United States Patent Application Publication US 2013/0267429 A1 - sequence listing, part 3

SEQ ID NO: 45968 - DNA, 60 bp, Artificial
  Synthetic oligonucleotide
ccatttctgtgtctggtcctagtgagccttctttggttgctaaatccccagacctggcgg

SEQ ID NO: 45969 - DNA, 60 bp, Artificial
  Synthetic oligonucleotide
gggtccaacagccgtaggtggtaagtttcttggtaattgtaacttttgcgccttggcctc

SEQ ID NO: 45970 - DNA, 60 bp, Artificial
  Synthetic oligonucleotide
ccgcctgtagccaaacaacacctgcgtcttcggacgaaaacggcaagaccccagctattg

SEQ ID NO: 45971 - DNA, 60 bp, Artificial
  Synthetic oligonucleotide
ggcaaagcacatttcagccgccgtagtagcaaagcctccatcactgatatcgtgtcccga

SEQ ID NO: 45972 - DNA, 60 bp, Artificial
  Synthetic oligonucleotide
gccgtaccaaacaaaagatattctgtgcacacttggggcaaattccgcatctaatccaga

SEQ ID NO: 45973 - DNA, 60 bp, Artificial
  Synthetic oligonucleotide
tatggcatcctttaaattcatgctatacactgccactgtgcctctccttctccctaacgc

SEQ ID NO: 45974 - DNA, 60 bp, Artificial
  Synthetic oligonucleotide
gctctcacgcttacgtacaatgggccagttttcgcatctgcagtaacccaggaagcagac

SEQ ID NO: 45975 - DNA, 60 bp, Artificial
  Synthetic oligonucleotide
cccgtctctcccgtctctcccgtctcctccgttgttttcaccttcttgacttatttctct

SEQ ID NO: 45976 - DNA, 60 bp, Artificial
  Synthetic oligonucleotide
ctcgactaacaacgatacaccagattctcaaccagtgcgaggaaccgctgggcttgggtc

SEQ ID NO: 45977 - DNA, 60 bp, Artificial
  Synthetic oligonucleotide
ccgtgctcctaaacactgagtctgatccactgctagtagacatcccatcttcttcgctac

SEQ ID NO: 45978 - DNA, 60 bp, Artificial
  Synthetic oligonucleotide
cactaacaggcccttcttcaaaacagtgttcagaaaccggacggtgggtgccagatgaag

SEQ ID NO: 45979 - DNA, 60 bp, Artificial
  Synthetic oligonucleotide
cctcctccgacaccagatcctgctccaagcgtgtctagtaacaaggatcaggccaagaca

SEQ ID NO: 45980 - DNA, 60 bp, Artificial
  Synthetic oligonucleotide
aaatcttcatccgaggtttcagtcataattgggaggtggtcttgtgtctgtttccgtttt

SEQ ID NO: 45981 - DNA, 60 bp, Artificial
  Synthetic oligonucleotide
gtctgctgaatgcttcttttatgccaagtactccagaaacagctctagataacccgccac

SEQ ID NO: 45982 - DNA, 60 bp, Artificial
  Synthetic oligonucleotide
gggcggtacaatcggcaaaacgaggtaagtgacgcgctatataaattgatgcttggtatg

SEQ ID NO: 45983 - DNA, 60 bp, Artificial
  Synthetic oligonucleotide
cccagcggttgttctgcgggtttaagaagtgtcatctcacatccgaccagctacagacac

SEQ ID NO: 45984 - DNA, 60 bp, Artificial
  Synthetic oligonucleotide
cagtgtgcctcatggtcttttaagtgctattgcagaggcaggcttccaaccaaaactcat

SEQ ID NO: 45985 - DNA, 60 bp, Artificial
  Synthetic oligonucleotide
acctccataccatcggccaataaagcgagacctagtgtatcttatgtaaagcaccagtgg

SEQ ID NO: 45986 - DNA, 60 bp, Artificial
  Synthetic oligonucleotide
agcttgtcggccgcgatcaggtggaagaaccagagtcgctggcagatcacccgcacggcc

SEQ ID NO: 45987 - DNA, 60 bp, Artificial
  Synthetic oligonucleotide
atagtcgaagaggctggcgtgcgcgttccactcgtccgagacctgccgcaccgtcgcact

SEQ ID NO: 45988 - DNA, 60 bp, Artificial
  Synthetic oligonucleotide
agatgaactggcaccggtagtcttcgaccgcgaattggggctgctggcgcgagacgttca

SEQ ID NO: 45989 - DNA, 60 bp, Artificial
  Synthetic oligonucleotide
ccaggcgcgcgtacagccaccccaggctcacgctccagccgcaccggttccgctccttct

SEQ ID NO: 45990 - DNA, 60 bp, Artificial
  Synthetic oligonucleotide
ctgctgttcgcccagccgcagtggaagcgcgtgtaccggatcgcccaggtggagcagctg

SEQ ID NO: 45991 - DNA, 60 bp, Artificial
  Synthetic oligonucleotide
agaccagttccaccacgtcgcggaccaccgtcttcacgaagcggcacgccgtcttgcgca

SEQ ID NO: 45992 - DNA, 60 bp, Artificial
  Synthetic oligonucleotide
cggcggtctcgtggtgctcctggtagcgcgtcaggtcgaagaaggggtgcagctcggtgt

SEQ ID NO: 45993 - DNA, 60 bp, Artificial
  Synthetic oligonucleotide
tgcggacgcggacctgtcgaccgaacatcctgcggcggacacggagcccgttgagaacgt

SEQ ID NO: 45994 - DNA, 60 bp, Artificial
  Synthetic oligonucleotide
acctgaccgtcacgcggctcttcctgcaccccgggctcgtgtaccgcctgctgaacccca

SEQ ID NO: 45995 - DNA, 60 bp, Artificial
  Synthetic oligonucleotide
tgaatcgcgcagcccaacagtccccaggccaaggtcccgacgagccggacccagggccga

SEQ ID NO: 45996 - DNA, 60 bp, Artificial
  Synthetic oligonucleotide
tgcagaccacgctgttgctgccgtacttggagctggtcaccgtgctgagtcccgtgggcg

SEQ ID NO: 45997 - DNA, 60 bp, Artificial
  Synthetic oligonucleotide
ggcccgtcgtcagagatcgagatccagcagggccaccagctcccgcacgtcggcctcgag

SEQ ID NO: 45998 - DNA, 60 bp, Artificial
  Synthetic oligonucleotide
acacgtaccggctgtgcgacggggagctgttccggctggcggagagcgtgggtcacctgt

SEQ ID NO: 45999 - DNA, 60 bp, Artificial
  Synthetic oligonucleotide
aagctgccgtgtgctgattggatgccggagctcatcaccacgccccgttcaaaccgcggc

SEQ ID NO: 46000 - DNA, 60 bp, Artificial
  Synthetic oligonucleotide
accgtgccgagccgcgagctgagggaagacgaagacgggcggcgagcgtgtttgtgggcg

SEQ ID NO: 46001 - DNA, 60 bp, Artificial
  Synthetic oligonucleotide
taggcatcacgctcgccgcggtcaaattcgtcgcccatccgcgctccagccccaagacga

SEQ ID NO: 46002 - DNA, 60 bp, Artificial
  Synthetic oligonucleotide
ttgcatcacgacccgccgccacgcagaccaatccgcagatcgaccgaccggactcataaa

SEQ ID NO: 46003 - DNA, 60 bp, Artificial
  Synthetic oligonucleotide
ttccaacggtgagtagtgtgcctccgtgtcgagatggcccgcttcaacgcgacgtcggtc

SEQ ID NO: 46004 - DNA, 60 bp, Artificial
  Synthetic oligonucleotide
aactggccctgctcttccgtcccgtcgacgctcgtctcgaacttacgcatgtcccgttgc

SEQ ID NO: 46005 - DNA, 60 bp, Artificial
  Synthetic oligonucleotide
tcctgctctacgcgcaccctatccgttcgcccgagccgccgccggatctcacgtccgctt

SEQ ID NO: 46006 - DNA, 60 bp, Artificial
  Synthetic oligonucleotide
acccatgacacaccgacaacaagcatccgaaccatagccacacgtccaagaagccgatac

SEQ ID NO: 46007 - DNA, 60 bp, Artificial
  Synthetic oligonucleotide
gcagacgaggtgctcggccggcaggttgaggagcgagagtccggtgcggaggagcttcac

SEQ ID NO: 46008 - DNA, 60 bp, Artificial
  Synthetic oligonucleotide
aaacgccggtagacacattctccgcccggatcgcgacgcacaaccacaagagaccgtaga

SEQ ID NO: 46009 - DNA, 60 bp, Artificial
  Synthetic oligonucleotide
tcgggtccccgagttccagaaaacccagatccacgcaccacccgtacgcccgctccaaca

SEQ ID NO: 46010 - DNA, 60 bp, Artificial
  Synthetic oligonucleotide
tcatgcaacgtcacagcatcgccttgcctcgacgacccaccgcgacgacccctaccctcg

SEQ ID NO: 46011 - DNA, 60 bp, Artificial
  Synthetic oligonucleotide
ccaccccgttgcccgcaaagtacccgatctgcccgaagtggaagacctcccggctacccc

SEQ ID NO: 46012 - DNA, 60 bp, Artificial
  Synthetic oligonucleotide
tcgaccgcgaacaggagcacgcacagggtgaactggcggtccgtccgagggcgcacgacg

SEQ ID NO: 46013 - DNA, 60 bp, Artificial
  Synthetic oligonucleotide
acgagatagggaagcggctggacgtggcgggacaggtcttcgactgcgcgcatctaccgt

SEQ ID NO: 46014 - DNA, 60 bp, Artificial
  Synthetic oligonucleotide
accgagggtaaacgagacctgccaccgccgcgccgaggccgggcaagatgccaagaaggg

SEQ ID NO: 46015 - DNA, 60 bp, Artificial
  Synthetic oligonucleotide
tgccgcccgggccccaccgctccgtcttctgccccgcgttcccctacgtgtcgttgtacg

SEQ ID NO: 46016 - DNA, 60 bp, Artificial
  Synthetic oligonucleotide
tagaagggctgctcgatctcgttctggtccggggtgtggtagaacaggatcacgacgtgc

SEQ ID NO: 46017 - DNA, 60 bp, Artificial
  Synthetic oligonucleotide
accccgggctgtcgcggttgatcgtcgtctcgtgccccgtcctgaaacgcctggcgctcc

SEQ ID NO: 46018 - DNA, 60 bp, Artificial
  Synthetic oligonucleotide
ccccgcacgtcctgtcacaatcgcatctgaacctgctgatacggtgcctgaatcccctct

SEQ ID NO: 46019 - DNA, 60 bp, Artificial
  Synthetic oligonucleotide
tggtgtggtgtctcgccgggtcgggtgcgggtggggcgtccggatcgggcgaacggtctc

SEQ ID NO: 46020 - DNA, 60 bp, Artificial
  Synthetic oligonucleotide
aacagcggcccatctcgagcctcatgccccgcgacgacgtgctcaccctctctccgcagt

SEQ ID NO: 46021 - DNA, 60 bp, Artificial
  Synthetic oligonucleotide
gacgcggtacaacgggctgccgtccacgctcttccccgccatctaccagaacgaacacgt

SEQ ID NO: 46022 - DNA, 60 bp, Artificial
  Synthetic oligonucleotide
cccgaaccaccacagatgaacacgatatacatgagccacagcatctcgtaccccagtcga

SEQ ID NO: 46023 - DNA, 60 bp, Artificial
  Synthetic oligonucleotide
tgtatcacctctacctgcacccgcgtccccgcctctccgatctcgaccagctgctcctga

SEQ ID NO: 46024 - DNA, 60 bp, Artificial
  Synthetic oligonucleotide
tggcgacggggccgagagagaacaaagagtgctgatcggacgggcgcaacggatggaaga

SEQ ID NO: 46025 - DNA, 60 bp, Artificial
  Synthetic oligonucleotide
tctcgctgatccgccaccccaccggctccggtcaaatgagcgcttctccgtgccccaatc

SEQ ID NO: 46026 - DNA, 60 bp, Artificial
  Synthetic oligonucleotide
tcgttcccgtccccgtcgcccagtccgccgtgctggagatacgacgcctgtcggcgaagc

SEQ ID NO: 46027 - DNA, 59 bp, Artificial
  Synthetic oligonucleotide
cccctggcgtgcccgtgtgtcttgtttacccgtccggctcgcgcgctcgtctcgcgaac

SEQ ID NO: 46028 - DNA, 60 bp, Artificial
  Synthetic oligonucleotide
accatcgacggatatcgacaccgggcgagacgagcgagccttccatccgccacccgtaca

SEQ ID NO: 46029 - DNA, 60 bp, Artificial
  Synthetic oligonucleotide
agaccagggtgcgcataaagtcgagcagcgagatgtaggacacgagcggcggcccgagct

SEQ ID NO: 46030 - DNA, 60 bp, Artificial
  Synthetic oligonucleotide
ccgagcaagagggtggcgaggaggagcgggctgaggagacggcggacgaggagggacggg

SEQ ID NO: 46031 - DNA, 60 bp, Artificial
  Synthetic oligonucleotide
gctcgcgccgctccccgcccgtggcatgttgacgacgagctaaccgcttaccgtcctttt

SEQ ID NO: 46032 - DNA, 60 bp, Artificial
  Synthetic oligonucleotide
acgggtggcacgagcgcaggatcaggtggcgggtggggtggatcaggtattccttctctt

SEQ ID NO: 46033 - DNA, 60 bp, Artificial
  Synthetic oligonucleotide
gtctcttccgcctcccgttttccctccgtctgctaggtgccgcttcccggacggtcggct

SEQ ID NO: 46034 - DNA, 58 bp, Artificial
  Synthetic oligonucleotide
ccccgagagtgtcgtttcgccaacagaacaatcgcccgctgaaccacgtcacgcccgg

SEQ ID NO: 46035 - DNA, 60 bp, Artificial
  Synthetic oligonucleotide
atccccgacttcgttctcatcgacgaggccgcatttgtcaaccccgcgtcgctcctgagt

SEQ ID NO: 46036 - DNA, 60 bp, Artificial
  Synthetic oligonucleotide
gctcgaaccaaggccctcagcgtgctcccctccgacactaaaatctacaccgtacgcttc

SEQ ID NO: 46037 - DNA, 60 bp, Artificial
  Synthetic oligonucleotide
tctccccgaatccctttgttttctcgtccagtgcgccgtaatcgacgctcaccgacagcc

SEQ ID NO: 46038 - DNA, 60 bp, Artificial
  Synthetic oligonucleotide
acacccctcccacaccgctggatgccgacctcggggattgggccgtcgactggctgtacg

SEQ ID NO: 46039 - DNA, 60 bp, Artificial
  Synthetic oligonucleotide
tcatcgccgctccatcaccgaagctgcggtacacggacgactgcatgagcgccatcaaga

SEQ ID NO: 46040 - DNA, 60 bp, Artificial
  Synthetic oligonucleotide
aactcgtgggccgggatggagagctcgcccctgtgtaccctctgcaggaagtcgatcacg

SEQ ID NO: 46041 - DNA, 60 bp, Artificial
  Synthetic oligonucleotide
tctggtctcgctgctccataccgcactgaagatcctggacatctcacccaaggatgccgc

SEQ ID NO: 46042 - DNA, 58 bp, Artificial
  Synthetic oligonucleotide
ccccgggatcggcaccgagttgcacctcctccgccgcaccttcaccgggcgagccgat

SEQ ID NO: 46043 - DNA, 60 bp, Artificial
  Synthetic oligonucleotide
gaccccgaaaatcccaagctcgtccgccacacgtccgatacctcgctatctctgaagcga

SEQ ID NO: 46044 - DNA, 60 bp, Artificial
  Synthetic oligonucleotide
gaccagagagcatcggtctgccaattacaccgccaactgtaagcccctcgtccaacccac

SEQ ID NO: 46045 - DNA, 60 bp, Artificial
  Synthetic oligonucleotide
aggatcatgagtctcatccggaccttttccaccaccgcgcccaccccgatcaaacggctc

SEQ ID NO: 46046 - DNA, 60 bp, Artificial
  Synthetic oligonucleotide
aaggccggcgtttccgtcattgtgaccaacaggcgcatctaccccaagtgcttccaccca

SEQ ID NO: 46047 - DNA, 60 bp, Artificial
  Synthetic oligonucleotide
tccctcacccagaagttcgcgtcgagcctgcgcccgagatccccgatggcctggaggaac

SEQ ID NO: 46048 - DNA, 60 bp, Artificial
  Synthetic oligonucleotide
atcccttcgagttcatccgccgccccaccgatcctcgggaatatgttactcgccctgatc

SEQ ID NO: 46049 - DNA, 60 bp, Artificial
  Synthetic oligonucleotide
agagcttccacccgccaaagctcgcgtgcgccaaggtcctgctgaagcactgtccgaggt

SEQ ID NO: 46050 - DNA, 60 bp, Artificial
  Synthetic oligonucleotide
acaaggtccactcaccgaagcggctaatgggtgcgacgatacggggctcggaaagacgaa

SEQ ID NO: 46051 - DNA, 60 bp, Artificial
  Synthetic oligonucleotide
caccgatgattctacgcgtgagttcatgaatgtgatccgcagcctcgcaggtcccctcgc

SEQ ID NO: 46052 - DNA, 60 bp, Artificial
  Synthetic oligonucleotide
caggccctgtatcaatttcacgcgctcccctcctcgcaggatcatcacactctttgccat

SEQ ID NO: 46053 - DNA, 60 bp, Artificial
  Synthetic oligonucleotide
tgaacagagatagaccccacacggcacaccccggcgaccgaagttgatgaccaccgtctc

SEQ ID NO: 46054 - DNA, 60 bp, Artificial
  Synthetic oligonucleotide
cgaccaacatcagtcccttcgcggcactcatcgacaagttcgttcagaccacggcatcgc

SEQ ID NO: 46055 - DNA, 60 bp, Artificial
  Synthetic oligonucleotide
tcgcgcagagggtgaagacgctggaacacaggctggcccgggagacgaagaaggggtctc

SEQ ID NO: 46056 - DNA, 60 bp, Artificial
  Synthetic oligonucleotide
atgcgaccgtatgccgcggacgcacacgagccccatcacccgttcggttcgcggtttcgg

SEQ ID NO: 46057 - DNA, 60 bp, Artificial
  Synthetic oligonucleotide
tgaacgcctccaccgacctcaagaaccccatcccgacacgatagaccttcccgaggggct

SEQ ID NO: 46058 - DNA, 60 bp, Artificial
  Synthetic oligonucleotide
tcacaccgccgatgaccgcagagacccggccccatccgaaattatccagtgccttgtacg

SEQ ID NO: 46059 - DNA, 60 bp, Artificial
  Synthetic oligonucleotide
gcccctcttcgacagcaatcacggcgaccactcaactgccgcacgcgatcatgaactctc

SEQ ID NO: 46060 - DNA, 60 bp, Artificial
  Synthetic oligonucleotide
atccgtcgcgttctcgttataatgtacgtacacccagtcccacacccgcgtggccaccgt

SEQ ID NO: 46061 - DNA, 60 bp, Artificial
  Synthetic oligonucleotide
tggattcaccgggtcgccatctctccccgtgcggcggctgtccagggcgtcgttgtccat

SEQ ID NO: 46062 - DNA, 60 bp, Artificial
  Synthetic oligonucleotide
acggtggacacgacgagggagtccgagtcggtcatggctcgcgcgacggagatcatcacc

SEQ ID NO: 46063 - DNA, 60 bp, Artificial
  Synthetic oligonucleotide
attccacacccgctgtctaggcgacgactctttcaacgccctgttcgccgccaccgttca

SEQ ID NO: 46064 - DNA, 60 bp, Artificial
  Synthetic oligonucleotide
cgtttccccgtttactctccgcacccagatcctctcccgagtctcgatcttcacggtacc

SEQ ID NO: 46065 - DNA, 60 bp, Artificial
  Synthetic oligonucleotide
atcagccacgcgaccctggccgcctcacaacggggattggttgccgcacatgcatcggtc

SEQ ID NO: 46066 - DNA, 60 bp, Artificial
  Synthetic oligonucleotide
tgttcgaccacggcggccagagtgggcagagtcttcgagaagagggtggcggcgtattta

SEQ ID NO: 46067 - DNA, 60 bp, Artificial
  Synthetic oligonucleotide
acacccacttccagggcgtaacccgaaagttctcaccacacccacttccagggcgtaacc

SEQ ID NO: 46068 - DNA, 60 bp, Artificial
  Synthetic oligonucleotide
ctgtgtcgtcagcgcccttcgtttccgggcacccgtcgtcgccgtgccggtagaccgtgt

SEQ ID NO: 46069 - DNA, 60 bp, Artificial
  Synthetic oligonucleotide
ccaacccaatcgctatcctgaccgactccgagaccaacgtgtacatgatgagccgcggtg

SEQ ID NO: 46070 - DNA, 60 bp, Artificial
  Synthetic oligonucleotide
agtggtgcgagccgcccacggtcagcgccccgccgccaccatcacagttctcggatgagc

SEQ ID NO: 46071 - DNA, 60 bp, Artificial
  Synthetic oligonucleotide
ttccttctccgccagctggtcgcgttcgtgtgggtcggtggtcatgatcactttctgtgg

SEQ ID NO: 46072 - DNA, 60 bp, Artificial
  Synthetic oligonucleotide
gggttgcgctgctccacatgaactcggtgagggtcgtgcccgggaaaggggtggtgagca

SEQ ID NO: 46073 - DNA, 60 bp, Artificial
  Synthetic oligonucleotide
ttaccccgcacgtcgtaaatgggacctgagccgtgacagtgcagtgctgaaggcgtatgc

SEQ ID NO: 46074 - DNA, 60 bp, Artificial
  Synthetic oligonucleotide
cgcccgttgggatagctgagccgcggtccgtgttgaaatccatcttctgtgcttccgatg

SEQ ID NO: 46075 - DNA, 60 bp, Artificial
  Synthetic oligonucleotide
ttgcgtcccggtcaccgcgtcacctggaaaatcactgggcttcgccgtggggtccgtcat

SEQ ID NO: 46076 - DNA, 60 bp, Artificial
  Synthetic oligonucleotide
ctcgtgaactcatgcaccagctcacgcgagacgtggtcaccgcacgcagctccgaactac

SEQ ID NO: 46077 - DNA, 60 bp, Artificial
  Synthetic oligonucleotide
ctcgcagagcacagagagtccgggcagtgacccaaacatcgatcgtgagcgcctgtgaaa

SEQ ID NO: 46078 - DNA, 58 bp, Artificial
  Synthetic oligonucleotide
acggacccagggcgtgtagcaccaactccctatcgtccgggtgtagctccccaacgtg

SEQ ID NO: 46079 - DNA, 60 bp, Artificial
  Synthetic oligonucleotide
gactgtcgcggaccacccttcgcagcggcctccgttgggtccatcttccgtctcgccatg

SEQ ID NO: 46080 - DNA, 60 bp, Artificial
  Synthetic oligonucleotide
tcaccccttgcgggttccggacggggagttctgcttcggggacggcgcctactgctgcga

SEQ ID NO: 46081 - DNA, 60 bp, Artificial
  Synthetic oligonucleotide
cgccgtctcgttcttcgccctgttcatgttgatcatctgggtgcttcacgccagccgtca

SEQ ID NO: 46082 - DNA, 60 bp, Artificial
  Synthetic oligonucleotide
cttaccccggaccgcggtggagaggcccgagaccgacccgtcccgaggctcacgaagcgg

SEQ ID NO: 46083 - DNA, 60 bp, Artificial
  Synthetic oligonucleotide
caggaaagggtcgtccgccgcgtcactctcgctcaagccaccctcggagtcagtctcgag

SEQ ID NO: 46084 - DNA, 59 bp, Artificial
  Synthetic oligonucleotide
cgggagcgtaccctccgcgaaataccggggccgtcttgagcgtcgccatacccgttctg

SEQ ID NO: 46085 - DNA, 60 bp, Artificial
  Synthetic oligonucleotide
aacaaccttctcctggcgtttaacttacagaattgcctgaaggtactatgccatccacgt

SEQ ID NO: 46086 - DNA, 60 bp, Artificial
  Synthetic oligonucleotide
cgacggctcccgcagcaccatcgtgttcgcctccagccacaacaccaacgtgagttcccc

SEQ ID NO: 46087 - DNA, 60 bp, Artificial
  Synthetic oligonucleotide
gatggccgagaacgcggcgtagttgcccagcacgtcgcagtcgctgtaggcgctgttcat

SEQ ID NO: 46088 - DNA, 60 bp, Artificial
  Synthetic oligonucleotide
gagggccccgtacgaggcgtagttgccgagcacgtcgcagtcgctgtaggcgctgttcat

SEQ ID NO: 46089 - DNA, 60 bp, Artificial
  Synthetic oligonucleotide
gggcgtataaagttggcctcgtcgacaaagagcaggttaaagtcctgtccgcggatcccc

SEQ ID NO: 46090 - DNA, 60 bp, Artificial
  Synthetic oligonucleotide
gccaggactttaacctgctctttgtcgacgaggccaactttattcgcccggatgcggtcc

SEQ ID NO: 46091 - DNA, 60 bp, Artificial
  Synthetic oligonucleotide
acaactcaacctcgcgccaggtcgcagtgcccgggatgtacagtccgtgtcgccagtttt

SEQ ID NO: 46092 - DNA, 60 bp, Artificial
  Synthetic oligonucleotide
aatcacatccgtggcgcccgtgccctcatcggcgtctgattcgtcccatgtctcaacaga

SEQ ID NO: 46093 - DNA, 60 bp, Artificial
  Synthetic oligonucleotide
aacgggaacaacaacgttttccactgcggaaacctggggtacttcgcggggcgcggcgtg

SEQ ID NO: 46094 - DNA, 59 bp, Artificial
  Synthetic oligonucleotide
agcgatatacatattccctaaacacgggaacgcgcgctgaccaccctccccaaatcaca

SEQ ID NO: 46095 - DNA, 60 bp, Artificial
  Synthetic oligonucleotide
tggttgacaatgtggtaatctgacagcggccggcccaggggtcccacttcgcactgctga

SEQ ID NO: 46096 - DNA, 60 bp, Artificial
  Synthetic oligonucleotide
caggttcgccaggcaaactcgcacgcattaaccaatctgccgaccgccgttgattccgga

SEQ ID NO: 46097 - DNA, 60 bp, Artificial
  Synthetic oligonucleotide
cgacatacagaccgccgaaccagaccagggtcccgtgtccgcccaggttatcgcaaaata

SEQ ID NO: 46098 - DNA, 60 bp, Artificial
  Synthetic oligonucleotide
tagttgtgttttcccgccgcccgtgggtcaagcactgggcctccggctttctctgcgtgt

SEQ ID NO: 46099 - DNA, 60 bp, Artificial
  Synthetic oligonucleotide
tactacacgcaacgactggcggggctccgagaggacctggacaacacgatcgacctgaac

SEQ ID NO: 46100 - DNA, 60 bp, Artificial
  Synthetic oligonucleotide
aacgcggctggtttccacccggacatccccgctcacaaacccgaactctctaggaacgca

SEQ ID NO: 46101 - DNA, 60 bp, Artificial
  Synthetic oligonucleotide
tggtggccttgcgcactcgggaatgcagccagtcaatcttctttgccagggtagcgtcct

SEQ ID NO: 46102 - DNA, 60 bp, Artificial
  Synthetic oligonucleotide
ccccattgcgtaccccacgtaccaaatagtccggcacacgtaatcagttcggcagacccc

SEQ ID NO: 46103 - DNA, 60 bp, Artificial
  Synthetic oligonucleotide
ccgaatccgcccacccattgttctatttgcgttgcatggtgccaagagtagtcatcgccg

SEQ ID NO: 46104 - DNA, 60 bp, Artificial
  Synthetic oligonucleotide
gccgtcccgcccaaaatgcacgcattgacaataataactgcggcctccacggcgtcatcg

SEQ ID NO: 46105 - DNA, 60 bp, Artificial
  Synthetic oligonucleotide
acgtgcctcccgtccagatgtggcgtcgcgagtcccaaaacgggcgtgtctaactacggt

SEQ ID NO: 46106 - DNA, 60 bp, Artificial
  Synthetic oligonucleotide
gcacaccggcagacacagatataagcacgccaacagggctaacgcgagcacaattgaccc

SEQ ID NO: 46107 - DNA, 60 bp, Artificial
  Synthetic oligonucleotide
ttttaaacaacaggggaaggggtacggccggtcccggaagtccgaccattgcggcaagtg

SEQ ID NO: 46108 - DNA, 60 bp, Artificial
  Synthetic oligonucleotide
cgccgcgtacagcgtttccctgttcctattatcgacgtacactccggtttcgttgccgtg

SEQ ID NO: 46109 - DNA, 60 bp, Artificial
  Synthetic oligonucleotide
tcctggccgcgcacagaaaaggacgaccaacaacctaccgttgcgtgttgttccgttggc

SEQ ID NO: 46110 - DNA, 60 bp, Artificial
  Synthetic oligonucleotide
ctgtataacgcaccccgcaaacccgtgcccattaacacgttacccgcatccctccacccc

SEQ ID NO: 46111 - DNA, 60 bp, Artificial
  Synthetic oligonucleotide
gccaagatcgacggcatcctgaccaacaacacgcgttttctttcgaccgccactgttacg

SEQ ID NO: 46112 - DNA, 60 bp, Artificial
  Synthetic oligonucleotide
agtagtcgcgtcgctaggtgataacgaagtggaccctatgccagaagacgccacgctccc

SEQ ID NO: 46113 - DNA, 60 bp, Artificial
  Synthetic oligonucleotide
ggctcgacgtaaccgcggtccaagaactcccaaaagcacaaattgcggtacactggcccc

SEQ ID NO: 46114 - DNA, 60 bp, Artificial
  Synthetic oligonucleotide
cgggcatcgtccccatagacatgtaccaggtgtgtcgcgaaaagctcagcctctccgact

SEQ ID NO: 46115 - DNA, 60 bp, Artificial
  Synthetic oligonucleotide
ttgcgtgttaggggatggggcctgttgaggcgttggcgattggggtggtcccggtgagtc

SEQ ID NO: 46116 - DNA, 60 bp, Artificial
  Synthetic oligonucleotide
acccaggcccttcgtgttttgttttaggtgagagacaagcgtcgccagctttgtgccgag

SEQ ID NO: 46117 - DNA, 60 bp, Artificial
  Synthetic oligonucleotide
tatacgcgtgtcagagcaagtttgcgctaccgtttcgtgcgacagccgccggcatcggtc

SEQ ID NO: 46118 - DNA, 60 bp, Artificial
  Synthetic oligonucleotide
ggccagagaccagcgcagcacacaatggtttcgcaacaacacgcttatgcatgggagtaa

SEQ ID NO: 46119 - DNA, 60 bp, Artificial
  Synthetic oligonucleotide
tttcagttgagtcaccctgccacgtaaacccgcctagagtgcggcacgcgttgtcggttg

SEQ ID NO: 46120 - DNA, 60 bp, Artificial
  Synthetic oligonucleotide
agatacacctcagcacccacgcgtacgcctctaacaacgaccggccgatatcgtgcagcc

SEQ ID NO: 46121 - DNA, 60 bp, Artificial
  Synthetic oligonucleotide
atccacccgtgacgagatcgcaggcaagatggcaaccgctatcacgcaactcttaccccg

SEQ ID NO: 46122 - DNA, 60 bp, Artificial
  Synthetic oligonucleotide
cgtgcccgaagacgcccaattgcaaggcctgacggatcaagatctcacctccaggatatt

SEQ ID NO: 46123 - DNA, 60 bp, Artificial
  Synthetic oligonucleotide
caagggcgcgaccaccaccgcgaagccaacgccgggcccgtcgacgcccacacctcccga

SEQ ID NO: 46124 - DNA, 60 bp, Artificial
  Synthetic oligonucleotide
cacttcgctaccgtgggccctcattcgcctgccggatttagccagtcgcgtgatgctata

SEQ ID NO: 46125 - DNA, 60 bp, Artificial
  Synthetic oligonucleotide
cgctggagaggggcctggtagataccgtattgaatgttaagcttaggtccgccccgccga

SEQ ID NO: 46126 - DNA, 60 bp, Artificial
  Synthetic oligonucleotide
gaactctttgcacgtcgtttctcacctgcccgtttgtcacccaggcctcccgtgtcgtga

SEQ ID NO: 46127 - DNA, 60 bp, Artificial
  Synthetic oligonucleotide
gcgccaaagagcggccgatgggtacgcgcggcgaccattaaaacatgtttcggtgacccc

SEQ ID NO: 46128 - DNA, 60 bp, Artificial
  Synthetic oligonucleotide
ctccccgttttgcccaacagtctaagcacccgtgagaaggagcggtgaacccaggtacag

SEQ ID NO: 46129 - DNA, 60 bp, Artificial
  Synthetic oligonucleotide
ttcatttcactcacgagcacgccaccccatcatcttcaccgctcgttcccgcgtccggat

SEQ ID NO: 46130 - DNA, 60 bp, Artificial
  Synthetic oligonucleotide
ccgggtctatgtaaacgtggagaaacggcttcatcgcgccctgtatatcttgtgacgtgc

SEQ ID NO: 46131 - DNA, 60 bp, Artificial
  Synthetic oligonucleotide
caacgcaactgaccgtcctcaccgctcaacacgaagcccttcaaaagcacgcatcatttt

SEQ ID NO: 46132 - DNA, 60 bp, Artificial
  Synthetic oligonucleotide
gacgccacaactggggtcgcgctttggccgtgttgggtcttggtgcgtatgtggtggata

SEQ ID NO: 46133 - DNA, 60 bp, Artificial
  Synthetic oligonucleotide
aagaggcgccctgtcgtgactggaagtactagcgggatgacgtgtccgggaagcagcctt

SEQ ID NO: 46134 - DNA, 60 bp, Artificial
  Synthetic oligonucleotide
acgacaaccagctcagcgccgtcaacaccgtctacctgggaaagcagcacgtgagggtaa

SEQ ID NO: 46135 - DNA, 60 bp, Artificial
  Synthetic oligonucleotide
catgtattttcggactgagtagacgggcacatgaaaatccacgcacagtcacgcggcggg

SEQ ID NO: 46136 - DNA, 60 bp, Artificial
  Synthetic oligonucleotide
atcacgggcgcgaccaccatagccgcacagaacctatcgcgtcgcctaaagacgttctgt

SEQ ID NO: 46137 - DNA, 60 bp, Artificial
  Synthetic oligonucleotide
gtgcccatcgagcagttaacgttctccaccgagctcagccgccccgtctgcgattacaag

SEQ ID NO: 46138 - DNA, 60 bp, Artificial
  Synthetic oligonucleotide
ttgcgagtaggcgatgctcgttcgctgcccctgattgtcgaccacgggtgtgaggttgta

SEQ ID NO: 46139 - DNA, 60 bp, Artificial
  Synthetic oligonucleotide
caaatataccacgtcattcgccgcaacaacacagagcagcaggcacaggcacgaccccac

SEQ ID NO: 46140 - DNA, 60 bp, Artificial
  Synthetic oligonucleotide
aagttcaagacggccttcgagtacgaccaggagctgctcatcgacatgtgcgcggaccgc

SEQ ID NO: 46141 - DNA, 60 bp, Artificial
  Synthetic oligonucleotide
ccgtgctcctcgacaagcagcaggcggccatcaaggtggtgtgcaactcggtctacggct

SEQ ID NO: 46142 - DNA, 60 bp, Artificial
  Synthetic oligonucleotide
atggcgatctcctcggagggcgtctgggcgagggcggcgaaaaggccccgatagcgctgg

SEQ ID NO: 46143 - DNA, 60 bp, Artificial
  Synthetic oligonucleotide
tggaacactttgggcgacgcgagaccctgacggaggtcctgggtcggtacaacgtacagc

SEQ ID NO: 46144 - DNA, 60 bp, Artificial
  Synthetic oligonucleotide
gggcgggctaaatggcgactccttccgagtaaccttttgtttattggggacggaagtggg

SEQ ID NO: 46145 - DNA, 60 bp, Artificial
  Synthetic oligonucleotide
ttcagtcgctatcgatggggcggacccaccgcggcgttcctgtctctcgtggaccagaag

SEQ ID NO: 46146 - DNA, 60 bp, Artificial
  Synthetic oligonucleotide
ccggcctcttcgaacagaaggacattcttcactactacgtggagcaggaatgcatcgagg

SEQ ID NO: 46147 - DNA, 58 bp, Artificial
  Synthetic oligonucleotide
tgaagacggggatgtactactgcaaggttcgcaaggcgaccaacagcggggtgttcgc

SEQ ID NO: 46148 - DNA, 60 bp, Artificial
  Synthetic oligonucleotide
aaggtgacccgggacggcgagacgctgcgccccaacacgctcctgctaaaggaactggaa

SEQ ID NO: 46149 - DNA, 60 bp, Artificial
  Synthetic oligonucleotide
tacgagggcgagtgggagatgctacgccagagcatgatgaaacacggcctgcgcaacagc

SEQ ID NO: 46150 - DNA, 60 bp, Artificial
  Synthetic oligonucleotide
acaacccacgccccagtgcacccgcggcaacgacaacctgcggtccatgggcattggcat

SEQ ID NO: 46151 - DNA, 60 bp, Artificial
  Synthetic oligonucleotide
aagccccgcaagctgctggtgtccgagctggccgaggatcccgcatacgccattgcccac

SEQ ID NO: 46152 - DNA, 60 bp, Artificial
  Synthetic oligonucleotide
aggtagtagcccatgcccgagagggtcaggcagttgtcggccacggtctggtccaggctg

SEQ ID NO: 46153 - DNA, 60 bp, Artificial
  Synthetic oligonucleotide
gacccctcccggtagccgtaaaacggggacatgtacacaaagtcgccagtcgccaacaca

SEQ ID NO: 46154 - DNA, 56 bp, Artificial
  Synthetic oligonucleotide
ataccgtctccggagcggccgccgcgttagccgagcgccccgcggaggagtggctg

SEQ ID NO: 46155 - DNA, 60 bp, Artificial
  Synthetic oligonucleotide
atctcctgtctgctctacgacctgtccaccaccgccctcgagcacatcctcctgttttcg

SEQ ID NO: 46156 - DNA, 60 bp, Artificial
  Synthetic oligonucleotide
acggtgtattacaagctcatggcccgccgcgcgcaggtcccgtccatcaaggaccggatc

SEQ ID NO: 46157 - DNA, 55 bp, Artificial
  Synthetic oligonucleotide
ggggcgatctccgggaccaccatgttctgcagcgtggcgtacacgcggtcgaagc

SEQ ID NO: 46158 - DNA, 60 bp, Artificial
  Synthetic oligonucleotide
tttcaggaaggactgcaggaggcgctgtttgatcggggcggtggtgacgagcaccccgtc

SEQ ID NO: 46159 - DNA, 60 bp, Artificial
  Synthetic oligonucleotide
cgcccggatgcggtccagacgattatgggctttctcaatcaggccaactgcaagatcatc

SEQ ID NO: 46160 - DNA, 60 bp, Artificial
  Synthetic oligonucleotide
tgatgaccgcggggaagcgccttcggtacgccagcaacaaccccaacgtgtcgggactga

SEQ ID NO: 46161 - DNA, 60 bp, Artificial
  Synthetic oligonucleotide
agtccagcaggccgctgtccttgatctcgtggcgcgtgtagacctccaggggcacaaact

SEQ ID NO: 46162 - DNA, 60 bp, Artificial
  Synthetic oligonucleotide
tactcggcgcggagcatctcgtccacctcctgccacttggtcatggtgcagaccgccggt

SEQ ID NO: 46163 - DNA, 60 bp, Artificial
  Synthetic oligonucleotide
ggtgacgacgtagctggcgttgtgggtgatgggcacgaggatccggggctccgcgttgtg

SEQ ID NO: 46164 - DNA, 60 bp, Artificial
  Synthetic oligonucleotide
acccgccgctacgatacgacaccaacctccccgtggatctgctacacatggtgtacgcgg

SEQ ID NO: 46165 - DNA, 60 bp, Artificial
  Synthetic oligonucleotide
aggtcggggacgccaaacagaagcacctccgagacaacgccgctatttaactccaccagc

SEQ ID NO: 46166 - DNA, 60 bp, Artificial
  Synthetic oligonucleotide
tcgcgttggggaaggtgacgggtccgtgctgctgccgctcgatcgttgttttcgggtgaa

SEQ ID NO: 46167 - DNA, 60 bp, Artificial
  Synthetic oligonucleotide
cgccccacgccaccgaattctcgtaggagacgacgacgaagcgctgcttggtcccgtagt

SEQ ID NO: 46168 - DNA, 59 bp, Artificial
  Synthetic oligonucleotide
cccctgtttagcgacgcggccgtgcgccacttccgccagcgcgccaccgtgtttctcgt

SEQ ID NO: 46169 - DNA, 52 bp, Artificial
  Synthetic oligonucleotide
tgcgagtgcgcctcgtcctcgcagaagtccggcgcgccgggcgccatggcgt

SEQ ID NO: 46170 - DNA, 60 bp, Artificial
  Synthetic oligonucleotide
ccctccaccaatggatccggctttgagatcttatcaccaacggctccgtctgtatacccc

SEQ ID NO: 46171 - DNA, 60 bp, Artificial
  Synthetic oligonucleotide
cggccatcgccggctccaacctctgcaccgagatcgtccacccggcctccaagcgatcca

SEQ ID NO: 46172 - DNA, 55 bp, Artificial
  Synthetic oligonucleotide
cgccgccgcagcaccggttggaattgattgcgaaagttgcgcccctcgaccgact

SEQ ID NO: 46173 - DNA, 60 bp, Artificial
  Synthetic oligonucleotide
agaacgtcacatggaccctgttcgaccgggacaccagcatgtcgctcgccgactttcacg

SEQ ID NO: 46174 - DNA, 60 bp, Artificial
  Synthetic oligonucleotide
tacggacgccaagctgaactacctgtcgcggacgcagcggctggcctccctcctgacgta

SEQ ID NO: 46175 - DNA, 55 bp, Artificial
  Synthetic oligonucleotide
gagttccccgtaaaaggcgtccgtctcccgaatgacatccctagccacaaggatc

SEQ ID NO: 46176 - DNA, 60 bp, Artificial
  Synthetic oligonucleotide
tgcttgtacagctcgatggtgcggcagaccagacaggggcggtccagcgcgaaggtgtcg

SEQ ID NO: 46177 - DNA, 60 bp, Artificial
  Synthetic oligonucleotide
tttcagctccatgtcggtctcgtggtcgtcccggtgaaacgcggtggtctccaggttgtt

SEQ ID NO: 46178 - DNA, 60 bp, Artificial
  Synthetic oligonucleotide
agttgaccgtcgtgccgtaccgatggaacgcctccacccgcgaggggttgtacttgaggt

SEQ ID NO: 46179 - DNA, 60 bp, Artificial
  Synthetic oligonucleotide
gggcgatgttctccttgaagaccaccgcgatgccctccgtgtagttctgaccctcgggcc

SEQ ID NO: 46180 - DNA, 60 bp, Artificial
  Synthetic oligonucleotide
gcggggagctggttgcgctggagggcggtccagaaccactgcgggttcggctggttcgac

SEQ ID NO: 46181 - DNA, 60 bp, Artificial
  Synthetic oligonucleotide
acatgacagtctgccgagtctcagcgacaccgtttccaccgaccgtcccgcacccgccta

SEQ ID NO: 46182 - DNA, 60 bp, Artificial
  Synthetic oligonucleotide
ggtcgattttgccagcctgtacccgagcatcatccaggcgcacaacctgtgctactccac

SEQ ID NO: 46183 - DNA, 60 bp, Artificial
  Synthetic oligonucleotide
ggactttgccagcctgtacccgagcatcatccaggcgcacaacctgtgcttcacgacgct

SEQ ID NO: 46184 - DNA, 60 bp, Artificial
  Synthetic oligonucleotide
gctggatggtgatgcccacccgcttgacgataacctccgaggtacgggaccagtaggtaa

SEQ ID NO: 46185 - DNA, 60 bp, Artificial
  Synthetic oligonucleotide
gtcgtgttggtcgacgagatgaagatgatcttggtcgtgttctgggccaggaaccccagg

SEQ ID NO: 46186 - DNA, 60 bp, Artificial
  Synthetic oligonucleotide
cagcctgatctgcagcatttacattcacgtcatcatctctgtctactcatctaaaacggt

SEQ ID NO: 46187 - DNA, 60 bp, Artificial
  Synthetic oligonucleotide
tgctcctggacaagcagcaggccgccatcaaggtcgtgtgtaactcggtgtacgggttca

SEQ ID NO: 46188 - DNA, 60 bp, Artificial
  Synthetic oligonucleotide
ccgaggtacgggaccagtaggtaaaatccgacaaggaatatattcgttccggtatatccg

SEQ ID NO: 46189 - DNA, 60 bp, Artificial
  Synthetic oligonucleotide
ccgaggtacgggaccagtaggtaaaatccgacaaggaatatattcgtgccggtatatccg

SEQ ID NO: 46190 - DNA, 60 bp, Artificial
  Synthetic oligonucleotide
ccgaagtacgggaccagtaggtaaaatccgacaaggaatatattcgttccggtatatccg

SEQ ID NO: 46191 - DNA, 60 bp, Artificial
  Synthetic oligonucleotide
tccgtaaacaggttgtactccctcagcgcctcctccgcctcctggatgtagctgtggtag

SEQ ID NO: 46192 - DNA, 60 bp, Artificial
  Synthetic oligonucleotide
tatccgtaaacaggttgtactccctcagcgcctcctccgcctcctggatgtagctgtggt

SEQ ID NO: 46193 - DNA, 60 bp, Artificial
  Synthetic oligonucleotide
tccacgttccggtcccgcttctccatcagctccacgatccgcctcgtgttcatctcgtag

SEQ ID NO: 46194 - DNA, 60 bp, Artificial
  Synthetic oligonucleotide
tcgatcgtgtagttcgagtacgagatgctgtcctcggcgccctggttcgtcacgttccgt

SEQ ID NO: 46195 - DNA, 60 bp, Artificial
  Synthetic oligonucleotide
atcagcacggcctcctccgtgatcttgttcgtgccgcccatgatctcgtccatgaacgag

SEQ ID NO: 46196 - DNA, 60 bp, Artificial
  Synthetic oligonucleotide
cgtcggtgatcagcaccgtctcctcgttgatcttgttcgtgccgcccatgatctcgtcca

SEQ ID NO: 46197 - DNA, 60 bp, Artificial
  Synthetic oligonucleotide
ggggtcatccgatccgagcgggataaggtctactggaccaccaacttcccctgcatgatc

SEQ ID NO: 46198 - DNA, 60 bp, Artificial
  Synthetic oligonucleotide
gcttgccgaacgtctcgttatatagtgcgacggacaggacgagctctcgaatgtgcgccc

SEQ ID NO: 46199 - DNA, 60 bp, Artificial
  Synthetic oligonucleotide
cttccacgcgccacacgtccaactgcttcccgaacgtctcgttatatagtgcgacggaca

SEQ ID NO: 46200 - DNA, 60 bp, Artificial
  Synthetic oligonucleotide
tcgggtggtgcccaacttccactgcctgctgaatcccgtgctgtacgccttcctcgggcg

SEQ ID NO: 46201 - DNA, 60 bp, Artificial
  Synthetic oligonucleotide
cgcggccctgtcgaagaggaaatactgaatcgacgagctaaccacagcgtgtctcctggg

SEQ ID NO: 46202 - DNA, 60 bp, Artificial
  Synthetic oligonucleotide
gcgcctccatactggacgtcgctgttatccgtcgtgttgcctacgtgcaccaatgttgtg

SEQ ID NO: 46203 - DNA, 60 bp, Artificial
  Synthetic oligonucleotide
cacttgttgccgcgtctataaatttaactgagggtttcccgtgcttcttcgcagccgttg

SEQ ID NO: 46204 - DNA, 60 bp, Artificial
  Synthetic oligonucleotide
gggcggatgaatgatggcgacgcgaagttgcgggagtgcgagggttatgtgtacgatgag

SEQ ID NO: 46205 - DNA, 60 bp, Artificial
  Synthetic oligonucleotide
tccggatcgcccaccacgattactacctctgccccgacgcgggcggctcgaacaatcagc

SEQ ID NO: 46206 - DNA, 60 bp, Artificial
  Synthetic oligonucleotide
ttggactgcttaccaccccgcacgatcccgttcctgaacctcccatttgcactcctccac

SEQ ID NO: 46207 - DNA, 60 bp, Artificial
  Synthetic oligonucleotide
acatccggagtaaaagtcccgccctcttccctacgtcaattcgcccgttgtggctcacgg

SEQ ID NO: 46208 - DNA, 60 bp, Artificial
  Synthetic oligonucleotide
tgcagaccccggatgcattgactgcggacccactttccatctcgaaacggatactgcgac

SEQ ID NO: 46209 - DNA, 60 bp, Artificial
  Synthetic oligonucleotide
caatgtctcgtgcatcatcccaacaggcatcgcctacctcgcaaacctttgatccctctg

SEQ ID NO: 46210 - DNA, 60 bp, Artificial
  Synthetic oligonucleotide
gcacatttcgtcggtagggtggcatggccgtcatgaacgagtgattgatgtacgaccccg

SEQ ID NO: 46211 - DNA, 60 bp, Artificial
  Synthetic oligonucleotide
atattctagagcacggcgagctccctcggggctgtgtgttcgggccaagtcctctaatgc

SEQ ID NO: 46212 - DNA, 60 bp, Artificial
  Synthetic oligonucleotide
cgtgggaagaagaatgttaacggcatggaccgcctccctgagacgatgcatagctttatc

SEQ ID NO: 46213 - DNA, 60 bp, Artificial
  Synthetic oligonucleotide
gacatgactcttcaacgctgatcattccgtccgttttcaataatccggggcgagggatag

SEQ ID NO: 46214 - DNA, 60 bp, Artificial
  Synthetic oligonucleotide
gcgtcatgtgggagatattactgacacggttcgagactatttggaagaaacgagcgggca

SEQ ID NO: 46215 - DNA, 60 bp, Artificial
  Synthetic oligonucleotide
cccgactgccattccctacttaaatacaaaaccgccttcgactatgaccaagccctccta

SEQ ID NO: 46216 - DNA, 60 bp, Artificial
  Synthetic oligonucleotide
cgtgcgacaggccaattaaattccgtgtgggcagtcaacataaaccccgcaggcaataca

SEQ ID NO: 46217 - DNA, 60 bp, Artificial
  Synthetic oligonucleotide
gcggttgtgggtcatgagtggagggagggtgccatctgtgatgccgagagggtcaaacta

SEQ ID NO: 46218 - DNA, 60 bp, Artificial
  Synthetic oligonucleotide
cctgacgcgctccattcatgttcgtactgtgtgcaactggctgtgttggcacttcgatcg

SEQ ID NO: 46219 - DNA, 60 bp, Artificial
  Synthetic oligonucleotide
gatctgtacactccaattcctaaaacgccaaccacaattaaacaataaacatcaccccgc

SEQ ID NO: 46220 - DNA, 60 bp, Artificial
  Synthetic oligonucleotide
ctgaaagctgcgacgagattgccgttcttctggataagcagcaggcggccatcaaagttg

SEQ ID NO: 46221 - DNA, 60 bp, Artificial
  Synthetic oligonucleotide
gacaaggtatttggacgcccgcttttatcttcactatcagactcggtgcacgtggcccca

SEQ ID NO: 46222 - DNA, 60 bp, Artificial
  Synthetic oligonucleotide
tgcttcttcgcccgaatgtatcgcacccgcagccctccctcttggattgcatggtgtcct

SEQ ID NO: 46223 - DNA, 60 bp, Artificial
  Synthetic oligonucleotide
tctcagtttgtccccgcgatggtaggtcattggtaataagtccagccgtgttgattgttc

SEQ ID NO: 46224 - DNA, 60 bp, Artificial
  Synthetic oligonucleotide
cccatccacataatagttaagacgccgccagaattgttatacacgtacgcatctgtcccc

SEQ ID NO: 46225 - DNA, 60 bp, Artificial
  Synthetic oligonucleotide
gctgtctggatgcaacgatttccatagacttccccactccgaccctgcatcaacgagcga

SEQ ID NO: 46226 - DNA, 60 bp, Artificial
  Synthetic oligonucleotide
cggcacgtggtatcgtactttacaaaatgctctggttgccgacaagcccagcgttgccag

SEQ ID NO: 46227 - DNA, 60 bp, Artificial
  Synthetic oligonucleotide
gtagcagcccgtccccatccaaacgcccataccacccgtcctgctatagtcctaccgata

SEQ ID NO: 46228 - DNA, 60 bp, Artificial
  Synthetic oligonucleotide
cgtaagcccttcccgttcactctttcacgcgcggcactatcggtacaacagtggcacaca

SEQ ID NO: 46229 - DNA, 60 bp, Artificial
  Synthetic oligonucleotide
cactgcccaaacccgtcgttttcgttcccgctaccgctgccacgttccaaacgaagtctg

SEQ ID NO: 46230 - DNA, 60 bp, Artificial
  Synthetic oligonucleotide
cacacgtttctaccaagcccaagattcgatcggtagtaggaacccgcaattgtgtgacgt

SEQ ID NO: 46231 - DNA, 60 bp, Artificial
  Synthetic oligonucleotide
cccattcggtggcttttctaggttcgggacattttcgcggcggttctagacggatcacgg

SEQ ID NO: 46232 - DNA, 60 bp, Artificial
  Synthetic oligonucleotide
gcacacaggtagagcaagaaccacggcatatcgagctacctccattgccccgctaaggac

SEQ ID NO: 46233 - DNA, 60 bp, Artificial
  Synthetic oligonucleotide
taaggctcagtccgtccgctccccgatcttttcgcccgatccctctaccagccggctttt

SEQ ID NO: 46234 - DNA, 60 bp, Artificial
  Synthetic oligonucleotide
acaggaaggggcggggcacgtgcatggggcgtggcgggagatgaatgaccgcggagttcc

SEQ ID NO: 46235 - DNA, 60 bp, Artificial
  Synthetic oligonucleotide
gcccaaagtccagcacatacgcgaccttcaaaatggttctgactggcgagacgggcttta

SEQ ID NO: 46236 - DNA, 60 bp, Artificial
  Synthetic oligonucleotide
ggcgaatgcatagacttaacccagattctgacgagtaggcttccggacattctgctgcga

SEQ ID NO: 46237 - DNA, 60 bp, Artificial
  Synthetic oligonucleotide
tgcccctcccgcagccacccgagcagtctgcgataccgcgggccccaccaccgatacttc

SEQ ID NO: 46238 - DNA, 60 bp, Artificial
  Synthetic oligonucleotide
gccccacacatttatgctccaggtccccagctcccgaagtccacagcaatcgttgatggg

SEQ ID NO: 46239 - DNA, 60 bp, Artificial
  Synthetic oligonucleotide
gagtccgttctttataaacagcttctcgtgttcggcattccgctaaaatccgtcgcctcc

SEQ ID NO: 46240 - DNA, 60 bp, Artificial
  Synthetic oligonucleotide
ccactctccctctccggttagctcctggcattctatcgccttcccatcaccctttattgg

SEQ ID NO: 46241 - DNA, 60 bp, Artificial
  Synthetic oligonucleotide
atcgcatttgtcgtgcaacgactctacgccatccctctcgcctcggctgcggtcgtatgt

SEQ ID NO: 46242 - DNA, 60 bp, Artificial
  Synthetic oligonucleotide
ggggccgaaaataggaaaactccgactgcgcacgcgccctctaaccctctcgcggccaca

SEQ ID NO: 46243 - DNA, 60 bp, Artificial
  Synthetic oligonucleotide
cgcctacacccgaggacgatcgcgatttagtggtagtacgtggacgtctccgaatgatgg

SEQ ID NO: 46244 - DNA, 60 bp, Artificial
  Synthetic oligonucleotide
cacttgctgtattacttccacttcgacgaacaacacacaagaccagtcagccgcgaacgg

SEQ ID NO: 46245 - DNA, 60 bp, Artificial
  Synthetic oligonucleotide
atgcatcccgaatgaacataactcgccctctcgatacctcaacgtctggcgcaactgcaa

SEQ ID NO: 46246 - DNA, 60 bp, Artificial
  Synthetic oligonucleotide
ggcaccttcgggacctacgccatattcccacagaccgcaaataaagcattatggaacatt

SEQ ID NO: 46247 - DNA, 60 bp, Artificial
  Synthetic oligonucleotide
catcgccgcatctgcattccatccaccctctgcctcttctacctgtttgttgagctcgtc

SEQ ID NO: 46248 - DNA, 60 bp, Artificial
  Synthetic oligonucleotide
gggtcaagcaagggatcgcctaccccaaatgtccagtcctatgatctcatcccacgccga

SEQ ID NO: 46249 - DNA, 60 bp, Artificial
  Synthetic oligonucleotide
ctgcattagaaccctcccaggtagccccgcacatgtactcagtaccaaagatatccaggc

SEQ ID NO: 46250 - DNA, 60 bp, Artificial
  Synthetic oligonucleotide
agggaattaaacttagatactgcccatgcgatgtccggtccatacactgccactgtccct

SEQ ID NO: 46251 - DNA, 60 bp, Artificial
  Synthetic oligonucleotide
ctcagcttgggcactaaagaaatgcaagacactggcctatacccaccagacgccgaggta

SEQ ID NO: 46252 - DNA, 60 bp, Artificial
  Synthetic oligonucleotide
ttctccagggcctccttgtagtgtgtgcttctttggatagatctcagacagtacagcccc

SEQ ID NO: 46253 - DNA, 60 bp, Artificial
  Synthetic oligonucleotide
ggagaaggaatttgaagtgattcccggggaagataccgtgcttctcgaggcaccggactc

SEQ ID NO: 46254 - DNA, 58 bp, Artificial
  Synthetic oligonucleotide
ggggatcatcaaaggagctactggtcagccctcaaaccaacacccgcacccatacccc

SEQ ID NO: 46255 - DNA, 60 bp, Artificial
  Synthetic oligonucleotide
gccataataaaccccagaaagtttgcagatgaggccctggtcataacatggctcacaaga

SEQ ID NO: 46256 - DNA, 60 bp, Artificial
  Synthetic oligonucleotide
cctgtccacaaccaccagtccaacatcaaagactccaaatggtagcagcattggtgaatc

SEQ ID NO: 46257 - DNA, 60 bp, Artificial
  Synthetic oligonucleotide
ctcacatgcccctacataacccaggcggcccgtgtatcaaccaacagggacccatgtcag

SEQ ID NO: 46258 - DNA, 60 bp, Artificial
  Synthetic oligonucleotide
gatcaccacccaggggacaatggacaagcatagatcacttacagcactatgaactcgaca

SEQ ID NO: 46259 - DNA, 60 bp, Artificial
  Synthetic oligonucleotide
ccaacattcccaccaaacggttggcactggtagcatttaacccctggcactagcaacagg

SEQ ID NO: 46260 - DNA, 60 bp, Artificial
  Synthetic oligonucleotide
gtggcactgttccattgttaccgcctccgctctctcccacaatttcccatcgttctcccc

SEQ ID NO: 46261 - DNA, 60 bp, Artificial
  Synthetic oligonucleotide
ggggaaaggttttagggtagatcacatggtcctggctacacacccaaaggcacgtcagac

SEQ ID NO: 46262 - DNA, 60 bp, Artificial
  Synthetic oligonucleotide
cgcagcattaacctggttggaggttgcctgcaaatccttactatccgtctgccccaccca

SEQ ID NO: 46263 - DNA, 60 bp, Artificial
  Synthetic oligonucleotide
ctggcagattaggtcctggatccggaggtggtgtgtcagccggttgtggacgttttggtg

SEQ ID NO: 46264 - DNA, 60 bp, Artificial
  Synthetic oligonucleotide
caccccaatcctggtcgtggactttgccagtctctatccaagtatcatccaggcccacaa

SEQ ID NO: 46265 - DNA, 60 bp, Artificial
  Synthetic oligonucleotide
gatgctgggcttgatataacccttccccaaaacctatcaatccctcctcggacaactgcc

SEQ ID NO: 46266 - DNA, 60 bp, Artificial
  Synthetic oligonucleotide
ttctggagtcactctgtctgtgtgtgatgggaccctggccgagcccgtgaacaccatggt

SEQ ID NO: 46267 - DNA, 60 bp, Artificial
  Synthetic oligonucleotide
gaccgcggaaacaccactgctcttcactagaataaattcgtgctccacttcaacagcctc

SEQ ID NO: 46268 - DNA, 60 bp, Artificial
  Synthetic oligonucleotide
aaaatgaccccagtagtgctgtagaacccatggaccagagtaactccccattgccctcca

SEQ ID NO: 46269 - DNA, 60 bp, Artificial
  Synthetic oligonucleotide
cacccacccatccagctgtgaaaccacaatccccaaagccgcagtctaagcccggtcatc

SEQ ID NO: 46270 - DNA, 60 bp, Artificial
  Synthetic oligonucleotide
gcctaggtgagaatggacatgactgaacccgtgtgtggtgatgattctatttctcgtggc

SEQ ID NO: 46271 - DNA, 60 bp, Artificial
  Synthetic oligonucleotide
ccaaactcgtgaagcaccaccatgagctatttgtccccttttccaaatccacagagacct

SEQ ID NO: 46272 - DNA, 60 bp, Artificial
  Synthetic oligonucleotide
ggccactagcaactgaaacccgatctccccgcatcccagggagaaagtgtctggcctgtt

SEQ ID NO: 46273 - DNA, 60 bp, Artificial
  Synthetic oligonucleotide
tgtgccctctgtccgagagccttgcgccccagtggaagggtagagaggattgtctttgtg

SEQ ID NO: 46274 - DNA, 60 bp, Artificial
  Synthetic oligonucleotide
gcctgtggccagacccagttttattccacaactctccattgcctggtgcctactgtgagg

SEQ ID NO: 46275 - DNA, 60 bp, Artificial
  Synthetic oligonucleotide
tccccactccctcgctttgttgtgactataggtaacaggttatcatagctggtaaatccc

SEQ ID NO: 46276 - DNA, 60 bp, Artificial
  Synthetic oligonucleotide
ggaggcattgaattcaacctgggcttggcgatccacatggttataggcctcacacaatgt

SEQ ID NO: 46277 - DNA, 60 bp, Artificial
  Synthetic oligonucleotide
cccgtgtgaatatcaaggtactcctgaagacccacccaaagacctccaactgcacctgac

SEQ ID NO: 46278 - DNA, 59 bp, Artificial
  Synthetic oligonucleotide
gcatccacttcatcagtttccagcccatcgccttcttcctcatcagttcccagcacagc

SEQ ID NO: 46279 - DNA, 60 bp, Artificial
  Synthetic oligonucleotide
cccgctggtttaaattttggggtttcatctttgttggtttgtaggtggggagaagggtta

SEQ ID NO: 46280 - DNA, 60 bp, Artificial
  Synthetic oligonucleotide
ccgaacacctctataaaacaggccagaacccacactataggggaaacgacctcagaacag

SEQ ID NO: 46281 - DNA, 60 bp, Artificial
  Synthetic oligonucleotide
cactgcataagggtttcaaaagttatctggtcacaggagacatcagcaacatgatggaca

SEQ ID NO: 46282 - DNA, 60 bp, Artificial
  Synthetic oligonucleotide
ttctgccaagatatactggaagtctgtcatcttttacagggtgggatgaggtctcggctg

SEQ ID NO: 46283 - DNA, 60 bp, Artificial
  Synthetic oligonucleotide
ggcaacacatctcgcgcacctatcctgacccgtcagtggggttgttggtttcaaagattg

SEQ ID NO: 46284 - DNA, 60 bp, Artificial
  Synthetic oligonucleotide
ccccgctccagatggttatttcccatgtttgccatctccggcctggtactgactgtgggt

SEQ ID NO: 46285 - DNA, 60 bp, Artificial
  Synthetic oligonucleotide
ccccgcagttacagacacacccaaccattccaccccaaacagaccatctcgaggactcca

SEQ ID NO: 46286 - DNA, 60 bp, Artificial
  Synthetic oligonucleotide
ggaggggtttccagtgaaacactgaggcgccatcaggccagtccccggagtcacatcccc

SEQ ID NO: 46287 - DNA, 60 bp, Artificial
  Synthetic oligonucleotide
caccctggaggacagacagccgcccgcaagccccagtgtttacttcaatccccaagatct

SEQ ID NO: 46288 - DNA, 60 bp, Artificial
  Synthetic oligonucleotide
cagtgtgatgcgtgttcatctttagataaactgcccaccggcaccatagcgaaccaacat

SEQ ID NO: 46289 - DNA, 60 bp, Artificial
  Synthetic oligonucleotide
gatggctgaaatggtatgttccgttgttgccagtgttagacaggcgatgtccccaatcaa

SEQ ID NO: 46290 - DNA, 60 bp, Artificial
  Synthetic oligonucleotide
ggccgcgtgccccgagctgcaagtggagaaggatgctgggccttcaggattaaatgttgt

SEQ ID NO: 46291 - DNA, 60 bp, Artificial
  Synthetic oligonucleotide
cagcgtgctccgtggatgcctggctctgttcctagccaccccaagtatcacatctcagac

SEQ ID NO: 46292 - DNA, 60 bp, Artificial
  Synthetic oligonucleotide
tagatttgattcctgcccataccacacgtttgcaatcttgaacatccactctgacgcccc

SEQ ID NO: 46293 - DNA, 60 bp, Artificial
  Synthetic oligonucleotide
atactccatccacagcccaagtgatattgagcatgtgccttccaaacaaaagacccgggg

SEQ ID NO: 46294 - DNA, 60 bp, Artificial
  Synthetic oligonucleotide
tcatgcaccaaccgcctaacacaattcatatttcaatgtttgtccagagcactcccggtc

SEQ ID NO: 46295 - DNA, 60 bp, Artificial
  Synthetic oligonucleotide
gggagatacaggagacggggactatcggacaacaagaccatcaggcacacccaggcatca

SEQ ID NO: 46296 - DNA, 60 bp, Artificial
  Synthetic oligonucleotide
gagcctcgtgaggcagcaccctccaatccctgcacgggtgaattagtgaaactccaggtg

SEQ ID NO: 46297 - DNA, 60 bp, Artificial
  Synthetic oligonucleotide
ctggtctagaatctgtctgactcaaatctgtatctgagggaggaggggcggttggagcac

SEQ ID NO: 46298 - DNA, 60 bp, Artificial
  Synthetic oligonucleotide
cgtggaggcggatggggaatggaagaaggactctgattgatttgggtttacagctggtta

SEQ ID NO: 46299 - DNA, 60 bp, Artificial
  Synthetic oligonucleotide
acacggagggcattggcgccatctacaaggagaacatcgcgccgtacacgttcaaggcct

SEQ ID NO: 46300 - DNA, 60 bp, Artificial
  Synthetic oligonucleotide
tcagcatcagcaagtacaacggcagcgcgggcaacaatcgcgtcttccaggcgggcaact

SEQ ID NO: 46301 - DNA, 60 bp, Artificial
  Synthetic oligonucleotide
agcacccgcgccacccgctgcacccgacgaacctggtggccaactccttcaacgtgctgc

SEQ ID NO: 46302 - DNA, 60 bp, Artificial
  Synthetic oligonucleotide
tccggtggactttcgcgacgggcgcggctttgagctgagcgtggaccggcaccggctgag

SEQ ID NO: 46303 - DNA, 60 bp, Artificial
  Synthetic oligonucleotide
acggtggactcggccaccttccaagaggccctggcttttagcgcgctggcacatgtttac

SEQ ID NO: 46304 - DNA, 60 bp, Artificial
  Synthetic oligonucleotide
ttctcggcagtcatcagggccaaaggaaaatcggtcccaggaggcggggtgccaaacaga

SEQ ID NO: 46305 - DNA, 60 bp, Artificial
  Synthetic oligonucleotide
agacgtcgcagcgcaggttgggcgggtgggcggttggcgtcgcgtcctcgagcgtaagga

SEQ ID NO: 46306 - DNA, 60 bp, Artificial
  Synthetic oligonucleotide
tgctgtggttcatggacgcgctcgatggcacggtgctgcgcaagcttggcaagcgcccct

SEQ ID NO: 46307 - DNA, 60 bp, Artificial
  Synthetic oligonucleotide
tagagcaccaccacgcgcacgtcctcggggtccgcgatctgcgacatccaggccacgcgc

SEQ ID NO: 46308 - DNA, 57 bp, Artificial
  Synthetic oligonucleotide
tggagcagacgatccgccactgcatggccccgcggccgcgcacggactacgtggcgg

SEQ ID NO: 46309 - DNA, 60 bp, Artificial
  Synthetic oligonucleotide
aaagtcgcgcaagtagcggctcatggcctcggcgaaggggcgttccagcatgacggcatg

SEQ ID NO: 46310 - DNA, 59 bp, Artificial
  Synthetic oligonucleotide
gtggtggcgcactctgccaacaacgcgggcctcttcgactgcatcctgccggtgctgga

SEQ ID NO: 46311 - DNA, 60 bp, Artificial
  Synthetic oligonucleotide
tatatacaccgggccggcggcagaaaactcgtacacgtacaccgggaccgcggggcgcgt

SEQ ID NO: 46312 - DNA, 60 bp, Artificial
  Synthetic oligonucleotide
atccacctgcaccaccgcctgctggaccacctgctgacggcctgcgccgggtacaagatc

SEQ ID NO: 46313 - DNA, 60 bp, Artificial
  Synthetic oligonucleotide
gccgtcacgctcccggtgatgaacgagctgtggccccggcagccctgcacgcgccgctgc

SEQ ID NO: 46314 - DNA, 60 bp, Artificial
  Synthetic oligonucleotide
cgcggacctaggactggccatcgacctgtacgcgctcggccacgccttgctggagctggt

SEQ ID NO: 46315 - DNA, 60 bp, Artificial
  Synthetic oligonucleotide
cgcgcgggctcgcgctgtttccgcgcttcaagtacaagcacctcttcgagcgctgcacgc

SEQ ID NO: 46316 - DNA, 56 bp, Artificial
  Synthetic oligonucleotide
gcagccccgcgagcagcgtggagcagcagttaacgcacacctttctgatcccgctc

SEQ ID NO: 46317 - DNA, 60 bp, Artificial
  Synthetic oligonucleotide
gctgacgatgggcaaggcgctgcgcgggctggatgacgtggccgcgcatctgctggggct

SEQ ID NO: 46318 - DNA, 60 bp, Artificial
  Synthetic oligonucleotide
aagcgcacctacgacatcctcaaccccttcgggcccgtatacaccagcttgccgaccaac

SEQ ID NO: 46319 - DNA, 60 bp, Artificial
  Synthetic oligonucleotide
tttcctggcgtaccggtacatttcccgcctccgcagcaaccccatgaaggcgctgtaccc

SEQ ID NO: 46320 - DNA, 57 bp, Artificial
  Synthetic oligonucleotide
accgcggaggtgaacagcggcacgaagcccagacacagaaagtacagcaggtcgtag

SEQ ID NO: 46321 - DNA, 60 bp, Artificial
  Synthetic oligonucleotide
tttcccggagccgatggcgtactggcgcacgatgtttggtacggacgccttaagtgggat

SEQ ID NO: 46322 - DNA, 60 bp, Artificial
  Synthetic oligonucleotide
gctaccgcgaggacctgcacacgcacctctggagaatcaaccgcccgctggcgctcccca

SEQ ID NO: 46323 - DNA, 60 bp, Artificial
  Synthetic oligonucleotide
caagcacgcttgcatcagcgcgaagcactcccggttgggcgcgtacacgaagcccgagag

SEQ ID NO: 46324 - DNA, 60 bp, Artificial
  Synthetic oligonucleotide
atcccgcgacacgacccgacgttcttgggcacccatggagcgcgcggcggagcggctggc

SEQ ID NO: 46325 - DNA, 60 bp, Artificial
  Synthetic oligonucleotide
acccgctacgaggccgacgtcccgcgcctggccgccctctgctggcagtttgtgcactat

SEQ ID NO: 46326 - DNA, 60 bp, Artificial
  Synthetic oligonucleotide
ccgtctgcctcgacgaccgcgagtgcttcaccgacgtggccctggacgcggcctgcctgc

SEQ ID NO: 46327 - DNA, 60 bp, Artificial
  Synthetic oligonucleotide
tacatgagccgcctccacgcgcacctcaaggtcgccgagggccgcagccgctttgtggtc

SEQ ID NO: 46328 - DNA, 60 bp, Artificial
  Synthetic oligonucleotide
aagactacttgacggcccacctgcgcgccatcgaggtcctgcccgagtcagcgccccacc

SEQ ID NO: 46329 - DNA, 60 bp, Artificial
  Synthetic oligonucleotide
aaagtgccgagggatgtccttgtagtccaggtccaccttccgctcccgcagggcctcctc

SEQ ID NO: 46330 - DNA, 60 bp, Artificial
  Synthetic oligonucleotide
ttggacttgaacgcgcacgcgaaccagccgcttcccgcaccgccggcctcggaggagggc

SEQ ID NO: 46331 - DNA, 60 bp, Artificial
  Synthetic oligonucleotide
cctcgcgacgacggaggctttcaaggagacggtgtacatgtgcaacaccttcctgcacta

SEQ ID NO: 46332 - DNA, 60 bp, Artificial
  Synthetic oligonucleotide
tggtgcaagatctagcgctcagccagtgccacggcatcttctgcgggcagccggtggacg

SEQ ID NO: 46333 - DNA, 60 bp, Artificial
  Synthetic oligonucleotide
aagagcaggtccggcacccagaggcagctgaacaggttgtcgcagcgcgttgactcgtcg

SEQ ID NO: 46334 - DNA, 60 bp, Artificial
  Synthetic oligonucleotide
atcatcgactcgcacccgctaacggcgcgcatcgacgaccgcgggcccatggagcccttt

SEQ ID NO: 46335 - DNA, 60 bp, Artificial
  Synthetic oligonucleotide
acggaggagctgggctgcctgcacctcgtgcgcagcgactcgcgcgtgaagatctacgtg

SEQ ID NO: 46336 - DNA, 60 bp, Artificial
  Synthetic oligonucleotide
aagctagccgccgcctaccacagccgtcacatcaacaccatcttccaagagtttggcttc

SEQ ID NO: 46337 - DNA, 60 bp, Artificial
  Synthetic oligonucleotide
aacgcactcaacgagcgacatctgcagcgtgcgcctccaggtatcgaacacgtgctccgc

SEQ ID NO: 46338 - DNA, 60 bp, Artificial
  Synthetic oligonucleotide
ttttaaacaccgccccgcagagctcctcctccgacctgcacgcctcctggtgcgcgatca

SEQ ID NO: 46339 - DNA, 60 bp, Artificial
  Synthetic oligonucleotide
agaacccggacgtgttctcggagggctcgcgcctgatcatgtgcctgcggctgtttgaca

SEQ ID NO: 46340 - DNA, 60 bp, Artificial
  Synthetic oligonucleotide
gcccggatgtgttactacctgcagttctgccagcaccagaagagtaccctaaacccggcc

SEQ ID NO: 46341 - DNA, 59 bp, Artificial
  Synthetic oligonucleotide
caccttaaccaaccacttttccctcagttcgcacgctttcacattttcccaccctacaa

SEQ ID NO: 46342 - DNA, 60 bp, Artificial
  Synthetic oligonucleotide
atccaaaactccagtgcagcacacctctcccctcaaccggctctaccccaacgtggtgct

SEQ ID NO: 46343 - DNA, 60 bp, Artificial
  Synthetic oligonucleotide
cactccctttgttttgtcagactggtggtaaaatgtgactgggataggggcgcactcgtc

SEQ ID NO: 46344 - DNA, 60 bp, Artificial
  Synthetic oligonucleotide
accatctccctttacacctctacagtgggcctaccgaccgggccttaccagctccccaat

SEQ ID NO: 46345 - DNA, 60 bp, Artificial
  Synthetic oligonucleotide
tcataaatgggttccggtttctcaggcactgcttctggtagagcgtgggtgggttgcgtg

SEQ ID NO: 46346 - DNA, 60 bp, Artificial
  Synthetic oligonucleotide
agcctacctgactgcaatggggagcttgagaccaccctcacccaatggcgactggagcaa

SEQ ID NO: 46347 - DNA, 60 bp, Artificial
  Synthetic oligonucleotide
taaaagggctctctgccgtgcgaggctcctcacagacacacagcaagaaagaagcgccgc

SEQ ID NO: 46348 - DNA, 60 bp, Artificial
  Synthetic oligonucleotide
tggaagacacagtgcctcacgcgactcacccacctgccggagagggactagatttcagct

SEQ ID NO: 46349 - DNA, 60 bp, Artificial
  Synthetic oligonucleotide
gccacatcgtgccctggaccctgggaccgagagatccaaaaccgaaacagcgtccatttg

SEQ ID NO: 46350 - DNA, 60 bp, Artificial
  Synthetic oligonucleotide
agacgaacctggtccacttgggccttctccttcagacgaacctggtccacttgagccttc

SEQ ID NO: 46351 - DNA, 60 bp, Artificial
  Synthetic oligonucleotide
agacaatcttcctgccacccgagagcttctgcctgggtgcccaagacaccatgttgaccc

SEQ ID NO: 46352 - DNA, 60 bp, Artificial
  Synthetic oligonucleotide
cttaagcctggcagggcacactcaaatggcaaaccgcatataatttcgacccacgccctt

SEQ ID NO: 46353 - DNA, 60 bp, Artificial
  Synthetic oligonucleotide
ataatactcctgcgtttggacggcctctacctgcgcgtcctgcccgacaagcaccccggt

SEQ ID NO: 46354 - DNA, 60 bp, Artificial
  Synthetic oligonucleotide
agctgctcgtggggaaggatgtgcgtgaaaacagtgtgcgctttgaggtgctacttgggg

SEQ ID NO: 46355 - DNA, 60 bp, Artificial
  Synthetic oligonucleotide
ctacagagagcaccttaagctatcatacctaaaacacacctttcccagaagcccagcact

SEQ ID NO: 46356 - DNA, 60 bp, Artificial
  Synthetic oligonucleotide
tgcctccaaaatagatgcaaaggatgccctcaccccactgacgccccaatcacctgtttt

SEQ ID NO: 46357 - DNA, 60 bp, Artificial
  Synthetic oligonucleotide
tcggggtgcactgaggatagagagagctcagggagccaggagtgcaggacttcggcgcgg

SEQ ID NO: 46358 - DNA, 60 bp, Artificial
  Synthetic oligonucleotide
ttggctaggttacacgtagacacgtcggcgcccgggtactgaatgacctccgcacagaga

SEQ ID NO: 46359 - DNA, 60 bp, Artificial
  Synthetic oligonucleotide
ccctcacctgcaagcaaccatggccgactcatctaactcctcgcttaactgcacggcaat

SEQ ID NO: 46360 - DNA, 60 bp, Artificial
  Synthetic oligonucleotide
ccaaccaggtagccccggccatgtaccacacccgcaacacttttaactgggacacgtttg

SEQ ID NO: 46361 - DNA, 60 bp, Artificial
  Synthetic oligonucleotide
ccacatctaccccagttcccacgaaggctctaaaacccacaccctcccaccagccgagta

SEQ ID NO: 46362 - DNA, 60 bp, Artificial
  Synthetic oligonucleotide
gtcgtcaagcaggaagaacccgtggaaaacaccggcgattctcaacttggtagccccaga

SEQ ID NO: 46363 - DNA, 60 bp, Artificial
  Synthetic oligonucleotide
ggcaggttggggtacatgcgggtcggtctgtggtcttgcgccaccctggttggagctagc

SEQ ID NO: 46364 - DNA, 60 bp, Artificial
  Synthetic oligonucleotide
cacctacccaaagctgaatttacaccccttcccgattcacccaaaccgccccaggacccc

SEQ ID NO: 46365 - DNA, 60 bp, Artificial
  Synthetic oligonucleotide
aaaactctgcctctacagccgtcataaaagtctacaccagcaccacagcacggtctccac

SEQ ID NO: 46366 - DNA, 60 bp, Artificial
  Synthetic oligonucleotide
gctgtagcagagaaaggcggcgtaaaactgaaccctcgcacttagcgtgagttcccaagc

SEQ ID NO: 46367 - DNA, 60 bp, Artificial
  Synthetic oligonucleotide
gacttgagcaaacacaagcacctgcccctaaaggcccaacagctgatacacccgttacag

SEQ ID NO: 46368 - DNA, 60 bp, Artificial
  Synthetic oligonucleotide
aacaccctaagtccgctctccgatgggccctatgactcttggtcccagtgcgagatctgc

SEQ ID NO: 46369 - DNA, 60 bp, Artificial
  Synthetic oligonucleotide
gcagacacctggccttgctctttgacccctgtctagctttcaacacctggcagtggcagc

SEQ ID NO: 46370 - DNA, 60 bp, Artificial
  Synthetic oligonucleotide
ggtatagttgctacatgtggaggctggcttagctctgagatccatcgctcaagttgggct

SEQ ID NO: 46371 - DNA, 60 bp, Artificial
  Synthetic oligonucleotide
cgccctgtcctccaaccagtctagcacaacctgtaccttgttcacatgccccatcgtgtg

SEQ ID NO: 46372 - DNA, 60 bp, Artificial
  Synthetic oligonucleotide
ggggtccctggagccaaggggatggagatggcatcgtgtgggctgaattctttctcttgg

SEQ ID NO: 46373 - DNA, 60 bp, Artificial
  Synthetic oligonucleotide
tggtcaaaagttctgctatagcacgcaaggccccgttgctgggagacgcggccaccttca

SEQ ID NO: 46374 - DNA, 60 bp, Artificial
  Synthetic oligonucleotide
tgctgtagtcccctagaagaggatcctgtgggtcgtcaccgcctccacctttaacacccc

SEQ ID NO: 46375 - DNA, 60 bp, Artificial
  Synthetic oligonucleotide
gagcggcaggcacgcacacatacttcaccaggcccttcggcagcttatgatcataacacc

SEQ ID NO: 46376 - DNA, 60 bp, Artificial
  Synthetic oligonucleotide
aactcctccctcagggaatctgccgccaaccttgctcgctccaggcccatagtcaccctc

SEQ ID NO: 46377 - DNA, 60 bp, Artificial
  Synthetic oligonucleotide
tccgcctgggccttctcctccgcctgggccttctcctccgcctgggccttctcccgttac

SEQ ID NO: 46378 - DNA, 60 bp, Artificial
  Synthetic oligonucleotide
ccctcgttcccactgggtcctccgcattgagggctaaggactggaggctctctatcatca

SEQ ID NO: 46379 - DNA, 60 bp, Artificial
  Synthetic oligonucleotide
cacagctccaacgcatccacagctttgataaacataactagcacacataatacccaccgg

SEQ ID NO: 46380 - DNA, 60 bp, Artificial
  Synthetic oligonucleotide
cagacctcgcattcctgccccaacaccaaagataaagagcacaacgagggcatactccta

SEQ ID NO: 46381 - DNA, 60 bp, Artificial
  Synthetic oligonucleotide
cgggtatcgtgctcaagctctacggacgaacggaaaccaaccagagcgtgtgtgtgaacg

SEQ ID NO: 46382 - DNA, 60 bp, Artificial
  Synthetic oligonucleotide
ggactttacagccataaaagcgctagcagataccgcccacaacacacacgcttcgctcga

SEQ ID NO: 46383 - DNA, 60 bp, Artificial
  Synthetic oligonucleotide
tggtcttggtgaatgcaggccgcctgaagagctccgagactatcagacgcgctggggttt

SEQ ID NO: 46384 - DNA, 59 bp, Artificial
  Synthetic oligonucleotide
ccccgccttagataccacacagggcccatgcctgctcagccccgccctctgccttcaaa

SEQ ID NO: 46385 - DNA, 60 bp, Artificial
  Synthetic oligonucleotide
gccccttcactgtttccaagcactccatacatccacattcacattccaacagcagagcta

SEQ ID NO: 46386 - DNA, 60 bp, Artificial
  Synthetic oligonucleotide
tgagacgtggtaggctgctcctgttcggctggctgcttgagggactcgctggcgtccaac

SEQ ID NO: 46387 - DNA, 60 bp, Artificial
  Synthetic oligonucleotide
gcccagagacccagattcagacgaggaaggcaagaacaaggaccggatacctgtacaatg

SEQ ID NO: 46388 - DNA, 60 bp, Artificial
  Synthetic oligonucleotide
gcagcaagactctcagcccaggtgtgccacagcctcaatctgaatatgaccccagcccga

SEQ ID NO: 46389 - DNA, 60 bp, Artificial
  Synthetic oligonucleotide
acacggtcttcaaagcaaccggcataccagcaaacacagactgcaactccccgctgcaat

SEQ ID NO: 46390 - DNA, 60 bp, Artificial
  Synthetic oligonucleotide
tgccgtgcttacccatccgccgtgctcccgcaaccactcgccctgctcttcggccaggta

SEQ ID NO: 46391 - DNA, 60 bp, Artificial
  Synthetic oligonucleotide
cggaaacagctgacggcacgctattggcatcccgcgtcatgaacctgctcttacatgcct

SEQ ID NO: 46392 - DNA, 60 bp, Artificial
  Synthetic oligonucleotide
cgaacgtcccgcaaaacccaaacacccattttctgagacgtgtggtgacggcaacctggc

SEQ ID NO: 46393 - DNA, 60 bp, Artificial
  Synthetic oligonucleotide
acatggtcgcacattttcccgacgatgcgcttatgtgccgagtctccactgttcgccgtc

SEQ ID NO: 46394 - DNA, 60 bp, Artificial
  Synthetic oligonucleotide
ggccggtgttttgcaatgccagcccacatggtataggcccaattccaaggaccgacgtgc

SEQ ID NO: 46395 - DNA, 60 bp, Artificial
  Synthetic oligonucleotide
cgcccatgggaacggaggcgtcgtcgtcatgtattggacggcaacataggcagcaacaca

SEQ ID NO: 46396 - DNA, 60 bp, Artificial
  Synthetic oligonucleotide
gcggctgtcaggataaaataggcatgcgtgtttgtattcccgtcccaccaccttacctgc

SEQ ID NO: 46397 - DNA, 60 bp, Artificial
  Synthetic oligonucleotide
atcttcgagcggcgcgatgcgagtgtgcttcccctcccaagaagtctggttgcgagaacg

SEQ ID NO: 46398 - DNA, 60 bp, Artificial
  Synthetic oligonucleotide
agtagctttcccgccttcctcgcctcaccccttaaaacgcgtgatgtcgggtctgtaggg

SEQ ID NO: 46399 - DNA, 60 bp, Artificial
  Synthetic oligonucleotide
atgccgccgaaacacttcaggtcggtatgagagccgggaggccgccatcagcaggagttt

SEQ ID NO: 46400 - DNA, 60 bp, Artificial
  Synthetic oligonucleotide
gatataatgcgagttaaagctgtttccgcgcctctacatttctcctccccattccccatc

SEQ ID NO: 46401 - DNA, 60 bp, Artificial
  Synthetic oligonucleotide
cgcagcatttccgttacctctttccactttgccatagagcatacgcgagagattttgggg

SEQ ID NO: 46402 - DNA, 60 bp, Artificial
  Synthetic oligonucleotide
gacgccgcctcttttgtctcgaattggaccctctcgagcgccggtcgggcttatggtcat

SEQ ID NO: 46403 - DNA, 60 bp, Artificial
  Synthetic oligonucleotide
ctcgcgttaacgtgggcggtcttctcggcaatgccatcgacgcgcagatccaaatgcaag

SEQ ID NO: 46404 - DNA, 60 bp, Artificial
  Synthetic oligonucleotide
tggtgcgaaacagaccttctcggcttcagaatgtcgctccgcagtctcttcgtgtcggtg

SEQ ID NO: 46405 - DNA, 60 bp, Artificial
  Synthetic oligonucleotide
ccaacagacacgtccatcaactgtttcgccagcatcccgtcctacaaataacagtggccc

SEQ ID NO: 46406 - DNA, 60 bp, Artificial
  Synthetic oligonucleotide
cctctgacagtgtctaacggtatacaggcgggagcgggtcgtggcgtcatcatcaccact

SEQ ID NO: 46407 - DNA, 60 bp, Artificial
  Synthetic oligonucleotide
ggactatacttcgcccttctcgtctcggacatggttacacaatcccttctcccggtgccg

SEQ ID NO: 46408 - DNA, 60 bp, Artificial
  Synthetic oligonucleotide
ccccacatcccatctctgacgtatatacacggggcgaacattagggttgatgcagcggac

SEQ ID NO: 46409 - DNA, 60 bp, Artificial
  Synthetic oligonucleotide
tcggcttcaattccagcatcccagaaatgtcgcagtcaccatcacgccgtgcatcgcttc

SEQ ID NO: 46410 - DNA, 60 bp, Artificial
  Synthetic oligonucleotide
tggtcaatatgggcatccgctaccatcatacagttctccattttcatccgggtgtgtgca

SEQ ID NO: 46411 - DNA, 60 bp, Artificial
  Synthetic oligonucleotide
acaacacaacgcgcaaaggccagtctatcgggttcggtttacgccttcgccatcacgggc

SEQ ID NO: 46412 - DNA, 60 bp, Artificial
  Synthetic oligonucleotide
ttcgacgaggccccaacgtgttcgctagccaagttataaacacctcgcgataaacggcgt

SEQ ID NO: 46413 - DNA, 60 bp, Artificial
  Synthetic oligonucleotide
tcttgctcgccgtcgctataaacgggcaattcttcgctgccggtgaggggacatacgcca

SEQ ID NO: 46414 - DNA, 60 bp, Artificial
  Synthetic oligonucleotide
gcaggtagccgctattgcttttgccccatacagcgccttgacgtttccgtacatacccct

SEQ ID NO: 46415 - DNA, 60 bp, Artificial
  Synthetic oligonucleotide
ggaggtccatcgaagtctgcaggcgcacaagtcccgcataatcagctcccagatcagaga

SEQ ID NO: 46416 - DNA, 60 bp, Artificial
  Synthetic oligonucleotide
tctagcacacaactatggcgttacctgagagatcgcgcaatactaagaccgcttcacgca

SEQ ID NO: 46417 - DNA, 60 bp, Artificial
  Synthetic oligonucleotide
tgtagcttgcgggacaaaccattcgggaaacacgcactccaggctcgaccgaacgcgcat

SEQ ID NO: 46418 - DNA, 60 bp, Artificial
  Synthetic oligonucleotide
ccctaaacctaaccacgactctcccggccgcgcattgcagaaaagtacacaccgctcccc

SEQ ID NO: 46419 - DNA, 60 bp, Artificial
  Synthetic oligonucleotide
tgacacacccatgttcccagcactccccaagccagattggattctctcccctgcgacacc

SEQ ID NO: 46420 - DNA, 60 bp, Artificial
  Synthetic oligonucleotide
atggcttgcaatgcaccttccgttatggctgtgttggctgattggggatggagctgttca

SEQ ID NO: 46421 - DNA, 60 bp, Artificial
  Synthetic oligonucleotide
ccccgcaaattcagtcaaaccaggaaccgtatcgccacagccacattcgacacgatcgcc

SEQ ID NO: 46422 - DNA, 60 bp, Artificial
  Synthetic oligonucleotide
tgatcgatacgcccctgccaaatccacccgtcgagtcgcccacacctgaacctctcgaat

SEQ ID NO: 46423 - DNA, 60 bp, Artificial
  Synthetic oligonucleotide
gatccatgcccgaacacggccagtcgttgaacagtattcgccacaatcctctgcgcgtcg

SEQ ID NO: 46424 - DNA, 60 bp, Artificial
  Synthetic oligonucleotide
ggagacctgtcatgagcgacaacggcgtagtgttcgattcacccatgcagcggatatgta

SEQ ID NO: 46425 - DNA, 60 bp, Artificial
  Synthetic oligonucleotide
tatggagccgcttttcacggcgcgttctatgcccttgaccccttccagcacgcgagcgta

SEQ ID NO: 46426 - DNA, 60 bp, Artificial
  Synthetic oligonucleotide
gggacgccgttgtttatactaggccccacagcagaattcatccccaatatcgaaacgggc

SEQ ID NO: 46427 - DNA, 60 bp, Artificial
  Synthetic oligonucleotide
gcgagggcttccgcagctacaacaaaggcagcgttcagggatctcctacacactcgcttc

SEQ ID NO: 46428 - DNA, 60 bp, Artificial
  Synthetic oligonucleotide
aaaacagcggcgaaaacaacagcggtaaaacgcacttcgtggcaacgcgatcgttcccaa

SEQ ID NO: 46429 - DNA, 60 bp, Artificial
  Synthetic oligonucleotide
cgtcaccacccacatacaacacccctccgcgtcgggcaagagtttcggaagcacgctatt

SEQ ID NO: 46430 - DNA, 60 bp, Artificial
  Synthetic oligonucleotide
ccctatgaatcccgtaactgtagcgcccgcgcagaaagccgccatcagaccaactacgtg

SEQ ID NO: 46431 - DNA, 60 bp, Artificial
  Synthetic oligonucleotide
cccgcctcgctggtaagaggactagaccgtcgacccaactctgtcttgtttagagccttt

SEQ ID NO: 46432 - DNA, 60 bp, Artificial
  Synthetic oligonucleotide
ccacagggcaagcgcgcctctgaatgcatgataacgagcaactgctgcaaccgcgcaaca

SEQ ID NO: 46433 - DNA, 60 bp, Artificial
  Synthetic oligonucleotide
cgtccaagccgagctgttcgcatatttgcttgccgcttgtttctaccgatcctggggccg

SEQ ID NO: 46434 - DNA, 60 bp, Artificial
  Synthetic oligonucleotide
cgccgcctctgctaaagctagctcagacttcagttcggccaaacggttttccaatcgcac

SEQ ID NO: 46435 - DNA, 60 bp, Artificial
  Synthetic oligonucleotide
aagtgtactgcgtgcccctgtgcatagcggtgacggaaaagcaacggggccgtcggattg

SEQ ID NO: 46436 - DNA, 60 bp, Artificial
  Synthetic oligonucleotide
gtggccattgtggacgggctatttgcagcgtgtcgtgggttggcggtagagtgtatgtgc

SEQ ID NO: 46437 - DNA, 60 bp, Artificial
  Synthetic oligonucleotide
tacatcagctcaagtccctccccgtcacgtacgcgaccaccactgcactcgcccattgcg

SEQ ID NO: 46438 - DNA, 60 bp, Artificial
  Synthetic oligonucleotide
aattacgaggatctctttgccgaggatccaaccccgcaccgcccgtacgacatcgcctcg

SEQ ID NO: 46439 - DNA, 60 bp, Artificial
  Synthetic oligonucleotide
tgtgcacctcccgaagtcaagtccccagcctatatactgagggccaaagatgtgtataac

SEQ ID NO: 46440 - DNA, 60 bp, Artificial
  Synthetic oligonucleotide
ggcgggtgtacaagagcaagcttggaggtatatcagagagttggtcctaagtgtcaccgt

SEQ ID NO: 46441 - DNA, 60 bp, Artificial
  Synthetic oligonucleotide
agacgctcagacacagtccatcagaacagaccactggcgggaggatgaggcagaacctgg

SEQ ID NO: 46442 - DNA, 60 bp, Artificial
  Synthetic oligonucleotide
ggtcagtctttgtgggctgctgggtcgcgatcgcctcatcaatggagttcacagtcacgg

SEQ ID NO: 46443 - DNA, 60 bp, Artificial
  Synthetic oligonucleotide
ccggggcgggcacgacccagaaagaccgcggttacgcctgagctgctacacagctgcctt

SEQ ID NO: 46444 - DNA, 60 bp, Artificial
  Synthetic oligonucleotide
caccactctggacctaccactgacccttggagacctgacacaatatagactggctcatgg

SEQ ID NO: 46445 - DNA, 60 bp, Artificial
  Synthetic oligonucleotide
acagccgtctttcccgggctccacaggcgctgcagcctccacggtcccctaaattttatg

SEQ ID NO: 46446 - DNA, 60 bp, Artificial
  Synthetic oligonucleotide
ctgacttggcagagcaccccgcctacgtgcgtcagcagaacttaagaattgcacacaagg

SEQ ID NO: 46447 - DNA, 60 bp, Artificial
  Synthetic oligonucleotide
gatgagcccctccaggttgtcctcacagcccacaagaccatagtggtgccaccaggagaa

SEQ ID NO: 46448 - DNA, 60 bp, Artificial
  Synthetic oligonucleotide
gtacccttctgttgaaaactacgctgccagacaggcgccacctccctatagcgcatcacc

SEQ ID NO: 46449 - DNA, 60 bp, Artificial
  Synthetic oligonucleotide
catcctccaataacttccagagcgatcacagatggcggagagtcacccatggagtggcag

SEQ ID NO: 46450 - DNA, 60 bp, Artificial
  Synthetic oligonucleotide
cctccgaccctcacccctaacatccatgtcctgttatgccaggcccctgtctttagcttc

SEQ ID NO: 46451 - DNA, 60 bp, Artificial
  Synthetic oligonucleotide
gggaccagtctgccacagtgatccagagctcatgcagagaagatccagccgcggtgtgta

SEQ ID NO: 46452 - DNA, 60 bp, Artificial
  Synthetic oligonucleotide
tagcctccacgcctcagggcactaccgtgcctgcctacgtgaccaccacagccaacactt

SEQ ID NO: 46453 - DNA, 60 bp, Artificial
  Synthetic oligonucleotide
ccaagctggtcaccatgaggaccttcgaggtcaggaagcccatagacagtggagcgggat

SEQ ID NO: 46454 - DNA, 60 bp, Artificial
  Synthetic oligonucleotide
ggtgatgggtgaggtcgatgcgaatgtttgcacgaagagggtgcgtgccaaccactgcag

SEQ ID NO: 46455 - DNA, 60 bp, Artificial
  Synthetic oligonucleotide
agacgggtgctgactgatggacaacaaatcagagttttctcttctttgctcgacgctgcc

SEQ ID NO: 46456 - DNA, 57 bp, Artificial
  Synthetic oligonucleotide
aatgcgtgtggcggcggagcgaggcgggtgtgttagtgtggcgtgtgtatcatgggg

SEQ ID NO: 46457 - DNA, 60 bp, Artificial
  Synthetic oligonucleotide
ggctgggtagtggtggcggagagttttaaagagcgcctgatctgtggggagttggccatg

SEQ ID NO: 46458 - DNA, 60 bp, Artificial
  Synthetic oligonucleotide
gctacaactgcagtgtaacaccaactggctgccaccgtgcccaatcatccataacctatt

SEQ ID NO: 46459 - DNA, 55 bp, Artificial
  Synthetic oligonucleotide
ccccagagccagagtccaggctgccccgcagttccccgagcctccagggtggcgc

SEQ ID NO: 46460 - DNA, 60 bp, Artificial
  Synthetic oligonucleotide
ccacgtccccatcactatcatcagcacagccaagggtatcaggacaaggggtagacaggc

SEQ ID NO: 46461 - DNA, 60 bp, Artificial
  Synthetic oligonucleotide
gggctgttgtgatacagatgcagtgattgtttgtcaggacggtggggacatgtggatcga

SEQ ID NO: 46462 - DNA, 60 bp, Artificial
  Synthetic oligonucleotide
cattccctcgcgccatccaaactgctcatgaacatagctaccattttgtggccaatgaag

SEQ ID NO: 46463 - DNA, 60 bp, Artificial
  Synthetic oligonucleotide
ccactagacgggcaatagcctgggagatgccatttgctatcagtggactttgggcgttgg

SEQ ID NO: 46464 - DNA, 60 bp, Artificial
  Synthetic oligonucleotide
cctgacctgacccgtctaccgcctcctcatcacctttagaacactccctcacgcccagta

SEQ ID NO: 46465 - DNA, 60 bp, Artificial
  Synthetic oligonucleotide
gttgagttttctgtccatataggctactctaccctctcgtcgccctagtttcctcgcccc

SEQ ID NO: 46466 - DNA, 60 bp, Artificial
  Synthetic oligonucleotide
gcctatgacaagctgaccaccagcgtcaacaacgtgcttgaggagttgtccagggcgtgg

SEQ ID NO: 46467 - DNA, 60 bp, Artificial
  Synthetic oligonucleotide
tctcctcatgctagtcgcgtcctctctgcttttggacactcatcatggagacaaccaatg

SEQ ID NO: 46468 - DNA, 60 bp, Artificial
  Synthetic oligonucleotide
cactccacccgaccctgaagtgcaaaccctgggtagctatgaatatgaacccgatgaacc

SEQ ID NO: 46469 - DNA, 60 bp, Artificial
  Synthetic oligonucleotide
cctcaaagcaggtggggagcctctgtcaccggtccttgagaaagtatacgccctcgcctt

SEQ ID NO: 46470 - DNA, 60 bp, Artificial
  Synthetic oligonucleotide
cccgtgagtcttccccacagaaactgcatagaactaacttgtgacacagaaaggtgtttg

SEQ ID NO: 46471 - DNA, 60 bp, Artificial
  Synthetic oligonucleotide
cgcccacctaaccaatctcctaacccttctgtgtctgctgtgccacacgcatctctacgt

SEQ ID NO: 46472 - DNA, 60 bp, Artificial
  Synthetic oligonucleotide
ctaacatctcctaaatttacaccaccagtcaaaagtggcaccaccctgcagctccgctgt

SEQ ID NO: 46473 - DNA, 60 bp, Artificial
  Synthetic oligonucleotide
ctgaaaccagctctgatatggaaaacctggctgcagacctccccaagcaaagatgcgcca

SEQ ID NO: 46474 - DNA, 60 bp, Artificial
  Synthetic oligonucleotide
gacatcaggatctctgcaaccatgtggacaggagaacagacacccatcttggcccacaat

SEQ ID NO: 46475 - DNA, 60 bp, Artificial
  Synthetic oligonucleotide
gcaaacagtgtgttttggatgttagttgccttgcctgcttctatggtggagatactgtgg

SEQ ID NO: 46476 - DNA, 60 bp, Artificial
  Synthetic oligonucleotide
gacagcctggagctctccccgtttcaaacctttgacaacaccagccagtctactgcgcct

SEQ ID NO: 46477 - DNA, 60 bp, Artificial
  Synthetic oligonucleotide
ggagagcgtacaggctttgcttccaacttcaagtccaggtacatcagagtcatttgtaga

SEQ ID NO: 46478 - DNA, 60 bp, Artificial
  Synthetic oligonucleotide
gatgttccccaacctgacacctgcggactatgagacttttaccctccctagcggcactgt

SEQ ID NO: 46479 - DNA, 60 bp, Artificial
  Synthetic oligonucleotide
ccaacgtggcccaagctgtgcgcattcgagatgtcactggactgatagaagccctgcagg

SEQ ID NO: 46480 - DNA, 60 bp, Artificial
  Synthetic oligonucleotide
ggaagtcatgagtcaattcaagggcaagcggggtccgtcttttcacataacccaggagga

SEQ ID NO: 46481 - DNA, 60 bp, Artificial
  Synthetic oligonucleotide
gtggaaactcaggggtatacgttagaggaagtggtagagtttggagagatgttggcagac

SEQ ID NO: 46482 - DNA, 59 bp, Artificial
  Synthetic oligonucleotide
catccacgtccacgctcaagtcctcagtgccaactctgtcctgtacgtgaccaaagttg

SEQ ID NO: 46483 - DNA, 57 bp, Artificial
  Synthetic oligonucleotide
ggctgaacagttgtgggccagctactcgacctcaggtcttccgcccagctaggccag

SEQ ID NO: 46484 - DNA, 60 bp, Artificial
  Synthetic oligonucleotide
tcgacctgtgcggatcgttttgggttcccctcccgagctggggcccggatccccgacctc

SEQ ID NO: 46485 - DNA, 60 bp, Artificial
  Synthetic oligonucleotide
gtaaccaagcttgtaggaagagcagaggctccacagcgtggcctgggcgttggatgcggg

SEQ ID NO: 46486 - DNA, 60 bp, Artificial
  Synthetic oligonucleotide
agaactcacggggtcgggaggatgtgggcgtggacggcggtaggaggttgggaagagtcc

SEQ ID NO: 46487 - DNA, 60 bp, Artificial
  Synthetic oligonucleotide
gcctcgcgggcattaagaaggacctagacaacaccatcgactacaatagagacagactgg

SEQ ID NO: 46488 - DNA, 60 bp, Artificial
  Synthetic oligonucleotide
gttgccgcaccgaaaccagcacattgaaacttcccacggagtctaaacacaggtggcact

SEQ ID NO: 46489 - DNA, 60 bp, Artificial
  Synthetic oligonucleotide
cttcccatggacattttctccgctgacgccgggaccgttcgctcaacaccattcacccac

SEQ ID NO: 46490 - DNA, 60 bp, Artificial
  Synthetic oligonucleotide
tcttcatcggaacagtcgtctgccgccccttcttcgcgcacctcatccaggtcgccgacc

SEQ ID NO: 46491 - DNA, 60 bp, Artificial
  Synthetic oligonucleotide
atccgcggcccttctcccgttactttcttgtccgcagcccttgtccaacgtcagttgtcc

SEQ ID NO: 46492 - DNA, 60 bp, Artificial
  Synthetic oligonucleotide
catgttagaaggggaggggcgggttttgacttttaaaagcacaccgcgggaccacggcgg

SEQ ID NO: 46493 - DNA, 60 bp, Artificial
  Synthetic oligonucleotide
ttgactcgcctccggcgtctaccccacctccgccaacccctctccacgacaggcctcttt

SEQ ID NO: 46494 - DNA, 60 bp, Artificial
  Synthetic oligonucleotide
gcgccccgggccagcctagcgtcgcaaacgtctggaagagtctgtggagtttggtttcga

SEQ ID NO: 46495 - DNA, 60 bp, Artificial
  Synthetic oligonucleotide
aaggatgaccccgcgatgcccattcccactcgcccgacgtctccctccgattcaaaagta

SEQ ID NO: 46496 - DNA, 60 bp, Artificial
  Synthetic oligonucleotide
gctgcggtcgtacttgtgtcttttccgtctgcgctactcgcttctcccacctcggtcatg

SEQ ID NO: 46497 - DNA, 60 bp, Artificial
  Synthetic oligonucleotide
tcttgcgctagcacccggtcgggcggccacggcagatttctacgaagtggatccggtata

SEQ ID NO: 46498 - DNA, 60 bp, Artificial
  Synthetic oligonucleotide
agcatctcgactccccggtcccattctccgcgtcgccatccatctgcttagtagcgcccg

SEQ ID NO: 46499 - DNA, 60 bp, Artificial
  Synthetic oligonucleotide
acacggacctctgcaaacacaagcctgcccgagcgatccgcactcccatctcacgttaca

SEQ ID NO: 46500 - DNA, 60 bp, Artificial
  Synthetic oligonucleotide
acgtgccatacaggttactggtggtggggttgaaatagcgcacggacgaattgcctgctg

SEQ ID NO: 46501 - DNA, 60 bp, Artificial
  Synthetic oligonucleotide
gacagccacggcgttgcacatatctgccggaatcgccaatcccgtcgtagaagcacaacc

SEQ ID NO: 46502 - DNA, 60 bp, Artificial
  Synthetic oligonucleotide
cataacccgcggataacggtactggtcagggaagcaacgcagcgcagacacgacccgata

SEQ ID NO: 46503 - DNA, 60 bp, Artificial
  Synthetic oligonucleotide
ctgcacggccgcatagaccacgtcgtacaattcgcccatcagcatttccagattatacgc

SEQ ID NO: 46504 - DNA, 60 bp, Artificial
  Synthetic oligonucleotide
gtgcagtgaggttcccgcatatgtttgcgcgtcatcaatcgctctcgccagtatcgccac

SEQ ID NO: 46505 - DNA, 56 bp, Artificial
  Synthetic oligonucleotide
cgtgaaccgaaccgacccgccgctcattgtccctcaagcctcagaactccgcccta

SEQ ID NO: 46506 - DNA, 60 bp, Artificial
  Synthetic oligonucleotide
cactatctcgggcggcggcaaacccctctgagctcttgtccatcctgtccttatcgtgca

SEQ ID NO: 46507 - DNA, 60 bp, Artificial
  Synthetic oligonucleotide
gggcgagccccgtgtcaaatgcaggctttggacagtgttccccatatccgtcgtagcgtt

SEQ ID NO: 46508 - DNA, 60 bp, Artificial
  Synthetic oligonucleotide
gttccaacagccgccgcaacggaatgaacgtgccaaggctctcgataaacgtcggactcg

SEQ ID NO: 46509 - DNA, 60 bp, Artificial
  Synthetic oligonucleotide
agtctgaacgttgtggcgggtctgtggaggtccctgttgtatgggtgccgggagtagtgt

SEQ ID NO: 46510 - DNA, 60 bp, Artificial
  Synthetic oligonucleotide
gaggtctgcagattctccggctcgcgaaaccgccattcccgtagaatcaatgaacgcgct

SEQ ID NO: 46511 - DNA, 60 bp, Artificial
  Synthetic oligonucleotide
ctggcgcgggacactgtcttcataggattgtttgcatcgaccctccatgtacagcaacca

SEQ ID NO: 46512 - DNA, 60 bp, Artificial
  Synthetic oligonucleotide
tcgaatctagctgccgcccgtagtcccaaagccgtgatatagtgagtgtggtcgcgcgat

SEQ ID NO: 46513 - DNA, 60 bp, Artificial
  Synthetic oligonucleotide
tttccctcagaatgcgtgaccctcattcagcacccggcaagagcccgctgtcgaaaaggc

SEQ ID NO: 46514 - DNA, 60 bp, Artificial
  Synthetic oligonucleotide
gccacgctcgttatcgctcgctttaccgcagatagtgcccgaaccctgcttcaatgtccc

SEQ ID NO: 46515 - DNA, 60 bp, Artificial
  Synthetic oligonucleotide
gtagcaaagggtatgacgcacagggattcgggcagaaaggagagcggcgcggcatggtat

SEQ ID NO: 46516 - DNA, 60 bp, Artificial
  Synthetic oligonucleotide
tctctttcctgctcgccgcactcgccaaccgcctctgcctaccggagagcgccgcctggg

SEQ ID NO: 46517 - DNA, 60 bp, Artificial
  Synthetic oligonucleotide
gacggccgcagttgcaatctgtcacgcgccaatggaaactttcaagcgacggcgattcgc

SEQ ID NO: 46518 - DNA, 60 bp, Artificial
  Synthetic oligonucleotide
taactgacgcaacaatccgccgcgaacaacggtccacatcaaatttctacgtagccggtt

SEQ ID NO: 46519 - DNA, 60 bp, Artificial
  Synthetic oligonucleotide
tccagcatatcgccgtaagatttacagacattcctccctccccacccaaccgaacactgc

SEQ ID NO: 46520 - DNA, 60 bp, Artificial
  Synthetic oligonucleotide
cccgggacatgaggtatcaagagtatgtgtagtgcgccagagggaacgtaggctgccggt

SEQ ID NO: 46521 - DNA, 60 bp, Artificial
  Synthetic oligonucleotide
ttcgctaatatcgcggcagcatcgacactccaaccgccctcgcatccctctacctgcttg

SEQ ID NO: 46522 - DNA, 60 bp, Artificial
  Synthetic oligonucleotide
cgcccatctgcagcataaccgatataagtgccaccttccagacacgttgaaatcggccgt

SEQ ID NO: 46523 - DNA, 60 bp, Artificial
  Synthetic oligonucleotide
gcacgccctgaccctataaccattacacgccccgccctaattccgagagaccttaacccc

SEQ ID NO: 46524 - DNA, 60 bp, Artificial
  Synthetic oligonucleotide
gacgcttgtgcatacgggcatgaccaatccgaggctgggaggcgtagttcctgtgctgtt

SEQ ID NO: 46525 - DNA, 60 bp, Artificial
  Synthetic oligonucleotide
tttcgtaccgcatgccggcgcttgtagatctcgccattgccgccgcgaccgtcttgctat

SEQ ID NO: 46526 - DNA, 60 bp, Artificial
  Synthetic oligonucleotide
accacggcaccggcggcacccacaacgaccttccctatggcctgaccgacttgccccata

SEQ ID NO: 46527 - DNA, 60 bp, Artificial
  Synthetic oligonucleotide
gcttccgccgcaacgacaaaggccgcgcttaacgatcgcttgcatacgcgctttaccatg

SEQ ID NO: 46528 - DNA, 60 bp, Artificial
  Synthetic oligonucleotide
cgccgggactcatgcgatctctccaccgccccagatgagcgcacaatcgccaaccgagat

SEQ ID NO: 46529 - DNA, 60 bp, Artificial
  Synthetic oligonucleotide
tcgccctccacatctctctcgcctgtttatcgcaaaagcgccgcaatgggaaagagccgg

SEQ ID NO: 46530 - DNA, 60 bp, Artificial
  Synthetic oligonucleotide
gtctagctctgcgctcgtaagttcggtttgcggtcggtcgctatccattttccctcgccc

SEQ ID NO: 46531 - DNA, 60 bp, Artificial
  Synthetic oligonucleotide
ctcccgacggggctctcgttcggcgatcgcttatcctctgccgccaccttgcgtccgttc

SEQ ID NO: 46532 - DNA, 60 bp, Artificial
  Synthetic oligonucleotide
ccccagagctcctcgcgctagatccttattgtgccaaaacagatatctggagtgccgggc

SEQ ID NO: 46533 - DNA, 60 bp, Artificial
  Synthetic oligonucleotide
acccctacgtcgtttatcagtgccgagcgtgtctgtgaccatggggccgttttgagaggg

SEQ ID NO: 46534 - DNA, 60 bp, Artificial
  Synthetic oligonucleotide
gggaattgcggtgagaaagtacaagttcgagcgccccagcaccatgttacttcatgcgac

SEQ ID NO: 46535 - DNA, 60 bp, Artificial
  Synthetic oligonucleotide
gcgccccttctgcctctcctcgatcccgactgctgcgtaggtagattgctcgttatgtgt

SEQ ID NO: 46536 - DNA, 60 bp, Artificial
  Synthetic oligonucleotide
tgattccttgggcggggatccttgtgcgctgtcttgctctgtatgcgccgacccaaagcc

SEQ ID NO: 46537 - DNA, 60 bp, Artificial
  Synthetic oligonucleotide
gcttctgtgcacacttgtccaacaaccatttccccgcggctgtcattttctacgctgatg

SEQ ID NO: 46538 - DNA, 60 bp, Artificial
  Synthetic oligonucleotide
gccaggcagctcgccagtgacagctctttcttaattagtagcggagaagacacggattca

SEQ ID NO: 46539 - DNA, 54 bp, Artificial
  Synthetic oligonucleotide
gtccgtcaattcacccaccgcttcatacatcctcgttcctatccctcccgccaa

SEQ ID NO: 46540 - DNA, 60 bp, Artificial
  Synthetic oligonucleotide
gccaatgctgtttctgtgtttccgggctacgagaatttccagactgttttaccggggagg

SEQ ID NO: 46541 - DNA, 60 bp, Artificial
  Synthetic oligonucleotide
caccagatgtaccagttgaaccacccagatctatccctacaaccaacgcaccttcacccg

SEQ ID NO: 46542 - DNA, 60 bp, Artificial
  Synthetic oligonucleotide
cattggcttcgatgtcgcccaccatttgagcgtcccacatgccaaggtcttcaaggtcct

SEQ ID NO: 46543 - DNA, 60 bp, Artificial
  Synthetic oligonucleotide
atgacacaaccgcatcggccatgaaagaattgggacgtgttgcatcagtgagagtgccca

SEQ ID NO: 46544 - DNA, 60 bp, Artificial
  Synthetic oligonucleotide
gcctttggcgtgcttgccagaagatttcaggctccacccagcacacctgacaccatcctc

SEQ ID NO: 46545 - DNA, 60 bp, Artificial
  Synthetic oligonucleotide
gatggcgcaggagatagataaacaccaccccgatgtatacacagatgtaatggccaccag

SEQ ID NO: 46546 - DNA, 60 bp, Artificial
  Synthetic oligonucleotide
gaggctggaaccgatgaaactacgttagataagaccattacccaaacagactcaacatgt

SEQ ID NO: 46547 - DNA, 60 bp, Artificial
  Synthetic oligonucleotide
tcacgttctcatcaaagcaggctacgcacatttcttcgctgattattttgaccgtggaca

SEQ ID NO: 46548 - DNA, 60 bp, Artificial
  Synthetic oligonucleotide
tcgttcacccgctcgtctctcttccgccgcctctcgccaatgcgtccaccaaccttcatt

SEQ ID NO: 46549 - DNA, 60 bp, Artificial
  Synthetic oligonucleotide
tcaggacttcccttcgtcgccaccaagtcaaagagaactttattcatcgacacagacagg

SEQ ID NO: 46550 - DNA, 60 bp, Artificial
  Synthetic oligonucleotide
tcgcgtccttccatgattgtaatacattgacccaatccttgcaagcgcctggctcagagt

SEQ ID NO: 46551 - DNA, 60 bp, Artificial
  Synthetic oligonucleotide
ccctgccaaagatgttgaatcggcgctcgtttacctaaaggggaggaaagattgcacctc

SEQ ID NO: 46552 - DNA, 60 bp, Artificial
  Synthetic oligonucleotide
tgtatagacgaagaccaaccccacaacaaagcttctatgaagcccaatcgctccctcgcc

SEQ ID NO: 46553 - DNA, 60 bp, Artificial
  Synthetic oligonucleotide
caccccgactcgcatgattacgatgcagacaatagtgaaccgaaatcagtggaggagtgt

SEQ ID NO: 46554 - DNA, 60 bp, Artificial
  Synthetic oligonucleotide
gcaaagataggtgttccagaagacgaggaaggcaacaggatagaaatggcgcagagattt

SEQ ID NO: 46555 - DNA, 60 bp, Artificial
  Synthetic oligonucleotide
cggacatcctccctgtcacgtgttaccaatgacgtctcgccagtaaccctgtcgaccctc

SEQ ID NO: 46556 - DNA, 60 bp, Artificial
  Synthetic oligonucleotide
aaccgccgctcctgctgccacatctaatgagaaggctgagaatggtgctgaaaaggaagc

SEQ ID NO: 46557 - DNA, 60 bp, Artificial
  Synthetic oligonucleotide
ttaccagcaggacctcaccatacctctctcatagcgtgcagtattccagaaagaccggcc

SEQ ID NO: 46558 - DNA, 60 bp, Artificial
  Synthetic oligonucleotide
atatcttcccaaatcagccgccgccagaaagaaggccagatcgacatctacagtaatcga

SEQ ID NO: 46559 - DNA, 60 bp, Artificial
  Synthetic oligonucleotide
gcgggttgttatgcactctaacgggacatagttcaaatccatcactggctgcacattctc

SEQ ID NO: 46560 - DNA, 60 bp, Artificial
  Synthetic oligonucleotide
ccgtgcttgagcctatgggaggtgatgactaataacgggattttaacacggggctgcgca

SEQ ID NO: 46561 - DNA, 60 bp, Artificial
  Synthetic oligonucleotide
accagcccgcgttaagacattggtctccacaatacacatgatcctagataattccctgcc

SEQ ID NO: 46562 - DNA, 60 bp, Artificial
  Synthetic oligonucleotide
ccaagatggctgctgttgctctgacgtacatgattccacctgccacgcctctcgcaatta

SEQ ID NO: 46563 - DNA, 60 bp, Artificial
  Synthetic oligonucleotide
taaaccgccaaagaaaggctgagaaatccattacagacgaacgcaaatcggcggcagtga

SEQ ID NO: 46564 - DNA, 60 bp, Artificial
  Synthetic oligonucleotide
cgtcaggccaatgattgccgatgacaacctcgagaaactcaccaatatgtccgccagttc

SEQ ID NO: 46565 - DNA, 60 bp, Artificial
  Synthetic oligonucleotide
ccctctatcccctgcatcccttccctggccgtaaacaacaacacccatgatagcggcggt

SEQ ID NO: 46566 - DNA, 60 bp, Artificial
  Synthetic oligonucleotide
gcgtctttatggtctgtttctgcctttcgtgttcctcttcgtcgtaatccgagtcccacg

SEQ ID NO: 46567 - DNA, 60 bp, Artificial
  Synthetic oligonucleotide
taatgggtggtggtgctgttgctctcgcagggaaggcgtaattcgtagtcttgctagtac

SEQ ID NO: 46568 - DNA, 60 bp, Artificial
  Synthetic oligonucleotide
cgatcatcttgacctgcccctcatgtgtgatcatcatctccgtgattttattagtggcca

SEQ ID NO: 46569 - DNA, 60 bp, Artificial
  Synthetic oligonucleotide
gcaaccaacccagaacgttcccgcataatctttcttgtctctctcatcttcttgtgttag

SEQ ID NO: 46570 - DNA, 60 bp, Artificial
  Synthetic oligonucleotide
gattggctgaatacgcacacacctacggaggggaggagcaaagaacaccttcgccacccg

SEQ ID NO: 46571 - DNA, 60 bp, Artificial
  Synthetic oligonucleotide
cccaatttagccgcgatacagcttctggcattgtgtgtaccgactgagccgaacatgttg

SEQ ID NO: 46572 - DNA, 60 bp, Artificial
  Synthetic oligonucleotide
gcagcctttcacagaattttgcaccttgaccaaagccatcacatcagccagcaacgactt

SEQ ID NO: 46573 - DNA, 60 bp, Artificial
  Synthetic oligonucleotide
tgaaacggcctatgggagagtctctttcgatcatgatggatcttgaaccacgtgcagcct

SEQ ID NO: 46574 - DNA, 60 bp, Artificial
  Synthetic oligonucleotide
gcgaggaggtggaattgatagatggtcgacattggacactgccaaatgccaggggatgtc

SEQ ID NO: 46575 - DNA, 60 bp, Artificial
  Synthetic oligonucleotide
cacacaaccttccccaataccatctcaaccacccgttaacattataccaacccaggtgcc

SEQ ID NO: 46576 - DNA, 60 bp, Artificial
  Synthetic oligonucleotide
ggcaccataggatccgacacaatacccaacactgcactgaccccagagagcctgtcagtc

SEQ ID NO: 46577 - DNA, 60 bp, Artificial
  Synthetic oligonucleotide
gcagcaaaagaccaattgtgacaccggctattccaccacctgttccgaattttgtcaacc

SEQ ID NO: 46578 - DNA, 60 bp, Artificial
  Synthetic oligonucleotide
gatgtgcatccctgccgtagctctccgtaattttcaatggcgatgcatttggtctgctct

SEQ ID NO: 46579 - DNA, 60 bp, Artificial
  Synthetic oligonucleotide
ccaaattgacacggctcaagtggacactcttggccagggatgtattacacctccacgaca

SEQ ID NO: 46580 - DNA, 60 bp, Artificial
  Synthetic oligonucleotide
tttgacacacccctcgccgtcatcttcacccttgaacttcctgccgcaggtggcgcatct

SEQ ID NO: 46581 - DNA, 60 bp, Artificial
  Synthetic oligonucleotide
atcaaccagagctcatggccgacgaagaggaattgcaaagagccacggaacaagttgtgg

SEQ ID NO: 46582 - DNA, 60 bp, Artificial
  Synthetic oligonucleotide
tcgagccaacctgcatgacaacattgccggaaattgctgtagacctcatcaataaggccc

SEQ ID NO: 46583 - DNA, 60 bp, Artificial
  Synthetic oligonucleotide
tcacacctagctgcacccacttgacaacatccatacatatcgtcatccagggtctctccg

SEQ ID NO: 46584 - DNA, 60 bp, Artificial
  Synthetic oligonucleotide
cactgccaccccggcgccaattcctataatcgtccaatgatatcccggtgccagatcagg

SEQ ID NO: 46585 - DNA, 60 bp, Artificial
  Synthetic oligonucleotide
gcgcctacggtgggtcatggggattgttatccgagagcagaccattggcagatgcggcaa

SEQ ID NO: 46586 - DNA, 60 bp, Artificial
  Synthetic oligonucleotide
tgttatctctcatgccatcacgtagacggtgtccctattttaggagcagggcgtctccgg

SEQ ID NO: 46587 - DNA, 60 bp, Artificial
  Synthetic oligonucleotide
cagttgacctgccccgactgccgctaccccgaagaccgcccgatggtgctcgtgggcttc

SEQ ID NO: 46588 - DNA, 60 bp, Artificial
  Synthetic oligonucleotide
ggcgcctgggagaacgtgaccgccgccgagaagggcctgtccgacgactacgccgactac

SEQ ID NO: 46589 - DNA, 60 bp, Artificial
  Synthetic oligonucleotide
gccctcccgcgctctctttcccacacacaacaagaggctcgccctcgttccatcatctcg

SEQ ID NO: 46590 - DNA, 60 bp, Artificial
  Synthetic oligonucleotide
atggaatggcacacgggccgcaaagtgggacgatggggacgggcctcaacgcgggacgag

SEQ ID NO: 46591 - DNA, 60 bp, Artificial
  Synthetic oligonucleotide
gcgccgcgcttcgaccagaccacgcgggactgcctcgcgctcaacgagctctgccgcccg

SEQ ID NO: 46592 - DNA, 60 bp, Artificial
  Synthetic oligonucleotide
tgtacaacgcgcagtttgtggcgctgatgcccaccgtgtcctcgtcgcaggtcaccgaga

SEQ ID NO: 46593 - DNA, 60 bp, Artificial
  Synthetic oligonucleotide
gcgtcagcgcgagctccccgccgtccctatcgtacagggccaggtagccggacacgtaca

SEQ ID NO: 46594 - DNA, 60 bp, Artificial
  Synthetic oligonucleotide
acgcggaccaggtggtggcccaggacgtgttcatgtccctgcgctacgagtgggaccagg

SEQ ID NO: 46595 - DNA, 60 bp, Artificial
  Synthetic oligonucleotide
tcgacggccaatgggatttctctcgcccacttcctctcgcgtctactttgcatgtccggc

SEQ ID NO: 46596 - DNA, 60 bp, Artificial
  Synthetic oligonucleotide
actacacgctcgtcgccaccgcggccgagtacgtcacggtcatcaaggagctgacggccc

SEQ ID NO: 46597 - DNA, 60 bp, Artificial
  Synthetic oligonucleotide
tcgtggccttcttcggcgggctcaagcacacgtgcccggaggcgtaccacagcgtcatcg

SEQ ID NO: 46598 - DNA, 60 bp, Artificial
  Synthetic oligonucleotide
tacttgctctcgatgcgccccacgaacttggcgggcaggcgcgggtagacggcgtcgctg

SEQ ID NO: 46599 - DNA, 60 bp, Artificial
  Synthetic oligonucleotide
ggagagggacggaggggagagggacgcgagacgtgttgccaaacaagcgcatctttattg

SEQ ID NO: 46600 - DNA, 60 bp, Artificial
  Synthetic oligonucleotide
atcgcacacacaacacccgcgcgcatgctcggcttcttcacacggaggacaccatgggca

SEQ ID NO: 46601 - DNA, 60 bp, Artificial
  Synthetic oligonucleotide
gcgcgcggcgtccgagaggctgcccgagcccgtcgagaacatgacccggctcttgacacg

SEQ ID NO: 46602 - DNA, 60 bp, Artificial
  Synthetic oligonucleotide
ccgaccgccagcacaaagatccacacgagggcgcgggcgtacagcgggaagacgagggcg

SEQ ID NO: 46603 - DNA, 60 bp, Artificial
  Synthetic oligonucleotide
agcgaccgggaatcccctctcatgaccagctccacccatcgtcacatgcccgctcgctca

SEQ ID NO: 46604 - DNA, 60 bp, Artificial
  Synthetic oligonucleotide
acctcgacgtccccgcagtggaagacggacctgaagactgcaaccgccagcaccagctcg

SEQ ID NO: 46605 - DNA, 60 bp, Artificial
  Synthetic oligonucleotide
agtcgctggccgtgctcaacgtgatcctccccgccccgctcgccgccgaggacgtgatgg

SEQ ID NO: 46606 - DNA, 60 bp, Artificial
  Synthetic oligonucleotide
ctacgaggcgaccgtcccgcacacccacgcctacgccggcagcatcgcgctcttcgccct

SEQ ID NO: 46607 - DNA, 58 bp, Artificial
  Synthetic oligonucleotide
ctcgggcctcttccgcgtgctgttcctggacgccgtgcggttcgtgcgcatgctcccc

SEQ ID NO: 46608 - DNA, 60 bp, Artificial
  Synthetic oligonucleotide
aagccagatgaacctgttccgcccgctctcccaccgcctttccctcccctccacgacgac

SEQ ID NO: 46609 - DNA, 60 bp, Artificial
  Synthetic oligonucleotide
tcagggcggcctccacgccgttcgtgaagaccaggcgcaggaaggagagggaggagcgca

SEQ ID NO: 46610 - DNA, 60 bp, Artificial
  Synthetic oligonucleotide
tacgatcgcacccagaagaccttcatcctgcagagcctccgccgggcctacgccgacatg

SEQ ID NO: 46611 - DNA, 60 bp, Artificial
  Synthetic oligonucleotide
cccgagaccacgagcgaggtgtacgcgcagttcctgatgctcaagacgctcttcgccgac

SEQ ID NO: 46612 - DNA, 60 bp, Artificial
  Synthetic oligonucleotide
tgatcctggcctcgacgcacagcaccggcatgagcctctcggcgctcgacgacatcaagc

SEQ ID NO: 46613 - DNA, 60 bp, Artificial
  Synthetic oligonucleotide
tgcaggactcggcgctcgtgggcaagctcttcttcaagttcctgccgcacctcgagctct

SEQ ID NO: 46614 - DNA, 60 bp, Artificial
  Synthetic oligonucleotide
ttctcgggacggggtcgaggcggcggaggaggacgcggacgcgggctcggagtccgatgt

SEQ ID NO: 46615 - DNA, 60 bp, Artificial
  Synthetic oligonucleotide
cgaccagcccgtgcacaactacatgatcaagcgcctcgatcgccgctccctcaacgccgc

SEQ ID NO: 46616 - DNA, 60 bp, Artificial
  Synthetic oligonucleotide
cccacggtcacggacacgagctcctgcgaggccatgacggcgcccgagttgaactgcttg

SEQ ID NO: 46617 - DNA, 60 bp, Artificial
  Synthetic oligonucleotide
caaagcagagcgagagcaccccacacccgcacgcactccccggtgtcgccccttttcccc

SEQ ID NO: 46618 - DNA, 60 bp, Artificial
  Synthetic oligonucleotide
agtccttgtgcacggccacctctccgagctccttcagggccgcctcatttaagggctctc

SEQ ID NO: 46619 - DNA, 60 bp, Artificial
  Synthetic oligonucleotide
ccaccgccaatccctgggcctcgcagcggcactcgtacgcggaccggctctacaacggcc

SEQ ID NO: 46620 - DNA, 57 bp, Artificial
  Synthetic oligonucleotide
tggtacacggacaccatgtccggcccgtagttcatgggtttcacgtaggcgaacatg

SEQ ID NO: 46621 - DNA, 53 bp, Artificial
  Synthetic oligonucleotide
gtgtagtccagcaggccgctgtccttgatctcctggcgggtgtacacctccag

SEQ ID NO: 46622 - DNA, 60 bp, Artificial
  Synthetic oligonucleotide
acctccgtgtagtccagcaggccgctgtccttgatctcgtggcgggtgtacacctccagg

SEQ ID NO: 46623 - DNA, 60 bp, Artificial
  Synthetic oligonucleotide
ttctttcgtgccgtccagaccgcctagcttggagcccgtgcctggcttgcccctgccgcc

SEQ ID NO: 46624 - DNA, 60 bp, Artificial
  Synthetic oligonucleotide
catcgacgtcaacaccctcttccgctgcatcgccaccggctccgcgttcgtcacggccga

SEQ ID NO: 46625 - DNA, 60 bp, Artificial
  Synthetic oligonucleotide
tgtgtctcgagcgaaggaaggcccagaggaccccggctaccacacgagggttgaggttat

SEQ ID NO: 46626 - DNA, 60 bp, Artificial
  Synthetic oligonucleotide
taaatgcgccgcgtgtcagcctttctatcgcattctcctgcgccgcctgcccgtatgaga

SEQ ID NO: 46627 - DNA, 60 bp, Artificial
  Synthetic oligonucleotide
actcctcgcccaacccgccgcagacgaaggccgagttccggacgccgtatcgcacgacgt

SEQ ID NO: 46628 - DNA, 60 bp, Artificial
  Synthetic oligonucleotide
atgttcaccctgctgcacgatcactacaccacgcacgtcttccgcggcctgctctcgctg

SEQ ID NO: 46629 - DNA, 60 bp, Artificial
  Synthetic oligonucleotide
agaggtcgcgctcgcccgaggtcagcacgccccgcttcgctctgccgtcggggcccgttc

SEQ ID NO: 46630 - DNA, 60 bp, Artificial
  Synthetic oligonucleotide
gtcgtgatcggcaaggggtccttcgggcaggtgtggaggctgggagacgggcggacggcg

SEQ ID NO: 46631 - DNA, 60 bp, Artificial
  Synthetic oligonucleotide
ttggacgatagagtcagcggttcgctcacggcagggaccacgcaactgggcacgagaaaa

SEQ ID NO: 46632 - DNA, 60 bp, Artificial
  Synthetic oligonucleotide
aggacgatcgcctcacgccccgcgtgctcttccactgcgtccccatcgaccgccggggac

SEQ ID NO: 46633 - DNA, 60 bp, Artificial
  Synthetic oligonucleotide
acatcctgcaccgcacgagggccttctaccgcctgggcctgaccccgaggacgtccgcca

SEQ ID NO: 46634 - DNA, 60 bp, Artificial
  Synthetic oligonucleotide
tcgagctgtacggcgtgaggcaccgggagcccgagatcatgttcgccaccaacccgacgt

SEQ ID NO: 46635 - DNA, 60 bp, Artificial
  Synthetic oligonucleotide
tgcaggcgtccgaagcgaccctgaaggacctgacggcggagatcaacgcgaacctgagga

SEQ ID NO: 46636 - DNA, 60 bp, Artificial
  Synthetic oligonucleotide
acagcagcgtgtccgtgtcgaaggtgtccgtcctcaccgccgtcagcgcgaacccgggat

SEQ ID NO: 46637 - DNA, 60 bp, Artificial
  Synthetic oligonucleotide
gaagcggaaccgtggcggcgggactagcgggaggagggtgtgcagcggtggggctgataa

SEQ ID NO: 46638 - DNA, 60 bp, Artificial
  Synthetic oligonucleotide
tgccgtccagcaggcaggtggcgacgcactcctccccgtgccgggcgcagtcgaactcga

SEQ ID NO: 46639 - DNA, 60 bp, Artificial
  Synthetic oligonucleotide
tgatagacttgacacgcggcgcccggatcgccacctcgcccaggtcctgctccaccgtct

SEQ ID NO: 46640 - DNA, 60 bp, Artificial
  Synthetic oligonucleotide
cgccctgatcctcaccaagcacgccggggcccagaggttccccgccgccgaggaccactg

SEQ ID NO: 46641 - DNA, 60 bp, Artificial
  Synthetic oligonucleotide
cgaagctgacgaagcgggcgagggagaaggagtcggacgggttgcgggagatgtactggg

SEQ ID NO: 46642 - DNA, 60 bp, Artificial
  Synthetic oligonucleotide
gcaacgccctgagcatcgccgccgcgtcctccccggagtacgccttgccgctaccctttt

SEQ ID NO: 46643 - DNA, 60 bp, Artificial
  Synthetic oligonucleotide
acttaaagtctctatccagcgcctccagcacggtccggtcgcccagccccgggacgcgga

SEQ ID NO: 46644 - DNA, 60 bp, Artificial
  Synthetic oligonucleotide
tcacgtgtgtgagaagcacgaggccagcgaccgcgcatacgaacgcaatgctaccgatga

SEQ ID NO: 46645 - DNA, 60 bp, Artificial
  Synthetic oligonucleotide
tcgaagcgcaggctccgttgcgtccggatctcgaagaacttctcggtcgggtgtggcgcc

SEQ ID NO: 46646 - DNA, 60 bp, Artificial
  Synthetic oligonucleotide
ccccgagaagacaccaggcgcaacggagttttcccgacaccgctttccaacacgatagga

SEQ ID NO: 46647 - DNA, 60 bp, Artificial
  Synthetic oligonucleotide
ggttggccaactacctgcgcgacgagctgacgaagcggtgcagcgaggggtcccggctca

SEQ ID NO: 46648 - DNA, 60 bp, Artificial
  Synthetic oligonucleotide
cgctacagtcgacccggttccaatgacagagcttttagctgcactcgcttcgtcttcata

SEQ ID NO: 46649 - DNA, 60 bp, Artificial
  Synthetic oligonucleotide
ccgagcgggcgtgaggcgagcagaccgaccagcgctctaggaagcgacagtacagctcgt

SEQ ID NO: 46650 - DNA, 60 bp, Artificial
  Synthetic oligonucleotide
acaacgaggccttcgcccgctactgcgactccatgggcccggacgtgaccccgccgacgc

SEQ ID NO: 46651 - DNA, 60 bp, Artificial
  Synthetic oligonucleotide
gtcttttgagagcgttcactggagccacaccccgttcccaacccgtgtcacaggcgcccc

SEQ ID NO: 46652 - DNA, 60 bp, Artificial
  Synthetic oligonucleotide
agcgcgttctgctccgactcccgtccccgtctggactgcgacaccaccctcttcctcgag

SEQ ID NO: 46653 - DNA, 60 bp, Artificial
  Synthetic oligonucleotide
cccctacatgctgccgcccaagagcgtcgccgggtcgatgggtctgaaccccgccgtcat

SEQ ID NO: 46654 - DNA, 60 bp, Artificial
  Synthetic oligonucleotide
ttcaccgaccggggaccgctcccgcacaccggctgcacgttccgcctggggaccgcgagg

SEQ ID NO: 46655 - DNA, 60 bp, Artificial
  Synthetic oligonucleotide
cgcgcgaggcgggagctgggcttctcggccacggtgctgacggggaacgacgtgcgcttc

SEQ ID NO: 46656 - DNA, 60 bp, Artificial
  Synthetic oligonucleotide
cccgccgccagtgcccgccgacgcacaggtgataggggaccagcttctcgccgtggaact

SEQ ID NO: 46657 - DNA, 60 bp, Artificial
  Synthetic oligonucleotide
ttcgactggcacttgttcgcgaagcagcggctccagagcgtcgcccacacgttcccgccc

SEQ ID NO: 46658 - DNA, 60 bp, Artificial
  Synthetic oligonucleotide
gagcctgttccgcaccgcagagttctatgatttcctcgttaccacacgccctgacccgac

SEQ ID NO: 46659 - DNA, 60 bp, Artificial
  Synthetic oligonucleotide
tgtaccgggtgagcatcgacatcgcgcaccagcacctgaccctgacggccacgtgcgtgc

SEQ ID NO: 46660 - DNA, 60 bp, Artificial
  Synthetic oligonucleotide
cggccctttctgttagcgaccagtcaccccaaaactccgacgcacacactcgtttaaagg

SEQ ID NO: 46661 - DNA, 60 bp, Artificial
  Synthetic oligonucleotide
acagatcacgccggacacctcgtctctcgccctcgcctctttattgtcctctcccacaca

SEQ ID NO: 46662 - DNA, 60 bp, Artificial
  Synthetic oligonucleotide
tgacgggtatagtgtccctggcgctgaacgggaggatctcgggcacgggcagcttgtcgg

SEQ ID NO: 46663 - DNA, 60 bp, Artificial
  Synthetic oligonucleotide
ggcaagcccttcttcatccccacgccgcctttcaggtcctcgacggctcatatgcaaaac

SEQ ID NO: 46664 - DNA, 60 bp, Artificial
  Synthetic oligonucleotide
tgtagtggcgcaggcccgtcgtgtccgtctctgtgccctcaaagtggggacccagcgcgc

SEQ ID NO: 46665 - DNA, 60 bp, Artificial
  Synthetic oligonucleotide
aatgtccttccagtacacggcgcccggcacgtcctgcggtccccagatcctgcccgtgaa

SEQ ID NO: 46666 - DNA, 60 bp, Artificial
  Synthetic oligonucleotide
aagattgtggccaagacgccgcctgctcgccgcgacgctctgccccgccgcatccaggag

SEQ ID NO: 46667 - DNA, 60 bp, Artificial
  Synthetic oligonucleotide
acgtcgaggccaccaaccagtgctccgacttctcacccgccgtctacacctcctgcaaca

SEQ ID NO: 46668 - DNA, 60 bp, Artificial
  Synthetic oligonucleotide
agcagcctcaagttcctggcctcgatgcactgcctctacaagacgccgcgctggagcttc

SEQ ID NO: 46669 - DNA, 60 bp, Artificial
  Synthetic oligonucleotide
atgcccctggaccacgcaccgccgcccgtgaccgaggacgcgctggccaagtacgtcgag

SEQ ID NO: 46670 - DNA, 60 bp, Artificial
  Synthetic oligonucleotide
cgtacccagacgccgtcatcttcaagaccatccaaccctctcccaaccccacatcagcca

SEQ ID NO: 46671 - DNA, 60 bp, Artificial
  Synthetic oligonucleotide
cgcagggaccgtttgacgcctcgccgcctgtgcgacgtgctgcgggccttctccttcttc

SEQ ID NO: 46672 - DNA, 60 bp, Artificial
  Synthetic oligonucleotide
tggtgatcgatgaggcggacgaggaggccccagcaacgcagacggccgtggaggttgagg

SEQ ID NO: 46673 - DNA, 60 bp, Artificial
  Synthetic oligonucleotide
ccacatcgcgggagccaggttccaccaccgccctaggtagctcgccgttgccgcacttga

SEQ ID NO: 46674 - DNA, 60 bp, Artificial
  Synthetic oligonucleotide
cgtcaacgcgtcgaccgtcgtgagcacaccacaacccgctgtaccctccacatcaaccca

SEQ ID NO: 46675 - DNA, 60 bp, Artificial
  Synthetic oligonucleotide
tgtcgtgcaccggaggcctgatcctcgactgtccccagaacgccgtctcgccctcggaca

SEQ ID NO: 46676 - DNA, 60 bp, Artificial
  Synthetic oligonucleotide
aatggcgcccgctcccggagcccagtctgtgcccgacaaccccgctctcaacagctacct

SEQ ID NO: 46677 - DNA, 60 bp, Artificial
  Synthetic oligonucleotide
ttcgggatcgtagcggatgagcagtgaggtgaggcaggagcggctggactcgatggcgtc

SEQ ID NO: 46678 - DNA, 60 bp, Artificial
  Synthetic oligonucleotide
agaatagtgagcatcgcgcgggaggtggagagggagcagcacgtcgtccgtcccgtccct

SEQ ID NO: 46679 - DNA, 60 bp, Artificial
  Synthetic oligonucleotide
ggtcgtagggtgcaaagccgcgtctgacagtgtcccatctcttggcagccaggtcacaca

SEQ ID NO: 46680 - DNA, 60 bp, Artificial
  Synthetic oligonucleotide
tagccgctgccgcttgggtcggggatgcgccagctcttgcctgatctccttctccaccgt

SEQ ID NO: 46681 - DNA, 60 bp, Artificial
  Synthetic oligonucleotide
agcgccaccagcaagccttcatgggtcctgccaacgacgcctacctcctgagagagtgga

SEQ ID NO: 46682 - DNA, 60 bp, Artificial
  Synthetic oligonucleotide
gctcccgtgtcggcctcgacgcctcaccaccacggcggccaccaccacttacagcagcac

SEQ ID NO: 46683 - DNA, 60 bp, Artificial
  Synthetic oligonucleotide
tcaacaggctgctcaccgtcctcgcacccgtcagacccgacgtctccatgcccgccagtc

SEQ ID NO: 46684 - DNA, 60 bp, Artificial
  Synthetic oligonucleotide
acaggtcgcacgtcgtgtttcagcaggacccgtcgcgccagagcatggacaccttctccc

SEQ ID NO: 46685 - DNA, 60 bp, Artificial
  Synthetic oligonucleotide
agggccgccgactcctccggtgtgaacttgaactctgcgtccccgacggcgccaaagtct

SEQ ID NO: 46686 - DNA, 60 bp, Artificial
  Synthetic oligonucleotide
actctcacgcgcaggccgccgtcaggcagccagggttcgtcgagaccatcatcggcagac

SEQ ID NO: 46687 - DNA, 60 bp, Artificial
  Synthetic oligonucleotide
gctcgacgcactggaccaagctagacgcctcggccgtcgctgccctgatgaaagccttcc

SEQ ID NO: 46688 - DNA, 60 bp, Artificial
  Synthetic oligonucleotide
gtcgccttacaccctctctgagcccagtccagccacttgcgaccgacttcgtcatcaaag

SEQ ID NO: 46689 - DNA, 60 bp, Artificial
  Synthetic oligonucleotide
ttgtgggagctgagggtggcggaggggatgaaggagccatggacaccggtgccgctgcgg

SEQ ID NO: 46690 - DNA, 60 bp, Artificial
  Synthetic oligonucleotide
agccgccgcagaacccgcagccccgtcccctccggttgcagtcatgtttacatctccgca

SEQ ID NO: 46691 - DNA, 60 bp, Artificial
  Synthetic oligonucleotide
gctgtctctcttgtctgcgtctttcaagggccacgtctctgagtgcggcaacctcggcgt

SEQ ID NO: 46692 - DNA, 60 bp, Artificial
  Synthetic oligonucleotide
tcacgtacgccggctcgatctgccccgccatcgtgtccttgaccatcagcacaaagacct

SEQ ID NO: 46693 - DNA, 60 bp, Artificial
  Synthetic oligonucleotide
acctgcccgcgacgattggtctgccgttgcctccgacggtgcccagcctgatccccacag

SEQ ID NO: 46694 - DNA, 60 bp, Artificial
  Synthetic oligonucleotide
accccatcttcaaccgcaacggcagcatcggcacctacggcgtcgacatgctcaagtgga

SEQ ID NO: 46695 - DNA, 60 bp, Artificial
  Synthetic oligonucleotide
agtgcgacagcaacatctgcgagccgcccgcgctgcacccgagctggaccgactgcatgg

SEQ ID NO: 46696 - DNA, 60 bp, Artificial
  Synthetic oligonucleotide
atcctgagtctgtgggtggaggccgggtgtaagggtgagactgtggcgccgctcgacgct

SEQ ID NO: 46697 - DNA, 60 bp, Artificial
  Synthetic oligonucleotide
actggttgacggagatgcaggggatcttgaggttggtgggtctgtccgcgactttggcga

SEQ ID NO: 46698 - DNA, 60 bp, Artificial
  Synthetic oligonucleotide
agcgggtggcccaggtccggtgcacgacggggcagtggaagggcacgttcagtcggtcgc

SEQ ID NO: 46699 - DNA, 59 bp, Artificial
  Synthetic oligonucleotide
ccccgtcgctgatgctcgccctgtgcccgaatcgcctgagcgcgtccctactgctggtg

SEQ ID NO: 46700 - DNA, 60 bp, Artificial
  Synthetic oligonucleotide
ccccgtcccaaacccctacccaaccaagcaccaaagagacgaggcgactacaccagaatc

SEQ ID NO: 46701 - DNA, 60 bp, Artificial
  Synthetic oligonucleotide
tcgagctcagcccgccgagccacccgttgaccctgatccacttgcggcgcgcggtgtcgt

SEQ ID NO: 46702 - DNA, 60 bp, Artificial
  Synthetic oligonucleotide
aatcggtcggcgcaccactctggcgggtcctcctcgtccagcagcctcgcgtgccgcatg

SEQ ID NO: 46703 - DNA, 60 bp, Artificial
  Synthetic oligonucleotide
actcgaacagcacgctcacgcagcccatcgcgtacagccgcacgatgcagtggaagagga

SEQ ID NO: 46704 - DNA, 60 bp, Artificial
  Synthetic oligonucleotide
tcccaccatccactccacgtcgcatctgaccctcacatcagcgtatctgcggctgccata

SEQ ID NO: 46705 - DNA, 60 bp, Artificial
  Synthetic oligonucleotide
ttcctcaacgccgtcaagcccatgcgcttccccactcccttcacctcctacggcccgcac

SEQ ID NO: 46706 - DNA, 60 bp, Artificial
  Synthetic oligonucleotide
ctcgtctcaaggacctgtctccgacgcccaagctgcccgccatgcagacgccgactcacc

SEQ ID NO: 46707 - DNA, 60 bp, Artificial
  Synthetic oligonucleotide
cccagggtccgtggagtccgacgttgcagagcaggcagcggggcaggacgcacttgcagt

SEQ ID NO: 46708 - DNA, 60 bp, Artificial
  Synthetic oligonucleotide
gctcgtcgggcccctccagatccaccacatgaacagagccataacactgaacgaatgagt

SEQ ID NO: 46709 - DNA, 60 bp, Artificial
  Synthetic oligonucleotide
tttcggcgagagagcagaggcgagagagcaagcagagacggcgagagaacagcaaaaccc

SEQ ID NO: 46710 - DNA, 60 bp, Artificial
  Synthetic oligonucleotide
gcacctgtccgcagcctcgacccttcacaccctgcacaccgggccctttcagcataaaag

SEQ ID NO: 46711 - DNA, 60 bp, Artificial
  Synthetic oligonucleotide
gcctgctgctcttatacttggcccctccttcaatacgtcacacaccctcgcgccatctgg

SEQ ID NO: 46712 - DNA, 60 bp, Artificial
  Synthetic oligonucleotide
cgcacgtaaacactccgaaaaccttatgagccgcgtttccatacgactgcatccataggc

SEQ ID NO: 46713 - DNA, 60 bp, Artificial
  Synthetic oligonucleotide
caactgcaatgtatttagctgctccttaccattcccgttcggcttacatcgcggtctgtg

SEQ ID NO: 46714 - DNA, 60 bp, Artificial
  Synthetic oligonucleotide
cgtccacacagcctcaggagccgcgtccggaagagttagcatccaaattaacccaagacg

SEQ ID NO: 46715 - DNA, 60 bp, Artificial
  Synthetic oligonucleotide
aactccagcacagtcggctccggtaaccccgcgtccttcatttcttgtacatacctttgt

SEQ ID NO: 46716 - DNA, 60 bp, Artificial
  Synthetic oligonucleotide
ccccagaagatccaagacaccctcttcacgcacaccaactcgttccgaactctcttaacg

SEQ ID NO: 46717 - DNA, 60 bp, Artificial
  Synthetic oligonucleotide
atggcccgtaccctcagacccgtaatcgaggccgcatttagaggtcgtttactcgttcgc

SEQ ID NO: 46718 - DNA, 60 bp, Artificial
  Synthetic oligonucleotide
cgtacggcttctgattctccacataacccataacgttccgctagagccccggcatgcagg

SEQ ID NO: 46719 - DNA, 60 bp, Artificial
  Synthetic oligonucleotide
atcatcccaacgcaccccaatgcctctctcatatgaattccggttgtacatttacctcgc

SEQ ID NO: 46720 - DNA, 60 bp, Artificial
  Synthetic oligonucleotide
atgtttcagcagtcagcgcatgtaacgcccacacgcaaggtacgtcgctagcctacgccc

SEQ ID NO: 46721 - DNA, 60 bp, Artificial
  Synthetic oligonucleotide
gaccttctagttcccgcgttgcatctgggttgcttcaaagtgcaaagggccacggagcgc

SEQ ID NO: 46722 - DNA, 59 bp, Artificial
  Synthetic oligonucleotide
ggggtgtagattggaagcgacgtcgacacgaagccccgcgccggcatgatataccgccc

SEQ ID NO: 46723 - DNA, 60 bp, Artificial
  Synthetic oligonucleotide
ccgctaacattttaatccacgttaacagttcatccgcagactccaacgcttcaatcaaag

SEQ ID NO: 46724 - DNA, 57 bp, Artificial
  Synthetic oligonucleotide
aactcttcagcccgtgttgaccccaaaacagacgcaagatgtacaacgcacaacccc

SEQ ID NO: 46725 - DNA, 60 bp, Artificial
  Synthetic oligonucleotide
ggccataaccccgaaacgacgatcaaccccataatagttgcattgacggcagcttcgcag

SEQ ID NO: 46726 - DNA, 60 bp, Artificial
  Synthetic oligonucleotide
gccgtgttgatgagcgtctgccttttgaacaatttccgtacacaaatttgaccccgtgat

SEQ ID NO: 46727 - DNA, 60 bp, Artificial
  Synthetic oligonucleotide
cagcggttaatggggcgggtgccgggattgactgtgatggtgcagctacttctgccgata

SEQ ID NO: 46728 - DNA, 60 bp, Artificial
  Synthetic oligonucleotide
aacccggggttccgttcgattgcctagtccaccaaagcaaccgacggggcttccagctta

SEQ ID NO: 46729 - DNA, 60 bp, Artificial
  Synthetic oligonucleotide
gcgtcacggggagggacacgagataatctgcgagcgtagggtcctccacttcaacatcaa

SEQ ID NO: 46730 - DNA, 60 bp, Artificial
  Synthetic oligonucleotide
cccaggacgccgaaacaaaacccacgttttacgtctgcccaccgccaacaggctccacaa

SEQ ID NO: 46731 - DNA, 60 bp, Artificial
  Synthetic oligonucleotide
gcctgaagacgcacaacgcctcacggctcattttcagagcctgttctgttctccgcatgc

SEQ ID NO: 46732 - DNA, 60 bp, Artificial
  Synthetic oligonucleotide
acgcgccatgtatttaacgggacagaactggcacggttgcgagatatggccgctgcggga

SEQ ID NO: 46733 - DNA, 60 bp, Artificial
  Synthetic oligonucleotide
ggcccacacggaggctctgcggatgacaacgaaggcggatcaacatgacataaacgagga

SEQ ID NO: 46734 - DNA, 60 bp, Artificial
  Synthetic oligonucleotide
ggaatcgtctaaccttaacgcgctacaacaaccgtcgtctatcgcacatcatccgtccaa

SEQ ID NO: 46735 - DNA, 60 bp, Artificial
  Synthetic oligonucleotide
cctgcagagtacgataccatggcccgaaaacaatccctggagagttattgccccttgccc

SEQ ID NO: 46736 - DNA, 60 bp, Artificial
  Synthetic oligonucleotide
ctcttccgcgataatttcaccacgcccacatacccactcccaataaaagccctgtagagc

SEQ ID NO: 46737 - DNA, 60 bp, Artificial
  Synthetic oligonucleotide
gcactgtatgcgttaccccatgtcacaaatcatgcggaaggttgtgtgtgttgggctccg

SEQ ID NO: 46738 - DNA, 60 bp, Artificial
  Synthetic oligonucleotide
caggacctttgcgttcccaccacaataccgacggacatgaaccaaatgcaaccgcagccg

SEQ ID NO: 46739 - DNA, 60 bp, Artificial
  Synthetic oligonucleotide
acgtcgctcacatccaacccctcttcggctcgtgttagtaagttgtcgatcgttacgctg

SEQ ID NO: 46740 - DNA, 60 bp, Artificial
  Synthetic oligonucleotide
tctcccgcggtcacccttctccaacaaccccggccacacagactcccgaccctcagccgt

SEQ ID NO: 46741 - DNA, 60 bp, Artificial
  Synthetic oligonucleotide
ccctctccgtcgtcattacgttcgcgcaatcaacaagcgtatacaccaccacccctccca

SEQ ID NO: 46742 - DNA, 60 bp, Artificial
  Synthetic oligonucleotide
aaaactaaccctgtacggttctcgcataacctctgtagcacgcgttgcaccagccgcccc

SEQ ID NO: 46743 - DNA, 60 bp, Artificial
  Synthetic oligonucleotide
tggacgcgacggcgggatcgggctttcgggaagcggccgaggtgggcgcgacggcgggat

SEQ ID NO: 46744 - DNA, 60 bp, Artificial
  Synthetic oligonucleotide
ctggggcgtcaaaacccgcatgcaattccatgtccaaagcatcgtctgtacgcgacctca

SEQ ID NO: 46745 - DNA, 60 bp, Artificial
  Synthetic oligonucleotide
tgcacgcatcaatctgagaagcaacatgacaacggaaaacacggccaggcaagccaaggt

SEQ ID NO: 46746 - DNA, 60 bp, Artificial
  Synthetic oligonucleotide
actcccggcgcggaaacccggtggacctgtacccggcccggttgagcaattgtaccacgt

SEQ ID NO: 46747 - DNA, 60 bp, Artificial
  Synthetic oligonucleotide
gtggtcattaaagcgggtcaacgtcaaggaacggccaccgaggcaaccgtgttaagagcg

SEQ ID NO: 46748 - DNA, 60 bp, Artificial
  Synthetic oligonucleotide
aatgaagttttgatgtacgtcgatggctcaaggaccagatgcggacccctgttctcgcca

SEQ ID NO: 46749 - DNA, 60 bp, Artificial
  Synthetic oligonucleotide
cagttgggctttaaaccttctgccaccctcatcctccccattggataatttggaacgcgc

SEQ ID NO: 46750 - DNA, 60 bp, Artificial
  Synthetic oligonucleotide
ccgcgggcggtgatccggttgttggctggacagtgcttgactgtgctccctgttgcggtt

SEQ ID NO: 46751 - DNA, 60 bp, Artificial
  Synthetic oligonucleotide
gcgtttccctctgttcctctatccgtggctcgaaaaggcagtctgtccatggttcgtggg

SEQ ID NO: 46752 - DNA, 60 bp, Artificial
  Synthetic oligonucleotide
acgcttcacagttctcttcgtcagcttcagcagccattataaacaccccacggaccggat

SEQ ID NO: 46753 - DNA, 60 bp, Artificial
  Synthetic oligonucleotide
atctgccccgtaacaggtccctcgtcgggaaatcgagaaaccaccctatccgaccaagtt

SEQ ID NO: 46754 - DNA, 60 bp, Artificial
  Synthetic oligonucleotide
taatattgtgctgtcgacaaaggcctccagtgtaaatgcgtccagacaagttaccccgcg

SEQ ID NO: 46755 - DNA, 60 bp, Artificial
  Synthetic oligonucleotide
gccccaacctcatatattagtcacgcccgaaatctggaagatcacaaggcagcagtttca

SEQ ID NO: 46756 - DNA, 60 bp, Artificial
  Synthetic oligonucleotide
tcgctgaacaatcccctaggcgttttcgggtcgcgaccgcaagtacggcacccattcaac

SEQ ID NO: 46757 - DNA, 60 bp, Artificial
  Synthetic oligonucleotide
tccgacatgcactgcatctggagaaccgcgtctatgtcgaaccgatcgggcggctctgat

SEQ ID NO: 46758 - DNA, 60 bp, Artificial
  Synthetic oligonucleotide
tgtcccacgcgtcttcacaccccacctcccaatcgtccggctccaaagcgtgttctctgt

SEQ ID NO: 46759 - DNA, 60 bp, Artificial
  Synthetic oligonucleotide
ccgctcgtgtggccggggtcattggtgcgatggttttcagcccaaattctgcgttgtatc

SEQ ID NO: 46760 - DNA, 60 bp, Artificial
  Synthetic oligonucleotide
ccaacccgagggacatctaaatcgtgttgcacgcgcggccctactttcggacctcaaacg

SEQ ID NO: 46761 - DNA, 60 bp, Artificial
  Synthetic oligonucleotide
cacagagcggtgcttaaagttgacgaccgggtggcctttgacgttgctgggacccatgca

SEQ ID NO: 46762 - DNA, 60 bp, Artificial
  Synthetic oligonucleotide
tttgcgttttacccacccctggctgcccgccgtgccgcagcacaccctcccgcagcagac

SEQ ID NO: 46763 - DNA, 60 bp, Artificial
  Synthetic oligonucleotide
tctcttacaccgccgacgtctacgccaacctgacgcccatcgccagttacatcgcccact

SEQ ID NO: 46764 - DNA, 60 bp, Artificial
  Synthetic oligonucleotide
caggttgcgttttagcacggaggggttggaaggcaggggcaggtgtctgggaagggcgat

SEQ ID NO: 46765 - DNA, 60 bp, Artificial
  Synthetic oligonucleotide
agaggcagagttaaccctttactcgccggctacttccgccccagctcccacgtacttccg

SEQ ID NO: 46766 - DNA, 60 bp, Artificial
  Synthetic oligonucleotide
agagccaacgacatcggactccggccccacttaatctgtcacctgccacgtcatctgcca

SEQ ID NO: 46767 - DNA, 60 bp, Artificial
  Synthetic oligonucleotide
atctggacccggacctgcgctgttccctgtgcctacgcagcatggtggtgcgcgcctgca

SEQ ID NO: 46768 - DNA, 60 bp, Artificial
  Synthetic oligonucleotide
ccacggctttgcagaggtaccacacaaacgccaagggacacatttacaagctcggacacg

SEQ ID NO: 46769 - DNA, 60 bp, Artificial
  Synthetic oligonucleotide
agcaccccggcaaaggagagaccggtgatgggcgccaccacgtagccgccgtccagcttg

SEQ ID NO: 46770 - DNA, 60 bp, Artificial
  Synthetic oligonucleotide
agtggcccggcagacttttgagaagggagaggagatgacggtgcagaagcagatggactg

SEQ ID NO: 46771 - DNA, 60 bp, Artificial
  Synthetic oligonucleotide
ctccgcttctacacctgtctgcaagcatgcgtagcctgtgtgcgttcgtgccgctactgt

SEQ ID NO: 46772 - DNA, 60 bp, Artificial
  Synthetic oligonucleotide
gtgcccggccagctacgcggtggagattgcgacgaaacaaacggaagaggaacaggtgaa

SEQ ID NO: 46773 - DNA, 60 bp, Artificial
  Synthetic oligonucleotide
ccacaggtcctttgccatttcagtacccaccaaacgccctcacccgaaaacgaccaagaa

SEQ ID NO: 46774 - DNA, 60 bp, Artificial
  Synthetic oligonucleotide
gaaaacgccctgtacgatgaactgtgctcccagtgccacaaggctccgcgctccagacgc

SEQ ID NO: 46775 - DNA, 60 bp, Artificial
  Synthetic oligonucleotide
agacttacgacgcgctgtgcaggtgccgcatggcccgctgccgcagattacttggaggcg

SEQ ID NO: 46776 - DNA, 60 bp, Artificial
  Synthetic oligonucleotide
tctacacccagtaagcgaagccgaatacacccggaagaaccagccaaaaggggagcgggg

SEQ ID NO: 46777 - DNA, 60 bp, Artificial
  Synthetic oligonucleotide
tgcccgagagcgtggccgctgtcaccctgcacgacgccatgatgcacaccgacaaaaccc

SEQ ID NO: 46778 - DNA, 60 bp, Artificial
  Synthetic oligonucleotide
acgacgggctctggggacgcaagacgtggcgttgcctctatctctaccaccgcagtcact

SEQ ID NO: 46779 - DNA, 60 bp, Artificial
  Synthetic oligonucleotide
tcacattcccttccccgacacggacgtgctgaaccccgtctgctacttgaacgcctacga

SEQ ID NO: 46780 - DNA, 60 bp, Artificial
  Synthetic oligonucleotide
ggcagtgggaggtggagggcgcaaaggcaaaggacgactacagctacaacaaagactacg

SEQ ID NO: 46781 - DNA, 60 bp, Artificial
  Synthetic oligonucleotide
tcggggtcgtttgggtctgctttaagtgtggtggtgggctgcgtggtgggttgagtggtt

SEQ ID NO: 46782 - DNA, 60 bp, Artificial
  Synthetic oligonucleotide
aacgtgctgaccgtgaaatgcctgcctttgctgacgggccacatctacgccgacctgtac

SEQ ID NO: 46783 - DNA, 60 bp, Artificial
  Synthetic oligonucleotide
gcacacgcaaacgaatccagcagtcggtcggggcacgcgtcttccacgtcgtacagctct

SEQ ID NO: 46784 - DNA, 60 bp, Artificial
  Synthetic oligonucleotide
aactcggcgtgcagtgcggccttgcccatgggtcgtttgttgatggtgaggggcggaaag

SEQ ID NO: 46785 - DNA, 60 bp, Artificial
  Synthetic oligonucleotide
tcaccagggccgactacatacccgagacaccggcgcctaacttgccaaccctgccgtcat

SEQ ID NO: 46786 - DNA, 60 bp, Artificial
  Synthetic oligonucleotide
tgggaggcgtggttagtgtttatacgtcacggggcatgcgtggaggggttttggcaccgt

SEQ ID NO: 46787 - DNA, 60 bp, Artificial
  Synthetic oligonucleotide
gtcatcgtacttcttctgcaggtccgtcttttcgctctgtgccgctgcgagatcagtgcc

SEQ ID NO: 46788 - DNA, 60 bp, Artificial
  Synthetic oligonucleotide
gatgcggaagatgacagcaccgcagaagccgacgtcacctcccctcccagccctgtgtct

SEQ ID NO: 46789 - DNA, 60 bp, Artificial
  Synthetic oligonucleotide
tttactgcacgcggtcctgcaacccaagtacacacagtacgcatttctggcccgcctggt

SEQ ID NO: 46790 - DNA, 60 bp, Artificial
  Synthetic oligonucleotide
ataccatgacgcacacgcagtgccgagtgatagccagcgctttacccagcccagatgcca

SEQ ID NO: 46791 - DNA, 60 bp, Artificial
  Synthetic oligonucleotide
aggtggcccaggcgtgcatggtgtcgttgagcaggtcggcggggttgtggttctgaaact

SEQ ID NO: 46792 - DNA, 60 bp, Artificial
  Synthetic oligonucleotide
agctgtacgggctgtcaaagacgggagggtcgcacatggccacggtccaacactctttca

SEQ ID NO: 46793 - DNA, 60 bp, Artificial
  Synthetic oligonucleotide
tatcctccctaccttacccgcgttcagtcccagacatgcccgtcctcctggtactctctc

SEQ ID NO: 46794 - DNA, 60 bp, Artificial
  Synthetic oligonucleotide
aacaatacccgccctggctctcaaacacccctcggtcgccttcgtctcgctctacctaac

SEQ ID NO: 46795 - DNA, 60 bp, Artificial
  Synthetic oligonucleotide
ccccgtgacagttgaacaggtcgttgagcttcatggggccgcctgtcgccacatcaaaca

SEQ ID NO: 46796 - DNA, 60 bp, Artificial
  Synthetic oligonucleotide
gtcagcacgtaattgggtccgctctcgggcaccaccaccaaagtccacatgtcgtctggg

SEQ ID NO: 46797 - DNA, 60 bp, Artificial
  Synthetic oligonucleotide
attcggttgcaagcaccacatgagcgtcggcaagcgtctggtgttggcccgctactacca

SEQ ID NO: 46798 - DNA, 60 bp, Artificial
  Synthetic oligonucleotide
gttgcgaggcagaggtggaggagtttggccgggcagagacattgaagctggtgtgcgatt

SEQ ID NO: 46799 - DNA, 60 bp, Artificial
  Synthetic oligonucleotide
gactacaacacggtacgcaccatcctccggcattgcacccacacccaccatgagatcgag

SEQ ID NO: 46800 - DNA, 60 bp, Artificial
  Synthetic oligonucleotide
taggtcgcacggtcaccatcgcgcgggccctgattaccctgccctgctagacacgcccgt

SEQ ID NO: 46801 - DNA, 60 bp, Artificial
  Synthetic oligonucleotide
ttcacctgccccgacgacctctgcggcctcactttggcgttggagctcaccgtttgtcac

SEQ ID NO: 46802 - DNA, 60 bp, Artificial
  Synthetic oligonucleotide
gacgagtttctcattttccaatacgccgcctccgcgggccctcccaacaccgccaagatt

SEQ ID NO: 46803 - DNA, 60 bp, Artificial
  Synthetic oligonucleotide
cccctctctctgtttccctcgcgctagcacagcatggagcacgcacccctcgctgaaaca

SEQ ID NO: 46804 - DNA, 60 bp, Artificial
  Synthetic oligonucleotide
tgcgccgtcatgaagcttttcaactgttccaaggcctactctcacagccccgcggtcacc

SEQ ID NO: 46805 - DNA, 60 bp, Artificial
  Synthetic oligonucleotide
ctatagactccctgctcctcaacccctacgaccccacgccctgcatcgcctactccaacg

SEQ ID NO: 46806 - DNA, 60 bp, Artificial
  Synthetic oligonucleotide
gagctgatgccaccgccaagcacctcaactcccctggtatgtagtgcacgcaacccacat

SEQ ID NO: 46807 - DNA, 60 bp, Artificial
  Synthetic oligonucleotide
ttgtgggcaggatccggagaggtgagtagggtgccgacgtagccgttccagtccaggcga

SEQ ID NO: 46808 - DNA, 60 bp, Artificial
  Synthetic oligonucleotide
ccgacggagctgcgcactacccacaaagtcagcctgtacgaattcagccccaggatcatg

SEQ ID NO: 46809 - DNA, 60 bp, Artificial
  Synthetic oligonucleotide
cctcatggcgttaaagttgcggggcatgttgtcaaagtcgggtgcgtctccgtggtgctc

SEQ ID NO: 46810 - DNA, 60 bp, Artificial
  Synthetic oligonucleotide
gcgcaggcttcgtcggacttgctttcctcagagtcttgttcgggcacctgtacggcctca

SEQ ID NO: 46811 - DNA, 60 bp, Artificial
  Synthetic oligonucleotide
gtggagtcggtagcaagaacaggctgtggcgttaccgcgttcgtttagcatatgggcgtg

SEQ ID NO: 46812 - DNA, 60 bp, Artificial
  Synthetic oligonucleotide
acagaacacatccacccacctgtcctttcgcacgcacatatgccgaggcttactacggag

SEQ ID NO: 46813 - DNA, 60 bp, Artificial
  Synthetic oligonucleotide
ccggcatggccaaacccatcaccgtccgatccagaaaataaaccacacccacatcacggt

SEQ ID NO: 46814 - DNA, 60 bp, Artificial
  Synthetic oligonucleotide
cagccttcttagccactgcacccactaaacacgccttacaaacttgcaaacctgacctcg

SEQ ID NO: 46815 - DNA, 60 bp, Artificial
  Synthetic oligonucleotide
tgtgcaagctgtacgattactgtccgttattgtgttctgctctgtgtcgtgcgccttgtg

SEQ ID NO: 46816 - DNA, 60 bp, Artificial
  Synthetic oligonucleotide
gcaaactccccttctgcgcccagccacctagagaacgaacatttcaaatcatcagctctg

SEQ ID NO: 46817 - DNA, 60 bp, Artificial
  Synthetic oligonucleotide
ccttgcatgacgcatgacaacagacaactgctgccgcaagaaactaagctcgtcacacca

SEQ ID NO: 46818 - DNA, 60 bp, Artificial
  Synthetic oligonucleotide
gagtcgcttttagactcgccgatgaaactgtcgaatgcccacaccatgttcagctcagac

SEQ ID NO: 46819 - DNA, 60 bp, Artificial
  Synthetic oligonucleotide
attcacagatgcttcgcaaatacagtcaacgatcacatccaaagcgaaaacataaccctg

SEQ ID NO: 46820 - DNA, 60 bp, Artificial
  Synthetic oligonucleotide
tgctcctgccgtaacacttataaccgagcccaatccagtgcctatagccccaagcccttg

SEQ ID NO: 46821 - DNA, 60 bp, Artificial
  Synthetic oligonucleotide
ggagcggcagataaacaacagaaaagtcattgtccagatagaaagcttgcatcgtcttac

SEQ ID NO: 46822 - DNA, 60 bp, Artificial
  Synthetic oligonucleotide
gaggccgctgatggagttcaagttatcagggccgcccagatctgtcactgaggctgtacc

SEQ ID NO: 46823 - DNA, 60 bp, Artificial
  Synthetic oligonucleotide
ggatcgcaaacgctcgagcccggaagtgtgattcgtgcgcataaaagggcgctggtgtct

SEQ ID NO: 46824 - DNA, 60 bp, Artificial
  Synthetic oligonucleotide
cgcgtgcaggtttcccaatcttgcccgtcgctgtcttttcgaacgatcgcaaacgaggtt

SEQ ID NO: 46825 - DNA, 60 bp, Artificial
  Synthetic oligonucleotide
gcagcttttagagttctcgttcgcctgggcaggaaatacttcaaccgcggtacccgctga

SEQ ID NO: 46826 - DNA, 60 bp, Artificial
  Synthetic oligonucleotide
cgtctacatcgtctccctctctcacgacacaagaattagtcacatggggatgctctcgca

SEQ ID NO: 46827 - DNA, 60 bp, Artificial
  Synthetic oligonucleotide
gccgttgacgcttccacacatccatcttcgtcacagccaaagctctgttccgctcagcac

SEQ ID NO: 46828 - DNA, 60 bp, Artificial
  Synthetic oligonucleotide
ggggtgttatgggaaattgttttcgacgattatctctgtttggacagccgactcaggcaa

SEQ ID NO: 46829 - DNA, 60 bp, Artificial
  Synthetic oligonucleotide
gcgccgccgagcagaacgactatgtcacctttcgaaaaccagtaacacggctccgatccg

SEQ ID NO: 46830 - DNA, 60 bp, Artificial
  Synthetic oligonucleotide
ttcggtcgcctgccaattttccatgtttcggcgttatgcagcacaccggtaattgtgaaa

SEQ ID NO: 46831 - DNA, 60 bp, Artificial
  Synthetic oligonucleotide
aacacttcgcgaggtgcagaccgctgctggacgaactgtgcggagagggcggatggcttc

SEQ ID NO: 46832 - DNA, 60 bp, Artificial
  Synthetic oligonucleotide
cgtatcgagtcgtggtatgttggtacgagctttcgttttcccgcgagatgcagatcgaga

SEQ ID NO: 46833 - DNA, 60 bp, Artificial
  Synthetic oligonucleotide
atatggcggcagttgttaatcttagctgtagtacgtacgaagaccattgtagagtggcgg

SEQ ID NO: 46834 - DNA, 60 bp, Artificial
  Synthetic oligonucleotide
taagcattaataggcacactagccatccgccaccaagcagttccgtttctctgagccatt

SEQ ID NO: 46835 - DNA, 60 bp, Artificial
  Synthetic oligonucleotide
ttctttagagattctggaatcgagcactctttcactgtaccgaaggccaagccgcaacct

SEQ ID NO: 46836 - DNA, 60 bp, Artificial
  Synthetic oligonucleotide
ccggatgtggacgtaatctttgttggaggagacgatgggataaagacctaaattgccgct

SEQ ID NO: 46837 - DNA, 60 bp, Artificial
  Synthetic oligonucleotide
aaaagagtcccgtccgttccctcatcggcatctccgtccgcgccgtgcatcggcaggtcg

SEQ ID NO: 46838 - DNA, 60 bp, Artificial
  Synthetic oligonucleotide
cgactaccgcgctccatctctgtcaagaacgaagtcctagcaccaactcgcgccttctgt

SEQ ID NO: 46839 - DNA, 60 bp, Artificial
  Synthetic oligonucleotide
gccgtgtgtgtaaatgagagtgtgagattgggatgggaacataagtgtgcaggggctccg

SEQ ID NO: 46840 - DNA, 60 bp, Artificial
  Synthetic oligonucleotide
cggtagggttttcggtgttttgttcggttttaatagtggcgttacgacggattgtaagag

SEQ ID NO: 46841 - DNA, 60 bp, Artificial
  Synthetic oligonucleotide
ccggagccgcagacgcaccttcccattcctccgttacaccaaacatactcatcctaccct

SEQ ID NO: 46842 - DNA, 60 bp, Artificial
  Synthetic oligonucleotide
aggcagcttacaggaaacgttgtcgtattgcatctgtcggacttccacaaccctgatgta

SEQ ID NO: 46843 - DNA, 60 bp, Artificial
  Synthetic oligonucleotide
cgcccacgcagagtaacgctttggtgacttcatttaatccgctgactcaaaacaaggacg

SEQ ID NO: 46844 - DNA, 60 bp, Artificial
  Synthetic oligonucleotide
cgtatccacgcgtcttccgtgactattccgagatcagacagccattcgatggttcccaga

SEQ ID NO: 46845 - DNA, 60 bp, Artificial
  Synthetic oligonucleotide
gttaggcggtgcatgattcatcttaaatggctctgaaacagtgatgttgggtcgaatcat

SEQ ID NO: 46846 - DNA, 60 bp, Artificial
  Synthetic oligonucleotide
tgggttatgtcgcaggtacgtagcatggagcccgaccttacgttggcggcggtctatcag

SEQ ID NO: 46847 - DNA, 60 bp, Artificial
  Synthetic oligonucleotide
cgccagcgccacaggccttgttatttgatagtgccgggagtacgcagaagtaaaagatct

SEQ ID NO: 46848 - DNA, 60 bp, Artificial
  Synthetic oligonucleotide
ttgcggtatgtgtgtgacggctgcggattccacacggcaggatgcgtctggaggttcgag

SEQ ID NO: 46849 - DNA, 60 bp, Artificial
  Synthetic oligonucleotide
gcctcgtcccgccaaataaatcaatacgtttcgacaaagggaagattgaagtcgcggccc

SEQ ID NO: 46850 - DNA, 60 bp, Artificial
  Synthetic oligonucleotide
agacacgttacagaagcagcaatcgcaacacacggcaataacccgtgcgccgctcccgtg

SEQ ID NO: 46851 - DNA, 60 bp, Artificial
  Synthetic oligonucleotide
gacacgtcgaacgacaattaaactggtacgccgcatatgccgaagcagcgcagcaagatc

SEQ ID NO: 46852 - DNA, 60 bp, Artificial
  Synthetic oligonucleotide
ggctcatgcacgattgataagtctccgacatgcccaacgtcgacatccgtccgaagcgca

SEQ ID NO: 46853 - DNA, 60 bp, Artificial
  Synthetic oligonucleotide
cgagtaccgacccgcaccatggcagttccaatacacgattgacaacatttcccatcacag

SEQ ID NO: 46854 - DNA, 60 bp, Artificial
  Synthetic oligonucleotide
ggcgcctatcctgggacctcgtggtagacacgcgatccccgtaattagggagctaagtgt

SEQ ID NO: 46855 - DNA, 60 bp, Artificial
  Synthetic oligonucleotide
gatccgaaagagagacgcccggcactgatcgcaactacagagcacagaagacacaaagcg

SEQ ID NO: 46856 - DNA, 60 bp, Artificial
  Synthetic oligonucleotide
cacaatgctcagacatctcatatatccgctcgaacaccaactgctgactcccacacagcg

SEQ ID NO: 46857 - DNA, 60 bp, Artificial
  Synthetic oligonucleotide
acaccgcttgcttgatcgtcctcctccgctagaatttcagaaaagtcatagaccggagca

SEQ ID NO: 46858 - DNA, 60 bp, Artificial
  Synthetic oligonucleotide
cacccctggaactgaagtggaagcacgccgtgggtatcgcgacgacgaataagcctttgc

SEQ ID NO: 46859 - DNA, 60 bp, Artificial
  Synthetic oligonucleotide
gtctcggatgcgttgttttggatcacgggcgtctccgttgtaaggtctcaggccaagaga

SEQ ID NO: 46860 - DNA, 60 bp, Artificial
  Synthetic oligonucleotide
cgggtgttcatcctcaggagtaatggacaggtaggtgacacggcgggccagtggttgatg

SEQ ID NO: 46861 - DNA, 60 bp, Artificial
  Synthetic oligonucleotide
tcacagagccagaagtacaccctgacgctaacacgcggaggcagaccaggagccgcgcca

SEQ ID NO: 46862 - DNA, 60 bp, Artificial
  Synthetic oligonucleotide
cctctgaaagcttctgccggactgcccctgacaccgccctgacccgggccatcacctaca

SEQ ID NO: 46863 - DNA, 60 bp, Artificial
  Synthetic oligonucleotide
ctggggcctacagcgagagtgccgtggaggagttaccccaaatcccgagcagtcaaccta

SEQ ID NO: 46864 - DNA, 60 bp, Artificial
  Synthetic oligonucleotide
cgacctccacctggaccgaatcatcgtcgtgctgcccctacgtgcattcaccctaaaggt

SEQ ID NO: 46865 - DNA, 60 bp, Artificial
  Synthetic oligonucleotide
ccccgcaaacacacatttactaactcctccaggcatgcagcttccctgatcccaccgagc

SEQ ID NO: 46866 - DNA, 60 bp, Artificial
  Synthetic oligonucleotide
gagcaccagcgcgggacctccagcagcggctccctcgtgtgacgttgccgttcccagcac

SEQ ID NO: 46867 - DNA, 60 bp, Artificial
  Synthetic oligonucleotide
ccatactctgcgagacacctgaccacaactgccagattcacagctcttccttcctcttcc

SEQ ID NO: 46868 - DNA, 60 bp, Artificial
  Synthetic oligonucleotide
tcaccctgccgccaccgccagccccgagcccgagctggactttagttccctctccctgga

SEQ ID NO: 46869 - DNA, 60 bp, Artificial
  Synthetic oligonucleotide
aacagcaaagctaggtgccgcccgtcattagagcacaggcccgctacgctgctgttgcct

SEQ ID NO: 46870 - DNA, 60 bp, Artificial
  Synthetic oligonucleotide
tccccgccctgagcgcctcacaccgagccctcctggacgagtacatgtctttcaagagca

SEQ ID NO: 46871 - DNA, 60 bp, Artificial
  Synthetic oligonucleotide
tgctctgtctccatcgactagtccttcgaagtcaggccaccatgccctccgttccccatg

SEQ ID NO: 46872 - DNA, 60 bp, Artificial
  Synthetic oligonucleotide
ctgggcccgtctacaccttaacaccacgtttgcagtttcgaccgccctttcagtgcccgt

SEQ ID NO: 46873 - DNA, 60 bp, Artificial
  Synthetic oligonucleotide
cgcggtcacccactcgctgctgaccttcccctttgccaagaagcgcgccaatctgatttt

SEQ ID NO: 46874 - DNA, 60 bp, Artificial
  Synthetic oligonucleotide
cccgcctgctacagccacgcttatctgcatttaattttgcctctcgccgcactacccacc

SEQ ID NO: 46875 - DNA, 60 bp, Artificial
  Synthetic oligonucleotide
ccacagctggccccacttctgattctcgcacatctactcccgttacccctctcctgtcag

SEQ ID NO: 46876 - DNA, 60 bp, Artificial
  Synthetic oligonucleotide
agcccagtgaccgcacctttcccctgtgcccctacttttcctcttttcccaatgctgccc

SEQ ID NO: 46877 - DNA, 60 bp, Artificial
  Synthetic oligonucleotide
aagtatggcatgccgggttggaacggcgcgggcggcagagggccctgtggtggcgactgg

SEQ ID NO: 46878 - DNA, 60 bp, Artificial
  Synthetic oligonucleotide
tctttgggcgcctgggatgggacgggtggggtcagcgagtcctggctgggtgcctgctgt

SEQ ID NO: 46879 - DNA, 60 bp, Artificial
  Synthetic oligonucleotide
gcacccactccgctctccaaaacactgcccttgcctgaactgttgccaagtaactccaac

SEQ ID NO: 46880 - DNA, 60 bp, Artificial
  Synthetic oligonucleotide
ccaggtacatgcccctcactcgaaccgccgcccgtagtatccattttgaggcaccaaagc

SEQ ID NO: 46881 - DNA, 60 bp, Artificial
  Synthetic oligonucleotide
cgtgggtgatgtgcgcttcgaccctcaccgcctggactggccccactacaacatcctatc

SEQ ID NO: 46882 - DNA, 60 bp, Artificial
  Synthetic oligonucleotide
acaagaggcgcagacccgagtttggccgccatggacaacgccaccacaactcccgtgcta

SEQ ID NO: 46883 - DNA, 60 bp, Artificial
  Synthetic oligonucleotide
gccgagctccccaccaacctcctcacctatctgtttctcgcccactttagcagcagtctg

SEQ ID NO: 46884 - DNA, 60 bp, Artificial
  Synthetic oligonucleotide
tatcagtccctgtttgaccacggcacacagcggcagcgggtgcgggagtgcgacaacata

SEQ ID NO: 46885 - DNA, 60 bp, Artificial
  Synthetic oligonucleotide
tgtcaagaacagcctgtttgccactaacctgagccgcgagcacctgagcaccctgcgctt

SEQ ID NO: 46886 - DNA, 60 bp, Artificial
  Synthetic oligonucleotide
cgccccgtttgctagcctggcagccggagtgctgattttaattccgtgctccatcccagt

SEQ ID NO: 46887 - DNA, 60 bp, Artificial
  Synthetic oligonucleotide
ataacgccaccgtgaagcgcaagcgacccgccgcctcgcccatatacagcaacaccgagt

SEQ ID NO: 46888 - DNA, 60 bp, Artificial
  Synthetic oligonucleotide
gccgccaaactctgagaccagccccagcacaagccccgtcccatctgaggaggacaatga

SEQ ID NO: 46889 - DNA, 60 bp, Artificial
  Synthetic oligonucleotide
tcagccgaattgcctcctattgcgatgctgcctcccatgctccaggaggtgtctgcccta

SEQ ID NO: 46890 - DNA, 60 bp, Artificial
  Synthetic oligonucleotide
actcagtcgtggggtttgtgggttcatcgctgccgccgttgagtggagcgcagtacttca

SEQ ID NO: 46891 - DNA, 60 bp, Artificial
  Synthetic oligonucleotide
ctgtggctatgttgtctgctgtgtagtactgctctcccgcaaacaccaggcccgccccta

SEQ ID NO: 46892 - DNA, 60 bp, Artificial
  Synthetic oligonucleotide
agtttacccagacctcttgtgccctactctcccaagcgccccgttcccaccaggccccga

SEQ ID NO: 46893 - DNA, 60 bp, Artificial
  Synthetic oligonucleotide
ccccatcgcccaaaagtgcaacctcactaccgatgacctgctacaccccaccaaccacaa

SEQ ID NO: 46894 - DNA, 60 bp, Artificial
  Synthetic oligonucleotide
aggagtcccatggcgaacgaggccccgatcaggcggtactctacttcaccggccatagtt

SEQ ID NO: 46895 - DNA, 60 bp, Artificial
  Synthetic oligonucleotide
actagctgaggacgcgagccccttcccggtcaactttctgcaccgccttcatgccctctg

SEQ ID NO: 46896 - DNA, 60 bp, Artificial
  Synthetic oligonucleotide
cttttgccagctcaccgccgccctggagcccactgcctcctgcaagctatgtcagacgtt

SEQ ID NO: 46897 - DNA, 60 bp, Artificial
  Synthetic oligonucleotide
gcgggtaagtacgggcggcttagtaacatgtggctggtagggtcgggttttggctgctga

SEQ ID NO: 46898 - DNA, 60 bp, Artificial
  Synthetic oligonucleotide
agtagcccatctccgcaaagacgtcagctaggccatgcaccccgatgcccatgctgcgct

SEQ ID NO: 46899 - DNA, 60 bp, Artificial
  Synthetic oligonucleotide
ggtgccgctcgcccgcctgacctactccactgaattcagcaagcccttctctgagtacaa

SEQ ID NO: 46900 - DNA, 60 bp, Artificial
  Synthetic oligonucleotide
gtgctctctgactgttctcctgcctaggtcacgcaaactgctagaaacacaggggctcgc

SEQ ID NO: 46901 - DNA, 60 bp, Artificial
  Synthetic oligonucleotide
gcaagacctcacacacaggcaaccccattgttttcccagacagggctacccacaaaacct

SEQ ID NO: 46902 - DNA, 60 bp, Artificial
  Synthetic oligonucleotide
atcatcatctgtgtgctgagccctcacgaccccatggcgctgaccaggacagaaaccgtg

SEQ ID NO: 46903 - DNA, 60 bp, Artificial
  Synthetic oligonucleotide
ccgcgctgttctgggctaccagctacctaaacaaccccgcctgcaccaacttcactgtca

SEQ ID NO: 46904 - DNA, 60 bp, Artificial
  Synthetic oligonucleotide
atcccagctgcaggaatgtgtaagttctgcctccaccattataccgccggggcctagact

SEQ ID NO: 46905 - DNA, 60 bp, Artificial
  Synthetic oligonucleotide
agccgctgattgacttcatccaggccatccagaaacccgcagtggagtacgtgccgcgag

SEQ ID NO: 46906 - DNA, 60 bp, Artificial
  Synthetic oligonucleotide
ccagctgaccgatcacatggccgccagcaacctaggcctgacccacaatacttcctccga

SEQ ID NO: 46907 - DNA, 60 bp, Artificial
  Synthetic oligonucleotide
tgaccatcgtccaggacatcgccctgcccagctgcatcgtctacgaggccgaaaacccct

SEQ ID NO: 46908 - DNA, 60 bp, Artificial
  Synthetic oligonucleotide
cgcgaccgacaaggcccgcatccgctccctaattttgacagacctgggcacggctgttgt

SEQ ID NO: 46909 - DNA, 59 bp, Artificial
  Synthetic oligonucleotide
cgcccttgaggttgtagaggaagctcgtgctggccttgccggtgttggtcgaggagacg

SEQ ID NO: 46910 - DNA, 60 bp, Artificial
  Synthetic oligonucleotide
cctgcgaaacggtgacgtctttgtagtacatggtggccttgaacttgtacggggcgatgt

SEQ ID NO: 46911 - DNA, 60 bp, Artificial
  Synthetic oligonucleotide
cgtcatccgctccgagcgcgaccgcgtctactggaccaccaacttcccctgcatgatctc

SEQ ID NO: 46912 - DNA, 60 bp, Artificial
  Synthetic oligonucleotide
tacgcgccgttgtacagcaggtccccgtacgagaagcgctgggaggcccacgggttggcc

SEQ ID NO: 46913 - DNA, 57 bp, Artificial
  Synthetic oligonucleotide
gaaggccgtgctctccatgttgttccgcacgtacttggccgtcgaccggcagacccc

SEQ ID NO: 46914 - DNA, 60 bp, Artificial
  Synthetic oligonucleotide
ggacgatgaggcggtggaaggggcggtcgtccatgatgtaattggtggatgagaagtagg

SEQ ID NO: 46915 - DNA, 60 bp, Artificial
  Synthetic oligonucleotide
acgggcgaggccccgttgaggtgataggccccgttgtacagcaggtccccgtacgagaac

SEQ ID NO: 46916 - DNA, 60 bp, Artificial
  Synthetic oligonucleotide
gaagatgaggcgcgacaggaaccggtaggcgaactccaccagcatctcgccctgggtctt

SEQ ID NO: 46917 - DNA, 54 bp, Artificial
  Synthetic oligonucleotide
ggggtcgtcctcaccaggggcacggagagcgagcgcacgacggcgatctcctcg

SEQ ID NO: 46918 - DNA, 54 bp, Artificial
  Synthetic oligonucleotide
ggccgtgctctccatgttgttccgcacgtacttggccgtcgaccggcagacccc

SEQ ID NO: 46919 - DNA, 60 bp, Artificial
  Synthetic oligonucleotide
cccacagcttcgtcatgtacaagcacaccttcaaggaaccggcctgcaccgtcagcacct

SEQ ID NO: 46920 - DNA, 60 bp, Artificial
  Synthetic oligonucleotide
gagacgtgcttctggtgcgccacgtagccgatgctgatgccgatgatgttcttcagcagg

SEQ ID NO: 46921 - DNA, 58 bp, Artificial
  Synthetic oligonucleotide
caagcaacaggccgccatcaaggtggtgtgcaactcggtgtacgggttcaccggggtg

SEQ ID NO: 46922 - DNA, 60 bp, Artificial
  Synthetic oligonucleotide
gtccctgaagccgaacatgtagaggaacttgttgtggaagcggttctccacgtagctgag

SEQ ID NO: 46923 - DNA, 52 bp, Artificial
  Synthetic oligonucleotide
cacgggcatatccacgctgccaaatctctcgctacggcgtgtggttctgggg

SEQ ID NO: 46924 - DNA, 60 bp, Artificial
  Synthetic oligonucleotide
cgtagcagaaagcatgcaagcatggaagcgccatagagtagttgctggggtcttctaggc

SEQ ID NO: 46925 - DNA, 60 bp, Artificial
  Synthetic oligonucleotide
agatttgtgcgccacaagagggcagactggagccctactgagcccgcatatgcagcagct

SEQ ID NO: 46926 - DNA, 55 bp, Artificial
  Synthetic oligonucleotide
aacaagatacaacgcgactgcgctagcatcaccgtttattaacgaccaagtaaaa

SEQ ID NO: 46927 - DNA, 60 bp, Artificial
  Synthetic oligonucleotide
ggaggaactagctcggtttatgattactgcggctaaaggtgattggtcaattagcgagtt

SEQ ID NO: 46928 - DNA, 56 bp, Artificial
  Synthetic oligonucleotide
cgcgcatgtggatgtgtattttaatgagatcaacctccatgaagcgtaactagggg

SEQ ID NO: 46929 - DNA, 60 bp, Artificial
  Synthetic oligonucleotide
gcttactgacgtgacccgcccacggctaggagagcacttttatacggacctcgggcacaa

SEQ ID NO: 46930 - DNA, 60 bp, Artificial
  Synthetic oligonucleotide
gaaactctagcgtggcgcgtttagtcatgatcgcctctctatttcgagctaccttgcgct

SEQ ID NO: 46931 - DNA, 60 bp, Artificial
  Synthetic oligonucleotide
gtcactagcacctcccacaataccgcttaacaaacaaaagcttactgatggttttcgctc

SEQ ID NO: 46932 - DNA, 60 bp, Artificial
  Synthetic oligonucleotide
cccaaacgaggtatatttgaactttacgtctatgcacggaattcagcccgttgtagctcg

SEQ ID NO: 46933 - DNA, 60 bp, Artificial
  Synthetic oligonucleotide
tgaacaccgccacacacagctcctcctccgagcggtacgcctcctggtgtgtaatcaaaa

SEQ ID NO: 46934 - DNA, 60 bp, Artificial
  Synthetic oligonucleotide
ggcttgcgcgtcggcttctataacgttatccctgtggaggtacactttatccaccgcaga

SEQ ID NO: 46935 - DNA, 60 bp, Artificial
  Synthetic oligonucleotide
ggcgttgcggtgactttgatagggaccacattgctttaaacctggacgcgtcatcagacg

SEQ ID NO: 46936 - DNA, 60 bp, Artificial
  Synthetic oligonucleotide
ttacggatgaacctaaacccgctaagagaacgtcacgagcgcgacactgtcataagccag

SEQ ID NO: 46937 - DNA, 60 bp, Artificial
  Synthetic oligonucleotide
agagccgttacatctacccttttccgtatacctcattagcgggaacgccggctccgggaa

SEQ ID NO: 46938 - DNA, 60 bp, Artificial
  Synthetic oligonucleotide
agacaccttctttctcaccaagcacgagcgtaacagaaaggagctggtggtagcccgcct

SEQ ID NO: 46939 - DNA, 60 bp, Artificial
  Synthetic oligonucleotide
cagacatggcaatgaacaaagcaaaggcgtggcaagagtggttggaggatgggttcgcgg

SEQ ID NO: 46940 - DNA, 60 bp, Artificial
  Synthetic oligonucleotide
gcgatagcggccaactacagccacgccggttcctgaagccatagcatttgtagtaaacgc

SEQ ID NO: 46941 - DNA, 60 bp, Artificial
  Synthetic oligonucleotide
aaaactgtatgcagtattcgacgactttcttccgccgatgtaaagggagttagcctttca

SEQ ID NO: 46942 - DNA, 60 bp, Artificial
  Synthetic oligonucleotide
cggtcagtcggtggaggggcgcaactttcgcaaccagtttcagccagttttaagacgtag

SEQ ID NO: 46943 - DNA, 60 bp, Artificial
  Synthetic oligonucleotide
ggctcggtcacgaggacgaagctctgttgatgagatggatgttggaggaagcaccacgag

SEQ ID NO: 46944 - DNA, 60 bp, Artificial
  Synthetic oligonucleotide
cgcagtcctgcctttgtccgtgcatttacgtcagcaaaagaagcaagtttggacctggat

SEQ ID NO: 46945 - DNA, 60 bp, Artificial
  Synthetic oligonucleotide
acaacccgtccagcaggcgcgtaaccgtcgtaagagctcctatgggttcgggcaagacaa

SEQ ID NO: 46946 - DNA, 59 bp, Artificial
  Synthetic oligonucleotide
caatttatgaaggcggcgctgcttcgccaccccatagaccagtcgctaatgccgtctat

SEQ ID NO: 46947 - DNA, 60 bp, Artificial
  Synthetic oligonucleotide
gccgcgcccacttgctcttaggacgagaaggactcgcccaataagccaatttgaatacgc

SEQ ID NO: 46948 - DNA, 60 bp, Artificial
  Synthetic oligonucleotide
gtgaaacatcggccaaaactggcgagtgagctcttcctcgttacagccatgctcgcacag

SEQ ID NO: 46949 - DNA, 51 bp, Artificial
  Synthetic oligonucleotide
aatggtgcacattttattgttgccgcattttgtagcaaagcactgttgact

SEQ ID NO: 46950 - DNA, 60 bp, Artificial
  Synthetic oligonucleotide
cggtgattgtggaccgcgagggttgctgggaagacattgagatcgagagtctcaccgcgt

SEQ ID NO: 46951 - DNA, 60 bp, Artificial
  Synthetic oligonucleotide
cgtcagcaggctcagttataaacaaagacatggattggctctggtccacaaacgcagccc

SEQ ID NO: 46952 - DNA, 60 bp, Artificial
  Synthetic oligonucleotide
gcagagaggacaggttgggttttgtcgaatccagcgcgtaatacacacgtagcagaaagc

SEQ ID NO: 46953 - DNA, 60 bp, Artificial
  Synthetic oligonucleotide
atgctgttttatatttctcaaccactacgttataaccggaagttatgactttgccgtggc

SEQ ID NO: 46954 - DNA, 60 bp, Artificial
  Synthetic oligonucleotide
cgcctgatattagcgctctcgtcgtttcgtgccggagaagcttcactcgcaccttagcta

SEQ ID NO: 46955 - DNA, 60 bp, Artificial
  Synthetic oligonucleotide
gtgagcacactataaaattcgcccgcacttccaagcccggcactcagctcgactgtgtgg

SEQ ID NO: 46956 - DNA, 60 bp, Artificial
  Synthetic oligonucleotide
ccggatgtgtacgtccgtccgacgatcgcgtgtaatactttctgggttttcgcgcttgga

SEQ ID NO: 46957 - DNA, 60 bp, Artificial
  Synthetic oligonucleotide
cgtgcaactcttcgtggaaaccacgtgaggtaaatgagaccaacaggcgttgcggtgact

SEQ ID NO: 46958 - DNA, 60 bp, Artificial
  Synthetic oligonucleotide
cgcgagaacaatggcatatccgctggagcaggcaacccgtacacctacgtcagtgagcac

SEQ ID NO: 46959 - DNA, 60 bp, Artificial
  Synthetic oligonucleotide
agacgtttggctatttagtgagccggaccttgagtcggagactattactccagcccgctg

SEQ ID NO: 46960 - DNA, 53 bp, Artificial
  Synthetic oligonucleotide
aaaagcactgaggttgtaagtgcgaaacagaacacttgcacaagccacatctt

SEQ ID NO: 46961 - DNA, 60 bp, Artificial
  Synthetic oligonucleotide
actggaccccagcgagatcccctctcccgcctgccctcccgaggcgctgtgctccaaccc

SEQ ID NO: 46962 - DNA, 60 bp, Artificial
  Synthetic oligonucleotide
ctggctggtaccgtcgagaccaacgccccggaagttttggccagagcaaaatacaactcc

SEQ ID NO: 46963 - DNA, 60 bp, Artificial
  Synthetic oligonucleotide
cccaccatcacccatatcatagagagctatataccccgctacgtaaataggaaggctcac

SEQ ID NO: 46964 - DNA, 50 bp, Artificial
  Synthetic oligonucleotide
ggctgtacctaaacgagcttgtgagatctaaccgcacctatgacctaaaa

SEQ ID NO: 46965 - DNA, 60 bp, Artificial
  Synthetic oligonucleotide
gcggacgtaattagtggtatttacgacacccagaaccggaaacagcagggagatttggcg

SEQ ID NO: 46966 - DNA, 60 bp, Artificial
  Synthetic oligonucleotide
gcgtggaccagaaggctcataattttggaggcggggagttttccgtcagcaggctcagtt

SEQ ID NO: 46967 - DNA, 54 bp, Artificial
  Synthetic oligonucleotide
ctattgttagtcaaacaatgagcagctacggagggtcagggcgtctgtcgagcg

SEQ ID NO: 46968 - DNA, 60 bp, Artificial
  Synthetic oligonucleotide
gacgggcgatgagctcaaccagatgtttgacatttaatacaataaagtatgtttccagac

SEQ ID NO: 46969 - DNA, 60 bp, Artificial
  Synthetic oligonucleotide
gcctgcaccgcgttgacgataacctcctcaacaattacgacattttagtactagacgagg

SEQ ID NO: 46970 - DNA, 60 bp, Artificial
  Synthetic oligonucleotide
ggagcaggcaacccgtacacctacgtcagtgagcacactataaaattcgcccgcacttcc

SEQ ID NO: 46971 - DNA, 60 bp, Artificial
  Synthetic oligonucleotide
cccaacgcccactcaacttccaacttcgctttagtggctgcgaccacgctaacagtgaca

SEQ ID NO: 46972 - DNA, 60 bp, Artificial
  Synthetic oligonucleotide
gcaaattgtaccgctttcacgacgccgcgatatcccgagtctactataccgtaggcggtg

SEQ ID NO: 46973 - DNA, 60 bp, Artificial
  Synthetic oligonucleotide
ccgtgctcctcgacaagcagcaggcggccatcaaggtggtgtgcaactcggtgtacgggt

SEQ ID NO: 46974 - DNA, 60 bp, Artificial
  Synthetic oligonucleotide
gtgcggctcatcatcaacatgaagggcatgcgccacatcggcgacatcaacgacacggtg

SEQ ID NO: 46975 - DNA, 55 bp, Artificial
  Synthetic oligonucleotide
aagacattatggagcagacgtttctcccacccattatgttgccccagttgccgga

SEQ ID NO: 46976 - DNA, 60 bp, Artificial
  Synthetic oligonucleotide
cgaaagcatgcgtgatacgaacccgctaagagggcggagattaccgccaccagacccaga

SEQ ID NO: 46977 - DNA, 60 bp, Artificial
  Synthetic oligonucleotide
aggtacccgaggccgaagtcccgggcccaggccagcacccgcagggcgaacgcgatcgag

SEQ ID NO: 46978 - DNA, 60 bp, Artificial
  Synthetic oligonucleotide
agagcaggctcccgtcggtcacgttgcagtgccccacctcgaacagcagctgcaggtagc

SEQ ID NO: 46979 - DNA, 60 bp, Artificial
  Synthetic oligonucleotide
agcagctccgccaggccttccagacctcggtcgtcaacaacatcaacggcatgctggagg

SEQ ID NO: 46980 - DNA, 60 bp, Artificial
  Synthetic oligonucleotide
gcaggcgtgccgcgtctccaggtcgcagaggtcgcagggcacgtcggtctggctcgagtc

SEQ ID NO: 46981 - DNA, 60 bp, Artificial
  Synthetic oligonucleotide
ggggcacgatcacggccgagcagaacaacgtcatcctgcagtccaccgaggccaccgggc

SEQ ID NO: 46982 - DNA, 60 bp, Artificial
  Synthetic oligonucleotide
cgcgcatggagccgatcatgacctcgcagccccggaaggtcacgttgtccacgtaggtgc

SEQ ID NO: 46983 - DNA, 60 bp, Artificial
  Synthetic oligonucleotide
cggtgcagtccaccccgcggtcggtgacgaagatcgggtacagggccttctgggcgaaca

SEQ ID NO: 46984 - DNA, 60 bp, Artificial
  Synthetic oligonucleotide
gtccacgttcatgagcgaggggtggcacacggtcccgatcgcctgctccagggacagccg

SEQ ID NO: 46985 - DNA, 60 bp, Artificial
  Synthetic oligonucleotide
tgaaccgccggggcgtcttccgcgtgtgggacatcggccagagccacttccagaagcgca

SEQ ID NO: 46986 - DNA, 60 bp, Artificial
  Synthetic oligonucleotide
acgtgcctggtgctcccgaagtaccggtccgacctctacacgtacctggggtcccgcgcc

SEQ ID NO: 46987 - DNA, 60 bp, Artificial
  Synthetic oligonucleotide
gaagtggctcgcgaggacgtacgcctgcaccaggatctgcttgaagttggggtggcgggg

SEQ ID NO: 46988 - DNA, 60 bp, Artificial
  Synthetic oligonucleotide
atcgttaacagcgcctcgcggttcgtctacacgccctccccgtacgccttcgccctcgtg

SEQ ID NO: 46989 - DNA, 60 bp, Artificial
  Synthetic oligonucleotide
ggcgtggtcttcggtacgtggtatcgcacgatccaggaccgcaccgccgccgacttcccc

SEQ ID NO: 46990 - DNA, 60 bp, Artificial
  Synthetic oligonucleotide
atgtcggcgatcacctcccagtagtacgtcaggtcccggcgctgcaggtcctccacggag

SEQ ID NO: 46991 - DNA, 60 bp, Artificial
  Synthetic oligonucleotide
tgcacctggcccaccttcacgtgcgtcccgttgtagcgccggaggaagatgcggtccacg

SEQ ID NO: 46992 - DNA, 60 bp, Artificial
  Synthetic oligonucleotide
gcggtacttctacacgacccagtgcccggacatcaaccacctccgctccctgagcatcct

SEQ ID NO: 46993 - DNA, 60 bp, Artificial
  Synthetic oligonucleotide
agtcgaacagcgtcacgcacagctccagctccgagccctcggagaaggccgggtcgctgc

SEQ ID NO: 46994 - DNA, 60 bp, Artificial
  Synthetic oligonucleotide
cgtgtgcgtcggccttgatgaccgtgtcgatgtcggcgaagcggagcgcgtggagctggt

SEQ ID NO: 46995 - DNA, 60 bp, Artificial
  Synthetic oligonucleotide
ttccggggcatcaagatcggctacaccgcccacatccgcaaggccaccgagcccgtgttc

SEQ ID NO: 46996 - DNA, 59 bp, Artificial
  Synthetic oligonucleotide
accccagcagcgcgtcgaactgcacgtcgtacaggctgttctggtcggaccgcacggcg

SEQ ID NO: 46997 - DNA, 60 bp, Artificial
  Synthetic oligonucleotide
cgtacgacgccagggaggccgccgaggccgtccgcacccacgtgaccgccaactaccggg

SEQ ID NO: 46998 - DNA, 60 bp, Artificial
  Synthetic oligonucleotide
atcgccgctcacttcttccgggcggcctttccctgcttctacgcgtccgcggcctcttat

SEQ ID NO: 46999 - DNA, 60 bp, Artificial
  Synthetic oligonucleotide
gttggcgcacttgatgtccaggtggctgatgccgcacgtggtgttcaggaagctcacggc

SEQ ID NO: 47000 - DNA, 60 bp, Artificial
  Synthetic oligonucleotide
tggcacagcgacatcatggccgtgctgcggatgaagggcgtgctggcgggcgaggaggcc

SEQ ID NO: 47001 - DNA, 60 bp, Artificial
  Synthetic oligonucleotide
cgggccccgtcgtcatacataggtgctgagggtgtgctcgagcgacaggagcgagatcga

SEQ ID NO: 47002 - DNA, 60 bp, Artificial
  Synthetic oligonucleotide
taccggcgggcgtactacggcagcgcgcagaaccccttctggttcgtcagcaagttcggg

SEQ ID NO: 47003 - DNA, 58 bp, Artificial
  Synthetic oligonucleotide
ccccagccacaagagcctgcagatgttcgtcctgtgccagcggcccgacgcgacgcgg

SEQ ID NO: 47004 - DNA, 60 bp, Artificial
  Synthetic oligonucleotide
acgaggtgcgcgtcgtcatcatcggccaggacccctatcaccagcccggccaggcccacg

SEQ ID NO: 47005 - DNA, 60 bp, Artificial
  Synthetic oligonucleotide
tactacaagctgctggcccgccgcgaccaggtgccctcgatcaaggaccggatcccgtac

SEQ ID NO: 47006 - DNA, 60 bp, Artificial
  Synthetic oligonucleotide
ccccggtccggaagagctccgtcgccagcgccgcctcgaaccacgccttgacgctgcgct

SEQ ID NO: 47007 - DNA, 60 bp, Artificial
  Synthetic oligonucleotide
tactacacggagagcgacgacgagacggccgccgattttctggtgcggatgggacggcag

SEQ ID NO: 47008 - DNA, 60 bp, Artificial
  Synthetic oligonucleotide
tcctcaccaagcccgccggggagcgcttcctgctctaccgcccctcgaccaccacgaacg

SEQ ID NO: 47009 - DNA, 60 bp, Artificial
  Synthetic oligonucleotide
tcaccaccctctgcctcgtgaccgcctacgggctggtgctgggctggtacgtcgtgttcg

SEQ ID NO: 47010 - DNA, 60 bp, Artificial
  Synthetic oligonucleotide
gcggacaggcgaggacaaacttccgcgtgcggtcaaagatgagcagcgggcaggcgttct

SEQ ID NO: 47011 - DNA, 60 bp, Artificial
  Synthetic oligonucleotide
attacacccatgaacgtgctcatcgacgtgaacccgcacaaccccagcgagatcgtgcgc

SEQ ID NO: 47012 - DNA, 60 bp, Artificial
  Synthetic oligonucleotide
tctgcgagaggaagtcgatctggaaggcgtggatgaggtactgcagcacgcgattggcca

SEQ ID NO: 47013 - DNA, 60 bp, Artificial
  Synthetic oligonucleotide
ggtgacgataacccgtcagattgataattggttcctacagaaactatctaaccgcagaag

SEQ ID NO: 47014 - DNA, 58 bp, Artificial
  Synthetic oligonucleotide
gacgataacccgtcagattgataattggttcctacagaaactattctaaccgcggaag

SEQ ID NO: 47015 - DNA, 60 bp, Artificial
  Synthetic oligonucleotide
cggtctcccagtcgtagacgtagacggtgccgtaatgacttagcatgagcacgcagggca

SEQ ID NO: 47016 - DNA, 60 bp, Artificial
  Synthetic oligonucleotide
cggcttttgtcaatccgcgtcaccagtattactttcagatgctcattcagcagtacgtgc

SEQ ID NO: 47017 - DNA, 60 bp, Artificial
  Synthetic oligonucleotide
cggcttttgtcaatccgcgccaccagtactactttcagatgctcattcagcagtacgtgc

SEQ ID NO: 47018 - DNA, 60 bp, Artificial
  Synthetic oligonucleotide
ctgcagaaaggactcgacgctgtcctcgatgccgatgcgcgatttgctgtccgagacgtt

SEQ ID NO: 47019 - DNA, 60 bp, Artificial
  Synthetic oligonucleotide
ggaaggactcgacgctgtcctcgatgccgatgcgcgatttgctgtccgagacgttaagca

SEQ ID NO: 47020 - DNA, 60 bp, Artificial
  Synthetic oligonucleotide
acgactccacgctgtcctcgatgccgatgcgcgatttgctgtccgacacgttcagcagga

SEQ ID NO: 47021 - DNA, 60 bp, Artificial
  Synthetic oligonucleotide
tcgccgtaacgtggtgttcaaggccaactgtcagatcagctcgcagaccggctccttcgt

SEQ ID NO: 47022 - DNA, 55 bp, Artificial
  Synthetic oligonucleotide
gcctgcgaggcgaaactctgagaagtctaccgagtcgagttacaagtcactaaaa

SEQ ID NO: 47023 - DNA, 60 bp, Artificial
  Synthetic oligonucleotide
gtggtgacgataacccgtcagattgataattggttcctacagaaactattctaaccgcgg

SEQ ID NO: 47024 - DNA, 60 bp, Artificial
  Synthetic oligonucleotide
ctcaagtacctcaacatgatgaagatggccatcacgggcaaagagtccatctgcttaccc

SEQ ID NO: 47025 - DNA, 60 bp, Artificial
  Synthetic oligonucleotide
ctgcccaccgcctccgacgccatggtggccttcatcaaccagacctcgaacatcatgaaa

SEQ ID NO: 47026 - DNA, 60 bp, Artificial
  Synthetic oligonucleotide
cacgacctgcacgacatcttccgcgagcaccccgaactggagctcaagtacctcaacatg

SEQ ID NO: 47027 - DNA, 60 bp, Artificial
  Synthetic oligonucleotide
gacctgcacgacatcttccgcgagcaccccgacctggaggtcaagtacctcaacatgatg

SEQ ID NO: 47028 - DNA, 60 bp, Artificial
  Synthetic oligonucleotide
ctgcacgacctgcacgacatcttccgcgagcaccccgaactagagctcaagtacctcaac

SEQ ID NO: 47029 - DNA, 60 bp, Artificial
  Synthetic oligonucleotide
ctgcacgacctgcacgacatcttccgcgagcaccccgaactggagctcaagtaccttaac

SEQ ID NO: 47030 - DNA, 57 bp, Artificial
  Synthetic oligonucleotide
cgccgtaggccgagggcttgatctcctcgatgtccttgagcgtgacgatgagcgact

SEQ ID NO: 47031 - DNA, 60 bp, Artificial
  Synthetic oligonucleotide
gcacgtacttgaggaaggcggcgtacttctggcccgcgttcacgaaatttaaccgcgcgt

SEQ ID NO: 47032 - DNA, 60 bp, Artificial
  Synthetic oligonucleotide
acgcccttgacgaactcgcaggccgtcttgcgcaccagatccacgcccttcatgctcaga

SEQ ID NO: 47033 - DNA, 50 bp, Artificial
  Synthetic oligonucleotide
gcctaagtgacggtgagatccaggctgtccgtgcaccacggtgaacacgg

SEQ ID NO: 47034 - DNA, 60 bp, Artificial
  Synthetic oligonucleotide
gctctgacagcctccggatcacatggttactcagcgtctgccagcctaagtgacggtgag

SEQ ID NO: 47035 - DNA, 60 bp, Artificial
  Synthetic oligonucleotide
tgtcgtggtcgggcaagctgaggaagcggatccagtcggcgctcagacaaaacacgcgag

SEQ ID NO: 47036 - DNA, 60 bp, Artificial
  Synthetic oligonucleotide
tgtcgtgctcgggcaggctgaggaagcgcacccagtcggcgctcagacaaaacacgcgag

SEQ ID NO: 47037 - DNA, 60 bp, Artificial
  Synthetic oligonucleotide
cacagggttacggcgtcgaacaggtctttcttggtggcgcccgagacccacatctggtat

SEQ ID NO: 47038 - DNA, 60 bp, Artificial
  Synthetic oligonucleotide
gcacagggttacggcgtcaaacaggtctttcttggtggcgcccgagacccacatctggta

SEQ ID NO: 47039 - DNA, 56 bp, Artificial
  Synthetic oligonucleotide
tgatgcaattggcgtacagccaggcgggccatttaccgtcattgacgtcaataggg

SEQ ID NO: 47040 - DNA, 60 bp, Artificial
  Synthetic oligonucleotide
acagggtgacggcgtcgaacaggtctttcttggtggcgcccgagacccacatctggtaga

SEQ ID NO: 47041 - DNA, 60 bp, Artificial
  Synthetic oligonucleotide
cgacacgtgcttttggtgcgccacgtagccgatgctgatgccgatcatgtgcttaagcag

SEQ ID NO: 47042 - DNA, 55 bp, Artificial
  Synthetic oligonucleotide
ttttctgccggccgtggtgtgcaacagcaactcctcgctggacgtgcatgggctg

SEQ ID NO: 47043 - DNA, 60 bp, Artificial
  Synthetic oligonucleotide
cagtgcgtgaagtcgaagaaggggtgcagctcggtgtagagcgtcagattgcccaccttg

SEQ ID NO: 47044 - DNA, 60 bp, Artificial
  Synthetic oligonucleotide
ggcagtgcgtaaagtcgaagaaggggtgcagctcggtgtagagcgtgatgttgcccacct

SEQ ID NO: 47045 - DNA, 60 bp, Artificial
  Synthetic oligonucleotide
cctggcagtgcgtaaagtcgaagaaggggtgcagctcggtgtagagcgtgatgttgccca

SEQ ID NO: 47046 - DNA, 57 bp, Artificial
  Synthetic oligonucleotide
gctcgcgaatgaggtcatccagctgtcgcagcatgacaaacagggccgacagccgcg

SEQ ID NO: 47047 - DNA, 52 bp, Artificial
  Synthetic oligonucleotide
ggcatgcttggtgtctgcgggcgcgagagggccggctcagcctttaaatatg

SEQ ID NO: 47048 - DNA, 60 bp, Artificial
  Synthetic oligonucleotide
cgcagtactttagacactccagctccatggcgtattcgttgcatttcgaacacactacgc

SEQ ID NO: 47049 - DNA, 60 bp, Artificial
  Synthetic oligonucleotide
cgagatgtcatgacgggagagtgtcttcagtgcagagctgtcttgattcctatatccgag

SEQ ID NO: 47050 - DNA, 60 bp, Artificial
  Synthetic oligonucleotide
ggtagaagagcagacccgactcgtaggcgaacacgtcccacttgggcgtcatgaagagca

SEQ ID NO: 47051 - DNA, 60 bp, Artificial
  Synthetic oligonucleotide
cgcagcctcgcctttaaacagcctgatgagccgctgcacgtccccgctcaacatacgtat

SEQ ID NO: 47052 - DNA, 60 bp, Artificial
  Synthetic oligonucleotide
tcctgtcggtcccgataatagaacatcgagttgagcgggaagttctgctgacagtgcagc

SEQ ID NO: 47053 - DNA, 60 bp, Artificial
  Synthetic oligonucleotide
ccacggtgaacaccacggccaagaaaatgatccctaatatagcgaccactaagagagcaa

SEQ ID NO: 47054 - DNA, 60 bp, Artificial
  Synthetic oligonucleotide
ctgcagttttatcttggagattactatataatgtctgatgaaatctggtcaaggtttcag

SEQ ID NO: 47055 - DNA, 58 bp, Artificial
  Synthetic oligonucleotide
ctactccagcagatcgcattaccggagtagcacaacacaccagttgagaagatatgac

SEQ ID NO: 47056 - DNA, 60 bp, Artificial
  Synthetic oligonucleotide
gtcaggcacttcaacaataggcaaagaagatcctctaaaatgatagtttcctcttctagg

SEQ ID NO: 47057 - DNA, 60 bp, Artificial
  Synthetic oligonucleotide
gaccctctaaaatgatagtttcctcttctaggaactgtctctgaggaagaactccccagt

SEQ ID NO: 47058 - DNA, 60 bp, Artificial
  Synthetic oligonucleotide
gtgcacgccagctgctgatagctctttgctgtcagtagatcctctgataaaccacaacag

SEQ ID NO: 47059 - DNA, 60 bp, Artificial
  Synthetic oligonucleotide
cccaaatgtgcacaccagatgctgcaagctctttgctgtcagtagatcctctgataaacc

SEQ ID NO: 47060 - DNA, 60 bp, Artificial
  Synthetic oligonucleotide
tgttcgacttcgccagcctctaccccagcatcatccaggcccacaacctctgcttcagca

SEQ ID NO: 47061 - DNA, 60 bp, Artificial
  Synthetic oligonucleotide
acttcgccagcctctaccccagcatcatccaggcccacaacctctgcttcagcacgctgt

SEQ ID NO: 47062 - DNA, 60 bp, Artificial
  Synthetic oligonucleotide
gattttgccagcctctaccccagcatcatccaggcccacaacctctgcttcagcacgctg

SEQ ID NO: 47063 - DNA, 60 bp, Artificial
  Synthetic oligonucleotide
tgaagcccgtgaacccgtagaaggcgttgcaggtcaccttgagcgccagctgctccttgt

SEQ ID NO: 47064 - DNA, 60 bp, Artificial
  Synthetic oligonucleotide
ggaagtagacccactccaggcggttgcagaaggtgccgaagatggcctcgaagtggatgt

SEQ ID NO: 47065 - DNA, 60 bp, Artificial
  Synthetic oligonucleotide
caggttgtactccctcagcgcctcctccgcctcctggatatagctgtggtagaccgaaga

SEQ ID NO: 47066 - DNA, 60 bp, Artificial
  Synthetic oligonucleotide
acggttgcagaaggtgccgaagatggcctcgaagtggatgttgtagcgttccgggtcgtc

SEQ ID NO: 47067 - DNA, 60 bp, Artificial
  Synthetic oligonucleotide
ccggcggccgacggtggccgaggcgatggcgttggggttcagcttgcgggcctcgttcca

SEQ ID NO: 47068 - DNA, 60 bp, Artificial
  Synthetic oligonucleotide
cctgcgagacggtcacgtccttgtagtacatggtggccttgaacttgtacggggcgatgt

SEQ ID NO: 47069 - DNA, 60 bp, Artificial
  Synthetic oligonucleotide
cagacctgcgagacggtcacgtccttgtagtacatggtggccttgaacttgtacggggcg

SEQ ID NO: 47070 - DNA, 60 bp, Artificial
  Synthetic oligonucleotide
tgctggactcgttcgagcgcggcacggccgaccagatgctgcgcgtcctgatggagaagg

SEQ ID NO: 47071 - DNA, 60 bp, Artificial
  Synthetic oligonucleotide
ttcgggcgcagcagctcgccgctcatcgtgaccttgctgaacatgttggtgaagacgggc

SEQ ID NO: 47072 - DNA, 60 bp, Artificial
  Synthetic oligonucleotide
ggctcccgcaacactgtcgtcccacttcctggtttgtcctctgaaccttttattacgtgg

SEQ ID NO: 47073 - DNA, 60 bp, Artificial
  Synthetic oligonucleotide
actcggtgttgggcaacgtttgttggcgaggacgcttgagactgcgtgactgggtgttgg

SEQ ID NO: 47074 - DNA, 60 bp, Artificial
  Synthetic oligonucleotide
cggtcgtttcgcagtgaagtcataagagcgttgtcgccagagccaaaatagcgtaacagc

SEQ ID NO: 47075 - DNA, 60 bp, Artificial
  Synthetic oligonucleotide
catcggtcgcctccaaactccgcacgcctatcagacccgggcctctttcaacagtgagta

SEQ ID NO: 47076 - DNA, 60 bp, Artificial
  Synthetic oligonucleotide
tggaaggtgaaccgccccttggtggaagcgtgctcccggctccttgcactttaacattgc

SEQ ID NO: 47077 - DNA, 60 bp, Artificial
  Synthetic oligonucleotide
aaagaaagagaggaccaacggacgagcccatctatcaccgctcaccactctgccgccaga

SEQ ID NO: 47078 - DNA, 60 bp, Artificial
  Synthetic oligonucleotide
ggcctcgtgactttgaacggtgcctagtacgggtttggactgtgagttggctgcgtgggt

SEQ ID NO: 47079 - DNA, 60 bp, Artificial
  Synthetic oligonucleotide
cagcgagattctcccactaaggctaccgcgccaagaagccctgctctttctacgtggcac

SEQ ID NO: 47080 - DNA, 60 bp, Artificial
  Synthetic oligonucleotide
tatcaacgagccgttccgccgtccctcgtcacgctccggtgccccttcactgggtccagt

SEQ ID NO: 47081 - DNA, 60 bp, Artificial
  Synthetic oligonucleotide
cgacaaacagtacccgcaaagaaaatgtgtcagccgtcaatcttctcccaagtgtcctcg

SEQ ID NO: 47082 - DNA, 60 bp, Artificial
  Synthetic oligonucleotide
tgccgcccctactgcctccggctattggagaagaaagttgacacggcccagctccacatc

SEQ ID NO: 47083 - DNA, 60 bp, Artificial
  Synthetic oligonucleotide
agttgcccctcaaggtgcccaagcatacagaaaagacagtcacccagtccgattctcccc

SEQ ID NO: 47084 - DNA, 60 bp, Artificial
  Synthetic oligonucleotide
ggcattgcctccaccttacaaccaaccctcactgcctcatttgcatggtctacgcgcagg

SEQ ID NO: 47085 - DNA, 60 bp, Artificial
  Synthetic oligonucleotide
cgcccgtcctagtggttgacttcgccagcctctatccgagcatcattcaggcccacaatc

SEQ ID NO: 47086 - DNA, 60 bp, Artificial
  Synthetic oligonucleotide
ggactgcctttataaacaacccacatcccggccgtcaccagtaccatgggatacggatca

SEQ ID NO: 47087 - DNA, 60 bp, Artificial
  Synthetic oligonucleotide
cgcccttcacttctttgacctcctgacatcagctagtccaaccagccgcttcgctcgtga

SEQ ID NO: 47088 - DNA, 60 bp, Artificial
  Synthetic oligonucleotide
gactgtccttacggcctatgtctgaagcactcacagttcccaacgacacaaatgccccat

SEQ ID NO: 47089 - DNA, 60 bp, Artificial
  Synthetic oligonucleotide
atctatgaccattcgcgcccagacccggcctatgagttccgcagcaccgttaacccctgg

SEQ ID NO: 47090 - DNA, 60 bp, Artificial
  Synthetic oligonucleotide
ggacaccttcccacccaacaaccttttccattcacctgcgtaaaacaatgtagtctgtgt

SEQ ID NO: 47091 - DNA, 60 bp, Artificial
  Synthetic oligonucleotide
gggacgaagattcaggtcatgagccatggggacgtggggcggggaatgtggtccaagaaa

SEQ ID NO: 47092 - DNA, 60 bp, Artificial
  Synthetic oligonucleotide
gacgctgctggactgctttcctggatggtgaaatgtgatcgtgctggtttccttgttgat

SEQ ID NO: 47093 - DNA, 60 bp, Artificial
  Synthetic oligonucleotide
gaaacgtaggcctcgctggaacggctgcggatgtcttctattctaaggtcccggcacccc

SEQ ID NO: 47094 - DNA, 60 bp, Artificial
  Synthetic oligonucleotide
gcgccacgagaaagtgaaccgccggtgtcgcaacccaaccctaaaccagaaaccaccgtt

SEQ ID NO: 47095 - DNA, 60 bp, Artificial
  Synthetic oligonucleotide
gcccgggtccagatctgttgccctatgtcagttcctacacagtcgtgtggacgtgtcgca

SEQ ID NO: 47096 - DNA, 60 bp, Artificial
  Synthetic oligonucleotide
aacgccccagttcaggttctggtcctcatacaggtccccatgagccgtccaggaaaggca

SEQ ID NO: 47097 - DNA, 60 bp, Artificial
  Synthetic oligonucleotide
acttgagccaattcccgagctctctgttgtcgcacgggcctaggatcactctggtcaccg

SEQ ID NO: 47098 - DNA, 60 bp, Artificial
  Synthetic oligonucleotide
ccgctaaggccatctcaattgcgcataccaatacaccgccgtcgctgacatcatggccgg

SEQ ID NO: 47099 - DNA, 60 bp, Artificial
  Synthetic oligonucleotide
tgtccatcggttcccacgggacctctaccgtgaggcggaaaaggcgtctaggcacggcac

SEQ ID NO: 47100 - DNA, 60 bp, Artificial
  Synthetic oligonucleotide
ttctgacctatgaccccgcgcttaatgggctgctaggtggtgcagtggccaccaggaggc

SEQ ID NO: 47101 - DNA, 60 bp, Artificial
  Synthetic oligonucleotide
ggacgcacgtttgaaagccctacatggattcaacgccctactagctcctcatgccgccgc

SEQ ID NO: 47102 - DNA, 60 bp, Artificial
  Synthetic oligonucleotide
ggtccaaaggcaggtgggatgcagttgtcaaaagggcggctgagacacataggagaccgg

SEQ ID NO: 47103 - DNA, 60 bp, Artificial
  Synthetic oligonucleotide
tcaagggagacgcgaaaaggtgggagaggctgggaatcacgatgcaggaaccatccacgg

SEQ ID NO: 47104 - DNA, 60 bp, Artificial
  Synthetic oligonucleotide
gaggttggggtcgaggttggggtcgaggttggggtcgaggttggggtcgaggttggggtc

SEQ ID NO: 47105 - DNA, 60 bp, Artificial
  Synthetic oligonucleotide
tcccaaagaccatcttctccctgccgcgtggagcctcacgagtgttctctatacgtctgc

SEQ ID NO: 47106 - DNA, 60 bp, Artificial
  Synthetic oligonucleotide
ctcgccgtgtctgaaaactacagtacgtcacaagcactgaacctcggttaaggcaatccg

SEQ ID NO: 47107 - DNA, 60 bp, Artificial
  Synthetic oligonucleotide
gaaataaccccgagacagccctttccgttcttcaaaacttcaccgccggttacccacacc

SEQ ID NO: 47108 - DNA, 60 bp, Artificial
  Synthetic oligonucleotide
gccctcagggagttggcagaagcggctggacatggaaatccgagtttggatgatgggacc

SEQ ID NO: 47109 - DNA, 60 bp, Artificial
  Synthetic oligonucleotide
gggcttggctctcgacagtcatcgccgcagtggactttacacgcttattgatggctcact

SEQ ID NO: 47110 - DNA, 60 bp, Artificial
  Synthetic oligonucleotide
actacacgtccccttgccacgacccgttccaatgggcacaggcagcaaacaatggcgaga

SEQ ID NO: 47111 - DNA, 60 bp, Artificial
  Synthetic oligonucleotide
cagcagtgcctgggaaaaggacatgggcgtggtgacaagaggcacagactggacgttggt

SEQ ID NO: 47112 - DNA, 60 bp, Artificial
  Synthetic oligonucleotide
ctggtttcccgcgcctctgcagcttttcagtaagaccggactccaggttgttcatttcga

SEQ ID NO: 47113 - DNA, 60 bp, Artificial
  Synthetic oligonucleotide
cccgccggcctagtccctagcctcggggtctcagttgggtcgcccaaagcggcagagggg

SEQ ID NO: 47114 - DNA, 60 bp, Artificial
  Synthetic oligonucleotide
ccgaagagcagcgacgtttcttggtctgggaatgcaggttgcgccacacaacttctagcc

SEQ ID NO: 47115 - DNA, 60 bp, Artificial
  Synthetic oligonucleotide
cccctgcgaccctttaaatccagcctacgtgacctctgaaacccatgagccacttaacta

SEQ ID NO: 47116 - DNA, 60 bp, Artificial
  Synthetic oligonucleotide
actgccttctgtgactttgtgacggcgttaatcccggagaatatacgtgagaccccaccg

SEQ ID NO: 47117 - DNA, 60 bp, Artificial
  Synthetic oligonucleotide
cccgccacacccttcccaaaactgtccggctttcacaccactttgtccgtctgtctcgtg

SEQ ID NO: 47118 - DNA, 60 bp, Artificial
  Synthetic oligonucleotide
actgtaatggaagcgagcatgacttgtcttgatgcggtgtggaaaggctggcaggtgggg

SEQ ID NO: 47119 - DNA, 60 bp, Artificial
  Synthetic oligonucleotide
tagtttgtggcaggtaggtagtcagtgagcgccctggacggggacctggggtggcaagag

SEQ ID NO: 47120 - DNA, 60 bp, Artificial
  Synthetic oligonucleotide
gtccggttgggtgtatggacctgtggaagagtgtgaccatccaggttcccgttgttggcc

SEQ ID NO: 47121 - DNA, 60 bp, Artificial
  Synthetic oligonucleotide
acgcattctgcccaatttgccattaatcgcattacatactcaactggggaaagcttccga

SEQ ID NO: 47122 - DNA, 60 bp, Artificial
  Synthetic oligonucleotide
cggggatgttatacgataatacgcatctgctaacacacaaccaaacgcagccataccggg

SEQ ID NO: 47123 - DNA, 60 bp, Artificial
  Synthetic oligonucleotide
cggtgaatcgcctttggtttgatgaaacacgtccattaaagagcttcgcccatcagtagt

SEQ ID NO: 47124 - DNA, 60 bp, Artificial
  Synthetic oligonucleotide
ccggttggttccagccacaatctccgtctaatgcacaattaaaatcgctgttatttcgca

SEQ ID NO: 47125 - DNA, 60 bp, Artificial
  Synthetic oligonucleotide
ccggtcagttggtcaatttgccccacgtaccacatccacaagatgggcatcgtcgttttg

SEQ ID NO: 47126 - DNA, 60 bp, Artificial
  Synthetic oligonucleotide
gtctgcggggttaggcgtttcttctgttacagttagtatttcaccggcttcttcgtcgtc

SEQ ID NO: 47127 - DNA, 60 bp, Artificial
  Synthetic oligonucleotide
cgaggcgttacttacacaatggatgcttacaacatcgccctccccgattccccatgctcc

SEQ ID NO: 47128 - DNA, 60 bp, Artificial
  Synthetic oligonucleotide
ggagacgtagaccgatctctattgtaccaagacgttacgccgcatctaacaccccgttgg

SEQ ID NO: 47129 - DNA, 60 bp, Artificial
  Synthetic oligonucleotide
cgcctcgcgcgccgtttgttgcaggtcgttttggattgttaagtcatcccgtatccacgg

SEQ ID NO: 47130 - DNA, 60 bp, Artificial
  Synthetic oligonucleotide
gtgatgatacaggattagggacatggctggctttggtaggagaggcacaaaccgctgggc

SEQ ID NO: 47131 - DNA, 60 bp, Artificial
  Synthetic oligonucleotide
tctcgccacgcaggggattttgttacccctcctgataaaccggatccaagacaattcccc

SEQ ID NO: 47132 - DNA, 60 bp, Artificial
  Synthetic oligonucleotide
ctgcgtgttctagccacagagagaacagtcctagaaatagcgttgttggcgttgcgatca

SEQ ID NO: 47133 - DNA, 60 bp, Artificial
  Synthetic oligonucleotide
taatttagtcagtggccatccaccccgccgttgaccgctgccgcccaggcaccgttgtgt

SEQ ID NO: 47134 - DNA, 60 bp, Artificial
  Synthetic oligonucleotide
tgctatttatcgtcgtggggacaagtcatttattttcgatccacatggacatggcgcaat

SEQ ID NO: 47135 - DNA, 60 bp, Artificial
  Synthetic oligonucleotide
gcaaagaactattcaccgattcaactctgccacctaaattaccacttaacgcccacctgg

SEQ ID NO: 47136 - DNA, 60 bp, Artificial
  Synthetic oligonucleotide
agacgagaagcagcggatcctgcacgcgtggtatcattttctcctaatatgcgatccacc

SEQ ID NO: 47137 - DNA, 60 bp, Artificial
  Synthetic oligonucleotide
ctactggcactatttacaacggacaacgggcgtttcaatacccatatccacggaaaactt

SEQ ID NO: 47138 - DNA, 60 bp, Artificial
  Synthetic oligonucleotide
gtgtgcgttattgtgtcccggccatgtttgtattattcgctgtgttaaccctaaccgctg

SEQ ID NO: 47139 - DNA, 60 bp, Artificial
  Synthetic oligonucleotide
cgcctgtgtcatcatctacaaataaacgccgctttaccccttttggtctacctgggcgtc

SEQ ID NO: 47140 - DNA, 60 bp, Artificial
  Synthetic oligonucleotide
ggtgaaaatccctcactgcattctgttacctgtgccgatgcaaccgtgggcataaacgct

SEQ ID NO: 47141 - DNA, 60 bp, Artificial
  Synthetic oligonucleotide
cctcccggaggcctaggtcaaattatgcgtcgttgtttcgctccccgtcccctaatttct

SEQ ID NO: 47142 - DNA, 60 bp, Artificial
  Synthetic oligonucleotide
cgcgaaggtttaacggaggcaacccactcgttatctataaccgcagacccatattccggg

SEQ ID NO: 47143 - DNA, 60 bp, Artificial
  Synthetic oligonucleotide
agacggacccgccatctcgcagtaccacgtgtatgtgaaagcgcctgcgcggccagacgc

SEQ ID NO: 47144 - DNA, 60 bp, Artificial
  Synthetic oligonucleotide
cgcgttacttggagactactttaaatttacgccattgtcactaacccatcagctacgtac

SEQ ID NO: 47145 - DNA, 60 bp, Artificial
  Synthetic oligonucleotide
ccacggctctgtaaaaccgttccaacatcccctgtaatggcacgaatagcatcccggacg

SEQ ID NO: 47146 - DNA, 60 bp, Artificial
  Synthetic oligonucleotide
gcgtgttcttggagatgttattgccgtttcttattgtcccaagctaggcaccgatacgcg

SEQ ID NO: 47147 - DNA, 60 bp, Artificial
  Synthetic oligonucleotide
cggacggactttggcccgtaactggaattaccgcttttcattacttagctccgtggacca

SEQ ID NO: 47148 - DNA, 60 bp, Artificial
  Synthetic oligonucleotide
ccctgttacgccatttacaaggcatttctcggcgctcttcggttggtgcgagatcacaag

SEQ ID NO: 47149 - DNA, 60 bp, Artificial
  Synthetic oligonucleotide
accgcccgtctacccctccgcccggtgtgtatgttctcttcaaacgaccgcgctcatctc

SEQ ID NO: 47150 - DNA, 60 bp, Artificial
  Synthetic oligonucleotide
ttccttgctgtggaaagtcaactccttccgtaccccacataacgttttccgctcgaatgc

SEQ ID NO: 47151 - DNA, 60 bp, Artificial
  Synthetic oligonucleotide
ccaaccccaagctgtacacatcgatgccatgtggcgtcatttcatctcggggcgcctgca

SEQ ID NO: 47152 - DNA, 60 bp, Artificial
  Synthetic oligonucleotide
catcatcgccttcccagaaacctaccgatccacgcacaccaaggtccccggcgtttgcaa

SEQ ID NO: 47153 - DNA, 60 bp, Artificial
  Synthetic oligonucleotide
ggaggaattggcgttccgcgtgtaacactaaatgctaaaccatgtgcttgtccgggtccg

SEQ ID NO: 47154 - DNA, 60 bp, Artificial
  Synthetic oligonucleotide
ccgtgacatcgttggccttgtcgaaaacgcttctggagactcattgacaactttatacgc

SEQ ID NO: 47155 - DNA, 60 bp, Artificial
  Synthetic oligonucleotide
tggcgtgcctcttccttgcccgtacccgtcgcctgcttgtcccgtgtgtcctcatcttct

SEQ ID NO: 47156 - DNA, 60 bp, Artificial
  Synthetic oligonucleotide
ccaggaacacatagcgcatcatctttacatgaagcagcaatcaacggagcgggtgctggt

SEQ ID NO: 47157 - DNA, 60 bp, Artificial
  Synthetic oligonucleotide
tgccccgaaataccggcctccattctccgacgtttgacaagctcccatctatcttgtaac

SEQ ID NO: 47158 - DNA, 60 bp, Artificial
  Synthetic oligonucleotide
cgcgttaatacaggcgtgttataaccatcacatgtcttcgtcgctcatgcagcatcttgt

SEQ ID NO: 47159 - DNA, 60 bp, Artificial
  Synthetic oligonucleotide
ggtcggagtgaaagccatgctgcgctccctaactgtgtacaaccccagggtaaacccgac

SEQ ID NO: 47160 - DNA, 60 bp, Artificial
  Synthetic oligonucleotide
cgagtttggctgttgtatctggaactaaaactacaggactcgcaggagctggtgttacgc

SEQ ID NO: 47161 - DNA, 60 bp, Artificial
  Synthetic oligonucleotide
aaaactttgccgctctagtaactctaccaacgtcgtggtctccgccctttgttgtgtcaa

SEQ ID NO: 47162 - DNA, 58 bp, Artificial
  Synthetic oligonucleotide
caaatgcacagagagcacacactctcacgtaccgcgctggacgtcgtgtacccttcct

SEQ ID NO: 47163 - DNA, 60 bp, Artificial
  Synthetic oligonucleotide
caggtacaattgctactaacgcaccggaacttcttgcaagggatccatacggcccggccg

SEQ ID NO: 47164 - DNA, 60 bp, Artificial
  Synthetic oligonucleotide
gaaaactcacatacaaacactggccaaatccgcgctttaatagcacctgtgattacccca

SEQ ID NO: 47165 - DNA, 60 bp, Artificial
  Synthetic oligonucleotide
ggtcccacgccacgtaccacatgtccgaattttgcaatttcaccttctggttttcgaggg

SEQ ID NO: 47166 - DNA, 60 bp, Artificial
  Synthetic oligonucleotide
atttgctgtcccgccagtccgctcctctcaccctcggcgggttgagacttgcgctttcta

SEQ ID NO: 47167 - DNA, 60 bp, Artificial
  Synthetic oligonucleotide
atgtaaaccgtgtatccagacccgccgcactccgcgccttcgtctacctcaacttcggtg

SEQ ID NO: 47168 - DNA, 60 bp, Artificial
  Synthetic oligonucleotide
cggctgtaacacctaaaccaaagggcgcagagtttcatacgtggcattaccattctcatg

SEQ ID NO: 47169 - DNA, 60 bp, Artificial
  Synthetic oligonucleotide
gatcttgtatatgccgttgattgtggggttgtttgggtgtgaaatgctggcgttgacgtt

SEQ ID NO: 47170 - DNA, 60 bp, Artificial
  Synthetic oligonucleotide
tacctacattagaatctgcctttcgtggccgtttgctggttcagtcactcaaaccttccg

SEQ ID NO: 47171 - DNA, 60 bp, Artificial
  Synthetic oligonucleotide
ggctccgctccaccccgttacccgaaaagtacccaatctgcccgaactgatagatgtcct

SEQ ID NO: 47172 - DNA, 60 bp, Artificial
  Synthetic oligonucleotide
gaacgttaggagaagcgcgatatagccgccgacccaaagagtgtccgaagcaggaagcgc

SEQ ID NO: 47173 - DNA, 60 bp, Artificial
  Synthetic oligonucleotide
accgggtggcacaggcattgcagcgcgtccacaaagtcgagccgctcgagcccgcggtcg

SEQ ID NO: 47174 - DNA, 60 bp, Artificial
  Synthetic oligonucleotide
cgccacggccgccgagctagcccgacccgaactgagcgccaaactgcagacgttcctaga

SEQ ID NO: 47175 - DNA, 60 bp, Artificial
  Synthetic oligonucleotide
aattttggacagaacgctcggcagacggtggagatcgacattcgctacgcgcacacgggc

SEQ ID NO: 47176 - DNA, 60 bp, Artificial
  Synthetic oligonucleotide
ataacgcgcccaaatcccggaggcacgccctgcatcttgagctcgtctaaagtcaagcgc

SEQ ID NO: 47177 - DNA, 60 bp, Artificial
  Synthetic oligonucleotide
acgtgtgccttcggggtgtgtggctactggtcgttcgtgggcggtctgagtttcacggaa

SEQ ID NO: 47178 - DNA, 60 bp, Artificial
  Synthetic oligonucleotide
tgagtgagctgaacatgccgtcccatcgagcagaccagagacccggagtgaggagcagta

SEQ ID NO: 47179 - DNA, 60 bp, Artificial
  Synthetic oligonucleotide
ccaatcaagcctccacgcagcgccaccgccagtccgtgcatgacaatcttggtaggttct

SEQ ID NO: 47180 - DNA, 60 bp, Artificial
  Synthetic oligonucleotide
ttcggagtcgcccgtctccagcgttccgcctcgctatgcctgcaacgagccctggtccct

SEQ ID NO: 47181 - DNA, 60 bp, Artificial
  Synthetic oligonucleotide
acgtgaacccgctgcgcctgccgtacgagaagaacacgaccatcacgccgtacatctgcc

SEQ ID NO: 47182 - DNA, 60 bp, Artificial
  Synthetic oligonucleotide
gcatgttgccaaaaccaccaccaaagcctgcatcgctccagtctccaaaaccagacgtgt

SEQ ID NO: 47183 - DNA, 60 bp, Artificial
  Synthetic oligonucleotide
cggtgccaatggtgccaatcacgcgcaactgtcccttcatgagcggcaaaagcctccagt

SEQ ID NO: 47184 - DNA, 57 bp, Artificial
  Synthetic oligonucleotide
cccctccggccaaccctctcccagcagactcggacctgaacaaccgcctcgtcagag

SEQ ID NO: 47185 - DNA, 60 bp, Artificial
  Synthetic oligonucleotide
gcacacggccggcagcaaacacgacagcttcaacatgaccaacgccggacactgtcacat

SEQ ID NO: 47186 - DNA, 60 bp, Artificial
  Synthetic oligonucleotide
agttggaggagcaggcaggcggtgagagtgaggatcggggctggtgcggagacctgcgta

SEQ ID NO: 47187 - DNA, 60 bp, Artificial
  Synthetic oligonucleotide
ggctgcgattcgggcgtaaactgtgtggctagaatgactgatggctgattgactctgaca

SEQ ID NO: 47188 - DNA, 60 bp, Artificial
  Synthetic oligonucleotide
aggatttggcaggtgaggcgttcgaaggtgacggccggggcgagggctcgagaggtagac

SEQ ID NO: 47189 - DNA, 60 bp, Artificial
  Synthetic oligonucleotide
gggtctgccggtgagttccagtgtcagatgtgagtaaggttcggatgaggtctcggcgtg

SEQ ID NO: 47190 - DNA, 60 bp, Artificial
  Synthetic oligonucleotide
tagtgttggcgggacttgaggtgaccgatgtgctgctcttgggtgtggtttctgatgcgg

SEQ ID NO: 47191 - DNA, 60 bp, Artificial
  Synthetic oligonucleotide
tgccgagcaggaggcgtgcgatattaaagtggagaaggagcggccgaacgagtcacagca

SEQ ID NO: 47192 - DNA, 60 bp, Artificial
  Synthetic oligonucleotide
tacaccgctccgaaccaatccaacaccaccatgacctcggccacgaacgagcgcccaaga

SEQ ID NO: 47193 - DNA, 60 bp, Artificial
  Synthetic oligonucleotide
ggcgtatgggcagggatatcgtgggaaagaccaggcagctccgttcagcttgtcgtaggt

SEQ ID NO: 47194 - DNA, 60 bp, Artificial
  Synthetic oligonucleotide
caggtacagtgaggccagtatatacacacacagggagtcaaagcccagagacgcagcagg

SEQ ID NO: 47195 - DNA, 60 bp, Artificial
  Synthetic oligonucleotide
attctcctccgtaccaccatcaccaccctcggatccctcctgcatgaccgcctcgagccc

SEQ ID NO: 47196 - DNA, 60 bp, Artificial
  Synthetic oligonucleotide
cttctatggtgctcctccgacgtccccaggcagaatggcggttccctaaacgtgcattgc

SEQ ID NO: 47197 - DNA, 60 bp, Artificial
  Synthetic oligonucleotide
gcgccgcaccgagtcccgcgcgtatctttcactctggcacctggccctctggcatccagc

SEQ ID NO: 47198 - DNA, 60 bp, Artificial
  Synthetic oligonucleotide
acggtacctcccacaacagtagctaccgcatctacgctttccacaacactacccaccact

SEQ ID NO: 47199 - DNA, 60 bp, Artificial
  Synthetic oligonucleotide
ccccacccactaccgctatatcaacacgctgttaaagattgagtttccagtatgagccat

SEQ ID NO: 47200 - DNA, 60 bp, Artificial
  Synthetic oligonucleotide
gttgcctgcgccgctgcaaccaccgctcccaccagcctcgcatgcggaaccgacccttaa

SEQ ID NO: 47201 - DNA, 60 bp, Artificial
  Synthetic oligonucleotide
ccggtgtatcacgttgggaagctgttggacgcgctcacagaaacagaagctggggtcgtg

SEQ ID NO: 47202 - DNA, 60 bp, Artificial
  Synthetic oligonucleotide
gacgaaacgctgaagatgcaaaccgccagggcgctctcgggaccgtccgcgcgtgttgat

SEQ ID NO: 47203 - DNA, 60 bp, Artificial
  Synthetic oligonucleotide
ttgagcatgtcgaacggggcattgttgaggcgggtgaggaagcaggtggcgtcgctagtt

SEQ ID NO: 47204 - DNA, 60 bp, Artificial
  Synthetic oligonucleotide
acaacacactcctcgcccgtctcatcgctcctcctccaccccatcacgcactatgcttct

SEQ ID NO: 47205 - DNA, 60 bp, Artificial
  Synthetic oligonucleotide
tgatgcagacgacatagcggagacacccgaggcggcctgagcaacagcggcgttggcgtc

SEQ ID NO: 47206 - DNA, 60 bp, Artificial
  Synthetic oligonucleotide
ttccgccggctccacataccaacacgccaagaggccacatgtctaaaacactcccagcag

SEQ ID NO: 47207 - DNA, 60 bp, Artificial
  Synthetic oligonucleotide
atagtcgctggcacgctcacactgtctggctcgcgaaacacgttgttctgctcatccggc

SEQ ID NO: 47208 - DNA, 60 bp, Artificial
  Synthetic oligonucleotide
ggttcggcggtggttgtcgcagtaagaacggtggtgacgttagtgctcacgctcgtggta

SEQ ID NO: 47209 - DNA, 60 bp, Artificial
  Synthetic oligonucleotide
cagcagcaaacactaccgcgagcagcctcaccagcatcgtaacttcacttgccactacca

SEQ ID NO: 47210 - DNA, 60 bp, Artificial
  Synthetic oligonucleotide
aactgcactactcctgcggatttcagccccgagggtacaacaccgcgtccgagatgtcag

SEQ ID NO: 47211 - DNA, 60 bp, Artificial
  Synthetic oligonucleotide
gcagatgacaacacaaccaccttacctccctggcccatcgaaatacagagcacatacttt

SEQ ID NO: 47212 - DNA, 60 bp, Artificial
  Synthetic oligonucleotide
aagtgccgcgggatgtccttgtagtccaggtccaccttccgctcccgcagggcctcctcg

SEQ ID NO: 47213 - DNA, 60 bp, Artificial
  Synthetic oligonucleotide
acgagcgtggtgaagcacaggttgtgcgcctggatgatgctggggtagaggctggcaaag

SEQ ID NO: 47214 - DNA, 60 bp, Artificial
  Synthetic oligonucleotide
ttgcgcgcggcggcgtccatggtgatgaagacgggcttgttgaggacgtaacacgagcac

SEQ ID NO: 47215 - DNA, 60 bp, Artificial
  Synthetic oligonucleotide
cggcggcgtccatggtgatgaagacgggcttgttgaggacgtagcacgagcacgcggtgg

SEQ ID NO: 47216 - DNA, 60 bp, Artificial
  Synthetic oligonucleotide
acttgtacggggcgatgttctccttgaagacgaccgcgatcccctccgtgtagttctggc

SEQ ID NO: 47217 - DNA, 60 bp, Artificial
  Synthetic oligonucleotide
tcatctcctcgcttaggtactcgtcctccaggagcgccagccagtcctcgatctgcagct

SEQ ID NO: 47218 - DNA, 60 bp, Artificial
  Synthetic oligonucleotide
aggttctcgagctccgccatcacgcgctcggtcgccgcgcggtacgtctcctgcatgacg

SEQ ID NO: 47219 - DNA, 60 bp, Artificial
  Synthetic oligonucleotide
gaggagcaggagtagttattttgtgacattctgtatctttatgaggcgtacacggtgttg

SEQ ID NO: 47220 - DNA, 60 bp, Artificial
  Synthetic oligonucleotide
gccaacatgaacagtgctgccaatcataatattcttcttccccagaacccgaacccgaca

SEQ ID NO: 47221 - DNA, 60 bp, Artificial
  Synthetic oligonucleotide
tttactagctgattttgggttatcaactatatatcaccctgtcaacaacgaaactggatt

SEQ ID NO: 47222 - DNA, 60 bp, Artificial
  Synthetic oligonucleotide
cagcaggcgtaattgcatcttcggtttctacaggaatcacagcgttacgttcttgagtta

SEQ ID NO: 47223 - DNA, 60 bp, Artificial
  Synthetic oligonucleotide
aaccaagcaacctccagctatcacaggatttccacaacttgtttggccagctatttctga

SEQ ID NO: 47224 - DNA, 60 bp, Artificial
  Synthetic oligonucleotide
gactaatatatcgaggttgggcatctatatgacaagggttaaattgacctaacgcttgag

SEQ ID NO: 47225 - DNA, 60 bp, Artificial
  Synthetic oligonucleotide
caggaggatgtacaggaggtggttctggtttgattttaagagtctcgtgtttgtacatgc

SEQ ID NO: 47226 - DNA, 60 bp, Artificial
  Synthetic oligonucleotide
ctttggggagttgcaattctgttttcactgcctgaacttatctttcctactgtagtaaac

SEQ ID NO: 47227 - DNA, 60 bp, Artificial
  Synthetic oligonucleotide
cgtggtctacctggatctgatggtctcaaaggatctgcagggagtaaaggaaagccaggt

SEQ ID NO: 47228 - DNA, 60 bp, Artificial
  Synthetic oligonucleotide
ccccaacttcacagtcattgatgatgctttatgtcattgataatgccttgagttaagggg

SEQ ID NO: 47229 - DNA, 60 bp, Artificial
  Synthetic oligonucleotide
caccggatgatataggtttaaccctttaacacctaagctatatactcattcgctgcactt

SEQ ID NO: 47230 - DNA, 60 bp, Artificial
  Synthetic oligonucleotide
ctccggtcccattgataatttaactcatcaaccagtagctggtcgcagtcgatatggagg

SEQ ID NO: 47231 - DNA, 60 bp, Artificial
  Synthetic oligonucleotide
tcgcaaaattccgatcggtggaagggtttattgacaggagctattttaggaatttccagc

SEQ ID NO: 47232 - DNA, 60 bp, Artificial
  Synthetic oligonucleotide
catcagttatttgccacacacaaaaccctgtttctaaccatacatctcgatcatcagcac

SEQ ID NO: 47233 - DNA, 60 bp, Artificial
  Synthetic oligonucleotide
tcttgggcttctgatgaaattaacactgttgtttgtgctcaggagttgtatgctgcaggg

SEQ ID NO: 47234 - DNA, 60 bp, Artificial
  Synthetic oligonucleotide
cctaaggcatcatcgcaacgtggagttaaaaggtactcatcctttaaaccctaaggctta

SEQ ID NO: 47235 - DNA, 60 bp, Artificial
  Synthetic oligonucleotide
gaatacgcaccgtcatccaagcattaagtacataatctccaccacgagaaacattgacag

SEQ ID NO: 47236 - DNA, 60 bp, Artificial
  Synthetic oligonucleotide
gtttcggtttctcttaattcattaatttcttgatcgcgtacagtggccgcagttcctaaa

SEQ ID NO: 47237 - DNA, 60 bp, Artificial
  Synthetic oligonucleotide
gagttccatcatgaaatgttattttaacacgacttgtggtttgatgaacgctgataggtt

SEQ ID NO: 47238 - DNA, 60 bp, Artificial
  Synthetic oligonucleotide
gaccaagcaaacagattttccttctttggatttaccataacctctgatctcttgagtcaa

SEQ ID NO: 47239 - DNA, 60 bp, Artificial
  Synthetic oligonucleotide
gtcgtcgatgccatcttaagaatttaaaggttaagctacaaacaagtgttgcaagtgggt

SEQ ID NO: 47240 - DNA, 60 bp, Artificial
  Synthetic oligonucleotide
cctcaaggtgaagaagctcgctgggaaacacaagatttaatgaacccatcacaattaatt

SEQ ID NO: 47241 - DNA, 60 bp, Artificial
  Synthetic oligonucleotide
caggtgattggtttgctacttcagctaaccccgttttaacattaagaaaaggtgcgttgc

SEQ ID NO: 47242 - DNA, 66 bp, Artificial
  Synthetic oligonucleotide
cacccggaacttatactggattacaaaattcattaagaaaatgcttaagatgttctacttgttctc

SEQ ID NO: 47243 - DNA, 65 bp, Artificial
  Synthetic oligonucleotide
gatcattcatgatgtagagttaaaaggtgcttactcttaaaatctgaaagtgtcattagtgatgc

SEQ ID NO: 47244 - DNA, 60 bp, Artificial
  Synthetic oligonucleotide
gccattatgctgatgtacctgtgcctacttatgattgttggattagagcttggagtgccg

SEQ ID NO: 47245 - DNA, 60 bp, Artificial
  Synthetic oligonucleotide
ccctttaactcttccatgcacagcaatactgatgtattgttggtaacacatttggtatta

SEQ ID NO: 47246 - DNA, 60 bp, Artificial
  Synthetic oligonucleotide
gcggctgttcttaaataatataaacctttacaacctaacttccaagcatcaaaatgaacc

SEQ ID NO: 47247 - DNA, 60 bp, Artificial
  Synthetic oligonucleotide
atctgctgtccaatgagcaaatggaattgtaatagtagtagcgtggtctgcagcaattgg

SEQ ID NO: 47248 - DNA, 60 bp, Artificial
  Synthetic oligonucleotide
ctagtttaaagcaatattccacccctaaacaagaagtgaattaagtctgcgaggacaaaa

SEQ ID NO: 47249 - DNA, 60 bp, Artificial
  Synthetic oligonucleotide
ttttaaaggggtctgttgatattctctacctgctctatttccccaacccacctttaaacc

SEQ ID NO: 47250 - DNA, 60 bp, Artificial
  Synthetic oligonucleotide
ctcgatgtgaagaacttagatttaatttatggcacgctgaatctccatggcctttaatcg

SEQ ID NO: 47251 - DNA, 60 bp, Artificial
  Synthetic oligonucleotide
cgcagttttatgcctaatggtagatattcttcagggtctgtagtttgtcaaggatttatt

SEQ ID NO: 47252 - DNA, 58 bp, Artificial
  Synthetic oligonucleotide
catggacctcctggttgcggtaaaacattaatggctcgatgcattgctcaagctttta

SEQ ID NO: 47253 - DNA, 60 bp, Artificial
  Synthetic oligonucleotide
ttgtgctcaagatgctgtatctcaaaatgaaacggtccaacgcatagttgaacagctttc

SEQ ID NO: 47254 - DNA, 60 bp, Artificial
  Synthetic oligonucleotide
ctatatacccatttgcgatgcttactcatatatagcttaggtgttaaagggtaaacactc

SEQ ID NO: 47255 - DNA, 60 bp, Artificial
  Synthetic oligonucleotide
ctctttaacacttctgtgcagtgccaacgcattatattggtgcgtttggaattaactctt

SEQ ID NO: 47256 - DNA, 60 bp, Artificial
  Synthetic oligonucleotide
catcattggtgcgtgaggggttaaagggttaactcttgaggtgctgttgatgcttcatca

SEQ ID NO: 47257 - DNA, 60 bp, Artificial
  Synthetic oligonucleotide
agatctgctgacgaacctatgtcattagcagctacatgttattcttgtggctataaatgg

SEQ ID NO: 47258 - DNA, 60 bp, Artificial
  Synthetic oligonucleotide
ctgatgcttgttggtatgtgccttgcgccgctgatcctacacaattaaaatcaagtgatt

SEQ ID NO: 47259 - DNA, 60 bp, Artificial
  Synthetic oligonucleotide
gacggctgaacaatctgtagtgttgtatagagcagctccttggttaataacttttactga

SEQ ID NO: 47260 - DNA, 66 bp, Artificial
  Synthetic oligonucleotide
ccgatgatgaggttaaagtgaaagtatatgaaaatccttattttgaacgcatgtttaaagatgctg

SEQ ID NO: 47261 - DNA, 60 bp, Artificial
  Synthetic oligonucleotide
ctattagctcatccagctgttgatgcttctggttctgtttgtgatgatgtatgggatgtt

SEQ ID NO: 47262 - DNA, 60 bp, Artificial
  Synthetic oligonucleotide
cccttgcactgaaatgacccaatgaattatgtctacagcgaggatcttctgaacaccatg

SEQ ID NO: 47263 - DNA, 60 bp, Artificial
  Synthetic oligonucleotide
tacctacatacatcctataaccttcagctccataagatccatcgggataaacagccagcg

SEQ ID NO: 47264 - DNA, 66 bp, Artificial
  Synthetic oligonucleotide
ggctgatattttacatgctaattgacgcttgtctaatacaattttaagagttgaatcggttgtttc

SEQ ID NO: 47265 - DNA, 60 bp, Artificial
  Synthetic oligonucleotide
cccttttaactccatgctattgtcaatgatgctttgtatcagcaacgatttcttggggtt

SEQ ID NO: 47266 - DNA, 60 bp, Artificial
  Synthetic oligonucleotide
gatgctattttacatattgacggtccaaatttccagccatgattcacttcaaaagcccat

SEQ ID NO: 47267 - DNA, 60 bp, Artificial
  Synthetic oligonucleotide
ctccattctaccaccttacccatacccttcatcacaccaaatcgttgaaaattcaacaac

SEQ ID NO: 47268 - DNA, 60 bp, Artificial
  Synthetic oligonucleotide
cttcatcacccattaagttagttgaattaaaagatcctgaattttcagatgatgagcggt

SEQ ID NO: 47269 - DNA, 60 bp, Artificial
  Synthetic oligonucleotide
agccagcccgagggtagccgccgctagtccgtgcccagagtttgctagggatcccaccag

SEQ ID NO: 47270 - DNA, 60 bp, Artificial
  Synthetic oligonucleotide
gggcctccgacggtcctcgatgagaaacgcaacctcgcacagttgttcgaaagctgaggt

SEQ ID NO: 47271 - DNA, 60 bp, Artificial
  Synthetic oligonucleotide
ccctctcaaactctcgacccctgacggctatcctctccatgcacttttcgggaggagtgt

SEQ ID NO: 47272 - DNA, 60 bp, Artificial
  Synthetic oligonucleotide
ttagagctccgtatctggtgcctctcattccgtaacggtgcctgtcgtcgcggcgtatgg

SEQ ID NO: 47273 - DNA, 60 bp, Artificial
  Synthetic oligonucleotide
taggcccactcccatagacaggtacaccatgaggacgtgcgaggtcggacccctgagcag

SEQ ID NO: 47274 - DNA, 60 bp, Artificial
  Synthetic oligonucleotide
gacggagaggcccgaggagacggtgaggatggtggccgacgcggtgtgctccaagatcct

SEQ ID NO: 47275 - DNA, 60 bp, Artificial
  Synthetic oligonucleotide
ggagaggctccctgtctaggcgagcagccgaccgaacatccagaattgcgaacgctatac

SEQ ID NO: 47276 - DNA, 60 bp, Artificial
  Synthetic oligonucleotide
tcaagatcaggggcagcaacctctgcaacgagatacacctccccacggccgcagacagaa

SEQ ID NO: 47277 - DNA, 60 bp, Artificial
  Synthetic oligonucleotide
acagtttgtcggcgtgtccctctgggtccccatctttagctctccgacgtcagccgcgca

SEQ ID NO: 47278 - DNA, 60 bp, Artificial
  Synthetic oligonucleotide
agaaacgtccttcccttcaggcccgagaccaggcaccacgactgcaccaccgcctcgtcc

SEQ ID NO: 47279 - DNA, 60 bp, Artificial
  Synthetic oligonucleotide
gactggacccagcgtcgtacagcctcagcctctctatcccgtcgccatttatcacacagt

SEQ ID NO: 47280 - DNA, 60 bp, Artificial
  Synthetic oligonucleotide
aaagcgtgcaccctcctgctcccgcacccggggcactttacggtcccctcctcgaccttt

SEQ ID NO: 47281 - DNA, 60 bp, Artificial
  Synthetic oligonucleotide
ctcacgtcagggccaaggagcgtcattgatggcggacgacgcgccgcttcgcctcatacc

SEQ ID NO: 47282 - DNA, 60 bp, Artificial
  Synthetic oligonucleotide
tgaggacccggtcggcaacatatctggtcactctctcaaacaatcgcaatggatcccaca

SEQ ID NO: 47283 - DNA, 60 bp, Artificial
  Synthetic oligonucleotide
atctgcaacgcgctgccgggcatcaaggacgccgaccaggccacatggaacagggtgagg

SEQ ID NO: 47284 - DNA, 60 bp, Artificial
  Synthetic oligonucleotide
gcggaaggctagttacccaccccggtggacccgtaccccgcgtcacccctgtcggtagag

SEQ ID NO: 47285 - DNA, 60 bp, Artificial
  Synthetic oligonucleotide
tatttgtggccactcaccgccacaggggcatgatggggttcgcggcggccgtgcaggaca

SEQ ID NO: 47286 - DNA, 60 bp, Artificial
  Synthetic oligonucleotide
ccccgctcaggatccaaagtactgcctcttttcctttgtggaggtgctgccgtcttgcga

SEQ ID NO: 47287 - DNA, 60 bp, Artificial
  Synthetic oligonucleotide
tcctcagaaggggaaaagtgctccagccagtcgccgagggtgtagtcgtagtgctcgtga

SEQ ID NO: 47288 - DNA, 60 bp, Artificial
  Synthetic oligonucleotide
ttttgccggggatcctggccatgcccaagtccaccaccacggccctcactccgtttgtct

SEQ ID NO: 47289 - DNA, 60 bp, Artificial
  Synthetic oligonucleotide
cagcgtgaccgatgtagagggcgacgtgagggtgacgggcgtaaagtttaaccagtttgc

SEQ ID NO: 47290 - DNA, 60 bp, Artificial
  Synthetic oligonucleotide
tcccaacggagacgcggctacagccctggccaacatgtacgtcgacaccggcccagagta

SEQ ID NO: 47291 - DNA, 60 bp, Artificial
  Synthetic oligonucleotide
gacggttgcatgggtgtcaagggttctgcggacgtagctcccctcaacaggtctatgtgg

SEQ ID NO: 47292 - DNA, 60 bp, Artificial
  Synthetic oligonucleotide
cacgaccatgtccctgactgtgctgctcatggcctgcctctcgtccccggtgatgagggc

SEQ ID NO: 47293 - DNA, 60 bp, Artificial
  Synthetic oligonucleotide
acatgttgtccacgtagtccgtcatgacctgcaccgtctcggggtccgtcaggctggggt

SEQ ID NO: 47294 - DNA, 60 bp, Artificial
  Synthetic oligonucleotide
tcctgacctgactcgggttcctggcctccgcagccgatccccacctcctgtctggcatga

SEQ ID NO: 47295 - DNA, 60 bp, Artificial
  Synthetic oligonucleotide
acttttccctctttacctgcacggctcccttccccagcctgatccacccgcaagtgggaa

SEQ ID NO: 47296 - DNA, 60 bp, Artificial
  Synthetic oligonucleotide
cctcgaggccctggtcgcaaagaaggacgagctgtacaagatttgcgccgccgtaaactc

SEQ ID NO: 47297 - DNA, 60 bp, Artificial
  Synthetic oligonucleotide
aaagactaaatgcgacgcaagcagacctccccaaagcacgccgacgcctaccggttcctc

SEQ ID NO: 47298 - DNA, 60 bp, Artificial
  Synthetic oligonucleotide
ccaccaacacgttccagtgcctgccgttcttaaacagcgccctcacctccttgtcgttga

SEQ ID NO: 47299 - DNA, 60 bp, Artificial
  Synthetic oligonucleotide
ggacggaggccctcttgctcagcctgtactacccaaacgaccgcaagctcctagactaca

SEQ ID NO: 47300 - DNA, 60 bp, Artificial
  Synthetic oligonucleotide
agggtcagagagcactcgtagctgtgagagttggtgcgcctgtcgaatgtcgccagcaga

SEQ ID NO: 47301 - DNA, 60 bp, Artificial
  Synthetic oligonucleotide
cgcccatcatttcggtacgctcactctgctccaaacgctgtccggagtctatcgaccgtc

SEQ ID NO: 47302 - DNA, 60 bp, Artificial
  Synthetic oligonucleotide
caggaacactccgaccctggcggcctcggtcatggcctttccgcacctgcagccgtgggg

SEQ ID NO: 47303 - DNA, 60 bp, Artificial
  Synthetic oligonucleotide
tacacactctgtgcccaaagcctgcgcccagagagagggttggtcgtgcgtcacagtgga

SEQ ID NO: 47304 - DNA, 60 bp, Artificial
  Synthetic oligonucleotide
tcatccccagggacgacggatggttctctacggcggcaaacccggctcacaccctccacg

SEQ ID NO: 47305 - DNA, 60 bp, Artificial
  Synthetic oligonucleotide
aggactcgagggcctgggcgaggggcaggaacgtggcgtccgtgctgtgtcaggtctctc

SEQ ID NO: 47306 - DNA, 60 bp, Artificial
  Synthetic oligonucleotide
aacgtgtccaccctccacccagactctgccgccctcgacggtcgcctgcgcgagatggcg

SEQ ID NO: 47307 - DNA, 60 bp, Artificial
  Synthetic oligonucleotide
cacctacgccgacatagccgtccccacctacgagtgcattgctcacgcctacacgtcctc

SEQ ID NO: 47308 - DNA, 60 bp, Artificial
  Synthetic oligonucleotide
tgatgtccacctccctgtccgacacatagtccgagagagccgtccctcccctggatatag

SEQ ID NO: 47309 - DNA, 60 bp, Artificial
  Synthetic oligonucleotide
tgattcccctctgcccctgaggcccagccgctcccacgggcccgaccggaccgatgtcac

SEQ ID NO: 47310 - DNA, 60 bp, Artificial
  Synthetic oligonucleotide
tcggcctccctggtgcccaacttttacaagacttccaccgactttgtccagtctcccgcg

SEQ ID NO: 47311 - DNA, 60 bp, Artificial
  Synthetic oligonucleotide
acggccgagtagtctgcgagcctggtgaccctgcccgggttggcggcggtaaagtcgtag

SEQ ID NO: 47312 - DNA, 60 bp, Artificial
  Synthetic oligonucleotide
ggggcagagacatgaggttcgtggtagagtacgacctggacggcaccaacccattcctga

SEQ ID NO: 47313 - DNA, 60 bp, Artificial
  Synthetic oligonucleotide
tggaaactggccctccacttcggccacagccgccgtcgccatccccgaggccccagtgac

SEQ ID NO: 47314 - DNA, 60 bp, Artificial
  Synthetic oligonucleotide
tatcaccccgtcgtctcccagcaggtcgtagtcccactctctgttcctcaggccccagtc

SEQ ID NO: 47315 - DNA, 60 bp, Artificial
  Synthetic oligonucleotide
tctccgacggcaatttccaaggctttagccgccacgctgcaagagtttctcattccggtg

SEQ ID NO: 47316 - DNA, 60 bp, Artificial
  Synthetic oligonucleotide
ctgcctcgtctccctgttgacgctcctgaactcgcacagccacccatcgccgttcttgta

SEQ ID NO: 47317 - DNA, 60 bp, Artificial
  Synthetic oligonucleotide
aacgggacatcgcagagcccaggaaagtcaggttcagggaagcgggatccgcggacgtca

SEQ ID NO: 47318 - DNA, 60 bp, Artificial
  Synthetic oligonucleotide
ttggaggaggaaagacggaagacaccgccttggccacggccaccgccttgtcccacagct

SEQ ID NO: 47319 - DNA, 60 bp, Artificial
  Synthetic oligonucleotide
tatttccggttggcctggctggcacgctcctccgcaatctgcttgtgaagcatccccagt

SEQ ID NO: 47320 - DNA, 60 bp, Artificial
  Synthetic oligonucleotide
cagcgggttcatgtcatcctcattggtggtcattgtcagtgcaggtgccatttgcgcgcc

SEQ ID NO: 47321 - DNA, 60 bp, Artificial
  Synthetic oligonucleotide
ttgagcgttaaccaggttctcaagatggcccacggcacggtcgtacgcaagctgcatggc

SEQ ID NO: 47322 - DNA, 60 bp, Artificial
  Synthetic oligonucleotide
agtcgtggccaccacacgtacaatctccgcagccaacacagggtcctccacagagatgca

SEQ ID NO: 47323 - DNA, 60 bp, Artificial
  Synthetic oligonucleotide
tgttgttgaaccccgccgctacaaaagacaccagcgcatagcccggctggcccgccatgg

SEQ ID NO: 47324 - DNA, 60 bp, Artificial
  Synthetic oligonucleotide
ctgctccacgggcacgtcacgccgagcctcctctagacgccctcctgacacaaacaccgc

SEQ ID NO: 47325 - DNA, 60 bp, Artificial
  Synthetic oligonucleotide
acatcgttccacgtgcctagcctgcccatcagcgtcgtacagtgccttgagatgaccggt

SEQ ID NO: 47326 - DNA, 60 bp, Artificial
  Synthetic oligonucleotide
tgaccccgccgtagccggcgtgaaacaccgcacccgctgcattccccatgtgcttgatga

SEQ ID NO: 47327 - DNA, 60 bp, Artificial
  Synthetic oligonucleotide
aaagaacaccttgccgggccgcacaccgagcgccgccatggcatacaagcactgcatcag

SEQ ID NO: 47328 - DNA, 60 bp, Artificial
  Synthetic oligonucleotide
gactgtgggtgccgggtctacaatgctacatgggtggactctacatgctgctctgcctct

SEQ ID NO: 47329 - DNA, 60 bp, Artificial
  Synthetic oligonucleotide
gccatacggtgcagcgaaggacaaagcgtgagataattgccggtgcgatccagtgcctgc

SEQ ID NO: 47330 - DNA, 60 bp, Artificial
  Synthetic oligonucleotide
cggtggcctagaaagtgtgcccgcgtgccttcaatgcagtcgtgatgacgctagggatag

SEQ ID NO: 47331 - DNA, 60 bp, Artificial
  Synthetic oligonucleotide
actgtcacgcacgacggcacgcctgagctcaatgtcctggagtcgcacaaaggccttgtt

SEQ ID NO: 47332 - DNA, 60 bp, Artificial
  Synthetic oligonucleotide
tacccttctcattccacaccccgttgtcaaacttgtaccacagctcgcccttgatgttgc

SEQ ID NO: 47333 - DNA, 60 bp, Artificial
  Synthetic oligonucleotide
tagcgtccatttgtccatgtccacgcacctctggccaacctttagccgccgcatgtcacc

SEQ ID NO: 47334 - DNA, 60 bp, Artificial
  Synthetic oligonucleotide
ccagcccacgcacactgctggccgaggtagacccgttcactaacagcagcaatgtcatca

SEQ ID NO: 47335 - DNA, 60 bp, Artificial
  Synthetic oligonucleotide
ccgcccgaccacagcacaatcaacatagggcccttcttcaccaccgaccacctattgctg

SEQ ID NO: 47336 - DNA, 60 bp, Artificial
  Synthetic oligonucleotide
tacatactgctgaggggacgcgttggcagcctcgggacagcaacagagcgcttccgatgc

SEQ ID NO: 47337 - DNA, 60 bp, Artificial
  Synthetic oligonucleotide
catagccacagcatatgcaccgatgtcggccgcccatggtccgtggaccgccccgtcgct

SEQ ID NO: 47338 - DNA, 60 bp, Artificial
  Synthetic oligonucleotide
gctcactcaccggtggcgaacgtacgtgtccagtgtgcagagtgccgttcaacattgtgg

SEQ ID NO: 47339 - DNA, 60 bp, Artificial
  Synthetic oligonucleotide
taaacgcactgcattggaaacatgcgcacggcgcctcagcaggcactttggccccggagc

SEQ ID NO: 47340 - DNA, 60 bp, Artificial
  Synthetic oligonucleotide
gcatactggacaacttgcaggatgaacccagcatcggagccctgtctcgcattgttggcc

SEQ ID NO: 47341 - DNA, 60 bp, Artificial
  Synthetic oligonucleotide
ttcacaggactaatgtgcacagtcgcaataccgctacccaccgaggccgagcctgaggac

SEQ ID NO: 47342 - DNA, 57 bp, Artificial
  Synthetic oligonucleotide
gttgatgccgctcaccacggacgccgcctgctgtgccatgtcgttgagcaccttctg

SEQ ID NO: 47343 - DNA, 60 bp, Artificial
  Synthetic oligonucleotide
aaagaggcctccgcgcatgtcgccaaacgccacgtcgtcgcccaataatttgcgcaccgt

SEQ ID NO: 47344 - DNA, 60 bp, Artificial
  Synthetic oligonucleotide
attggtccaaaagtgtgccggtcgggtctccgcaacgcacgtcatgtaccacgctctgca

SEQ ID NO: 47345 - DNA, 60 bp, Artificial
  Synthetic oligonucleotide
cgcacgcaacacagcacacgaaaacagacagtgcttcgtccccgcccctagtctgcatag

SEQ ID NO: 47346 - DNA, 60 bp, Artificial
  Synthetic oligonucleotide
agtacggcccaaccacgctcaaggccatcgcatgtaagcgccagggcgagctcggacact

SEQ ID NO: 47347 - DNA, 60 bp, Artificial
  Synthetic oligonucleotide
ttgtgaccgcttgcgacaaggcatagcgccggcaaccacgggccgatgtgcccaccgaca

SEQ ID NO: 47348 - DNA, 60 bp, Artificial
  Synthetic oligonucleotide
agacgcttgaggtgttcgcggtttgccagtgagtcggaggcgctgtcgttctacgcacgt

SEQ ID NO: 47349 - DNA, 60 bp, Artificial
  Synthetic oligonucleotide
tgtggttgtcggcaagatgagctttgaccagtccaggcccgagggcgcgtgctgctcgct

SEQ ID NO: 47350 - DNA, 60 bp, Artificial
  Synthetic oligonucleotide
cggtgcctgaggtccatcaatattgcaaaaccattatagtcagcgcccttcacatccaca

SEQ ID NO: 47351 - DNA, 60 bp, Artificial
  Synthetic oligonucleotide
tctcgcgggcaaagtaggtcacggcattgtcgccgccatacaagtgggtctccatcgcat

SEQ ID NO: 47352 - DNA, 60 bp, Artificial
  Synthetic oligonucleotide
ctgtgcaagcaactggtcgactacctcaatacgtgggtggcgctgtgtgagatggctggc

SEQ ID NO: 47353 - DNA, 60 bp, Artificial
  Synthetic oligonucleotide
caatgcaggcccaacgtcccctttacagactggcgcagggagcacttcaccgacatcgac

SEQ ID NO: 47354 - DNA, 60 bp, Artificial
  Synthetic oligonucleotide
atggtcgacgtcatcatgtccatgctgagcaccccgcgtgacgccacaaggccacgtacg

SEQ ID NO: 47355 - DNA, 60 bp, Artificial
  Synthetic oligonucleotide
atttccggggccgcgctgcacgtttgccgtcttgagcttgccggtgcttacgctctctat

SEQ ID NO: 47356 - DNA, 60 bp, Artificial
  Synthetic oligonucleotide
acgtcatgggcatcctcctgggccgctatgtgcagtcaacgggcataggtctcatcaagg

SEQ ID NO: 47357 - DNA, 60 bp, Artificial
  Synthetic oligonucleotide
agttccgccgagtgttgcggcgccagctcctcacctcccactgtcaactctgatgtgttg

SEQ ID NO: 47358 - DNA, 60 bp, Artificial
  Synthetic oligonucleotide
cgcttgtaatacagagtgtccaggcccgatgcatagtcaggtttcttgttcagcacacgg

SEQ ID NO: 47359 - DNA, 60 bp, Artificial
  Synthetic oligonucleotide
gcgctgcctgttgcgtacagttgcccgttgttgcagagaaggtacaccgtaggcttcggt

SEQ ID NO: 47360 - DNA, 60 bp, Artificial
  Synthetic oligonucleotide
aacggccctcgtgtccactttgccagcagcctatcaacactatggcagcatccgatcgcc

SEQ ID NO: 47361 - DNA, 60 bp, Artificial
  Synthetic oligonucleotide
cagtgggctgcacaatggctgaatgccacacacaagcctatcgcaacacgtctgctggcc

SEQ ID NO: 47362 - DNA, 60 bp, Artificial
  Synthetic oligonucleotide
ttgacgcccggtgtcccgttccttgcgcacctgcacccgtatctggccgatgtgtgtgga

SEQ ID NO: 47363 - DNA, 60 bp, Artificial
  Synthetic oligonucleotide
gagtggcccgcgccgccaattcatccgtcttttcaatgggcgctgtgccgtcaaacacaa

SEQ ID NO: 47364 - DNA, 60 bp, Artificial
  Synthetic oligonucleotide
acacctgacaacggccgccaccagctcatgtgccacagcattatctcgaaacacgggtgc

SEQ ID NO: 47365 - DNA, 60 bp, Artificial
  Synthetic oligonucleotide
acgggcaagatacgccagcgcctctccgggccatgtgcgcaccgactgctccagtagtgt

SEQ ID NO: 47366 - DNA, 60 bp, Artificial
  Synthetic oligonucleotide
ccgcagcatcgtcggacaaccgttgcaaaagtctatcacagtgctgagactcggccgagc

SEQ ID NO: 47367 - DNA, 60 bp, Artificial
  Synthetic oligonucleotide
ataaccatggcacccgcagtgtaggccgccacagccacatttgccacctcatgctcaacg

SEQ ID NO: 47368 - DNA, 60 bp, Artificial
  Synthetic oligonucleotide
agcctgatgtagtcctggaattgctgggtggtgcgcagttcgcccgtgctggtgtcaatg

SEQ ID NO: 47369 - DNA, 60 bp, Artificial
  Synthetic oligonucleotide
aaagtcaaagcacagtgtcccaatgcggcggggcgggttaatgtgcggtggtgagtcgac

SEQ ID NO: 47370 - DNA, 60 bp, Artificial
  Synthetic oligonucleotide
tcccatcagcgagttgtacaggttgagctgcggcgacccggaatccatgcacattcgacc

SEQ ID NO: 47371 - DNA, 60 bp, Artificial
  Synthetic oligonucleotide
aacgccgtcaatgcacaggaccagttctctcggttccaccagggccacgagcgagtcaat

SEQ ID NO: 47372 - DNA, 60 bp, Artificial
  Synthetic oligonucleotide
ggcgcgagacccaaagtactttcgaatccccagagccatgtcgtcggagcactggtccaa

SEQ ID NO: 47373 - DNA, 60 bp, Artificial
  Synthetic oligonucleotide
tgcgtccagaccattccacacgggacacaccttttccgaagcggggccaatggtccggtg

SEQ ID NO: 47374 - DNA, 60 bp, Artificial
  Synthetic oligonucleotide
tttggagggatgggtcggggctggagggcgactgcgtgtcgggctgggtaaacttgactt

SEQ ID NO: 47375 - DNA, 60 bp, Artificial
  Synthetic oligonucleotide
caattcgaacaagcgccgacgcaccacactcgtatcgcaagcaacagacgcaccccgttc

SEQ ID NO: 47376 - DNA, 60 bp, Artificial
  Synthetic oligonucleotide
ctcgctacgctcgctccccacttgtgctaacacgcttcgcttgtctaaatttcaacctcc

SEQ ID NO: 47377 - DNA, 60 bp, Artificial
  Synthetic oligonucleotide
gcccgggtcaccttttcgtagcgtttctccaccgtcagtcccggttccgtgttgagaaga

SEQ ID NO: 47378 - DNA, 60 bp, Artificial
  Synthetic oligonucleotide
catagagagacacagtctgcctcggcctctcccttgctttgaatgtaccccactcccatc

SEQ ID NO: 47379 - DNA, 60 bp, Artificial
  Synthetic oligonucleotide
agagattgtttgatggcgcagtacaccaccaccgctccaaccaccgcaaggcacccgtag

SEQ ID NO: 47380 - DNA, 60 bp, Artificial
  Synthetic oligonucleotide
agtcgtagctcaccgtgtaggtttcggccggctccgccgtagcttgctgggtcgtcgtcg

SEQ ID NO: 47381 - DNA, 60 bp, Artificial
  Synthetic oligonucleotide
taaatcgccgcccatcgtgtcgccgcccttgagcacgtagcgcgtatcgtttgacgttga

SEQ ID NO: 47382 - DNA, 60 bp, Artificial
  Synthetic oligonucleotide
cggtgagcatatcctcgttttgcaccacaattccccgcgtacccgtgtcgatggccacca

SEQ ID NO: 47383 - DNA, 60 bp, Artificial
  Synthetic oligonucleotide
acccactactccctactcgctacgctcgttacgctcgttacgctcgctactccctactcg

SEQ ID NO: 47384 - DNA, 60 bp, Artificial
  Synthetic oligonucleotide
gccaccaatccgctgcccttgacaaactcggaaaagacaaacgatagtcgtccctcggtg

SEQ ID NO: 47385 - DNA, 60 bp, Artificial
  Synthetic oligonucleotide
atattacaaccactcgctacgctcactacccactgcttgttccaactcgtgcctcgctgc

SEQ ID NO: 47386 - DNA, 60 bp, Artificial
  Synthetic oligonucleotide
gcggcagcacggtgcactcgtttctcggcattgggctgggtgtggacacggtggacgagt

SEQ ID NO: 47387 - DNA, 60 bp, Artificial
  Synthetic oligonucleotide
tacacgagcgcagcgaggcacgagtgggttggtggatagagtagttggagtacatggttg

SEQ ID NO: 47388 - DNA, 60 bp, Artificial
  Synthetic oligonucleotide
ccgtggccaagtctaccagtcccagcctcagaaacagcgggtcggacgaaagtgacttga

SEQ ID NO: 47389 - DNA, 60 bp, Artificial
  Synthetic oligonucleotide
aacaagaagcagtgcgccaaaccggaccccgccgagtgcaacattgggacagactcgcac

SEQ ID NO: 47390 - DNA, 59 bp, Artificial
  Synthetic oligonucleotide
ttggtggagatgggaaattgtctgagctggtcggagcgggcctgagttttgcagcggaa

SEQ ID NO: 47391 - DNA, 60 bp, Artificial
  Synthetic oligonucleotide
aacacacgttccgagaccgcactggcgcgatgagttgcacggcatcccggggtaggggta

SEQ ID NO: 47392 - DNA, 60 bp, Artificial
  Synthetic oligonucleotide
ggtcgaaaaccaggccaaaacgttccacctgtcccacacggttagcggaaagtacagcat

SEQ ID NO: 47393 - DNA, 60 bp, Artificial
  Synthetic oligonucleotide
tttatcgaacacgttgcctacaaggagttgacccgccaccagaccgactacccgtccggc

SEQ ID NO: 47394 - DNA, 60 bp, Artificial
  Synthetic oligonucleotide
ctctccactatccactactcgttacgctcgctacccgctacccgctaggccaactcttgg

SEQ ID NO: 47395 - DNA, 60 bp, Artificial
  Synthetic oligonucleotide
acggcaagtacaagtactaaaccaccactttcccaccccactcccattgtccaactctcc

SEQ ID NO: 47396 - DNA, 60 bp, Artificial
  Synthetic oligonucleotide
gtcgaccccaacttttcctactcgcgcgtcaccatttcaccgctgttcaatctcgaccag

SEQ ID NO: 47397 - DNA, 60 bp, Artificial
  Synthetic oligonucleotide
aagggtgtgccgcgggccatgttgggtcagtacaacgtgccctgtctgaccagccaagtc

SEQ ID NO: 47398 - DNA, 60 bp, Artificial
  Synthetic oligonucleotide
gtcccaatgccgaccgacccgttgaccagcaccagcggaatgatgggcacaaagtggacc

SEQ ID NO: 47399 - DNA, 60 bp, Artificial
  Synthetic oligonucleotide
cgctcaactacccgcaaaagccgctcgtcaccacctcctttgccgagtacaaccagctca

SEQ ID NO: 47400 - DNA, 60 bp, Artificial
  Synthetic oligonucleotide
tccacttgtccagtcgcgcgcagtaactctggtactcggtcacccgcgcccaatactcga

SEQ ID NO: 47401 - DNA, 60 bp, Artificial
  Synthetic oligonucleotide
cccgctccgctgaccatcgaaccctaccccgatgcattccaaactctcgtccaattgagg

SEQ ID NO: 47402 - DNA, 60 bp, Artificial
  Synthetic oligonucleotide
gccccgagtgccagcatgactatgtttccgccaacttaaagtaccccgaaccaccaccat

SEQ ID NO: 47403 - DNA, 60 bp, Artificial
  Synthetic oligonucleotide
cgtctgtgcacgctgcgccactcgcttcgcttcgctcgctgtagtaaatttcagagccca

SEQ ID NO: 47404 - DNA, 60 bp, Artificial
  Synthetic oligonucleotide
tcgcaagtcgccggtacgtcgtagcccgcgtcgtagcccgcgtcgtagcccgcgtcgtag

SEQ ID NO: 47405 - DNA, 60 bp, Artificial
  Synthetic oligonucleotide
gctacccattccacccactactcgctacccactactcgctacccactactcgctacccac

SEQ ID NO: 47406 - DNA, 60 bp, Artificial
  Synthetic oligonucleotide
gggcggaaaacttgtcggagctcgtgcccaagtcgtgcgggtgttatgttggtgactcga

SEQ ID NO: 47407 - DNA, 60 bp, Artificial
  Synthetic oligonucleotide
atcgacagcccatcgccgccgcagtagtcaaagtcgtaggggaagagaaaggacagcagg

SEQ ID NO: 47408 - DNA, 60 bp, Artificial
  Synthetic oligonucleotide
acttgcaccgtgaaagttttgcagcgggccgagaaggggttcgacgagcggcgtcacgtc

SEQ ID NO: 47409 - DNA, 60 bp, Artificial
  Synthetic oligonucleotide
aaaccccgacgccacgacgcaggagattatcgacggcttgaagacgaccaccatcaccga

SEQ ID NO: 47410 - DNA, 60 bp, Artificial
  Synthetic oligonucleotide
acacattgcccggcccatcaaagtcccacccatcgccgtgcgacccattctcgaagcgaa

SEQ ID NO: 47411 - DNA, 60 bp, Artificial
  Synthetic oligonucleotide
ctcagcgggcaggggagggagatgtgttggcgaaccttgtccaagagctgatgatttcgg

SEQ ID NO: 47412 - DNA, 60 bp, Artificial
  Synthetic oligonucleotide
cgctcgctgcggtcgtactcgttacgctcgctactcgcttcaactcttgcctaaatttcg

SEQ ID NO: 47413 - DNA, 60 bp, Artificial
  Synthetic oligonucleotide
aagccacttgttccgcctcatctgccgattcagacgattgccgcacgctttgccgcgatg

SEQ ID NO: 47414 - DNA, 60 bp, Artificial
  Synthetic oligonucleotide
ggcgcaacggaacctaccaagtcaccattcccgacaaggtcaacgacgccaagttaaagt

SEQ ID NO: 47415 - DNA, 60 bp, Artificial
  Synthetic oligonucleotide
cggcaaagaagagcaccttgacggcgtgcgagaagcgaatgtcaaacgacggcatcgggt

SEQ ID NO: 47416 - DNA, 60 bp, Artificial
  Synthetic oligonucleotide
aagcgcagcgcaacgagtgggtagtggatagcgagcgtaacgaccgttagggagtagcga

SEQ ID NO: 47417 - DNA, 60 bp, Artificial
  Synthetic oligonucleotide
gtgagtagcggtagaggtggtccagtcgcaaccctcggctccaggtccccttttgacgcg

SEQ ID NO: 47418 - DNA, 60 bp, Artificial
  Synthetic oligonucleotide
aaacaccctactgaccacgccaaacgatcccgccccaatctcctccgtttcgaaccaggg

SEQ ID NO: 47419 - DNA, 60 bp, Artificial
  Synthetic oligonucleotide
aggggttcccggcacaaacggcgaaggactcccaggccccagaggagagcccggacaaaa

SEQ ID NO: 47420 - DNA, 60 bp, Artificial
  Synthetic oligonucleotide
ccagcacctaacgcgccacaagctcgacacgtttgaaggttccaccgagtacagcgtcgt

SEQ ID NO: 47421 - DNA, 60 bp, Artificial
  Synthetic oligonucleotide
aaagtgaaaacgtctggcactgcgttgttgccgtgctctgcgcccgcgggtactaactcg

SEQ ID NO: 47422 - DNA, 60 bp, Artificial
  Synthetic oligonucleotide
ggtaacgccgtgctgatgactcccaagagacgcccacacgctcaaaatcacgcgggatac

SEQ ID NO: 47423 - DNA, 60 bp, Artificial
  Synthetic oligonucleotide
atttaaggtagcgtctcactgctcctggtctgcgcccaccgtctgcgtcccgtgcggaaa

SEQ ID NO: 47424 - DNA, 60 bp, Artificial
  Synthetic oligonucleotide
ccggttcggttcgccacatacagaatccagactttccctgttttccctgtttgtctccgt

SEQ ID NO: 47425 - DNA, 60 bp, Artificial
  Synthetic oligonucleotide
aatgaattagaccgatactgcaaccctaagaaatccaccgtagcgccctccaccgtagcg

SEQ ID NO: 47426 - DNA, 60 bp, Artificial
  Synthetic oligonucleotide
ccaagacagaggctgcatcaaaacaacgttcgcccgtgcgcaaatcctcggccaacgcgt

SEQ ID NO: 47427 - DNA, 60 bp, Artificial
  Synthetic oligonucleotide
tgagtcggtgagattttccaaaggcgcgagcaccacgggaggaatccgcacggaagcgta

SEQ ID NO: 47428 - DNA, 60 bp, Artificial
  Synthetic oligonucleotide
taccgtggcggaagacccgatcacgctgcctatggtctggttggattcgtacacccacac

SEQ ID NO: 47429 - DNA, 60 bp, Artificial
  Synthetic oligonucleotide
aaacgcgccaattgtgttacgccaaactgaaccccgcgcagctctctcaggacaggctgc

SEQ ID NO: 47430 - DNA, 60 bp, Artificial
  Synthetic oligonucleotide
tgcgcacgtgatctccctttagcccttgcaatcccctggcgcctctgcgacccggaatac

SEQ ID NO: 47431 - DNA, 60 bp, Artificial
  Synthetic oligonucleotide
ggtgggcacttactcgaaaatcggcgtgggattcgacgcgggcgaacgacagggaatatg

SEQ ID NO: 47432 - DNA, 60 bp, Artificial
  Synthetic oligonucleotide
gctagaacccgaccaatttgtcaggatgcaacactctacagcgccgtccagcaaccccgt

SEQ ID NO: 47433 - DNA, 60 bp, Artificial
  Synthetic oligonucleotide
gttcgattttgggtcgtttggccgcgagcttcctgggtgtcggaggatccactttgcgca

SEQ ID NO: 47434 - DNA, 60 bp, Artificial
  Synthetic oligonucleotide
cgggccaggggaaacaagacgcgcccaagaaatggacgtacggacaatgcgggtgttctt

SEQ ID NO: 47435 - DNA, 60 bp, Artificial
  Synthetic oligonucleotide
tcagacccatgtcgtacgccactttgccgaatccgagcacgcagtcagacgccctctcta

SEQ ID NO: 47436 - DNA, 60 bp, Artificial
  Synthetic oligonucleotide
ctgacttcgcgcatctcttttctcaaggattcgttggcatcttgaaggtccgacagctcc

SEQ ID NO: 47437 - DNA, 60 bp, Artificial
  Synthetic oligonucleotide
cgttggtctgtgtcaaccgaattcccgcgcacgtcaggttgtgtttataggtcacggtcc

SEQ ID NO: 47438 - DNA, 60 bp, Artificial
  Synthetic oligonucleotide
gtcgtcccatttggtcaggttttgatacacggctgaatcttgcgcgtcccactgagcggg

SEQ ID NO: 47439 - DNA, 60 bp, Artificial
  Synthetic oligonucleotide
gggcgtttataaatgacgtgatgagagtccctgacgtgccccgcgttttcaaacccgctg

SEQ ID NO: 47440 - DNA, 60 bp, Artificial
  Synthetic oligonucleotide
gtcatcagccacgggtattcggcgcacagggtttcaaacaatcggctcactccctctacg

SEQ ID NO: 47441 - DNA, 60 bp, Artificial
  Synthetic oligonucleotide
ttgtttcgtcgtcgaccaacatgtgcgggtggttctggcatggctgaggatccacaactg

SEQ ID NO: 47442 - DNA, 60 bp, Artificial
  Synthetic oligonucleotide
cgcatttgcagtttctgtcgggagcgccttcctttacggtaaacattcccaattgtcgac

SEQ ID NO: 47443 - DNA, 60 bp, Artificial
  Synthetic oligonucleotide
ccttgcaagtggcgcacggtcttcctgggagcctgaaacccatacaaaattcggcaggac

SEQ ID NO: 47444 - DNA, 60 bp, Artificial
  Synthetic oligonucleotide
cccgccacggatcccaagtatgtgctgttttcgttcgtggaggtaatccccgcgtgtgac

SEQ ID NO: 47445 - DNA, 60 bp, Artificial
  Synthetic oligonucleotide
acaaacctatggccccggtggaggagggaacgctgcagtgccccaaatgcggatgtaaaa

SEQ ID NO: 47446 - DNA, 60 bp, Artificial
  Synthetic oligonucleotide
ctctcacacccggctctcgcttacgcaaagatgctcatggaccctagtctgcgaactcgc

SEQ ID NO: 47447 - DNA, 60 bp, Artificial
  Synthetic oligonucleotide
tacaattcgccgacgatgacaagaccagtgaacgccaagctacacacgcacccgcacccg

SEQ ID NO: 47448 - DNA, 60 bp, Artificial
  Synthetic oligonucleotide
cagacgatgaaacaggcgaagagacagacgacgattttgacgagaacgtggaaggcggcg

SEQ ID NO: 47449 - DNA, 60 bp, Artificial
  Synthetic oligonucleotide
ctgccgagttcctccgctgatgttacacgccccgttttctagctcattgcacatggtcgc

SEQ ID NO: 47450 - DNA, 60 bp, Artificial
  Synthetic oligonucleotide
gcggaccagaaggccacggacgcttcctcgaaggcaacagaggcggaccagaaggcaaca

SEQ ID NO: 47451 - DNA, 60 bp, Artificial
  Synthetic oligonucleotide
aggccctgttgctcggattgtgcaaaatgctgaccgcgctcaaacctcagatggtgtgcg

SEQ ID NO: 47452 - DNA, 60 bp, Artificial
  Synthetic oligonucleotide
tctgcaacctctggatagtattcgcacagcactttgatgtcttcctcgccgtcctctcca

SEQ ID NO: 47453 - DNA, 60 bp, Artificial
  Synthetic oligonucleotide
ggcgtcccacccttcgatacccaacgcttccaacaaacagcacgctctttcatcccgagg

SEQ ID NO: 47454 - DNA, 60 bp, Artificial
  Synthetic oligonucleotide
cgtgtagccaactttgtctgtcgtccgcaatgtcgcccgttagcatgcccgtcagttctc

SEQ ID NO: 47455 - DNA, 60 bp, Artificial
  Synthetic oligonucleotide
gcgttggtcttgcaagtgtacgccgggttgttcataatttcccaccagtccacgttcggt

SEQ ID NO: 47456 - DNA, 60 bp, Artificial
  Synthetic oligonucleotide
accataccggtgaccatcataagaggccctacaacccttcggcccgcaagaaacccggcg

SEQ ID NO: 47457 - DNA, 60 bp, Artificial
  Synthetic oligonucleotide
cgcacggaggttttgggagatacgttattgtcgcaactcatcacagggtcgcccattcta

SEQ ID NO: 47458 - DNA, 60 bp, Artificial
  Synthetic oligonucleotide
gggacagctcagagaacactggcgcaaaacacaaccgcctccggccgcaaaactcacgat

SEQ ID NO: 47459 - DNA, 60 bp, Artificial
  Synthetic oligonucleotide
tatacccggcatttctcccacttgtaccgccatcagggacgcgagcagattggatatggg

SEQ ID NO: 47460 - DNA, 60 bp, Artificial
  Synthetic oligonucleotide
tacgacaacatgatcgggaacaccagcgacatgaccaaccccactcccgctcagggtcag

SEQ ID NO: 47461 - DNA, 60 bp, Artificial
  Synthetic oligonucleotide
gggtgacagcggagagcagggacccaaaggagtcacaggccaaatggggcaaataggaca

SEQ ID NO: 47462 - DNA, 60 bp, Artificial
  Synthetic oligonucleotide
ctccgcggtcttttcgtaccctggcattccgcccgctctgtccaatatggccgttatctc

SEQ ID NO: 47463 - DNA, 60 bp, Artificial
  Synthetic oligonucleotide
cccctcgcagcaacgctattcgcccgcgtcaatgagtttcgctacgggaaatgcagtctc

SEQ ID NO: 47464 - DNA, 60 bp, Artificial
  Synthetic oligonucleotide
ctactcccattgcccacctgacgtttattcccattatggtttcaaacttgcagtgcgcgg

SEQ ID NO: 47465 - DNA, 60 bp, Artificial
  Synthetic oligonucleotide
cgccccacgcatgtcaccgtatcgcgcgacacctccgcctctataaaactcacaggatgt

SEQ ID NO: 47466 - DNA, 60 bp, Artificial
  Synthetic oligonucleotide
tgcggttctgtctacacgatccaaccccaagtcttccatctgcaaagccagctcgtcccc

SEQ ID NO: 47467 - DNA, 60 bp, Artificial
  Synthetic oligonucleotide
gcacagactgtccgttggaatgtttgcacacgtacctcccgttttcgtgcgccagttgcg

SEQ ID NO: 47468 - DNA, 60 bp, Artificial
  Synthetic oligonucleotide
gcgaacgtgctcaaagtagacatggaccagatacaacgcgagattgaggaaactagggcc

SEQ ID NO: 47469 - DNA, 60 bp, Artificial
  Synthetic oligonucleotide
cctactccatgacatcctgttaaaggctgtgggtgtgttttatgacgacccatactatcc

SEQ ID NO: 47470 - DNA, 60 bp, Artificial
  Synthetic oligonucleotide
ccgttaacaaatcgcaaaattgccaaaactggtgcgatatacaaagatttagttcgaagc

SEQ ID NO: 47471 - DNA, 60 bp, Artificial
  Synthetic oligonucleotide
ctggtcccagtgaaacgcttgacttaactgacatgcgaacttacccagcattagatttta

SEQ ID NO: 47472 - DNA, 60 bp, Artificial
  Synthetic oligonucleotide
caggtttaaagggtaacggtggagccaatttgaattcagtccatttgagttttccttcca

SEQ ID NO: 47473 - DNA, 60 bp, Artificial
  Synthetic oligonucleotide
acgcttttaaatcaggggctggtccaaatcgttgtgctaacagacaagttgttttaacgg

SEQ ID NO: 47474 - DNA, 60 bp, Artificial
  Synthetic oligonucleotide
taatgatgtcttgtgcttattgttacgatgaaaatatcagtcccgttattagctgccaac

SEQ ID NO: 47475 - DNA, 60 bp, Artificial
  Synthetic oligonucleotide
catgctcgttcacgagctgctttctctgtcttaaaagcgcctcgtactttagcaacacca

SEQ ID NO: 47476 - DNA, 57 bp, Artificial
  Synthetic oligonucleotide
gaccaactgtacaacggcgcataatctaactcattagctgctttggttgtatcaaaa

SEQ ID NO: 47477 - DNA, 60 bp, Artificial
  Synthetic oligonucleotide
gcgtaaattaacgccgacgtgacattctgcccaaacaacatcatcgtatttaaaccaggt

SEQ ID NO: 47478 - DNA, 60 bp, Artificial
  Synthetic oligonucleotide
ccatcgatgggttttacaatctaataagacaggctcgtcaaataaccaggtgacaatacc

SEQ ID NO: 47479 - DNA, 60 bp, Artificial
  Synthetic oligonucleotide
caccgtcccaaatacattctgctatattagcatatttaccctgtttctcactagacaaaa

SEQ ID NO: 47480 - DNA, 64 bp, Artificial
  Synthetic oligonucleotide
cacaacctattagaactgacctagttaaaactggttgtttggtaaaacacgtatttgaatttcc

SEQ ID NO: 47481 - DNA, 60 bp, Artificial
  Synthetic oligonucleotide
ctcagccggttaattattttgaaccaagtttaggctatcatattgttggaccgattccag

SEQ ID NO: 47482 - DNA, 60 bp, Artificial
  Synthetic oligonucleotide
aataccgggttacaattatgaagttgaaaatgttttaccatcgctgatcaacgcttccgc

SEQ ID NO: 47483 - DNA, 60 bp, Artificial
  Synthetic oligonucleotide
ccttgaggatggtgagtcatttaaagattgcgcggatcgagaattattagaagaaaccgg

SEQ ID NO: 47484 - DNA, 60 bp, Artificial
  Synthetic oligonucleotide
cacacatcaagtatttcaatttgatcgggatcaccgggtacagtttatgggttgcttcaa

SEQ ID NO: 47485 - DNA, 60 bp, Artificial
  Synthetic oligonucleotide
ggctagatcatctttatctgtaagttgtgcttctcctgaaactactgcaattaggcgttc

SEQ ID NO: 47486 - DNA, 60 bp, Artificial
  Synthetic oligonucleotide
cgccgtaattacagattttacagctgacggattgccactagcacacttaaggccatgttt

SEQ ID NO: 47487 - DNA, 60 bp, Artificial
  Synthetic oligonucleotide
gaaggagggcttattacaagttccgttgcgaattaatgaagatgccgatttaacaagatt

SEQ ID NO: 47488 - DNA, 60 bp, Artificial
  Synthetic oligonucleotide
caacaacgcctacaacacaacaacttctttggcctttacggacgcgatggcgatcagaaa

SEQ ID NO: 47489 - DNA, 60 bp, Artificial
  Synthetic oligonucleotide
ccgggtgaatatgatttaacacagcgattctatatgtttgtcagcattgtttctaattca

SEQ ID NO: 47490 - DNA, 60 bp, Artificial
  Synthetic oligonucleotide
taaggttcggtttgacaacggcgcctggcttaacagcggggttcggtttgacaacggcgc

SEQ ID NO: 47491 - DNA, 60 bp, Artificial
  Synthetic oligonucleotide
ggcccttagcaccgttttcgccagcaagtccttgatcacctttgcagcctacataaggac

SEQ ID NO: 47492 - DNA, 60 bp, Artificial
  Synthetic oligonucleotide
aggaaggtgacggtaagggaaatacagaaaccctatttgcatcaagtaatacagctgtat

SEQ ID NO: 47493 - DNA, 61 bp, Artificial
  Synthetic oligonucleotide
caccgtcttaatgagcataaacatattttactttataaggttgctgtatttggcattcagg

SEQ ID NO: 47494 - DNA, 60 bp, Artificial
  Synthetic oligonucleotide
caccgaggccgacaatttgaatcaaaactaacacgtgattatttaaatgcgttggattcg

SEQ ID NO: 47495 - DNA, 60 bp, Artificial
  Synthetic oligonucleotide
cagttgtattaaagccacagaggaacaatatgtaggtgcttatgttgttgaaccagtacc

SEQ ID NO: 47496 - DNA, 60 bp, Artificial
  Synthetic oligonucleotide
cgcacttccattgcacgcaaactaaatttgttgtgacggtaaatgagatcccgtgcctag

SEQ ID NO: 47497 - DNA, 60 bp, Artificial
  Synthetic oligonucleotide
cagctggtgcgccattaggttggggttcaatggcaggaacagaaattataattaatccgt

SEQ ID NO: 47498 - DNA, 60 bp, Artificial
  Synthetic oligonucleotide
caatcatcaaactttccacatgattctatcacagatttatcacaccaggctaacagcgct

SEQ ID NO: 47499 - DNA, 60 bp, Artificial
  Synthetic oligonucleotide
cgcctgacgttccattaacagaacgcgcacctctaactggtttccctatgactcagccat

SEQ ID NO: 47500 - DNA, 60 bp, Artificial
  Synthetic oligonucleotide
cgttaattcgttcatctgagtcaggttcttccatgacagcccatcttacaccaccaccgg

SEQ ID NO: 47501 - DNA, 60 bp, Artificial
  Synthetic oligonucleotide
gtggcctgtattatacgtcccttttgcacatggggctgaccgtacatcgtgacgaccgcc

SEQ ID NO: 47502 - DNA, 60 bp, Artificial
  Synthetic oligonucleotide
gccgggcttaaaattgattaaatagcgtttcgcagttactatcggtactaatggccaacg

SEQ ID NO: 47503 - DNA, 60 bp, Artificial
  Synthetic oligonucleotide
ggcgggacctgctattgatttaacggcaggcccatctaatctagcaacggcgggacctgc

SEQ ID NO: 47504 - DNA, 60 bp, Artificial
  Synthetic oligonucleotide
gcgtggccattattaatcctacgcctgaaactcctatcacagcgcctgtcaataaccctt

SEQ ID NO: 47505 - DNA, 60 bp, Artificial
  Synthetic oligonucleotide
gtatatgttatggctcctggagaagctgaattatgcggtgttaaattagtagcaactggt

SEQ ID NO: 47506 - DNA, 61 bp, Artificial
  Synthetic oligonucleotide
gaaacaacacaacttatttctgaaaacgctcatattttacatcgaatgattggtagtacgc

SEQ ID NO: 47507 - DNA, 60 bp, Artificial
  Synthetic oligonucleotide
cagcggcactcattcaatcaaaacagaatcccgttgtcttttcatgggcattaccctatc

SEQ ID NO: 47508 - DNA, 60 bp, Artificial
  Synthetic oligonucleotide
ccgcagcataaaattaaaccgattgaagaagatcaaaccatagcactaaagtataccggc

SEQ ID NO: 47509 - DNA, 60 bp, Artificial
  Synthetic oligonucleotide
gcagtctttcgaggttcatctactggggcaggtgtaacgatcgaaacaaatcaacgttta

SEQ ID NO: 47510 - DNA, 60 bp, Artificial
  Synthetic oligonucleotide
caggccctacaactgaacgcgctgtttgattacgtcgtttacccatcatattttgcctta

SEQ ID NO: 47511 - DNA, 60 bp, Artificial
  Synthetic oligonucleotide
cgacagtattaccggaatcaaaacgtgaaatgcctcaacctgaacccattaatgttgttg

SEQ ID NO: 47512 - DNA, 60 bp, Artificial
  Synthetic oligonucleotide
cgcgactgttaccacccgatggtacgtcgttaacagaattacgtcgtgttgccatgccgt

SEQ ID NO: 47513 - DNA, 60 bp, Artificial
  Synthetic oligonucleotide
gatcaataattgctgccacataagcttttctaacagtctcagtccaaatttgacaagcgc

SEQ ID NO: 47514 - DNA, 60 bp, Artificial
  Synthetic oligonucleotide
ccgttgtacagatttcacgatcggcagcggcagttgttttaataacgtcaagatcactca

SEQ ID NO: 47515 - DNA, 60 bp, Artificial
  Synthetic oligonucleotide
tggcaggaaataataggtccgttaagcattccatttcatactctgtaaatgaacgccgcg

SEQ ID NO: 47516 - DNA, 60 bp, Artificial
  Synthetic oligonucleotide
tggcgcagtttgaacttgttccactaatatatctcgaggagttgtacccataagtcgccg

SEQ ID NO: 47517 - DNA, 60 bp, Artificial
  Synthetic oligonucleotide
cataaaacagatgggtccaataagtttaattccagttactgctacagtgaccacaagcgc

SEQ ID NO: 47518 - DNA, 60 bp, Artificial
  Synthetic oligonucleotide
caggtgattggtttgctacagcagctaatcctgttctaacattgagaaagggtgcgttac

SEQ ID NO: 47519 - DNA, 60 bp, Artificial
  Synthetic oligonucleotide
gcacacgtccttaccacaaaagtagggtgtgtctacggttcctgctaatttaatttggtg

SEQ ID NO: 47520 - DNA, 60 bp, Artificial
  Synthetic oligonucleotide
aaaaggaataggagaaggagctataattttagttacaagagctggtgacgctatccctca

SEQ ID NO: 47521 - DNA, 60 bp, Artificial
  Synthetic oligonucleotide
cctcaacttgcagcaggatcggtaggagcttcacagcttgctccaggtgccgttaacgct

SEQ ID NO: 47522 - DNA, 60 bp, Artificial
  Synthetic oligonucleotide
taagtagacaatcggtattggtgttgacgggcaaacaaatcgtgttttatctgttgcagt

SEQ ID NO: 47523 - DNA, 60 bp, Artificial
  Synthetic oligonucleotide
ccattgacaaatttctgcattttcgtgagccatccacaaaccagcaccaataacttttcc

SEQ ID NO: 47524 - DNA, 60 bp, Artificial
  Synthetic oligonucleotide
caggtgagcttgtgaagcctttgcacccaaaacttatctgtaacaatgttaaccggaaac

SEQ ID NO: 47525 - DNA, 60 bp, Artificial
  Synthetic oligonucleotide
gctggagatttgggtgggtctggaacaactgcaagctcacctgtcatttcatcgggtgca

SEQ ID NO: 47526 - DNA, 60 bp, Artificial
  Synthetic oligonucleotide
gacgcagccatctgcatccaaatatcccgcaagccattccattcgacattcaagggagct

SEQ ID NO: 47527 - DNA, 60 bp, Artificial
  Synthetic oligonucleotide
ccaactacgccagcaactgatacagcccaacaactgccacataaatattgattatcgggt

SEQ ID NO: 47528 - DNA, 60 bp, Artificial
  Synthetic oligonucleotide
ggtgttgaggatcctttacttctgtgaatattatcaactgcgttggcaagtacttccaca

SEQ ID NO: 47529 - DNA, 60 bp, Artificial
  Synthetic oligonucleotide
tttatcaggttgaggagccctgtcttctacagatatgtcaagtttcttttggaccgtgtt

SEQ ID NO: 47530 - DNA, 60 bp, Artificial
  Synthetic oligonucleotide
aagtcaatcaccaaaccggcagagtaacgacctagtaacgaaaattacagcgcaagaatg

SEQ ID NO: 47531 - DNA, 60 bp, Artificial
  Synthetic oligonucleotide
accacaatcacagcagtcacaacaatctgccgtcttgccccagaggccgagttttctcgg

SEQ ID NO: 47532 - DNA, 60 bp, Artificial
  Synthetic oligonucleotide
ttcttctacgagttctccatatccagctaacgctcctcttccttctactttaaaaccaat

SEQ ID NO: 47533 - DNA, 60 bp, Artificial
  Synthetic oligonucleotide
aatccaggagttaaatgaattacccatattccctcaggaccaataacaaaatgtgccaac

SEQ ID NO: 47534 - DNA, 60 bp, Artificial
  Synthetic oligonucleotide
gaccctgctttgtcagattcccaaagatatattatctacgccatcgttgctgctattctt

SEQ ID NO: 47535 - DNA, 60 bp, Artificial
  Synthetic oligonucleotide
gaagatgttgagtcaaattgcataattcattcatagcgtctgccatggctttgttgcggt

SEQ ID NO: 47536 - DNA, 60 bp, Artificial
  Synthetic oligonucleotide
gtctacgggcctcgtctgttaattttaacggcgcataaactaatactttgtctccggttg

SEQ ID NO: 47537 - DNA, 60 bp, Artificial
  Synthetic oligonucleotide
gccgaagttggtgttatctgcttttgagatcttagaacctagaactgcagcatctggacc

SEQ ID NO: 47538 - DNA, 60 bp, Artificial
  Synthetic oligonucleotide
gcttgcaccaaattgctagcatgccctcaaccggaactgttggatattctgcgttaaccc

SEQ ID NO: 47539 - DNA, 60 bp, Artificial
  Synthetic oligonucleotide
ccaattcgtgccatcagatataaatgttctgccgttatttgtaggagttggatctccgct

SEQ ID NO: 47540 - DNA, 60 bp, Artificial
  Synthetic oligonucleotide
tttcaagcacatatattacaagttgctggaggagatgaaggttcttggattaggtttgga

SEQ ID NO: 47541 - DNA, 60 bp, Artificial
  Synthetic oligonucleotide
caagaatttatgaatcgagggaccggatattatgcaacacaaaggatagttaacgttcag

SEQ ID NO: 47542 - DNA, 60 bp, Artificial
  Synthetic oligonucleotide
gcgtgtgctccgcaaatggtatttgtgcagccataactcccaacatacaagatgcatgta

SEQ ID NO: 47543 - DNA, 60 bp, Artificial
  Synthetic oligonucleotide
tttccattttcacacgcatagtcacattctccaacccatgtgtctgatccggtaaccgcc

SEQ ID NO: 47544 - DNA, 60 bp, Artificial
  Synthetic oligonucleotide
cattgtatggcaggaagacaaggtgtgtgtgatactgcaatgtcaacagcaacaagtggc

SEQ ID NO: 47545 - DNA, 60 bp, Artificial
  Synthetic oligonucleotide
gcaactccagaatcgcgtgaaaagaagaaaggtaatggcaaattcaagtcagcttcagga

SEQ ID NO: 47546 - DNA, 60 bp, Artificial
  Synthetic oligonucleotide
actttctggagatctaacaggatcatcgacttctccaacaattgctgccggtgccattac

SEQ ID NO: 47547 - DNA, 60 bp, Artificial
  Synthetic oligonucleotide
caacgatgggtatttataatcagggatcgcaaattagagttccaactccagcaacatccg

SEQ ID NO: 47548 - DNA, 60 bp, Artificial
  Synthetic oligonucleotide
catttcccaagctattcactcgacaaacaaaatacgcaggattttcggaattgactctga

SEQ ID NO: 47549 - DNA, 60 bp, Artificial
  Synthetic oligonucleotide
agaaactttatcgccgccaccaagattaagagggcctggaggtgctaaattaacacttaa

SEQ ID NO: 47550 - DNA, 59 bp, Artificial
  Synthetic oligonucleotide
cagccgggaccgacggcttaacgtgtccatccgaaacacgggaaagtggcctgagaaaa

SEQ ID NO: 47551 - DNA, 59 bp, Artificial
  Synthetic oligonucleotide
ccccgcgcctcactgcttgcttttatactcgcaccgctgcttaacctattttactgtgg

SEQ ID NO: 47552 - DNA, 60 bp, Artificial
  Synthetic oligonucleotide
ggaaaagtatcctcatggtcctgcttggtcatttggagatagagttccatacgcagaggc

SEQ ID NO: 47553 - DNA, 60 bp, Artificial
  Synthetic oligonucleotide
cagaactaactcgtgctcaacgtggtgttagatgggctgttgtagatgaatttgctccag

SEQ ID NO: 47554 - DNA, 60 bp, Artificial
  Synthetic oligonucleotide
cacaccaccaaacttcttctttcaatccaatgccgagcgaggttagtcttcacacctcac

SEQ ID NO: 47555 - DNA, 60 bp, Artificial
  Synthetic oligonucleotide
ccggttactgtaccagctgctaaatctcctcccgatcctcccgtaactgtaccagccgca

SEQ ID NO: 47556 - DNA, 60 bp, Artificial
  Synthetic oligonucleotide
ctccaacctctagcaattacttgttccgtttcagacccattccaatgtggaacgacatgt

SEQ ID NO: 47557 - DNA, 60 bp, Artificial
  Synthetic oligonucleotide
gggatcttctagtagatctccttggggatctgcgtcgtggaggactacgtcgtggagatc

SEQ ID NO: 47558 - DNA, 60 bp, Artificial
  Synthetic oligonucleotide
ggactgggagggtatatagaaggaatggaaagaggtggggttgcaaatagattaaaccaa

SEQ ID NO: 47559 - DNA, 60 bp, Artificial
  Synthetic oligonucleotide
ccttgttgattccatccaacaccgttaacatcatctcctacataagttccaccagaagcg

SEQ ID NO: 47560 - DNA, 60 bp, Artificial
  Synthetic oligonucleotide
gcagctcaacatcgtttcaaggttggaggtgtagaaggaagacgtagattaagaggaaga

SEQ ID NO: 47561 - DNA, 60 bp, Artificial
  Synthetic oligonucleotide
acgttttctaccctctcttgctttcaattcttctctttctgcaataaacggtttactttt

SEQ ID NO: 47562 - DNA, 60 bp, Artificial
  Synthetic oligonucleotide
tagagtgtgtgggagcttcagggctggtgtacttcaatgagagtcgaaaatatcagttag

SEQ ID NO: 47563 - DNA, 60 bp, Artificial
  Synthetic oligonucleotide
cgggaaacgcatgtacgggttgggtaacgggtattgagaacgttagagatttatcgggac

SEQ ID NO: 47564 - DNA, 60 bp, Artificial
  Synthetic oligonucleotide
catgattaaaggattagattcgtacacaggtcaaatggctccggatgttaacgcgcctct

SEQ ID NO: 47565 - DNA, 60 bp, Artificial
  Synthetic oligonucleotide
ggcagtgttgcaacagccccaacggttgccccaggtgccattacacttgcaaagatggct

SEQ ID NO: 47566 - DNA, 60 bp, Artificial
  Synthetic oligonucleotide
ctcgtcgtaggtttccatcagaacttgggcgtaaacctcttcttcgtccctcttgacggt

SEQ ID NO: 47567 - DNA, 60 bp, Artificial
  Synthetic oligonucleotide
gaagttccttttgtatcatccgtatctgcagcacctcctccaacgtcaacaactgtatcg

SEQ ID NO: 47568 - DNA, 60 bp, Artificial
  Synthetic oligonucleotide
ggtgagatggaaatagagcccttactgctttgaccactgctgtcaacaattggaaatggt

SEQ ID NO: 47569 - DNA, 60 bp, Artificial
  Synthetic oligonucleotide
cgttgctggcttcctgcctgatccaactgacaacgaccacaccttcgatgcgctccaagc

SEQ ID NO: 47570 - DNA, 60 bp, Artificial
  Synthetic oligonucleotide
ctgctgcctgttggcactgtctgcactagggttgactcggaaaactaaccgggtcatccg

SEQ ID NO: 47571 - DNA, 60 bp, Artificial
  Synthetic oligonucleotide
cacccgtgttgactcggaaaactaaccgggtcatccggatccctagtgcgtatcgtggat

SEQ ID NO: 47572 - DNA, 60 bp, Artificial
  Synthetic oligonucleotide
ccgtgttgactcggaaaactaaccgggtcatccggatccctagtgcgtatcgtggatgac

SEQ ID NO: 47573 - DNA, 60 bp, Artificial
  Synthetic oligonucleotide
tggttacgttgctggcttcctgcctgatccaactgacaacgaccacaccttcgatgcgct

SEQ ID NO: 47574 - DNA, 61 bp, Artificial
  Synthetic oligonucleotide
cccgtgttgactcggaaaactaaccgggtcatccggatccctagtgcgtatcgtggatgac

SEQ ID NO: 47575 - DNA, 60 bp, Artificial
  Synthetic oligonucleotide
cccgtgttgactcggaaaactaaccgggtcatccggatccctagtgcgtatcgtggatga

SEQ ID NO: 47576 - DNA, 60 bp, Artificial
  Synthetic oligonucleotide
acccgtgttgactcggaaaactaaccgggtcatccggatccctagtgcgtatcgtggatg

SEQ ID NO: 47577 - DNA, 52 bp, Artificial
  Synthetic oligonucleotide
ccgagttacacgcgcattgcaacgggctgtcatcgacaaaacgaaaaccccg

SEQ ID NO: 47578 - DNA, 50 bp, Artificial
  Synthetic oligonucleotide
cgagttacacgcgcattgcaacgggctgtcatcgacaaaacgaaaacccc

SEQ ID NO: 47579 - DNA, 50 bp, Artificial
  Synthetic oligonucleotide
gagttacacgcgcattgcaacgggctgtcatcgacaaaacgaaaaccccg

SEQ ID NO: 47580 - DNA, 51 bp, Artificial
  Synthetic oligonucleotide
cgagttacacgcgcattgcaacgggctgtcatcgacaaaacgaaaaccccg

SEQ ID NO: 47581 - DNA, 60 bp, Artificial
  Synthetic oligonucleotide
tcattgggcgttttgccgcaatgaaggatgtctgggagaaaattacacatgacagcgagg

SEQ ID NO: 47582 - DNA, 60 bp, Artificial
  Synthetic oligonucleotide
ctcattgggcgttttgccgcaatgaaggatgtctgggagaaaattacacatgacagcgag

SEQ ID NO: 47583 - DNA, 51 bp, Artificial
  Synthetic oligonucleotide
ccgagttacacgcgcattgcaacgggctgtcatcgacaaaacgaaaacccc

SEQ ID NO: 47584 - DNA, 60 bp, Artificial
  Synthetic oligonucleotide
tgccccgcaaacacgggcggtggttacgttgctggcttcctgcctgatccaactgacaac

SEQ ID NO: 47585 - DNA, 60 bp, Artificial
  Synthetic oligonucleotide
ccccgcaaacacgggcggtggttacgttgctggcttcctgcctgattcaactgacaacga

SEQ ID NO: 47586 - DNA, 60 bp, Artificial
  Synthetic oligonucleotide
gaaattcagccaatgtgccccgcaaacacgggcggtggttacgttgctggcttcctgcct

SEQ ID NO: 47587 - DNA, 60 bp, Artificial
  Synthetic oligonucleotide
cgaaattcagccaatgtgccccgcaaacacgggcggtggttacgttgctggcttcctgcc

SEQ ID NO: 47588 - DNA, 60 bp, Artificial
  Synthetic oligonucleotide
ttcgaaattcagccaatgtgccccgcaaacacgggcggtggttacgttgctggcttcctg

SEQ ID NO: 47589 - DNA, 60 bp, Artificial
  Synthetic oligonucleotide
aatgtgccccgcaaacacgggcggtggttacgttgctggcttcctgcctgatccaactga

SEQ ID NO: 47590 - DNA, 60 bp, Artificial
  Synthetic oligonucleotide
ttcagccaatgtgccccgcaaacacgggcggtggttacgttgctggcttcctgcctgatt

SEQ ID NO: 47591 - DNA, 60 bp, Artificial
  Synthetic oligonucleotide
tcgaaattcagccaatgtgccccgcaaacacgggcggtggttacgttgctggcttcctgc

SEQ ID NO: 47592 - DNA, 60 bp, Artificial
  Synthetic oligonucleotide
gtgccccgcaaacacgggcggtggttacgttgctggcttcctgcctgattcaactgacaa

SEQ ID NO: 47593 - DNA, 60 bp, Artificial
  Synthetic oligonucleotide
tgccccgcaaacacgggcggtggttacgttgctggcttcctgcctgattcaactgacaac

SEQ ID NO: 47594 - DNA, 60 bp, Artificial
  Synthetic oligonucleotide
atgtgccccgcaaacacgggcggtggttacgttgctggcttcctgcctgattcaactgac

SEQ ID NO: 47595 - DNA, 60 bp, Artificial
  Synthetic oligonucleotide
tgtgccccgcaaacacgggcggtggttacgttgctggcttcctgcctgattcaactgaca

SEQ ID NO: 47596 - DNA, 60 bp, Artificial
  Synthetic oligonucleotide
ttcagccaatgtgccccgcaaacacgggcggtggttacgttgctggcttcctgcctgatc

SEQ ID NO: 47597 - DNA, 60 bp, Artificial
  Synthetic oligonucleotide
cccgcaaacacgggcggtggttacgttgctggcttcctgcctgatccaactgacaacgat

SEQ ID NO: 47598 - DNA, 60 bp, Artificial
  Synthetic oligonucleotide
ccccgcaaacacgggcggtggttacgttgctggcttcctgcctgatccaactgacaacga

SEQ ID NO: 47599 - DNA, 60 bp, Artificial
  Synthetic oligonucleotide
ccgcaaacacgggcggtggttacgttgctggcttcctgcctgatccaactgacaacgatc

SEQ ID NO: 47600 - DNA, 60 bp, Artificial
  Synthetic oligonucleotide
aggatttccctctttgggcttgttgggttaccgttagctccgcgcagtgagcaccaccgc

SEQ ID NO: 47601 - DNA, 60 bp, Artificial
  Synthetic oligonucleotide
gatttccctctttgggcttgttgggttaccgttagctccgcgcagtgagcaccaccgcca

SEQ ID NO: 47602 - DNA, 57 bp, Artificial
  Synthetic oligonucleotide
tgggctgttgggttaccgttagctccgcgcagtgagcaccaccgccatgtggttaaa

SEQ ID NO: 47603 - DNA, 60 bp, Artificial
  Synthetic oligonucleotide
gggcttgttgggttaccgttagctccgcgcagtgagcaccaccgccatgtggttaaatgg

SEQ ID NO: 47604 - DNA, 60 bp, Artificial
  Synthetic oligonucleotide
ctctttgggcttgttgggttaccgttagctccgcgcagtgagcaccaccgccatgtggtt

SEQ ID NO: 47605 - DNA, 56 bp, Artificial
  Synthetic oligonucleotide
tgggctgttgggttaccgttagctccgcgcagtgagcaccaccgccatgtggttaa

SEQ ID NO: 47606 - DNA, 56 bp, Artificial
  Synthetic oligonucleotide
gggctgttgggttaccgttagctccgcgcagtgagcaccaccgccatgtggttaaa

SEQ ID NO: 47607 - DNA, 60 bp, Artificial
  Synthetic oligonucleotide
tttccctctttgggcttgttgggttaccgttagctccgcgcagtgagcaccaccgccatg

SEQ ID NO: 47608 - DNA, 60 bp, Artificial
  Synthetic oligonucleotide
ttccctctttgggcttgttgggttaccgttagctccgcgcagtgagcaccaccgccatgt

SEQ ID NO: 47609 - DNA, 55 bp, Artificial
  Synthetic oligonucleotide
gggctgttgggttaccgttagctccgcgcagtgagcaccaccgccatgtggttaa

SEQ ID NO: 47610 - DNA, 55 bp, Artificial
  Synthetic oligonucleotide
tgggctgttgggttaccgttagctccgcgcagtgagcaccaccgccatgtggtta

SEQ ID NO: 47611 - DNA, 60 bp, Artificial
  Synthetic oligonucleotide
ccagctgggtcgcgtgggcgtggtaaatgagtgattcatcgtcccatctgacgaaacccg

SEQ ID NO: 47612 - DNA, 60 bp, Artificial
  Synthetic oligonucleotide
ccccaagaaggctcatcgaagcgttcgtgaagaacgaaccgaccatgaaggctggccgta

SEQ ID NO: 47613 - DNA, 60 bp, Artificial
  Synthetic oligonucleotide
ttcctgaccgtgcagcaccagcgggcgtatcgagcgacgaacagcctgctcatcaaaccg

SEQ ID NO: 47614 - DNA, 61 bp, Artificial
  Synthetic oligonucleotide
gaaggctggccgtatcatctcgtcgttcgctgacatgcggttcctactgcggttttccagc

SEQ ID NO: 47615 - DNA, 61 bp, Artificial
  Synthetic oligonucleotide
cgcatcgagcgctctgaacatcgtttcgcgtgcgttaggataccgcgtgccactagccaaa

SEQ ID NO: 47616 - DNA, 54 bp, Artificial
  Synthetic oligonucleotide
gatggaaatcaagccagggcaccaacaagtggcccaagtaagcggcaggcggaa

SEQ ID NO: 47617 - DNA, 60 bp, Artificial
  Synthetic oligonucleotide
actcaaaatgctgaactacgagacaatcatcaacggcgcatcgagcgctctgaacatcgt

SEQ ID NO: 47618 - DNA, 60 bp, Artificial
  Synthetic oligonucleotide
ggccccaagatgtcaaggacgttgatcttatgttccagtgtgcggccgcacgtaccggag

SEQ ID NO: 47619 - DNA, 60 bp, Artificial
  Synthetic oligonucleotide
ggggaacgcgtgatgtcgcgagggagactatttcccttgccataagggccgctggttttc

SEQ ID NO: 47620 - DNA, 60 bp, Artificial
  Synthetic oligonucleotide
acctggaggaagctccacttgacgacgcgcgatccaacaataccattggcaacggctgcc

SEQ ID NO: 47621 - DNA, 60 bp, Artificial
  Synthetic oligonucleotide
cggatcccaacgtcaacaaggatctgcgagcgttctgcgagttcctgaccgtgcagcacc

SEQ ID NO: 47622 - DNA, 60 bp, Artificial
  Synthetic oligonucleotide
cagggcaagaatgttgaagttgccgacgctgacaggatcggccgcgccataaatcccaag

SEQ ID NO: 47623 - DNA, 60 bp, Artificial
  Synthetic oligonucleotide
tggagcagctggctcaggagacgcaagcaacgatccaaacgctcatgatcgcggatccca

SEQ ID NO: 47624 - DNA, 60 bp, Artificial
  Synthetic oligonucleotide
agcgattcgacccggcacaaggcatcactttcctcgcccgtgtttatcccgacccctaca

SEQ ID NO: 47625 - DNA, 61 bp, Artificial
  Synthetic oligonucleotide
agacctcgagacacttcggtctctggatcagcgtctaggagaaatcactgacgtctgggcg

SEQ ID NO: 47626 - DNA, 60 bp, Artificial
  Synthetic oligonucleotide
aacggctcagggcttatgccattgagttcgttgacttggttgtgcctgagcgtggtgtcg

SEQ ID NO: 47627 - DNA, 60 bp, Artificial
  Synthetic oligonucleotide
tcccgacccctacacgtcgaccacaagtttccaggaccctttgcgtacctggaggaagct

SEQ ID NO: 47628 - DNA, 60 bp, Artificial
  Synthetic oligonucleotide
agttcatcgagacccgagacgcgagctggcttgcttggttcgcccgggcggttggactca

SEQ ID NO: 47629 - DNA, 61 bp, Artificial
  Synthetic oligonucleotide
cggttttgcttatgacgcgggtgtcggcgttaagagcgggtcgccaacaacttgcgacctg

SEQ ID NO: 47630 - DNA, 60 bp, Artificial
  Synthetic oligonucleotide
taccgacatgctggtctcatgccccgcgagggcgaagcgattcggttttgcttatgacgc

SEQ ID NO: 47631 - DNA, 60 bp, Artificial
  Synthetic oligonucleotide
gcggcaagccaccaacattatgccgccgctgacctcgtgagagcggctactgaagataag

SEQ ID NO: 47632 - DNA, 61 bp, Artificial
  Synthetic oligonucleotide
cattcgaatgacacacccagagctgacaccaatcgatgctttccggctcatcggtctcgcg

SEQ ID NO: 47633 - DNA, 60 bp, Artificial
  Synthetic oligonucleotide
accaagtcgcagatccacaaagttcactactgccgtccatggccgcaatcgccccatcgc

SEQ ID NO: 47634 - DNA, 60 bp, Artificial
  Synthetic oligonucleotide
cgcaatcgccccatcgcgctttggtgtggtgtctgcctgtagcaagctactggcgcttca

SEQ ID NO: 47635 - DNA, 60 bp, Artificial
  Synthetic oligonucleotide
cccgttcatggcttacaccttcaatcctgttgaagtagctggccgtgacggtgactcctt

SEQ ID NO: 47636 - DNA, 60 bp, Artificial
  Synthetic oligonucleotide
catcgattactacctgcgtgacattgaccgctacctgggtcgtggtgtcccgttcatggc

SEQ ID NO: 47637 - DNA, 60 bp, Artificial
  Synthetic oligonucleotide
tcgtcattacgaaatcagccccgcgaggcaatcaccagctgaggcggcaagccaccaaca

SEQ ID NO: 47638 - DNA, 60 bp, Artificial
  Synthetic oligonucleotide
ctttgatggcacggttagtgagtggctacaacgccacgtcatgaacgccgtctacctgcg

SEQ ID NO: 47639 - DNA, 60 bp, Artificial
  Synthetic oligonucleotide
tacgtgtccggtgttgaagaaccatcggagggagacttttccaactttgatggcacggtt

SEQ ID NO: 47640 - DNA, 60 bp, Artificial
  Synthetic oligonucleotide
cggctcatcggtctcgcgtttggggacgattccctcttcgagcgacgtttcgctaagaac

SEQ ID NO: 47641 - DNA, 60 bp, Artificial
  Synthetic oligonucleotide
tcactgacgtctgggcggatattaccatcaaccgggataatgaaccaaacccctacaagg

SEQ ID NO: 47642 - DNA, 58 bp, Artificial
  Synthetic oligonucleotide
ggtcgcgaaggagctgatcattgcgtgacgattccaaaggtgcactacgacatgctta

SEQ ID NO: 47643 - DNA, 57 bp, Artificial
  Synthetic oligonucleotide
acaaaccaagccagaccctcgccatccaacaggtgtgggagactgtcgacatgcccc

SEQ ID NO: 47644 - DNA, 60 bp, Artificial
  Synthetic oligonucleotide
ggcggttggactcaccaagtcgcagatccacaaagttcactactgccgtccatggccgca

SEQ ID NO: 47645 - DNA, 60 bp, Artificial
  Synthetic oligonucleotide
ttcggcgtgtgcgttatcaggacacgtcccggcccggttggaattccatcgtctcgaccg

SEQ ID NO: 47646 - DNA, 60 bp, Artificial
  Synthetic oligonucleotide
gatcgggctcaagtacactgatcctagtgtactcgcgacggttgcccaatactatcaggg

SEQ ID NO: 47647 - DNA, 61 bp, Artificial
  Synthetic oligonucleotide
gacaaacatgtcatgcgcttacgagctaatcaagtcacttccagccaagctggagcagctg

SEQ ID NO: 47648 - DNA, 60 bp, Artificial
  Synthetic oligonucleotide
tcccattcccgcgaaaagccgtattggttgactgttggaggcgcttggccccaagatgtc

SEQ ID NO: 47649 - DNA, 59 bp, Artificial
  Synthetic oligonucleotide
aaaatatgatgcctatgatcaagcgctgggagacgctgtcgttgtcgctggaccgccgg

SEQ ID NO: 47650 - DNA, 60 bp, Artificial
  Synthetic oligonucleotide
ggcggaggttagtgctcgggtgtacgccagcccgttggtatctgacgaaaatatgatgcc

SEQ ID NO: 47651 - DNA, 60 bp, Artificial
  Synthetic oligonucleotide
acgagaagaccgtgagatcagcctgtttccgcaaaattccatcgtttccgcagaacacgc

SEQ ID NO: 47652 - DNA, 60 bp, Artificial
  Synthetic oligonucleotide
attccatcgtttccgcagaacacgcgcggaaagcggataatgggcatccgatctccgggg

SEQ ID NO: 47653 - DNA, 60 bp, Artificial
  Synthetic oligonucleotide
aaatcccaaggtccactggccagcgcacgtcgaagttgacgaggcggaggttagtgctcg

SEQ ID NO: 47654 - DNA, 60 bp, Artificial
  Synthetic oligonucleotide
tcgatcgcgttgagggctacctcgtcaccgacggcctgagcccgcttactggcgcgtatt

SEQ ID NO: 47655 - DNA, 60 bp, Artificial
  Synthetic oligonucleotide
cttactggcgcgtattgtcgcatggttaagcgggtttacgaggccggcggagccgaggat

SEQ ID NO: 47656 - DNA, 61 bp, Artificial
  Synthetic oligonucleotide
aactatgcgaaggtttccgccgaggtggggatggtcctcaaaatcgagcgattcgacccgg

SEQ ID NO: 47657 - DNA, 59 bp, Artificial
  Synthetic oligonucleotide
ttttccggatcacgaacaatcaagtcacgtttgatgttagtggcggtggatcttggtcc

SEQ ID NO: 47658 - DNA, 60 bp, Artificial
  Synthetic oligonucleotide
cgccgtctacctgcgttatttcaatcaccgagcgcagcgagacctcaggtcgtataccga

SEQ ID NO: 47659 - DNA, 60 bp, Artificial
  Synthetic oligonucleotide
aagctactggcgcttcactttcattccgacggacctgcatacgcgcacgcttcggcgtgt

SEQ ID NO: 47660 - DNA, 60 bp, Artificial
  Synthetic oligonucleotide
gtggcggtggatcttggtcccatgaagtttgggactggtgcgcgtttggtgagttcatcg

SEQ ID NO: 47661 - DNA, 60 bp, Artificial
  Synthetic oligonucleotide
gaaatgtgcgtttgctgcccctgattttagtgtggatcccggtaagggtattccggacaa

SEQ ID NO: 47662 - DNA, 60 bp, Artificial
  Synthetic oligonucleotide
gtgcgtttgctgcccctgattttagtgtggatcccggtaagggtattccggacaattttc

SEQ ID NO: 47663 - DNA, 60 bp, Artificial
  Synthetic oligonucleotide
ttccgcgcagaggtcgcggttggagcgcaacccacaacgttcgttggtgtgccctaccct

SEQ ID NO: 47664 - DNA, 60 bp, Artificial
  Synthetic oligonucleotide
aatggcctgagaggcatccgccccttggcgccgcgagataactactctggtaactttatc

SEQ ID NO: 47665 - DNA, 60 bp, Artificial
  Synthetic oligonucleotide
ttcctgctgttaacaactacagtaagttccgttatgcgtcaatggcctgtgggctttacc

SEQ ID NO: 47666 - DNA, 60 bp, Artificial
  Synthetic oligonucleotide
ggtccagtcgggactattagtgcaggcgttcatcaactaacaggaatgtacatgtaaagg

SEQ ID NO: 47667 - DNA, 60 bp, Artificial
  Synthetic oligonucleotide
catgtaaaggacccccgccgccagacccgccgacaatcgcacgtcgtaaaactgcgcgct

SEQ ID NO: 47668 - DNA, 60 bp, Artificial
  Synthetic oligonucleotide
cccgccgccagacccgccgacaatcgcacgtcgtaaaactgcgcgctcgaaagctcataa

SEQ ID NO: 47669 - DNA, 61 bp, Artificial
  Synthetic oligonucleotide
cagtcgggactattagtgcaggcgttcatcaactaacaggaatgtacatgtaaaggacccc

SEQ ID NO: 47670 - DNA, 60 bp, Artificial
  Synthetic oligonucleotide
cgccgccagacccgccgacaatcgcacgtcgtaaaactgcgcgctcgaaagctcataaaa

SEQ ID NO: 47671 - DNA, 61 bp, Artificial
  Synthetic oligonucleotide
ccgccgccagacccgccgacaatcgcacgtcgtaaaactgcgcgctcgaaagctcataaaa

SEQ ID NO: 47672 - DNA, 60 bp, Artificial
  Synthetic oligonucleotide
tgaacctgagtgaggctgtcaaccccgctgttactgcgattacccctgcgccgggagtct

SEQ ID NO: 47673 - DNA, 50 bp, Artificial
  Synthetic oligonucleotide
ttgagtgttatcacaacctcaagatgcggtttccagttgcagtctcttca

SEQ ID NO: 47674 - DNA, 60 bp, Artificial
  Synthetic oligonucleotide
tccggccccgagaaagccgcgtaagcggaaccaagcgctcgtgcgtaatccacgtttgac

SEQ ID NO: 47675 - DNA, 60 bp, Artificial
  Synthetic oligonucleotide
tgtcctcagagtgctgaatcaaatttcaggcacactgtcagtgataccaggtccagtcgg

SEQ ID NO: 47676 - DNA, 60 bp, Artificial
  Synthetic oligonucleotide
tctgaaatgtgcgtttgctgcccctgattttagtgtggatcccggtaagggtattccgga

SEQ ID NO: 47677 - DNA, 60 bp, Artificial
  Synthetic oligonucleotide
cactggtccggccccgagaaagccgcgtaagcggaaccaagcgctcgtgcgtaatccacg

SEQ ID NO: 47678 - DNA, 60 bp, Artificial
  Synthetic oligonucleotide
tcgagcttcagccttacactgactcggcgctcttccaattctcaggggtctctccaccct

SEQ ID NO: 47679 - DNA, 60 bp, Artificial
  Synthetic oligonucleotide
gccttacactgactcggcgctcttccaattctcaggggtctctccacccttcgaccctct

SEQ ID NO: 47680 - DNA, 60 bp, Artificial
  Synthetic oligonucleotide
gctagctcccggaggtggtactgatacaacgctcaccggtttgggtaacgtaaacacatt

SEQ ID NO: 47681 - DNA, 60 bp, Artificial
  Synthetic oligonucleotide
tctaatgttctgggagcggcaacggcgatgaaactgctagctcccggaggtggtactgat

SEQ ID NO: 47682 - DNA, 61 bp, Artificial
  Synthetic oligonucleotide
gccctaccctacgtatgccactaacttcggtgctggtagccaaaacgggcttcctgctgtt

SEQ ID NO: 47683 - DNA, 60 bp, Artificial
  Synthetic oligonucleotide
ccgggagtctttgcaaacttcgtcgataaacgtatcaatggcctgagaggcatccgcccc

SEQ ID NO: 47684 - DNA, 60 bp, Artificial
  Synthetic oligonucleotide
cctaccctacgtatgccactaacttcggtgctggtagccaaaacgggcttcctgctgtta

SEQ ID NO: 47685 - DNA, 60 bp, Artificial
  Synthetic oligonucleotide
ctgctgttaacaactacagtaagttccgttatgcgtcaatggcctgtgggctttacccca

SEQ ID NO: 47686 - DNA, 60 bp, Artificial
  Synthetic oligonucleotide
gcgccgggagtctttgcaaacttcgtcgataaacgtatcaatggcctgagaggcatccgc

SEQ ID NO: 47687 - DNA, 60 bp, Artificial
  Synthetic oligonucleotide
cccctgcgccgggagtctttgcaaacttcgtcgataaacgtatcaatggcctgagaggca

SEQ ID NO: 47688 - DNA, 60 bp, Artificial
  Synthetic oligonucleotide
cgattacccctgcgccgggagtctttgcaaacttcgtcgataaacgtatcaatggcctga

SEQ ID NO: 47689 - DNA, 60 bp, Artificial
  Synthetic oligonucleotide
gttaacaactacagtaagttccgttatgcgtcaatggcctgtgggctttaccccacaagc

SEQ ID NO: 47690 - DNA, 60 bp, Artificial
  Synthetic oligonucleotide
atgtacaggtataacatcaaagatggtatcaagaactaagaatcgaaggaacaaggcaag

SEQ ID NO: 47691 - DNA, 60 bp, Artificial
  Synthetic oligonucleotide
agaggcatccgccccttggcgccgcgagataactactctggtaactttatcgacggggct

SEQ ID NO: 47692 - DNA, 60 bp, Artificial
  Synthetic oligonucleotide
tgagaggcatccgccccttggcgccgcgagataactactctggtaactttatcgacgggg

SEQ ID NO: 47693 - DNA, 60 bp, Artificial
  Synthetic oligonucleotide
ttgaacctgagtgaggctgtcaaccccgctgttactgcgattacccctgcgccgggagtc

SEQ ID NO: 47694 - DNA, 60 bp, Artificial
  Synthetic oligonucleotide
ttacactgactcggcgctcttccaattctcaggggtctctccacccttcgaccctctcgc

SEQ ID NO: 47695 - DNA, 60 bp, Artificial
  Synthetic oligonucleotide
gtggagagttgacttgaacctgagtgaggctgtcaaccccgctgttactgcgattacccc

SEQ ID NO: 47696 - DNA, 60 bp, Artificial
  Synthetic oligonucleotide
tggtccggccccgagaaagccgcgtaagcggaaccaagcgctcgtgcgtaatccacgttt

SEQ ID NO: 47697 - DNA, 60 bp, Artificial
  Synthetic oligonucleotide
tctccacccttcgaccctctcgctcttgagtgttatcacaacctcaagatgcggtttcca

SEQ ID NO: 47698 - DNA, 60 bp, Artificial
  Synthetic oligonucleotide
gaacctgagtgaggctgtcaaccccgctgttactgcgattacccctgcgccgggagtctt

SEQ ID NO: 47699 - DNA, 60 bp, Artificial
  Synthetic oligonucleotide
gcggtttccagttgcagtctcttcacgggagaacagcaagttctgggaaggtgtcctcag

SEQ ID NO: 47700 - DNA, 60 bp, Artificial
  Synthetic oligonucleotide
cttacactgactcggcgctcttccaattctcaggggtctctccacccttcgaccctctcg

SEQ ID NO: 47701 - DNA, 60 bp, Artificial
  Synthetic oligonucleotide
ctcagaatctaatgttctgggagcggcaacggcgatgaaactgctagctcccggaggtgg

SEQ ID NO: 47702 - DNA, 60 bp, Artificial
  Synthetic oligonucleotide
tacactgactcggcgctcttccaattctcaggggtctctccacccttcgaccctctcgct

SEQ ID NO: 47703 - DNA, 61 bp, Artificial
  Synthetic oligonucleotide
gggctttaccccacaagcaatatgatgcagttttcgggttcagttcaagtgtggagagttg

SEQ ID NO: 47704 - DNA, 60 bp, Artificial
  Synthetic oligonucleotide
ttggagttctcagaatctaatgttctgggagcggcaacggcgatgaaactgctagctccc

SEQ ID NO: 47705 - DNA, 60 bp, Artificial
  Synthetic oligonucleotide
ccccacaagcaatatgatgcagttttcgggttcagttcaagtgtggagagttgacttgaa

SEQ ID NO: 47706 - DNA, 61 bp, Artificial
  Synthetic oligonucleotide
catcaaagatggtatcaagaactaagaatcgaaggaacaaggcaaggaaggtcgtcagtcg

SEQ ID NO: 47707 - DNA, 60 bp, Artificial
  Synthetic oligonucleotide
tccagttgcagtctcttcacgggagaacagcaagttctgggaaggtgtcctcagagtgct

SEQ ID NO: 47708 - DNA, 59 bp, Artificial
  Synthetic oligonucleotide
taactttatcgacggggcttacacctttgcctttgataagtccaccgattttgagtggt

SEQ ID NO: 47709 - DNA, 60 bp, Artificial
  Synthetic oligonucleotide
ttgacttgaacctgagtgaggctgtcaaccccgctgttactgcgattacccctgcgccgg

SEQ ID NO: 47710 - DNA, 60 bp, Artificial
  Synthetic oligonucleotide
ggcatccgccccttggcgccgcgagataactactctggtaactttatcgacggggcttac

SEQ ID NO: 47711 - DNA, 61 bp, Artificial
  Synthetic oligonucleotide
ccaacgtgtgcgacgtacaaacgccccttagcgcagtgaacttagtttcacaccaactatt

SEQ ID NO: 47712 - DNA, 60 bp, Artificial
  Synthetic oligonucleotide
cctacttgcaactccacgcagtataatggtggcatcagtgtttggaagggggctgtccaa

SEQ ID NO: 47713 - DNA, 60 bp, Artificial
  Synthetic oligonucleotide
ggctgtccaaatgtcaactacacagtatccgttggataccacacctgagtcgtcccaact

SEQ ID NO: 47714 - DNA, 60 bp, Artificial
  Synthetic oligonucleotide
gccgcctttaggtacgccagcatgaattttggtttgtaccctacttgcaactccacgcag

SEQ ID NO: 47715 - DNA, 60 bp, Artificial
  Synthetic oligonucleotide
tgccgcctttaggtacgccagcatgaattttggtttgtaccctacttgcaactccacgca

SEQ ID NO: 47716 - DNA, 60 bp, Artificial
  Synthetic oligonucleotide
cacattggagatttgattgcagagctgtccttttgagaggaccaacgtgtgcgacgtaca

SEQ ID NO: 47717 - DNA, 60 bp, Artificial
  Synthetic oligonucleotide
ccgcctttaggtacgccagcatgaattttggtttgtaccctacttgcaactccacgcagt

SEQ ID NO: 47718 - DNA, 60 bp, Artificial
  Synthetic oligonucleotide
tgtgggagagagttaaacggttacttaaagccggtttggtcgccgcttcgtatgttcccg

SEQ ID NO: 47719 - DNA, 60 bp, Artificial
  Synthetic oligonucleotide
cgccaacatgtgggagagagttaaacggttacttaaagccggtttggtcgccgcttcgta

SEQ ID NO: 47720 - DNA, 60 bp, Artificial
  Synthetic oligonucleotide
ggtgttcaacacattggagatttgattgcagagctgtccttttgagaggaccaacgtgtg

SEQ ID NO: 47721 - DNA, 60 bp, Artificial
  Synthetic oligonucleotide
gtgggagagagttaaacggttacttaaagccggtttggtcgccgcttcgtatgttcccgg

SEQ ID NO: 47722 - DNA, 61 bp, Artificial
  Synthetic oligonucleotide
cagcagctggttcagtcaatacggccaccattaaaacatgggcttgtattgagtaccgccc

SEQ ID NO: 47723 - DNA, 60 bp, Artificial
  Synthetic oligonucleotide
tgtcaactacacagtatccgttggataccacacctgagtcgtcccaactagtgcacgcta

SEQ ID NO: 47724 - DNA, 60 bp, Artificial
  Synthetic oligonucleotide
agtgacagcagcagctggttcagtcaatacggccaccattaaaacatgggcttgtattga

SEQ ID NO: 47725 - DNA, 60 bp, Artificial
  Synthetic oligonucleotide
gggcaaaatgttaccgttgcccaagccggtatgcctttttcattagatgctggagcggca

SEQ ID NO: 47726 - DNA, 60 bp, Artificial
  Synthetic oligonucleotide
caactacacagtatccgttggataccacacctgagtcgtcccaactagtgcacgctatca

SEQ ID NO: 47727 - DNA, 60 bp, Artificial
  Synthetic oligonucleotide
acgccaacatgtgggagagagttaaacggttacttaaagccggtttggtcgccgcttcgt

SEQ ID NO: 47728 - DNA, 60 bp, Artificial
  Synthetic oligonucleotide
acgcagaatttccgttctatcctatcttggaaggtgtacagactctgccagggcaaaatg

SEQ ID NO: 47729 - DNA, 60 bp, Artificial
  Synthetic oligonucleotide
gccttctggcgctgtattaaaacagctaccgcgccagcgcaaccagccgcattgacaacg

SEQ ID NO: 47730 - DNA, 60 bp, Artificial
  Synthetic oligonucleotide
cgtgtgcgacgtacaaacgccccttagcgcagtgaacttagtttcacaccaactatttag

SEQ ID NO: 47731 - DNA, 60 bp, Artificial
  Synthetic oligonucleotide
gtattgagtaccgcccaaacactaacactgcactttataaatatgcacatgattcacccg

SEQ ID NO: 47732 - DNA, 60 bp, Artificial
  Synthetic oligonucleotide
aactacacagtatccgttggataccacacctgagtcgtcccaactagtgcacgctatcac

SEQ ID NO: 47733 - DNA, 60 bp, Artificial
  Synthetic oligonucleotide
cttgtattgagtaccgcccaaacactaacactgcactttataaatatgcacatgattcac

SEQ ID NO: 47734 - DNA, 54 bp, Artificial
  Synthetic oligonucleotide
aatgtgcgttcgcttcgccggactccaacacggatcctggcaagggtatacctg

SEQ ID NO: 47735 - DNA, 60 bp, Artificial
  Synthetic oligonucleotide
gcagctggttcagtcaatacggccaccattaaaacatgggcttgtattgagtaccgccca

SEQ ID NO: 47736 - DNA, 60 bp, Artificial
  Synthetic oligonucleotide
atcacgcagaacaatctcatgatgctatctgaacccggactctcatttttgaaatgtgcg

SEQ ID NO: 47737 - DNA, 56 bp, Artificial
  Synthetic oligonucleotide
gaaatgtgcgttcgcttcgccggactccaacacggatcctggcaagggtatacctg

SEQ ID NO: 47738 - DNA, 60 bp, Artificial
  Synthetic oligonucleotide
agcagctggttcagtcaatacggccaccattaaaacatgggcttgtattgagtaccgccc

SEQ ID NO: 47739 - DNA, 60 bp, Artificial
  Synthetic oligonucleotide
cacttcacttttcggtaccaccgctactaatcgtgccgatcaagttgccgcctttaggta

SEQ ID NO: 47740 - DNA, 60 bp, Artificial
  Synthetic oligonucleotide
ccgatcaagttgccgcctttaggtacgccagcatgaattttggtttgtaccctacttgca

SEQ ID NO: 47741 - DNA, 60 bp, Artificial
  Synthetic oligonucleotide
gctcaacgccaacatgtgggagagagttaaacggttacttaaagccggtttggtcgccgc

SEQ ID NO: 47742 - DNA, 60 bp, Artificial
  Synthetic oligonucleotide
ttacagcgagtcgtttatcgacggtgtttttacccaatccattaacggcaacgcagaatt

SEQ ID NO: 47743 - DNA, 61 bp, Artificial
  Synthetic oligonucleotide
ccctgatttcacttcacttttcggtaccaccgctactaatcgtgccgatcaagttgccgcc

SEQ ID NO: 47744 - DNA, 60 bp, Artificial
  Synthetic oligonucleotide
ccgttctatcctatcttggaaggtgtacagactctgccagggcaaaatgttaccgttgcc

SEQ ID NO: 47745 - DNA, 60 bp, Artificial
  Synthetic oligonucleotide
tcccttccctgatttcacttcacttttcggtaccaccgctactaatcgtgccgatcaagt

SEQ ID NO: 47746 - DNA, 59 bp, Artificial
  Synthetic oligonucleotide
tgagtaccgcccaaacactaacactgcactttataaatatgcacatgattcacccgctg

SEQ ID NO: 47747 - DNA, 60 bp, Artificial
  Synthetic oligonucleotide
tctatcctatcttggaaggtgtacagactctgccagggcaaaatgttaccgttgcccaag

SEQ ID NO: 47748 - DNA, 60 bp, Artificial
  Synthetic oligonucleotide
attgagtaccgcccaaacactaacactgcactttataaatatgcacatgattcacccgct

SEQ ID NO: 47749 - DNA, 60 bp, Artificial
  Synthetic oligonucleotide
ttgagtaccgcccaaacactaacactgcactttataaatatgcacatgattcacccgctg

SEQ ID NO: 47750 - DNA, 60 bp, Artificial
  Synthetic oligonucleotide
gttgccgcctttaggtacgccagcatgaattttggtttgtaccctacttgcaactccacg

SEQ ID NO: 47751 - DNA, 61 bp, Artificial
  Synthetic oligonucleotide
acaatacaggaaagtttacaaatctctacctgttgccgtacgagcgaagctcaacgccaac

SEQ ID NO: 47752 - DNA, 60 bp, Artificial
  Synthetic oligonucleotide
cctgatttcacttcacttttcggtaccaccgctactaatcgtgccgatcaagttgccgcc

SEQ ID NO: 47753 - DNA, 60 bp, Artificial
  Synthetic oligonucleotide
ttgccgcctttaggtacgccagcatgaattttggtttgtaccctacttgcaactccacgc

SEQ ID NO: 47754 - DNA, 61 bp, Artificial
  Synthetic oligonucleotide
tggagatttgattgcagagctgtccttttgagaggaccaacgtgtgcgacgtacaaacgcc

SEQ ID NO: 47755 - DNA, 60 bp, Artificial
  Synthetic oligonucleotide
tcacttcacttttcggtaccaccgctactaatcgtgccgatcaagttgccgcctttaggt

SEQ ID NO: 47756 - DNA, 60 bp, Artificial
  Synthetic oligonucleotide
tcaactacacagtatccgttggataccacacctgagtcgtcccaactagtgcacgctatc

SEQ ID NO: 47757 - DNA, 60 bp, Artificial
  Synthetic oligonucleotide
gtggccttctggcgctgtattaaaacagctaccgcgccagcgcaaccagccgcattgaca

SEQ ID NO: 47758 - DNA, 60 bp, Artificial
  Synthetic oligonucleotide
tactctctcagaagaatgtctatacagaaactggtgtaaattttagtggcgcaacaacgc

SEQ ID NO: 47759 - DNA, 60 bp, Artificial
  Synthetic oligonucleotide
ggtgtggccttctggcgctgtattaaaacagctaccgcgccagcgcaaccagccgcattg

SEQ ID NO: 47760 - DNA, 60 bp, Artificial
  Synthetic oligonucleotide
ctcagaagaatgtctatacagaaactggtgtaaattttagtggcgcaacaacgcaaaatg

SEQ ID NO: 47761 - DNA, 60 bp, Artificial
  Synthetic oligonucleotide
gctgtttggcacgtcagcaactgacaccgcagctaatgtcactgctttccggtatgcgtc

SEQ ID NO: 47762 - DNA, 60 bp, Artificial
  Synthetic oligonucleotide
cgtcagcaactgacaccgcagctaatgtcactgctttccggtatgcgtcaatggcagccg

SEQ ID NO: 47763 - DNA, 60 bp, Artificial
  Synthetic oligonucleotide
agcaactgacaccgcagctaatgtcactgctttccggtatgcgtcaatggcagccggtgt

SEQ ID NO: 47764 - DNA, 61 bp, Artificial
  Synthetic oligonucleotide
ggtatgcgtcaatggcagccggtgtttaccccacgagcaatctaatgcaatttgctgggtc

SEQ ID NO: 47765 - DNA, 53 bp, Artificial
  Synthetic oligonucleotide
caagctcgtagcaccgaccctatacccatctctagggtcttcaacctcttggt

SEQ ID NO: 47766 - DNA, 60 bp, Artificial
  Synthetic oligonucleotide
aacgcgtccgatccatcctgaaatctgggctcaactttgcttcgaccatacctggccccg

SEQ ID NO: 47767 - DNA, 60 bp, Artificial
  Synthetic oligonucleotide
acgcgtccgatccatcctgaaatctgggctcaactttgcttcgaccatacctggccccgt

SEQ ID NO: 47768 - DNA, 60 bp, Artificial
  Synthetic oligonucleotide
ttgcttcgaccatacctggccccgtaggagtggcagcgacagggatcaaaggcatcattg

SEQ ID NO: 47769 - DNA, 60 bp, Artificial
  Synthetic oligonucleotide
cttcgaccatacctggccccgtaggagtggcagcgacagggatcaaaggcatcattgaag

SEQ ID NO: 47770 - DNA, 60 bp, Artificial
  Synthetic oligonucleotide
tcgaccatacctggccccgtaggagtggcagcgacagggatcaaaggcatcattgaagcc

SEQ ID NO: 47771 - DNA, 60 bp, Artificial
  Synthetic oligonucleotide
gaccatacctggccccgtaggagtggcagcgacagggatcaaaggcatcattgaagccat

SEQ ID NO: 47772 - DNA, 60 bp, Artificial
  Synthetic oligonucleotide
caccgatcccggcaaaggtattccagacaaatttcagggtctcgttttaccgaagaaaca

SEQ ID NO: 47773 - DNA, 60 bp, Artificial
  Synthetic oligonucleotide
tgagttccatcccatcatggagggttacgcgtccgttccacccgcgaacgtaaccaatgc

SEQ ID NO: 47774 - DNA, 60 bp, Artificial
  Synthetic oligonucleotide
tccggttcttttatcgagggttgttattcacaatcggtgtgcaatgaacctgagtttgag

SEQ ID NO: 47775 - DNA, 60 bp, Artificial
  Synthetic oligonucleotide
aactactccggttcttttatcgagggttgttattcacaatcggtgtgcaatgaacctgag

SEQ ID NO: 47776 - DNA, 60 bp, Artificial
  Synthetic oligonucleotide
gagtttgagttccatcccatcatggagggttacgcgtccgttccacccgcgaacgtaacc

SEQ ID NO: 47777 - DNA, 60 bp, Artificial
  Synthetic oligonucleotide
cgccacattttgggaacgcgtccgatccatcctgaaatctgggctcaactttgcttcgac

SEQ ID NO: 47778 - DNA, 60 bp, Artificial
  Synthetic oligonucleotide
ttttatcgagggttgttattcacaatcggtgtgcaatgaacctgagtttgagttccatcc

SEQ ID NO: 47779 - DNA, 60 bp, Artificial
  Synthetic oligonucleotide
cgcaaaacgtccttaaagcgttgacgacgcaaaacgtccccaagctcgtagcaccgaccc

SEQ ID NO: 47780 - DNA, 60 bp, Artificial
  Synthetic oligonucleotide
gggaacgcgtccgatccatcctgaaatctgggctcaactttgcttcgaccatacctggcc

SEQ ID NO: 47781 - DNA, 61 bp, Artificial
  Synthetic oligonucleotide
gggcctgcgtagagtatcgtccgaatccaaattccaccctctatgagttcgctcgtgagtc

SEQ ID NO: 47782 - DNA, 60 bp, Artificial
  Synthetic oligonucleotide
ctgggcctgcgtagagtatcgtccgaatccaaattccaccctctatgagttcgctcgtga

SEQ ID NO: 47783 - DNA, 60 bp, Artificial
  Synthetic oligonucleotide
tgaacctgagtttgagttccatcccatcatggagggttacgcgtccgttccacccgcgaa

SEQ ID NO: 47784 - DNA, 60 bp, Artificial
  Synthetic oligonucleotide
ggcagccggtgtttaccccacgagcaatctaatgcaatttgctgggtcaatacaggtgta

SEQ ID NO: 47785 - DNA, 60 bp, Artificial
  Synthetic oligonucleotide
tttgctgggtcaatacaggtgtacaagatacctctaaaacaggttcttaactcctactct

SEQ ID NO: 47786 - DNA, 55 bp, Artificial
  Synthetic oligonucleotide
tctcgttttaccgaagaaacattgtctgacccagtcgataacgtttactccgggg

SEQ ID NO: 47787 - DNA, 60 bp, Artificial
  Synthetic oligonucleotide
cctactctcagaccgtagcgaccgtaccacctaccaacttggctcagaacacaattgcaa

SEQ ID NO: 47788 - DNA, 61 bp, Artificial
  Synthetic oligonucleotide
acaggtgtacaagatacctctaaaacaggttcttaactcctactctcagaccgtagcgacc

SEQ ID NO: 47789 - DNA, 60 bp, Artificial
  Synthetic oligonucleotide
ggttgcacctattcctggaattgcttgcctgaaggcagaagcgaatgttggcgcatcctt

SEQ ID NO: 47790 - DNA, 60 bp, Artificial
  Synthetic oligonucleotide
cgcgaacgtaaccaatgctcaagctagcatgttcaccaatctaaccttctcaggcgcagc

SEQ ID NO: 47791 - DNA, 60 bp, Artificial
  Synthetic oligonucleotide
cgtgcatcaaaccagcctcgtcggaggagagctcgccgtactcgaagacagcagagaatg

SEQ ID NO: 47792 - DNA, 60 bp, Artificial
  Synthetic oligonucleotide
cgacgcaaaacgtccttaaagcgttgacgacgcaaaacgtccccaagctcgtagcaccga

SEQ ID NO: 47793 - DNA, 60 bp, Artificial
  Synthetic oligonucleotide
gcgttgacgacgcaaaacgtccttaaagcgttgacgacgcaaaacgtccccaagctcgta

SEQ ID NO: 47794 - DNA, 58 bp, Artificial
  Synthetic oligonucleotide
gtaaacaaccaataacatcatggtatccaaagcagcacgccgccgaagagcggcccct

SEQ ID NO: 47795 - DNA, 61 bp, Artificial
  Synthetic oligonucleotide
gccattggttccttgtgggtttgattccacccacagaagcgttgacgacgcaaaacgtcct

SEQ ID NO: 47796 - DNA, 60 bp, Artificial
  Synthetic oligonucleotide
accgtgcatcaaaccagcctcgtcggaggagagctcgccgtactcgaagacagcagagaa

SEQ ID NO: 47797 - DNA, 60 bp, Artificial
  Synthetic oligonucleotide
cgaaccgtgcatcaaaccagcctcgtcggaggagagctcgccgtactcgaagacagcaga

SEQ ID NO: 47798 - DNA, 60 bp, Artificial
  Synthetic oligonucleotide
ccggatttttccaccgatcccggcaaaggtattccagacaaatttcagggtctcgtttta

SEQ ID NO: 47799 - DNA, 60 bp, Artificial
  Synthetic oligonucleotide
gaacgcgtccgatccatcctgaaatctgggctcaactttgcttcgaccatacctggcccc

SEQ ID NO: 47800 - DNA, 60 bp, Artificial
  Synthetic oligonucleotide
tttccaccgatcccggcaaaggtattccagacaaatttcagggtctcgttttaccgaaga

SEQ ID NO: 47801 - DNA, 60 bp, Artificial
  Synthetic oligonucleotide
cacaattgcaatagatggactagaagcgttagatgcactaccaaataacaactactccgg

SEQ ID NO: 47802 - DNA, 61 bp, Artificial
  Synthetic oligonucleotide
gatggactagaagcgttagatgcactaccaaataacaactactccggttcttttatcgagg

SEQ ID NO: 47803 - DNA, 61 bp, Artificial
  Synthetic oligonucleotide
ctcctactctcagaccgtagcgaccgtaccacctaccaacttggctcagaacacaattgca

SEQ ID NO: 47804 - DNA, 60 bp, Artificial
  Synthetic oligonucleotide
ttctcaggcgcagcatataccggtcttggcgacatggacgcaattgcgatccttgtgact

SEQ ID NO: 47805 - DNA, 60 bp, Artificial
  Synthetic oligonucleotide
ccgtagcgaccgtaccacctaccaacttggctcagaacacaattgcaatagatggactag

SEQ ID NO: 47806 - DNA, 60 bp, Artificial
  Synthetic oligonucleotide
tgcatcaaaccagcctcgtcggaggagagctcgccgtactcgaagacagcagagaatggc

SEQ ID NO: 47807 - DNA, 60 bp, Artificial
  Synthetic oligonucleotide
cccgcgaacgtaaccaatgctcaagctagcatgttcaccaatctaaccttctcaggcgca

SEQ ID NO: 47808 - DNA, 60 bp, Artificial
  Synthetic oligonucleotide
tgaaaatgagcgctcccggactcgattttctgaaatgtgcctttgcttcgccggattttt

SEQ ID NO: 47809 - DNA, 60 bp, Artificial
  Synthetic oligonucleotide
ggcatcattgaagccattggttccttgtgggtttgattccacccacagaagcgttgacga

SEQ ID NO: 47810 - DNA, 60 bp, Artificial
  Synthetic oligonucleotide
gttccatcccatcatggagggttacgcgtccgttccacccgcgaacgtaaccaatgctca

SEQ ID NO: 47811 - DNA, 60 bp, Artificial
  Synthetic oligonucleotide
ccagcaacgttcccgggcctatcggtatcgcggccagtggtcttagtggtttatccgcac

SEQ ID NO: 47812 - DNA, 60 bp, Artificial
  Synthetic oligonucleotide
cgccaatagggacactttcatcttgatagcccctacgcccggtgttgcatattgggtcgc

SEQ ID NO: 47813 - DNA, 60 bp, Artificial
  Synthetic oligonucleotide
agcaacgttcccgggcctatcggtatcgcggccagtggtcttagtggtttatccgcactc

SEQ ID NO: 47814 - DNA, 60 bp, Artificial
  Synthetic oligonucleotide
cagcaacgttcccgggcctatcggtatcgcggccagtggtcttagtggtttatccgcact

SEQ ID NO: 47815 - DNA, 60 bp, Artificial
  Synthetic oligonucleotide
ggccagcaacgttcccgggcctatcggtatcgcggccagtggtcttagtggtttatccgc

SEQ ID NO: 47816 - DNA, 60 bp, Artificial
  Synthetic oligonucleotide
tgttccgcaacagaatgtcccgaagcagccgaggcgtcgacgcaatcgtgcgagacgtaa

SEQ ID NO: 47817 - DNA, 60 bp, Artificial
  Synthetic oligonucleotide
gcccctgttccgcaacagaatgtcccgaagcagccgaggcgtcgacgcaatcgtgcgaga

SEQ ID NO: 47818 - DNA, 60 bp, Artificial
  Synthetic oligonucleotide
tccaagttccaaaatggttagaaacaacaaccgaagacgacaacgcacccagcgtatcgt

SEQ ID NO: 47819 - DNA, 60 bp, Artificial
  Synthetic oligonucleotide
attccaagttccaaaatggttagaaacaacaaccgaagacgacaacgcacccagcgtatc

SEQ ID NO: 47820 - DNA, 60 bp, Artificial
  Synthetic oligonucleotide
gtttatccgcactctttgaaggtttcgggttttagatcccggatgccaaccagatcgggc

SEQ ID NO: 47821 - DNA, 60 bp, Artificial
  Synthetic oligonucleotide
gcaacgttcccgggcctatcggtatcgcggccagtggtcttagtggtttatccgcactct

SEQ ID NO: 47822 - DNA, 60 bp, Artificial
  Synthetic oligonucleotide
gtaaacaattccaagttccaaaatggttagaaacaacaaccgaagacgacaacgcaccca

SEQ ID NO: 47823 - DNA, 60 bp, Artificial
  Synthetic oligonucleotide
actttaccgccaatagggacactttcatcttgatagcccctacgcccggtgttgcatatt

SEQ ID NO: 47824 - DNA, 60 bp, Artificial
  Synthetic oligonucleotide
gccagcaacgttcccgggcctatcggtatcgcggccagtggtcttagtggtttatccgca

SEQ ID NO: 47825 - DNA, 60 bp, Artificial
  Synthetic oligonucleotide
gtagtaactcgaaaagatgtactaaaccagtcgattaactttaccgccaatagggacact

SEQ ID NO: 47826 - DNA, 60 bp, Artificial
  Synthetic oligonucleotide
ccgcactctttgaaggtttcgggttttagatcccggatgccaaccagatcgggcaagaat

SEQ ID NO: 47827 - DNA, 60 bp, Artificial
  Synthetic oligonucleotide
cactctttgaaggtttcgggttttagatcccggatgccaaccagatcgggcaagaatccg

SEQ ID NO: 47828 - DNA, 60 bp, Artificial
  Synthetic oligonucleotide
ctttgaaggtttcgggttttagatcccggatgccaaccagatcgggcaagaatccgaacg

SEQ ID NO: 47829 - DNA, 60 bp, Artificial
  Synthetic oligonucleotide
cagatcgggcaagaatccgaacgatcggacatttggccacaacaagcccaacttggttga

SEQ ID NO: 47830 - DNA, 60 bp, Artificial
  Synthetic oligonucleotide
gccaatagggacactttcatcttgatagcccctacgcccggtgttgcatattgggtcgcc

SEQ ID NO: 47831 - DNA, 60 bp, Artificial
  Synthetic oligonucleotide
tcgggcaagaatccgaacgatcggacatttggccacaacaagcccaacttggttgatgat

SEQ ID NO: 47832 - DNA, 61 bp, Artificial
  Synthetic oligonucleotide
ggcaaagtagtaactcgaaaagatgtactaaaccagtcgattaactttaccgccaataggg

SEQ ID NO: 47833 - DNA, 60 bp, Artificial
  Synthetic oligonucleotide
gagagggttaaatccattattaaatcctcccttgctatggccagcaacgttcccgggcct

SEQ ID NO: 47834 - DNA, 60 bp, Artificial
  Synthetic oligonucleotide
gtttgaaggcaaagtagtaactcgaaaagatgtactaaaccagtcgattaactttaccgc

SEQ ID NO: 47835 - DNA, 61 bp, Artificial
  Synthetic oligonucleotide
cgccgctgcatcgcgatccgaccaggtatcatcattcaggtatgcttccatgaacgtgggt

SEQ ID NO: 47836 - DNA, 60 bp, Artificial
  Synthetic oligonucleotide
gccgctgcatcgcgatccgaccaggtatcatcattcaggtatgcttccatgaacgtgggt

SEQ ID NO: 47837 - DNA, 52 bp, Artificial
  Synthetic oligonucleotide
tgtttggaaatgtcctgtaaagctgagcaatgtgcaattcccggttgcaaca

SEQ ID NO: 47838 - DNA, 60 bp, Artificial
  Synthetic oligonucleotide
ccaatagggacactttcatcttgatagcccctacgcccggtgttgcatattgggtcgccg

SEQ ID NO: 47839 - DNA, 60 bp, Artificial
  Synthetic oligonucleotide
gggacactttcatcttgatagcccctacgcccggtgttgcatattgggtcgccgatgttc

SEQ ID NO: 47840 - DNA, 61 bp, Artificial
  Synthetic oligonucleotide
acgccgctgcatcgcgatccgaccaggtatcatcattcaggtatgcttccatgaacgtggg

SEQ ID NO: 47841 - DNA, 60 bp, Artificial
  Synthetic oligonucleotide
gcccggtctttgccggttgccgtcatagcagcacaaaatgcatctatgtgggagagggtt

SEQ ID NO: 47842 - DNA, 60 bp, Artificial
  Synthetic oligonucleotide
gcatctatgtgggagagggttaaatccattattaaatcctcccttgctatggccagcaac

SEQ ID NO: 47843 - DNA, 60 bp, Artificial
  Synthetic oligonucleotide
tagcccggtctttgccggttgccgtcatagcagcacaaaatgcatctatgtgggagaggg

SEQ ID NO: 47844 - DNA, 60 bp, Artificial
  Synthetic oligonucleotide
agcccggtctttgccggttgccgtcatagcagcacaaaatgcatctatgtgggagagggt

SEQ ID NO: 47845 - DNA, 61 bp, Artificial
  Synthetic oligonucleotide
gtagcccggtctttgccggttgccgtcatagcagcacaaaatgcatctatgtgggagaggg

SEQ ID NO: 47846 - DNA, 59 bp, Artificial
  Synthetic oligonucleotide
cgtcccaatccaaatgccatgttataccaatttggccatgattcgcccccatgtgatga

SEQ ID NO: 47847 - DNA, 60 bp, Artificial
  Synthetic oligonucleotide
atcgtacagtagcccggtctttgccggttgccgtcatagcagcacaaaatgcatctatgt

SEQ ID NO: 47848 - DNA, 60 bp, Artificial
  Synthetic oligonucleotide
acagaatgtcccgaagcagccgaggcgtcgacgcaatcgtgcgagacgtaataggcgcca

SEQ ID NO: 47849 - DNA, 60 bp, Artificial
  Synthetic oligonucleotide
tcgtgcgagacgtaataggcgccaggggcgtgcgatgaacatgggggcgctgaccaggct

SEQ ID NO: 47850 - DNA, 60 bp, Artificial
  Synthetic oligonucleotide
tccgcaacagaatgtcccgaagcagccgaggcgtcgacgcaatcgtgcgagacgtaatag

SEQ ID NO: 47851 - DNA, 61 bp, Artificial
  Synthetic oligonucleotide
caacctggtttagcgtttcttaagtgtgcttttgcaccacctgatttcaacaccgatcccg

SEQ ID NO: 47852 - DNA, 60 bp, Artificial
  Synthetic oligonucleotide
tgaccaggcttagtcaacctggtttagcgtttcttaagtgtgcttttgcaccacctgatt

SEQ ID NO: 47853 - DNA, 61 bp, Artificial
  Synthetic oligonucleotide
gggagagggttaaatccattattaaatcctcccttgctatggccagcaacgttcccgggcc

SEQ ID NO: 47854 - DNA, 60 bp, Artificial
  Synthetic oligonucleotide
ccgccaatagggacactttcatcttgatagcccctacgcccggtgttgcatattgggtcg

SEQ ID NO: 47855 - DNA, 60 bp, Artificial
  Synthetic oligonucleotide
acaattccaagttccaaaatggttagaaacaacaaccgaagacgacaacgcacccagcgt

SEQ ID NO: 47856 - DNA, 60 bp, Artificial
  Synthetic oligonucleotide
gtcaacctggtttagcgtttcttaagtgtgcttttgcaccacctgatttcaacaccgatc

SEQ ID NO: 47857 - DNA, 60 bp, Artificial
  Synthetic oligonucleotide
caggcgctgtcaactccgccattcttaagacatgggcatgtcttgagtaccgtcccaatc

SEQ ID NO: 47858 - DNA, 60 bp, Artificial
  Synthetic oligonucleotide
agttggatggggaaacatggacacgatcgtcatccgtgtctctgcccccacaggcgctgt

SEQ ID NO: 47859 - DNA, 54 bp, Artificial
  Synthetic oligonucleotide
gctaacgtcaccgtggctacttcaggccagccttttaaccttgcagctggcgct

SEQ ID NO: 47860 - DNA, 50 bp, Artificial
  Synthetic oligonucleotide
gtctgtttgtaatgagcctgattttgagttctcagatatattggaaggga

SEQ ID NO: 47861 - DNA, 60 bp, Artificial
  Synthetic oligonucleotide
gaactcgcacgcatgtctggagcagcattttgtgtcgttacgggctaccgcctgttgaca

SEQ ID NO: 47862 - DNA, 60 bp, Artificial
  Synthetic oligonucleotide
cctggaccgttgactcaaactgctgtatttccaagtgagtcacgttccaacgagcttgcc

SEQ ID NO: 47863 - DNA, 60 bp, Artificial
  Synthetic oligonucleotide
tcctggaccgttgactcaaactgctgtatttccaagtgagtcacgttccaacgagcttgc

SEQ ID NO: 47864 - DNA, 60 bp, Artificial
  Synthetic oligonucleotide
ctcgcacgcatgtctggagcagcattttgtgtcgttacgggctaccgcctgttgacatca

SEQ ID NO: 47865 - DNA, 60 bp, Artificial
  Synthetic oligonucleotide
actcgcacgcatgtctggagcagcattttgtgtcgttacgggctaccgcctgttgacatc

SEQ ID NO: 47866 - DNA, 60 bp, Artificial
  Synthetic oligonucleotide
gtgttctccagcatgttccgtggtacatgccaacgcacacaccagctgaaatcgctgacg

SEQ ID NO: 47867 - DNA, 60 bp, Artificial
  Synthetic oligonucleotide
ggaccgttgactcaaactgctgtatttccaagtgagtcacgttccaacgagcttgccaca

SEQ ID NO: 47868 - DNA, 60 bp, Artificial
  Synthetic oligonucleotide
tggaccgttgactcaaactgctgtatttccaagtgagtcacgttccaacgagcttgccac

SEQ ID NO: 47869 - DNA, 60 bp, Artificial
  Synthetic oligonucleotide
ctggaccgttgactcaaactgctgtatttccaagtgagtcacgttccaacgagcttgcca

SEQ ID NO: 47870 - DNA, 60 bp, Artificial
  Synthetic oligonucleotide
gtcctccagcatgttccgtggtacatgccaactcacacaccggctgaaattgccgaggct

SEQ ID NO: 47871 - DNA, 60 bp, Artificial
  Synthetic oligonucleotide
gttctccagcatgttccgtggtacatgccaacgcacacaccagctgaaatcgctgacgca

SEQ ID NO: 47872 - DNA, 60 bp, Artificial
  Synthetic oligonucleotide
agtcctccagcatgttccgtggtacatgccaactcacacaccggctgaaattgccgaggc

SEQ ID NO: 47873 - DNA, 60 bp, Artificial
  Synthetic oligonucleotide
tgttctccagcatgttccgtggtacatgccaacgcacacaccagctgaaatcgctgacgc

SEQ ID NO: 47874 - DNA, 60 bp, Artificial
  Synthetic oligonucleotide
tcgcacgcatgtctggagcagcattttgtgtgtacacaggctaccgcctgttgacctcaa

SEQ ID NO: 47875 - DNA, 60 bp, Artificial
  Synthetic oligonucleotide
gcagtcctccagcatgttccgtggtacatgccaactcacacaccggctgaaattgccgag

SEQ ID NO: 47876 - DNA, 61 bp, Artificial
  Synthetic oligonucleotide
cagtcctccagcatgttccgtggtacatgccaactcacacaccggctgaaattgccgaggc

SEQ ID NO: 47877 - DNA, 60 bp, Artificial
  Synthetic oligonucleotide
cagtcctccagcatgttccgtggtacatgccaactcacacaccggctgaaattgccgagg

SEQ ID NO: 47878 - DNA, 60 bp, Artificial
  Synthetic oligonucleotide
tgaactcgcacgcatgtctggagcagcattttgtgtcgttacgggctaccgcctgttgac

SEQ ID NO: 47879 - DNA, 59 bp, Artificial
  Synthetic oligonucleotide
ctcgcacgcatgtctggagcagcattttgtgtgtacacaggctaccgcctgttgacctc

SEQ ID NO: 47880 - DNA, 60 bp, Artificial
  Synthetic oligonucleotide
ctcgcacgcatgtctggagcagcattttgtgtgtacacaggctaccgcctgttgacctca

SEQ ID NO: 47881 - DNA, 61 bp, Artificial
  Synthetic oligonucleotide
ctcgcacgcatgtctggagcagcattttgtgtgtacacaggctaccgcctgttgacctcaa

SEQ ID NO: 47882 - DNA, 60 bp, Artificial
  Synthetic oligonucleotide
cccacaatccctatagctgacgcggcttgcgaccgcgtcgaaggctacctctgcactgat

SEQ ID NO: 47883 - DNA, 60 bp, Artificial
  Synthetic oligonucleotide
cccgtgtatttgtagacccactcaacactcctactacgattcaagatccgttacgcacac

SEQ ID NO: 47884 - DNA, 61 bp, Artificial
  Synthetic oligonucleotide
tcatcattgccgaccgtggaccgattgtccagaccgggctctggtttacaccatcccacag

SEQ ID NO: 47885 - DNA, 60 bp, Artificial
  Synthetic oligonucleotide
tgtgcttagcgttgctcccactgtttatcgccctacaatgccacgcgtccattggccagt

SEQ ID NO: 47886 - DNA, 61 bp, Artificial
  Synthetic oligonucleotide
caccatcccacagcacactgtctggagattcacgtggattgacactgagatccacacccgc

SEQ ID NO: 47887 - DNA, 61 bp, Artificial
  Synthetic oligonucleotide
tcaaccgcgcggccaagtgttacggactggaactcaaagtagagaagtacaacccagaagt

SEQ ID NO: 47888 - DNA, 60 bp, Artificial
  Synthetic oligonucleotide
cagaatttccgcgatgaccaacccgcggctgatgccttcatcgtcggtgttgatgtggac

SEQ ID NO: 47889 - DNA, 60 bp, Artificial
  Synthetic oligonucleotide
agacctcgaaccattaactattgaggaaacagttgaacgtcttaacaaaccatcacagca

SEQ ID NO: 47890 - DNA, 60 bp, Artificial
  Synthetic oligonucleotide
tcacagcaattacaattacgcgcggttttcgagatcatgggtgtagaacctcgacaagtg

SEQ ID NO: 47891 - DNA, 54 bp, Artificial
  Synthetic oligonucleotide
ttgacactgagatccacacccgcaaactgaaacgcattacataccaggataaca

SEQ ID NO: 47892 - DNA, 60 bp, Artificial
  Synthetic oligonucleotide
cggtgatgatggactcgcaagagccaccatacagaaaaccatcaaccgcgcggccaagtg

SEQ ID NO: 47893 - DNA, 61 bp, Artificial
  Synthetic oligonucleotide
gggctcggggcaactcagtctgtaaatgcacggcttattggtatgggacataaggacccgc

SEQ ID NO: 47894 - DNA, 60 bp, Artificial
  Synthetic oligonucleotide
aggccgtaccccagtggggataaccgacggggtttgtgaattcgtgagtgattgtgacgg

SEQ ID NO: 47895 - DNA, 60 bp, Artificial
  Synthetic oligonucleotide
ggtgcaacgactatacgggcccaaaacttcaactagagatgttcgggaagcccgtcgtag

SEQ ID NO: 47896 - DNA, 60 bp, Artificial
  Synthetic oligonucleotide
caaggctgctcaaacgatcgatgaagaaggcgttgcgccaggctccgtggacgaatcgtt

SEQ ID NO: 47897 - DNA, 61 bp, Artificial
  Synthetic oligonucleotide
cgttattaaagcttaacgatgcaaagcaaactcgctctaattcaggaacttccggaccgca

SEQ ID NO: 47898 - DNA, 60 bp, Artificial
  Synthetic oligonucleotide
tctccgggtggatgcaacgaaacatagcccagaaagctatggttcaagcatttcgcgctg

SEQ ID NO: 47899 - DNA, 54 bp, Artificial
  Synthetic oligonucleotide
tgagtggttccgaaagaacactcacacccgttctaggccgaaagggccagagga

SEQ ID NO: 47900 - DNA, 61 bp, Artificial
  Synthetic oligonucleotide
ggtgtcaagagtggaagtccaactaccacaccacataatacacagtacaatgcatgcgtcg

SEQ ID NO: 47901 - DNA, 61 bp, Artificial
  Synthetic oligonucleotide
gcccgtcgtagtcgtaataaagagaagccctattggttgacatgtgatggatcatggccac

SEQ ID NO: 47902 - DNA, 60 bp, Artificial
  Synthetic oligonucleotide
acggacaagtcatagaaaccgatttctctaatctcgacggcagagtctccgggtggatgc

SEQ ID NO: 47903 - DNA, 56 bp, Artificial
  Synthetic oligonucleotide
gaaagtttcccgctatacactagcgtattccgacgcagtgttacacgccgaacata

SEQ ID NO: 47904 - DNA, 60 bp, Artificial
  Synthetic oligonucleotide
gcccagcatggcggcatacctagagggaaaaccccttccggaggaaagaccaacgctcga

SEQ ID NO: 47905 - DNA, 60 bp, Artificial
  Synthetic oligonucleotide
aatcattcttggagaacaccagatcacccgcacggaattgctcggcgggattgtgattgt

SEQ ID NO: 47906 - DNA, 60 bp, Artificial
  Synthetic oligonucleotide
tgtggactactatatcacagaaccagacgtcctattagaacatatgagacctcttgtact

SEQ ID NO: 47907 - DNA, 61 bp, Artificial
  Synthetic oligonucleotide
tgatgcccacacaccgcttattagcgagtattgtaggatggtgcaacgactatacgggccc

SEQ ID NO: 47908 - DNA, 60 bp, Artificial
  Synthetic oligonucleotide
aattaccattgaggtgtttgggtttagagagggtcggctaccataaaattcatcattgcc

SEQ ID NO: 47909 - DNA, 60 bp, Artificial
  Synthetic oligonucleotide
tggggcctagaaaccatttccacttcgccgtcggtgatttggcacagaatttccgcgatg

SEQ ID NO: 47910 - DNA, 60 bp, Artificial
  Synthetic oligonucleotide
atacaaggtgagtggcggagccgcttgggtacacccggtctgggactggtgtgaagctgg

SEQ ID NO: 47911 - DNA, 61 bp, Artificial
  Synthetic oligonucleotide
ctggtgtgaagctggcgagttcatcgctagccgtgtgagaagtagttggtttgaatggcta

SEQ ID NO: 47912 - DNA, 60 bp, Artificial
  Synthetic oligonucleotide
tgctcggcgggattgtgattgtatctggatgcggtgctgtagcgtactgcatatccaagt

SEQ ID NO: 47913 - DNA, 60 bp, Artificial
  Synthetic oligonucleotide
tgacagcctgcgtaccgtaacgccgagacgtgcctcagataatgggcacgcagtttcagg

SEQ ID NO: 47914 - DNA, 61 bp, Artificial
  Synthetic oligonucleotide
gcatatgcagattaccatagagaaggataaactggaaatgctctccgggctcggggcaact

SEQ ID NO: 47915 - DNA, 60 bp, Artificial
  Synthetic oligonucleotide
tggccacagcatccgcaagacgccctattgatgaaacaaattgttgtatcccgtactggt

SEQ ID NO: 47916 - DNA, 60 bp, Artificial
  Synthetic oligonucleotide
aacctcgacaagtgatcgaatcgtttaataagaacgagcctggaatgaaatcgagccgga

SEQ ID NO: 47917 - DNA, 61 bp, Artificial
  Synthetic oligonucleotide
gtccagccaaggctaaacgctttgggtttcgttacgagccaggcatgggtgtcaagagtgg

SEQ ID NO: 47918 - DNA, 60 bp, Artificial
  Synthetic oligonucleotide
gtatcccgtactggtatcgacgaagacactgtcgataaactcattgggcgttttgccgca

SEQ ID NO: 47919 - DNA, 60 bp, Artificial
  Synthetic oligonucleotide
ggcaaagcaaacagtaaaccgaatggtaacgtcgctgctggacaagcccagcatggcggc

SEQ ID NO: 47920 - DNA, 54 bp, Artificial
  Synthetic oligonucleotide
taagcgttgggagaccatgtcagagtcgatcgaaaggagagttacattcgtcgc

SEQ ID NO: 47921 - DNA, 60 bp, Artificial
  Synthetic oligonucleotide
ccggaccgcatacaaaaggcggtggaagtggtactggcaatgagctaccaagaagcacca

SEQ ID NO: 47922 - DNA, 60 bp, Artificial
  Synthetic oligonucleotide
tgccgcaatgaaggatgtatgggagccgatcacacttgagagcgaagaaagcaaggctgc

SEQ ID NO: 47923 - DNA, 61 bp, Artificial
  Synthetic oligonucleotide
cgcgctgaataccgtgacgaaataatatcattcatggacaccattatcaactgtccagcca

SEQ ID NO: 47924 - DNA, 60 bp, Artificial
  Synthetic oligonucleotide
cggtcgcgaagatcgcagcggaatttgtgtcgctgatgaatggaccgttcatagacctcg

SEQ ID NO: 47925 - DNA, 61 bp, Artificial
  Synthetic oligonucleotide
gccaaattctaaatttattatcgtaccctatatggatagagtaagttctgaagtactgcag

SEQ ID NO: 47926 - DNA, 60 bp, Artificial
  Synthetic oligonucleotide
aaaggatattcgatattctatcatctttaacatcaagatggctagaggtaaacaaaattc

SEQ ID NO: 47927 - DNA, 60 bp, Artificial
  Synthetic oligonucleotide
ggcaggctacgtcacaagtgggtgcgcggcagtggaatttctctgatacaacaactattc

SEQ ID NO: 47928 - DNA, 60 bp, Artificial
  Synthetic oligonucleotide
ggtcaagataaagagaacgttcgtttctctcaacagggtgtattttacctcttgcaagtg

SEQ ID NO: 47929 - DNA, 60 bp, Artificial
  Synthetic oligonucleotide
tgggttccaccaacagaactcaagcaaacttatactcaagatattactggtttgaagcca

SEQ ID NO: 47930 - DNA, 60 bp, Artificial
  Synthetic oligonucleotide
ggttccaccaacagaactcaagcaaacttatactcaagatattactggtttgaagccaaa

SEQ ID NO: 47931 - DNA, 60 bp, Artificial
  Synthetic oligonucleotide
caatctcatatttcgatactagcgctatcaaatgtgatgggtacatatcatttcaggcca

SEQ ID NO: 47932 - DNA, 60 bp, Artificial
  Synthetic oligonucleotide
tgggtctgtggattttccatgccacaaattaatcctacaccagtggaagtttcacagcta

SEQ ID NO: 47933 - DNA, 59 bp, Artificial
  Synthetic oligonucleotide
aacaaaattctaatcagattcaaaacaatagtaacgcaaacggcaagcgccgtaagcgt

SEQ ID NO: 47934 - DNA, 60 bp, Artificial
  Synthetic oligonucleotide
acttaggcaggctacgtcacaagtgggtgcgcggcagtggaatttctctgatacaacaac

SEQ ID NO: 47935 - DNA, 60 bp, Artificial
  Synthetic oligonucleotide
gttacttaggcaggctacgtcacaagtgggtgcgcggcagtggaatttctctgatacaac

SEQ ID NO: 47936 - DNA, 60 bp, Artificial
  Synthetic oligonucleotide
atcagttacttaggcaggctacgtcacaagtgggtgcgcggcagtggaatttctctgata

SEQ ID NO: 47937 - DNA, 60 bp, Artificial
  Synthetic oligonucleotide
tccactagatgaccccaacgttatcctcgatgtcgatcagttacttaggcaggctacgtc

SEQ ID NO: 47938 - DNA, 60 bp, Artificial
  Synthetic oligonucleotide
cttcaaactaacattagaagtgctaggagtgacgttaatgccatcactgttttaaatggc

SEQ ID NO: 47939 - DNA, 60 bp, Artificial
  Synthetic oligonucleotide
gatccactagatgaccccaacgttatcctcgatgtcgatcagttacttaggcaggctacg

SEQ ID NO: 47940 - DNA, 60 bp, Artificial
  Synthetic oligonucleotide
agatccactagatgaccccaacgttatcctcgatgtcgatcagttacttaggcaggctac

SEQ ID NO: 47941 - DNA, 60 bp, Artificial
  Synthetic oligonucleotide
caaagtccgaggttctaacaatttaactgattccaagtctagaatcttggttaagcaacc

SEQ ID NO: 47942 - DNA, 60 bp, Artificial
  Synthetic oligonucleotide
cgcagttggttcaatctcatatttcgatactagcgctatcaaatgtgatgggtacatatc

SEQ ID NO: 47943 - DNA, 60 bp, Artificial
  Synthetic oligonucleotide
tttctggtctatcgcaattttgggagcgttatagatggcacaaggctgcagttagatatg

SEQ ID NO: 47944 - DNA, 60 bp, Artificial
  Synthetic oligonucleotide
tttcaggccaatagcattggtgaagcaaccttcaccttagtgaccgattatcagggtgcg

SEQ ID NO: 47945 - DNA, 60 bp, Artificial
  Synthetic oligonucleotide
gggtacatatcatttcaggccaatagcattggtgaagcaaccttcaccttagtgaccgat

SEQ ID NO: 47946 - DNA, 60 bp, Artificial
  Synthetic oligonucleotide
cttaggcaggctacgtcacaagtgggtgcgcggcagtggaatttctctgatacaacaact

SEQ ID NO: 47947 - DNA, 60 bp, Artificial
  Synthetic oligonucleotide
gcagacggttcccaactttaaccccattgtcgcaaagccgacggttgccccacttcaaac

SEQ ID NO: 47948 - DNA, 60 bp, Artificial
  Synthetic oligonucleotide
cccacttcaaactaacattagaagtgctaggagtgacgttaatgccatcactgttttaaa

SEQ ID NO: 47949 - DNA, 60 bp, Artificial
  Synthetic oligonucleotide
gaagtactgcagaagtgcacaatcacttgtaatgaggttgacgcagttggttcaatctca

SEQ ID NO: 47950 - DNA, 60 bp, Artificial
  Synthetic oligonucleotide
gtccgaggttctaacaatttaactgattccaagtctagaatcttggttaagcaaccaatt

SEQ ID NO: 47951 - DNA, 60 bp, Artificial
  Synthetic oligonucleotide
cagatccactagatgaccccaacgttatcctcgatgtcgatcagttacttaggcaggcta

SEQ ID NO: 47952 - DNA, 60 bp, Artificial
  Synthetic oligonucleotide
gattgggtctgtggattttccatgccacaaattaatcctacaccagtggaagtttcacag

SEQ ID NO: 47953 - DNA, 60 bp, Artificial
  Synthetic oligonucleotide
tcaggccaatagcattggtgaagcaaccttcaccttagtgaccgattatcagggtgcggt

SEQ ID NO: 47954 - DNA, 60 bp, Artificial
  Synthetic oligonucleotide
ctggtcaagataaagagaacgttcgtttctctcaacagggtgtattttacctcttgcaag

SEQ ID NO: 47955 - DNA, 60 bp, Artificial
  Synthetic oligonucleotide
atccactagatgaccccaacgttatcctcgatgtcgatcagttacttaggcaggctacgt

SEQ ID NO: 47956 - DNA, 60 bp, Artificial
  Synthetic oligonucleotide
gcaggctacgtcacaagtgggtgcgcggcagtggaatttctctgatacaacaactattcc

SEQ ID NO: 47957 - DNA, 60 bp, Artificial
  Synthetic oligonucleotide
ttctctgatacaacaactattccattgattgtcaggcgtgatgatcaattgtactatact

SEQ ID NO: 47958 - DNA, 60 bp, Artificial
  Synthetic oligonucleotide
agataaagagaacgttcgtttctctcaacagggtgtattttacctcttgcaagtgactac

SEQ ID NO: 47959 - DNA, 60 bp, Artificial
  Synthetic oligonucleotide
cactatatttagattgggtctgtggattttccatgccacaaattaatcctacaccagtgg

SEQ ID NO: 47960 - DNA, 60 bp, Artificial
  Synthetic oligonucleotide
caagataaagagaacgttcgtttctctcaacagggtgtattttacctcttgcaagtgact

SEQ ID NO: 47961 - DNA, 60 bp, Artificial
  Synthetic oligonucleotide
gttagatatgttcctgcagtacccaatactttagcttgccaacttattggttacatcgat

SEQ ID NO: 47962 - DNA, 61 bp, Artificial
  Synthetic oligonucleotide
cgcagacggttcccaactttaaccccattgtcgcaaagccgacggttgccccacttcaaac

SEQ ID NO: 47963 - DNA, 55 bp, Artificial
  Synthetic oligonucleotide
acccaatactttagcttgccaacttattggttacatcgatacagatccactagat

SEQ ID NO: 47964 - DNA, 60 bp, Artificial
  Synthetic oligonucleotide
ccgcagacggttcccaactttaaccccattgtcgcaaagccgacggttgccccacttcaa

SEQ ID NO: 47965 - DNA, 61 bp, Artificial
  Synthetic oligonucleotide
gcaattttgggagcgttatagatggcacaaggctgcagttagatatgttcctgcagtaccc

SEQ ID NO: 47966 - DNA, 66 bp, Artificial
  Synthetic oligonucleotide
tgaagccaaattctaaatttattatcgtaccctatatggatagagtaagttctgaagtactgcaga

SEQ ID NO: 47967 - DNA, 60 bp, Artificial
  Synthetic oligonucleotide
ggttctaacaatttaactgattccaagtctagaatcttggttaagcaaccaatttctgcg

SEQ ID NO: 47968 - DNA, 60 bp, Artificial
  Synthetic oligonucleotide
gggtgcggttgaccctaaaccctatcagtataggattatcagagctatcgtcggcaataa

SEQ ID NO: 47969 - DNA, 60 bp, Artificial
  Synthetic oligonucleotide
agtaagttctgaagtactgcagaagtgcacaatcacttgtaatgaggttgacgcagttgg

SEQ ID NO: 47970 - DNA, 60 bp, Artificial
  Synthetic oligonucleotide
tcagggtgcggttgaccctaaaccctatcagtataggattatcagagctatcgtcggcaa

SEQ ID NO: 47971 - DNA, 61 bp, Artificial
  Synthetic oligonucleotide
ctgaagtactgcagaagtgcacaatcacttgtaatgaggttgacgcagttggttcaatctc

SEQ ID NO: 47972 - DNA, 60 bp, Artificial
  Synthetic oligonucleotide
tatcagggtgcggttgaccctaaaccctatcagtataggattatcagagctatcgtcggc

SEQ ID NO: 47973 - DNA, 51 bp, Artificial
  Synthetic oligonucleotide
ttatcagagctatcgtcggcaataattaggttgtcatatctagcacatgat

SEQ ID NO: 47974 - DNA, 60 bp, Artificial
  Synthetic oligonucleotide
actggtttgaagccaaattctaaatttattatcgtaccctatatggatagagtaagttct

SEQ ID NO: 47975 - DNA, 61 bp, Artificial
  Synthetic oligonucleotide
ccgggtgaatgtagtcaagacgactgccacaccaacccactttcaaccccttggaccgttg

SEQ ID NO: 47976 - DNA, 61 bp, Artificial
  Synthetic oligonucleotide
caggatcctttgcgtacaattccgaagttacacctcacaaccaataagggtgtatctccgg

SEQ ID NO: 47977 - DNA, 60 bp, Artificial
  Synthetic oligonucleotide
tcgaaagctggaaaacctcgggtgccaactcgacccgctgcagaccgaaaggctgcggca

SEQ ID NO: 47978 - DNA, 60 bp, Artificial
  Synthetic oligonucleotide
taatcctagaccaggtggaaaagcggaaggcttatcgtcgaaagctggaaaacctcgggt

SEQ ID NO: 47979 - DNA, 60 bp, Artificial
  Synthetic oligonucleotide
ggcatgctgtgacaacgaccttggcaacagccccggcccttttgccgatgaggggtgtta

SEQ ID NO: 47980 - DNA, 61 bp, Artificial
  Synthetic oligonucleotide
ccttgaaccagcagccagagttgcttggcccttttataaaccgatgaaagttgaggtaggg

SEQ ID NO: 47981 - DNA, 60 bp, Artificial
  Synthetic oligonucleotide
ggccttaaagtcgaagccaaagtgaatggtcctgatgaccctgtatccttttgcggacgt

SEQ ID NO: 47982 - DNA, 60 bp, Artificial
  Synthetic oligonucleotide
acgaccttggcaacagccccggcccttttgccgatgaggggtgttaattcagatgtggcg

SEQ ID NO: 47983 - DNA, 60 bp, Artificial
  Synthetic oligonucleotide
ggtcttcaccatcgaacagaagtgtatccagggtgacccacatcgccgaataattttcct

SEQ ID NO: 47984 - DNA, 60 bp, Artificial
  Synthetic oligonucleotide
aaccccacctgtgagtaactctgaaaccaccacgactactgccgtagtccatgcatccgc

SEQ ID NO: 47985 - DNA, 61 bp, Artificial
  Synthetic oligonucleotide
ttttggtgccagaaccaggcgtcggccatccatgggatacggcagcagtgcgtgaagtgca

SEQ ID NO: 47986 - DNA, 60 bp, Artificial
  Synthetic oligonucleotide
cgtggtacggcccaggtaagaccccaaagcaagtaggacgcaggcttcagagtatcgcca

SEQ ID NO: 47987 - DNA, 60 bp, Artificial
  Synthetic oligonucleotide
aggcgactccgatcatcggcacttgggccagacgtgtgatagaactgacgggtgacctca

SEQ ID NO: 47988 - DNA, 60 bp, Artificial
  Synthetic oligonucleotide
aatgctcaccaacaacttgatccatcgttaatcgaaactgctatggctaacattctagga

SEQ ID NO: 47989 - DNA, 60 bp, Artificial
  Synthetic oligonucleotide
gcagtgcgtgaagtgcaggacaaccgccaacagaaagcacgcatcaatatggtagccgcc

SEQ ID NO: 47990 - DNA, 60 bp, Artificial
  Synthetic oligonucleotide
gcgtgaagtgcaggacaaccgccaacagaaagcacgcatcaatatggtagccgccaccgt

SEQ ID NO: 47991 - DNA, 57 bp, Artificial
  Synthetic oligonucleotide
gagccttataatgtgtcaatgagcaaccacgacatagagagaggaaaccggtatttt

SEQ ID NO: 47992 - DNA, 61 bp, Artificial
  Synthetic oligonucleotide
cgcaaaggatctcaccataccctacaggaatgatccggtgtcggataatacaggtttcgtc

SEQ ID NO: 47993 - DNA, 60 bp, Artificial
  Synthetic oligonucleotide
aagtcttcatgcagatgggcaccacgactgctggtgtgaggtacgaagccggttggggca

SEQ ID NO: 47994 - DNA, 61 bp, Artificial
  Synthetic oligonucleotide
tctaggaatagatgtgggagagctcaaggctttggataaagctgtcagtgaagctaaggcc

SEQ ID NO: 47995 - DNA, 60 bp, Artificial
  Synthetic oligonucleotide
tactgttgctaccggaagttgtgccacactcccgccgaggcttggaggaagctcagccaa

SEQ ID NO: 47996 - DNA, 61 bp, Artificial
  Synthetic oligonucleotide
cttggaggaagctcagccaaggtgccctcctgactggcgatgatgctgttcttgcccatga

SEQ ID NO: 47997 - DNA, 61 bp, Artificial
  Synthetic oligonucleotide
cttgtctcgcgctaaagatccgtgcgcacgagagtttggtgaagatacgcttgtgtaagcc

SEQ ID NO: 47998 - DNA, 61 bp, Artificial
  Synthetic oligonucleotide
ggaggcgtgtgtaaacgcgccaatactctttgagttgataccagaggcaaaattccgggtg

SEQ ID NO: 47999 - DNA, 60 bp, Artificial
  Synthetic oligonucleotide
gctgaagcatacgccgcgacgaacgatccgcgtaacatcaccactatggcacctgagctt

SEQ ID NO: 48000 - DNA, 60 bp, Artificial
  Synthetic oligonucleotide
gaggtagggctgaagcgcaaatgtatgactgcaggtcaagtcaacgtgttgtatgagcca

SEQ ID NO: 48001 - DNA, 60 bp, Artificial
  Synthetic oligonucleotide
gcctaaccctggcacaaccccacctgtgagtaactctgaaaccaccacgactactgccgt

SEQ ID NO: 48002 - DNA, 60 bp, Artificial
  Synthetic oligonucleotide
ccgatgaaagttgaggtagggctgaagcgcaaatgtatgactgcaggtcaagtcaacgtg

SEQ ID NO: 48003 - DNA, 60 bp, Artificial
  Synthetic oligonucleotide
ttgacgtgcgaggcggcgccagctatagtcatcagctatgggattacactggcgacacta

SEQ ID NO: 48004 - DNA, 60 bp, Artificial
  Synthetic oligonucleotide
atatggtagccgccaccgtttctactcactcatccaaccggttaaaggcctttataaagg

SEQ ID NO: 48005 - DNA, 60 bp, Artificial
  Synthetic oligonucleotide
tgcggacgtatttatccacgtcttagtgattgcataacgagttttcaggatcctttgcgt

SEQ ID NO: 48006 - DNA, 60 bp, Artificial
  Synthetic oligonucleotide
agcggaactcctgaagtcgtaccagaaatggcaggacacagcgagcgacgcgataaatcg

SEQ ID NO: 48007 - DNA, 60 bp, Artificial
  Synthetic oligonucleotide
gtatcactgcgatgaccactccttccacgtgaatgatgatagggttttctttgacgtgcg

SEQ ID NO: 48008 - DNA, 60 bp, Artificial
  Synthetic oligonucleotide
aaaacctcgggtgccaactcgacccgctgcagaccgaaaggctgcggcaggcagtggcaa

SEQ ID NO: 48009 - DNA, 60 bp, Artificial
  Synthetic oligonucleotide
gcggcaggcagtggcaaccgtcgtggacctactaacggccgacgacccatccgtgatcga

SEQ ID NO: 48010 - DNA, 60 bp, Artificial
  Synthetic oligonucleotide
aatgggttggaaccggcgttgctggacgtagtcaagaacctgggccttaaagtcgaagcc

SEQ ID NO: 48011 - DNA, 61 bp, Artificial
  Synthetic oligonucleotide
cggcaaacacggtcatcccattcaaggagtataaggaatacgcatctgaattcgtggagtt

SEQ ID NO: 48012 - DNA, 60 bp, Artificial
  Synthetic oligonucleotide
tatctccggaacaagcagcggctaatagggcccacgggtacttggcgacggacaaggcga

SEQ ID NO: 48013 - DNA, 60 bp, Artificial
  Synthetic oligonucleotide
aagcagcggctaatagggcccacgggtacttggcgacggacaaggcgactccgatcatcg

SEQ ID NO: 48014 - DNA, 61 bp, Artificial
  Synthetic oligonucleotide
gcagcactttaaaccaatgttgttgtatacattagtaccagaatcgctctcgtatcactgc

SEQ ID NO: 48015 - DNA, 58 bp, Artificial
  Synthetic oligonucleotide
tgtcggataatacaggtttcgtcttttgtgacgtggattactatgcagatatggaaaa

SEQ ID NO: 48016 - DNA, 60 bp, Artificial
  Synthetic oligonucleotide
tacgagcagccgtggtacggcccaggtaagaccccaaagcaagtaggacgcaggcttcag

SEQ ID NO: 48017 - DNA, 60 bp, Artificial
  Synthetic oligonucleotide
tgcggttcttcaaagagcaccaacgaacggagttccagagctggtttagcaaagtcttca

SEQ ID NO: 48018 - DNA, 60 bp, Artificial
  Synthetic oligonucleotide
gtatcgccaaacacggtacactggagagtgactactcacgctttgatggctcaatcagcg

SEQ ID NO: 48019 - DNA, 60 bp, Artificial
  Synthetic oligonucleotide
aaggatttaaaattagtaccagtagcacgagaccacactcacggacgtgcggcgaagttt

SEQ ID NO: 48020 - DNA, 60 bp, Artificial
  Synthetic oligonucleotide
tacgaaagtaccaatggaggagcacataccgctaccaagtcagtatgagagccctaaggc

SEQ ID NO: 48021 - DNA, 60 bp, Artificial
  Synthetic oligonucleotide
ggggtgttaattcagatgtggcgactgtgaatggccgggtgaagaagccggcaaacacgg

SEQ ID NO: 48022 - DNA, 60 bp, Artificial
  Synthetic oligonucleotide
tgtgtaagccatatgatgcccagtcccggtcgaaaattatagagaaagtgatcgaacgca

SEQ ID NO: 48023 - DNA, 61 bp, Artificial
  Synthetic oligonucleotide
agtatgagagccctaaggctttgccgcctagggtgccgagctcgcgatggcttaggtcgtt

SEQ ID NO: 48024 - DNA, 60 bp, Artificial
  Synthetic oligonucleotide
accagaatcgctctcgtatcactgcgatgaccactccttccacgtgaatgatgatagggt

SEQ ID NO: 48025 - DNA, 60 bp, Artificial
  Synthetic oligonucleotide
tcttccctcggctttgacttgaagatagtgaatcgcgcgccacgtggctctccagtgaca

SEQ ID NO: 48026 - DNA, 61 bp, Artificial
  Synthetic oligonucleotide
ggcgtacttggtcactgatagcaagacaccttttattggtcattggtgccgggcttatcag

SEQ ID NO: 48027 - DNA, 60 bp, Artificial
  Synthetic oligonucleotide
gcacctgctgttacacgattgggcatcaagtatgaccctgattgcagtcgcctcagtggt

SEQ ID NO: 48028 - DNA, 60 bp, Artificial
  Synthetic oligonucleotide
aacaaattctccgtgatgcggccatgatccggactcagatccagcgggaaatggaactgg

SEQ ID NO: 48029 - DNA, 60 bp, Artificial
  Synthetic oligonucleotide
tgcaagcgtccaacttcctctgcaggatttcgagaacatccgcactgcatacgaactgtc

SEQ ID NO: 48030 - DNA, 60 bp, Artificial
  Synthetic oligonucleotide
ttcaagatgggtgagcatcgtaacatcgtgtcaattgtgccctttgcaacttgccgttca

SEQ ID NO: 48031 - DNA, 60 bp, Artificial
  Synthetic oligonucleotide
actccgttcactaccgtgttgctggcgggaaggatgtgcgccaccgcatctggaactaca

SEQ ID NO: 48032 - DNA, 60 bp, Artificial
  Synthetic oligonucleotide
ttggtttgggtgttccgatattgctgtacaccttccagccaagtactgtgtccggagagg

SEQ ID NO: 48033 - DNA, 60 bp, Artificial
  Synthetic oligonucleotide
accgttccgcatacccaaaacgtcaagttgtccagctacacctacgctttcaaagccagt

SEQ ID NO: 48034 - DNA, 60 bp, Artificial
  Synthetic oligonucleotide
ggccgcagtctgaatccgatgactggaatgacattgtagccaacgagcttggcgtcacca

SEQ ID NO: 48035 - DNA, 61 bp, Artificial
  Synthetic oligonucleotide
tcacaaccgacggaaacagcattgctaatgctttcgtctcataccttgctggtcgcatggc

SEQ ID NO: 48036 - DNA, 60 bp, Artificial
  Synthetic oligonucleotide
taccccctcacgtatgtcgaggagcagcagaccaagccgttacagcgggctcggaatgat

SEQ ID NO: 48037 - DNA, 60 bp, Artificial
  Synthetic oligonucleotide
tggaaccaaagatgtctgtcgcattggacggggagatccaagccggtcctagtcaaaaca

SEQ ID NO: 48038 - DNA, 61 bp, Artificial
  Synthetic oligonucleotide
ccggcttccgtgcagtcgccattaagaacattgttgaaattgcacaccacctgtgataccc

SEQ ID NO: 48039 - DNA, 60 bp, Artificial
  Synthetic oligonucleotide
tcctgtcacgccggttcccaccccttccagcggtgatcgaggaaccgatggagacggact

SEQ ID NO: 48040 - DNA, 60 bp, Artificial
  Synthetic oligonucleotide
acaccaagctcggtattgcgcctttcggcgaccctgttaccatgttcaccgttgatcaat

SEQ ID NO: 48041 - DNA, 60 bp, Artificial
  Synthetic oligonucleotide
ggtcgtgcataaacctggcgatcttgctcgtcattaccaagcagttggtagtgcctacga

SEQ ID NO: 48042 - DNA, 60 bp, Artificial
  Synthetic oligonucleotide
tggctcgcggaccgtgttgaggattatcgccaacgcatcatcgctgagaagaaacaaatt

SEQ ID NO: 48043 - DNA, 60 bp, Artificial
  Synthetic oligonucleotide
ttgtgatgactgatgttgactactacgtggacatgcatgagttgattggtttgggtgttc

SEQ ID NO: 48044 - DNA, 60 bp, Artificial
  Synthetic oligonucleotide
acgaactgtccaaaactaacaacttgtcagatactgttcgccggtcagggcgcccgtgca

SEQ ID NO: 48045 - DNA, 60 bp, Artificial
  Synthetic oligonucleotide
gccgcgagcacataacacctaagatgcgcaaagtggctagggacttcgtgcaccatctgg

SEQ ID NO: 48046 - DNA, 60 bp, Artificial
  Synthetic oligonucleotide
gcttatgctggtcccatcagtggcctcccacgtctgacaacatcaatcgatttggaacca

SEQ ID NO: 48047 - DNA, 60 bp, Artificial
  Synthetic oligonucleotide
tctccagcatgttccgtggtacatgccaacgcacacaccagctgaaatcgctgacgcagt

SEQ ID NO: 48048 - DNA, 60 bp, Artificial
  Synthetic oligonucleotide
cgcttcatgcgtgagtgcgtcgaatttgctatctataagcgctgggttcacctggaccac

SEQ ID NO: 48049 - DNA, 61 bp, Artificial
  Synthetic oligonucleotide
gaagcatacaacgccccaaattaccccaggaacatttcaaccgttccgcatacccaaaacg

SEQ ID NO: 48050 - DNA, 60 bp, Artificial
  Synthetic oligonucleotide
cacctcgtcgagctcgagcagctcttccaggtgatgatggacacgcgcgtcgctctcggc

SEQ ID NO: 48051 - DNA, 60 bp, Artificial
  Synthetic oligonucleotide
ccgttcaaatctgctcaagatcagtgagtacggtgctgagttggagtatatgcgctacca

SEQ ID NO: 48052 - DNA, 60 bp, Artificial
  Synthetic oligonucleotide
cgcgttgctctcggcggagtgaccgcgatccaggtaaacgagatgcgcacgttcgtggta

SEQ ID NO: 48053 - DNA, 60 bp, Artificial
  Synthetic oligonucleotide
tcaacgcagtcacttacatctctgagaatgggccactcatcagtctgggtttggaaggca

SEQ ID NO: 48054 - DNA, 60 bp, Artificial
  Synthetic oligonucleotide
gcacctcgaccatttaacagaattgtccacactattgggaaatgaactccaagcacctgc

SEQ ID NO: 48055 - DNA, 61 bp, Artificial
  Synthetic oligonucleotide
ggagggcaatttcgctagtgtccaacttccgcttcaggatttcgaaaacatccgtactgct

SEQ ID NO: 48056 - DNA, 60 bp, Artificial
  Synthetic oligonucleotide
gccggtcctagtcaacaacctcaaactgacaaggatggaacaagtccaacaggcgatcga

SEQ ID NO: 48057 - DNA, 60 bp, Artificial
  Synthetic oligonucleotide
aaagatgcacaaagtggctagggatttcgtgcgccatttggtgcccacggccgggctcgg

SEQ ID NO: 48058 - DNA, 60 bp, Artificial
  Synthetic oligonucleotide
cgcggcgcttgatgcgtatactggtcccgtgagcggacttccccgtctgacaacatcact

SEQ ID NO: 48059 - DNA, 60 bp, Artificial
  Synthetic oligonucleotide
gctcggccgtccctatcccctcacgtatgtcgaagagcaccagaccaagccgttacagcg

SEQ ID NO: 48060 - DNA, 60 bp, Artificial
  Synthetic oligonucleotide
gcacgttcctccgtttcatgcgggagaatgtcgaatttgccatttacaagcgttgggtgc

SEQ ID NO: 48061 - DNA, 60 bp, Artificial
  Synthetic oligonucleotide
tcccgcacacccaaaacgttaagctgtccagctacacctacgctttcaaagaagcagtcc

SEQ ID NO: 48062 - DNA, 60 bp, Artificial
  Synthetic oligonucleotide
ccccgtggtttctgggcaagtctgaaacagattttgcgcgacattactggcatcaccgct

SEQ ID NO: 48063 - DNA, 61 bp, Artificial
  Synthetic oligonucleotide
cccgtttggcgaccaggttacgttgttcaccgttgaccagttcaagatgggtgagcaccgc

SEQ ID NO: 48064 - DNA, 61 bp, Artificial
  Synthetic oligonucleotide
gggtgagcaccgcaacatcgtctccattgttcctttcgcgacttgtcgctccaacctcctt

SEQ ID NO: 48065 - DNA, 60 bp, Artificial
  Synthetic oligonucleotide
gtttatctcgatccctggtcatcaccggcttccgtgcagtcgccgttgcgcactttgctc

SEQ ID NO: 48066 - DNA, 61 bp, Artificial
  Synthetic oligonucleotide
ccaacctccttaagattagtgagtacggtgctgaattggactacatgcgttaccaacaacg

SEQ ID NO: 48067 - DNA, 61 bp, Artificial
  Synthetic oligonucleotide
gttggccttggcgttccgatcctgttgtacacgttccaacccagcactgtgtccggggaag

SEQ ID NO: 48068 - DNA, 61 bp, Artificial
  Synthetic oligonucleotide
tggccattggtgtcgggcctaccaacgcaattgcactgcacgtgtggtccaatacgcagac

SEQ ID NO: 48069 - DNA, 60 bp, Artificial
  Synthetic oligonucleotide
ccaccaggaggctgctaccgagcggaacagcgctaccgacaccatgatcggtgtggttga

SEQ ID NO: 48070 - DNA, 60 bp, Artificial
  Synthetic oligonucleotide
cactcgacttggaaccgaagatgcctgtcgcattagacggcgaggtccaagccggtccta

SEQ ID NO: 48071 - DNA, 60 bp, Artificial
  Synthetic oligonucleotide
aacgagatgcgaacgttcgtgataagcgccagcgccgcagcacaacgcctccgcgctctc

SEQ ID NO: 48072 - DNA, 61 bp, Artificial
  Synthetic oligonucleotide
cgggctaccgcctgttgacatcaaaatggcttgcggatagggttgaggattatcgccaacg

SEQ ID NO: 48073 - DNA, 60 bp, Artificial
  Synthetic oligonucleotide
ttgacttgaaaatagtgaatcgtgcacctcgcggttctccagtgaccttcctctcgcgag

SEQ ID NO: 48074 - DNA, 60 bp, Artificial
  Synthetic oligonucleotide
tgagcagggcaaatgctatgcccgtgagtacgctcctgggccgctgactcaaactgctgt

SEQ ID NO: 48075 - DNA, 60 bp, Artificial
  Synthetic oligonucleotide
cggtcggcacgttcgtgtaaggaggcagccataattcacaaatgccttcaggccgggtgc

SEQ ID NO: 48076 - DNA, 60 bp, Artificial
  Synthetic oligonucleotide
gggtccgcaggctaaggcaaagagccgcgagcacatcactccaaagatgcacaaagtggc

SEQ ID NO: 48077 - DNA, 60 bp, Artificial
  Synthetic oligonucleotide
atctcgctagcgaggtcgtccacaagcctggagagctggcacgccactaccaagctcttg

SEQ ID NO: 48078 - DNA, 60 bp, Artificial
  Synthetic oligonucleotide
cgtgcgccataggatctggaactacaaccaggataccatgttcgtgcgctccaaaccccg

SEQ ID NO: 48079 - DNA, 60 bp, Artificial
  Synthetic oligonucleotide
gagtttgaactcgcacgcatgtctggagcagcattttgtgtcgttacgggctaccgcctg

SEQ ID NO: 48080 - DNA, 60 bp, Artificial
  Synthetic oligonucleotide
ccgcgtgagaaggagtaccacgggtcccgtcagttctatagtcttgccgacttccgtcag

SEQ ID NO: 48081 - DNA, 60 bp, Artificial
  Synthetic oligonucleotide
tttccaagtgagtcgcgttccaatgagcttgccacgatcgacggtcgtatagcgggtccg

SEQ ID NO: 48082 - DNA, 60 bp, Artificial
  Synthetic oligonucleotide
ggcatggacttggattggtattgtctacggtgacgacggtcttagatccggaaacgtgtc

SEQ ID NO: 48083 - DNA, 60 bp, Artificial
  Synthetic oligonucleotide
tgacacaaggttccctgtacaacgattccctttccacaaatgacttcaagtccatcctcc

SEQ ID NO: 48084 - DNA, 61 bp, Artificial
  Synthetic oligonucleotide
ccctgtacaacgattccctttccacaaatgacttcaagtccatcctcctaggatccacacc

SEQ ID NO: 48085 - DNA, 60 bp, Artificial
  Synthetic oligonucleotide
tggagcagtcttccagctggaccgtccgctgtccattgactacagccttggaactggaga

SEQ ID NO: 48086 - DNA, 60 bp, Artificial
  Synthetic oligonucleotide
ccggctacgcttgaaggcctatacacggctggaagcgcgccgcgtgcttaattgggtgcc

SEQ ID NO: 48087 - DNA, 60 bp, Artificial
  Synthetic oligonucleotide
aggagggtgcgattgctattgttggtacccttgacggcgtaccggctacgcttgaaggcc

SEQ ID NO: 48088 - DNA, 60 bp, Artificial
  Synthetic oligonucleotide
cactgacgcacctgtgtctaaggcctcgactgtaactggattcggacgtgggaccaatga

SEQ ID NO: 48089 - DNA, 60 bp, Artificial
  Synthetic oligonucleotide
cgccgacgtgctaacaatcgtcggcgtagtaatcgcactgacgcacctgtgtctaaggcc

SEQ ID NO: 48090 - DNA, 60 bp, Artificial
  Synthetic oligonucleotide
gcgaatccgcaaccccgccgacgtgctaacaatcgtcggcgtagtaatcgcactgacgca

SEQ ID NO: 48091 - DNA, 60 bp, Artificial
  Synthetic oligonucleotide
aaggcctatacacggctggaagcgcgccgcgtgcttaattgggtgccagtggtaccagtc

SEQ ID NO: 48092 - DNA, 60 bp, Artificial
  Synthetic oligonucleotide
attgggtgccagtggtaccagtcgtatccaacgccgaggaagtccctctttgggctgttg

SEQ ID NO: 48093 - DNA, 60 bp, Artificial
  Synthetic oligonucleotide
tcagtacacccgcacgctcctctggacctcgtcgggaaaggagcagcgtctcacgtcacc

SEQ ID NO: 48094 - DNA, 60 bp, Artificial
  Synthetic oligonucleotide
tggcgttgcttactactctgatgagcagccccgtcaaatcctgctgcctgttggcactgt

SEQ ID NO: 48095 - DNA, 60 bp, Artificial
  Synthetic oligonucleotide
aatgacgtccatctctcaggtatgtcgagaatctcccaggccgtcctcccagccgggaca

SEQ ID NO: 48096 - DNA, 60 bp, Artificial
  Synthetic oligonucleotide
caggaacagacggatacgttgttgttgacgcaaccatcgtccccgacctcctgccacgac

SEQ ID NO: 48097 - DNA, 60 bp, Artificial
  Synthetic oligonucleotide
agctggaccgtccgctgtccattgactacagccttggaactggagatgttgaccgtgctg

SEQ ID NO: 48098 - DNA, 60 bp, Artificial
  Synthetic oligonucleotide
ctcccagccgggacaggaacagacggatacgttgttgttgacgcaaccatcgtccccgac

SEQ ID NO: 48099 - DNA, 60 bp, Artificial
  Synthetic oligonucleotide
atctctcaggtatgtcgagaatctcccaggccgtcctcccagccgggacaggaacagacg

SEQ ID NO: 48100 - DNA, 60 bp, Artificial
  Synthetic oligonucleotide
ctgatccaactgacaacgatcacaccttcgacgcgcttcaagcaactcgtggtgcagtcg

SEQ ID NO: 48101 - DNA, 60 bp, Artificial
  Synthetic oligonucleotide
aacagtccgacctcagtacacccgcacgctcctctggacctcgtcgggaaaggagcagcg

SEQ ID NO: 48102 - DNA, 60 bp, Artificial
  Synthetic oligonucleotide
ccgctcccatcatgacacaaggttccctgtacaacgattccctttccacaaatgacttca

SEQ ID NO: 48103 - DNA, 60 bp, Artificial
  Synthetic oligonucleotide
tgatgtggtcaacgtgtcagtgctgtgtcgctggagtgttcgactgagcgttccatctct

SEQ ID NO: 48104 - DNA, 60 bp, Artificial
  Synthetic oligonucleotide
ccaccgctcccatcatgacacaaggttccctgtacaacgattccctttccacaaatgact

SEQ ID NO: 48105 - DNA, 60 bp, Artificial
  Synthetic oligonucleotide
ggtcaacgtgtcagtgctgtgtcgctggagtgttcgactgagcgttccatctcttgagac

SEQ ID NO: 48106 - DNA, 60 bp, Artificial
  Synthetic oligonucleotide
cgtctcacgtcacctggtcggctgatactcctgtgtgtcggcaacaacactgatgtggtc

SEQ ID NO: 48107 - DNA, 60 bp, Artificial
  Synthetic oligonucleotide
aacaacactgatgtggtcaacgtgtcagtgctgtgtcgctggagtgttcgactgagcgtt

SEQ ID NO: 48108 - DNA, 60 bp, Artificial
  Synthetic oligonucleotide
ggaccaatgacgtccatctctcaggtatgtcgagaatctcccaggccgtcctcccagccg

SEQ ID NO: 48109 - DNA, 60 bp, Artificial
  Synthetic oligonucleotide
ggagcagcgtctcacgtcacctggtcggctgatactcctgtgtgtcggcaacaacactga

SEQ ID NO: 48110 - DNA, 60 bp, Artificial
  Synthetic oligonucleotide
acgcacctgtgtctaaggcctcgactgtaactggattcggacgtgggaccaatgacgtcc

SEQ ID NO: 48111 - DNA, 60 bp, Artificial
  Synthetic oligonucleotide
aagcacccaaggagggtgcgattgctattgttggtacccttgacggcgtaccggctacgc

SEQ ID NO: 48112 - DNA, 60 bp, Artificial
  Synthetic oligonucleotide
ctgcctgatccaactgacaacgatcacaccttcgacgcgcttcaagcaactcgtggtgca

SEQ ID NO: 48113 - DNA, 60 bp, Artificial
  Synthetic oligonucleotide
cagcctcgtcaaatcctgctgcctgttggcactgtctgcactagggttgactcggaaaac

SEQ ID NO: 48114 - DNA, 60 bp, Artificial
  Synthetic oligonucleotide
ccagtggtaccagtcgtatccaacgccgaggaagtccctctttgggctgttgggttaccg

SEQ ID NO: 48115 - DNA, 60 bp, Artificial
  Synthetic oligonucleotide
tggcactgtctgcaccagggttgactcgggaaactaaccgggtcatccggttccctagtg

SEQ ID NO: 48116 - DNA, 60 bp, Artificial
  Synthetic oligonucleotide
tccccgacctcctgccacgactgggacacgctgctagaatcttccagcgatacgctgttg

SEQ ID NO: 48117 - DNA, 60 bp, Artificial
  Synthetic oligonucleotide
tggagggaaccgagttacacgcgcattgcaacgggctgtcattgacaaaacgaagacccc

SEQ ID NO: 48118 - DNA, 60 bp, Artificial
  Synthetic oligonucleotide
cacgtttctatccgcttgacagcctgcgtaccgtgacgcctaagcgtgtcgcagacaacg

SEQ ID NO: 48119 - DNA, 60 bp, Artificial
  Synthetic oligonucleotide
caattgcgccctatcctcagagtggagggaaccgagttacacgcgcattgcaacgggctg

SEQ ID NO: 48120 - DNA, 60 bp, Artificial
  Synthetic oligonucleotide
ccgaactgaattgccagtcgggattgcaaccgtatctgggtgcggtgccgtagtgtactg

SEQ ID NO: 48121 - DNA, 60 bp, Artificial
  Synthetic oligonucleotide
tgcgccgaactccgtggacgaatcgttaccaatgttaaacgatgccaagcaaactcgcgc

SEQ ID NO: 48122 - DNA, 60 bp, Artificial
  Synthetic oligonucleotide
accacgccacataacacccaatacaatggatgtgtcgaatttacagctctgacctttgag

SEQ ID NO: 48123 - DNA, 60 bp, Artificial
  Synthetic oligonucleotide
cgtcccaacaattacaacttagggcggttttcgaaatgattggagtcgaacctcgtcaat

SEQ ID NO: 48124 - DNA, 60 bp, Artificial
  Synthetic oligonucleotide
tatgtcaccgagcctgatgtgcttttagagcacatgcgtccagtagtgttacacaccttt

SEQ ID NO: 48125 - DNA, 60 bp, Artificial
  Synthetic oligonucleotide
agtttccagatacaccttagcgtattcggatatagttctacatgccgaacacaatgaaca

SEQ ID NO: 48126 - DNA, 53 bp, Artificial
  Synthetic oligonucleotide
gtaggtggctcttaggagcacccacacccgttctagcccgaaagggcagaggt

SEQ ID NO: 48127 - DNA, 61 bp, Artificial
  Synthetic oligonucleotide
ggcaaaactaacggtaagtcggatggtaacatcactgctggagaaacccagcgtggtggca

SEQ ID NO: 48128 - DNA, 60 bp, Artificial
  Synthetic oligonucleotide
tggacacgataatcaattgttcagctaaagctaaacgctttggtttccgatatgagcctg

SEQ ID NO: 48129 - DNA, 61 bp, Artificial
  Synthetic oligonucleotide
ccgccacccaatctgtcaacgctaggcttatcggtatgggacacaaggacccgcaatacac

SEQ ID NO: 48130 - DNA, 61 bp, Artificial
  Synthetic oligonucleotide
cggccgttggaggatccaaatttgaggtcaaccccaacccaaactcaagcactggactgcg

SEQ ID NO: 48131 - DNA, 61 bp, Artificial
  Synthetic oligonucleotide
gatccaacgataccattagctgatgcggcttgcgaccgtgtcgaaggccatctctgtaccg

SEQ ID NO: 48132 - DNA, 60 bp, Artificial
  Synthetic oligonucleotide
caccaattagtccaactgtgtataaacctacaatgccacgcgtccattggccagtaacca

SEQ ID NO: 48133 - DNA, 61 bp, Artificial
  Synthetic oligonucleotide
cgcgctgccaagtgtttcggcctcgaactcaaagttgaacgatacaatccagagataggtc

SEQ ID NO: 48134 - DNA, 60 bp, Artificial
  Synthetic oligonucleotide
ctgcgaatgattggtttggagaaggttggctatcataaaatccatcattgtagaccgtgg

SEQ ID NO: 48135 - DNA, 60 bp, Artificial
  Synthetic oligonucleotide
tccagagataggtctttgtttcctgtctcgtgtatttgtggacccgctcgcaactacgac

SEQ ID NO: 48136 - DNA, 60 bp, Artificial
  Synthetic oligonucleotide
tccaacctcgatggcagggtttccagctggatgcaaagaaacatcgcccaaaaggccatg

SEQ ID NO: 48137 - DNA, 60 bp, Artificial
  Synthetic oligonucleotide
ctgggtgcggtgccgtagtgtactgcatatccaagttctggggctatggggcaattgcgc

SEQ ID NO: 48138 - DNA, 60 bp, Artificial
  Synthetic oligonucleotide
caagcgctgggaaacaatgtctgaatcaattgaacgtagagtgacttttgtcgccaatga

SEQ ID NO: 48139 - DNA, 54 bp, Artificial
  Synthetic oligonucleotide
tcgcagacaacgggcacgccgtttcaggggccgtacgtgatgccgcacgtcgtt

SEQ ID NO: 48140 - DNA, 60 bp, Artificial
  Synthetic oligonucleotide
acacgcgcattgcaacgggctgtcattgacaaaacgaagaccccgatagagacacgtttc

SEQ ID NO: 48141 - DNA, 56 bp, Artificial
  Synthetic oligonucleotide
ctgagcaggtgaggaaccaacgtagaagccggaataaagagaagccctactggttg

SEQ ID NO: 48142 - DNA, 60 bp, Artificial
  Synthetic oligonucleotide
acgaagaccccgatagagacacgtttctatccgcttgacagcctgcgtaccgtaacgcct

SEQ ID NO: 48143 - DNA, 60 bp, Artificial
  Synthetic oligonucleotide
acgggctgtcattgacaaaacgaagaccccgatagagacacgtttctatccgcttgacag

SEQ ID NO: 48144 - DNA, 60 bp, Artificial
  Synthetic oligonucleotide
agcgaacctaaacaatgactctaaaagttattcttggagaacaccagatcacccgaactg

SEQ ID NO: 48145 - DNA, 60 bp, Artificial
  Synthetic oligonucleotide
ttgggcgttttgccgcaatgaaggatgtctgggagaaaattacacatgacagcgaggaga

SEQ ID NO: 48146 - DNA, 60 bp, Artificial
  Synthetic oligonucleotide
tattaccccgggcggaacccgactgagatcgccgacggtgtttgtgagtttgttagtgac

SEQ ID NO: 48147 - DNA, 61 bp, Artificial
  Synthetic oligonucleotide
ggccatggttcaagcattccgcccagaatacagagatgagatcatttcattcatggacacg

SEQ ID NO: 48148 - DNA, 60 bp, Artificial
  Synthetic oligonucleotide
agatcttgaccctttgtcgattgaagaaacgattgaacggctgaataaaccgtcccaaca

SEQ ID NO: 48149 - DNA, 60 bp, Artificial
  Synthetic oligonucleotide
tggtttccgatatgagcctggtgtaggcgttaaaagtggaagtccaacaaccacgccaca

SEQ ID NO: 48150 - DNA, 60 bp, Artificial
  Synthetic oligonucleotide
atcaaacgtacagccattgacgaagatcaggtcgatgcactcattgggcgttttgccgca

SEQ ID NO: 48151 - DNA, 60 bp, Artificial
  Synthetic oligonucleotide
ccaagacgcaccgaacaacgtgcgcagggacctcgacaacctgcacgcttgcctaaacaa

SEQ ID NO: 48152 - DNA, 53 bp, Artificial
  Synthetic oligonucleotide
agcaaactcgcgctaatccaggaacttcccgaccgcattcaaacggcggtgga

SEQ ID NO: 48153 - DNA, 60 bp, Artificial
  Synthetic oligonucleotide
cctgatgctgaacctgaagatttgttccgtttaatcggaccgaagtgcggtgatgatggt

SEQ ID NO: 48154 - DNA, 61 bp, Artificial
  Synthetic oligonucleotide
cccgctcgcaactacgaccacaattcaagacccactgcgtactctgcgaaaactacatctt

SEQ ID NO: 48155 - DNA, 61 bp, Artificial
  Synthetic oligonucleotide
cacacctttaacccgaagaaagtgagcggttttgatgctgactcaccattcaccattaaga

SEQ ID NO: 48156 - DNA, 61 bp, Artificial
  Synthetic oligonucleotide
gcggtggagcagcatgggtccatccagtttgggattggtgcgaagctggtgagtttatcgc

SEQ ID NO: 48157 - DNA, 61 bp, Artificial
  Synthetic oligonucleotide
gcaaaatggtactacgactctacgggcccactgcttcaactgagcaggtgaggaaccaacg

SEQ ID NO: 48158 - DNA, 54 bp, Artificial
  Synthetic oligonucleotide
catcggtcgagaaggggagcatgctcagattaccatcgagaaagaaaagttgga

SEQ ID NO: 48159 - DNA, 61 bp, Artificial
  Synthetic oligonucleotide
ccgtggactgattgtccagatcgtgcacttgtctacactattccgcaatatgtcatttggc

SEQ ID NO: 48160 - DNA, 58 bp, Artificial
  Synthetic oligonucleotide
ggatttcgttccattctcttgggcgcgacccaactcgacctcgctcctgcaaacgctg

SEQ ID NO: 48161 - DNA, 60 bp, Artificial
  Synthetic oligonucleotide
ctggagttcgaaattcagccaatgtgccccgcaaacacgggcggtggttacgttgctggc

SEQ ID NO: 48162 - DNA, 60 bp, Artificial
  Synthetic oligonucleotide
ccttgagacacctgaggacaccaccgctccaattactacccaggcgccactccacaacga

SEQ ID NO: 48163 - DNA, 60 bp, Artificial
  Synthetic oligonucleotide
gcttcctgcctgatccaactgacaacgaccacaccttcgatgcgctccaagcaactcgtg

SEQ ID NO: 48164 - DNA, 60 bp, Artificial
  Synthetic oligonucleotide
cgacaaagcacccaaggagggctcgattgctattgttggtaccattgacggcgtacctgg

SEQ ID NO: 48165 - DNA, 60 bp, Artificial
  Synthetic oligonucleotide
cgtgtcagtcatgtgtcgctggagcgttcgccttagtgtcccgtcccttgagacacctga

SEQ ID NO: 48166 - DNA, 60 bp, Artificial
  Synthetic oligonucleotide
ctatcacgggatttggacgtgcgaccaatgatgtccatatctcgggaatgtcacggatcg

SEQ ID NO: 48167 - DNA, 60 bp, Artificial
  Synthetic oligonucleotide
ccgaccacaaaggccgccaattctcaaccacgtcgacgtgcaacacagcgccgtcgcagt

SEQ ID NO: 48168 - DNA, 60 bp, Artificial
  Synthetic oligonucleotide
aagcaactcgtggtgcagtcgtcgccaaatggtgggaaagtcgaacagtccggccccagt

SEQ ID NO: 48169 - DNA, 60 bp, Artificial
  Synthetic oligonucleotide
gtctagcgtgcttgatacggtgccagcttcaccagtcttgtccaacgccgaggatttccc

SEQ ID NO: 48170 - DNA, 60 bp, Artificial
  Synthetic oligonucleotide
tactccgaccagcaaccacggcaaatcttgctgccggctggcacgctcttcacccgtgtt

SEQ ID NO: 48171 - DNA, 61 bp, Artificial
  Synthetic oligonucleotide
tctaacaccgctttgcaagtcaaaatggtacgcaaaggtgataagaaattggcaaaacccc

SEQ ID NO: 48172 - DNA, 60 bp, Artificial
  Synthetic oligonucleotide
gcgccgtcgcagtggtagggctgatgcacccttagctaaggcatcgactatcacgggatt

SEQ ID NO: 48173 - DNA, 60 bp, Artificial
  Synthetic oligonucleotide
tgattacaatcttggagtgggcgacgtcgaccgggccgtgtactggcacctgcggaagaa

SEQ ID NO: 48174 - DNA, 61 bp, Artificial
  Synthetic oligonucleotide
cctgccacggcttggacacgctgctcgaatcttccagcgatacgctgttgaaacactggag

SEQ ID NO: 48175 - DNA, 60 bp, Artificial
  Synthetic oligonucleotide
aacaccgaccccggtaagggaatacctgatagatttgaaggcaaagtggtcagccgaaag

SEQ ID NO: 48176 - DNA, 59 bp, Artificial
  Synthetic oligonucleotide
gtctcggcccctgagggcgcagttaactctgccatactcaaggcatggtcctgcattga

SEQ ID NO: 48177 - DNA, 60 bp, Artificial
  Synthetic oligonucleotide
caacgcgttgtcgtcacaacaacccaaacagcgcctgttccacagcaaaacgtgccacgt

SEQ ID NO: 48178 - DNA, 60 bp, Artificial
  Synthetic oligonucleotide
acgccatgttataccaattcggccatgattcgcctcctctcgatgaggtcgcgcttcagg

SEQ ID NO: 48179 - DNA, 60 bp, Artificial
  Synthetic oligonucleotide
acctggtttggcgtttctcaaatgtgcatttgcaccacctgacttcaacaccgaccccgg

SEQ ID NO: 48180 - DNA, 60 bp, Artificial
  Synthetic oligonucleotide
accaattcggccatgattcgcctcctctcgatgaggtcgcgcttcaggaataccgtacgg

SEQ ID NO: 48181 - DNA, 60 bp, Artificial
  Synthetic oligonucleotide
ggcgtttctcaaatgtgcatttgcaccacctgacttcaacaccgaccccggtaagggaat

SEQ ID NO: 48182 - DNA, 60 bp, Artificial
  Synthetic oligonucleotide
ccctgtaaagctgagtactgtgcaattcccggttgcaacagatccagccaccagttcgct

SEQ ID NO: 48183 - DNA, 60 bp, Artificial
  Synthetic oligonucleotide
gatgcagtttgccggaagcataactgtttggaaatgccctgtaaagctgagtactgtgca

SEQ ID NO: 48184 - DNA, 60 bp, Artificial
  Synthetic oligonucleotide
gctgagtactgtgcaattcccggttgcaacagatccagccaccagttcgctagttcatac

SEQ ID NO: 48185 - DNA, 60 bp, Artificial
  Synthetic oligonucleotide
gtaaacaattccaagttccaaaatggttaataacaacagaccaagacgtcaacgagctca

SEQ ID NO: 48186 - DNA, 60 bp, Artificial
  Synthetic oligonucleotide
catattggagggtatccagacattgccacctgctaatgtgtcccttggttctacgggtca

SEQ ID NO: 48187 - DNA, 60 bp, Artificial
  Synthetic oligonucleotide
tccctggctgctgcaagcaacattcccggcccgatcggtgtcgccgcaagtggtattagt

SEQ ID NO: 48188 - DNA, 60 bp, Artificial
  Synthetic oligonucleotide
gtcaacctggtttggcgtttctcaaatgtgcatttgcaccacctgacttcaacaccgacc

SEQ ID NO: 48189 - DNA, 60 bp, Artificial
  Synthetic oligonucleotide
ccgtacggttgccagatctttgccggttgcagtgatagcggcccaaaatgcatcaatgtg

SEQ ID NO: 48190 - DNA, 60 bp, Artificial
  Synthetic oligonucleotide
tcattaaatcctccctggctgctgcaagcaacattcccggcccgatcggtgtcgccgcaa

SEQ ID NO: 48191 - DNA, 60 bp, Artificial
  Synthetic oligonucleotide
attaaatcctccctggctgctgcaagcaacattcccggcccgatcggtgtcgccgcaagt

SEQ ID NO: 48192 - DNA, 60 bp, Artificial
  Synthetic oligonucleotide
aattcggccatgattcgcctcctctcgatgaggtcgcgcttcaggaataccgtacggttg

SEQ ID NO: 48193 - DNA, 61 bp, Artificial
  Synthetic oligonucleotide
gcgcttcaggaataccgtacggttgccagatctttgccggttgcagtgatagcggcccaaa

SEQ ID NO: 48194 - DNA, 60 bp, Artificial
  Synthetic oligonucleotide
acacttttatactcatcgcacctacccccggagtcgcctactggagtgctagcgttcctg

SEQ ID NO: 48195 - DNA, 60 bp, Artificial
  Synthetic oligonucleotide
cccggtaagggaatacctgatagatttgaaggcaaagtggtcagccgaaaggatgtcctc

SEQ ID NO: 48196 - DNA, 60 bp, Artificial
  Synthetic oligonucleotide
cagccgaaaggatgtcctcaatcaatctatcagctttactgccggacaggacacttttat

SEQ ID NO: 48197 - DNA, 60 bp, Artificial
  Synthetic oligonucleotide
ccgaccccggtaagggaatacctgatagatttgaaggcaaagtggtcagccgaaaggatg

SEQ ID NO: 48198 - DNA, 60 bp, Artificial
  Synthetic oligonucleotide
gtcctcaatcaatctatcagctttactgccggacaggacacttttatactcatcgcacct

SEQ ID NO: 48199 - DNA, 60 bp, Artificial
  Synthetic oligonucleotide
ggatgtcctcaatcaatctatcagctttactgccggacaggacacttttatactcatcgc

SEQ ID NO: 48200 - DNA, 60 bp, Artificial
  Synthetic oligonucleotide
acgtcgaacttgatgcagtttgccggaagcataactgtttggaaatgccctgtaaagctg

SEQ ID NO: 48201 - DNA, 60 bp, Artificial
  Synthetic oligonucleotide
cgtaatggtagacgccgacgtaatcgcacgaggcgtaatcgccgacgtgtgcgcggaatg

SEQ ID NO: 48202 - DNA, 61 bp, Artificial
  Synthetic oligonucleotide
taatcgccgacgtgtgcgcggaatgaacatggcggcgctaaccagattaagtcaacctggt

SEQ ID NO: 48203 - DNA, 60 bp, Artificial
  Synthetic oligonucleotide
cagcaaaacgtgccacgtaatggtagacgccgacgtaatcgcacgaggcgtaatcgccga

SEQ ID NO: 48204 - DNA, 60 bp, Artificial
  Synthetic oligonucleotide
tggagtagtcggatggggcaatatggacacgattgtcatccgtgtctcggcccctgaggg

SEQ ID NO: 48205 - DNA, 60 bp, Artificial
  Synthetic oligonucleotide
tcggatggggcaatatggacacgattgtcatccgtgtctcggcccctgagggcgcagtta

SEQ ID NO: 48206 - DNA, 60 bp, Artificial
  Synthetic oligonucleotide
ccgggttttacatcgatgttcggaacaacttcaacatctaggtccgatcaggtgtcctca

SEQ ID NO: 48207 - DNA, 60 bp, Artificial
  Synthetic oligonucleotide
ccaccagtggagtagtcggatggggcaatatggacacgattgtcatccgtgtctcggccc

SEQ ID NO: 48208 - DNA, 60 bp, Artificial
  Synthetic oligonucleotide
ccgatcaggtgtcctcattcaggtacgcttccatgaacgtgggtatttacccaacgtcga

SEQ ID NO: 48209 - DNA, 60 bp, Artificial
  Synthetic oligonucleotide
ggtatccagacattgccacctgctaatgtgtcccttggttctacgggtcaaccttttacc

SEQ ID NO: 48210 - DNA, 60 bp, Artificial
  Synthetic oligonucleotide
caggtgtcctcattcaggtacgcttccatgaacgtgggtatttacccaacgtcgaacttg

SEQ ID NO: 48211 - DNA, 60 bp, Artificial
  Synthetic oligonucleotide
tggagggtatccagacattgccacctgctaatgtgtcccttggttctacgggtcaacctt

SEQ ID NO: 48212 - DNA, 61 bp, Artificial
  Synthetic oligonucleotide
ccaagttccaaaatggttaataacaacagaccaagacgtcaacgagctcaacgcgttgtcg

SEQ ID NO: 48213 - DNA, 60 bp, Artificial
  Synthetic oligonucleotide
cggacatttggccacaataagcccaatttggttgaagattaaagtagtgagcccccttag

SEQ ID NO: 48214 - DNA, 60 bp, Artificial
  Synthetic oligonucleotide
aacgagctcaacgcgttgtcgtcacaacaacccaaacagcgcctgttccacagcaaaacg

SEQ ID NO: 48215 - DNA, 60 bp, Artificial
  Synthetic oligonucleotide
agctcaacgcgttgtcgtcacaacaacccaaacagcgcctgttccacagcaaaacgtgcc

SEQ ID NO: 48216 - DNA, 61 bp, Artificial
  Synthetic oligonucleotide
ccggacgccaacctaaccgggcaagtatccgaacaatcggacatttggccacaataagccc

SEQ ID NO: 48217 - DNA, 60 bp, Artificial
  Synthetic oligonucleotide
gaagcatccggacgccaacctaaccgggcaagtatccgaacaatcggacatttggccaca

SEQ ID NO: 48218 - DNA, 60 bp, Artificial
  Synthetic oligonucleotide
aacgtgccacgtaatggtagacgccgacgtaatcgcacgaggcgtaatcgccgacgtgtg

SEQ ID NO: 48219 - DNA, 60 bp, Artificial
  Synthetic oligonucleotide
cttttagaagcatccggacgccaacctaaccgggcaagtatccgaacaatcggacatttg

SEQ ID NO: 48220 - DNA, 60 bp, Artificial
  Synthetic oligonucleotide
gtcgccgcaagtggtattagtggactgtcagccctttttgaaggatttggcttttagaag

SEQ ID NO: 48221 - DNA, 60 bp, Artificial
  Synthetic oligonucleotide
tggctgctgcaagcaacattcccggcccgatcggtgtcgccgcaagtggtattagtggac

SEQ ID NO: 48222 - DNA, 60 bp, Artificial
  Synthetic oligonucleotide
taattatccgggttttacatcgatgttcggaacaacttcaacatctaggtccgatcaggt

SEQ ID NO: 48223 - DNA, 50 bp, Artificial
  Synthetic oligonucleotide
ccccggagtcgcctactggagtgctagcgttcctgctggtacttttccta

SEQ ID NO: 48224 - DNA, 60 bp, Artificial
  Synthetic oligonucleotide
gcgttcctgctggtacttttcctactagtgcgactacgtttaaccccgttaattatccgg

SEQ ID NO: 48225 - DNA, 61 bp, Artificial
  Synthetic oligonucleotide
ccgctagactatcaggaaccatcaccttataaagacacactagacatagatggccagccgg

SEQ ID NO: 48226 - DNA, 61 bp, Artificial
  Synthetic oligonucleotide
gcggacctaagcgacctcataacgtggtaagcaatgcctgggaaactctgaatgacaaccg

SEQ ID NO: 48227 - DNA, 60 bp, Artificial
  Synthetic oligonucleotide
ccaacacgcacgtccctgggtggattgtccgaaccgggccttagtttggggattacctca

SEQ ID NO: 48228 - DNA, 60 bp, Artificial
  Synthetic oligonucleotide
ggagatgtgaggttcactattagtgacaaccaagtggactatagggtagatggtggtggt

SEQ ID NO: 48229 - DNA, 60 bp, Artificial
  Synthetic oligonucleotide
ctcatttacacatggaccacgactcagccgcagattagcttcctatgtggtaatcggacc

SEQ ID NO: 48230 - DNA, 60 bp, Artificial
  Synthetic oligonucleotide
cctcatttactcatttacacatggaccacgactcagccgcagattagcttcctatgtggt

SEQ ID NO: 48231 - DNA, 60 bp, Artificial
  Synthetic oligonucleotide
acaagcaaccacaaactttggctacggtttgtcagttctacaacagtgccgcttatgata

SEQ ID NO: 48232 - DNA, 60 bp, Artificial
  Synthetic oligonucleotide
agccagttccaatcagttcatgatccttgggacatcaaaccgctagactatcaggaacca

SEQ ID NO: 48233 - DNA, 60 bp, Artificial
  Synthetic oligonucleotide
aggcttaagtaccatgcagtcagttacttcaagacttttacaaatgggttacaagcaacc

SEQ ID NO: 48234 - DNA, 60 bp, Artificial
  Synthetic oligonucleotide
tcggaccttatgaagctattgctaaaagccgacccgcgatggccctacaaagggccatgg

SEQ ID NO: 48235 - DNA, 60 bp, Artificial
  Synthetic oligonucleotide
aacatgacttcacgcacgtgtgtacctgtcgagtcagcagctcttgatcgtgtcagtgga

SEQ ID NO: 48236 - DNA, 61 bp, Artificial
  Synthetic oligonucleotide
cacctgtgaccttaattcagttctaaataacttcactcaatacgcagcagttaggctgact

SEQ ID NO: 48237 - DNA, 60 bp, Artificial
  Synthetic oligonucleotide
tcttgttgaaattttccacatatacgcttgcctttcgagatgaagtattacatgctgaac

SEQ ID NO: 48238 - DNA, 60 bp, Artificial
  Synthetic oligonucleotide
gccaggcggtgaagactgcaatcgacagtctgccgacatgccaggacccaaaagtagcga

SEQ ID NO: 48239 - DNA, 60 bp, Artificial
  Synthetic oligonucleotide
tcaactcagatggaattacgtcgtcgaacaacttggtatggaactcaaggttgaaccctt

SEQ ID NO: 48240 - DNA, 60 bp, Artificial
  Synthetic oligonucleotide
acatgctgaacataatcgacattggttttgtcctggattgacacctaatgagatagcaga

SEQ ID NO: 48241 - DNA, 60 bp, Artificial
  Synthetic oligonucleotide
tgaacaaactggcttaagtttcggcgacgattcactatttgacaagcaatatcaactcag

SEQ ID NO: 48242 - DNA, 61 bp, Artificial
  Synthetic oligonucleotide
gctcttgatcgtgtcagtggatatttagtaactgacaagtactctccagtaacaagtgagt

SEQ ID NO: 48243 - DNA, 60 bp, Artificial
  Synthetic oligonucleotide
ggttccaacacctcgcatagccaggtttgctgaagaatacgtccgcctggtagttcccga

SEQ ID NO: 48244 - DNA, 60 bp, Artificial
  Synthetic oligonucleotide
tcaccaggtggccacactgtcgacgagcaattggcatctcatcgacattatgctgttaat

SEQ ID NO: 48245 - DNA, 60 bp, Artificial
  Synthetic oligonucleotide
ctgaaaatggacacaaaacttctggagcggttcgagatgcagctagaaatttaattacta

SEQ ID NO: 48246 - DNA, 60 bp, Artificial
  Synthetic oligonucleotide
ggtacccattgaataatttgttgatgaacaaacctcaccgcttatctgaaaatggacaca

SEQ ID NO: 48247 - DNA, 60 bp, Artificial
  Synthetic oligonucleotide
gatggaagcaaccgccttcaatgccaccgacaacctactttcaaagccaagggtggtagc

SEQ ID NO: 48248 - DNA, 60 bp, Artificial
  Synthetic oligonucleotide
aaggagacaacgcaaggattgtgaccgtgagaaaccatactggttagtgagtggtggcgc

SEQ ID NO: 48249 - DNA, 60 bp, Artificial
  Synthetic oligonucleotide
gctagcagacctggctggaattgtttagttgaccacactagcaccaaacttgtagccagc

SEQ ID NO: 48250 - DNA, 61 bp, Artificial
  Synthetic oligonucleotide
tcaatgttggttagttgcccagctcgagctaagcgttttggtttccaatatgaaccgggag

SEQ ID NO: 48251 - DNA, 60 bp, Artificial
  Synthetic oligonucleotide
tccactggccattggcgtctgaaattgatcagcctacaacttcttttcgtaattactcca

SEQ ID NO: 48252 - DNA, 60 bp, Artificial
  Synthetic oligonucleotide
cccaagtgtgccaggcggtgaagactgcaatcgacagtctgccgacatgccaggacccaa

SEQ ID NO: 48253 - DNA, 60 bp, Artificial
  Synthetic oligonucleotide
tgacttacatcgagcatcagcagatgacgcagttaaagaaaacgctgtcattgtggctat

SEQ ID NO: 48254 - DNA, 60 bp, Artificial
  Synthetic oligonucleotide
tacacatggaccacgactcagccgcagattagcttcctatgtggtaatcggaccttatga

SEQ ID NO: 48255 - DNA, 60 bp, Artificial
  Synthetic oligonucleotide
ttacgagctggtgcagcaatttcccagatgcctgtcccaagtgtgccaggcggtgaagac

SEQ ID NO: 48256 - DNA, 60 bp, Artificial
  Synthetic oligonucleotide
tcaggaaccatcaccttataaagacacactagacatagatggccagccggtagatgcagt

SEQ ID NO: 48257 - DNA, 61 bp, Artificial
  Synthetic oligonucleotide
ctaagctgtagcatagttgctagaccttcacaaccacctgtccactggccattggcgtctg

SEQ ID NO: 48258 - DNA, 60 bp, Artificial
  Synthetic oligonucleotide
tcaacttacgagctggtgcagcaatttcccagatgcctgtcccaagtgtgccaggcggtg

SEQ ID NO: 48259 - DNA, 60 bp, Artificial
  Synthetic oligonucleotide
acgctgtcattgtggctattgatacggactactatctacgtgatccatcaatctactttt

SEQ ID NO: 48260 - DNA, 61 bp, Artificial
  Synthetic oligonucleotide
acgtccgcctggtagttcccgaagcgaatgtaggtgtaccttatagtttggaagatgcgcg

SEQ ID NO: 48261 - DNA, 60 bp, Artificial
  Synthetic oligonucleotide
acctggctggaattgtttagttgaccacactagcaccaaacttgtagccagcataggtcg

SEQ ID NO: 48262 - DNA, 61 bp, Artificial
  Synthetic oligonucleotide
caagggtggtagcaacactaaagggagaagccgtaaatcccggaacggaggacgttctatc

SEQ ID NO: 48263 - DNA, 60 bp, Artificial
  Synthetic oligonucleotide
ccatagatggtttaaccgtaagttttccaaggaattgcagaagtatacatcaatgttggt

SEQ ID NO: 48264 - DNA, 60 bp, Artificial
  Synthetic oligonucleotide
gcaaccgccttcaatgccaccgacaacctactttcaaagccaagggtggtagcaacacta

SEQ ID NO: 48265 - DNA, 60 bp, Artificial
  Synthetic oligonucleotide
tcacatgattgagaggtgttatatgaacactgccgaaagtgtaactcgaaggagacaacg

SEQ ID NO: 48266 - DNA, 60 bp, Artificial
  Synthetic oligonucleotide
atgcggtaaaccaaatttgggaaacagtcgacatggaagtccgccgattaattgaagcat

SEQ ID NO: 48267 - DNA, 60 bp, Artificial
  Synthetic oligonucleotide
gcaactttgacggaagagtatctgcttggtgtcaagagaacgtgatgaatgcggtttacc

SEQ ID NO: 48268 - DNA, 60 bp, Artificial
  Synthetic oligonucleotide
cacgaggttggtggaggcaatggaaagaccagagttaccattgctaagcgaagcggacct

SEQ ID NO: 48269 - DNA, 60 bp, Artificial
  Synthetic oligonucleotide
gccctacaaagggccatggttgatttgacacgacgggacgtgcgtactgactggtaccca

SEQ ID NO: 48270 - DNA, 61 bp, Artificial
  Synthetic oligonucleotide
tgagatgaacgcacgtgaattgagtagagtcaactatcagtgtgctagcagacctggctgg

SEQ ID NO: 48271 - DNA, 60 bp, Artificial
  Synthetic oligonucleotide
tagcgaaggatctgagcagctacaaggcttgcctgagcaagatggaagcaaccgccttca

SEQ ID NO: 48272 - DNA, 61 bp, Artificial
  Synthetic oligonucleotide
gagggttaccgcagcccgtactggatttgaggagtcaaaacttattaatttgattagccag

SEQ ID NO: 48273 - DNA, 61 bp, Artificial
  Synthetic oligonucleotide
gggaggttttaagtaattctttagaacatcgtgttaccatggtggccaataataaggttcc

SEQ ID NO: 48274 - DNA, 61 bp, Artificial
  Synthetic oligonucleotide
tggaactcaaggttgaaccctttgaccccagtaatggtgtgacttttcttgctcgtgtttt

SEQ ID NO: 48275 - DNA, 60 bp, Artificial
  Synthetic oligonucleotide
gacaactaagaggcttacaatacttgggaaggacgcaggtgcaattacagaggacccaga

SEQ ID NO: 48276 - DNA, 60 bp, Artificial
  Synthetic oligonucleotide
ggaacctttggccctgttcatttccggaatcaagtcaaaatacgccgcagggttgacatg

SEQ ID NO: 48277 - DNA, 60 bp, Artificial
  Synthetic oligonucleotide
aagtacacatcaggaagacaggagaagaaccccgctcttagaatgaaatggatgatggcg

SEQ ID NO: 48278 - DNA, 60 bp, Artificial
  Synthetic oligonucleotide
attgctgctaggaacattgtcaggagagcaacagtatcagcagacccattggcttcactc

SEQ ID NO: 48279 - DNA, 60 bp, Artificial
  Synthetic oligonucleotide
gcaaatgacgctggatcagacagggtaatggtatcacctctggctgtaacgtggtggaac

SEQ ID NO: 48280 - DNA, 60 bp, Artificial
  Synthetic oligonucleotide
tcttaagggtccgagatcagcgaggaaatgtactcctatcccctgaagaagttagtgaga

SEQ ID NO: 48281 - DNA, 60 bp, Artificial
  Synthetic oligonucleotide
cagtccgaggtgatctgaatttcgtaaacagagcaaatcaacgactgaaccccatgcacc

SEQ ID NO: 48282 - DNA, 60 bp, Artificial
  Synthetic oligonucleotide
cgcaaacgatttgcagaccaagaactgggtgatgccccattccttgaccggcttcgccga

SEQ ID NO: 48283 - DNA, 60 bp, Artificial
  Synthetic oligonucleotide
gcaaacgatttgcagaccaagaactgggtgatgccccattccttgaccggcttcgccgag

SEQ ID NO: 48284 - DNA, 60 bp, Artificial
  Synthetic oligonucleotide
gtccgcaaacgatttgcagaccaagaactgggtgatgccccattccttgaccggcttcgc

SEQ ID NO: 48285 - DNA, 60 bp, Artificial
  Synthetic oligonucleotide
ccgcaaacgatttgcagaccaagaactgggtgatgccccattccttgaccggcttcgccg

SEQ ID NO: 48286 - DNA, 60 bp, Artificial
  Synthetic oligonucleotide
tgtccgcaaacgatttgcagaccaagaactgggtgatgccccattccttgaccggcttcg

SEQ ID NO: 48287 - DNA, 60 bp, Artificial
  Synthetic oligonucleotide
tgtccgcaaacgacttgcagaccaagaactgggtgatgccccattccttgaccggcttcg

SEQ ID NO: 48288 - DNA, 60 bp, Artificial
  Synthetic oligonucleotide
ggcatgtccgcaaacgatttgcagaccaagaactgggtgatgccccattccttgaccggc

SEQ ID NO: 48289 - DNA, 60 bp, Artificial
  Synthetic oligonucleotide
catgtccgcaaacgatttgcagaccaagaactgggtgatgccccattccttgaccggctt

SEQ ID NO: 48290 - DNA, 60 bp, Artificial
  Synthetic oligonucleotide
gcaagcgatttgcagaccaagaactgggtgatgccccattccttgaccggcttcgccgag

SEQ ID NO: 48291 - DNA, 60 bp, Artificial
  Synthetic oligonucleotide
caaacgatttgcagaccaagaactgggtgatgccccattccttgaccggcttcgccgaga

SEQ ID NO: 48292 - DNA, 60 bp, Artificial
  Synthetic oligonucleotide
ccgagaactgggtgatgccccattccttgaccggcttcgccgagatcagaagtccctaag

SEQ ID NO: 48293 - DNA, 60 bp, Artificial
  Synthetic oligonucleotide
caagaactgggtgatgccccattccttgaccggcttcgccgagatcagaagtccctaaga

SEQ ID NO: 48294 - DNA, 60 bp, Artificial
  Synthetic oligonucleotide
agaactgggtgatgccccattccttgaccggcttcgccgagatcaaaagtccctaagagg

SEQ ID NO: 48295 - DNA, 54 bp, Artificial
  Synthetic oligonucleotide
agaactgggtgatgccccattccttgaccggcttcgccgagatcagaagtccct

SEQ ID NO: 48296 - DNA, 60 bp, Artificial
  Synthetic oligonucleotide
ccaagaactgggtgatgccccattccttgaccggcttcgccgagatcagaagtccctgag

SEQ ID NO: 48297 - DNA, 60 bp, Artificial
  Synthetic oligonucleotide
ccaagaactgggtgatgccccattccttgaccggcttcgccgagaccagaagtccctaag

SEQ ID NO: 48298 - DNA, 60 bp, Artificial
  Synthetic oligonucleotide
aaacgatttgcagaccaagaactgggtgatgccccattccttgaccggcttcgccgagat

SEQ ID NO: 48299 - DNA, 60 bp, Artificial
  Synthetic oligonucleotide
aagcgatttgcagaccaagaactgggtgatgccccattccttgaccggcttcgccgagat

SEQ ID NO: 48300 - DNA, 60 bp, Artificial
  Synthetic oligonucleotide
aaacgatttgcagaccaagaactgggtgatgccccattccttgaccggcttcgccgagac

SEQ ID NO: 48301 - DNA, 60 bp, Artificial
  Synthetic oligonucleotide
aaaagatttgcagaccaagaactgggtgatgccccattccttgaccggcttcgccgagat

SEQ ID NO: 48302 - DNA, 60 bp, Artificial
  Synthetic oligonucleotide
cgacttgcagaccaagaactgggtgatgccccattccttgaccggcttcgccgagatcag

SEQ ID NO: 48303 - DNA, 60 bp, Artificial
  Synthetic oligonucleotide
acaatttgcagaccaagaactgggtgatgccccattccttgaccggcttcgccgagatca

SEQ ID NO: 48304 - DNA, 60 bp, Artificial
  Synthetic oligonucleotide
cagaccaagaactgggtgatgccccattccttgaccggcttcgccgagatcagaagtccc

SEQ ID NO: 48305 - DNA, 60 bp, Artificial
  Synthetic oligonucleotide
gcagaccaagaactgggtgatgccccattccttgaccggcttcgccgagatcagaagtcc

SEQ ID NO: 48306 - DNA, 60 bp, Artificial
  Synthetic oligonucleotide
tttggcatgtccgcaaacgatttgcagaccaagaactgggtgatgccccattccttgacc

SEQ ID NO: 48307 - DNA, 60 bp, Artificial
  Synthetic oligonucleotide
ctttggcatgtccgcaaacgatttgcagaccaagaactgggtgatgccccattccttgac

SEQ ID NO: 48308 - DNA, 60 bp, Artificial
  Synthetic oligonucleotide
gctttctttggcatgtccgcaaacgatttgcagaccaagaactgggtgatgccccattcc

SEQ ID NO: 48309 - DNA, 60 bp, Artificial
  Synthetic oligonucleotide
tgctttctttggcatgtccgcaaacgatttgcagaccaagaactgggtgatgccccattc

SEQ ID NO: 48310 - DNA, 60 bp, Artificial
  Synthetic oligonucleotide
ttggcatgtccgcaagcgatttgcagaccaagaactgggtgatgccccattccttgaccg

SEQ ID NO: 48311 - DNA, 60 bp, Artificial
  Synthetic oligonucleotide
ttggcatgtccgcaaacgatttgcagaccaagaactgggtgatgccccattccttgaccg

SEQ ID NO: 48312 - DNA, 60 bp, Artificial
  Synthetic oligonucleotide
ccgaacggctgcattgagggcaagctttctcaaatgtcaaaagaagtgaatgctagaatt

SEQ ID NO: 48313 - DNA, 60 bp, Artificial
  Synthetic oligonucleotide
accgaacggctgcattgagggcaagctttctcaaatgtcaaaagaagtgaatgctagaat

SEQ ID NO: 48314 - DNA, 60 bp, Artificial
  Synthetic oligonucleotide
cggctgcattgagggcaagctttctcaaatgtcaaaagaggtgaacgccagaattgagcc

SEQ ID NO: 48315 - DNA, 60 bp, Artificial
  Synthetic oligonucleotide
aacggctgcattgagggcaagctttctcaaatgtcaaaagaagtgaatgctagaattgag

SEQ ID NO: 48316 - DNA, 60 bp, Artificial
  Synthetic oligonucleotide
gaacggctgcattgagggcaagctttctcaaatgtcaaaagaagtgaatgctagaattga

SEQ ID NO: 48317 - DNA, 60 bp, Artificial
  Synthetic oligonucleotide
gaacggctgcattgagggcaagctttctcaaatgtcaaaagaggtgaacgccagaattga

SEQ ID NO: 48318 - DNA, 60 bp, Artificial
  Synthetic oligonucleotide
cggctgcattgagggcaagctttctcaaatgtcaaaagaagtgaatgctagaattgagcc

SEQ ID NO: 48319 - DNA, 60 bp, Artificial
  Synthetic oligonucleotide
ggggggatacacaaatcccaacgaggagatcattcgagctgaagaagctgtgggagcaga

SEQ ID NO: 48320 - DNA, 60 bp, Artificial
  Synthetic oligonucleotide
ggggggatacacaaatccaaacgaggagatcattcgagctgaagaagctgtgggagcaga

SEQ ID NO: 48321 - DNA, 59 bp, Artificial
  Synthetic oligonucleotide
ggggatacacaaatccaaacgaggagatcattcgagctgaagaagctgtgggagcagac

SEQ ID NO: 48322 - DNA, 60 bp, Artificial
  Synthetic oligonucleotide
gaggggatacgcaaatccaaacgaggagatcattcgagctgaagaagctgtgggagcaga

SEQ ID NO: 48323 - DNA, 59 bp, Artificial
  Synthetic oligonucleotide
ctacctaataagagcactgacactgaacacaatgacagaagacgcagaaagaggcgaat

SEQ ID NO: 48324 - DNA, 60 bp, Artificial
  Synthetic oligonucleotide
ggagctacctaataagagcactgacactgaacacaatgacaaaagacgcagaaaggggca

SEQ ID NO: 48325 - DNA, 60 bp, Artificial
  Synthetic oligonucleotide
gaatatgcatacaaaattgtcaagaaaggggactcatcaattatgaaaagtgaattggaa

SEQ ID NO: 48326 - DNA, 60 bp, Artificial
  Synthetic oligonucleotide
gaatatgcatacaaaattgtcaagaaaggggactcaacaattatgaaaagtgaattggaa

SEQ ID NO: 48327 - DNA, 60 bp, Artificial
  Synthetic oligonucleotide
gagtaatggaaatttcattgccccagaatatgcatacaaaattgtcaagaaaggggactc

SEQ ID NO: 48328 - DNA, 60 bp, Artificial
  Synthetic oligonucleotide
ggaaatttcattgctccggaatatgcatacaaaattgtcaagaaaggggactcagcaatt

SEQ ID NO: 48329 - DNA, 60 bp, Artificial
  Synthetic oligonucleotide
gcgaaatcacatgtgtgtgcagggataattggcatggctcaaatcggccatgggtatctt

SEQ ID NO: 48330 - DNA, 57 bp, Artificial
  Synthetic oligonucleotide
atgagtcttctaaccgaggtcgaaacgtacgtactctctatcatcccgtcaggcccc

SEQ ID NO: 48331 - DNA, 60 bp, Artificial
  Synthetic oligonucleotide
aaggatcaactctcccgaggagatctggagctgctggtgcggcagtaaagggagtcggaa

SEQ ID NO: 48332 - DNA, 60 bp, Artificial
  Synthetic oligonucleotide
gtcaattgatatggatggcatgccattctgcagcatttgaggacctgagagtctcaagtt

SEQ ID NO: 48333 - DNA, 59 bp, Artificial
  Synthetic oligonucleotide
caattggtatggatggcatgccattctgcagcatttgaggacctgagagtctcaagttt

SEQ ID NO: 48334 - DNA, 60 bp, Artificial
  Synthetic oligonucleotide
actctacagagattcgcttggagaagcagtaatgagggtgggagaccttcactccctcca

SEQ ID NO: 48335 - DNA, 60 bp, Artificial
  Synthetic oligonucleotide
tgccccattccttgaccggcttcgccgagatcagaagtccctaagaggaagaggcagcac

SEQ ID NO: 48336 - DNA, 60 bp, Artificial
  Synthetic oligonucleotide
tccttgaccggcttcgccgagatcagaagtccctaagaggaagaggcagcactcttggtc

SEQ ID NO: 48337 - DNA, 60 bp, Artificial
  Synthetic oligonucleotide
gctcctattatcctgatgctggcgaaatcacatgtgtgtgcagggataattggcatggct

SEQ ID NO: 48338 - DNA, 60 bp, Artificial
  Synthetic oligonucleotide
cacgcccaagatatacttgaaaggacacacaacgggaagctctgcagtctaaatggggtg

SEQ ID NO: 48339 - DNA, 60 bp, Artificial
  Synthetic oligonucleotide
aaccaagaggatcttctaatactgtgggggatccatcatcctaatgacgcagcggaacaa

SEQ ID NO: 48340 - DNA, 60 bp, Artificial
  Synthetic oligonucleotide
tctatttggggctatagcgggctttattgaagggggatggcagggaatggtagacggttg

SEQ ID NO: 48341 - DNA, 60 bp, Artificial
  Synthetic oligonucleotide
tcgtcaagaagggggactcggcaatcatgaaaagcggcttggcatatggtaactgtgata

SEQ ID NO: 48342 - DNA, 60 bp, Artificial
  Synthetic oligonucleotide
aggagggtagagaatttgaacaagaaaatggaagacgggtttctagatgtttggacttac

SEQ ID NO: 48343 - DNA, 60 bp, Artificial
  Synthetic oligonucleotide
caaacgtcaacaacctttatgataaagtccgactacagcttaaggacaacgcgagggaac

SEQ ID NO: 48344 - DNA, 60 bp, Artificial
  Synthetic oligonucleotide
tcagaagaagcaagactaaacagggaggaaataagtggagttaaattggaatcaatgggg

SEQ ID NO: 48345 - DNA, 60 bp, Artificial
  Synthetic oligonucleotide
gttcgagtctctgaaactctacagagattcgcttggagaagcagtaatgaggatgggaga

SEQ ID NO: 48346 - DNA, 60 bp, Artificial
  Synthetic oligonucleotide
ctgaaactctacagagattcgcttggagaagcagtaatgagaatgggagacctccactca

SEQ ID NO: 48347 - DNA, 60 bp, Artificial
  Synthetic oligonucleotide
gttcgagtctctgaaactctacagagattcgcttggagaagcagtaatgagggtgggaga

SEQ ID NO: 48348 - DNA, 60 bp, Artificial
  Synthetic oligonucleotide
atggcgtctcaaggcaccaaacgatcttatgaacagatggaaactggtggagaacgtcag

SEQ ID NO: 48349 - DNA, 60 bp, Artificial
  Synthetic oligonucleotide
gttctctctgcatttgatgaaaggaggaacaggtacctagaggaacatcccagtgcgggg

SEQ ID NO: 48350 - DNA, 60 bp, Artificial
  Synthetic oligonucleotide
acagtagagagaatggttctctctgcatttgatgaaaggaggaacaggtacctagaggaa

SEQ ID NO: 48351 - DNA, 60 bp, Artificial
  Synthetic oligonucleotide
gcgtaccgggatggaccccagaatgtgctctctgatgcaaggatcaactctcccgaggag

SEQ ID NO: 48352 - DNA, 60 bp, Artificial
  Synthetic oligonucleotide
ccccattccttgaccggcttcgccgagatcagaagtccctaagaggaagaggcaacactc

SEQ ID NO: 48353 - DNA, 60 bp, Artificial
  Synthetic oligonucleotide
tgatgccccattccttgaccggcttcgccgagatcagaagtccctaagaggaagaggcaa

SEQ ID NO: 48354 - DNA, 60 bp, Artificial
  Synthetic oligonucleotide
gtgatgccccattccttgaccggcttcgccgagatcagaagtccctaagaggaagaggca

SEQ ID NO: 48355 - DNA, 60 bp, Artificial
  Synthetic oligonucleotide
ggtgatgccccattccttgaccggcttcgccgagatcagaagtccctaagaggaagaggc

SEQ ID NO: 48356 - DNA, 60 bp, Artificial
  Synthetic oligonucleotide
ttttagggtttgtgttcacgctcaccgtgcccagtgagcgaggactgcagcgtagacgat

SEQ ID NO: 48357 - DNA, 60 bp, Artificial
  Synthetic oligonucleotide
attttagggtttgtgttcacgctcaccgtgcccagtgagcgaggactgcagcgtagacga

SEQ ID NO: 48358 - DNA, 60 bp, Artificial
  Synthetic oligonucleotide
ttttagggtttgtgttcacgctcaccgtgcccagtgagcgaggactgcagcgtatacgat

SEQ ID NO: 48359 - DNA, 60 bp, Artificial
  Synthetic oligonucleotide
ggattttagggtttgtgttcacgctcaccgtgcccagtgagcgaggactgcagcgtagac

SEQ ID NO: 48360 - DNA, 60 bp, Artificial
  Synthetic oligonucleotide
agtgacactgtgagttggtcttggccagacggtgctgagttgccattcaccattgacaag

SEQ ID NO: 48361 - DNA, 60 bp, Artificial
  Synthetic oligonucleotide
agtaacactgtgagttggtcttggccagacggtgctgagttgccattcaccattgacaag

SEQ ID NO: 48362 - DNA, 60 bp, Artificial
  Synthetic oligonucleotide
tgactacccgcagtattcagaagaagcaagactaaacagagaggaaataagtggagtaaa

SEQ ID NO: 48363 - DNA, 60 bp, Artificial
  Synthetic oligonucleotide
ctcctgttatcctgatgctggcgaaatcacatgtgtgtgcagggataattggcatggctc

SEQ ID NO: 48364 - DNA, 60 bp, Artificial
  Synthetic oligonucleotide
tcctgttatcctgatgctggcgaaatcacatgtgtgtgcagggataattggcatggctcg

SEQ ID NO: 48365 - DNA, 60 bp, Artificial
  Synthetic oligonucleotide
gctcctgttatcctgatgctggcgaaatcacatgtgtgtgcagggataattggcatggct

SEQ ID NO: 48366 - DNA, 60 bp, Artificial
  Synthetic oligonucleotide
caaatggcaactatcaccaacccactaatcaggcatgagaacagaatggtgctggccagc

SEQ ID NO: 48367 - DNA, 60 bp, Artificial
  Synthetic oligonucleotide
gacaaatggcaactatcaccaacccactaatcaggcatgagaacagaatggtgctggcca

SEQ ID NO: 48368 - DNA, 60 bp, Artificial
  Synthetic oligonucleotide
tgttcacgctcaccgtgcccagtgaacgaggactgcagcgtagacgctttgtccagaatg

SEQ ID NO: 48369 - DNA, 60 bp, Artificial
  Synthetic oligonucleotide
ttgtgttcacgctcaccgtgcccagtgaacgaggactgcagcgtagacgctttgtccaga

SEQ ID NO: 48370 - DNA, 60 bp, Artificial
  Synthetic oligonucleotide
gctccaattgagcacattgcaagtatgagaaggaactatttcacagcggaagtatcccat

SEQ ID NO: 48371 - DNA, 60 bp, Artificial
  Synthetic oligonucleotide
tgggtccctctgctgtagacatagggaatggatgcttcgaaaccaaacacaagtgcaacc

SEQ ID NO: 48372 - DNA, 60 bp, Artificial
  Synthetic oligonucleotide
gggagaattttctcttcccacttttgattcactgaatattactgctgcatctttaaatga

SEQ ID NO: 48373 - DNA, 60 bp, Artificial
  Synthetic oligonucleotide
acggagggctaccacaaagcggcagaattgttgttgattacatggtgcaaaaacctggga

SEQ ID NO: 48374 - DNA, 60 bp, Artificial
  Synthetic oligonucleotide
agcggcagaattgttgttgattacatggtgcaaaaacctgggaaaacaggaacaattgtc

SEQ ID NO: 48375 - DNA, 60 bp, Artificial
  Synthetic oligonucleotide
agcggcagaattgttgttgattacatggtgcaaaaacctgggaagacaggaacaattgtc

SEQ ID NO: 48376 - DNA, 60 bp, Artificial
  Synthetic oligonucleotide
ggaacaattgtctatcaaagaggtgttttgttgcctcaaaaggtgtggtgcgcaagtggc

SEQ ID NO: 48377 - DNA, 60 bp, Artificial
  Synthetic oligonucleotide
ggtgtggtgcgcaagtggcaggagcaaggtaataaaagggtccttgcctttaattggtga

SEQ ID NO: 48378 - DNA, 60 bp, Artificial
  Synthetic oligonucleotide
ccttactacacaggagaacatgcaaaagccataggaaattgcccaatatgggtgaaaaca

SEQ ID NO: 48379 - DNA, 60 bp, Artificial
  Synthetic oligonucleotide
gaacatgcaaaagccataggaaattgcccaatatgggtgaaaacacctttgaagcttgcc

SEQ ID NO: 48380 - DNA, 60 bp, Artificial
  Synthetic oligonucleotide
ggtgaaaacacctttgaagcttgccaatggaaccagatatagacctcctgcaaaactatt

SEQ ID NO: 48381 - DNA, 60 bp, Artificial
  Synthetic oligonucleotide
ggtgaaaacacctttgaagcttgccaatggaaccaaatatagacctcctgcaaaactatt

SEQ ID NO: 48382 - DNA, 60 bp, Artificial
  Synthetic oligonucleotide
gacctgcttagacaggatagctgctggcacctttaatgcgggagaattttctcttcccac

SEQ ID NO: 48383 - DNA, 60 bp, Artificial
  Synthetic oligonucleotide
aagtgcaaccagacctgcttagacaggatagctgctggcacctttaatgcaggagaattt

SEQ ID NO: 48384 - DNA, 60 bp, Artificial
  Synthetic oligonucleotide
aagtgcaaccagacctgcttagacaggatagctgctggcacctttaatgcgggagaattt

SEQ ID NO: 48385 - DNA, 60 bp, Artificial
  Synthetic oligonucleotide
ccctctgctgtagacatagggaatggatgcttcgaaaccaaacacaagtgcaaccagacc

SEQ ID NO: 48386 - DNA, 60 bp, Artificial
  Synthetic oligonucleotide
aatctcattttgcaaatctcaaaggaacaaagaccagagggaaactatgcccaaactgtc

SEQ ID NO: 48387 - DNA, 60 bp, Artificial
  Synthetic oligonucleotide
cctcatctgctaatggagtaaccacacattatgtttctcagattggcggcttcccagatc

SEQ ID NO: 48388 - DNA, 60 bp, Artificial
  Synthetic oligonucleotide
tcctcaaaagttcacctcatctgctaatggagtaaccacacattatgtttctcagattgg

SEQ ID NO: 48389 - DNA, 60 bp, Artificial
  Synthetic oligonucleotide
ctcagattggcggcttcccagatcaaacagaagacggagggctaccacaaagcggcagaa

SEQ ID NO: 48390 - DNA, 60 bp, Artificial
  Synthetic oligonucleotide
taaccacacattatgtttctcagattggtggcttcccagatcaaacagaagacggaggac

SEQ ID NO: 48391 - DNA, 60 bp, Artificial
  Synthetic oligonucleotide
ggaggaccctacagacttggaacctcaggatcttgccctaacgttaccagtagagacgga

SEQ ID NO: 48392 - DNA, 60 bp, Artificial
  Synthetic oligonucleotide
ggcaccaggaggaccctacagacttggaacctcaggatcttgccctaacgttaccagtag

SEQ ID NO: 48393 - DNA, 60 bp, Artificial
  Synthetic oligonucleotide
ctctatggagactcaaatcctcaaaagttcacctcatctgccaatggagtaaccacacat

SEQ ID NO: 48394 - DNA, 60 bp, Artificial
  Synthetic oligonucleotide
cctctatggagactcaaatcctcaaaagttcacctcatctgccaatggagtaaccacaca

SEQ ID NO: 48395 - DNA, 60 bp, Artificial
  Synthetic oligonucleotide
aggagaattttctctccccacttttgattcactgaatattactgctgcatctttaaatga

SEQ ID NO: 48396 - DNA, 60 bp, Artificial
  Synthetic oligonucleotide
cattttgcaaatctaaaaggaacaaagaccagagggaaactatgcccaaactgtctcaac

SEQ ID NO: 48397 - DNA, 60 bp, Artificial
  Synthetic oligonucleotide
ctctccccacttttgattcactgaatattactgctgcatctttaaatgatgatggattgg

SEQ ID NO: 48398 - DNA, 60 bp, Artificial
  Synthetic oligonucleotide
ctttaaatgatgatggattggataaccatactatactgctctactactcaactgctgctt

SEQ ID NO: 48399 - DNA, 60 bp, Artificial
  Synthetic oligonucleotide
ggattggataaccatactatactgctctactactcaactgctgcttctagtttggcggta

SEQ ID NO: 48400 - DNA, 60 bp, Artificial
  Synthetic oligonucleotide
actgctgcttctagtttggcggtaacattgatgatagctatttttattgtttatatggtc

SEQ ID NO: 48401 - DNA, 60 bp, Artificial
  Synthetic oligonucleotide
cgcaaatagagcttgcagtcttgctttccaacgaaggaataataaacagtgaagatgagc

SEQ ID NO: 48402 - DNA, 60 bp, Artificial
  Synthetic oligonucleotide
cgcaaatagaacttgcagtcttgctttccaacgaaggaataataaacagtgaagatgagc

SEQ ID NO: 48403 - DNA, 60 bp, Artificial
  Synthetic oligonucleotide
acaataagctcgcaaatagagcttgcagtcttgctttccaacgaaggaataataaacagt

SEQ ID NO: 48404 - DNA, 52 bp, Artificial
  Synthetic oligonucleotide
tggcagtggcagcagaccttaagagtacgcaagaagccataaacaagataac

SEQ ID NO: 48405 - DNA, 60 bp, Artificial
  Synthetic oligonucleotide
ggaaaggggtttcttcggagctattgctggtttcttagaaggaggatgggaaggaatgat

SEQ ID NO: 48406 - DNA, 60 bp, Artificial
  Synthetic oligonucleotide
caaaactattaaaggaaaggggtttcttcggagctattgctggtttcttagaaggaggat

SEQ ID NO: 48407 - DNA, 60 bp, Artificial
  Synthetic oligonucleotide
gaagcttgccaatggaaccagatatagacctcctgcaaaactattaaaggaaaggggttt

SEQ ID NO: 48408 - DNA, 60 bp, Artificial
  Synthetic oligonucleotide
gaagcttgccaatggaaccaaatatagacctcctgcaaaactattaaaggaaaggggttt

SEQ ID NO: 48409 - DNA, 60 bp, Artificial
  Synthetic oligonucleotide
aatctcattttgcaaatctaaaaggaacaaagaccagagggaaactatgcccaaactgtc

SEQ ID NO: 48410 - DNA, 60 bp, Artificial
  Synthetic oligonucleotide
gacggaggactaccacaaagcggcagaattgttgttgattacatggtgcaaaaacctggg

SEQ ID NO: 48411 - DNA, 60 bp, Artificial
  Synthetic oligonucleotide
agagcaccaggaggaccctacagacttggaacctcaggatcttgccctaacgttaccagt

SEQ ID NO: 48412 - DNA, 60 bp, Artificial
  Synthetic oligonucleotide
ggcaccaggaggaccctacagacttggaacctcaggatcttgccctaacgctaccagtag

SEQ ID NO: 48413 - DNA, 60 bp, Artificial
  Synthetic oligonucleotide
aaggcaccaggaggaccctacagacttggaacctcaggatcttgccctaacgctaccagt

SEQ ID NO: 48414 - DNA, 60 bp, Artificial
  Synthetic oligonucleotide
aaggcaccaggaggaccctacagacttggaacctcaggatcttgccctaacgttaccagt

SEQ ID NO: 48415 - DNA, 60 bp, Artificial
  Synthetic oligonucleotide
ctccacgaagtcagacctgttacatccgggtgctttcctataatgcacgacagaacaaaa

SEQ ID NO: 48416 - DNA, 60 bp, Artificial
  Synthetic oligonucleotide
ccgggtgctttcctataatgcatgacagaacaaaaatcagacagctacccaatcttctca

SEQ ID NO: 48417 - DNA, 60 bp, Artificial
  Synthetic oligonucleotide
ccttcggcaaaagcttcaatactccacgaagtcagacctgttacatccgggtgctttcct

SEQ ID NO: 48418 - DNA, 60 bp, Artificial
  Synthetic oligonucleotide
atactccacgaagtcagacctgttacatccgggtgctttcctataatgcacgacagaaca

SEQ ID NO: 48419 - DNA, 60 bp, Artificial
  Synthetic oligonucleotide
cattttgcaaatctcaaaggaacaaagaccagagggaaactatgcccaaactgtctcaac

SEQ ID NO: 48420 - DNA, 60 bp, Artificial
  Synthetic oligonucleotide
cacaccttcggcaaaagcttcaatactccacgaagtcagacctgttacatccgggtgctt

SEQ ID NO: 48421 - DNA, 60 bp, Artificial
  Synthetic oligonucleotide
cgggactctagcatacttactgacagccagacagcgaccaaaagaattcggatggccgtc

SEQ ID NO: 48422 - DNA, 60 bp, Artificial
  Synthetic oligonucleotide
cgggactctagcatacttactgacagccagacagcgaccaaaagaattcggatggccatc

SEQ ID NO: 48423 - DNA, 60 bp, Artificial
  Synthetic oligonucleotide
cgggactttagcatacttactgacagccagacagcgaccaaaagaattcggatggccatc

SEQ ID NO: 48424 - DNA, 60 bp, Artificial
  Synthetic oligonucleotide
cgggactctagcatacttactgacagccagacagcgaccaaaaggattcggatggccatc

SEQ ID NO: 48425 - DNA, 60 bp, Artificial
  Synthetic oligonucleotide
cgagactctagcatacttactgacagccagacagcgaccaaaagaattcggatggccatc

SEQ ID NO: 48426 - DNA, 60 bp, Artificial
  Synthetic oligonucleotide
gggactctagcatacttactgacagccagacagcgaccaaaagaattcggatggccatca

SEQ ID NO: 48427 - DNA, 60 bp, Artificial
  Synthetic oligonucleotide
ccggacactagcatacttactgacagccagacagcgaccaaaagaattcggatggccatc

SEQ ID NO: 48428 - DNA, 60 bp, Artificial
  Synthetic oligonucleotide
gactctagcatacttactgacagccagacagcgaccaaaagaattcggatggccatcaat

SEQ ID NO: 48429 - DNA, 60 bp, Artificial
  Synthetic oligonucleotide
tctagcatacttactgacagccagacagcgaccaaaagaattcggatggccatcaattag

SEQ ID NO: 48430 - DNA, 60 bp, Artificial
  Synthetic oligonucleotide
ctagcatacttactgacagccagacagcgaccaaaagaattcggatggccatcaattagt

SEQ ID NO: 48431 - DNA, 60 bp, Artificial
  Synthetic oligonucleotide
tgaaattgaagatctcatctttctggcacggtctgcactcatcctgagaggatccgtagc

SEQ ID NO: 48432 - DNA, 60 bp, Artificial
  Synthetic oligonucleotide
tggggggctatatgaagcaattgaggagtgcctgattaatgatccctgggttttgcttaa

SEQ ID NO: 48433 - DNA, 60 bp, Artificial
  Synthetic oligonucleotide
gcaagccttacaactattgcttgaagtggagcaagagataagaactttctcgtttcagct

SEQ ID NO: 48434 - DNA, 60 bp, Artificial
  Synthetic oligonucleotide
tatgcaagccttacaactattgcttgaagtggagcaagagataagaactttctcgtttca

SEQ ID NO: 48435 - DNA, 60 bp, Artificial
  Synthetic oligonucleotide
cctttatgcaagccttacaactattgcttgaagtggagcaagagataagaactttctcgt

SEQ ID NO: 48436 - DNA, 60 bp, Artificial
  Synthetic oligonucleotide
aataacgtttatgcaagccttacaactattgcttgaagtggagcaagagataagaacttt

SEQ ID NO: 48437 - DNA, 56 bp, Artificial
  Synthetic oligonucleotide
aactattgcttgaagtggagcaagagataagaactttctcgtttcagcttatttga

SEQ ID NO: 48438 - DNA, 60 bp, Artificial
  Synthetic oligonucleotide
aactattgcttgaagtggagcaagagataagaactttctcgtttcagcttatttgatgat

SEQ ID NO: 48439 - DNA, 60 bp, Artificial
  Synthetic oligonucleotide
ggaggccggttggaatttccagtatggtggaggccatggtgtctagggcccgaattgatg

SEQ ID NO: 48440 - DNA, 60 bp, Artificial
  Synthetic oligonucleotide
tatggatggcatgccattctgcagcatttgaagatctgagggtctcaagcttcatcagag

SEQ ID NO: 48441 - DNA, 60 bp, Artificial
  Synthetic oligonucleotide
tcaactggtatggatggcatgccattctgcagcatttgaagatctgagggtctcaagttt

SEQ ID NO: 48442 - DNA, 60 bp, Artificial
  Synthetic oligonucleotide
ggtatggatggcatgccattctgcagcatttgaagatctgagggtctcaagtttcatcag

SEQ ID NO: 48443 - DNA, 60 bp, Artificial
  Synthetic oligonucleotide
aggtcaactggtatggatggcatgccattctgcagcatttgaagatctgagggtctcaag

SEQ ID NO: 48444 - DNA, 60 bp, Artificial
  Synthetic oligonucleotide
aagtcaactggtatggatggcatgccattctgcagcatttgaagatctgagggtctcaag

SEQ ID NO: 48445 - DNA, 60 bp, Artificial
  Synthetic oligonucleotide
attgagagggtttctaattctcggcaaagaagacaaaagatatggaccagcattgagcat

SEQ ID NO: 48446 - DNA, 60 bp, Artificial
  Synthetic oligonucleotide
cccattccttgaccggcttcgccgagatcagaagtccctaagaggaagaggcagcaccct

SEQ ID NO: 48447 - DNA, 60 bp, Artificial
  Synthetic oligonucleotide
acctagctgaaatgactcttgaggaaatgtcaagggactggttaatgctcattcccaagc

SEQ ID NO: 48448 - DNA, 60 bp, Artificial
  Synthetic oligonucleotide
acctaactgaaatgactcttgaggaaatgtcaagggactggttaatgctcattcccaagc

SEQ ID NO: 48449 - DNA, 60 bp, Artificial
  Synthetic oligonucleotide
atgtcgcagtcccgcactcgcgagatactaacaaagaccactgtggaccacatagctata

SEQ ID NO: 48450 - DNA, 60 bp, Artificial
  Synthetic oligonucleotide
atgtcgcagtcccgcactcgcgagatactaacaaagaccactgtggaccacatggctata

SEQ ID NO: 48451 - DNA, 60 bp, Artificial
  Synthetic oligonucleotide
gaacggctgcattgagggcaagctttctcaaatgtcgaaagaagtgaatgctagaattga

SEQ ID NO: 48452 - DNA, 60 bp, Artificial
  Synthetic oligonucleotide
gaacggctgcattgagggcaagctttctcaaatgtcgaaagaagtaaacgccagaattga

SEQ ID NO: 48453 - DNA, 60 bp, Artificial
  Synthetic oligonucleotide
cggctgcattgagggcaagctttctcaaatgtcgaaagaagtgaatgctagaattgagcc

SEQ ID NO: 48454 - DNA, 60 bp, Artificial
  Synthetic oligonucleotide
cggctgcattgagggcaagctttctcaaatgtcgaaagaagtaaacgccagaattgagcc

SEQ ID NO: 48455 - DNA, 60 bp, Artificial
  Synthetic oligonucleotide
gactttcatgactcaaatgtcaagaacctttacgacaaggtccgactacagcttagggat

SEQ ID NO: 48456 - DNA, 60 bp, Artificial
  Synthetic oligonucleotide
agaagatggaagacggattcctagatgtctggacttataatgctgaacttctggttctca

SEQ ID NO: 48457 - DNA, 60 bp, Artificial
  Synthetic oligonucleotide
gaagatggaagacggattcctagatgtctggacttataatgctgaacttctggttctcat

SEQ ID NO: 48458 - DNA, 60 bp, Artificial
  Synthetic oligonucleotide
gagctacctaataagagcactgacactgaacacaatgacaaaagatgctgaaaggggaaa

SEQ ID NO: 48459 - DNA, 60 bp, Artificial
  Synthetic oligonucleotide
ggaaggaaggttgatccagaacagtataacaatagagagaatggttctctctgcatttga

SEQ ID NO: 48460 - DNA, 60 bp, Artificial
  Synthetic oligonucleotide
agttttcggagacaatccacgccccaatgatgggacaggcagttgtggtccgatgtcccc

SEQ ID NO: 48461 - DNA, 60 bp, Artificial
  Synthetic oligonucleotide
aagggttttcatttaaatacggcaatggtgtttggatcgggagaaccaaaagccttaatt

SEQ ID NO: 48462 - DNA, 60 bp, Artificial
  Synthetic oligonucleotide
tgtaaaaaacggaacgtatgactacccgcagtattcagaagaagcaagactaaacagaga

SEQ ID NO: 48463 - DNA, 60 bp, Artificial
  Synthetic oligonucleotide
tgtgaaaaacggaacgtatgactacccgcagtattcagaagaagcaagactaaacagaga

SEQ ID NO: 48464 - DNA, 60 bp, Artificial
  Synthetic oligonucleotide
ccaaaccagcctatatgttcgagcatcagggagagtcacagtctctaccaaaagaagcca

SEQ ID NO: 48465 - DNA, 60 bp, Artificial
  Synthetic oligonucleotide
agatgctctattgggagaccctcattgtgatggcttccaaaataaggaatgggacctttt

SEQ ID NO: 48466 - DNA, 60 bp, Artificial
  Synthetic oligonucleotide
atggcaaatttgacaaattgtacatttgggggattcaccacccgagcacggacaaagaac

SEQ ID NO: 48467 - DNA, 60 bp, Artificial
  Synthetic oligonucleotide
caaatatccagcgctgaacgtgactatgccaaacaatggcaaatttgacaaattgtacat

SEQ ID NO: 48468 - DNA, 60 bp, Artificial
  Synthetic oligonucleotide
gttgcctcatcaggcaccctggagtttatcaacgaaaacttcaattggactggagtcgct

SEQ ID NO: 48469 - DNA, 60 bp, Artificial
  Synthetic oligonucleotide
gctctggagaaccaacatacaattgatctaactgactcagaaatgaacaaactgtttgaa

SEQ ID NO: 48470 - DNA, 60 bp, Artificial
  Synthetic oligonucleotide
gacaaagaacaaaccaacctatatattcgagcatcagggagagtcacagtctctaccaag

SEQ ID NO: 48471 - DNA, 54 bp, Artificial
  Synthetic oligonucleotide
agtcttctaaccgaggtcgaaacgtacgttctctctatcatcccatcaggcccc

SEQ ID NO: 48472 - DNA, 60 bp, Artificial
  Synthetic oligonucleotide
tcatcctgagaggatcagtggcccacaagtcctgcttgcctgcttgtgtgtacgggcttg

SEQ ID NO: 48473 - DNA, 60 bp, Artificial
  Synthetic oligonucleotide
aacgagagaactctagactttcatgactcaaatgtcaagaacctttacgacaaggtccga

SEQ ID NO: 48474 - DNA, 60 bp, Artificial
  Synthetic oligonucleotide
aatgagagaactctagactttcatgactcaaatgtcaagaacctttacgacaaggtccga

SEQ ID NO: 48475 - DNA, 60 bp, Artificial
  Synthetic oligonucleotide
aaagatgagtcttctaaccgaggtcgaaacgtacgtactctctatcatcccgtcaggccc

SEQ ID NO: 48476 - DNA, 60 bp, Artificial
  Synthetic oligonucleotide
gaacggctgtattgagggcaagctttctcaaatgtcaaaagaagtgaacgccagaattga

SEQ ID NO: 48477 - DNA, 60 bp, Artificial
  Synthetic oligonucleotide
cggctgtattgagggcaagctttctcaaatgtcaaaagaagtgaacgccagaattgagcc

SEQ ID NO: 48478 - DNA, 60 bp, Artificial
  Synthetic oligonucleotide
tgggaatgctgagattgaagatctcatttttctggcacggtctgcactcatcctgagagg

SEQ ID NO: 48479 - DNA, 60 bp, Artificial
  Synthetic oligonucleotide
gagtatgcatacaaaattgtcaagaaaggggactcagcaattatgaaaagtgaattggaa

SEQ ID NO: 48480 - DNA, 60 bp, Artificial
  Synthetic oligonucleotide
gaatatgcatacaaaattgtcaagaaaggggactcagcaattatgaaaagtgaattggaa

SEQ ID NO: 48481 - DNA, 60 bp, Artificial
  Synthetic oligonucleotide
cggactccaatcctctgatgatttcgctctcatagtgaatgcaccgaatcatgagggaat

SEQ ID NO: 48482 - DNA, 60 bp, Artificial
  Synthetic oligonucleotide
ggacggactccaatcctctgatgatttcgctctcatagtgaatgcaccgaatcatgaggg

SEQ ID NO: 48483 - DNA, 60 bp, Artificial
  Synthetic oligonucleotide
cgatcttatgaacagatggaaactggtggagaacgccagaatgccactgagatcagggca

SEQ ID NO: 48484 - DNA, 60 bp, Artificial
  Synthetic oligonucleotide
agacaagaccaatcctgtcacctctgactaagggaattttagggtttgtgttcacgctca

SEQ ID NO: 48485 - DNA, 60 bp, Artificial
  Synthetic oligonucleotide
ggctaggcagatggtgcaggcaatgaggacaattgggactcatcctagctccagtgccgg

SEQ ID NO: 48486 - DNA, 60 bp, Artificial
  Synthetic oligonucleotide
tgaagaagctgtgggagcagacccgctcaaaggcaggactgttggtttcagatggagggc

SEQ ID NO: 48487 - DNA, 60 bp, Artificial
  Synthetic oligonucleotide
gcccagtgagcgaggactgcagcgtagacgctttgtccagaatgccctgaatggaaatgg

SEQ ID NO: 48488 - DNA, 60 bp, Artificial
  Synthetic oligonucleotide
ctccaacactgtgtcaagctttcaggtagattgctttctttggcatgtccgcaaacgatt

SEQ ID NO: 48489 - DNA, 60 bp, Artificial
  Synthetic oligonucleotide
ccaaccctgtgtcaagctttcaggtagattgctttctttggcatgtccgcaaacgatttg

SEQ ID NO: 48490 - DNA, 60 bp, Artificial
  Synthetic oligonucleotide
tgtctttgcaggaaagaacaccgatctcgaggctctcatggaatggctaaagacaagacc

SEQ ID NO: 48491 - DNA, 60 bp, Artificial
  Synthetic oligonucleotide
ggcgctccaaggcaccaaacgatcttatgagcagatggaaactggtggagaacgccagaa

SEQ ID NO: 48492 - DNA, 60 bp, Artificial
  Synthetic oligonucleotide
ggaccagcattgagcatcaatgaactgagcaatcttacgaaaggggagaaagctaatgta

SEQ ID NO: 48493 - DNA, 60 bp, Artificial
  Synthetic oligonucleotide
acattccgtccattcaatccagaggtctatttggagccattgccggttttattgaagggg

SEQ ID NO: 48494 - DNA, 60 bp, Artificial
  Synthetic oligonucleotide
ggggattcctaattctaggcagagaggacaaaagatatggaccagcattgagcatcaatg

SEQ ID NO: 48495 - DNA, 60 bp, Artificial
  Synthetic oligonucleotide
cagatggcaactaccaccaacccactaatcaggcatgagaacagaatggtgctggccagc

SEQ ID NO: 48496 - DNA, 60 bp, Artificial
  Synthetic oligonucleotide
cagctgcagatgcagacacaatatgtataggctaccatgcgaacaattcaaccgacactg

SEQ ID NO: 48497 - DNA, 60 bp, Artificial
  Synthetic oligonucleotide
catgagtaatgaaggatcttatttcttcggagacaatgcagaggagtatgacaattgagg

SEQ ID NO: 48498 - DNA, 60 bp, Artificial
  Synthetic oligonucleotide
gatttgtgttcacgctcaccgtgcccagtgagcgaggactgcagcgtagacgctttgtcc

SEQ ID NO: 48499 - DNA, 60 bp, Artificial
  Synthetic oligonucleotide
atggcgtctcaaggcaccaagcgatcttatgaacagatggaaactggtggagaacgccag

SEQ ID NO: 48500 - DNA, 60 bp, Artificial
  Synthetic oligonucleotide
atggcgtctcaaggcaccaaacgatcctatgaacagatggaaactggtggagaacgccag

SEQ ID NO: 48501 - DNA, 60 bp, Artificial
  Synthetic oligonucleotide
gggtcctcatcggaggacttgaatggaatgataacacagttcgagtctctgaaactctac

SEQ ID NO: 48502 - DNA, 60 bp, Artificial
  Synthetic oligonucleotide
cctcatcggaggacttgaatggaatgataacacagttcgagtctctgaaactctacagag

SEQ ID NO: 48503 - DNA, 60 bp, Artificial
  Synthetic oligonucleotide
tggagtcctcatcggaggacttgaatggaatgataacacagttcgagtctctgaaactct

SEQ ID NO: 48504 - DNA, 53 bp, Artificial
  Synthetic oligonucleotide
aaaatgagtcttctaaccgaggtcgaaacgtacgttctctctatcgtcccgtc

SEQ ID NO: 48505 - DNA, 60 bp, Artificial
  Synthetic oligonucleotide
gcaattggcgtcctcatcggaggacttgaatggaatgataacacagttcgagtctctgaa

SEQ ID NO: 48506 - DNA, 60 bp, Artificial
  Synthetic oligonucleotide
tacatacagatgtgcactgaactcaaactcagcgaccaggaaggaaggttgatccagaac

SEQ ID NO: 48507 - DNA, 60 bp, Artificial
  Synthetic oligonucleotide
aggtataaaccccaattacctcctggcttggaagcaagtgctggcagaactccaagatat

SEQ ID NO: 48508 - DNA, 60 bp, Artificial
  Synthetic oligonucleotide
cttcctttgacatgagtaatgaaggatcttatttcttcggagacaatgcagaggagtatg

SEQ ID NO: 48509 - DNA, 60 bp, Artificial
  Synthetic oligonucleotide
cttcctttgacatgagtaatgaaggatcttatttcttcggagacaatgcagaggagtacg

SEQ ID NO: 48510 - DNA, 59 bp, Artificial
  Synthetic oligonucleotide
cttcctttgacatgagtaatgaaggatcttatttcttcggagacaatgcagaggagtat

SEQ ID NO: 48511 - DNA, 60 bp, Artificial
  Synthetic oligonucleotide
cttcctttgacatgagtaatgaaggatcttatttcttcggagacaatgcagaggagtttg

SEQ ID NO: 48512 - DNA, 60 bp, Artificial
  Synthetic oligonucleotide
agccgaatgatgccatcaatttcgagagtaatggaaatttcattgctccagaatatgcat

SEQ ID NO: 48513 - DNA, 60 bp, Artificial
  Synthetic oligonucleotide
agccaaatgatgccatcaatttcgagagtaatggaaatttcattgctccagaatatgcat

SEQ ID NO: 48514 - DNA, 60 bp, Artificial
  Synthetic oligonucleotide
atggaaagtgtaaaaaacggaacgtatgactacccacagtattcagaagaagcaagacta

SEQ ID NO: 48515 - DNA, 60 bp, Artificial
  Synthetic oligonucleotide
tggagtatcaaataggatatatatgcagtggagttttcggagacaatccacgccccaatg

SEQ ID NO: 48516 - DNA, 60 bp, Artificial
  Synthetic oligonucleotide
tttggagtatcaaataggatatatatgcagtggagttttcggagacaatccacgccccaa

SEQ ID NO: 48517 - DNA, 60 bp, Artificial
  Synthetic oligonucleotide
ttggagtatcaaataggatatatatgcagtggagttttcggagacaatccacgccccaat

SEQ ID NO: 48518 - DNA, 60 bp, Artificial
  Synthetic oligonucleotide
aaatttggagtatcaaataggatatatatgcagtggagttttcggagacaatccacgccc

SEQ ID NO: 48519 - DNA, 60 bp, Artificial
  Synthetic oligonucleotide
aatttggagtatcaaataggatatatatgcagtggagttttcggagacaatccacgcccc

SEQ ID NO: 48520 - DNA, 60 bp, Artificial
  Synthetic oligonucleotide
caccgatctcgaggctctcatggagtggctaaagacaagaccaatcctgtcacctctgac

SEQ ID NO: 48521 - DNA, 60 bp, Artificial
  Synthetic oligonucleotide
ccgatctcgaggctctcatggagtggctaaagacaagaccaatcctgtcacctctgacca

SEQ ID NO: 48522 - DNA, 60 bp, Artificial
  Synthetic oligonucleotide
acaccgatctcgaggctctcatggagtggctaaagacaagaccaatcctgtcacctctga

SEQ ID NO: 48523 - DNA, 60 bp, Artificial
  Synthetic oligonucleotide
ggccataatcaagaaatacacatcaggaagacaagagaagaaccctgctctcagaatgaa

SEQ ID NO: 48524 - DNA, 60 bp, Artificial
  Synthetic oligonucleotide
ccataatcaagaaatacacatcaggaagacaagagaagaaccctgctctcagaatgaaat

SEQ ID NO: 48525 - DNA, 60 bp, Artificial
  Synthetic oligonucleotide
atggccataatcaagaaatacacatcaggaagacaagagaagaaccctgctctcagaatg

SEQ ID NO: 48526 - DNA, 60 bp, Artificial
  Synthetic oligonucleotide
ctgaggggattcttaattctaggcaaggaggacaaaagatatggaccagcattgagcatc

SEQ ID NO: 48527 - DNA, 60 bp, Artificial
  Synthetic oligonucleotide
gagcccagtgggtatgcacaaacagattgtgtattggaagcaatggctttccttgaagaa

SEQ ID NO: 48528 - DNA, 60 bp, Artificial
  Synthetic oligonucleotide
caccgatatgagcatagaggagatgagccgggaatggtacatgctgatgcctaggcagaa

SEQ ID NO: 48529 - DNA, 60 bp, Artificial
  Synthetic oligonucleotide
tgagcatagaggagatgagccgagaatggtacatgctgatgcctaggcagaaaataactg

SEQ ID NO: 48530 - DNA, 60 bp, Artificial
  Synthetic oligonucleotide
tatcaccgatatgagcatagaggagatgagccgagaatggtacatgctgatgcctaggca

SEQ ID NO: 48531 - DNA, 60 bp, Artificial
  Synthetic oligonucleotide
tagattgttatctatggcacataagaaagctactcagtatgagagacatgtgtgatgctc

SEQ ID NO: 48532 - DNA, 60 bp, Artificial
  Synthetic oligonucleotide
tgcttccagtcctgctcctcggtatgtcaccgatatgagcatagaggagatgagccgaga

SEQ ID NO: 48533 - DNA, 60 bp, Artificial
  Synthetic oligonucleotide
tgttatctatggcacataagaaagctactcagtatgagagacatgtgtgatgcccccttt

SEQ ID NO: 48534 - DNA, 60 bp, Artificial
  Synthetic oligonucleotide
cattgcttccagacctgctcctcggtatatcaccgatatgagcatagaggagatgagccg

SEQ ID NO: 48535 - DNA, 60 bp, Artificial
  Synthetic oligonucleotide
ccgaagagaccaaaaggcattaaagggaagaggcagcacacttggactcgatttaagagt

SEQ ID NO: 48536 - DNA, 60 bp, Artificial
  Synthetic oligonucleotide
ccaaaaggcattaaagggaagaggcagcacacttggactcgatttaagagtggctacaat

SEQ ID NO: 48537 - DNA, 60 bp, Artificial
  Synthetic oligonucleotide
ggcattaaagggaagaggcagcacacttggactcgatttaagagtggctacaatggaggg

SEQ ID NO: 48538 - DNA, 60 bp, Artificial
  Synthetic oligonucleotide
gaggagatgagccgagaatggtacatgctgatgcctaggcagaaaataactggaggcctt

SEQ ID NO: 48539 - DNA, 60 bp, Artificial
  Synthetic oligonucleotide
gaatggtacatgctgatgcctaggcagaaaataactggaggccttatggtgaaaatggac

SEQ ID NO: 48540 - DNA, 60 bp, Artificial
  Synthetic oligonucleotide
caccgatatgagcatagaggagatgagccgagaatggtacatgctgatgcctaggcagaa

SEQ ID NO: 48541 - DNA, 60 bp, Artificial
  Synthetic oligonucleotide
tatcaccgatatgagcatagaggagatgagccgggaatggtacatgctgatgcctaggca

SEQ ID NO: 48542 - DNA, 60 bp, Artificial
  Synthetic oligonucleotide
gcattgcaactcttacttgaagttgagagtgagataaggaccttctcttttcagcttatt

SEQ ID NO: 48543 - DNA, 60 bp, Artificial
  Synthetic oligonucleotide
tgttatctatggcacataagaaagctactcagtatgagagacatgtgtgatgctcccttt

SEQ ID NO: 48544 - DNA, 60 bp, Artificial
  Synthetic oligonucleotide
gcattgcaactcttacttgaagttgagagtgagataaggacattctcgtttcagcttatt

SEQ ID NO: 48545 - DNA, 60 bp, Artificial
  Synthetic oligonucleotide
cattgcttccagtcctgctcctcggtatatcaccgatatgagcatagaggagatgagccg

SEQ ID NO: 48546 - DNA, 60 bp, Artificial
  Synthetic oligonucleotide
aaaatagccattgcttccagtcctgctcctcggtatatcaccgatatgagcatagaggag

SEQ ID NO: 48547 - DNA, 60 bp, Artificial
  Synthetic oligonucleotide
cctcaaaatagccattgcttccagtcctgctcctcggtatatcaccgatatgagcataga

SEQ ID NO: 48548 - DNA, 60 bp, Artificial
  Synthetic oligonucleotide
agcattgcaactcttacttgaagttgagagtgagataaggaccttctcttttcagcttat

SEQ ID NO: 48549 - DNA, 60 bp, Artificial
  Synthetic oligonucleotide
ctctccctccaaaacagaaacgctacatggcgagacgagttgagtcagaagtttgaagag

SEQ ID NO: 48550 - DNA, 60 bp, Artificial
  Synthetic oligonucleotide
agcattgcaactcttacttgaagttgagagtgagataaggacattctcgtttcagcttat

SEQ ID NO: 48551 - DNA, 60 bp, Artificial
  Synthetic oligonucleotide
aactagagacattagtctctctgagggcattcacagaaagtggtgctattgtggctgaaa

SEQ ID NO: 48552 - DNA, 56 bp, Artificial
  Synthetic oligonucleotide
gggaagaggcagcacacttggactcgatttaagagtggctacaatggaggggaaaa

SEQ ID NO: 48553 - DNA, 60 bp, Artificial
  Synthetic oligonucleotide
gcattaaagggaagaggcagcacacttggactcgatttaagagtggctacaatggagggg

SEQ ID NO: 48554 - DNA, 60 bp, Artificial
  Synthetic oligonucleotide
taactggaggccttatggtgaaaatggaccaagccataatggataaaagaattatcctta

SEQ ID NO: 48555 - DNA, 60 bp, Artificial
  Synthetic oligonucleotide
aaaacaactggaggccttatggtgaaaatggaccaagccataatggataaaagaattatc

SEQ ID NO: 48556 - DNA, 60 bp, Artificial
  Synthetic oligonucleotide
ggactcgatttaagagtggctacaatggaggggaaaaagatcgttgaggacatcctgaag

SEQ ID NO: 48557 - DNA, 60 bp, Artificial
  Synthetic oligonucleotide
gaggcagcacacttggactcgatttaagagtggctacaatggaggggaaaaagatcgttg

SEQ ID NO: 48558 - DNA, 53 bp, Artificial
  Synthetic oligonucleotide
atttaagagtggctacaatggaggggaaaaagatcgttgaggacatcctgaag

SEQ ID NO: 48559 - DNA, 60 bp, Artificial
  Synthetic oligonucleotide
ggactcgatttaagagtggctacaatggaggggaaaaagatcgtcgaggacatcctgaag

SEQ ID NO: 48560 - DNA, 60 bp, Artificial
  Synthetic oligonucleotide
cactccctccaaaacagaaacgctacatggcgaaacgagttgagtcagaagtttgaagag

SEQ ID NO: 48561 - DNA, 60 bp, Artificial
  Synthetic oligonucleotide
gtctctctgagggcattcacagaaagtggtgctatagtggctgaaatatctcccattccc

SEQ ID NO: 48562 - DNA, 60 bp, Artificial
  Synthetic oligonucleotide
cactccctccaaaacagaaacgctacatggcgagacgagttgagtcagaagtttgaagag

SEQ ID NO: 48563 - DNA, 60 bp, Artificial
  Synthetic oligonucleotide
caactggaggccttatggtgaaaatggaccaagccataatggataaaagaattatcctta

SEQ ID NO: 48564 - DNA, 51 bp, Artificial
  Synthetic oligonucleotide
gaggcagcacacttggactcgatttaagagtggctacaatggaggggaaaa

SEQ ID NO: 48565 - DNA, 60 bp, Artificial
  Synthetic oligonucleotide
gggaagaggcagcacacttggactcgatttaagagtggctacaatggaggggaaaaagat

SEQ ID NO: 48566 - DNA, 60 bp, Artificial
  Synthetic oligonucleotide
gcaagcattgcaactcttacttgaagttgagagtgagataaggaccttctcttttcagct

SEQ ID NO: 48567 - DNA, 60 bp, Artificial
  Synthetic oligonucleotide
gcctaggcagaaaataactggaggccttatggtgaaaatggaccaagccataatggataa

SEQ ID NO: 48568 - DNA, 60 bp, Artificial
  Synthetic oligonucleotide
cactccctccaaaacagaaacgctacatggcgaggcgagttgagtcagaagtttgaagag

SEQ ID NO: 48569 - DNA, 60 bp, Artificial
  Synthetic oligonucleotide
tgcctaggcagaaaataactggaggccttatggtgaaaatggaccaagccataatggata

SEQ ID NO: 48570 - DNA, 60 bp, Artificial
  Synthetic oligonucleotide
cggtggacttgaatggaatgataactcaattcgagcgtatgaaaatatacagagattcgc

SEQ ID NO: 48571 - DNA, 60 bp, Artificial
  Synthetic oligonucleotide
cttgaatggaatgataactcaattcgagcgtctgaaaatatacagagattcgcttgggga

SEQ ID NO: 48572 - DNA, 60 bp, Artificial
  Synthetic oligonucleotide
aaatatacagagattcgcttggggaatccgtgatgagaatgggggaccttcactccctcc

SEQ ID NO: 48573 - DNA, 60 bp, Artificial
  Synthetic oligonucleotide
catgctgatgcctaggcagaaaataactggaggccttatggtgaaaatggaccaagccat

SEQ ID NO: 48574 - DNA, 60 bp, Artificial
  Synthetic oligonucleotide
gtctctctgagggcattcacagaaagtggtgctattgtggctgaaatatttcccattccc

SEQ ID NO: 48575 - DNA, 60 bp, Artificial
  Synthetic oligonucleotide
gtctctctgagggcattcacagaaagtggtgctattgtggctgaaatatctcccattccc

SEQ ID NO: 48576 - DNA, 60 bp, Artificial
  Synthetic oligonucleotide
atcctcatcggtggacttgaatggaatgataactcaattcgagcgtctgaaaatatacag

SEQ ID NO: 48577 - DNA, 60 bp, Artificial
  Synthetic oligonucleotide
cggtggacttgaatggaatgataactcaattcgagcgtctgaaaatatacagagattcgc

SEQ ID NO: 48578 - DNA, 60 bp, Artificial
  Synthetic oligonucleotide
cgtcctcatcggaggacttgaatggaatgataacacagttcgagtcactgaaactataca

SEQ ID NO: 48579 - DNA, 60 bp, Artificial
  Synthetic oligonucleotide
ggggggatacgcaaatccaaacgaggagatcattcgagctgaagaagctgtgggagcaaa

SEQ ID NO: 48580 - DNA, 53 bp, Artificial
  Synthetic oligonucleotide
ggggcaatcagcttctggatgtgttctaatgggtcattgcaatgcagaatatg

SEQ ID NO: 48581 - DNA, 60 bp, Artificial
  Synthetic oligonucleotide
cctttgacatgagtaatgaaggatcttatttcttcggagacaatgcagaggagtacgaca

SEQ ID NO: 48582 - DNA, 60 bp, Artificial
  Synthetic oligonucleotide
cctttgacatgagtaatgaaggatcttatttcttcggagacaatgcagaggagtatgaca

SEQ ID NO: 48583 - DNA, 60 bp, Artificial
  Synthetic oligonucleotide
ctttctttgacatgagtaatgaaggatcttatttcttcggagacaatgcagaggagtatg

SEQ ID NO: 48584 - DNA, 60 bp, Artificial
  Synthetic oligonucleotide
atgcacaaacagattgtgtattggaagcaatggctttccttgaagaatcccacccaggga

SEQ ID NO: 48585 - DNA, 60 bp, Artificial
  Synthetic oligonucleotide
gggtatgcacaaacagattgtgtattggaagcaatggctttccttgaagaatcccaccca

SEQ ID NO: 48586 - DNA, 60 bp, Artificial
  Synthetic oligonucleotide
gtatgcacaaacagattgtgtattggaagcaatggctttccttgaagaatcccacccagg

SEQ ID NO: 48587 - DNA, 60 bp, Artificial
  Synthetic oligonucleotide
ggtatgcacaaacagattgtgtattggaagcaatggctttccttgaagaatcccacccag

SEQ ID NO: 48588 - DNA, 60 bp, Artificial
  Synthetic oligonucleotide
aaggatcaactctcccgaggagatctggagctgctggtgcagcagtaaagggagtcggaa

SEQ ID NO: 48589 - DNA, 60 bp, Artificial
  Synthetic oligonucleotide
aaggatcaactctcccgaggagatctggagctgctggtgcagcagtaaagggagtcggga

SEQ ID NO: 48590 - DNA, 60 bp, Artificial
  Synthetic oligonucleotide
gggatcaactctcccgaggagatctggagctgctggtgcagcagtaaagggagttgggac

SEQ ID NO: 48591 - DNA, 60 bp, Artificial
  Synthetic oligonucleotide
ctgagaggattcctaattctaggcaaggaggacaaaagatatggaccagcattgagcatc

SEQ ID NO: 48592 - DNA, 60 bp, Artificial
  Synthetic oligonucleotide
ctgaggggattcctaattctaggcaaggaggacaaaagatatggaccagcattgagcatc

SEQ ID NO: 48593 - DNA, 60 bp, Artificial
  Synthetic oligonucleotide
gaggggattcctaattctaggcaaggaggacaaaagatatggaccagcattgagcatcaa

SEQ ID NO: 48594 - DNA, 60 bp, Artificial
  Synthetic oligonucleotide
ggggattcctaattctaggcaaggaggacaaaagatatggaccagcattgagcatcaatg

SEQ ID NO: 48595 - DNA, 60 bp, Artificial
  Synthetic oligonucleotide
ataaaccccaattacctcctggcttggaagcaagtgctggcagaaatccaagatattgaa

SEQ ID NO: 48596 - DNA, 60 bp, Artificial
  Synthetic oligonucleotide
ggcagagaggacaaaagatatggaccagcattgagcatcaatgaactgagcaatcttgca

SEQ ID NO: 48597 - DNA, 60 bp, Artificial
  Synthetic oligonucleotide
ggcaaggaggacaaaagatatggaccagcattgagcatcaatgaactgagcaatcttgca

SEQ ID NO: 48598 - DNA, 60 bp, Artificial
  Synthetic oligonucleotide
ggcaaggaggacaaaagatatggaccagcattgagcatcaatgaactgagcaatcttgcg

SEQ ID NO: 48599 - DNA, 60 bp, Artificial
  Synthetic oligonucleotide
ggcaacgaggacaaaagatatggaccagcattgagcatcaatgaactgagcaatcttgca

SEQ ID NO: 48600 - DNA, 60 bp, Artificial
  Synthetic oligonucleotide
taggcaaagaagacaaaagatatggaccagcattaagcatcaatgaactgagcaatcttg

SEQ ID NO: 48601 - DNA, 60 bp, Artificial
  Synthetic oligonucleotide
attgagagggtttctaattctcggcaaagaagacaaaagatatggaccagcattaagcat

SEQ ID NO: 48602 - DNA, 60 bp, Artificial
  Synthetic oligonucleotide
aacatattcatcatcaatgatgtgggaaatcaacggtcctgagtcagtgcttgttaacac

SEQ ID NO: 48603 - DNA, 60 bp, Artificial
  Synthetic oligonucleotide
tccaaacgaggagatcattcgagctgaagaagctgtgggagcaaacccgttcaaaggcag

SEQ ID NO: 48604 - DNA, 60 bp, Artificial
  Synthetic oligonucleotide
gggataactggcatggctcaaatcggccatgggtatctttcaatcaaaatttggagtatc

SEQ ID NO: 48605 - DNA, 60 bp, Artificial
  Synthetic oligonucleotide
gcagggataactggcatggctcaaatcggccatgggtatctttcaatcaaaatttggagt

SEQ ID NO: 48606 - DNA, 60 bp, Artificial
  Synthetic oligonucleotide
tgtgcagggataactggcatggctcaaatcggccatgggtatctttcaatcaaaatttgg

SEQ ID NO: 48607 - DNA, 60 bp, Artificial
  Synthetic oligonucleotide
gccggcgaaatcacatgtgtgtgcagggataattggcatggctcaaatcggccatgggta

SEQ ID NO: 48608 - DNA, 60 bp, Artificial
  Synthetic oligonucleotide
atgccggcgaaatcacatgtgtgtgcagggataattggcatggctcaaatcggccatggg

SEQ ID NO: 48609 - DNA, 60 bp, Artificial
  Synthetic oligonucleotide
atgctggcgaaatcacatgtgtgtgcagggataattggcatggctcaaatcggccatggg

SEQ ID NO: 48610 - DNA, 60 bp, Artificial
  Synthetic oligonucleotide
gtctatatgcatctccacaactcgaggggttttcggctgaatcaagaaaattgcttctca

SEQ ID NO: 48611 - DNA, 60 bp, Artificial
  Synthetic oligonucleotide
ctgaggaacaagctgtggatatatgcaaagcagcaatgggtttgaggatcagttcatcct

SEQ ID NO: 48612 - DNA, 60 bp, Artificial
  Synthetic oligonucleotide
caggctgtggatatatgcaaagcagcaatgggtttgaggatcagttcatcctttagcttt

SEQ ID NO: 48613 - DNA, 60 bp, Artificial
  Synthetic oligonucleotide
cagttttcttctctaactgtgaatgtgagaggctcaggaatgagaatactcataaggggc

SEQ ID NO: 48614 - DNA, 60 bp, Artificial
  Synthetic oligonucleotide
cagttttcttctctaactgtgaatgtgagaggctcaggaatgagaatactcgtaaggggc

SEQ ID NO: 48615 - DNA, 60 bp, Artificial
  Synthetic oligonucleotide
caattttcttctctaactgtgaatgtgagaggctcaggaatgagaatactcgtaaggggc

SEQ ID NO: 48616 - DNA, 60 bp, Artificial
  Synthetic oligonucleotide
gcagttttcttctctaactgtgaatgtgagaggctcaggaatgagaatactcgtaagggg

SEQ ID NO: 48617 - DNA, 60 bp, Artificial
  Synthetic oligonucleotide
gcagttttcttctctaactgtgaatgtgagaggctcaggaatgagaatactcgtgagggg

SEQ ID NO: 48618 - DNA, 60 bp, Artificial
  Synthetic oligonucleotide
agccgagcagaatgcagttttcttctctaactgtgaatgtgagaggctcaggaatgagaa

SEQ ID NO: 48619 - DNA, 60 bp, Artificial
  Synthetic oligonucleotide
agcagagcagaatgcagttttcttctctaactgtgaatgtgagaggctcaggaatgagaa

SEQ ID NO: 48620 - DNA, 60 bp, Artificial
  Synthetic oligonucleotide
agcagagcaaaatgcagttttcttctctaactgtgaatgtgagaggctcaggaatgagaa

SEQ ID NO: 48621 - DNA, 60 bp, Artificial
  Synthetic oligonucleotide
tctaaatggagtgaagcctctcattttgagggattgtagtgtagctggatggctcctcgg

SEQ ID NO: 48622 - DNA, 60 bp, Artificial
  Synthetic oligonucleotide
tctaaatggagtgaagcctctgattttgagggattgtagtgtagctggatggctcctcgg

SEQ ID NO: 48623 - DNA, 60 bp, Artificial
  Synthetic oligonucleotide
tctaaatggagtgaaacctctcattttgagggattgtagtgtagctggatggctcctcgg

SEQ ID NO: 48624 - DNA, 60 bp, Artificial
  Synthetic oligonucleotide
agtatcccactgcagggccactgaatacataatgaagggagtgtacataaacacagccct

SEQ ID NO: 48625 - DNA, 60 bp, Artificial
  Synthetic oligonucleotide
tcatcctgagaggatccgtagcccataagtcctgcttgcctgcttgtgtgtacggactcg

SEQ ID NO: 48626 - DNA, 60 bp, Artificial
  Synthetic oligonucleotide
ctgtgggttggtcttggccagacggtgctgagttgccattcaccattgacaagtagtctg

SEQ ID NO: 48627 - DNA, 60 bp, Artificial
  Synthetic oligonucleotide
gtgacactgtgggttggtcttggccagacggtgctgaggtgccattcaccattgacaagt

SEQ ID NO: 48628 - DNA, 60 bp, Artificial
  Synthetic oligonucleotide
ggtgtaaacagtgacactgtgggttggtcttggccagacggtgctgagttgccattcacc

SEQ ID NO: 48629 - DNA, 60 bp, Artificial
  Synthetic oligonucleotide
ggtgtagatagtgacactgtgggttggtcttggccagacggtgctgagttgccattcacc

SEQ ID NO: 48630 - DNA, 60 bp, Artificial
  Synthetic oligonucleotide
ggtgtaaatagtgacactgtgggttggtcttggccagacggtgctgagttgccattcacc

SEQ ID NO: 48631 - DNA, 60 bp, Artificial
  Synthetic oligonucleotide
atgagtcttctaaccgaggtcgaaacgtacgtactctctatcatcccgtcaggccccctc

SEQ ID NO: 48632 - DNA, 60 bp, Artificial
  Synthetic oligonucleotide
gcaagccttacatctattgcttgaagtggagcaagagataagaactttctcgtttcagct

SEQ ID NO: 48633 - DNA, 60 bp, Artificial
  Synthetic oligonucleotide
cggtgtcaagctttcaggtagactgctttctttggcatgtccgcaaacgatttgcagacc

SEQ ID NO: 48634 - DNA, 60 bp, Artificial
  Synthetic oligonucleotide
tctaatgtcgcagtcccgcactcgcgagatactaacaaaaaccactgtggaccatatggc

SEQ ID NO: 48635 - DNA, 60 bp, Artificial
  Synthetic oligonucleotide
caatagtcagtcttgttaaaagtgatcagatttgcattggttaccatgcaaacaactcgt

SEQ ID NO: 48636 - DNA, 60 bp, Artificial
  Synthetic oligonucleotide
caacagtcagtcttgttaaaagtgatcagatttgcattggttaccatgcaaacaactcga

SEQ ID NO: 48637 - DNA, 60 bp, Artificial
  Synthetic oligonucleotide
caataatcagtcttgttaaaagtgatcagatttgcattggttaccatgcaaacaactcga

SEQ ID NO: 48638 - DNA, 60 bp, Artificial
  Synthetic oligonucleotide
caatagtcagtcttgttaaaagtgatcagatttgcattggttaccatgcaaacaactcga

SEQ ID NO: 48639 - DNA, 60 bp, Artificial
  Synthetic oligonucleotide
caatagtcagtcttgtcaaaagtgatcagatttgcattggttaccatgcaaacaactcga

SEQ ID NO: 48640 - DNA, 60 bp, Artificial
  Synthetic oligonucleotide
cgtacgttctctctatcatcccgtcaggccccctcaaagccgagatcgcgcagagacttg

SEQ ID NO: 48641 - DNA, 60 bp, Artificial
  Synthetic oligonucleotide
cggaagtatcccattgcagggccactgaatacataatgaagggagtgtacataaacacag

SEQ ID NO: 48642 - DNA, 60 bp, Artificial
  Synthetic oligonucleotide
gcggaagtatcccattgcagggccactgaatacataatgaagggagtgtacataaacaca

SEQ ID NO: 48643 - DNA, 60 bp, Artificial
  Synthetic oligonucleotide
cacgctcaccgtgcccagtgagcgaggactgcagcgtagacgctttgtccagaatgccct

SEQ ID NO: 48644 - DNA, 60 bp, Artificial
  Synthetic oligonucleotide
tgttcacgctcaccgtgcccagtgagcgaggactgcagcgtagacgctttgtccagaatg

SEQ ID NO: 48645 - DNA, 56 bp, Artificial
  Synthetic oligonucleotide
gctcaccgtgcccagtgagcgaggactgcagcgtagacgctttgtccagaatgccc

SEQ ID NO: 48646 - DNA, 60 bp, Artificial
  Synthetic oligonucleotide
tgaggagtgctcctgttatcctgatgctggcgaaatcacatgtgtgtgcagggataactg

SEQ ID NO: 48647 - DNA, 60 bp, Artificial
  Synthetic oligonucleotide
caatagatggagtcaccaataaggtcaactcgatcattgacaaaatgaacactcaatttg

SEQ ID NO: 48648 - DNA, 60 bp, Artificial
  Synthetic oligonucleotide
ggtattgcatttgactcaaggaacctgctgggaacagatgtacactccaggcggagaagt

SEQ ID NO: 48649 - DNA, 60 bp, Artificial
  Synthetic oligonucleotide
tgaggagtgctcctgttatcctgatgctggcgaaatcacatgtgtgtgcagggataattg

SEQ ID NO: 48650 - DNA, 60 bp, Artificial
  Synthetic oligonucleotide
gggaggttttatatacagatgtgcactgaactcaaactcagtgaccatgaagggaggctg

SEQ ID NO: 48651 - DNA, 60 bp, Artificial
  Synthetic oligonucleotide
gtggaattgggaggttttatatacagatgtgcactgaactcaaactcagtgactatgaag

SEQ ID NO: 48652 - DNA, 60 bp, Artificial
  Synthetic oligonucleotide
ggtggaattgggaggttttatatacagatgtgcactgaactcaaactcagtgactatgaa

SEQ ID NO: 48653 - DNA, 60 bp, Artificial
  Synthetic oligonucleotide
ggtggaattgggaggttttatatacagatgtgcactgaactcaaactcagtgaccatgaa

SEQ ID NO: 48654 - DNA, 60 bp, Artificial
  Synthetic oligonucleotide
caaaatttggagtatcaaataggatatatatgcagtggaattttcggagacaatccacgc

SEQ ID NO: 48655 - DNA, 60 bp, Artificial
  Synthetic oligonucleotide
gctttcaggtagattgctttctttggcatgtccgcaaacgatttgcagaccaagaactgg

SEQ ID NO: 48656 - DNA, 60 bp, Artificial
  Synthetic oligonucleotide
gggaggttttatatacagatgtgcactgaactcaaactcagtgactatgaagggaggctg

SEQ ID NO: 48657 - DNA, 60 bp, Artificial
  Synthetic oligonucleotide
tttcaggtagactgctttctttggcatgtccgcaaacgatttgcagaccaagaactgggt

SEQ ID NO: 48658 - DNA, 60 bp, Artificial
  Synthetic oligonucleotide
caggtagactgctttctttggcatgtccgcaaacgatttgcagaccaagaactgggtgat

SEQ ID NO: 48659 - DNA, 60 bp, Artificial
  Synthetic oligonucleotide
aacggaacgtatgactacccacagtattcagaagaagcaagactaaacagagaggaaata

SEQ ID NO: 48660 - DNA, 60 bp, Artificial
  Synthetic oligonucleotide
tcagcgttcagcccactttctcagtacagagaaatcttcccttcgaaagagcgaccatta

SEQ ID NO: 48661 - DNA, 60 bp, Artificial
  Synthetic oligonucleotide
ctcatctttctggcacggtctgcactcatcctgagaggatccgtagcccataagtcctgc

SEQ ID NO: 48662 - DNA, 60 bp, Artificial
  Synthetic oligonucleotide
ggaggtcgttttcccaaatgaagtgggagctagaatattgacatcagagtcccaattgac

SEQ ID NO: 48663 - DNA, 60 bp, Artificial
  Synthetic oligonucleotide
ggaggtcgttttcccaaatgaagtgggagctagaatattgacatcagagtctcaattgac

SEQ ID NO: 48664 - DNA, 60 bp, Artificial
  Synthetic oligonucleotide
ggagacaacaccaaatggaatgagaatcagaatcctaggatgtttctggcaatgataacg

SEQ ID NO: 48665 - DNA, 60 bp, Artificial
  Synthetic oligonucleotide
ggagacaacaccaaatggaatgagaatcagaatcctaggatgtttctggcaatgataaca

SEQ ID NO: 48666 - DNA, 60 bp, Artificial
  Synthetic oligonucleotide
ctggagacaacaccaaatggaatgagaatcagaatcctaggatgtttctggcaatgataa

SEQ ID NO: 48667 - DNA, 60 bp, Artificial
  Synthetic oligonucleotide
gcaacacccggaatgcaaatcagaggattcgtgtactttgtcgaaacactagcgaggaat

SEQ ID NO: 48668 - DNA, 60 bp, Artificial
  Synthetic oligonucleotide
gcgacacccggaatgcaaatcagaggattcgtgtactttgtcgaaacactagcgaggagt

SEQ ID NO: 48669 - DNA, 60 bp, Artificial
  Synthetic oligonucleotide
gcaacacccggaatgcaaatcagaggattcgtgtactttgtcgaaacactagcgaggagt

SEQ ID NO: 48670 - DNA, 60 bp, Artificial
  Synthetic oligonucleotide
tgcaacacccggaatgcaaatcagaggattcgtgtactttgtcgaaacactagcgaggag

SEQ ID NO: 48671 - DNA, 52 bp, Artificial
  Synthetic oligonucleotide
caaaatgccataagtaccacattcccttatactggagatcccccatacagcc

SEQ ID NO: 48672 - DNA, 60 bp, Artificial
  Synthetic oligonucleotide
atggcgtctcaaggcaccaaacgatcttatgaacagatggaaactagtggagaacgccag

SEQ ID NO: 48673 - DNA, 60 bp, Artificial
  Synthetic oligonucleotide
ttgtgttcacgctcaccgtgcccagtgagcgaggactgcagcgtagacgctttgtccaga

SEQ ID NO: 48674 - DNA, 60 bp, Artificial
  Synthetic oligonucleotide
gaaatacacatcaggaagacaagagaagaaccctgctctcagaatgaaatggatgatggc

SEQ ID NO: 48675 - DNA, 56 bp, Artificial
  Synthetic oligonucleotide
tcacatcaggaagacaagagaagaaccctgctctcagaatgaaatggatgatggca

SEQ ID NO: 48676 - DNA, 55 bp, Artificial
  Synthetic oligonucleotide
acacatcaggaagacaagagaagaaccctgctctcagaatgaaatggatgatggc

SEQ ID NO: 48677 - DNA, 56 bp, Artificial
  Synthetic oligonucleotide
acacatcaggaagacaagagaagaaccctgctctcagaatgaaatggatgatggca

SEQ ID NO: 48678 - DNA, 53 bp, Artificial
  Synthetic oligonucleotide
catcaggaagacaagagaagaaccctgctctcagaatgaaatggatgatggca

SEQ ID NO: 48679 - DNA, 60 bp, Artificial
  Synthetic oligonucleotide
gattacaaacaaggtgaattctgtaattgagaaaatgaacactcaattcacagctgtggg

SEQ ID NO: 48680 - DNA, 60 bp, Artificial
  Synthetic oligonucleotide
aaatgccattaacgggattacaaacaaggtgaattctgtaatcgagaaaatgaacactca

SEQ ID NO: 48681 - DNA, 60 bp, Artificial
  Synthetic oligonucleotide
aacaattcctatgtgaacaataaagggaaagaagtccttgtactatggggtgttcatcac

SEQ ID NO: 48682 - DNA, 60 bp, Artificial
  Synthetic oligonucleotide
aaatgccattaacgggattacaaacaaggtgaattctgtaattgagaaaatgaacactca

SEQ ID NO: 48683 - DNA, 60 bp, Artificial
  Synthetic oligonucleotide
gtgaacaataaagggaaagaagtccttgtactatggggtgttcatcacccgtctagcagt

SEQ ID NO: 48684 - DNA, 60 bp, Artificial
  Synthetic oligonucleotide
gggagtgcagatgcagcgattcaagtgatcctcttgttgttgccgcaagtatcattggaa

SEQ ID NO: 48685 - DNA, 60 bp, Artificial
  Synthetic oligonucleotide
gggagtgcagatgcagcgattcaagtgatcctcttgttgttgccgcaagtatcattggga

SEQ ID NO: 48686 - DNA, 60 bp, Artificial
  Synthetic oligonucleotide
aatgggagtgcagatgcagcgattcaagtgatcctcttgttgttgccgcaagtatcattg

SEQ ID NO: 48687 - DNA, 60 bp, Artificial
  Synthetic oligonucleotide
agattgtgtattggaagcaatggctttccttgaagaatcccacccagggatctttgaaaa

SEQ ID NO: 48688 - DNA, 60 bp, Artificial
  Synthetic oligonucleotide
tgtcacagtcccgcactcgcgagatactaacaaaaaccactgtggaccatatggccataa

SEQ ID NO: 48689 - DNA, 60 bp, Artificial
  Synthetic oligonucleotide
aatgtcacagtcccgcactcgcgagatactaacaaaaaccactgtggaccatatggccat

SEQ ID NO: 48690 - DNA, 60 bp, Artificial
  Synthetic oligonucleotide
tctagatggagtgaagcctctaattttgagagattgtagtgtagctggatggctcctcgg

SEQ ID NO: 48691 - DNA, 60 bp, Artificial
  Synthetic oligonucleotide
ctagatggagtgaagcctctaattttgagagattgtagtgtagctggatggctcctcggg

SEQ ID NO: 48692 - DNA, 60 bp, Artificial
  Synthetic oligonucleotide
ggtcgccagacctatgactggacattgaatagaaaccaaccggctgcaactgctttggcc

SEQ ID NO: 48693 - DNA, 60 bp, Artificial
  Synthetic oligonucleotide
agtgtaaaaaacggaacgtatgactacccgcagtattcagaagaagcaagactaaacaga

SEQ ID NO: 48694 - DNA, 60 bp, Artificial
  Synthetic oligonucleotide
agatgagtcttctaaccgaggtcgaaacgtacgttctctctatcatcccgtcaggccccc

SEQ ID NO: 48695 - DNA, 60 bp, Artificial
  Synthetic oligonucleotide
ggagctacctgataagagcactgacactgaacacaatgacaaaagatgcagaaagaggca

SEQ ID NO: 48696 - DNA, 59 bp, Artificial
  Synthetic oligonucleotide
ctacctaataagagcactgacactgaacacaatgacaaaagacgcagaaagaggcaaat

SEQ ID NO: 48697 - DNA, 60 bp, Artificial
  Synthetic oligonucleotide
acctaataagagcactgacactgaacacaatgacaaaagatgctgaaaggggaaaattga

SEQ ID NO: 48698 - DNA, 60 bp, Artificial
  Synthetic oligonucleotide
agagctacctgataagagcactgacactgaacacaatgacaaaagatgcagaaagaggca

SEQ ID NO: 48699 - DNA, 60 bp, Artificial
  Synthetic oligonucleotide
ggagctacttaataagagcactgacactgaacacaatgacaaaagatgcagaaagaggca

SEQ ID NO: 48700 - DNA, 60 bp, Artificial
  Synthetic oligonucleotide
agagctacctaataagagcactgacactgaacacaatgacaaaagatgcagaaagaggca

SEQ ID NO: 48701 - DNA, 60 bp, Artificial
  Synthetic oligonucleotide
ggggcatatggagtaaaagggttttcatttaaatacggcaatggtgtttggatcgggaga

SEQ ID NO: 48702 - DNA, 60 bp, Artificial
  Synthetic oligonucleotide
cggagcgtatggagtaaaagggttttcatttaaatacggcaatggtgtttggatcgggag

SEQ ID NO: 48703 - DNA, 60 bp, Artificial
  Synthetic oligonucleotide
gggtcctcatcggaggacttgaatggaatgataacgcagttcgagtctctgaaactctac

SEQ ID NO: 48704 - DNA, 51 bp, Artificial
  Synthetic oligonucleotide
ttttctggcacggtctgcactcatcctgagaggatcagtagcccataagtc

SEQ ID NO: 48705 - DNA, 52 bp, Artificial
  Synthetic oligonucleotide
ttttctggcacggtctgcactcatcctgagaggatcagtagcccataagtcc

SEQ ID NO: 48706 - DNA, 60 bp, Artificial
  Synthetic oligonucleotide
gtaccttcgatcttggagggctatatgaagcaattgaggagtgcctgattaacgatccct

SEQ ID NO: 48707 - DNA, 60 bp, Artificial
  Synthetic oligonucleotide
ggaccttcgatcttggagggctatatgaagcaattgaggagtgcctgattaacgatccct

SEQ ID NO: 48708 - DNA, 60 bp, Artificial
  Synthetic oligonucleotide
gaccttcgatcttggagggctatatgaagcaattgaggagtgcctgattaacgatccctg

SEQ ID NO: 48709 - DNA, 60 bp, Artificial
  Synthetic oligonucleotide
atggctaaagacaagaccaatcctgtcacctctgactaaaggaattttaggatttgtgtt

SEQ ID NO: 48710 - DNA, 60 bp, Artificial
  Synthetic oligonucleotide
catggagtggctaaagacaagaccaatcctgtcacctctgactaaagggattttgggatt

SEQ ID NO: 48711 - DNA, 60 bp, Artificial
  Synthetic oligonucleotide
gtggctaaagacaagaccaatcctgtcacctctgactaaaggaattttgggatttgtgtt

SEQ ID NO: 48712 - DNA, 60 bp, Artificial
  Synthetic oligonucleotide
gtggctaaagacaagaccaatcctgtcacctctgactaaagggatcttgggatttgtgtt

SEQ ID NO: 48713 - DNA, 60 bp, Artificial
  Synthetic oligonucleotide
gtggctaaagacaagaccaatcctgtcacctctgactaaagggattttgggatttgtgtt

SEQ ID NO: 48714 - DNA, 60 bp, Artificial
  Synthetic oligonucleotide
cggggcatatggaataaaagggttttcatttaaatacggcaatggtgtttggatcgggag

SEQ ID NO: 48715 - DNA, 60 bp, Artificial
  Synthetic oligonucleotide
acggggcatatggaataaaagggttttcatttaaatacggcaatggtgtttggatcggga

SEQ ID NO: 48716 - DNA, 60 bp, Artificial
  Synthetic oligonucleotide
catatggaataaaagggttttcatttaaatacggcaatggtgtttggatcgggagaacca

SEQ ID NO: 48717 - DNA, 60 bp, Artificial
  Synthetic oligonucleotide
ggaaaatgaaaggactttggatttccatgactcaaatgtgaagaatctgtacgagaaagt

SEQ ID NO: 48718 - DNA, 60 bp, Artificial
  Synthetic oligonucleotide
gaagaactgaaacacctattgagcagaataaaccattttgagaaaattcagatcatcccc

SEQ ID NO: 48719 - DNA, 60 bp, Artificial
  Synthetic oligonucleotide
tggataaactgacccaaggtcgccagacctatgactggacattgaatagaaaccaaccgg

SEQ ID NO: 48720 - DNA, 60 bp, Artificial
  Synthetic oligonucleotide
gtggataaactgacccaaggtcgccagacctatgactggacattgaatagaaaccaaccg

SEQ ID NO: 48721 - DNA, 60 bp, Artificial
  Synthetic oligonucleotide
aagagtggataaactgacccaaggtcgccagacctatgactggacattgaatagaaacca

SEQ ID NO: 48722 - DNA, 60 bp, Artificial
  Synthetic oligonucleotide
ccaaaagagaatccagcacataaaagtcaattggtatggatggcatgccattctgcagca

SEQ ID NO: 48723 - DNA, 60 bp, Artificial
  Synthetic oligonucleotide
gcagatggtgcaggcaatgaggacaattgggactcatcctaactctagtgccggtctgaa

SEQ ID NO: 48724 - DNA, 60 bp, Artificial
  Synthetic oligonucleotide
ggctaggcagatggtgcaggcaatgaggacaattgggactcatcctaactctagtaccgg

SEQ ID NO: 48725 - DNA, 60 bp, Artificial
  Synthetic oligonucleotide
ggctaggcagatggtgcaggcaatgaggacaattgggactcatcctaactctagtgctgg

SEQ ID NO: 48726 - DNA, 60 bp, Artificial
  Synthetic oligonucleotide
ggccctctatcatacagaaaatgcttatgtctctgtagtgtcttcacattatagcagaag

SEQ ID NO: 48727 - DNA, 60 bp, Artificial
  Synthetic oligonucleotide
ttcacattatagcagaagattcaccccagaaatagcaaaaagacccaaagtaagagatca

SEQ ID NO: 48728 - DNA, 60 bp, Artificial
  Synthetic oligonucleotide
gaagtccttgtactatggggtgttcatcacccgtctaacataagggaccaaagggccatc

SEQ ID NO: 48729 - DNA, 60 bp, Artificial
  Synthetic oligonucleotide
gaccaaagggccatctatcatacagaaaatgcttatgtctctgtagtgtcttcacattat

SEQ ID NO: 48730 - DNA, 60 bp, Artificial
  Synthetic oligonucleotide
gtcaacctacttgaggacagtcacaacggaaaactatgtcgactaaagggaatagcccca

SEQ ID NO: 48731 - DNA, 60 bp, Artificial
  Synthetic oligonucleotide
agacacaatatgtataggctaccatgccaacaactcaaccgacactgttgacacagtact

SEQ ID NO: 48732 - DNA, 60 bp, Artificial
  Synthetic oligonucleotide
aggctaccatgccaacaactcaaccgacactgttgacacagtacttgagaagaatgtgac

SEQ ID NO: 48733 - DNA, 60 bp, Artificial
  Synthetic oligonucleotide
gaagaatggcttgtacccaaatctgagcaagtcctatgtaaacaacaaagagaaagaagt

SEQ ID NO: 48734 - DNA, 60 bp, Artificial
  Synthetic oligonucleotide
ggtaattgcagcgttgccggatggatcttaggaaacccagaatgcgaattactgatttcc

SEQ ID NO: 48735 - DNA, 60 bp, Artificial
  Synthetic oligonucleotide
atcttcatttgagagattcgaaatattccccaaagaaagctcatggcccaaccacaccgt

SEQ ID NO: 48736 - DNA, 60 bp, Artificial
  Synthetic oligonucleotide
aatagccccactacaattgggtaattgcagcgttgccggatggatcttaggaaacccaaa

SEQ ID NO: 48737 - DNA, 60 bp, Artificial
  Synthetic oligonucleotide
gattacaaacaaggtgaattctgtaatcgagaaaatgaacactcaattcacagctgtggg

SEQ ID NO: 48738 - DNA, 60 bp, Artificial
  Synthetic oligonucleotide
acatcccatccattcaatccagaggtttgtttggagccattgccggtttcattgaagggg

SEQ ID NO: 48739 - DNA, 60 bp, Artificial
  Synthetic oligonucleotide
caggagtgcaaaattaaggatggttacaggactaaggaacatcccatccattcaatccag

SEQ ID NO: 48740 - DNA, 60 bp, Artificial
  Synthetic oligonucleotide
gaacatcccatccattcaatccagaggtttgtttggagccattgccggtttcattgaagg

SEQ ID NO: 48741 - DNA, 60 bp, Artificial
  Synthetic oligonucleotide
ctgctggaacccggggacacaataatatttgaggcaaatggaaatctaatagcgccatgg

SEQ ID NO: 48742 - DNA, 60 bp, Artificial
  Synthetic oligonucleotide
gactctgctggaacccggggacacaataatatttgaggcaaatggaaatctaatagcgcc

SEQ ID NO: 48743 - DNA, 60 bp, Artificial
  Synthetic oligonucleotide
tgtccaaagtatgtcaggagtgcaaaattaaggatggttacaggactaaggaacatccca

SEQ ID NO: 48744 - DNA, 60 bp, Artificial
  Synthetic oligonucleotide
caaatggaaatctaatagcgccatggtatgcttttgcactgagtagaggctttggatcag

SEQ ID NO: 48745 - DNA, 60 bp, Artificial
  Synthetic oligonucleotide
ggaaaactatgtctactaaaaggaatagccccactacaattgggtaattgcagcgttgcc

SEQ ID NO: 48746 - DNA, 60 bp, Artificial
  Synthetic oligonucleotide
cccaaacctgagcaagtcctatgtaaacaacaaagagaaagaagtccttgtactatgggg

SEQ ID NO: 48747 - DNA, 59 bp, Artificial
  Synthetic oligonucleotide
gaatgtgacagtgacacactctgtcaacctacttgaggacagtcacaacggaaaactat

SEQ ID NO: 48748 - DNA, 60 bp, Artificial
  Synthetic oligonucleotide
ccgacactgttgacacagtacttgagaagaacgtgacagtgacacactctgtcaacctac

SEQ ID NO: 48749 - DNA, 60 bp, Artificial
  Synthetic oligonucleotide
ggcccaaccacaccgtaaccggagtatcagcatcatgctcccataatgggaaaagcagtt

SEQ ID NO: 48750 - DNA, 60 bp, Artificial
  Synthetic oligonucleotide
acaattgggtaattgcagcgttgccggatggatcttaggaaacccagaatgcgaattact

SEQ ID NO: 48751 - DNA, 60 bp, Artificial
  Synthetic oligonucleotide
ccccactacaattgggtaattgcagcgttgccggatggatcttaggaaacccaaaatgcg

SEQ ID NO: 48752 - DNA, 60 bp, Artificial
  Synthetic oligonucleotide
gcaattgagttcagtatcttcatttgagagattcgaaatattccccaaagaaagctcatg

SEQ ID NO: 48753 - DNA, 54 bp, Artificial
  Synthetic oligonucleotide
gcagaaacaccaaaccctgagaatggaacatgttacccagggtatttcgccgac

SEQ ID NO: 48754 - DNA, 60 bp, Artificial
  Synthetic oligonucleotide
gatctactcaactgtcgccagttccctggttcttttggtctccctgggggcaatcagctt

SEQ ID NO: 48755 - DNA, 60 bp, Artificial
  Synthetic oligonucleotide
acactcaattcacagctgtgggcaaagaattcaacaaattggaaagaaggatggaaaact

SEQ ID NO: 48756 - DNA, 60 bp, Artificial
  Synthetic oligonucleotide
gtgttttgaattctatcacaagtgtaacaatgaatgcatggagagtgtgaaaaatggaac

SEQ ID NO: 48757 - DNA, 60 bp, Artificial
  Synthetic oligonucleotide
ccaattgaagaataatgccaaagaaatagggaacgggtgttttgaattctatcacaagtg

SEQ ID NO: 48758 - DNA, 60 bp, Artificial
  Synthetic oligonucleotide
gagctacctaataagagcactgacactgaacacaatgacaaaagatgcagaaagaggcaa

SEQ ID NO: 48759 - DNA, 60 bp, Artificial
  Synthetic oligonucleotide
gcaattggggtcctcatcggaggacttgaatggaatgataacacagttcgagtctctgaa

SEQ ID NO: 48760 - DNA, 60 bp, Artificial
  Synthetic oligonucleotide
ggcaccaaacgaccttatgaacagatggaaactggtggagaacgccagaatgccactgag

SEQ ID NO: 48761 - DNA, 60 bp, Artificial
  Synthetic oligonucleotide
ggcgtctcaaggcaccaaacgatcttacgaacagatggaaactggtggagaacgccagaa

SEQ ID NO: 48762 - DNA, 60 bp, Artificial
  Synthetic oligonucleotide
ggcaccaaacgatcctatgaacagatggaaactggtggagaacgccagaatgccactgag

SEQ ID NO: 48763 - DNA, 60 bp, Artificial
  Synthetic oligonucleotide
ggcgtctcaaggcaccaaacgaccttatgaacagatggaaactggtggagaacgccagaa

SEQ ID NO: 48764 - DNA, 60 bp, Artificial
  Synthetic oligonucleotide
gcaattcgggtcctcatcggaggacttgaatggaatgataacacagttcgagtctctgaa

SEQ ID NO: 48765 - DNA, 60 bp, Artificial
  Synthetic oligonucleotide
gcttttggcctagtatgtgccacttgtgagcagattgcagattcacagcatcggtctcac

SEQ ID NO: 48766 - DNA, 60 bp, Artificial
  Synthetic oligonucleotide
ggacggactccaatcctctgatgatttcgctctcatcgtaaacgcaccgaatcatgaggg

SEQ ID NO: 48767 - DNA, 60 bp, Artificial
  Synthetic oligonucleotide
cggactccaatcctctgatgatttcgctctcatagtgaatgcaccaaatcatgagggaat

SEQ ID NO: 48768 - DNA, 60 bp, Artificial
  Synthetic oligonucleotide
ccagacctatgactggacattgaatagaaaccagccggctgcaactgctttggccaacac

SEQ ID NO: 48769 - DNA, 60 bp, Artificial
  Synthetic oligonucleotide
tgaaagaatatggggaagatccgaaaatcgaaacgaacaaatttgccgcaatatgtacgc

SEQ ID NO: 48770 - DNA, 60 bp, Artificial
  Synthetic oligonucleotide
agaatatggggaagatccgaaaatcgaaacgaacaagtttgctgcaatatgcacacactt

SEQ ID NO: 48771 - DNA, 60 bp, Artificial
  Synthetic oligonucleotide
aatgaaagaatatggggaagatccgaaaatcgaaacgaacaaatttgccgcaatatgcac

SEQ ID NO: 48772 - DNA, 60 bp, Artificial
  Synthetic oligonucleotide
aatgaaagagtatggggaagatccgaaaatcgaaacgaacaaatttgccgcactatgcac

SEQ ID NO: 48773 - DNA, 60 bp, Artificial
  Synthetic oligonucleotide
gacccaaggtcgccagacctatgactggacattgaatagaaaccagccggctgcaactgc

SEQ ID NO: 48774 - DNA, 60 bp, Artificial
  Synthetic oligonucleotide
aactgacccaaggtcgccagacctatgactggacattgaatagaaaccagccggctgcaa

SEQ ID NO: 48775 - DNA, 60 bp, Artificial
  Synthetic oligonucleotide
tccaaacaaggagatcattcgagctgaagaagctgtgggagcaaacccgttcaaaggcag

SEQ ID NO: 48776 - DNA, 53 bp, Artificial
  Synthetic oligonucleotide
cacatggaataaaagggttttcatttaaatacggcaatggtgtttggatcggg

SEQ ID NO: 48777 - DNA, 60 bp, Artificial
  Synthetic oligonucleotide
ccagacctatgactggacattgaatagaaaccagccggctgcaaccgctttggccaacac

SEQ ID NO: 48778 - DNA, 60 bp, Artificial
  Synthetic oligonucleotide
gatctcatttttctggcacggtctgcactcatcctgagaggatccgtagcccataagtcc

SEQ ID NO: 48779 - DNA, 60 bp, Artificial
  Synthetic oligonucleotide
ctgtgtcaagctttcaggtagactgctttctttggcatgtccgcaaacgatttgcagacc

SEQ ID NO: 48780 - DNA, 51 bp, Artificial
  Synthetic oligonucleotide
cagatggaaactggtggagaacgccagaatgccactgagatcagggcatct

SEQ ID NO: 48781 - DNA, 55 bp, Artificial
  Synthetic oligonucleotide
tatgaacagatggaaactggtggagaacgccagaatgctactgagatcagggcat

SEQ ID NO: 48782 - DNA, 60 bp, Artificial
  Synthetic oligonucleotide
ctgtcaatttattcaacagtggcgagttccctagcactggcaatcatggtagctggtcta

SEQ ID NO: 48783 - DNA, 60 bp, Artificial
  Synthetic oligonucleotide
caatagccagtcttgttaaaagtgatcagatttgcattggttaccatgcaaacaattcaa

SEQ ID NO: 48784 - DNA, 60 bp, Artificial
  Synthetic oligonucleotide
caatagtcagccctgtcaaaagtgatcagatttgcattggttaccatgcaaacaattcaa

SEQ ID NO: 48785 - DNA, 60 bp, Artificial
  Synthetic oligonucleotide
gctgaagaagctgtgggagcagacccgttcaaaggcaggactgttggtttcagatggagg

SEQ ID NO: 48786 - DNA, 60 bp, Artificial
  Synthetic oligonucleotide
caacagtcagtcttgttaaaagtgaccagatttgcattggttaccatgcaaacaactcga

SEQ ID NO: 48787 - DNA, 60 bp, Artificial
  Synthetic oligonucleotide
caatagtcagtcttgttaagagtgatcagatttgcattggttaccatgcaaacaactcga

SEQ ID NO: 48788 - DNA, 60 bp, Artificial
  Synthetic oligonucleotide
taggcaaagaagacaaaagatatggaccagcattaagcatcattgaactgagcattcttg

SEQ ID NO: 48789 - DNA, 60 bp, Artificial
  Synthetic oligonucleotide
agcaaaagcagggtgacaaagacataatggattccaacactgtgtcaagctttcaggtag

SEQ ID NO: 48790 - DNA, 60 bp, Artificial
  Synthetic oligonucleotide
gacactgtgagttggtcttggccagacggtgctgagttgccattcaccattgacaagtag

SEQ ID NO: 48791 - DNA, 60 bp, Artificial
  Synthetic oligonucleotide
ctgtgagttggtcttggccagacggtgctgagttgccattcaccattgacaagtagtttg

SEQ ID NO: 48792 - DNA, 60 bp, Artificial
  Synthetic oligonucleotide
caatcctctgatgatttcgctctcatagtgaatgcaccgaatcatgagggaatacaagca

SEQ ID NO: 48793 - DNA, 60 bp, Artificial
  Synthetic oligonucleotide
caatagtcaaccttgttaaaagtgatcagatttgcattggttaccatgcaaacaactcga

SEQ ID NO: 48794 - DNA, 60 bp, Artificial
  Synthetic oligonucleotide
caatagtcagtcttgttaaaagtgatcagatttgcattggttaccatgcaaacaactcaa

SEQ ID NO: 48795 - DNA, 60 bp, Artificial
  Synthetic oligonucleotide
aagggttttcatttaaatacggcaatggtgtttggatcgggagaaccaaaagcactaatt

SEQ ID NO: 48796 - DNA, 60 bp, Artificial
  Synthetic oligonucleotide
ttccttgaagaatcccacccagggatctttgaaaactcgtgtcttgaaacaatggaaatt

SEQ ID NO: 48797 - DNA, 60 bp, Artificial
  Synthetic oligonucleotide
gctttccttgaagaatcccacccagggatctttgaaaactcgtgtcttgaaacaatggaa

SEQ ID NO: 48798 - DNA, 60 bp, Artificial
  Synthetic oligonucleotide
aaagatgagtcttctaaccgaggtcgaaacgtacgttctctctatcgtcccgtcaggccc

SEQ ID NO: 48799 - DNA, 60 bp, Artificial
  Synthetic oligonucleotide
aagatgagtcttctaaccgaggtcgaaacgtacgttctctctatcgtcccgtcaggcccc

SEQ ID NO: 48800 - DNA, 60 bp, Artificial
  Synthetic oligonucleotide
tccttgaccggcttcgccgagatcagaagtccctaagaggaagaggcaacactcttggtc

SEQ ID NO: 48801 - DNA, 60 bp, Artificial
  Synthetic oligonucleotide
ttccttgaccggcttcgccgagatcagaagtccctaagaggaagaggcaacactcttggt

SEQ ID NO: 48802 - DNA, 60 bp, Artificial
  Synthetic oligonucleotide
cggaaggggtacctgagtctatgagggaagagtatcggcaggaacagcagaatgctgtgg

SEQ ID NO: 48803 - DNA, 60 bp, Artificial
  Synthetic oligonucleotide
cggaaggggtacctgagtctatgagggaagagtatcggcaggaacagcatagtgctgtgg

SEQ ID NO: 48804 - DNA, 52 bp, Artificial
  Synthetic oligonucleotide
cggaaggggtacctgagtctatgagggaagagtatcggcaggaacagcagag

SEQ ID NO: 48805 - DNA, 60 bp, Artificial
  Synthetic oligonucleotide
atacggaaggggtacctgagtctatgagggaagagtatcggcaggaacagcagagtgctg

SEQ ID NO: 48806 - DNA, 60 bp, Artificial
  Synthetic oligonucleotide
gtctgcagtattgagagggtttctaattctcggcaaagaagacaaaagatatggaccagc

SEQ ID NO: 48807 - DNA, 60 bp, Artificial
  Synthetic oligonucleotide
gatccagaacagtataacaatagagagaatggttctctctgcatttgatgaaaggaggaa

SEQ ID NO: 48808 - DNA, 60 bp, Artificial
  Synthetic oligonucleotide
acaatagagagaatggttctctctgcatttgatgaaaggaggaacaggtacctagaggaa

SEQ ID NO: 48809 - DNA, 60 bp, Artificial
  Synthetic oligonucleotide
gaatggctaaagacaagaccaatcctgtcacctctgactaaggggattttaggatttgtg

SEQ ID NO: 48810 - DNA, 60 bp, Artificial
  Synthetic oligonucleotide
tctcatggaatggctaaagacaagaccaatcctgtcacctctgactaaggggattttagg

SEQ ID NO: 48811 - DNA, 60 bp, Artificial
  Synthetic oligonucleotide
ctcatggaatggctaaagacaagaccaatcctgtcacctctgactaaggggattttaggg

SEQ ID NO: 48812 - DNA, 60 bp, Artificial
  Synthetic oligonucleotide
catggaatggctaaagacaagaccaatcctgtcacctctgactaaggggattttaggatt

SEQ ID NO: 48813 - DNA, 60 bp, Artificial
  Synthetic oligonucleotide
gatgatccctgaaaggaatgagcaaggtcaaactctttggagcaaaacaagtgacgctgg

SEQ ID NO: 48814 - DNA, 60 bp, Artificial
  Synthetic oligonucleotide
ctaagaggcttacaatacttgggaaggacgcaggtgcacttacagaggacccagatgaag

SEQ ID NO: 48815 - DNA, 60 bp, Artificial
  Synthetic oligonucleotide
ataacatttatgcaagccttacatctattgcttgaagtggagcaagagataagaactttc

SEQ ID NO: 48816 - DNA, 50 bp, Artificial
  Synthetic oligonucleotide
ttctaaccgaggtcgaaacgtacgttctctctatcgtcccggcaggcccc

SEQ ID NO: 48817 - DNA, 60 bp, Artificial
  Synthetic oligonucleotide
actatgaagggaggctgattcagaacagcataacaatagagagaatggttctctctgcat

SEQ ID NO: 48818 - DNA, 60 bp, Artificial
  Synthetic oligonucleotide
cgactatgaagggaggctgattcagaacagcataacaatagagagaatggttctctctgc

SEQ ID NO: 48819 - DNA, 60 bp, Artificial
  Synthetic oligonucleotide
tgactatgaagggaggctgattcagaacagcataacaatagagagaatggttctctctgc

SEQ ID NO: 48820 - DNA, 60 bp, Artificial
  Synthetic oligonucleotide
tgaccatgaagggaggctgattcagaacagcataacaatagagagaatggttctctctgc

SEQ ID NO: 48821 - DNA, 60 bp, Artificial
  Synthetic oligonucleotide
gactatgaagggaggctgattcagaacagcataacaatagagagaatggttctctctgca

SEQ ID NO: 48822 - DNA, 60 bp, Artificial
  Synthetic oligonucleotide
cttcctttgacatgagtaatgaaggatcttacttcttcggagacaatgcagaggagtttg

SEQ ID NO: 48823 - DNA, 60 bp, Artificial
  Synthetic oligonucleotide
gtgcgtactgggatggaccctagaatgtgctctctgatgcaaggatcaactctcccgagg

SEQ ID NO: 48824 - DNA, 60 bp, Artificial
  Synthetic oligonucleotide
gcgtactgggatggaccctagaatgtgctctctgatgcaaggatcaactctcccgaggag

SEQ ID NO: 48825 - DNA, 60 bp, Artificial
  Synthetic oligonucleotide
cttcctttgacatgagtaatgaaggatcttattttttcggagacaatgcagaggagtatg

SEQ ID NO: 48826 - DNA, 60 bp, Artificial
  Synthetic oligonucleotide
cttcctttgacatgagtaatgaaggatcttatttcttcggagacaatgcggaggagtatg

SEQ ID NO: 48827 - DNA, 55 bp, Artificial
  Synthetic oligonucleotide
cttcctttgacatgagtaatgaaggatcttatttcttcggagacaatgcagagga

SEQ ID NO: 48828 - DNA, 60 bp, Artificial
  Synthetic oligonucleotide
cttcctttgacatgagtaatgaaggatcttatttcttcggagacaatgcagaggaatatg

SEQ ID NO: 48829 - DNA, 51 bp, Artificial
  Synthetic oligonucleotide
gagtctctgaaactctacagagattcgcttggagaagcagtgatgaggatg

SEQ ID NO: 48830 - DNA, 60 bp, Artificial
  Synthetic oligonucleotide
gttcgagtctctgaaactctacagagattcgcttggagaagcagtgatgaggatgggaga

SEQ ID NO: 48831 - DNA, 60 bp, Artificial
  Synthetic oligonucleotide
ttaaatggaatgataacacagttcgagtctctgaaactatacagagattcgcttggaaaa

SEQ ID NO: 48832 - DNA, 60 bp, Artificial
  Synthetic oligonucleotide
ttgaatggaatgataacacagttcgagtctctgagactatacagagattcgcttggagaa

SEQ ID NO: 48833 - DNA, 60 bp, Artificial
  Synthetic oligonucleotide
cggaaggggtacctgagtctatgagggaagagtatcggcaggaacagcagagtgctgtag

SEQ ID NO: 48834 - DNA, 60 bp, Artificial
  Synthetic oligonucleotide
cggaaggggtacctgagtctatgagggaagagtatcggcaggaacagcagagtgctgtgg

SEQ ID NO: 48835 - DNA, 60 bp, Artificial
  Synthetic oligonucleotide
cataatgggaaaagcagtttttacagaaatttgctatggctgacggggaagaatggtttg

SEQ ID NO: 48836 - DNA, 60 bp, Artificial
  Synthetic oligonucleotide
aaacggagtaacggcagcatgctcccatgaggggaaaagcagtttttacagaaatttgct

SEQ ID NO: 48837 - DNA, 60 bp, Artificial
  Synthetic oligonucleotide
tcccataatgggaaaagcagtttttacagaaatttgctatggctgacggagaagaatggc

SEQ ID NO: 48838 - DNA, 60 bp, Artificial
  Synthetic oligonucleotide
acacagtacttgagaagaatgtgacagtgacacactctgtcaacctacttgaggacagtc

SEQ ID NO: 48839 - DNA, 60 bp, Artificial
  Synthetic oligonucleotide
ggaaaatgaaaggactctggatttccatgactcaaatgtgaagaatctgtatgagaaagt

SEQ ID NO: 48840 - DNA, 60 bp, Artificial
  Synthetic oligonucleotide
gggaatgctgaaattgaagatctcatctttctggcacggtctgcactcatcctgagagga

SEQ ID NO: 48841 - DNA, 60 bp, Artificial
  Synthetic oligonucleotide
gggaatgctgagattgaagatctaatattcctggcacggtctgcactcatcctgagagga

SEQ ID NO: 48842 - DNA, 60 bp, Artificial
  Synthetic oligonucleotide
gggaatgctgagattgaagatcttatattcctggcacggtctgcactcatcctgagagga

SEQ ID NO: 48843 - DNA, 60 bp, Artificial
  Synthetic oligonucleotide
gggaatgctgagattgaagatctcatattcctggcacggtctgcactcatcctgagagga

SEQ ID NO: 48844 - DNA, 60 bp, Artificial
  Synthetic oligonucleotide
gggaatgctgagattgaagatctcatattactggcacggtctgcactcatcctgagagga

SEQ ID NO: 48845 - DNA, 60 bp, Artificial
  Synthetic oligonucleotide
gggaatgccgaaattgaagatctcatctttctggcacggtctgcactcatcctgagagga

SEQ ID NO: 48846 - DNA, 60 bp, Artificial
  Synthetic oligonucleotide
gaatgctgagattgaagatctcatattcctggcacggtctgcactcatcctgagaggatc

SEQ ID NO: 48847 - DNA, 60 bp, Artificial
  Synthetic oligonucleotide
tgctgagattgaagatctcatattcctggcacggtctgcactcatcctgagaggatcagt

SEQ ID NO: 48848 - DNA, 60 bp, Artificial
  Synthetic oligonucleotide
gagatgtgccacagcacacagattggtgggataaggatggtggacatccttaggcaaaat

SEQ ID NO: 48849 - DNA, 60 bp, Artificial
  Synthetic oligonucleotide
agaatctggagtatcaaataggatatatatgcagtggggttttcggagacagcccacgcc

SEQ ID NO: 48850 - DNA, 60 bp, Artificial
  Synthetic oligonucleotide
gtctcaaggcaccaaacgatcttatgaacagatggaaactggtggagaacgccagaatgc

SEQ ID NO: 48851 - DNA, 60 bp, Artificial
  Synthetic oligonucleotide
gtctcagggcaccaaacgatcttatgaacagatggaaactggtggagaacgccagaatgc

SEQ ID NO: 48852 - DNA, 60 bp, Artificial
  Synthetic oligonucleotide
gtttaacagtctatatgcatctccacaactcgaggggttttcagctgaatcaagaaaatt

SEQ ID NO: 48853 - DNA, 60 bp, Artificial
  Synthetic oligonucleotide
cagtctatatgcatctccacaactcgaggggttttcagctgaatcaagaaaattgcttct

SEQ ID NO: 48854 - DNA, 60 bp, Artificial
  Synthetic oligonucleotide
gtctatatgcatctccacaactcgaggggttttcagctgaatcaagaaaattgcttctca

SEQ ID NO: 48855 - DNA, 60 bp, Artificial
  Synthetic oligonucleotide
gttcaacaaacaagagtggataaactgacccaaggtcgccagacctatgactggacattg

SEQ ID NO: 48856 - DNA, 60 bp, Artificial
  Synthetic oligonucleotide
ttcaacaaacaagagtggataaactgacccaaggtcgccagacctatgactggacattga

SEQ ID NO: 48857 - DNA, 60 bp, Artificial
  Synthetic oligonucleotide
ggtatcatgccaacaattcaacaacacaggtagatacgatacttgagaagaatgtgactg

SEQ ID NO: 48858 - DNA, 60 bp, Artificial
  Synthetic oligonucleotide
caagatctgcattgggtatcatgccaacaattcaacaacacaggtagatacgatacttga

SEQ ID NO: 48859 - DNA, 60 bp, Artificial
  Synthetic oligonucleotide
gtaatagcaatactggcagcagccggaaagtcagacaagatctgcattgggtatcatgcc

SEQ ID NO: 48860 - DNA, 60 bp, Artificial
  Synthetic oligonucleotide
atgattgcaatcattgtaatagcaatactggcagcagccggaaagtcagacaagatctgc

SEQ ID NO: 48861 - DNA, 60 bp, Artificial
  Synthetic oligonucleotide
agattctgcaagatattgaacaaggcccctctcgacttaagggaatgtaccatagatggt

SEQ ID NO: 48862 - DNA, 60 bp, Artificial
  Synthetic oligonucleotide
aatcagaaggaagaaagattctgcaagatattgaacaaggcccctctcgacttaagggaa

SEQ ID NO: 48863 - DNA, 56 bp, Artificial
  Synthetic oligonucleotide
gactgtcacacactcaattgagttgctggaaaatcagaaggaagaaagattctgca

SEQ ID NO: 48864 - DNA, 60 bp, Artificial
  Synthetic oligonucleotide
cgatacttgagaagaatgtgactgtcacacactcaattgagttgctggaaaatcagaagg

SEQ ID NO: 48865 - DNA, 60 bp, Artificial
  Synthetic oligonucleotide
gtaaaggagccgtcttcaggtcaaatttaccaatcgagaactgcgatgccacatgccaga

SEQ ID NO: 48866 - DNA, 60 bp, Artificial
  Synthetic oligonucleotide
ttgtcaacacaaacagtaaaggagccgtcttcaggtcaaatttaccaatcgagaactgcg

SEQ ID NO: 48867 - DNA, 60 bp, Artificial
  Synthetic oligonucleotide
acctattgcttggtgatcaaagctggtcatacattgtggaaagacctactgctcaaaatg

SEQ ID NO: 48868 - DNA, 60 bp, Artificial
  Synthetic oligonucleotide
cttaagggaatgtaccatagatggttggatcttggggaatccccaatgcgacctattgct

SEQ ID NO: 48869 - DNA, 60 bp, Artificial
  Synthetic oligonucleotide
acgtgaagagtgaaagtctgaggcttgcaactggactaagaaatgttccacagattgaaa

SEQ ID NO: 48870 - DNA, 60 bp, Artificial
  Synthetic oligonucleotide
tgtgagtcccctgtggataggagaatgtcccaaatacgtgaagagtgaaagtctgaggct

SEQ ID NO: 48871 - DNA, 60 bp, Artificial
  Synthetic oligonucleotide
cagattgaaactagaggactcttcggagctattgcggggtttattgaaggaggatggact

SEQ ID NO: 48872 - DNA, 60 bp, Artificial
  Synthetic oligonucleotide
gtctgaggcttgcaactggactaagaaatgttccacagattgaaactagaggactcttcg

SEQ ID NO: 48873 - DNA, 60 bp, Artificial
  Synthetic oligonucleotide
atcaaagctggtcatacattgtggaaagacctactgctcaaaatgggatctgctacccag

SEQ ID NO: 48874 - DNA, 60 bp, Artificial
  Synthetic oligonucleotide
aggatggactgggatgatagatgggtggtatggctatcaccatgaaaattctcaaggatc

SEQ ID NO: 48875 - DNA, 60 bp, Artificial
  Synthetic oligonucleotide
gacagcagaatatccagtaattaagggaacttacaacaacactggaacccagccaatcct

SEQ ID NO: 48876 - DNA, 60 bp, Artificial
  Synthetic oligonucleotide
cagtaattaagggaacttacaacaacactggaacccagccaatcctctatttctggggtg

SEQ ID NO: 48877 - DNA, 60 bp, Artificial
  Synthetic oligonucleotide
taaaacatttcagaatgtgagtcccctgtggataggagaatgtcccaaatacgtgaagag

SEQ ID NO: 48878 - DNA, 60 bp, Artificial
  Synthetic oligonucleotide
gctgaactgttggttcttcttgaaaacgaaagaacactagacatgcatgatgcgaatgtg

SEQ ID NO: 48879 - DNA, 60 bp, Artificial
  Synthetic oligonucleotide
atgcatgatgcgaatgtgaagaacctacatgaaaaggtcaaatcacaactaagggacaat

SEQ ID NO: 48880 - DNA, 60 bp, Artificial
  Synthetic oligonucleotide
gaatgtggaatctaatggaaatctaatcgccccttggtatgcatacaaatttgtcaacac

SEQ ID NO: 48881 - DNA, 60 bp, Artificial
  Synthetic oligonucleotide
tggaaatctaatcgccccttggtatgcatacaaatttgtcaacacaaacagtaaaggagc

SEQ ID NO: 48882 - DNA, 60 bp, Artificial
  Synthetic oligonucleotide
caaggatcaggatatgcagcagacaaagaaagcactcaaaaggctgtaaacagaattaca

SEQ ID NO: 48883 - DNA, 60 bp, Artificial
  Synthetic oligonucleotide
aacagaattacaaataaggtcaattccatcatcaacaaaatgaacacacaatttgaagct

SEQ ID NO: 48884 - DNA, 60 bp, Artificial
  Synthetic oligonucleotide
agccaatcctctatttctggggtgtgcatcatcctcctaacaccgacgagcaggatactc

SEQ ID NO: 48885 - DNA, 60 bp, Artificial
  Synthetic oligonucleotide
tctggggtgtgcatcatcctcctaacaccgacgagcaggatactctgtatggctctggtt

SEQ ID NO: 48886 - DNA, 60 bp, Artificial
  Synthetic oligonucleotide
ctgtcgaccacgaattttcaaatctggagaggagaattgacaatctgaacaaaagaatgc

SEQ ID NO: 48887 - DNA, 60 bp, Artificial
  Synthetic oligonucleotide
catacaatgctgaactgttggttcttcttgaaaacgaaagaacactagacatgcatgatg

SEQ ID NO: 48888 - DNA, 58 bp, Artificial
  Synthetic oligonucleotide
ttcccccaaagcacctggcaaggagttgacaccaacagtggaacaacaagatcctgcc

SEQ ID NO: 48889 - DNA, 60 bp, Artificial
  Synthetic oligonucleotide
gctcaaaatgggatctgctacccaggaaccttaaatgaggtagaagaactgagggcattt

SEQ ID NO: 48890 - DNA, 60 bp, Artificial
  Synthetic oligonucleotide
ggactcttcggagctattgcggggtttattgaaggaggatggactgggatgatagatggg

SEQ ID NO: 48891 - DNA, 60 bp, Artificial
  Synthetic oligonucleotide
ctcaaggatcaggatatgcagcagacaaagaaagcactcaaaaggctgtaaacagaatta

SEQ ID NO: 48892 - DNA, 60 bp, Artificial
  Synthetic oligonucleotide
caaataaggtcaattccatcatcaacaaaatgaacacacaatttgaagctgtcgaccacg

SEQ ID NO: 48893 - DNA, 55 bp, Artificial
  Synthetic oligonucleotide
ccccaaagcacctggcaaggagttgacaccaacagtggaacaacaagatcctgcc

SEQ ID NO: 48894 - DNA, 60 bp, Artificial
  Synthetic oligonucleotide
atttgaagctgtcgaccacgaattttcaaatctggagaggagaattgacaatctgaacaa

SEQ ID NO: 48895 - DNA, 60 bp, Artificial
  Synthetic oligonucleotide
gggctgatcatggcaatgggtctttggatgtgttcaaatggttcaatgcagtgcaatgtg

SEQ ID NO: 48896 - DNA, 60 bp, Artificial
  Synthetic oligonucleotide
ttggtagggctgatcatggcaatgggtctttggatgtgttcaaatggttcaatgcagtgc

SEQ ID NO: 48897 - DNA, 60 bp, Artificial
  Synthetic oligonucleotide
ttgccatttatagtacggtatcgagcagcctagtgttggtagggctgatcatggcaatgg

SEQ ID NO: 48898 - DNA, 60 bp, Artificial
  Synthetic oligonucleotide
gtgtgtatcaaattcttgccatttatagtacggtatcgagcagcctagtgttggtagggc

SEQ ID NO: 48899 - DNA, 60 bp, Artificial
  Synthetic oligonucleotide
gtacatatgactatcccaaataccagactgaaagcaaattaaacaggctaaaaatagaat

SEQ ID NO: 48900 - DNA, 60 bp, Artificial
  Synthetic oligonucleotide
gggacaatgctaacgatctagggaatggttgctttgaattttggcataagtgtgacaatg

SEQ ID NO: 48901 - DNA, 60 bp, Artificial
  Synthetic oligonucleotide
aagggacaatgctaacgatctagggaatggttgctttgaattttggcataagtgtgacaa

SEQ ID NO: 48902 - DNA, 60 bp, Artificial
  Synthetic oligonucleotide
gtgaagaacctacatgaaaaggtcaaatcacaactaagggacaatgctaacgatctaggg

SEQ ID NO: 48903 - DNA, 60 bp, Artificial
  Synthetic oligonucleotide
ggactgggatgatagatgggtggtatggctatcaccatgaaaattctcaaggatcaggat

SEQ ID NO: 48904 - DNA, 60 bp, Artificial
  Synthetic oligonucleotide
gagaactgcgatgccacatgccagactattgcgggggttctaaggaccaataaaacattt

SEQ ID NO: 48905 - DNA, 60 bp, Artificial
  Synthetic oligonucleotide
agtcttctaaccgaggtcgaaacgtacgttctctctatcatcccatcaggccccctcaaa

SEQ ID NO: 48906 - DNA, 60 bp, Artificial
  Synthetic oligonucleotide
cctggtcttgttagtctccctgggggcaatcagcttctggatgtgttctaatgggtcatt

SEQ ID NO: 48907 - DNA, 60 bp, Artificial
  Synthetic oligonucleotide
tttcaggtagattgctttctttggcatgtccgcaaacgagttgcagaccaagaactaggt

SEQ ID NO: 48908 - DNA, 60 bp, Artificial
  Synthetic oligonucleotide
ctgtgtcaagctttcaggtagattgctttctttggcatgtccgcaaacgagttgcagacc

SEQ ID NO: 48909 - DNA, 60 bp, Artificial
  Synthetic oligonucleotide
tccaaacactgtgtcaagctttcaggtagattgctttctttggcatgtccgcaaacgagt

SEQ ID NO: 48910 - DNA, 60 bp, Artificial
  Synthetic oligonucleotide
tgtcgcaatctcgcacacgcgagatactgacaaaaaccactgtggatcatatggccataa

SEQ ID NO: 48911 - DNA, 60 bp, Artificial
  Synthetic oligonucleotide
tgtcgcaatctcgcactcgcgagatactgacaaaaaccactgtggatcatatggccataa

SEQ ID NO: 48912 - DNA, 60 bp, Artificial
  Synthetic oligonucleotide
gcaagccttacaactattgcttgaggtggagcaagagataagaactttctcgtttcagct

SEQ ID NO: 48913 - DNA, 60 bp, Artificial
  Synthetic oligonucleotide
tatgcaagccttacaactattgcttgaggtggagcaagagataagaactttctcgtttca

SEQ ID NO: 48914 - DNA, 60 bp, Artificial
  Synthetic oligonucleotide
atggaagtcgcaagtcaggctaggcaaatggtgcaggcaatgaggacaattgggactcac

SEQ ID NO: 48915 - DNA, 60 bp, Artificial
  Synthetic oligonucleotide
agccatggaagtcgcaagtcaggctaggcaaatggtgcaggcaatgaggacaattgggac

SEQ ID NO: 48916 - DNA, 55 bp, Artificial
  Synthetic oligonucleotide
atttccagagaaagagaagagtgagggacaacatgaccaagaaaatggtcacaca

SEQ ID NO: 48917 - DNA, 58 bp, Artificial
  Synthetic oligonucleotide
cacatttccagagaaagagaagagtgagggacaacatgaccaagaaaatggtcacaca

SEQ ID NO: 48918 - DNA, 60 bp, Artificial
  Synthetic oligonucleotide
acataaaagtcaactggtatggatggcatgccattctgcagcatttgaagatctgagggt

SEQ ID NO: 48919 - DNA, 60 bp, Artificial
  Synthetic oligonucleotide
cctttgacatgagtaatgaaggatcttatttcttcggagacaatgcagaggaatatgaca

SEQ ID NO: 48920 - DNA, 60 bp, Artificial
  Synthetic oligonucleotide
cctttgacatgagtaatgaaggatcttatttcttcggagacaatgcggaggagtatgaca

SEQ ID NO: 48921 - DNA, 60 bp, Artificial
  Synthetic oligonucleotide
agaagatcattcgagctgaagaagctgtgggagcagacccgttcaaaggcaggactgttg

SEQ ID NO: 48922 - DNA, 60 bp, Artificial
  Synthetic oligonucleotide
aaacgagaagatcattcgagctgaagaagctgtgggagcagacccgttcaaaggcaggac

SEQ ID NO: 48923 - DNA, 60 bp, Artificial
  Synthetic oligonucleotide
tcccaacgaggagatcattcgagctgaagaagctgtgggagcagactcgttcaaaagcag

SEQ ID NO: 48924 - DNA, 60 bp, Artificial
  Synthetic oligonucleotide
tccaaacgaggagatcattcgagctgaagaagctgtgggagcagacccgttcaaaggcag

SEQ ID NO: 48925 - DNA, 60 bp, Artificial
  Synthetic oligonucleotide
tccaaacgaggagatcattcgagctgaagaagctgtgggagcagacccattcaaaggcag

SEQ ID NO: 48926 - DNA, 60 bp, Artificial
  Synthetic oligonucleotide
aagtacacatcaggaagacaagagaagaatcccgctcttagaatgaaatggatgatggcg

SEQ ID NO: 48927 - DNA, 60 bp, Artificial
  Synthetic oligonucleotide
atggcgtctcaaggcaccaaacgatcttacgaacagatggaaactggtggagaacgccag

SEQ ID NO: 48928 - DNA, 60 bp, Artificial
  Synthetic oligonucleotide
atggcgtctcaaggcaccaaacgaccttatgaacagatggaaactggtggagaacgccag

SEQ ID NO: 48929 - DNA, 60 bp, Artificial
  Synthetic oligonucleotide
ctgagaggattcctaattttaggcaaggaggacaaaagatatggaccagcattgagcatc

SEQ ID NO: 48930 - DNA, 60 bp, Artificial
  Synthetic oligonucleotide
ctgaggggattcctaattctaggcaaggagaacaaaagatatggaccagcattgagcatc

SEQ ID NO: 48931 - DNA, 60 bp, Artificial
  Synthetic oligonucleotide
atacagagggcagaacatctgacatgaggactgaaatcataagaatgatggaaagcgcca

SEQ ID NO: 48932 - DNA, 60 bp, Artificial
  Synthetic oligonucleotide
caacaaacaagagtggataaactgacccaaggtcgccagacctatgactggacattgaat

SEQ ID NO: 48933 - DNA, 60 bp, Artificial
  Synthetic oligonucleotide
gaagggaaacagtttctgctctctctgaagataacctctttttcgaggaataaactgtac

SEQ ID NO: 48934 - DNA, 60 bp, Artificial
  Synthetic oligonucleotide
tcagagggggatgactctctaccaacgggtccggatgatcctatgtttggaatttctgat

SEQ ID NO: 48935 - DNA, 60 bp, Artificial
  Synthetic oligonucleotide
aacatgagacgactccatatgtccgagcacgccatgatggaaagaagacaggtcttccta

SEQ ID NO: 48936 - DNA, 60 bp, Artificial
  Synthetic oligonucleotide
tcagtcatcacctgcctaacgtcaagccttcaatcatttgcagaggggaacccagtgaga

SEQ ID NO: 48937 - DNA, 60 bp, Artificial
  Synthetic oligonucleotide
gcattagggaatcaaatctaccccagcatcagtcatcacctgcctaacgtcaagccttca

SEQ ID NO: 48938 - DNA, 60 bp, Artificial
  Synthetic oligonucleotide
gattgaatgcattagggaatccaaatctaccccagcatcagtcatcacctgcctaacgtc

SEQ ID NO: 48939 - DNA, 60 bp, Artificial
  Synthetic oligonucleotide
cactgaggttgatggagtagcagaagggctggtggacaagtacatagtgatagtgggcag

SEQ ID NO: 48940 - DNA, 60 bp, Artificial
  Synthetic oligonucleotide
cagcatcaatttactcacaagttgtactctctagggcagctgagaacaacagcctcaatt

SEQ ID NO: 48941 - DNA, 60 bp, Artificial
  Synthetic oligonucleotide
cgatttacactgaggttgatggagtagcagaagggctggtggacaagtacatagagatag

SEQ ID NO: 48942 - DNA, 60 bp, Artificial
  Synthetic oligonucleotide
agctagagaaaaatgcgatttacactgaggttgatggagtagcagaagggctggtggaca

SEQ ID NO: 48943 - DNA, 60 bp, Artificial
  Synthetic oligonucleotide
cgctgcttatagcggagataatgggagaagacacagaagagaagtaccctaagcacagcg

SEQ ID NO: 48944 - DNA, 60 bp, Artificial
  Synthetic oligonucleotide
acagtttctgctctctctgaagataacctctttttcgaggaataaactgtacacattctc

SEQ ID NO: 48945 - DNA, 60 bp, Artificial
  Synthetic oligonucleotide
ctggtggacaagtacatagagatagtgggcagaacaaaagtggcatctgtcatagaaaaa

SEQ ID NO: 48946 - DNA, 60 bp, Artificial
  Synthetic oligonucleotide
ggggatggtactgcttgggccccatcatgtaaagagagacacagacaatgctccgctgct

SEQ ID NO: 48947 - DNA, 60 bp, Artificial
  Synthetic oligonucleotide
gagagacacagacaatgctccgctgcttatagcggagataatgggagaagacacagaaga

SEQ ID NO: 48948 - DNA, 60 bp, Artificial
  Synthetic oligonucleotide
ccacaatatgatgtcttcaagtggcaggacaggagcaccatagaatggatatgtagcaag

SEQ ID NO: 48949 - DNA, 60 bp, Artificial
  Synthetic oligonucleotide
cccaagtccacggacacgtcaggagagtggtagaatgctggaaatacaccatatgctgtc

SEQ ID NO: 48950 - DNA, 60 bp, Artificial
  Synthetic oligonucleotide
cgggcagttgcatacaaggtacttctggtttctgatctctctgaccattctcctacatca

SEQ ID NO: 48951 - DNA, 60 bp, Artificial
  Synthetic oligonucleotide
ttaccacgacctagccttcaatttagaaggggaggcagaagaatcttgtgcattggtgct

SEQ ID NO: 48952 - DNA, 60 bp, Artificial
  Synthetic oligonucleotide
tcctacatcaggcatttaccacgacctagccttcaatttagaaggggaggcagaagaatc

SEQ ID NO: 48953 - DNA, 60 bp, Artificial
  Synthetic oligonucleotide
aaggggtttttgtgcagggcactggaatgggttgtgtcaaacaatctaacacaggaggtt

SEQ ID NO: 48954 - DNA, 60 bp, Artificial
  Synthetic oligonucleotide
cagaagaatcttgtgcattggtgctaagagggagccaactgcaagacataaaggggtttt

SEQ ID NO: 48955 - DNA, 60 bp, Artificial
  Synthetic oligonucleotide
acaggaggttgtggaaactatcagtggggaggccaagctccaattttctgtaggcaccac

SEQ ID NO: 48956 - DNA, 60 bp, Artificial
  Synthetic oligonucleotide
cagggcactggaatgggttgtgtcaaacaatctaacacaggaggttgtggaaactatcag

SEQ ID NO: 48957 - DNA, 60 bp, Artificial
  Synthetic oligonucleotide
tggatcacccaagtccacggacacgtcaggagagtggtagaatgctggaaatacaccata

SEQ ID NO: 48958 - DNA, 57 bp, Artificial
  Synthetic oligonucleotide
gcctaatgtgtactactagagaggggtattgcaagaaaaaagtgctttgatttctct

SEQ ID NO: 48959 - DNA, 60 bp, Artificial
  Synthetic oligonucleotide
ggcaaaaggctggaacagcatgcctaatgtgtactactagagaggggtattgcaagaaaa

SEQ ID NO: 48960 - DNA, 60 bp, Artificial
  Synthetic oligonucleotide
cgactccatatgtccgagcacgccatgatggaaagaagacaggtcttcctaccttttggg

SEQ ID NO: 48961 - DNA, 60 bp, Artificial
  Synthetic oligonucleotide
cacaagttgtactctctagggcagctgagaacaacagcctcaatttagaggtaaacccag

SEQ ID NO: 48962 - DNA, 60 bp, Artificial
  Synthetic oligonucleotide
tacactgaggttgatggagtagcagaagggctggtggacaagtacatagtgatagtgggc

SEQ ID NO: 48963 - DNA, 60 bp, Artificial
  Synthetic oligonucleotide
aacaagcacttgacatgacagacaggcccgaccacatagacagcagagtatgggagctgt

SEQ ID NO: 48964 - DNA, 60 bp, Artificial
  Synthetic oligonucleotide
gccacccggaccttctcacaactgcacaccgaaatcgtagcagaaattacagcttgcccc

SEQ ID NO: 48965 - DNA, 60 bp, Artificial
  Synthetic oligonucleotide
ccgatcgtagcagaattacagcttgccccataatcaccagagacccatcaggcaattgcc

SEQ ID NO: 48966 - DNA, 60 bp, Artificial
  Synthetic oligonucleotide
gtgggcagaacaaaagtggcatctgtcatagagaaatggcaaattgttgccacccggacc

SEQ ID NO: 48967 - DNA, 60 bp, Artificial
  Synthetic oligonucleotide
catagaaaaatggcaaattgctgccacccggaccttctcacaactgcacaccgatcgtag

SEQ ID NO: 48968 - DNA, 60 bp, Artificial
  Synthetic oligonucleotide
gcaaattgctgccacccggaccttctcacaactgcacaccgatcgtagcagaattacagc

SEQ ID NO: 48969 - DNA, 60 bp, Artificial
  Synthetic oligonucleotide
aatttctgatggcaatttacaacaaccctcagatggaaggctttcttgcaaacatgagac

SEQ ID NO: 48970 - DNA, 60 bp, Artificial
  Synthetic oligonucleotide
gatggcaatttacaacaaccctcagatggaaggctttcttgcaaacatgagacgactcca

SEQ ID NO: 48971 - DNA, 60 bp, Artificial
  Synthetic oligonucleotide
ggggatgactctctaccaacgggtccggatgatcctatgtttggaatttctgatggcaat

SEQ ID NO: 48972 - DNA, 60 bp, Artificial
  Synthetic oligonucleotide
acagcttgccccataatcaccagagacccatcaggcaattgccaattctgggggatggta

SEQ ID NO: 48973 - DNA, 60 bp, Artificial
  Synthetic oligonucleotide
ggcaattgccaattctgggggatggtgctgcttgggccccatcatgtaaagagagacaca

SEQ ID NO: 48974 - DNA, 60 bp, Artificial
  Synthetic oligonucleotide
agcctcaatttagaggtaaacccagagatccagctgtacctagaaggcgctcagaggggg

SEQ ID NO: 48975 - DNA, 60 bp, Artificial
  Synthetic oligonucleotide
ggcaccactttcaggaccttactgaagagagacacagattgggatgtgatacctactccc

SEQ ID NO: 48976 - DNA, 60 bp, Artificial
  Synthetic oligonucleotide
gtggaaactatcagtggggaggccaagctccaattttctgtaggcaccactttcaggacc

SEQ ID NO: 48977 - DNA, 60 bp, Artificial
  Synthetic oligonucleotide
cgagtgtcccccggaacagaccaagaggccatctcttggatacactctcagtctgagatt

SEQ ID NO: 48978 - DNA, 60 bp, Artificial
  Synthetic oligonucleotide
atacatcgtgtgtccccccggaacagaccaagaggccatctcttggatacactctcagtc

SEQ ID NO: 48979 - DNA, 60 bp, Artificial
  Synthetic oligonucleotide
tttacaacaaccctcagatggaaggctttcttgcaaacatgagacgactccatatgtccg

SEQ ID NO: 48980 - DNA, 60 bp, Artificial
  Synthetic oligonucleotide
actctcagtctgagattgaatgcattagggaatccaaatctaccccagcatcagtcatca

SEQ ID NO: 48981 - DNA, 60 bp, Artificial
  Synthetic oligonucleotide
gtctgagattgaatgcattagggaatcaaatctaccccagcatcagtcatcacctgccta

SEQ ID NO: 48982 - DNA, 60 bp, Artificial
  Synthetic oligonucleotide
gtaaagattcaatggtctcaagatcccacaatgctatacaataagatggagtttgaacca

SEQ ID NO: 48983 - DNA, 60 bp, Artificial
  Synthetic oligonucleotide
tgtcatcatggaggtcgttttcccaaatgaagtgggggctagaatattgacatcagaatc

SEQ ID NO: 48984 - DNA, 60 bp, Artificial
  Synthetic oligonucleotide
tgtcatcatggaggtcgttttcccaaatgaagtgggagctagaacattgacatcagagtc

SEQ ID NO: 48985 - DNA, 60 bp, Artificial
  Synthetic oligonucleotide
tgtcatcatggaggtcgttttcccaaatgaagttggagccaggatattgacatcagagtc

SEQ ID NO: 48986 - DNA, 53 bp, Artificial
  Synthetic oligonucleotide
gagagaatggttctctctgcatttgatgaaaggaggaacaggtacctagagga

SEQ ID NO: 48987 - DNA, 60 bp, Artificial
  Synthetic oligonucleotide
ctggcccagacaatggggctgtggctgtattgaaatacaatggcataataacagacacta

SEQ ID NO: 48988 - DNA, 60 bp, Artificial
  Synthetic oligonucleotide
ggcccagacaatggggctgtggctgtattgaaatacaatggcataataacagacactatc

SEQ ID NO: 48989 - DNA, 60 bp, Artificial
  Synthetic oligonucleotide
agaactgggtgatgccccattccttgaccgggtttgccgagatcagaagtccctaagagg

SEQ ID NO: 48990 - DNA, 60 bp, Artificial
  Synthetic oligonucleotide
cagtgtgcctagctgctttaaatacaccttgtctcggaatagaaccattcaggacaaacc

SEQ ID NO: 48991 - DNA, 60 bp, Artificial
  Synthetic oligonucleotide
gatcatggaagactacagtgtgcctagctgctttaaatacaccttgtctcggaatagaac

SEQ ID NO: 48992 - DNA, 60 bp, Artificial
  Synthetic oligonucleotide
aggctgggaatgttcatgggaatgtacaacctcacgtcgactctgcttgcactgatctca

SEQ ID NO: 48993 - DNA, 60 bp, Artificial
  Synthetic oligonucleotide
cgatcttgtgaggaatgtggtgggcaacagcatttcgtgcaggctgggaatgttcatggg

SEQ ID NO: 48994 - DNA, 60 bp, Artificial
  Synthetic oligonucleotide
cagagtttgacgatcttgtgaggaatgtggtgggcaacagcatttcgtgcaggctgggaa

SEQ ID NO: 48995 - DNA, 60 bp, Artificial
  Synthetic oligonucleotide
gggaaactcactgacagaaaaccattgggagaaatgccttcagagtttgacgatcttgtg

SEQ ID NO: 48996 - DNA, 60 bp, Artificial
  Synthetic oligonucleotide
ctggacgaagtggcactcagacgccatctgggccttctagacgaagagaccctgaggaga

SEQ ID NO: 48997 - DNA, 60 bp, Artificial
  Synthetic oligonucleotide
aagtcaaagttagcagacatgggagaaggattagtatacaccaaagggaaactcactgac

SEQ ID NO: 48998 - DNA, 60 bp, Artificial
  Synthetic oligonucleotide
ccatttatggtattcaagtcaaagttagcagacatgggagaaggattagtatacaccaaa

SEQ ID NO: 48999 - DNA, 60 bp, Artificial
  Synthetic oligonucleotide
tagacgaagagaccctgaggagaatactgaacccgaacaacccagttactcaaaaggggg

SEQ ID NO: 49000 - DNA, 60 bp, Artificial
  Synthetic oligonucleotide
ggggacccttccatgttctttagaatagagaacaagatgccccagatcatggaagactac

SEQ ID NO: 49001 - DNA, 60 bp, Artificial
  Synthetic oligonucleotide
ggacccagatgcaatgcgcctcatgtggaccgtgttcttgagaaagctagggtgccctga

SEQ ID NO: 49002 - DNA, 60 bp, Artificial
  Synthetic oligonucleotide
actgcaagacacatgaagagatgttcaaacaggcggagacactccgactgactttgaaac

SEQ ID NO: 49003 - DNA, 60 bp, Artificial
  Synthetic oligonucleotide
atactatgtgcaaacacctagagagagggaggttaaacagaaggaccatagctaccccca

SEQ ID NO: 49004 - DNA, 60 bp, Artificial
  Synthetic oligonucleotide
ggcatcaacatgtctccttccaaatgcatattgatcagccctgcagggataggagagttc

SEQ ID NO: 49005 - DNA, 60 bp, Artificial
  Synthetic oligonucleotide
cagccctgcagggataggagagttcaactccaaattccatcaccgtgactttgtggggaa

SEQ ID NO: 49006 - DNA, 60 bp, Artificial
  Synthetic oligonucleotide
cttagaacaaaatctaagaagaaaaataggcccaaccctcctatcttactgccaggcgat

SEQ ID NO: 49007 - DNA, 53 bp, Artificial
  Synthetic oligonucleotide
aaaataggcccaaccctcctatcttactgccaggcgattgcagacgtgatgga

SEQ ID NO: 49008 - DNA, 60 bp, Artificial
  Synthetic oligonucleotide
gcaatcacccctctgctgacaaatcagggggcctccccagtacacagcttctccaccatg

SEQ ID NO: 49009 - DNA, 60 bp, Artificial
  Synthetic oligonucleotide
gcactggagcattagccatgagaatcttcaaccatgcctacaaatatgcatatatggcat

SEQ ID NO: 49010 - DNA, 60 bp, Artificial
  Synthetic oligonucleotide
gccatgagaatcttcaaccatgcctacaaatatgcatatatggcattaggggtaaccaga

SEQ ID NO: 49011 - DNA, 60 bp, Artificial
  Synthetic oligonucleotide
atacaccaaagggaaactcactgacagaaaaccattgggagaaatgccttcagagtttga

SEQ ID NO: 49012 - DNA, 60 bp, Artificial
  Synthetic oligonucleotide
cagccaaagagatcctcgagaatgtccctacctctggagtgccagtgggaggagaagaaa

SEQ ID NO: 49013 - DNA, 60 bp, Artificial
  Synthetic oligonucleotide
ggagaagaaaaattggccaagctcgccagcaagcaaacctttcacacagcagtcacagga

SEQ ID NO: 49014 - DNA, 60 bp, Artificial
  Synthetic oligonucleotide
actttgaaactagttggcatcaacatgtctccttccaaatgcatattgatcagccctgca

SEQ ID NO: 49015 - DNA, 60 bp, Artificial
  Synthetic oligonucleotide
gccaggcgattgcagacgtgatggagctagatgagaccacttatgaaggcgcgagagatc

SEQ ID NO: 49016 - DNA, 60 bp, Artificial
  Synthetic oligonucleotide
cagacgtgatggagctagatgagaccacttatgaaggcgcgagagatcccaggccctggg

SEQ ID NO: 49017 - DNA, 60 bp, Artificial
  Synthetic oligonucleotide
ggataggagagttcaactccaaattccatcaccgtgactttgtggggaacgtggccaccg

SEQ ID NO: 49018 - DNA, 56 bp, Artificial
  Synthetic oligonucleotide
ttgtggggaacgtggccaccgaactaccagcattggttccgaatgggacaaaccca

SEQ ID NO: 49019 - DNA, 60 bp, Artificial
  Synthetic oligonucleotide
gggcctaaatgtgatcaagcattctgtcaacaccggtcaaatgaacctatgcactggagc

SEQ ID NO: 49020 - DNA, 60 bp, Artificial
  Synthetic oligonucleotide
cggtcagagagagccttaagagaaggcttgagctggtggtggagaggtctgacctggacg

SEQ ID NO: 49021 - DNA, 60 bp, Artificial
  Synthetic oligonucleotide
gtgacctctatcataaacaagctgttccccgaggtgctcatccaagaggcatctgctcca

SEQ ID NO: 49022 - DNA, 60 bp, Artificial
  Synthetic oligonucleotide
aacaagctgttccccgaggtgctcatccaagaggcatctgctccaggcacggtcagagag

SEQ ID NO: 49023 - DNA, 60 bp, Artificial
  Synthetic oligonucleotide
aggatcttctgaatgggcacatcactacactagttttcttttgtaaaaaagcgccttgat

SEQ ID NO: 49024 - DNA, 60 bp, Artificial
  Synthetic oligonucleotide
tggtggagaggtctgacctggacgaggagaggaagaagaggatcctttccaggatcttct

SEQ ID NO: 49025 - DNA, 60 bp, Artificial
  Synthetic oligonucleotide
gttcaatgagtgtttggacccagatgcaatgcgcctcatgtggaccgtgttcttgagaaa

SEQ ID NO: 49026 - DNA, 60 bp, Artificial
  Synthetic oligonucleotide
gcagtattagagaacataatcagaccttaccaatacttctacaaagaacccaatgtccag

SEQ ID NO: 49027 - DNA, 60 bp, Artificial
  Synthetic oligonucleotide
tctacaaagaacccaatgtccagagagctctagacatcaagacaggatgcaaggagccag

SEQ ID NO: 49028 - DNA, 60 bp, Artificial
  Synthetic oligonucleotide
ggtcctagcagtggatttcacaccgcaagtgtgttaaagctagctgacaatttctttaga

SEQ ID NO: 49029 - DNA, 60 bp, Artificial
  Synthetic oligonucleotide
tttctttagaaaatacaggcctgctatggaaaaattgaagtactggatacttgtaaagct

SEQ ID NO: 49030 - DNA, 50 bp, Artificial
  Synthetic oligonucleotide
agcaaaaacaggcgctccaaacacaatgaacctgttcaccccacgctcag

SEQ ID NO: 49031 - DNA, 60 bp, Artificial
  Synthetic oligonucleotide
tcttgagaaagctagggtgccctgactggataatggagttgttcaatataccatttatgg

SEQ ID NO: 49032 - DNA, 60 bp, Artificial
  Synthetic oligonucleotide
ggagctactatacgcctacacaggaccggcgcccgttgcttatggcacaagaaccagagc

SEQ ID NO: 49033 - DNA, 60 bp, Artificial
  Synthetic oligonucleotide
cacaagaaccagagcagtattagagaacataatcagaccttaccaatacttctacaaaga

SEQ ID NO: 49034 - DNA, 60 bp, Artificial
  Synthetic oligonucleotide
ttgtaaagcttccgaagctcaagtatgcagagctgagcaagggcaggcagacctacagtt

SEQ ID NO: 49035 - DNA, 60 bp, Artificial
  Synthetic oligonucleotide
cttccgaagctcaagtatgcagagctgagcaagggcaggcagacctacagttttatacac

SEQ ID NO: 49036 - DNA, 60 bp, Artificial
  Synthetic oligonucleotide
actcaggagctactatacgcctacacaggaccggcgcccgttgcttatggcacaagaacc

SEQ ID NO: 49037 - DNA, 60 bp, Artificial
  Synthetic oligonucleotide
ctccaccatgcatctggacgaagtggcactcagacgccatctgggccttctagacgaaga

SEQ ID NO: 49038 - DNA, 60 bp, Artificial
  Synthetic oligonucleotide
atctgctccaggcacggtcagagagagccttaagagaaggcttgagctggtggtggagag

SEQ ID NO: 49039 - DNA, 58 bp, Artificial
  Synthetic oligonucleotide
aaaattggccaagctcgccagcaagcaaacctttcacacagcagtcacaggagagctg

SEQ ID NO: 49040 - DNA, 53 bp, Artificial
  Synthetic oligonucleotide
aaaacggaacgtatgactacccgcagtattcagaagaagcaagactaaacaga

SEQ ID NO: 49041 - DNA, 60 bp, Artificial
  Synthetic oligonucleotide
atgagtcttctaaccgaggtcgaaacgtacgttctctctatcatcccatcaggccccctc

SEQ ID NO: 49042 - DNA, 57 bp, Artificial
  Synthetic oligonucleotide
atgagtcttctaaccgaggtcgaaacgtacgttctctctatcatcccatcaggcccc

SEQ ID NO: 49043 - DNA, 60 bp, Artificial
  Synthetic oligonucleotide
aagatgagtcttctaaccgaggtcgaaacgtacgttctctctatcatcccatcaggcccc

SEQ ID NO: 49044 - DNA, 60 bp, Artificial
  Synthetic oligonucleotide
ggcgtctcaaggcaccaagcgatcttatgaacagatggaaactggtggagaacgccagaa

SEQ ID NO: 49045 - DNA, 60 bp, Artificial
  Synthetic oligonucleotide
gaccggtttcgccgagatcagaagtccctaagaggaagaggcagcactcttggtctggac

SEQ ID NO: 49046 - DNA, 60 bp, Artificial
  Synthetic oligonucleotide
atcggcttcgccgagatcagaagtccctaagaggaagaggcagcactcttggtctggaaa

SEQ ID NO: 49047 - DNA, 60 bp, Artificial
  Synthetic oligonucleotide
cggcttcgccgagatcagaagtccctaagaggaagaggcagcactcttggtctggacatc

SEQ ID NO: 49048 - DNA, 60 bp, Artificial
  Synthetic oligonucleotide
gaccggcttcgccgagatcagaagtccctaagaggaagaggcagcactcttggtctggac

SEQ ID NO: 49049 - DNA, 60 bp, Artificial
  Synthetic oligonucleotide
accggcttcgccgagatcagaagtccctaagaggaagaggcagcactcttggtctggaca

SEQ ID NO: 49050 - DNA, 60 bp, Artificial
  Synthetic oligonucleotide
ggcttcgccgagatcagaagtccctaagaggaagaggcagcactcttggtctggaaatcg

SEQ ID NO: 49051 - DNA, 60 bp, Artificial
  Synthetic oligonucleotide
attttgagggattgtagtgtagctggatggctcctcggaaaccctatgtgtgacgaattc

SEQ ID NO: 49052 - DNA, 60 bp, Artificial
  Synthetic oligonucleotide
ctcctgttatcctgatgctggcgaaatcacatgtgtgtgcagggataactggcatggctc

SEQ ID NO: 49053 - DNA, 60 bp, Artificial
  Synthetic oligonucleotide
ctgtgtcaagctttcaggtagattgctttctttggcatgtccgcaaacgatttgcagacc

SEQ ID NO: 49054 - DNA, 60 bp, Artificial
  Synthetic oligonucleotide
tgcttgaagtggagcaagagataagaactttctcgtttcagcttatttaatgataaaaaa

SEQ ID NO: 49055 - DNA, 60 bp, Artificial
  Synthetic oligonucleotide
agcaaaagcagggtgacaaagacataatggatccaaacactgtgtcaagctttcaggtag

SEQ ID NO: 49056 - DNA, 60 bp, Artificial
  Synthetic oligonucleotide
cgatcttatgaacagatggaaactggtggagaacgccagaatgctactgagatcagagga

SEQ ID NO: 49057 - DNA, 60 bp, Artificial
  Synthetic oligonucleotide
acgatcttatgaacagatggaaactggtggagaacgccagaatgctactgagatcagggc

SEQ ID NO: 49058 - DNA, 60 bp, Artificial
  Synthetic oligonucleotide
aaacgatcttatgaacagatggaaactggtggagaacgccagaatgctactgagatcaga

SEQ ID NO: 49059 - DNA, 60 bp, Artificial
  Synthetic oligonucleotide
ccatatggccataatcaagaaatacacatcaggaagacaagagaagaaccctgctctcag

SEQ ID NO: 49060 - DNA, 60 bp, Artificial
  Synthetic oligonucleotide
cactgtggaccatatggccataatcaagaaatacacatcaggaagacaagagaagaaccc

SEQ ID NO: 49061 - DNA, 60 bp, Artificial
  Synthetic oligonucleotide
tggaccatatggccataatcaagaaatacacatcaggaagacaagagaagaaccctgctc

SEQ ID NO: 49062 - DNA, 60 bp, Artificial
  Synthetic oligonucleotide
ctgtggaccatatggccataatcaagaaatacacatcaggaagacaagagaagaaccctg

SEQ ID NO: 49063 - DNA, 60 bp, Artificial
  Synthetic oligonucleotide
atggcgtctcaaggcaccaaacgatcttatgaacagatggaaactggtggagaacgccag

SEQ ID NO: 49064 - DNA, 60 bp, Artificial
  Synthetic oligonucleotide
ccacaaatgtgacaatgaatgtatggaaagtgtgagaaacggaacatatgactacccaca

SEQ ID NO: 49065 - DNA, 60 bp, Artificial
  Synthetic oligonucleotide
agaacacagatcttgaggctctcatggaatggctaaagacaagaccaatcctgtcacctc

SEQ ID NO: 49066 - DNA, 60 bp, Artificial
  Synthetic oligonucleotide
cacagaccttgaggctctcatggaatggctaaagacaagaccaatcctgtcacctctgac

SEQ ID NO: 49067 - DNA, 60 bp, Artificial
  Synthetic oligonucleotide
caccgatctcgaggctctcatggaatggctaaagacaagaccaatcctgtcacctctgac

SEQ ID NO: 49068 - DNA, 60 bp, Artificial
  Synthetic oligonucleotide
caacagtcagccttgttaaaagtgaccagatttgcattggttaccatgcaaacaactcga

SEQ ID NO: 49069 - DNA, 60 bp, Artificial
  Synthetic oligonucleotide
aaagacaagaccaatcctgtcacctctgactaaagggattttgggatttgtgttcacgct

SEQ ID NO: 49070 - DNA, 60 bp, Artificial
  Synthetic oligonucleotide
agacaagaccaatcctgtcacctctgactaaagggattttgggatttgtgttcacgctca

SEQ ID NO: 49071 - DNA, 60 bp, Artificial
  Synthetic oligonucleotide
aaagacaagaccaatcctgtcacctctgactaagggaattttagggtttgtgttcacgct

SEQ ID NO: 49072 - DNA, 60 bp, Artificial
  Synthetic oligonucleotide
cgggaatggttgttttgagttctatcacaaatgtgatgatgaatgtatggagagcgtgaa

SEQ ID NO: 49073 - DNA, 60 bp, Artificial
  Synthetic oligonucleotide
cgactatgaaggaaggctgatccagaacagcataacaatagagagaatggttctctctgc

SEQ ID NO: 49074 - DNA, 60 bp, Artificial
  Synthetic oligonucleotide
aacaacgaccttgggccagcaacagctcagatggctcttcagctattcatcaaggactac

SEQ ID NO: 49075 - DNA, 60 bp, Artificial
  Synthetic oligonucleotide
caacgaccttgggccagcaacagctcagatggctcttcagctattcatcaaggactacag

SEQ ID NO: 49076 - DNA, 60 bp, Artificial
  Synthetic oligonucleotide
caacgatcttgggccagcaacagctcagatggctcttcagctattcatcaaggactacag

SEQ ID NO: 49077 - DNA, 60 bp, Artificial
  Synthetic oligonucleotide
gaccggcttcgccgagatcagaagtccctaagaggaagaggcaacactcttggtctggac

SEQ ID NO: 49078 - DNA, 60 bp, Artificial
  Synthetic oligonucleotide
accggcttcgccgagatcagaagtccctaagaggaagaggcaacactcttggtctggaca

SEQ ID NO: 49079 - DNA, 60 bp, Artificial
  Synthetic oligonucleotide
cttgaccggcttcgccgagatcagaagtccctaagaggaagaggcaacactcttggtctg

SEQ ID NO: 49080 - DNA, 60 bp, Artificial
  Synthetic oligonucleotide
tgaccggcttcgccgagatcagaagtccctaagaggaagaggcaacactcttggtctgga

SEQ ID NO: 49081 - DNA, 60 bp, Artificial
  Synthetic oligonucleotide
ttcgccgagatcagaagtccctaagaggaagaggcaacactcttggtctggacatcgaga

SEQ ID NO: 49082 - DNA, 60 bp, Artificial
  Synthetic oligonucleotide
cttcgccgagatcagaagtccctaagaggaagaggcaacactcttggtctggacatcgaa

SEQ ID NO: 49083 - DNA, 60 bp, Artificial
  Synthetic oligonucleotide
ggcttcgccgagatcagaagtccctaagaggaagaggcaacactcttggtctggacatcg

SEQ ID NO: 49084 - DNA, 60 bp, Artificial
  Synthetic oligonucleotide
gcttcgccgagatcagaagtccctaagaggaagaggcaacactcttggtctggacatcga

SEQ ID NO: 49085 - DNA, 57 bp, Artificial
  Synthetic oligonucleotide
tgactatgaagggaggctgattcagaacagcataacaatagagagaatggttctctc

SEQ ID NO: 49086 - DNA, 60 bp, Artificial
  Synthetic oligonucleotide
caggacaagcagcagatcttaaaagcactcaagcagcaatcgaccaaatcaacgggaaac

SEQ ID NO: 49087 - DNA, 60 bp, Artificial
  Synthetic oligonucleotide
cactaaaatagatctctggtcttacaacgcggagcttcttgtcgctctggagaaccaaca

SEQ ID NO: 49088 - DNA, 60 bp, Artificial
  Synthetic oligonucleotide
ggtagacggttggtacggtttcaggcatcaaaattctgagggcacaggacaagcagcaga

SEQ ID NO: 49089 - DNA, 60 bp, Artificial
  Synthetic oligonucleotide
gagaagccagcaaactgtaatcccgaatatcgggtctagaccctgggtaaggggtctgtc

SEQ ID NO: 49090 - DNA, 60 bp, Artificial
  Synthetic oligonucleotide
aatgctactgagctggttcagagttcctcaacaggtagaatatgcgacagtcctcatcga

SEQ ID NO: 49091 - DNA, 60 bp, Artificial
  Synthetic oligonucleotide
atgcgacagtcctcaccgaatccttgatggaaaaaactgcacactgatagatgctctatt

SEQ ID NO: 49092 - DNA, 60 bp, Artificial
  Synthetic oligonucleotide
caaaaccttcccggaaatgacaacagcacagcaacgctgtgcctgggacatcatgcagtg

SEQ ID NO: 49093 - DNA, 60 bp, Artificial
  Synthetic oligonucleotide
cacagatcttgaggctctcatggagtggctaaagacaagaccaatcctgtcacctctgac

SEQ ID NO: 49094 - DNA, 60 bp, Artificial
  Synthetic oligonucleotide
caccgatcttgaggctctcatggagtggctaaagacaagaccaatcctgtcacctctgac

SEQ ID NO: 49095 - DNA, 60 bp, Artificial
  Synthetic oligonucleotide
caccgatctagaggctctcatggagtggctaaagacaagaccaatcctgtcacctctgac

SEQ ID NO: 49096 - DNA, 60 bp, Artificial
  Synthetic oligonucleotide
tgtaaaaaacgggacgtatgactacccgcagtattcagaagaagcaagactaaacagaga

SEQ ID NO: 49097 - DNA, 60 bp, Artificial
  Synthetic oligonucleotide
caatagtcagtcttgttaaaagtgatcagatttgcattggttaccatgcaaacaattcaa

SEQ ID NO: 49098 - DNA, 60 bp, Artificial
  Synthetic oligonucleotide
ttgcaatagtcagtcttgttaaaagtgatcagatttgcattggttaccatgcaaacaact

SEQ ID NO: 49099 - DNA, 60 bp, Artificial
  Synthetic oligonucleotide
ttgcaatagtcagccttgttaaaagtgatcagatttgcattggttaccatgcaaacaact

SEQ ID NO: 49100 - DNA, 60 bp, Artificial
  Synthetic oligonucleotide
aagtgtaaaaaacggaacgtatgactacccgcagtattcagaagaagcaagactaaacag

SEQ ID NO: 49101 - DNA, 60 bp, Artificial
  Synthetic oligonucleotide
agtgtaagaaacggaacgtatgactacccgcagtattcagaagaagcaagactaaacaga

SEQ ID NO: 49102 - DNA, 60 bp, Artificial
  Synthetic oligonucleotide
cggcaggggtacctgagtctatgagggaagagtatcggcaggaacagcagagtgctgtgg

SEQ ID NO: 49103 - DNA, 60 bp, Artificial
  Synthetic oligonucleotide
gggttttcatttaaatacggcaatggtgtttggatcgggagaaccaaaagcactaattcc

SEQ ID NO: 49104 - DNA, 60 bp, Artificial
  Synthetic oligonucleotide
gggttctcatttaaatacggcaatggtgtttggatcgggagaaccaaaagcactaattcc

SEQ ID NO: 49105 - DNA, 60 bp, Artificial
  Synthetic oligonucleotide
ttttcatttaaatacggcaatggtgtttggatcgggagaaccaaaagcactaattccagg

SEQ ID NO: 49106 - DNA, 56 bp, Artificial
  Synthetic oligonucleotide
ttatgaacagatggaaactggtggagaacgccagaatgctactgagatcagagcat

SEQ ID NO: 49107 - DNA, 60 bp, Artificial
  Synthetic oligonucleotide
ccagcattgagcatcaatgaactgagcaatcttgcgaaaggggagaaggctaacgtgttg

SEQ ID NO: 49108 - DNA, 60 bp, Artificial
  Synthetic oligonucleotide
ccagcattgagcatcaatgaactgagcaatcttgcgaaaggggagaaggctgatgtgttg

SEQ ID NO: 49109 - DNA, 60 bp, Artificial
  Synthetic oligonucleotide
taatgcagggatcaactctcccgaggagatctggagctgctggtgcagcagtaaagggag

SEQ ID NO: 49110 - DNA, 60 bp, Artificial
  Synthetic oligonucleotide
cggatgctcaggttcacaattgtactacaaagtgccaaacccctcatggggccttgaaca

SEQ ID NO: 49111 - DNA, 60 bp, Artificial
  Synthetic oligonucleotide
cctcatggccaaatcatgagacaaccaaaggtgccacagctgcatgcttccactctggag

SEQ ID NO: 49112 - DNA, 60 bp, Artificial
  Synthetic oligonucleotide
acaattgtgatacaaagtgccaaacccctcatggggccttgaacagtagtcttccttttc

SEQ ID NO: 49113 - DNA, 60 bp, Artificial
  Synthetic oligonucleotide
ggatgctcaggttcacaattgtactacaaagtgccaaacccctcatggggccttgaacag

SEQ ID NO: 49114 - DNA, 60 bp, Artificial
  Synthetic oligonucleotide
gccttgaacagtaatcttccttttcagaacgtacatcccatcactattggagaatgcccc

SEQ ID NO: 49115 - DNA, 60 bp, Artificial
  Synthetic oligonucleotide
agtgccaaacccctcatggggccttgaacagtagtcttccttttcagaacgtacatccca

SEQ ID NO: 49116 - DNA, 60 bp, Artificial
  Synthetic oligonucleotide
atggtacgcattcgcattgaataagggctctggttctggaattatgatgtcggatgctca

SEQ ID NO: 49117 - DNA, 60 bp, Artificial
  Synthetic oligonucleotide
ggagacaccataacttttgaagccactgggaacttaatagcaccatggtacgcattcgca

SEQ ID NO: 49118 - DNA, 60 bp, Artificial
  Synthetic oligonucleotide
cctcatggccaaatcatgagacaaccaaaggtgttacagctgcatgcccccactctggag

SEQ ID NO: 49119 - DNA, 60 bp, Artificial
  Synthetic oligonucleotide
ggtacgcattcgcattgaataagggctctggttctggaattatgatgtcggatgctcagg

SEQ ID NO: 49120 - DNA, 60 bp, Artificial
  Synthetic oligonucleotide
gctgagttcagtttcgtcatttgaaaggtttgaaattttcccaaaagcaacctcatggcc

SEQ ID NO: 49121 - DNA, 60 bp, Artificial
  Synthetic oligonucleotide
ctcacagcgaattcgtggtcttacataatagagacttcaaattcagaaaacggaacatgc

SEQ ID NO: 49122 - DNA, 60 bp, Artificial
  Synthetic oligonucleotide
cctgttgctcacagcgaattcatggtcttacataatagagacttcaaattcagaaaatgg

SEQ ID NO: 49123 - DNA, 60 bp, Artificial
  Synthetic oligonucleotide
caacaaagggaaagaagtgcttgtaatctggggagtgcaccaccctccgactaacaatga

SEQ ID NO: 49124 - DNA, 60 bp, Artificial
  Synthetic oligonucleotide
caacaaagggaaagaagtgcttgtaatctggggaatacaccaccctccgactaacaatga

SEQ ID NO: 49125 - DNA, 60 bp, Artificial
  Synthetic oligonucleotide
caactaagaatggcaacaggattaaggaacgtcccctctattcaatccagaggacttttc

SEQ ID NO: 49126 - DNA, 60 bp, Artificial
  Synthetic oligonucleotide
atgcgacttgttgctcacagcgaattcgtggtcttacataatagagacttcaaattcaga

SEQ ID NO: 49127 - DNA, 60 bp, Artificial
  Synthetic oligonucleotide
gagaggaaatagacggtgtgaaactagaatcaatgggagtttaccagattttggcgatct

SEQ ID NO: 49128 - DNA, 60 bp, Artificial
  Synthetic oligonucleotide
aaattgaatagagaggaaatagacggtgtgaaactagaatcaatgggagtttaccagatt

SEQ ID NO: 49129 - DNA, 60 bp, Artificial
  Synthetic oligonucleotide
ggtcgatgatgggtttttggatgtttggacatataacgctgagttgctcattttgctcga

SEQ ID NO: 49130 - DNA, 60 bp, Artificial
  Synthetic oligonucleotide
ggtcgatgatgggtttttggatgtttggacatataatgctgagttgctcgttttgctcga

SEQ ID NO: 49131 - DNA, 58 bp, Artificial
  Synthetic oligonucleotide
tacccagctgatcagaaaagcacacaaaatgcaattgacgggatcagcaacaaagtga

SEQ ID NO: 49132 - DNA, 58 bp, Artificial
  Synthetic oligonucleotide
tatgcagctgatcagaaaagcacacaaaatgcaattgacgggatcagcaacaaagtga

SEQ ID NO: 49133 - DNA, 60 bp, Artificial
  Synthetic oligonucleotide
cccaaatattcagaagaatccaaattgaatagagaggaaatagacggtgtgaaactagaa

SEQ ID NO: 49134 - DNA, 60 bp, Artificial
  Synthetic oligonucleotide
ggcacatataattatcccaaatattcagaagaatccaaattgaatagagaggaaatagac

SEQ ID NO: 49135 - DNA, 60 bp, Artificial
  Synthetic oligonucleotide
gcgtgaagaatggcacatataactatcccaaatattcagaagaatccaaattgaatagag

SEQ ID NO: 49136 - DNA, 60 bp, Artificial
  Synthetic oligonucleotide
agagcgtgaagaatggcacatataactatcccaaatattcagaagaatccaaattgaata

SEQ ID NO: 49137 - DNA, 60 bp, Artificial
  Synthetic oligonucleotide
aggacttttcggagcaattgctgggttcattgaaggaggatggacaggaatgatagatgg

SEQ ID NO: 49138 - DNA, 60 bp, Artificial
  Synthetic oligonucleotide
aggacttttcggagcaattgctggattcattgaaggaggatggacaggaatgatagatgg

SEQ ID NO: 49139 - DNA, 60 bp, Artificial
  Synthetic oligonucleotide
aactgagaatggcaacaggactaaggaacgtcccctctattcaatccagaggacttttcg

SEQ ID NO: 49140 - DNA, 60 bp, Artificial
  Synthetic oligonucleotide
gatcaaggagacaccataacttttgaagccactgggaacttaatagcaccatggtacgca

SEQ ID NO: 49141 - DNA, 60 bp, Artificial
  Synthetic oligonucleotide
gatcaaggagacaccataacttttgaagcaactgggaacttaatagcaccatggtacgca

SEQ ID NO: 49142 - DNA, 60 bp, Artificial
  Synthetic oligonucleotide
ggacttttcggagcaattgctggattcattgaaggaggatggacaggaatgatagatggg

SEQ ID NO: 49143 - DNA, 60 bp, Artificial
  Synthetic oligonucleotide
ggagcaattgctggattcattgaaggaggatggacaggaatgatagatgggtggtatggg

SEQ ID NO: 49144 - DNA, 60 bp, Artificial
  Synthetic oligonucleotide
atacacaaacaacaaagggaaagaagtgcttgtaatctggggaatacaccaccctccgac

SEQ ID NO: 49145 - DNA, 60 bp, Artificial
  Synthetic oligonucleotide
atacacaaacaacaaagggaaagaagtgcttgtaatctggggagtgcaccaccctccgac

SEQ ID NO: 49146 - DNA, 60 bp, Artificial
  Synthetic oligonucleotide
agggatctggttacgcagctgatcagaaaagcacacaaaatgcaattgacgggatcagca

SEQ ID NO: 49147 - DNA, 60 bp, Artificial
  Synthetic oligonucleotide
ggatctggttacgcagctgatcagaaaagcacacaaaatgcaattgacgggatcagcaac

SEQ ID NO: 49148 - DNA, 60 bp, Artificial
  Synthetic oligonucleotide
actcatggccaaatcatgagacaaccaaaggtgttacagccgcatgctcttactctggag

SEQ ID NO: 49149 - DNA, 60 bp, Artificial
  Synthetic oligonucleotide
gggaaattcctatcctaaactcagcaaatcatacacaaacaacaaagggaaagaagtgct

SEQ ID NO: 49150 - DNA, 60 bp, Artificial
  Synthetic oligonucleotide
ctaaactcagcaaatcatacacaaacaacaaagggaaagaagtgcttgtaatctggggag

SEQ ID NO: 49151 - DNA, 60 bp, Artificial
  Synthetic oligonucleotide
ataatggaaaactctgcagcctgaatggaatagcccccttacaactggggaattgcaacg

SEQ ID NO: 49152 - DNA, 57 bp, Artificial
  Synthetic oligonucleotide
ggaaatagacggtgtgaaactagaatcaatgggagttcaccagattttggcgatcta

SEQ ID NO: 49153 - DNA, 60 bp, Artificial
  Synthetic oligonucleotide
ggagcaattgctgggttcattgaaggaggatggacaggaatgatagatggatggtatggg

SEQ ID NO: 49154 - DNA, 60 bp, Artificial
  Synthetic oligonucleotide
ggcgtcaagcgaacaatggagaagatgcaactgctggtctcactcacatgatgatctggc

SEQ ID NO: 49155 - DNA, 54 bp, Artificial
  Synthetic oligonucleotide
gggaatggtagacggttggtacggtttcaggcatcaaaattctgagggcacagg

SEQ ID NO: 49156 - DNA, 60 bp, Artificial
  Synthetic oligonucleotide
gagacgaagcattaaacaaccggttccagatcaaaggtgttgagctgaagtcaggataca

SEQ ID NO: 49157 - DNA, 60 bp, Artificial
  Synthetic oligonucleotide
gcattaaacaaccggtttcagatcaaaggtgttgagctgaagtcaggatacaaagactgg

SEQ ID NO: 49158 - DNA, 60 bp, Artificial
  Synthetic oligonucleotide
tgctttgtgttgttttgctggggttcatcatgtgggcctgccaaaaaggcaacattaggt

SEQ ID NO: 49159 - DNA, 60 bp, Artificial
  Synthetic oligonucleotide
tgctttgtgttgttttgcttgggttcatcatgtgggcctgccaaaaaggcaacattaggt

SEQ ID NO: 49160 - DNA, 60 bp, Artificial
  Synthetic oligonucleotide
aatcgaaaaggaattctcagaagtagaagggagaattcaggacctcgagaaatacgttga

SEQ ID NO: 49161 - DNA, 60 bp, Artificial
  Synthetic oligonucleotide
ctactgagctggttcagagttcctcaacaggtagaatatgcgacagtcctcaccgaatcc

SEQ ID NO: 49162 - DNA, 60 bp, Artificial
  Synthetic oligonucleotide
tgggagaccctcattgtgatggcttccaaaatgagaaatgggacctttttgttgaacgca

SEQ ID NO: 49163 - DNA, 60 bp, Artificial
  Synthetic oligonucleotide
gcaactgttacccttatgatgtaccggattatgcctcccttaggtcactagttgcctcat

SEQ ID NO: 49164 - DNA, 60 bp, Artificial
  Synthetic oligonucleotide
gcaactgttacccttatgatgtgccggattatgcctcccttaggtcactagttgcctcat

SEQ ID NO: 49165 - DNA, 60 bp, Artificial
  Synthetic oligonucleotide
tcgagaaaacgaacgagaaattccatcaaatcgaaaaagaattctcagaagtagaaggga

SEQ ID NO: 49166 - DNA, 60 bp, Artificial
  Synthetic oligonucleotide
atgatgtgccggattatgcctcccttaggtcactagttgcctcatcaggcaccctggagt

SEQ ID NO: 49167 - DNA, 60 bp, Artificial
  Synthetic oligonucleotide
ttatgcctcccttaggtcactagttgcctcatcaggcaccctggagtttatcaatgaagg

SEQ ID NO: 49168 - DNA, 60 bp, Artificial
  Synthetic oligonucleotide
gcctcccttaggtcactagttgcctcatcaggcaccctggagtttatcaatgaaggcttc

SEQ ID NO: 49169 - DNA, 60 bp, Artificial
  Synthetic oligonucleotide
gggtaaggggtcagtccagtagaataggcatctattggacaatagtaaaaccgggagaca

SEQ ID NO: 49170 - DNA, 60 bp, Artificial
  Synthetic oligonucleotide
ggaattctcagaagtagaagggagaattcaggacctcgagaaatacgttgaagacactaa

SEQ ID NO: 49171 - DNA, 60 bp, Artificial
  Synthetic oligonucleotide
ctcagaagtagaagggagaattcaggacctcgagaaatatgttgaagacactaaaataga

SEQ ID NO: 49172 - DNA, 60 bp, Artificial
  Synthetic oligonucleotide
gcttgcatagggtcaatcagaaatggaacttatgaccatgatgtatacagagacgaagca

SEQ ID NO: 49173 - DNA, 59 bp, Artificial
  Synthetic oligonucleotide
aacgggaaactgaataggttaatcgagaaaacgaacgagaaattccatcaaatcgaaaa

SEQ ID NO: 49174 - DNA, 60 bp, Artificial
  Synthetic oligonucleotide
ggaattctcagaagtagaagggagaattcaggacctcgagaaatatgttgaagacactaa

SEQ ID NO: 49175 - DNA, 60 bp, Artificial
  Synthetic oligonucleotide
aatcgaaaaggaattctcagaagtagaagggagaattcaggacctcgagaaatatgttga

SEQ ID NO: 49176 - DNA, 60 bp, Artificial
  Synthetic oligonucleotide
tacagagacgaagcattaaacaaccggtttcagatcaaaggtgttgagctgaagtcagga

SEQ ID NO: 49177 - DNA, 60 bp, Artificial
  Synthetic oligonucleotide
tatacagagacgaagcattaaacaaccggtttcagatcaaaggtgttgagctgaagtcag

SEQ ID NO: 49178 - DNA, 60 bp, Artificial
  Synthetic oligonucleotide
aatcgaaaaagaattctcagaagtagaagggagaattcaggacctcgagaaatatgttga

SEQ ID NO: 49179 - DNA, 60 bp, Artificial
  Synthetic oligonucleotide
gggagaattcaggacctcgagaaatatgttgaagacactaaaatagatctctggtcttac

SEQ ID NO: 49180 - DNA, 60 bp, Artificial
  Synthetic oligonucleotide
gtagaagggagaattcaggacctcgagaaatatgttgaagacactaaaatagatctctgg

SEQ ID NO: 49181 - DNA, 60 bp, Artificial
  Synthetic oligonucleotide
tgacaatgcttgcatagggtcaatcagaaatggaacttatgaccatgatgtatacagaga

SEQ ID NO: 49182 - DNA, 60 bp, Artificial
  Synthetic oligonucleotide
tgacaatgcctgcatagggtcaatcagaaatggaacttatgaccatgatgtatacagaga

SEQ ID NO: 49183 - DNA, 60 bp, Artificial
  Synthetic oligonucleotide
gcctgcatagggtcaatcagaaatggaacttatgaccatgatgtatacagagacgaagca

SEQ ID NO: 49184 - DNA, 60 bp, Artificial
  Synthetic oligonucleotide
acaatgcttgcatagggtcaatcagaaatggaacttatgaccatgatgtatacagagacg

SEQ ID NO: 49185 - DNA, 60 bp, Artificial
  Synthetic oligonucleotide
tatacagagacgaagcattaaacaaccggttccagatcaaaggtgttgagctgaagtcag

SEQ ID NO: 49186 - DNA, 60 bp, Artificial
  Synthetic oligonucleotide
atgatgtaccggattatgcctcccttaggtcactagttgcctcatcaggcaccctggagt

SEQ ID NO: 49187 - DNA, 60 bp, Artificial
  Synthetic oligonucleotide
gaaattggcaacagggatgcggaatgtaccagagaaacaaactagaggcatattcggcgc

SEQ ID NO: 49188 - DNA, 60 bp, Artificial
  Synthetic oligonucleotide
ctgaagttggcaacagggatgcggaatgtaccagagaaacaaactagaggcatattcggc

SEQ ID NO: 49189 - DNA, 60 bp, Artificial
  Synthetic oligonucleotide
actctgaagttggcaacagggatgcggaatgtaccagagaaacaaactagaggcatattc

SEQ ID NO: 49190 - DNA, 60 bp, Artificial
  Synthetic oligonucleotide
gggtaaggggtcagtccagtagaataagcatctattggacaatagtaaaaccgggagaca

SEQ ID NO: 49191 - DNA, 60 bp, Artificial
  Synthetic oligonucleotide
gggaatgatagacggttggtacggtttcaggcatcaaaattctgagggcacaggacaagc

SEQ ID NO: 49192 - DNA, 60 bp, Artificial
  Synthetic oligonucleotide
gggaatggtagacggttggtacggtttcaggcatcaaaattctgagggcacaggacaagc

SEQ ID NO: 49193 - DNA, 60 bp, Artificial
  Synthetic oligonucleotide
ggcaacagggatgcggaatgtaccagagaaacaaactagaggcatattcggcgcaatcgc

SEQ ID NO: 49194 - DNA, 55 bp, Artificial
  Synthetic oligonucleotide
gttggcaacagggatgcggaatgtaccagagaaacaaactagaggcatattcggc

SEQ ID NO: 49195 - DNA, 60 bp, Artificial
  Synthetic oligonucleotide
aatgggaaactgaatagggtaatcgagaaaacgaacgagaaattccatcaaatcgaaaag

SEQ ID NO: 49196 - DNA, 60 bp, Artificial
  Synthetic oligonucleotide
aacgggaaactgaataggttaatcgagaaaacgaacgagaaattccatcaaatcgaaaaa

SEQ ID NO: 49197 - DNA, 60 bp, Artificial
  Synthetic oligonucleotide
gggaaactgaatagggtaatcgagaaaacgaacgagaaattccatcaaatcgaaaaggaa

SEQ ID NO: 49198 - DNA, 60 bp, Artificial
  Synthetic oligonucleotide
acgaaaaccggacactagcatacttactgacagccagacagcgaccaaaagaattcggat

SEQ ID NO: 49199 - DNA, 60 bp, Artificial
  Synthetic oligonucleotide
acggaaacgagactctagcatacttactgacagccagacagcgaccaaaagaattcggat

SEQ ID NO: 49200 - DNA, 60 bp, Artificial
  Synthetic oligonucleotide
acggaaacgggactctagcatacttactgacagccagacagcgaccaaaagaattcggat

SEQ ID NO: 49201 - DNA, 60 bp, Artificial
  Synthetic oligonucleotide
acgaaaacgggactctagcatacttactgacagccagacagcgaccaaaagaattcggat

SEQ ID NO: 49202 - DNA, 60 bp, Artificial
  Synthetic oligonucleotide
acggagacgggactctagcatacttactgacagccagacagcgaccaaaagaattcggat

SEQ ID NO: 49203 - DNA, 60 bp, Artificial
  Synthetic oligonucleotide
acggaaacgggactttagcatacttactgacagccagacagcgaccaaaagaattcggat

SEQ ID NO: 49204 - DNA, 60 bp, Artificial
  Synthetic oligonucleotide
acggaaacgggactctagcatacttactgacagccagacagcgaccaaaaggattcggat

SEQ ID NO: 49205 - DNA, 60 bp, Artificial
  Synthetic oligonucleotide
acggaaccgggactctagcatacttactgacagccagacagcgaccaaaagaattcggat

SEQ ID NO: 49206 - DNA, 60 bp, Artificial
  Synthetic oligonucleotide
actattgcttgaagtggagcaagagataagaaccttctcgtttcagcttatttgatgata

SEQ ID NO: 49207 - DNA, 60 bp, Artificial
  Synthetic oligonucleotide
ggcagatggtgcaggcaatgaggacaattgggactcatcctagctccagtgccggtctga

SEQ ID NO: 49208 - DNA, 60 bp, Artificial
  Synthetic oligonucleotide
gactaggcagatggtgcaggcaatgaggacaattgggactcatcctagctccagtgccgg

SEQ ID NO: 49209 - DNA, 60 bp, Artificial
  Synthetic oligonucleotide
ttttaggatttgtgttcacgctcaccgtgcccagtgagcgaggactgcagcgtagacgct

SEQ ID NO: 49210 - DNA, 60 bp, Artificial
  Synthetic oligonucleotide
tgaatgtatggaaagtgtgagaaacggaacatatgactacccacagtattcagaagaagc

SEQ ID NO: 49211 - DNA, 60 bp, Artificial
  Synthetic oligonucleotide
gagattgtagtgtagctggatggctcctcggaaaccctatgtgtgacgaattcatcaatg

SEQ ID NO: 49212 - DNA, 60 bp, Artificial
  Synthetic oligonucleotide
ggttctacatacagatgtgcactgaactcaaactcagtgactacgaaggcaggctgatcc

SEQ ID NO: 49213 - DNA, 60 bp, Artificial
  Synthetic oligonucleotide
ggcaggaacagcagaatgctgtggatgttgacgatggtcattttgtcaacatagagctgg

SEQ ID NO: 49214 - DNA, 60 bp, Artificial
  Synthetic oligonucleotide
atgagaatccagcacataaaagtcaattggtatggatggcatgccattctgcagcatttg

SEQ ID NO: 49215 - DNA, 52 bp, Artificial
  Synthetic oligonucleotide
caaaatgctataagtaccacattcccttatactggagatcctccatacagcc

SEQ ID NO: 49216 - DNA, 54 bp, Artificial
  Synthetic oligonucleotide
cgcaaaatgctataagtaccacattcccttatactggagatcctccatacagcc

SEQ ID NO: 49217 - DNA, 60 bp, Artificial
  Synthetic oligonucleotide
gcaggaaagaacaccgatctcgaggctctcatggaatggctaaagacaagaccaatcctg

SEQ ID NO: 49218 - DNA, 60 bp, Artificial
  Synthetic oligonucleotide
caggaaagaacaccgatctcgaggctctcatggaatggctaaagacaagaccaatcctgt

SEQ ID NO: 49219 - DNA, 60 bp, Artificial
  Synthetic oligonucleotide
ggaggtcgttttcccaaatgaagtgggagctagaatattgacatcagagtcgcaattgac

SEQ ID NO: 49220 - DNA, 60 bp, Artificial
  Synthetic oligonucleotide
ggaagtcgttttcccaaatgaagtgggagctagaatattgacatcagagtcgcaattgac

SEQ ID NO: 49221 - DNA, 60 bp, Artificial
  Synthetic oligonucleotide
gaggtcgttttcccaaatgaagtgggagctagaatattgacatcagagtcgcaattgacg

SEQ ID NO: 49222 - DNA, 60 bp, Artificial
  Synthetic oligonucleotide
ctgatgatttcgctctcatagtgaatgcaccgaatcatgagggaatacaagcaggagtgg

SEQ ID NO: 49223 - DNA, 60 bp, Artificial
  Synthetic oligonucleotide
ccccggggacacaatatgtataggctaccatgcgaacaactcaaccgacactgttgacac

SEQ ID NO: 49224 - DNA, 60 bp, Artificial
  Synthetic oligonucleotide
agacacaatatgtataggctaccatgcgaacaactcaaccgacactgttgacacactact

SEQ ID NO: 49225 - DNA, 60 bp, Artificial
  Synthetic oligonucleotide
ttattgaggggggatggactggaatgatagatggatggtatggttatcatcatcagaatg

SEQ ID NO: 49226 - DNA, 60 bp, Artificial
  Synthetic oligonucleotide
tcattgaaggggggtggactggaatgatagatggatggtatggttatcatcatcagaatg

SEQ ID NO: 49227 - DNA, 60 bp, Artificial
  Synthetic oligonucleotide
ggggatggactggaatgatagatggatggtatggttatcatcatcagaatgaacagggat

SEQ ID NO: 49228 - DNA, 60 bp, Artificial
  Synthetic oligonucleotide
ggggtggactggaatgatagatggatggtatggttatcatcatcagaatgaacaaggatc

SEQ ID NO: 49229 - DNA, 60 bp, Artificial
  Synthetic oligonucleotide
ggactggaatgatagatggatggtatggttatcatcatcagaatgaacagggatcaggct

SEQ ID NO: 49230 - DNA, 60 bp, Artificial
  Synthetic oligonucleotide
ttattgaagggggatggactggaatgatagatggatggtatggttatcatcatcagaatg

SEQ ID NO: 49231 - DNA, 60 bp, Artificial
  Synthetic oligonucleotide
aactgtcgccagttcactggtgcttttggtctccctgggggcaatcagtttctggatgtg

SEQ ID NO: 49232 - DNA, 60 bp, Artificial
  Synthetic oligonucleotide
tctggcgatctactcaactgtcgctagttcactggtgcttttggtctccctgggggcaat

SEQ ID NO: 49233 - DNA, 60 bp, Artificial
  Synthetic oligonucleotide
cgcgtcaatgcatgagtgtaacacgaagtgtcaaacaccccagggagctataaacagcag

SEQ ID NO: 49234 - DNA, 60 bp, Artificial
  Synthetic oligonucleotide
ctcaaacgcgtcaatgcatgagtgtaacacgaagtgtcaaacaccccagggagctataaa

SEQ ID NO: 49235 - DNA, 60 bp, Artificial
  Synthetic oligonucleotide
ctggttttattgaggggggatggactggaatgatagatggatggtatggttatcatcatc

SEQ ID NO: 49236 - DNA, 60 bp, Artificial
  Synthetic oligonucleotide
gggcaatcagtttctggatgtgttctaatgggtctttgcagtgcagaatatgcatctgag

SEQ ID NO: 49237 - DNA, 60 bp, Artificial
  Synthetic oligonucleotide
tgggggcaatcagtttctggatgtgttctaatgggtctttgcagtgcagaatatgcatct

SEQ ID NO: 49238 - DNA, 60 bp, Artificial
  Synthetic oligonucleotide
ttattcaacagtggcaagttccctagcactggcaatcatgatagctggtctatctttttg

SEQ ID NO: 49239 - DNA, 58 bp, Artificial
  Synthetic oligonucleotide
ttattcaacagtggcaagttccctagcactggcaatcatgatagctggtctatctttt

SEQ ID NO: 49240 - DNA, 60 bp, Artificial
  Synthetic oligonucleotide
gatatggaccagcattgagcatcaatgaactgagcaatcttacgaaaggggagaaagcta

SEQ ID NO: 49241 - DNA, 60 bp, Artificial
  Synthetic oligonucleotide
cgtgcccagtgagcgaggactgcagcgtagacgctttgtccagaatgccctaaatggaaa

SEQ ID NO: 49242 - DNA, 60 bp, Artificial
  Synthetic oligonucleotide
cgtgcccagtgagcgaggactgcagcgtagacgctttgtccagaatgccctgaatggaaa

SEQ ID NO: 49243 - DNA, 60 bp, Artificial
  Synthetic oligonucleotide
ccgtgcccagtgagcgaggactgcagcgtagacgctttgtccagaatgccttaaatggga

SEQ ID NO: 49244 - DNA, 60 bp, Artificial
  Synthetic oligonucleotide
ccgtgcccagtgagcgaggactgcagcgtagacgctttgtccagaatgccctgaatggaa

SEQ ID NO: 49245 - DNA, 60 bp, Artificial
  Synthetic oligonucleotide
caccgtgcccagtgagcgaggactgcagcgtagacgctttgtccagaatgccttgaatgg

SEQ ID NO: 49246 - DNA, 60 bp, Artificial
  Synthetic oligonucleotide
caccgtgcccagtgagcgaggactgcagcgtagacgctttgtccagaatgccctaaatgg

SEQ ID NO: 49247 - DNA, 60 bp, Artificial
  Synthetic oligonucleotide
caccgtgcccagtgagcgaggactgcagcgtagacgctttgtccagaatgccttaaatgg

SEQ ID NO: 49248 - DNA, 60 bp, Artificial
  Synthetic oligonucleotide
gctcaccgtgcccagtgagcgaggactgcagcgtagacgctttgtccagaatgccttgaa

SEQ ID NO: 49249 - DNA, 60 bp, Artificial
  Synthetic oligonucleotide
gctcaccgtgcccagtgagcgaggactgcagcgtagacgctttgtccagaatgccctaaa

SEQ ID NO: 49250 - DNA, 60 bp, Artificial
  Synthetic oligonucleotide
gctcaccgtgcccagtgagcgaggactgcagcgtagacgctttgtccagaatgccttaaa

SEQ ID NO: 49251 - DNA, 60 bp, Artificial
  Synthetic oligonucleotide
cccacaagtgaaaatgtggtggaagcactgaacgcggagtttgaagatactcaaaactca

SEQ ID NO: 49252 - DNA, 60 bp, Artificial
  Synthetic oligonucleotide
ccagtcttgagcagctcgaaaaggcatgcggaaaccccacaagtgaaaatgtggtggaag

SEQ ID NO: 49253 - DNA, 60 bp, Artificial
  Synthetic oligonucleotide
tcaaaactcaccactgaaggcacaggggcgttctacgaaagggggtctaccaatgagtac

SEQ ID NO: 49254 - DNA, 60 bp, Artificial
  Synthetic oligonucleotide
gtggtggaagcactgaacgcggagtttgaagatactcaaaactcaccactgaaggcacag

SEQ ID NO: 49255 - DNA, 60 bp, Artificial
  Synthetic oligonucleotide
tccataaagcctcacatcgaaaaccagtttgtactcccgtattcagtgatcgcagtgact

SEQ ID NO: 49256 - DNA, 60 bp, Artificial
  Synthetic oligonucleotide
gacggaaagcttgcgtatgtcagaactcttgcacacagctactgctccataaagcctcac

SEQ ID NO: 49257 - DNA, 60 bp, Artificial
  Synthetic oligonucleotide
tcttcgacggaaagcttgcgtatgtcagaactcttgcacacagctactgctccataaagc

SEQ ID NO: 49258 - DNA, 60 bp, Artificial
  Synthetic oligonucleotide
cagaccataggccaatctcagaaggccatgttgagacaaatcttcgacggaaagcttgcg

SEQ ID NO: 49259 - DNA, 60 bp, Artificial
  Synthetic oligonucleotide
cctgatgagacagaccataggccaatctcagaaggccatgttgagacaaatcttcgacgg

SEQ ID NO: 49260 - DNA, 60 bp, Artificial
  Synthetic oligonucleotide
gggctgcagcagggataaggaagaggctcgaagcaaccctgatgagacagaccataggcc

SEQ ID NO: 49261 - DNA, 60 bp, Artificial
  Synthetic oligonucleotide
aaactatcacctagggctgcagcagggataaggaagaggctcgaagcaaccctgatgaga

SEQ ID NO: 49262 - DNA, 60 bp, Artificial
  Synthetic oligonucleotide
aagacagaggatgccatcttgtggcagcggaacccagtcactcgggagcttcaggtctcg

SEQ ID NO: 49263 - DNA, 60 bp, Artificial
  Synthetic oligonucleotide
gtgaagcaagcaagaagatcctgctcactggccccaatgagtcatggaagacgtttatgg

SEQ ID NO: 49264 - DNA, 60 bp, Artificial
  Synthetic oligonucleotide
cacatcgaaaaccagtttgtactcccgtattcagtgatcgcagtgactgacagtttcgag

SEQ ID NO: 49265 - DNA, 60 bp, Artificial
  Synthetic oligonucleotide
gcccaaatgttaatctactgcacctttcgctgcctgcatgaagaccttggagttctcacc

SEQ ID NO: 49266 - DNA, 60 bp, Artificial
  Synthetic oligonucleotide
agaccttggagttctcacctcaatgtttggaatggtgtttgagccgaggaagagcaaagg

SEQ ID NO: 49267 - DNA, 60 bp, Artificial
  Synthetic oligonucleotide
cgcgagtggtacccttttcttgcttcactccaattgtgcgtcaagacagaggatgccatc

SEQ ID NO: 49268 - DNA, 60 bp, Artificial
  Synthetic oligonucleotide
cgtcaagacagaggatgccatcttgtggcagcggaacccagtcactcgggagcttcaggt

SEQ ID NO: 49269 - DNA, 60 bp, Artificial
  Synthetic oligonucleotide
acgtttatggcccaaatgttaatctactgcacctttcgctgcctgcatgaagaccttgga

SEQ ID NO: 49270 - DNA, 60 bp, Artificial
  Synthetic oligonucleotide
gcaagcaagaagatcctgctcactggccccaatgagtcatggaagacgtttatggcccaa

SEQ ID NO: 49271 - DNA, 60 bp, Artificial
  Synthetic oligonucleotide
aagttttggtctaaaccccagagaggcgcaccgaggaaccttggaggtgctcgcagaggc

SEQ ID NO: 49272 - DNA, 60 bp, Artificial
  Synthetic oligonucleotide
cttacaaccaatactccagtcttgagcagctcgaaaaggcatgcggaaaccccacaagtg

SEQ ID NO: 49273 - DNA, 60 bp, Artificial
  Synthetic oligonucleotide
ggaaagtactgcaagtcttcagaactccaagtgcttggctctcaagaaatcacctacaag

SEQ ID NO: 49274 - DNA, 60 bp, Artificial
  Synthetic oligonucleotide
caagaaatcacctacaagttttggtctaaaccccagagaggcgcaccgaggaaccttgga

SEQ ID NO: 49275 - DNA, 60 bp, Artificial
  Synthetic oligonucleotide
gaccttggagttctcacctcaatgtttggaatggtgtttgagccgaggaagagcaaagga

SEQ ID NO: 49276 - DNA, 60 bp, Artificial
  Synthetic oligonucleotide
agagcaaaggaaagtactgcaagtcttcagaactccaagtgcttggctctcaagaaatca

SEQ ID NO: 49277 - DNA, 60 bp, Artificial
  Synthetic oligonucleotide
tcaaggcccaaatggtgacactggcgaaccagctcaagattgatcttaaagtgaagcaca

SEQ ID NO: 49278 - DNA, 60 bp, Artificial
  Synthetic oligonucleotide
ggcccaaatggtgacactggcgaaccagctcaagattgatcttaaagtgaagcacaatgc

SEQ ID NO: 49279 - DNA, 60 bp, Artificial
  Synthetic oligonucleotide
gaaatgccatcagagaaacagggaaatactcctttttcttcaacgacgagaaagatggat

SEQ ID NO: 49280 - DNA, 60 bp, Artificial
  Synthetic oligonucleotide
gatgagcaaaagcgcgagtggtacccttttcttgcttcactccaattgtgcgtcaagaca

SEQ ID NO: 49281 - DNA, 60 bp, Artificial
  Synthetic oligonucleotide
cagaatgcgactcactgcttccagcgaaatcatggtcctacattgtagaaacaccaaact

SEQ ID NO: 49282 - DNA, 60 bp, Artificial
  Synthetic oligonucleotide
ggggaaatgtaacatcgccggatggctcttgggaaacccagaatgcgactcactgcttcc

SEQ ID NO: 49283 - DNA, 60 bp, Artificial
  Synthetic oligonucleotide
cccactacaattggggaaatgtaacatcgccggatggctcttgggaaacccagaatgcga

SEQ ID NO: 49284 - DNA, 60 bp, Artificial
  Synthetic oligonucleotide
ataggggaaaaagcagtttttacagaaatttgctatggctgacgaaaacggaggactcat

SEQ ID NO: 49285 - DNA, 60 bp, Artificial
  Synthetic oligonucleotide
gcgactcactgcttccagcgaaatcatggtcctacattgtagaaacaccaaactctgaga

SEQ ID NO: 49286 - DNA, 60 bp, Artificial
  Synthetic oligonucleotide
gcgactcactgcttccagcgagatcatggtcctacattgtagaaacaccaaactctgaga

SEQ ID NO: 49287 - DNA, 60 bp, Artificial
  Synthetic oligonucleotide
cagaatgcgactcactgcttccagcgagatcatggtcctacattgtagaaacaccaaact

SEQ ID NO: 49288 - DNA, 60 bp, Artificial
  Synthetic oligonucleotide
gtgcacttgcagctgcagatgcagacacaatatgtataggctaccatgcgaacaattcaa

SEQ ID NO: 49289 - DNA, 60 bp, Artificial
  Synthetic oligonucleotide
gatgaactattactggaccttgctaaaacccggagacacaataatatttgaggcaaatgg

SEQ ID NO: 49290 - DNA, 60 bp, Artificial
  Synthetic oligonucleotide
aggatgaactattactggaccttgctaaaacccggagacacaataatatttgaggcaaat

SEQ ID NO: 49291 - DNA, 55 bp, Artificial
  Synthetic oligonucleotide
tctggcgatctactcaactgtcgctagttcactggtgcttttggtctccctgggg

SEQ ID NO: 49292 - DNA, 60 bp, Artificial
  Synthetic oligonucleotide
cagattctggcgatctactcaactgtcgccagttcactggtgcttttggtctccctgggg

SEQ ID NO: 49293 - DNA, 60 bp, Artificial
  Synthetic oligonucleotide
tctggatgtgttctaatggatctttgcagtgcagaatatgcatctgagattagaatttca

SEQ ID NO: 49294 - DNA, 60 bp, Artificial
  Synthetic oligonucleotide
ggacatttggacatataatgcagaattgttagttctactggaaaatgaaaggactctgga

SEQ ID NO: 49295 - DNA, 60 bp, Artificial
  Synthetic oligonucleotide
gggtgttttgagttctaccacaagtgtgacaatgaatgcatggaaagtgtaagaaatggg

SEQ ID NO: 49296 - DNA, 60 bp, Artificial
  Synthetic oligonucleotide
ttgagttctaccacaagtgtgacaatgaatgcatggaaagtgtaagaaatgggacttatg

SEQ ID NO: 49297 - DNA, 60 bp, Artificial
  Synthetic oligonucleotide
ccacaagtgtgacaatgaatgcatggaaagtgtaagaaatgggacttatgattatcccaa

SEQ ID NO: 49298 - DNA, 60 bp, Artificial
  Synthetic oligonucleotide
actaagaaacatcccatccattcaatccagaggtctatttggagccattgctggttttat

SEQ ID NO: 49299 - DNA, 60 bp, Artificial
  Synthetic oligonucleotide
aacatcccatccattcaatccagaggtctatttggagccattgctggttttattgagggg

SEQ ID NO: 49300 - DNA, 60 bp, Artificial
  Synthetic oligonucleotide
gatggatttctggacatttggacatataatgcagaattgttagttctactggaaaatgaa

SEQ ID NO: 49301 - DNA, 60 bp, Artificial
  Synthetic oligonucleotide
ggagtgaaattggaatcaatggggatctatcagattctggcgatctactcaactgtcgcc

SEQ ID NO: 49302 - DNA, 60 bp, Artificial
  Synthetic oligonucleotide
gtatcagattctggcgatctactcaactgtcgccagttcactggtgcttttggtctccct

SEQ ID NO: 49303 - DNA, 60 bp, Artificial
  Synthetic oligonucleotide
ggatgaagattaccagggcagactgtgtaatcctctgaacccgtttgtcagtcataagga

SEQ ID NO: 49304 - DNA, 60 bp, Artificial
  Synthetic oligonucleotide
tgtcaatttattcaacagtggcgagttccctagcactggcaatcatggtagctggtctat

SEQ ID NO: 49305 - DNA, 60 bp, Artificial
  Synthetic oligonucleotide
gtcaatttattcaacagtggcgagttccctagcactggcaatcatggtagctggtctatc

SEQ ID NO: 49306 - DNA, 60 bp, Artificial
  Synthetic oligonucleotide
tcaatttattcaacagtggcgagttccctagcactggcaatcatggtagctggtctatct

SEQ ID NO: 49307 - DNA, 60 bp, Artificial
  Synthetic oligonucleotide
aaggatcaactctcccgaggagatctggagctgctggtgcgacagtaaagggagtcggaa

SEQ ID NO: 49308 - DNA, 60 bp, Artificial
  Synthetic oligonucleotide
ttttgggatttgtattcacgctcaccgtgcccagtgagcgaggactgcagcgtagacgct

SEQ ID NO: 49309 - DNA, 60 bp, Artificial
  Synthetic oligonucleotide
tgattatgaagggaggctgatccagaacagtataacaatagagagaatggttctctctgc

SEQ ID NO: 49310 - DNA, 60 bp, Artificial
  Synthetic oligonucleotide
actacccacagtattcagaagaagcaagactaaacagggaggaaataagtggagttaaat

SEQ ID NO: 49311 - DNA, 58 bp, Artificial
  Synthetic oligonucleotide
ggcaggaacagcagaatgctgtggatgttgacgatggtcattttgtcaacatagagct

SEQ ID NO: 49312 - DNA, 60 bp, Artificial
  Synthetic oligonucleotide
aattgaagaagctgtgggagcagacccgctcaaaggcaggactgttggtttcagatggag

SEQ ID NO: 49313 - DNA, 60 bp, Artificial
  Synthetic oligonucleotide
gaattgaagaagctgtgggagcagacccgctcaaaggcaggactgttggtttcagatgga

SEQ ID NO: 49314 - DNA, 60 bp, Artificial
  Synthetic oligonucleotide
atatggagtaaaagggttttcatttaaatacggcaatggtgtttggatcgggagaaccaa

SEQ ID NO: 49315 - DNA, 60 bp, Artificial
  Synthetic oligonucleotide
gtaaaagggttttcatttaaatacggcaatggtgtttggatcgggagaaccaaaagcatt

SEQ ID NO: 49316 - DNA, 60 bp, Artificial
  Synthetic oligonucleotide
gtctaattagaccaaatgagaatccagcacataaaagtcaattggtgtggatggcatgcc

SEQ ID NO: 49317 - DNA, 60 bp, Artificial
  Synthetic oligonucleotide
gtgtattggaagcaatggctttccttgaagaatcccacccagggatctttgaaaactcgt

SEQ ID NO: 49318 - DNA, 60 bp, Artificial
  Synthetic oligonucleotide
ggcaccaaacgatcttatgaacagatggaaactggtggagaacgccagaatgctactgag

SEQ ID NO: 49319 - DNA, 60 bp, Artificial
  Synthetic oligonucleotide
gctgggtaacggttgtttcgagttctatcacaaatgtgatgatgaatgtatggaaagtgt

SEQ ID NO: 49320 - DNA, 60 bp, Artificial
  Synthetic oligonucleotide
tgggaatgctgaaattgaagatctcatttttctggcacggtctgcactcatcctgagagg

SEQ ID NO: 49321 - DNA, 60 bp, Artificial
  Synthetic oligonucleotide
ccctaactgtgaatgtgagaggctcaggaatgagaatactcgtaaggggcaactcccctg

SEQ ID NO: 49322 - DNA, 60 bp, Artificial
  Synthetic oligonucleotide
gttcagcaaacaagagtggataaactgacccaaggtcgccagacctatgactggacattg

SEQ ID NO: 49323 - DNA, 60 bp, Artificial
  Synthetic oligonucleotide
gcgtactggaatggatcccaggatgtgctctctgatgcaaggatcaactctcccgaggag

SEQ ID NO: 49324 - DNA, 60 bp, Artificial
  Synthetic oligonucleotide
cgtgcgtactggaatggatcccaggatgtgctctctgatgcaaggatcaactctcccgag

SEQ ID NO: 49325 - DNA, 60 bp, Artificial
  Synthetic oligonucleotide
cccgcagtattcagaagaagcaagactaaacagagaggaaataagtggagtaaaattgga

SEQ ID NO: 49326 - DNA, 57 bp, Artificial
  Synthetic oligonucleotide
atgagtcttctaaccgaggtcgaaacgtacgttctctctatcgtcccgtcaggcccc

SEQ ID NO: 49327 - DNA, 60 bp, Artificial
  Synthetic oligonucleotide
atgagtcttctaaccgaggtcgaaacgtacgttctctctatcgtcccatcaggccccctc

SEQ ID NO: 49328 - DNA, 60 bp, Artificial
  Synthetic oligonucleotide
tcatcctgagagggtcagtggcccacaagtcctgcttgcctgcttgtgtgtacgggcttg

SEQ ID NO: 49329 - DNA, 60 bp, Artificial
  Synthetic oligonucleotide
tcatcctgagaggatcggtggcccacaagtcctgcttgcctgcttgtgtgtacgggcttg

SEQ ID NO: 49330 - DNA, 60 bp, Artificial
  Synthetic oligonucleotide
ttgaatggaatgataacacagttcgagtctctgaaactatacagagattcgcttggagag

SEQ ID NO: 49331 - DNA, 60 bp, Artificial
  Synthetic oligonucleotide
ttgaatggaatgataacacagttcgagtctctgaaactatacagagattcgcttggagaa

SEQ ID NO: 49332 - DNA, 60 bp, Artificial
  Synthetic oligonucleotide
aaagacaagaccaatcctgtcacctctgactaaggggattttgggatttgtgttcacgct

SEQ ID NO: 49333 - DNA, 60 bp, Artificial
  Synthetic oligonucleotide
ccaacacggtgtcaagctttcaggtagactgctttctttggcatgtccgcaaacgatttg

SEQ ID NO: 49334 - DNA, 60 bp, Artificial
  Synthetic oligonucleotide
caacactgtgtcaagctttcaggtagactgctttctttggcatgtccgcaaacgatttgc

SEQ ID NO: 49335 - DNA, 60 bp, Artificial
  Synthetic oligonucleotide
tcccaacactgtgtcaagctttcaggtagactgctttctttggcatgtccgcaaacgatt

SEQ ID NO: 49336 - DNA, 60 bp, Artificial
  Synthetic oligonucleotide
cgaccaagaaggaaggttgatccagaacagtataacaatagagagaatggttctctctgc

SEQ ID NO: 49337 - DNA, 60 bp, Artificial
  Synthetic oligonucleotide
gaccaggaaggaaggttgatccagaacagtataacaatagagagaatggttctctctgca

SEQ ID NO: 49338 - DNA, 60 bp, Artificial
  Synthetic oligonucleotide
cgaccaggaaggaaggttgatccagaacagtataacaatagagagaatggttctctctgc

SEQ ID NO: 49339 - DNA, 60 bp, Artificial
  Synthetic oligonucleotide
atattcatcatcaatgatgtgggaaatcaacggtcctgagtcagtgcttgttaacaccta

SEQ ID NO: 49340 - DNA, 60 bp, Artificial
  Synthetic oligonucleotide
tattcatcatcaatgatgtgggaaatcaacggtcctgagtcagtgcttgttaacacctat

SEQ ID NO: 49341 - DNA, 59 bp, Artificial
  Synthetic oligonucleotide
attcatcatcaatgatgtgggaaatcaacggtcctgagtcagtgcttgttaacacctat

SEQ ID NO: 49342 - DNA, 60 bp, Artificial
  Synthetic oligonucleotide
acctaaatttctcccagatttgtatgactacaaagagaaccgattcattgaaattggagt

SEQ ID NO: 49343 - DNA, 60 bp, Artificial
  Synthetic oligonucleotide
cctaaatttctcccagatttgtatgactacaaagagaaccgattcattgaaattggagtg

SEQ ID NO: 49344 - DNA, 60 bp, Artificial
  Synthetic oligonucleotide
ctaattctcggcaaagaagacaaaagatatggaccagcattgagcatcaatgaactgagc

SEQ ID NO: 49345 - DNA, 60 bp, Artificial
  Synthetic oligonucleotide
actgggtgatgccccattccttgaccggcttcgccgagatcagaagtccctaagaggaag

SEQ ID NO: 49346 - DNA, 60 bp, Artificial
  Synthetic oligonucleotide
ccaggaactgggtgatgccccattccttgaccggcttcgccgagatcagaagtccctaag

SEQ ID NO: 49347 - DNA, 60 bp, Artificial
  Synthetic oligonucleotide
gatgtctttgcaggaaagaacaccgatctcgaggctctcatggaatggctaaagacaaga

SEQ ID NO: 49348 - DNA, 60 bp, Artificial
  Synthetic oligonucleotide
ggcgtctcaaggcaccaaacgatcttatgaacagatggaaactggtggagaacgccagaa

SEQ ID NO: 49349 - DNA, 52 bp, Artificial
  Synthetic oligonucleotide
ttgtgttcacgctcaccgtgcccagtgagcgaggactgcagcgtagacgctt

SEQ ID NO: 49350 - DNA, 60 bp, Artificial
  Synthetic oligonucleotide
gtcaatttattcaacagtggcgagttccctagcactggcaatcatgatagctggtctatc

SEQ ID NO: 49351 - DNA, 60 bp, Artificial
  Synthetic oligonucleotide
gaatttggcgccaagcgaacaatggagaagacgcaactgctggtctcactcacatgatga

SEQ ID NO: 49352 - DNA, 60 bp, Artificial
  Synthetic oligonucleotide
ctttagtctaattagaccaaatgagaatccagcacataaaagtcaattggtttggatggc

SEQ ID NO: 49353 - DNA, 60 bp, Artificial
  Synthetic oligonucleotide
ctttagtctcattagaccaaatgagaatccagcacataagagtcaattagtgtggatggc

SEQ ID NO: 49354 - DNA, 60 bp, Artificial
  Synthetic oligonucleotide
ctttagtctaattagaccaaatgagaatccagcacataaaagtcaattggtgtggatggc

SEQ ID NO: 49355 - DNA, 60 bp, Artificial
  Synthetic oligonucleotide
gtgcttacaggcaacctccaaacattgaaaataagagtacatgaggggtatgaggaattc

SEQ ID NO: 49356 - DNA, 60 bp, Artificial
  Synthetic oligonucleotide
tcattagaccaaatgagaatccagcacataaaagtcaattggtatggatggcatgccatt

SEQ ID NO: 49357 - DNA, 60 bp, Artificial
  Synthetic oligonucleotide
acacatttccagagaaagagaagagtgagggacaacatgaccaagaaaatggtcacccag

SEQ ID NO: 49358 - DNA, 60 bp, Artificial
  Synthetic oligonucleotide
agaaatacacatcaggaagacaagaaaagaaccctgctctcagaatgaaatggatgatgg

SEQ ID NO: 49359 - DNA, 60 bp, Artificial
  Synthetic oligonucleotide
gtgtacagcccactttctcagtacagagaaatcttcccttcgaaagagcgaccattatgg

SEQ ID NO: 49360 - DNA, 60 bp, Artificial
  Synthetic oligonucleotide
tcagcgttcagcccactttctcggtacagagaaatcttcccttcgaaagagcgaccatta

SEQ ID NO: 49361 - DNA, 60 bp, Artificial
  Synthetic oligonucleotide
taaaggcagtccgaggtgatctgaatttcgtaaacagagcaaatcaacgactgaacccca

SEQ ID NO: 49362 - DNA, 60 bp, Artificial
  Synthetic oligonucleotide
ggttgttttgagttctatcacaaatgtgatgatgaatgtatggagagcgtgaagaatggc

SEQ ID NO: 49363 - DNA, 56 bp, Artificial
  Synthetic oligonucleotide
cagagtgctgtggatgttgacgatggtcattttgtcaacatagagttggagtaaaa

SEQ ID NO: 49364 - DNA, 51 bp, Artificial
  Synthetic oligonucleotide
gtgctgtggatgttgacgatggtcattttgtcaacatagaattggagtaaa

SEQ ID NO: 49365 - DNA, 53 bp, Artificial
  Synthetic oligonucleotide
agtgctgtggatgttgacgatggtcattttgtcaacatagagttggagtaaaa

SEQ ID NO: 49366 - DNA, 60 bp, Artificial
  Synthetic oligonucleotide
cagagtgctgtggatgttgacgatggtcattttgtcaacatagagttggagtaaaaaact

SEQ ID NO: 49367 - DNA, 53 bp, Artificial
  Synthetic oligonucleotide
agtgctgtggatgttgacgatggtcattttgtcaacatagagctggagtaaaa

SEQ ID NO: 49368 - DNA, 53 bp, Artificial
  Synthetic oligonucleotide
aatgctgtggatgttgacgatggtcattttgtcaacatagaattggagtaaaa

SEQ ID NO: 49369 - DNA, 53 bp, Artificial
  Synthetic oligonucleotide
agtgctgtggatgttgacgatggtcattttgtcaacatagagctggaggaaaa

SEQ ID NO: 49370 - DNA, 53 bp, Artificial
  Synthetic oligonucleotide
agtgctgtggatgttgacgatggtcattttgtcaacatagaattggagtaaaa

SEQ ID NO: 49371 - DNA, 54 bp, Artificial
  Synthetic oligonucleotide
gtcttggccagacggtgctgagttgccattcaccattgacaagtagtttgttca

SEQ ID NO: 49372 - DNA, 60 bp, Artificial
  Synthetic oligonucleotide
ggaagcaatggctttccttgaagaatcccacccagggatctttgaaaactcgtgtcttga

SEQ ID NO: 49373 - DNA, 60 bp, Artificial
  Synthetic oligonucleotide
tggaagcaatggctttccttgaagaatcccacccagggatctttgaaaactcgtgtcttg

SEQ ID NO: 49374 - DNA, 60 bp, Artificial
  Synthetic oligonucleotide
gtattggaagcaatggctttccttgaagaatcccacccagggatctttgaaaactcgtgt

SEQ ID NO: 49375 - DNA, 60 bp, Artificial
  Synthetic oligonucleotide
cagaatatgcatacaaaattgtcaagaaaggggactcagcaattatgaaaagtgaattgg

SEQ ID NO: 49376 - DNA, 60 bp, Artificial
  Synthetic oligonucleotide
gctccagaatatgcatacaaaattgtcaagaaaggggactcagcaattatgaaaagtgaa

SEQ ID NO: 49377 - DNA, 60 bp, Artificial
  Synthetic oligonucleotide
ttgctccagaatatgcatacaaaattgtcaagaaaggggactcagcaattatgaaaagtg

SEQ ID NO: 49378 - DNA, 60 bp, Artificial
  Synthetic oligonucleotide
attgctccagaatatgcatacaaaattgtcaagaaaggggactcagcaattatgaaaagt

SEQ ID NO: 49379 - DNA, 60 bp, Artificial
  Synthetic oligonucleotide
ggaaatttcattgctccagaatatgcatacaaaattgtcaagaaaggggactcagcaatt

SEQ ID NO: 49380 - DNA, 60 bp, Artificial
  Synthetic oligonucleotide
ggaaatttcattgctccagaatatgcatacaaaattgtcaagaaaggggactcaacaatt

SEQ ID NO: 49381 - DNA, 60 bp, Artificial
  Synthetic oligonucleotide
aatggaaatttcattgctccagaatatgcatacaaaattgtcaagaaaggggactcagca

SEQ ID NO: 49382 - DNA, 60 bp, Artificial
  Synthetic oligonucleotide
gtaatggaaatttcattgctccagaatatgcatacaaaattgtcaagaaaggggactcag

SEQ ID NO: 49383 - DNA, 60 bp, Artificial
  Synthetic oligonucleotide
gttcggggagggagtacgacaaaaggatgtacacaaagggcctgttgaaggaactgtgct

SEQ ID NO: 49384 - DNA, 60 bp, Artificial
  Synthetic oligonucleotide
acgacaaaaggatgtacacaaagggcctgttgaaggaactgtgctcaatcctgcagggcc

SEQ ID NO: 49385 - DNA, 60 bp, Artificial
  Synthetic oligonucleotide
cctggacagagaagggaaacaagttcttgcatgcatgctaatacttagcacgcagtcgat

SEQ ID NO: 49386 - DNA, 60 bp, Artificial
  Synthetic oligonucleotide
cgcagtcgataggaaaaactgttctagttgagctgttagcgggcatcagcgggaaacatc

SEQ ID NO: 49387 - DNA, 60 bp, Artificial
  Synthetic oligonucleotide
gcagtactagaccataaagatggcccaccaaatggcagcaggtaattctttggactcaac

SEQ ID NO: 49388 - DNA, 60 bp, Artificial
  Synthetic oligonucleotide
aggtaattctttggactcaacatgcatgccccgaattggaccacacgtaagagagatgga

SEQ ID NO: 49389 - DNA, 60 bp, Artificial
  Synthetic oligonucleotide
cgagcaccgagacctctggttggacgaagttgccaagcagctcaacaccctcacacccgt

SEQ ID NO: 49390 - DNA, 60 bp, Artificial
  Synthetic oligonucleotide
caccgagacctctggttggacgaagttgccaagcagctcaacaccctcacacccgtccta

SEQ ID NO: 49391 - DNA, 60 bp, Artificial
  Synthetic oligonucleotide
ggtaaagcagcggatcgaagacttccgagagctagagaaacttgcagcaggttcggggag

SEQ ID NO: 49392 - DNA, 60 bp, Artificial
  Synthetic oligonucleotide
cggatcgaagacttccgagagctagagaaacttgcagcaggttcggggagggagtacgac

SEQ ID NO: 49393 - DNA, 60 bp, Artificial
  Synthetic oligonucleotide
aaactgttctagttgagctgttagcgggcatcagcgggaaacatccgatggaagtgctcc

SEQ ID NO: 49394 - DNA, 54 bp, Artificial
  Synthetic oligonucleotide
gggaaacatccgatggaagtgctcccagtgcatactaacaacattgtcatgtat

SEQ ID NO: 49395 - DNA, 59 bp, Artificial
  Synthetic oligonucleotide
acatgtacaacctcatcagggaggcatggttgagccttgagagggggacccatcgttga

SEQ ID NO: 49396 - DNA, 60 bp, Artificial
  Synthetic oligonucleotide
agagcgtcgattagagcaccgaccgatccttgtgtatcccgagtccgacaacatgtacaa

SEQ ID NO: 49397 - DNA, 60 bp, Artificial
  Synthetic oligonucleotide
gcaccgaccgatccttgtgtatcccgagtccgacaacatgtacaacctcatcagggaggc

SEQ ID NO: 49398 - DNA, 60 bp, Artificial
  Synthetic oligonucleotide
gacgtaccagatcctggtaggagtcggagagcaactgtaccaattgctcaagagcgtcga

SEQ ID NO: 49399 - DNA, 60 bp, Artificial
  Synthetic oligonucleotide
ggtaggagtcggagagcaactgtaccaattgctcaagagcgtcgattagagcaccgaccg

SEQ ID NO: 49400 - DNA, 60 bp, Artificial
  Synthetic oligonucleotide
gaactgtgctcaatcctgcagggccaccaggtgatcaagctcaaagggctgacgtaccag

SEQ ID NO: 49401 - DNA, 60 bp, Artificial
  Synthetic oligonucleotide
ctgcagggccaccaggtgatcaagctcaaagggctgacgtaccagatcctggtaggagtc

SEQ ID NO: 49402 - DNA, 60 bp, Artificial
  Synthetic oligonucleotide
ggcaaaggatggcctacaagagatctcaaattacatcagctccctggacagagaagggaa

SEQ ID NO: 49403 - DNA, 60 bp, Artificial
  Synthetic oligonucleotide
gggtacaaggcaaaggatggcctacaagagatctcaaattacatcagctccctggacaga

SEQ ID NO: 49404 - DNA, 60 bp, Artificial
  Synthetic oligonucleotide
aaggcggaaagtatgacatgaacagtgtgaagaaggggtacaaggcaaaggatggcctac

SEQ ID NO: 49405 - DNA, 60 bp, Artificial
  Synthetic oligonucleotide
tttcaaacaggctaaaaggcggaaagtatgacatgaacagtgtgaagaaggggtacaagg

SEQ ID NO: 49406 - DNA, 60 bp, Artificial
  Synthetic oligonucleotide
tgtgacaagaaagacgcctgaagcttttgtcctaatttcaaacaggctaaaaggcggaaa

SEQ ID NO: 49407 - DNA, 60 bp, Artificial
  Synthetic oligonucleotide
tctcgtgtacaaatatgtgacaagaaagacgcctgaagcttttgtcctaatttcaaacag

SEQ ID NO: 49408 - DNA, 60 bp, Artificial
  Synthetic oligonucleotide
cggtcagagatgagtctacgtacggcacggacgagttgatacaagtggctctcgtgtaca

SEQ ID NO: 49409 - DNA, 60 bp, Artificial
  Synthetic oligonucleotide
acggtcagagatgagtctacgtacggcacggacgagttgatacaagtggctctcgtgtac

SEQ ID NO: 49410 - DNA, 60 bp, Artificial
  Synthetic oligonucleotide
gagagatggagaactgccactctgaaaaaacctgcgctcgaatttggaaaacggtcagag

SEQ ID NO: 49411 - DNA, 60 bp, Artificial
  Synthetic oligonucleotide
ggactcaacatgcatgccccgaattggaccacacgtaagagagatggagaactgccactc

SEQ ID NO: 49412 - DNA, 60 bp, Artificial
  Synthetic oligonucleotide
caaacgaggagatcattcgagctgaagaagctgtgggagcagacccgctcaaaggcagga

SEQ ID NO: 49413 - DNA, 60 bp, Artificial
  Synthetic oligonucleotide
ggagatcattcgagctgaagaagctgtgggagcagacccgctcaaaggcaggactgttgg

SEQ ID NO: 49414 - DNA, 60 bp, Artificial
  Synthetic oligonucleotide
gctggcgaaatcacatgtgtgtgcagggataattggcatggctcgaaccgaccatgggtg

SEQ ID NO: 49415 - DNA, 60 bp, Artificial
  Synthetic oligonucleotide
gccggcgaaatcacatgtgtgtgcagggataattggcatggctccaatcggccatgggta

SEQ ID NO: 49416 - DNA, 60 bp, Artificial
  Synthetic oligonucleotide
gccggcgaaatcacatgtgtgtgcagggataattggcatggctcaaataggccatgggta

SEQ ID NO: 49417 - DNA, 60 bp, Artificial
  Synthetic oligonucleotide
atgccggcgaaatcacatgtgtgtgcagggataattggcatggctcaaataggccatggg

SEQ ID NO: 49418 - DNA, 60 bp, Artificial
  Synthetic oligonucleotide
catggaatggctaaagacaagaccaatcctgtcacctctgactaagggaattttagggtt

SEQ ID NO: 49419 - DNA, 60 bp, Artificial
  Synthetic oligonucleotide
ggctctcatggaatggctaaagacaagaccaatcctgtcacctctgactaagggaatttt

SEQ ID NO: 49420 - DNA, 60 bp, Artificial
  Synthetic oligonucleotide
tcatggaatggctaaagacaagaccaatcctgtcacctctgactaagggaattttagggt

SEQ ID NO: 49421 - DNA, 60 bp, Artificial
  Synthetic oligonucleotide
ctcatggaatggctaaagacaagaccaatcctgtcacctctgactaagggaattttaggg

SEQ ID NO: 49422 - DNA, 60 bp, Artificial
  Synthetic oligonucleotide
ttcctaattctaggcagagaggacaaaagatatggaccagcattgagcatcaatgaactg

SEQ ID NO: 49423 - DNA, 60 bp, Artificial
  Synthetic oligonucleotide
ttctctctgcatttgatgaaaggaggaacagatacctggaagaacatcccagtgcgggga

SEQ ID NO: 49424 - DNA, 60 bp, Artificial
  Synthetic oligonucleotide
agttgagaaacctaaatttctcccagatttgtatgactacaaagagaaccgattcattga

SEQ ID NO: 49425 - DNA, 60 bp, Artificial
  Synthetic oligonucleotide
gagaaacctaaatttctcccagatttgtatgactacaaagagaaccgatttattgagatt

SEQ ID NO: 49426 - DNA, 60 bp, Artificial
  Synthetic oligonucleotide
agtcgagaaacctaaatttctcccagatttgtatgactacaaagagaaccgattcatcga

SEQ ID NO: 49427 - DNA, 60 bp, Artificial
  Synthetic oligonucleotide
agtcgagaaacctaaatttctcccagatttgtatgactacaaagagaaccgattcattga

SEQ ID NO: 49428 - DNA, 60 bp, Artificial
  Synthetic oligonucleotide
gacccaaggtcgccagacctatgactggacattgaatagaaaccaaccggctgcaactgc

SEQ ID NO: 49429 - DNA, 60 bp, Artificial
  Synthetic oligonucleotide
taaactgacccaaggtcgccagacctatgactggacattgaatagaaaccaaccggctgc

SEQ ID NO: 49430 - DNA, 60 bp, Artificial
  Synthetic oligonucleotide
ggataaactgacccaaggtcgccagacctatgactggacattgaatagaaaccaaccggc

SEQ ID NO: 49431 - DNA, 60 bp, Artificial
  Synthetic oligonucleotide
tcactatgaggagtgctcctgttatcctgatgctggcgaaatcacatgtgtgtgcaggga

SEQ ID NO: 49432 - DNA, 60 bp, Artificial
  Synthetic oligonucleotide
agaactgggtgatgccccattccttgaccggcttcgccgagatcagaagtccctaagagg

SEQ ID NO: 49433 - DNA, 60 bp, Artificial
  Synthetic oligonucleotide
gaacaccgatctcgaggctctcatggagtggctaaagacaagaccaatcctgtcacctct

SEQ ID NO: 49434 - DNA, 60 bp, Artificial
  Synthetic oligonucleotide
cttgaggctctcatggaatggctaaagacaagaccaatcctgtcacctctgactaaggga

SEQ ID NO: 49435 - DNA, 60 bp, Artificial
  Synthetic oligonucleotide
cttgaggctctcatggaatggctaaagacaagaccaatcctgtcacctctgactaagggg

SEQ ID NO: 49436 - DNA, 60 bp, Artificial
  Synthetic oligonucleotide
catgatggaggccatggtgtctagggcccgaattgatgcacggattgacttcgaatctgg

SEQ ID NO: 49437 - DNA, 60 bp, Artificial
  Synthetic oligonucleotide
caatcagcttctggatgtgttctaatgggtctttgcagtgcagaatatgaatctgaggta

SEQ ID NO: 49438 - DNA, 60 bp, Artificial
  Synthetic oligonucleotide
gcgataaactctagtatgccattccacaacatacaccctctcaccatcggggaatgcccc

SEQ ID NO: 49439 - DNA, 60 bp, Artificial
  Synthetic oligonucleotide
cgataaactctagtatgccattccacaacatacaccctctcaccatcggggaatgcccca

SEQ ID NO: 49440 - DNA, 60 bp, Artificial
  Synthetic oligonucleotide
aaagatatggaccagcattaagcatcaatgaactgagcaatcttgcaaaaggggagaagg

SEQ ID NO: 49441 - DNA, 60 bp, Artificial
  Synthetic oligonucleotide
gggaggttttacatacagatgtgcactgaactcaaactcagcgaccaggaaggaaggttg

SEQ ID NO: 49442 - DNA, 53 bp, Artificial
  Synthetic oligonucleotide
aaggatcaactctcccgaggagatctggagctgccggtgcagcagtaaagggg

SEQ ID NO: 49443 - DNA, 53 bp, Artificial
  Synthetic oligonucleotide
aagggtcaactctcccgaggagatctggagctgccggtgcagcagtaaagggg

SEQ ID NO: 49444 - DNA, 60 bp, Artificial
  Synthetic oligonucleotide
tgatgcaaggatcaactctcccgaggagatctggagctgccggtgcagcagtaaaggggg

SEQ ID NO: 49445 - DNA, 59 bp, Artificial
  Synthetic oligonucleotide
tgatgcaaggatcaactctcccgaggagatctggagctgccggtgcagcagtaaagggg

SEQ ID NO: 49446 - DNA, 60 bp, Artificial
  Synthetic oligonucleotide
aagggtcaactctcccgaggagatctggagctgccggtgcagcagtaaagggggtaggga

SEQ ID NO: 49447 - DNA, 60 bp, Artificial
  Synthetic oligonucleotide
aaggatcaactctcccgaggagatctggagctgccggtgcagcagtaaagggggtaggga

SEQ ID NO: 49448 - DNA, 60 bp, Artificial
  Synthetic oligonucleotide
ctttagtctaattagaccaaatgagaatccagcacataaaagtcaattggtatggatggc

SEQ ID NO: 49449 - DNA, 60 bp, Artificial
  Synthetic oligonucleotide
ggccccaaggggacaactatctactagaggagttcaaattgcttcaaatgagaacatgga

SEQ ID NO: 49450 - DNA, 60 bp, Artificial
  Synthetic oligonucleotide
agctgggtaacggttgtttcgagttctaccacaaatgtgataatgaatgtatggaaagtg

SEQ ID NO: 49451 - DNA, 60 bp, Artificial
  Synthetic oligonucleotide
gctgggtaacggttgtttcgagttctaccacaaatgtgataatgaatgtatggaaagtgt

SEQ ID NO: 49452 - DNA, 60 bp, Artificial
  Synthetic oligonucleotide
gaaatacacatcaggtagacaagagaagaaccctgctctcagaatgaaatggatgatggc

SEQ ID NO: 49453 - DNA, 53 bp, Artificial
  Synthetic oligonucleotide
catcgggaagacaagagaagaaccctgctctcagaatgaaatggatgatggca

SEQ ID NO: 49454 - DNA, 52 bp, Artificial
  Synthetic oligonucleotide
aaaagtgatcagatttgcattggttaccatgcaaacaactcgacagagcagg

SEQ ID NO: 49455 - DNA, 60 bp, Artificial
  Synthetic oligonucleotide
tcccaagaggacagctatccaccagaggggttcaaattgcttcaaatgagaacatggaag

SEQ ID NO: 49456 - DNA, 60 bp, Artificial
  Synthetic oligonucleotide
catatggagtaaaagggttttcatttaaatacggcaatggtgtttggatcgggagaacca

SEQ ID NO: 49457 - DNA, 60 bp, Artificial
  Synthetic oligonucleotide
gttttcaggtagactgctttctttggcatgtccgcaaacgatttgcagaccaagaactgg

SEQ ID NO: 49458 - DNA, 60 bp, Artificial
  Synthetic oligonucleotide
agactgctttctttggcatgtccgcaaacgatttgcagaccaagaactgggtgatgcccc

SEQ ID NO: 49459 - DNA, 60 bp, Artificial
  Synthetic oligonucleotide
agctttcaggtagactgctttctttggcatgtccgcaaacgatttgcagaccaagaactg

SEQ ID NO: 49460 - DNA, 60 bp, Artificial
  Synthetic oligonucleotide
gctttcaggtagactgctttctttggcatgtccgcaaacgatttgcagaccaagaactgg

SEQ ID NO: 49461 - DNA, 50 bp, Artificial
  Synthetic oligonucleotide
caatagtcagtcttgtcaaaagtgaccagatttgcattggttaccatgca

SEQ ID NO: 49462 - DNA, 50 bp, Artificial
  Synthetic oligonucleotide
caacagtcagccttgttaaaagtgaccagatttgcattggttaccatgca

SEQ ID NO: 49463 - DNA, 50 bp, Artificial
  Synthetic oligonucleotide
caacagtcagtcttgttaaaagtgaccagatttgcattggttaccatgca

SEQ ID NO: 49464 - DNA, 60 bp, Artificial
  Synthetic oligonucleotide
ctggcacgatttggagctatgaaagccccattgaaactaaaagtaactgtatcattggga

SEQ ID NO: 49465 - DNA, 60 bp, Artificial
  Synthetic oligonucleotide
tgccagcttcttgaggggaaagtccatggggatccagagcgatgtgcaggttgatgctaa

SEQ ID NO: 49466 - DNA, 60 bp, Artificial
  Synthetic oligonucleotide
gaggagtagaagttgtcaatgcaacggaaacagtggagcggacaaacatccccaaaattt

SEQ ID NO: 49467 - DNA, 60 bp, Artificial
  Synthetic oligonucleotide
ctgcacatcgctctggatccccatggactttcccctcaagaagctggcacgatttggagc

SEQ ID NO: 49468 - DNA, 60 bp, Artificial
  Synthetic oligonucleotide
tctgcttgttatagtccctccactgtggtagcattccccttcgcaattagcatcaacctg

SEQ ID NO: 49469 - DNA, 60 bp, Artificial
  Synthetic oligonucleotide
cccaaaatttgctcaaaagggaaaagaaccactgatcttggccaatgcggactgttaggg

SEQ ID NO: 49470 - DNA, 60 bp, Artificial
  Synthetic oligonucleotide
gaggggaaagtccatggggatccagagcgatgtgcaggttgatgctaattgcgaagggga

SEQ ID NO: 49471 - DNA, 60 bp, Artificial
  Synthetic oligonucleotide
gtccctccactgtggtagcattccccttcgcaattagcatcaacctgcacatcgctctgg

SEQ ID NO: 49472 - DNA, 60 bp, Artificial
  Synthetic oligonucleotide
tcttgccattgcagtgggccttgttttcatatgtgtgaagaacggaaacatgcggtgcac

SEQ ID NO: 49473 - DNA, 60 bp, Artificial
  Synthetic oligonucleotide
ctagtgcatgtagaagatcagggtcttcattctatgcagaaatggagtggctcctgtcaa

SEQ ID NO: 49474 - DNA, 60 bp, Artificial
  Synthetic oligonucleotide
tcggcaattgatcagataaccggaaagttaaatagactcattgagaaaaccaaccagcaa

SEQ ID NO: 49475 - DNA, 60 bp, Artificial
  Synthetic oligonucleotide
gaagcaaaaagcatgatgccccgaagctaaaccaaagtatcacatctttgtagccactac

SEQ ID NO: 49476 - DNA, 60 bp, Artificial
  Synthetic oligonucleotide
atttgtgggaaagaagcattgtctgtatttgacaggagccactccatttctgcatagaat

SEQ ID NO: 49477 - DNA, 60 bp, Artificial
  Synthetic oligonucleotide
gcagttccttctccttgtgcattctgatgcctgaaaccgtaccacccgtcgaccagacct

SEQ ID NO: 49478 - DNA, 60 bp, Artificial
  Synthetic oligonucleotide
gctcatacagcttgttcatctctgaatcagccaaatcaatagtgtgctggttttccattg

SEQ ID NO: 49479 - DNA, 60 bp, Artificial
  Synthetic oligonucleotide
ttcagagatgaacaagctgtatgagcgagtgaggaaacaattaagggaaaatgctgaaga

SEQ ID NO: 49480 - DNA, 60 bp, Artificial
  Synthetic oligonucleotide
ccctgatcttctacatgcactagttgttccgttggtccttattccactatatgtgaatcc

SEQ ID NO: 49481 - DNA, 60 bp, Artificial
  Synthetic oligonucleotide
gctgaacttcttgtggcaatggaaaaccagcacactattgatttggctgattcagagatg

SEQ ID NO: 49482 - DNA, 60 bp, Artificial
  Synthetic oligonucleotide
ctctgtatttgctgtgatcataagtattgttccttatactagccatacaatcatcgtcac

SEQ ID NO: 49483 - DNA, 60 bp, Artificial
  Synthetic oligonucleotide
catcaatcttttgtgccgagtccaggaacacgaccgcagataaatggccagtccggacgg

SEQ ID NO: 49484 - DNA, 60 bp, Artificial
  Synthetic oligonucleotide
aatcgagagacgagaaggaaatgatgtttgttacccggggaagtttgttaatgaagaggc

SEQ ID NO: 49485 - DNA, 60 bp, Artificial
  Synthetic oligonucleotide
ccgctccactgtttccgttgcattgacaacttctactcctctctcagtgagtgtgtttac

SEQ ID NO: 49486 - DNA, 60 bp, Artificial
  Synthetic oligonucleotide
tgcatagaatgaagaccctgatcttctacatgcactagttgttccgttggtccttattcc

SEQ ID NO: 49487 - DNA, 60 bp, Artificial
  Synthetic oligonucleotide
tttagtttcaatggggctttcatagctccaaatcgtgccagcttcttgaggggaaagtcc

SEQ ID NO: 49488 - DNA, 60 bp, Artificial
  Synthetic oligonucleotide
gccaagatcagtggttcttttcccttttgagcaaattttggggatgtttgtccgctccac

SEQ ID NO: 49489 - DNA, 60 bp, Artificial
  Synthetic oligonucleotide
agtttggtctgttcggtggttgatcctgaatggtggattccccagactatcagagctgat

SEQ ID NO: 49490 - DNA, 60 bp, Artificial
  Synthetic oligonucleotide
gatgtttgtccgctccactgtttccgttgcattgacaacttctactcctctctcagtgag

SEQ ID NO: 49491 - DNA, 60 bp, Artificial
  Synthetic oligonucleotide
ggtcgcattgaggtggtccggtaatggtccctaacagtccgcattggccaagatcagtgg

SEQ ID NO: 49492 - DNA, 60 bp, Artificial
  Synthetic oligonucleotide
aaagggaaaagaaccactgatcttggccaatgcggactgttagggaccattaccggacca

SEQ ID NO: 49493 - DNA, 60 bp, Artificial
  Synthetic oligonucleotide
attctagaaattggtcgcattgaggtggtccggtaatggtccctaacagtccgcattggc

SEQ ID NO: 49494 - DNA, 60 bp, Artificial
  Synthetic oligonucleotide
ttccaaatatcatcaatcttttgtgccgagtccaggaacacgaccgcagataaatggcca

SEQ ID NO: 49495 - DNA, 60 bp, Artificial
  Synthetic oligonucleotide
gatcaaccaatgaaaatcaatccgtccggactggccatttatctgcggtcgtgttcctgg

SEQ ID NO: 49496 - DNA, 60 bp, Artificial
  Synthetic oligonucleotide
gttgtcaatgcaacggaaacagtggagcggacaaacatccccaaaatttgctcaaaaggg

SEQ ID NO: 49497 - DNA, 60 bp, Artificial
  Synthetic oligonucleotide
ccaactgctctgctatttatgttttgaaaaggcaatctgcttgttatagtccctccactg

SEQ ID NO: 49498 - DNA, 60 bp, Artificial
  Synthetic oligonucleotide
ccggggaagtttgttaatgaagaggcattgcgacaaatcctcagaggatcaggtgggatt

SEQ ID NO: 49499 - DNA, 60 bp, Artificial
  Synthetic oligonucleotide
cctctgaggatttgtcgcaatgcctcttcattaacaaacttccccgggtaacaaacatca

SEQ ID NO: 49500 - DNA, 60 bp, Artificial
  Synthetic oligonucleotide
cagtggttcttttcccttttgagcaaattttggggatgtttgtccgctccactgtttccg

SEQ ID NO: 49501 - DNA, 60 bp, Artificial
  Synthetic oligonucleotide
tccttattccactatatgtgaatcccattgtttctttgtcaatcccacctgatcctctga

SEQ ID NO: 49502 - DNA, 60 bp, Artificial
  Synthetic oligonucleotide
atgtgaatcccattgtttctttgtcaatcccacctgatcctctgaggatttgtcgcaatg

SEQ ID NO: 49503 - DNA, 60 bp, Artificial
  Synthetic oligonucleotide
ctgctgcagttccttctccttgtgcattctgatgcctgaaaccgtaccacccgtcgacca

SEQ ID NO: 49504 - DNA, 60 bp, Artificial
  Synthetic oligonucleotide
gcaaccagtgccatcctcttcagcattttcccttaattgtttcctcactcgctcatacag

SEQ ID NO: 49505 - DNA, 60 bp, Artificial
  Synthetic oligonucleotide
tggacatcatgctgtatcaaatggcaccaaagtaaacacactcactgagagaggagtaga

SEQ ID NO: 49506 - DNA, 60 bp, Artificial
  Synthetic oligonucleotide
cgggaacgttcttcatcccagttgccaataataaactttcctgttttacatatcttgggc

SEQ ID NO: 49507 - DNA, 60 bp, Artificial
  Synthetic oligonucleotide
gccttttcaaaacataaatagcagagcagttggcaaatgcccaagatatgtaaaacagga

SEQ ID NO: 49508 - DNA, 60 bp, Artificial
  Synthetic oligonucleotide
tgtattctattttgcatcgcttcttctctgtatttgctgtgatcataagtattgttcctt

SEQ ID NO: 49509 - DNA, 60 bp, Artificial
  Synthetic oligonucleotide
actgttagggaccattaccggaccacctcaatgcgaccaatttctagaattttcagctga

SEQ ID NO: 49510 - DNA, 60 bp, Artificial
  Synthetic oligonucleotide
tttcagctgatctaataatcgagagacgagaaggaaatgatgtttgttacccggggaagt

SEQ ID NO: 49511 - DNA, 60 bp, Artificial
  Synthetic oligonucleotide
tgaagaacggaaacatgcggtgcactatttgtatataagtttggaaaaaaacacccttgt

SEQ ID NO: 49512 - DNA, 60 bp, Artificial
  Synthetic oligonucleotide
tccttctcgtctctcgattattagatcagctgaaaattctagaattggtcgcattgaggt

SEQ ID NO: 49513 - DNA, 60 bp, Artificial
  Synthetic oligonucleotide
atcatgctttttgcttcttgccattgcagtgggccttgttttcatatgtgtgaagaacgg

SEQ ID NO: 49514 - DNA, 60 bp, Artificial
  Synthetic oligonucleotide
ttgccccagaatatgcatacaaaattgtcaagaaaggggactcaacaattatgaaaagtg

SEQ ID NO: 49515 - DNA, 60 bp, Artificial
  Synthetic oligonucleotide
agcaaaagcaggggttataccatagacaaccaaaagcaaaacaatggccatcatttatct

SEQ ID NO: 49516 - DNA, 58 bp, Artificial
  Synthetic oligonucleotide
gactttcatgattccaatgtcaagaatctgtatgataaagtcagaatgcagctgagag

SEQ ID NO: 49517 - DNA, 60 bp, Artificial
  Synthetic oligonucleotide
aaaatgagaggacacttgactttcatgattccaatgtcaagaatctgtatgataaagtca

SEQ ID NO: 49518 - DNA, 60 bp, Artificial
  Synthetic oligonucleotide
acaaatgtgatgatgaatgcatgaatagtgtgaaaaacgggacgtatgattatcccaagt

SEQ ID NO: 49519 - DNA, 50 bp, Artificial
  Synthetic oligonucleotide
gataaagtcagaatgcagctgagagacaacgtcaaagaactaggaaatgg

SEQ ID NO: 49520 - DNA, 60 bp, Artificial
  Synthetic oligonucleotide
gtcactggcaatcatgatggctgggatctctttctggatgtgctccaacgggtctctgca

SEQ ID NO: 49521 - DNA, 60 bp, Artificial
  Synthetic oligonucleotide
agtagcaggttctctgtcactggcaatcatgatggctgggatctctttctggatgtgctc

SEQ ID NO: 49522 - DNA, 60 bp, Artificial
  Synthetic oligonucleotide
ctcctgttcacagcagtgagaggggaccagatatgcattggataccatgccaataattcc

SEQ ID NO: 49523 - DNA, 60 bp, Artificial
  Synthetic oligonucleotide
attggataccatgccaataattccacagagaaggtcgacacaattctagagcggaacgtc

SEQ ID NO: 49524 - DNA, 60 bp, Artificial
  Synthetic oligonucleotide
ccatgccaataattccacagagaaggtcgacacaattctagagcggaacgtcactgtgac

SEQ ID NO: 49525 - DNA, 60 bp, Artificial
  Synthetic oligonucleotide
gcggaacgtcactgtgactcatgccaagaacattcttgagaagacccataacggaaagtt

SEQ ID NO: 49526 - DNA, 60 bp, Artificial
  Synthetic oligonucleotide
acggaaagttatgcaaactaaacggaatccctccacttgaactaggggactgtagcattg

SEQ ID NO: 49527 - DNA, 60 bp, Artificial
  Synthetic oligonucleotide
gcaaactaaacggaatccctccacttgaactaggggactgtagcattgccggatggctcc

SEQ ID NO: 49528 - DNA, 60 bp, Artificial
  Synthetic oligonucleotide
aggcttcaattgtgccagaatggtcctatataatggagaaagaaaacccgagagacggtt

SEQ ID NO: 49529 - DNA, 60 bp, Artificial
  Synthetic oligonucleotide
ccagaatggtcctatataatggagaaagaaaacccgagagacggtttgtgttatccaggc

SEQ ID NO: 49530 - DNA, 60 bp, Artificial
  Synthetic oligonucleotide
gcccaaagatagatggacacagcatacaacaactggaggttcgcgggcctgtgcggtgtc

SEQ ID NO: 49531 - DNA, 60 bp, Artificial
  Synthetic oligonucleotide
gtgcggtgtctggtaatccatcattcttcaggaacatggtctggctgacaaagaaaggat

SEQ ID NO: 49532 - DNA, 60 bp, Artificial
  Synthetic oligonucleotide
atatgtgggacaccataaattttgagagtactggtaatctaattgcaccagagtatggat

SEQ ID NO: 49533 - DNA, 60 bp, Artificial
  Synthetic oligonucleotide
tatgtgggacaccataaattttgagagtactggtaatctaattgcaccagagtatggatt

SEQ ID NO: 49534 - DNA, 60 bp, Artificial
  Synthetic oligonucleotide
cgggtttctagatgtgtggacatacaatgctgagcttctagttctgatggaaaatgagag

SEQ ID NO: 49535 - DNA, 60 bp, Artificial
  Synthetic oligonucleotide
gatgtgtggacatacaatgctgagcttctagttctgatggaaaatgagaggacacttgac

SEQ ID NO: 49536 - DNA, 60 bp, Artificial
  Synthetic oligonucleotide
aacaaggtaaattctgtgattgaaaagatgaacacccaatttgaagctgttgggaaagaa

SEQ ID NO: 49537 - DNA, 60 bp, Artificial
  Synthetic oligonucleotide
gtgattgaaaagatgaacacccaatttgaagctgttgggaaagaattcagtaacttagag

SEQ ID NO: 49538 - DNA, 60 bp, Artificial
  Synthetic oligonucleotide
gatatgcagcagacaaagaatccactcaaaaggcatttgatggaatcaccaacaaggtaa

SEQ ID NO: 49539 - DNA, 51 bp, Artificial
  Synthetic oligonucleotide
ccactcaaaaggcatttgatggaatcaccaacaaggtaaattctgtgattg

SEQ ID NO: 49540 - DNA, 60 bp, Artificial
  Synthetic oligonucleotide
aatggttgatggttggtatggataccatcacagcaatgaccagggatcaggatatgcagc

SEQ ID NO: 49541 - DNA, 60 bp, Artificial
  Synthetic oligonucleotide
gtatggataccatcacagcaatgaccagggatcaggatatgcagcagacaaagaatccac

SEQ ID NO: 49542 - DNA, 60 bp, Artificial
  Synthetic oligonucleotide
agaggattgtttggggcaatagctggttttatagaaggaggatggcaaggaatggttgat

SEQ ID NO: 49543 - DNA, 60 bp, Artificial
  Synthetic oligonucleotide
ggggcaatagctggttttatagaaggaggatggcaaggaatggttgatggttggtatgga

SEQ ID NO: 49544 - DNA, 60 bp, Artificial
  Synthetic oligonucleotide
gacagaacaaataacattgtaccagaatgtgggaacctatgtttccgtaggcacatcaac

SEQ ID NO: 49545 - DNA, 60 bp, Artificial
  Synthetic oligonucleotide
catcccattgatgagacagaacaaataacattgtaccagaatgtgggaacctatgtttcc

SEQ ID NO: 49546 - DNA, 60 bp, Artificial
  Synthetic oligonucleotide
cgtacaacaatacaagcggagaacaaatgctgataatttggggggtgcaccatcccattg

SEQ ID NO: 49547 - DNA, 60 bp, Artificial
  Synthetic oligonucleotide
gcggtgtctggtaatccatcattcttcaggaacatggtctggctgacaaagaaaggatca

SEQ ID NO: 49548 - DNA, 60 bp, Artificial
  Synthetic oligonucleotide
tcatttatctcattctcctgttcacagcagtgagaggggaccagatatgcattggatacc

SEQ ID NO: 49549 - DNA, 60 bp, Artificial
  Synthetic oligonucleotide
ggggttataccatagacaaccaaaagcaaaacaatggccatcatttatctcattctcctg

SEQ ID NO: 49550 - DNA, 60 bp, Artificial
  Synthetic oligonucleotide
gtgaatggactaggaagtagaatggaattctcttggaccctcttggatatgtgggacacc

SEQ ID NO: 49551 - DNA, 60 bp, Artificial
  Synthetic oligonucleotide
taaagtgaatggactaggaagtagaatggaattctcttggaccctcttggatatgtggga

SEQ ID NO: 49552 - DNA, 60 bp, Artificial
  Synthetic oligonucleotide
catgaaaacagaaggaacacttgagaactgtgagaccaaatgccaaactcctttgggagc

SEQ ID NO: 49553 - DNA, 60 bp, Artificial
  Synthetic oligonucleotide
gtagttcagggatcatgaaaacagaaggaacacttgagaactgtgagaccaaatgccaaa

SEQ ID NO: 49554 - DNA, 55 bp, Artificial
  Synthetic oligonucleotide
ttttgcttaatgcgtcttggttcaactccttcctcacacatgcactaaaatagtt

SEQ ID NO: 49555 - DNA, 60 bp, Artificial
  Synthetic oligonucleotide
ttgaatggaatgataacacagttcgagtctctgaaactctacagagattcgcttggagaa

SEQ ID NO: 49556 - DNA, 60 bp, Artificial
  Synthetic oligonucleotide
gctgggtaacggttgtttcgagttctatcacaaatgtgacaatgaatgtatggaaagtgt

SEQ ID NO: 49557 - DNA, 60 bp, Artificial
  Synthetic oligonucleotide
agctgggtaacggttgtttcgagttctatcacaaatgtgacaatgaatgtatggaaagtg

SEQ ID NO: 49558 - DNA, 60 bp, Artificial
  Synthetic oligonucleotide
tcatggcgtctcaaggcaccaaacgatcttatgaacagatggaaactggtggagaacgcc

SEQ ID NO: 49559 - DNA, 60 bp, Artificial
  Synthetic oligonucleotide
ggggaagatccgaaaatcgaaacgaacaaatttgctgcaatatgcacacacttggaggtc

SEQ ID NO: 49560 - DNA, 60 bp, Artificial
  Synthetic oligonucleotide
tgggggcgataaactctagtatgccattccacaacatacaccctctcaccatcggggaat

SEQ ID NO: 49561 - DNA, 60 bp, Artificial
  Synthetic oligonucleotide
tgggggcgataaactctagtatgccattccacaacatacaccctctcaccatcggggaaa

SEQ ID NO: 49562 - DNA, 60 bp, Artificial
  Synthetic oligonucleotide
tgggggcgataaactctagtatgccattccacaacatacaccctctcaccatcggagaat

SEQ ID NO: 49563 - DNA, 60 bp, Artificial
  Synthetic oligonucleotide
ctgggggcgataaactctagtatgccattccacaacatacaccctctcaccatcggggaa

SEQ ID NO: 49564 - DNA, 60 bp, Artificial
  Synthetic oligonucleotide
acgtacgttctctctatcgtcccgtcaggccccctcaaagccgagatcgcgcagagactt

SEQ ID NO: 49565 - DNA, 60 bp, Artificial
  Synthetic oligonucleotide
ggcagagaggacaaaagatatggacccgcattgagcatcaatgaactgagcaatcttgca

SEQ ID NO: 49566 - DNA, 60 bp, Artificial
  Synthetic oligonucleotide
cgatcttggggggctatatgaagcaattgaggagtgcctgattaatgatccctgggtttt

SEQ ID NO: 49567 - DNA, 60 bp, Artificial
  Synthetic oligonucleotide
ctcacaggaggattgcatgataaaggcagtccgaggtgatctgaatttcgtgaacagagc

SEQ ID NO: 49568 - DNA, 60 bp, Artificial
  Synthetic oligonucleotide
aatgaaagaatatggggaagatccgaaaatcgaaacgaacaaatttgctgcaatatgcac

SEQ ID NO: 49569 - DNA, 60 bp, Artificial
  Synthetic oligonucleotide
gaaagaacaccgatctcgaggctctcatggaatggctaaagacaagaccaatcctgtcac

SEQ ID NO: 49570 - DNA, 60 bp, Artificial
  Synthetic oligonucleotide
ggctttccttgaagaatcccacccagggatctttgaaaactcgtgtcttgaaacgatgga

SEQ ID NO: 49571 - DNA, 60 bp, Artificial
  Synthetic oligonucleotide
ctttccttgaagaatcccacccagggatctttgaaaactcgtgtcttgaaacgatggaaa

SEQ ID NO: 49572 - DNA, 60 bp, Artificial
  Synthetic oligonucleotide
ccttgaagaatcccacccagggatctttgaaaactcgtgtcttgaaacgatggaaattgt

SEQ ID NO: 49573 - DNA, 60 bp, Artificial
  Synthetic oligonucleotide
attaatgatccctgggttttgcttaatgcgtcttggttcaactccttcctcacacatgca

SEQ ID NO: 49574 - DNA, 60 bp, Artificial
  Synthetic oligonucleotide
aacgatccctgggttttgcttaatgcgtcttggttcaactccttcctcacacatgcactg

SEQ ID NO: 49575 - DNA, 60 bp, Artificial
  Synthetic oligonucleotide
gaacggctgcattgagggcaagctttctcaaatgtcaaaagaagtgaacgccagaattga

SEQ ID NO: 49576 - DNA, 60 bp, Artificial
  Synthetic oligonucleotide
cggctgcattgagggcaagctttctcaaatgtcaaaagaagtgaacgccagaattgagcc

SEQ ID NO: 49577 - DNA, 60 bp, Artificial
  Synthetic oligonucleotide
gaatgctgaaattgaagatctcatttttctggcacggtctgcactcatcctgagaggatc

SEQ ID NO: 49578 - DNA, 60 bp, Artificial
  Synthetic oligonucleotide
aatgctgaaattgaagatctcatttttctggcacggtctgcactcatcctgagaggatca

SEQ ID NO: 49579 - DNA, 60 bp, Artificial
  Synthetic oligonucleotide
cgggaatgctgaaattgaagatctcatctttctggcacggtctgcactcatcctgagagg

SEQ ID NO: 49580 - DNA, 60 bp, Artificial
  Synthetic oligonucleotide
ggtgttctcacaggaggattgcatgataaaggcagtccgaggtgatctgaatttcgtgaa

SEQ ID NO: 49581 - DNA, 60 bp, Artificial
  Synthetic oligonucleotide
gggcagaacatctgacatgaggactgaaatcataagaatgatggaaagcgccaaaccaga

SEQ ID NO: 49582 - DNA, 60 bp, Artificial
  Synthetic oligonucleotide
ggcaccaaacgatcttatgaacagatggaaactggtggagaacgccagaatgccactgag

SEQ ID NO: 49583 - DNA, 60 bp, Artificial
  Synthetic oligonucleotide
acaattggaatttctggcccagacaatggggctgtggctgtattgaaatacaatggcata

SEQ ID NO: 49584 - DNA, 60 bp, Artificial
  Synthetic oligonucleotide
tgcttgtcatgatggcactagttggttgacaattggaatttctggcccagacaatggggc

SEQ ID NO: 49585 - DNA, 60 bp, Artificial
  Synthetic oligonucleotide
atttctggcccagacaatggggctgtggctgtattgaaatacaatggcataataacagac

SEQ ID NO: 49586 - DNA, 60 bp, Artificial
  Synthetic oligonucleotide
gcctgattaatgatccctgggttttgcttaatgcgtcttggttcaactccttcctcacac

SEQ ID NO: 49587 - DNA, 60 bp, Artificial
  Synthetic oligonucleotide
gcaatcgaggagtgcctgattaatgatccctgggttttgcttaatgcgtcttggttcaac

SEQ ID NO: 49588 - DNA, 60 bp, Artificial
  Synthetic oligonucleotide
gcaattgaggagtgcctgattaatgatccctgggttttgcttaatgcgtcttggttcaac

SEQ ID NO: 49589 - DNA, 60 bp, Artificial
  Synthetic oligonucleotide
agcaattgaggagtgcctgattaatgatccctgggttttgcttaatgcgtcttggttcaa

SEQ ID NO: 49590 - DNA, 60 bp, Artificial
  Synthetic oligonucleotide
gaagcaattgaggagtgcctgattaatgatccctgggttttgcttaatgcgtcttggttc

SEQ ID NO: 49591 - DNA, 60 bp, Artificial
  Synthetic oligonucleotide
ccttgaagaatcccacccagggatctttgaaaactcgtgtcttgaaacaatggaaattgt

SEQ ID NO: 49592 - DNA, 60 bp, Artificial
  Synthetic oligonucleotide
atgagtcttctaaccgaggtcgaaacgtacgttctctctatcgtcccgtcaggccccctc

SEQ ID NO: 49593 - DNA, 60 bp, Artificial
  Synthetic oligonucleotide
gctttcaggtagactgctttctttggcatgtccgcaaacgatttgcagaccgagaactgg

SEQ ID NO: 49594 - DNA, 60 bp, Artificial
  Synthetic oligonucleotide
gctttcaggtagactgctttctttggcatgtccgcaaacgatttgcagaccaggaactgg

SEQ ID NO: 49595 - DNA, 60 bp, Artificial
  Synthetic oligonucleotide
cagaatttgcatttaaatttgtgagttcagattgtagttaaaaacacccttgtttctact

SEQ ID NO: 49596 - DNA, 60 bp, Artificial
  Synthetic oligonucleotide
gcgtatggggtaaaagggttttcatttaaatacggcaatggtgtttggatcgggagaacc

SEQ ID NO: 49597 - DNA, 60 bp, Artificial
  Synthetic oligonucleotide
gatggagtcaccaataaggtcaactcgatcattgacaaaatgaacactcagtttgaggcc

SEQ ID NO: 49598 - DNA, 60 bp, Artificial
  Synthetic oligonucleotide
caatagatggagtcaccaataaggtcaactcgatcattgacaaaatgaacactcagtttg

SEQ ID NO: 49599 - DNA, 60 bp, Artificial
  Synthetic oligonucleotide
gcccagtgaacgaggactgcagcgtagacgctttgtccagaatgccctaaatggaaatgg

SEQ ID NO: 49600 - DNA, 60 bp, Artificial
  Synthetic oligonucleotide
gcccagtgagcgaggactgcagcgtagacgctttgtccagaatgccctaaatggaaatgg

SEQ ID NO: 49601 - DNA, 60 bp, Artificial
  Synthetic oligonucleotide
tttgagagtaatggaaatttcattgctccagaatatgcatacaaaattgtcaagaaaggg

SEQ ID NO: 49602 - DNA, 60 bp, Artificial
  Synthetic oligonucleotide
ttcgagagtaatggaaatttcattgctccagaatatgcatacaaaattgtcaagaaaggg

SEQ ID NO: 49603 - DNA, 60 bp, Artificial
  Synthetic oligonucleotide
cgagagtaatggaaatttcattgctccagaatatgcatacaaaattgtcaagaaagggga

SEQ ID NO: 49604 - DNA, 60 bp, Artificial
  Synthetic oligonucleotide
ttctaaccgaggtcgaaacgtacgttctctctatcgtcccggcaggccccctcaaagccg

SEQ ID NO: 49605 - DNA, 60 bp, Artificial
  Synthetic oligonucleotide
attgagcatcaatgaactgagcaagcttgcaaaaggggagaaagctaatgtattgatagg

SEQ ID NO: 49606 - DNA, 60 bp, Artificial
  Synthetic oligonucleotide
aatgaactgagcaagcttgcaaaaggggagaaagctaatgtattgatagggcaaggagac

SEQ ID NO: 49607 - DNA, 60 bp, Artificial
  Synthetic oligonucleotide
aatgaactgagcaatcttacgaaaggggagaaagctaatgtattgatagggcaaggagac

SEQ ID NO: 49608 - DNA, 60 bp, Artificial
  Synthetic oligonucleotide
cggaagagcatcgtcgggcacctcaagcgccaatgcatcggtgagacccaaaaggcaatg

SEQ ID NO: 49609 - DNA, 60 bp, Artificial
  Synthetic oligonucleotide
ccaaaaggcaatgatcaaccagtttgagatggggaggtgggagtctctatccacatttgc

SEQ ID NO: 49610 - DNA, 60 bp, Artificial
  Synthetic oligonucleotide
agcaaaaacaggcagtcaaaatggctacagaccagatggacatctcgggccctcctccaa

SEQ ID NO: 49611 - DNA, 60 bp, Artificial
  Synthetic oligonucleotide
gataccatcttgtggcagaaataccccgtcacccaggagctagagattagcaactccctt

SEQ ID NO: 49612 - DNA, 60 bp, Artificial
  Synthetic oligonucleotide
ggagctagagattagcaactcccttgagatctacgccaacggtcacggcatcaaagaccg

SEQ ID NO: 49613 - DNA, 60 bp, Artificial
  Synthetic oligonucleotide
gctagagattagcaactcccttgagatctacgccaacggtcacggcatcaaagaccggct

SEQ ID NO: 49614 - DNA, 60 bp, Artificial
  Synthetic oligonucleotide
cgggcctctcgtccaccttctccacttgaagaggctccaagaaaatccaccaaagaaccc

SEQ ID NO: 49615 - DNA, 60 bp, Artificial
  Synthetic oligonucleotide
gggcctctcgtccaccttctccacttgaagaggctccaagaaaatccaccaaagaacccc

SEQ ID NO: 49616 - DNA, 60 bp, Artificial
  Synthetic oligonucleotide
caaagaaccccaaaacaaagaagcccttagaatcccctgctgtcaatgggatacggaaga

SEQ ID NO: 49617 - DNA, 60 bp, Artificial
  Synthetic oligonucleotide
caaagaagcccttagaatcccctgctgtcaatgggatacggaagagcatcgtcgggcacc

SEQ ID NO: 49618 - DNA, 60 bp, Artificial
  Synthetic oligonucleotide
atacggaagagcatcgtcgggcacctcaagcgccaatgcatcggtgagacccaaaaggca

SEQ ID NO: 49619 - DNA, 59 bp, Artificial
  Synthetic oligonucleotide
gaacaagaaaacactacgagtttgcgggccagatgagaagtggatcagcttcatgaacc

SEQ ID NO: 49620 - DNA, 60 bp, Artificial
  Synthetic oligonucleotide
cccactgatagccaactgcgaggattttgccggggcaacgctgtctgacgagtgggtgtt

SEQ ID NO: 49621 - DNA, 60 bp, Artificial
  Synthetic oligonucleotide
ggccggtactgcaagaagtctcaaaccaaggtcatcgggctgttcaccttccaatacgag

SEQ ID NO: 49622 - DNA, 60 bp, Artificial
  Synthetic oligonucleotide
agaggaaggaatttggccggtactgcaagaagtctcaaaccaaggtcatcgggctgttca

SEQ ID NO: 49623 - DNA, 60 bp, Artificial
  Synthetic oligonucleotide
ccacatttgctgcctctctgctggcaataaagcctcggatcgagaaccacttcgtgctga

SEQ ID NO: 49624 - DNA, 60 bp, Artificial
  Synthetic oligonucleotide
caaccagtttgagatggggaggtgggagtctctatccacatttgctgcctctctgctggc

SEQ ID NO: 49625 - DNA, 60 bp, Artificial
  Synthetic oligonucleotide
ttcgtgctgacgtacccactgatagccaactgcgaggattttgccggggcaacgctgtct

SEQ ID NO: 49626 - DNA, 60 bp, Artificial
  Synthetic oligonucleotide
gcctctctgctggcaataaagcctcggatcgagaaccacttcgtgctgacgtacccactg

SEQ ID NO: 49627 - DNA, 60 bp, Artificial
  Synthetic oligonucleotide
cccaagatcgatagaagggtcaaaaaggggccagatctcgtgcagaccttctttcaaagg

SEQ ID NO: 49628 - DNA, 60 bp, Artificial
  Synthetic oligonucleotide
gggctgttcaccttccaatacgagtactggtcaaagcctctgaagtctgccccaagatcg

SEQ ID NO: 49629 - DNA, 60 bp, Artificial
  Synthetic oligonucleotide
tccaacaagaccaaagataccatcttgtggcagaaataccccgtcacccaggagctagag

SEQ ID NO: 49630 - DNA, 60 bp, Artificial
  Synthetic oligonucleotide
ccgaaatacaaggggcaatggtatccattccttgcacttctacagatctccaacaagacc

SEQ ID NO: 49631 - DNA, 55 bp, Artificial
  Synthetic oligonucleotide
gtacgagatgatcagggaccagatgcgcactttggcatcgacacacaaaatcccc

SEQ ID NO: 49632 - DNA, 60 bp, Artificial
  Synthetic oligonucleotide
cagcatgtggacacagagagtcagatcccaaagatgtacgagatgatcagggaccagatg

SEQ ID NO: 49633 - DNA, 60 bp, Artificial
  Synthetic oligonucleotide
cctcctccaaagaaacagcatgtggacacagagagtcagatcccaaagatgtacgagatg

SEQ ID NO: 49634 - DNA, 60 bp, Artificial
  Synthetic oligonucleotide
ggcagtcaaaatggctacagaccagatggacatctcgggccctcctccaaagaaacagca

SEQ ID NO: 49635 - DNA, 60 bp, Artificial
  Synthetic oligonucleotide
acccgaaatacaaggggcaatggtatccattccttgcacttctacagatctccaacaaga

SEQ ID NO: 49636 - DNA, 58 bp, Artificial
  Synthetic oligonucleotide
cccctgaacattgaccacaactgcgaggttatcgggtccatcataatggctgcctgta

SEQ ID NO: 49637 - DNA, 60 bp, Artificial
  Synthetic oligonucleotide
tccccctgaacattgaccacaactgcgaggttatcgggtccatcataatggctgcctgta

SEQ ID NO: 49638 - DNA, 60 bp, Artificial
  Synthetic oligonucleotide
gtacgagatgatcagggaccagatgcgcactttggcatcgacacacaaaatccccctgaa

SEQ ID NO: 49639 - DNA, 60 bp, Artificial
  Synthetic oligonucleotide
gcgcccctcttacaacaatttcaccagcatagacgccctgcagtctgcctctgggtctca

SEQ ID NO: 49640 - DNA, 60 bp, Artificial
  Synthetic oligonucleotide
gtacatggacctaaaagtggaggggacaacctgcttctaccgaaagggcggccatgtaga

SEQ ID NO: 49641 - DNA, 53 bp, Artificial
  Synthetic oligonucleotide
aaaaggggccagatctcgtgcagaccttctttcaaaggaaagcgcccctctta

SEQ ID NO: 49642 - DNA, 60 bp, Artificial
  Synthetic oligonucleotide
ctttcaaaggaaagcgcccctcttacaacaatttcaccagcatagacgccctgcagtctg

SEQ ID NO: 49643 - DNA, 60 bp, Artificial
  Synthetic oligonucleotide
agtggaggggacaacctgcttctaccgaaagggcggccatgtagaggtggaattccctgg

SEQ ID NO: 49644 - DNA, 60 bp, Artificial
  Synthetic oligonucleotide
gccatgtagaggtggaattccctgggagcgcccactgcaacacatacctgttcggttgat

SEQ ID NO: 49645 - DNA, 60 bp, Artificial
  Synthetic oligonucleotide
aattatcactatgaggagtgctcctgttatcctgatgctggcgaaatcacatgtgtgtgc

SEQ ID NO: 49646 - DNA, 60 bp, Artificial
  Synthetic oligonucleotide
actatgaggagtgctcctgttatcctgatgctggcgaaatcacatgtgtgtgcagggata

SEQ ID NO: 49647 - DNA, 60 bp, Artificial
  Synthetic oligonucleotide
atgaggagtgctcctgttatcctgatgctggcgaaatcacatgtgtgtgcagggataatt

SEQ ID NO: 49648 - DNA, 60 bp, Artificial
  Synthetic oligonucleotide
aaacgatttgcagaccaggaactgggtgatgccccattccttgaccggcttcgccgagat

SEQ ID NO: 49649 - DNA, 60 bp, Artificial
  Synthetic oligonucleotide
aaacgatttgcagaccgagaactgggtgatgccccattccttgaccggcttcgccgagat

SEQ ID NO: 49650 - DNA, 60 bp, Artificial
  Synthetic oligonucleotide
caatagtcagtcttgtcaaaagtgaccagatttgcattggttaccatgcaaacaaatcga

SEQ ID NO: 49651 - DNA, 60 bp, Artificial
  Synthetic oligonucleotide
ggggaagatccgaaaatcgaaacgaacaaatttgctgcaatatgcacacacttggaagtc

SEQ ID NO: 49652 - DNA, 60 bp, Artificial
  Synthetic oligonucleotide
ggggaagatccgaaaatcgaaacgaacaaatttgctgcaatatgcacacacttagaagtc

SEQ ID NO: 49653 - DNA, 60 bp, Artificial
  Synthetic oligonucleotide
cactggaaccatgcgcaggcttgccgaccaaagtctcccaccgaacttctccagccttga

SEQ ID NO: 49654 - DNA, 60 bp, Artificial
  Synthetic oligonucleotide
tcgccgagatcagaagtccctaagaggaagaggcaacactcttggtctggacatcgaaac

SEQ ID NO: 49655 - DNA, 60 bp, Artificial
  Synthetic oligonucleotide
cacaggaaccatgcgcaggcttgccgaccaaagtctcccaccgaacttctccagccttga

SEQ ID NO: 49656 - DNA, 60 bp, Artificial
  Synthetic oligonucleotide
ggaaccatgcgcaggcttgccgaccaaagtctcccaccgaacttctccagccttgaaaac

SEQ ID NO: 49657 - DNA, 60 bp, Artificial
  Synthetic oligonucleotide
aaccatgcgcaggcttgccgaccaaagtctcccaccgaacttctccagccttgaaaattt

SEQ ID NO: 49658 - DNA, 60 bp, Artificial
  Synthetic oligonucleotide
aatcgccaccatgaggcctgcagacagcaaggcagggagattctactctgacatcctctc

SEQ ID NO: 49659 - DNA, 60 bp, Artificial
  Synthetic oligonucleotide
tcttctcaaaaccagattatctggaggcgaagggggtttcatatcaagtcctcaagaacg

SEQ ID NO: 49660 - DNA, 60 bp, Artificial
  Synthetic oligonucleotide
tccacactgctgagcatcttactagtctagccttagatgacagcccttctgcagtggtgt

SEQ ID NO: 49661 - DNA, 60 bp, Artificial
  Synthetic oligonucleotide
gcatcttactagtctagccttagatgacagcccttctgcagtggtgtacagcggctggca

SEQ ID NO: 49662 - DNA, 60 bp, Artificial
  Synthetic oligonucleotide
agtggaaacaggcagcaaagatggcttccaaccaccctgtaaggtcgttcagcgaggtct

SEQ ID NO: 49663 - DNA, 60 bp, Artificial
  Synthetic oligonucleotide
ggcaggtaatagacttcttaagtggagaagaggacccagcactccacactgctgagcatc

SEQ ID NO: 49664 - DNA, 60 bp, Artificial
  Synthetic oligonucleotide
gccaagaatttgttggctgtgcatgtttgttctgacgtgaaaatgtccctaaataagagg

SEQ ID NO: 49665 - DNA, 60 bp, Artificial
  Synthetic oligonucleotide
gctgtgcatgtttgttctgacgtgaaaatgtccctaaataagaggcaggtaatagacttc

SEQ ID NO: 49666 - DNA, 60 bp, Artificial
  Synthetic oligonucleotide
gaacgtcagcaacaaagttgcacttctccgagaaagcatatggtgggttacagagctgga

SEQ ID NO: 49667 - DNA, 60 bp, Artificial
  Synthetic oligonucleotide
cttcgatgagtcctggtacttatatggaatttctgctttttcagatggtgttccgggctg

SEQ ID NO: 49668 - DNA, 60 bp, Artificial
  Synthetic oligonucleotide
gagggtgcctgaaggctgctttgctattctgtctggggtcaatactgggatgtacaaccc

SEQ ID NO: 49669 - DNA, 60 bp, Artificial
  Synthetic oligonucleotide
ttcatctcaaagagggtgcctgaaggctgctttgctattctgtctggggtcaatactggg

SEQ ID NO: 49670 - DNA, 60 bp, Artificial
  Synthetic oligonucleotide
caaccctagagaacttaagcggagttatgtccaatctctgtctactgggacttcctgcga

SEQ ID NO: 49671 - DNA, 60 bp, Artificial
  Synthetic oligonucleotide
caatactgggatgtacaaccctagagaacttaagcggagttatgtccaatctctgtctac

SEQ ID NO: 49672 - DNA, 60 bp, Artificial
  Synthetic oligonucleotide
agtgtgcaacaggatttggaagattcacagagatctacagtcaagcaacctcactactac

SEQ ID NO: 49673 - DNA, 60 bp, Artificial
  Synthetic oligonucleotide
caaccctgatgaaacagtgtgcaacaggatttggaagattcacagagatctacagtcaag

SEQ ID NO: 49674 - DNA, 60 bp, Artificial
  Synthetic oligonucleotide
cctcactactacagtgcaagttatgatggtataccggttcatctcaaagagggtgcctga

SEQ ID NO: 49675 - DNA, 60 bp, Artificial
  Synthetic oligonucleotide
tacagtcaagcaacctcactactacagtgcaagttatgatggtataccggttcatctcaa

SEQ ID NO: 49676 - DNA, 55 bp, Artificial
  Synthetic oligonucleotide
ctctgtctactgggacttcctgcgaatttctgagatcgcttgacaagcttgccaa

SEQ ID NO: 49677 - DNA, 60 bp, Artificial
  Synthetic oligonucleotide
ctctgtctactgggacttcctgcgaatttctgagatcgcttgacaagcttgccaagaatt

SEQ ID NO: 49678 - DNA, 60 bp, Artificial
  Synthetic oligonucleotide
aaataagaggcaggtaatagacttcttaagtggagaagaggacccagcactccacactgc

SEQ ID NO: 49679 - DNA, 60 bp, Artificial
  Synthetic oligonucleotide
gcaaagatggcttccaaccaccctgtaaggtcgttcagcgaggtctgctgtgccgaggca

SEQ ID NO: 49680 - DNA, 60 bp, Artificial
  Synthetic oligonucleotide
caaacgatcttatgaacagatggaaactggtggagaacgccagaatgccactgagatcag

SEQ ID NO: 49681 - DNA, 60 bp, Artificial
  Synthetic oligonucleotide
acgatcttatgaacagatggaaactggtggagaacgccagaatgccactgagatcagggc

SEQ ID NO: 49682 - DNA, 60 bp, Artificial
  Synthetic oligonucleotide
aactattgcttgaagtggagcaagagataagaaccttctcgtttcagcttatttgatgat

SEQ ID NO: 49683 - DNA, 60 bp, Artificial
  Synthetic oligonucleotide
ggcgtcaagcgaacaatggagaagacgcaactgctggtcttacccacctgatgatatggc

SEQ ID NO: 49684 - DNA, 60 bp, Artificial
  Synthetic oligonucleotide
gggaggttttacatacagatgtgcactgaactcaaactcagcgactatgaagggaggctg

SEQ ID NO: 49685 - DNA, 51 bp, Artificial
  Synthetic oligonucleotide
gctcagcaagggcagacagactttgagcttcttaaggaacaggaatcaacc

SEQ ID NO: 49686 - DNA, 60 bp, Artificial
  Synthetic oligonucleotide
cgttccccaagcattgcacatcaaaacaggccaaaagggaccagaagaaatctctacgac

SEQ ID NO: 49687 - DNA, 59 bp, Artificial
  Synthetic oligonucleotide
caagaactgctgtatgcatacacaggaccagcgccagtagcatacgggaccagaacaag

SEQ ID NO: 49688 - DNA, 60 bp, Artificial
  Synthetic oligonucleotide
tgatcctgctctctagagaactgaaggccaaatacccagaagcatttgaacggctgaaag

SEQ ID NO: 49689 - DNA, 60 bp, Artificial
  Synthetic oligonucleotide
ctactttcacatacgaagtagcaacaaaccttgccagatttgactttgaggaatatgatg

SEQ ID NO: 49690 - DNA, 60 bp, Artificial
  Synthetic oligonucleotide
aagtagcaacaaaccttgccagatttgactttgaggaatatgatgacggagagacagggc

SEQ ID NO: 49691 - DNA, 60 bp, Artificial
  Synthetic oligonucleotide
ggaaaaaacctgcacattgggcaccatgtggaagcatctagaaagaggacggctcaacag

SEQ ID NO: 49692 - DNA, 60 bp, Artificial
  Synthetic oligonucleotide
cgttggaataaacatgtcaccgagtaaatgcattctgataagtcctgcaggtatcggaga

SEQ ID NO: 49693 - DNA, 60 bp, Artificial
  Synthetic oligonucleotide
aaccgatttaccttcactggtccctggtggaaaaaatccttcaagtgatctagccatggg

SEQ ID NO: 49694 - DNA, 60 bp, Artificial
  Synthetic oligonucleotide
gagttacgacgacatgttcaagcaagcagaattgttgcgatggtctctaaaactcgttgg

SEQ ID NO: 49695 - DNA, 60 bp, Artificial
  Synthetic oligonucleotide
gcatggattgattgtgaactgctagagatggagtatgcagagctcagcaagggcagacag

SEQ ID NO: 49696 - DNA, 60 bp, Artificial
  Synthetic oligonucleotide
aattacaggggaccacgtggagagtagtgacgatttcatccactttttcaaagcaaagag

SEQ ID NO: 49697 - DNA, 60 bp, Artificial
  Synthetic oligonucleotide
ctacaacaaaacttaggaaggccaatcggacaatcaatgctaagttatctcagagctgtg

SEQ ID NO: 49698 - DNA, 60 bp, Artificial
  Synthetic oligonucleotide
ttcaatcttagttctactctactagccttaatagcagcagataggtctgaaattacaggg

SEQ ID NO: 49699 - DNA, 60 bp, Artificial
  Synthetic oligonucleotide
actctactagccttaatagcagcagataggtctgaaattacaggggaccacgtggagagt

SEQ ID NO: 49700 - DNA, 60 bp, Artificial
  Synthetic oligonucleotide
ccaaaagatcacctcttttgttgaagaatgcttcccagaactcactatcgggaacaccac

SEQ ID NO: 49701 - DNA, 60 bp, Artificial
  Synthetic oligonucleotide
cttttgttgaagaatgcttcccagaactcactatcgggaacaccacaatgccaggcacag

SEQ ID NO: 49702 - DNA, 52 bp, Artificial
  Synthetic oligonucleotide
ggaacaccacaatgccaggcacagtaaaacaggcttgcaaacgaaggctgga

SEQ ID NO: 49703 - DNA, 60 bp, Artificial
  Synthetic oligonucleotide
tcacagcaagaactgaagaagtggtgagcttccggccagaaggcaagctgccaatgattc

SEQ ID NO: 49704 - DNA, 60 bp, Artificial
  Synthetic oligonucleotide
ccaatgattctggaagacaacagtgtgggcagctgtttcaaatacacctttaccagaaac

SEQ ID NO: 49705 - DNA, 60 bp, Artificial
  Synthetic oligonucleotide
gacaacagtgtgggcagctgtttcaaatacacctttaccagaaaccgcacagtgactgac

SEQ ID NO: 49706 - DNA, 60 bp, Artificial
  Synthetic oligonucleotide
aatgctaagttatctcagagctgtgatggaagtgttggcaatgcctaaaactactttcac

SEQ ID NO: 49707 - DNA, 60 bp, Artificial
  Synthetic oligonucleotide
aagcaaagagttacgacgacatgttcaagcaagcagaattgttgcgatggtctctaaaac

SEQ ID NO: 49708 - DNA, 60 bp, Artificial
  Synthetic oligonucleotide
ctgctctctagagaactgaaggccaaatacccagaagcatttgaacggctgaaagcatgg

SEQ ID NO: 49709 - DNA, 60 bp, Artificial
  Synthetic oligonucleotide
tagccatgggactaaatgttatcaggcattctatcaacaccaaccaaatgaacttcataa

SEQ ID NO: 49710 - DNA, 60 bp, Artificial
  Synthetic oligonucleotide
atgttatcaggcattctatcaacaccaaccaaatgaacttcataagtggagacttggcat

SEQ ID NO: 49711 - DNA, 52 bp, Artificial
  Synthetic oligonucleotide
agcaaaaacaagcagttgacagtcatgaatctcttctctcccagaacagggc

SEQ ID NO: 49712 - DNA, 60 bp, Artificial
  Synthetic oligonucleotide
gaggggaagagaagttggccaagctttcaagcaagttggaggctgtctcagaagtaactg

SEQ ID NO: 49713 - DNA, 60 bp, Artificial
  Synthetic oligonucleotide
cggctgaaagcatggattgattgtgaactgctagagatggagtatgcagagctcagcaag

SEQ ID NO: 49714 - DNA, 60 bp, Artificial
  Synthetic oligonucleotide
agaagaaatctctacgacatctccgagtagtggcttccacagagattctgtgatcctgct

SEQ ID NO: 49715 - DNA, 60 bp, Artificial
  Synthetic oligonucleotide
cgatgaactgctgcctaatgcaataaaggacaaagaggggaaaattgtaggcatcagatg

SEQ ID NO: 49716 - DNA, 60 bp, Artificial
  Synthetic oligonucleotide
gatgccctcagaattcgatgaactgctgcctaatgcaataaaggacaaagaggggaaaat

SEQ ID NO: 49717 - DNA, 60 bp, Artificial
  Synthetic oligonucleotide
ggactgacttaccagaaagaaggagttgttagggtgttcccttttggggagatgccctca

SEQ ID NO: 49718 - DNA, 60 bp, Artificial
  Synthetic oligonucleotide
gctaggagaggaagagctcagaagaatcatgaaccctagcaatccaatcacagcaagaac

SEQ ID NO: 49719 - DNA, 60 bp, Artificial
  Synthetic oligonucleotide
ggacccagatgcaatgaggctaatgtggacagtgtttcttgaagactatccacagtgggt

SEQ ID NO: 49720 - DNA, 60 bp, Artificial
  Synthetic oligonucleotide
gaagtaactggggagctgagtggggatcaggaaaaattcaatgagtgtttggacccagat

SEQ ID NO: 49721 - DNA, 60 bp, Artificial
  Synthetic oligonucleotide
tggccaagctttcaagcaagttggaggctgtctcagaagtaactggggagctgagtgggg

SEQ ID NO: 49722 - DNA, 60 bp, Artificial
  Synthetic oligonucleotide
cagtactcttgaaccaaggtgctccaaccgtccacagcgtgtcaaccctccacctcgacg

SEQ ID NO: 49723 - DNA, 60 bp, Artificial
  Synthetic oligonucleotide
catttaagaaggacccagtactcttgaaccaaggtgctccaaccgtccacagcgtgtcaa

SEQ ID NO: 49724 - DNA, 60 bp, Artificial
  Synthetic oligonucleotide
agcgtgtcaaccctccacctcgacgaagtttgtctcagatatcaaatgcatttgctagga

SEQ ID NO: 49725 - DNA, 60 bp, Artificial
  Synthetic oligonucleotide
ggagacttggcattgaggatcttcaccaaagcctatcgccattcttacatggcagaagga

SEQ ID NO: 49726 - DNA, 60 bp, Artificial
  Synthetic oligonucleotide
aacttcataagtggagacttggcattgaggatcttcaccaaagcctatcgccattcttac

SEQ ID NO: 49727 - DNA, 60 bp, Artificial
  Synthetic oligonucleotide
gcagaaggaatcactcgaagaacaaaattcctggaggcatttaagaaggacccagtactc

SEQ ID NO: 49728 - DNA, 60 bp, Artificial
  Synthetic oligonucleotide
aggggaaaattgtaggcatcagatgcacattaggcatgtttatgggaatgttcaatctta

SEQ ID NO: 49729 - DNA, 60 bp, Artificial
  Synthetic oligonucleotide
cctgcacattgggcaccatgtggaagcatctagaaagaggacggctcaacaggcgtacca

SEQ ID NO: 49730 - DNA, 60 bp, Artificial
  Synthetic oligonucleotide
ccattcttacatggcagaaggaatcactcgaagaacaaaattcctggaggcatttaagaa

SEQ ID NO: 49731 - DNA, 60 bp, Artificial
  Synthetic oligonucleotide
cgacatctccgagtagtggcttccacagagattctgtgatcctgctctctagagaactga

SEQ ID NO: 49732 - DNA, 60 bp, Artificial
  Synthetic oligonucleotide
gaagaaaacgttccccaagcattgcacatcaaaacaggccaaaagggaccagaagaaatc

SEQ ID NO: 49733 - DNA, 60 bp, Artificial
  Synthetic oligonucleotide
gaaaccatagagtatctacaacaaaacttaggaaggccaatcggacaatcaatgctaagt

SEQ ID NO: 49734 - DNA, 60 bp, Artificial
  Synthetic oligonucleotide
tctctaaaactcgttggaataaacatgtcaccgagtaaatgcattctgataagtcctgca

SEQ ID NO: 49735 - DNA, 60 bp, Artificial
  Synthetic oligonucleotide
atcctgagaggatcagtggcccacaagtcctgcttgcctgcttgtgtgtacgggcttgcc

SEQ ID NO: 49736 - DNA, 60 bp, Artificial
  Synthetic oligonucleotide
tcatcctgagaggatcagtggcccacaagtcctgcttgcctgcttgtgtgtatgggcttg

SEQ ID NO: 49737 - DNA, 60 bp, Artificial
  Synthetic oligonucleotide
actattgcttgaagtggagcaagagataagaactttctcgtttcagcttatttgatgata

SEQ ID NO: 49738 - DNA, 60 bp, Artificial
  Synthetic oligonucleotide
ttcctaattctaggcaacgaggacaaaagatatggaccagcattgagcatcaatgaactg

SEQ ID NO: 49739 - DNA, 60 bp, Artificial
  Synthetic oligonucleotide
gcactaattccaggagcggctttgaaatgatttgggatccaaatgggtggactggaacag

SEQ ID NO: 49740 - DNA, 60 bp, Artificial
  Synthetic oligonucleotide
ggagaaccaaaagcactaattccaggagcggctttgaaatgatttgggatccaaatgggt

SEQ ID NO: 49741 - DNA, 60 bp, Artificial
  Synthetic oligonucleotide
gtgtttggatcgggagaaccaaaagcactaattccaggagcggctttgaaatgatttggg

SEQ ID NO: 49742 - DNA, 60 bp, Artificial
  Synthetic oligonucleotide
tggatcgggagaaccaaaagcactaattccaggagcggctttgaaatgatttgggatcca

SEQ ID NO: 49743 - DNA, 60 bp, Artificial
  Synthetic oligonucleotide
agcactaattccaggagcggctttgaaatgatttgggatccaaatgggtggactgaaacg

SEQ ID NO: 49744 - DNA, 60 bp, Artificial
  Synthetic oligonucleotide
gatcgggagaaccaaaagcactaattccaggagcggctttgaaatgatttgggatccaaa

SEQ ID NO: 49745 - DNA, 60 bp, Artificial
  Synthetic oligonucleotide
tcgggagaaccaaaagcactaattccaggagcggctttgaaatgatttgggatccaaatg

SEQ ID NO: 49746 - DNA, 60 bp, Artificial
  Synthetic oligonucleotide
caaaagcactaattccaggagcggctttgaaatgatttgggatccaaatgggtggactgg

SEQ ID NO: 49747 - DNA, 60 bp, Artificial
  Synthetic oligonucleotide
gccccagaatatgcatacaaaattgtcaagaaaggggactcaacaattatgaaaagtgaa

SEQ ID NO: 49748 - DNA, 60 bp, Artificial
  Synthetic oligonucleotide
gggacggactccaatcctctgatgatttcgctctcatagtgaatgcaccgaatcatgagg

SEQ ID NO: 49749 - DNA, 60 bp, Artificial
  Synthetic oligonucleotide
cttagggacaacctggaacctgggaccttcgatcttggagggctatatgaagcaattgag

SEQ ID NO: 49750 - DNA, 60 bp, Artificial
  Synthetic oligonucleotide
ttagggacaacctggaacctgggaccttcgatcttggagggctatatgaagcaattgagg

SEQ ID NO: 49751 - DNA, 60 bp, Artificial
  Synthetic oligonucleotide
atgagtcttctaaccgaggtcgaaacgtacgttctctctatcatcccgtcaggccccctc

SEQ ID NO: 49752 - DNA, 60 bp, Artificial
  Synthetic oligonucleotide
acacaattcgaaaaatcgccacaatgaggcctgcagactgcaaagcgggaaagttctact

SEQ ID NO: 49753 - DNA, 60 bp, Artificial
  Synthetic oligonucleotide
ggcagtgagaatggcttccaacttaccagtgaggtctttcagcgaggtctgctgcgctga

SEQ ID NO: 49754 - DNA, 60 bp, Artificial
  Synthetic oligonucleotide
cgagtgccagaggggtgcttcgccatcctttccggtgtgaacactgggatgtataacccg

SEQ ID NO: 49755 - DNA, 60 bp, Artificial
  Synthetic oligonucleotide
tcaaaacgagtgccagaggggtgcttcgccatcctttccggtgtgaacactgggatgtat

SEQ ID NO: 49756 - DNA, 60 bp, Artificial
  Synthetic oligonucleotide
ccactgtgcaagttatgatggtataccgcttcatatcaaaacgagtgccagaggggtgct

SEQ ID NO: 49757 - DNA, 60 bp, Artificial
  Synthetic oligonucleotide
caagtgacctcaccaccactgtgcaagttatgatggtataccgcttcatatcaaaacgag

SEQ ID NO: 49758 - DNA, 60 bp, Artificial
  Synthetic oligonucleotide
tgatgagactgtatgtaataggatttggaagattcaccgggacctacagtcaagtgacct

SEQ ID NO: 49759 - DNA, 60 bp, Artificial
  Synthetic oligonucleotide
cctcagggacctcctgcgagtttttgaggtctttggacaagctagcgaagaacttgttgg

SEQ ID NO: 49760 - DNA, 60 bp, Artificial
  Synthetic oligonucleotide
ttctgcagtggtgtacagtggatggcagcaggaggcgataaagctgcacaacacaattcg

SEQ ID NO: 49761 - DNA, 60 bp, Artificial
  Synthetic oligonucleotide
ctgcagtggtgtacagtggatggcagcaggaggcgataaagctgcacaacacaattcgaa

SEQ ID NO: 49762 - DNA, 60 bp, Artificial
  Synthetic oligonucleotide
gagacaagtgatagattttataagtggagaagaagaccccactctccacacagcagaaca

SEQ ID NO: 49763 - DNA, 60 bp, Artificial
  Synthetic oligonucleotide
gattttataagtggagaagaagaccccactctccacacagcagaacacctaacaagcctg

SEQ ID NO: 49764 - DNA, 54 bp, Artificial
  Synthetic oligonucleotide
ttttgaggtctttggacaagctagcgaagaacttgttggccgtgcacgtctgct

SEQ ID NO: 49765 - DNA, 60 bp, Artificial
  Synthetic oligonucleotide
tcgccacaatgaggcctgcagactgcaaagcgggaaagttctactccgacatcctctccg

SEQ ID NO: 49766 - DNA, 59 bp, Artificial
  Synthetic oligonucleotide
ggatgctttcgaccaaggaaagctcgcctacgatcgggatgtagtgctcatcggatgga

SEQ ID NO: 49767 - DNA, 60 bp, Artificial
  Synthetic oligonucleotide
agtggaaacaggcagtgagaatggcttccaacttaccagtgaggtctttcagcgaggtct

SEQ ID NO: 49768 - DNA, 60 bp, Artificial
  Synthetic oligonucleotide
aacttgttggccgtgcacgtctgctctgatgtgaagatgtccctcaacaagagacaagtg

SEQ ID NO: 49769 - DNA, 60 bp, Artificial
  Synthetic oligonucleotide
aagttctactccgacatcctctccgcctgcgaccagacaaaggagctgttggatgctttc

SEQ ID NO: 49770 - DNA, 60 bp, Artificial
  Synthetic oligonucleotide
ctccgacatcctctccgcctgcgaccagacaaaggagctgttggatgctttcgaccaagg

SEQ ID NO: 49771 - DNA, 60 bp, Artificial
  Synthetic oligonucleotide
tgggatgtataacccgagagagctaaaaaggagctatgtacagtctctgtcctcagggac

SEQ ID NO: 49772 - DNA, 60 bp, Artificial
  Synthetic oligonucleotide
cctctgttctggactgagaaggacttctcatatctggtcaaagacaatttcgaaatacag

SEQ ID NO: 49773 - DNA, 60 bp, Artificial
  Synthetic oligonucleotide
agctgtcagaaattttggacacagtgatatccagtatcgccaagatcgacgagagactta

SEQ ID NO: 49774 - DNA, 60 bp, Artificial
  Synthetic oligonucleotide
tggacacagtgatatccagtatcgccaagatcgacgagagacttatcggcagactgatca

SEQ ID NO: 49775 - DNA, 60 bp, Artificial
  Synthetic oligonucleotide
gcctccatagatgacctccacgcactcagtgcagcacaggcatttgagctggaagggctc

SEQ ID NO: 49776 - DNA, 60 bp, Artificial
  Synthetic oligonucleotide
gctggaagggctcagagcatcttttgctgaactggattcacgatttaggcagctgtcaga

SEQ ID NO: 49777 - DNA, 60 bp, Artificial
  Synthetic oligonucleotide
ggactgagaaggacttctcatatctggtcaaagacaatttcgaaatacagagggaagaag

SEQ ID NO: 49778 - DNA, 60 bp, Artificial
  Synthetic oligonucleotide
cgaaatacagagggaagaagtaaaaatcagctgcttcgtagatccagactattgggtagg

SEQ ID NO: 49779 - DNA, 60 bp, Artificial
  Synthetic oligonucleotide
gagagacttatcggcagactgatcaaagcacccgtttctagcagattcatctcagaggac

SEQ ID NO: 49780 - DNA, 60 bp, Artificial
  Synthetic oligonucleotide
cggcagactgatcaaagcacccgtttctagcagattcatctcagaggacaagtttctgct

SEQ ID NO: 49781 - DNA, 60 bp, Artificial
  Synthetic oligonucleotide
gaaattcgcataccatatgtgcaacatcgactggagatgcggagtcaccacctcccccgt

SEQ ID NO: 49782 - DNA, 60 bp, Artificial
  Synthetic oligonucleotide
tcagcactcttctgcctaatggaagcactgtggaacactctgctggggagcctctgttct

SEQ ID NO: 49783 - DNA, 60 bp, Artificial
  Synthetic oligonucleotide
cctaatggaagcactgtggaacactctgctggggagcctctgttctggactgagaaggac

SEQ ID NO: 49784 - DNA, 60 bp, Artificial
  Synthetic oligonucleotide
gggagacagtgcatatgtggacggcaggtggacccatgttggggacaaccatccttgcac

SEQ ID NO: 49785 - DNA, 60 bp, Artificial
  Synthetic oligonucleotide
ccgcccagcagagatgagttactgctttggggatcatctcaccagtgttcatacggggac

SEQ ID NO: 49786 - DNA, 60 bp, Artificial
  Synthetic oligonucleotide
tgttcatacggggacatctgccatgattgctgggggagcgattcctatgcatgcctggga

SEQ ID NO: 49787 - DNA, 55 bp, Artificial
  Synthetic oligonucleotide
atgcctgggacagctggaccctgccaaacattgggcgccaaggaaggagctcgtc

SEQ ID NO: 49788 - DNA, 57 bp, Artificial
  Synthetic oligonucleotide
gaaattcgcataccatatgtgcaacatcgactggagatgcggagtcaccacctcccc

SEQ ID NO: 49789 - DNA, 60 bp, Artificial
  Synthetic oligonucleotide
ggtggcctcgttgattctaatactggttgtaatgctaggctactgcattacccgcccagc

SEQ ID NO: 49790 - DNA, 60 bp, Artificial
  Synthetic oligonucleotide
tatccttaggggtagcagaacctgactgcaatacaaaaacagccacaggcccatatatat

SEQ ID NO: 49791 - DNA, 60 bp, Artificial
  Synthetic oligonucleotide
acagcctccatagatgacctccacgcactcagtgcagcacaggcatttgagctggaaggg

SEQ ID NO: 49792 - DNA, 60 bp, Artificial
  Synthetic oligonucleotide
acctgccctttggtaataaaagctggactgtggtgacagcctccatagatgacctccacg

SEQ ID NO: 49793 - DNA, 60 bp, Artificial
  Synthetic oligonucleotide
ctcagaggacaagtttctgctacatcagtgcgtggacagtgtggccaacaacaccaactg

SEQ ID NO: 49794 - DNA, 60 bp, Artificial
  Synthetic oligonucleotide
tctgctacatcagtgcgtggacagtgtggccaacaacaccaactgcgtgggagacagtgc

SEQ ID NO: 49795 - DNA, 60 bp, Artificial
  Synthetic oligonucleotide
cagtcagaagatggttggtcttttgtggtcaaatctaaagacgcgctcatccagaccatg

SEQ ID NO: 49796 - DNA, 60 bp, Artificial
  Synthetic oligonucleotide
gtgccctctggtacccttctgccgccgaagtcgattttaggggaactgtccagtcagaag

SEQ ID NO: 49797 - DNA, 60 bp, Artificial
  Synthetic oligonucleotide
ccagaccatgatgtacaccaaaaacggcggtaaagggacttctctcacggacctcttgga

SEQ ID NO: 49798 - DNA, 60 bp, Artificial
  Synthetic oligonucleotide
gatggttggtcttttgtggtcaaatctaaagacgcgctcatccagaccatgatgtacacc

SEQ ID NO: 49799 - DNA, 60 bp, Artificial
  Synthetic oligonucleotide
acctcttggactacccttctggttggcttaaggggcagctggggggcttgctatatggca

SEQ ID NO: 49800 - DNA, 55 bp, Artificial
  Synthetic oligonucleotide
aaaacggcggtaaagggacttctctcacggacctcttggactacccttctggttg

SEQ ID NO: 49801 - DNA, 60 bp, Artificial
  Synthetic oligonucleotide
cggtgtgtacttgttaattgctttcgcttttgtgctattgatcagactaattaagagtgc

SEQ ID NO: 49802 - DNA, 60 bp, Artificial
  Synthetic oligonucleotide
ctatatggcaatatcggtgtgtacttgttaattgctttcgcttttgtgctattgatcaga

SEQ ID NO: 49803 - DNA, 60 bp, Artificial
  Synthetic oligonucleotide
aacttcttcgaagtgacttcacaccaattttgtcatcaatatgcatgttacaacttctct

SEQ ID NO: 49804 - DNA, 56 bp, Artificial
  Synthetic oligonucleotide
attgatcagactaattaagagtgctggattatgctaaaaaactgctttgatatctc

SEQ ID NO: 49805 - DNA, 60 bp, Artificial
  Synthetic oligonucleotide
attgggtaggagaaaggaagaccaagaaagcgttttgccaagacgggaccaacttcttcg

SEQ ID NO: 49806 - DNA, 53 bp, Artificial
  Synthetic oligonucleotide
aaaatcagctgcttcgtagatccagactattgggtaggagaaaggaagaccaa

SEQ ID NO: 49807 - DNA, 60 bp, Artificial
  Synthetic oligonucleotide
acgagaaaagcaaggacctgccctttggtaataaaagctggactgtggtgacagcctcca

SEQ ID NO: 49808 - DNA, 60 bp, Artificial
  Synthetic oligonucleotide
gacgaactgctggaagctgtctacaaagaaagagctcacgagaaaagcaaggacctgccc

SEQ ID NO: 49809 - DNA, 60 bp, Artificial
  Synthetic oligonucleotide
caacttctctaaggacgaactgctggaagctgtctacaaagaaagagctcacgagaaaag

SEQ ID NO: 49810 - DNA, 60 bp, Artificial
  Synthetic oligonucleotide
acttcacaccaattttgtcatcaatatgcatgttacaacttctctaaggacgaactgctg

SEQ ID NO: 49811 - DNA, 60 bp, Artificial
  Synthetic oligonucleotide
gttgtattcggccaccagatacacaacctctgcacaaaatgagctacttaccgctggtta

SEQ ID NO: 49812 - DNA, 60 bp, Artificial
  Synthetic oligonucleotide
cagatataaacccaagccagtcactgtatccaagaagttgtattcggccaccagatacac

SEQ ID NO: 49813 - DNA, 60 bp, Artificial
  Synthetic oligonucleotide
taacggtggcctcgttgattctaatactggttgtaatgctaggctactgcattacccgcc

SEQ ID NO: 49814 - DNA, 60 bp, Artificial
  Synthetic oligonucleotide
ggccaccagatacacaacctctgcacaaaatgagctacttaccgctggttatcgcacagc

SEQ ID NO: 49815 - DNA, 60 bp, Artificial
  Synthetic oligonucleotide
ccatatatattggacagatataaacccaagccagtcactgtatccaagaagttgtattcg

SEQ ID NO: 49816 - DNA, 60 bp, Artificial
  Synthetic oligonucleotide
ggaagaccaagaaagcgttttgccaagacgggaccaacttcttcgaagtgacttcacacc

SEQ ID NO: 49817 - DNA, 60 bp, Artificial
  Synthetic oligonucleotide
attacccgcccagcagagatgagttactgctttggggatcatctcaccagtgttcatacg

SEQ ID NO: 49818 - DNA, 60 bp, Artificial
  Synthetic oligonucleotide
acaccaactgcgtgggagacagtgcatatgtggacggcaggtggacccatgttggggaca

SEQ ID NO: 49819 - DNA, 60 bp, Artificial
  Synthetic oligonucleotide
ccatgatggcaccagttggttgacaattggaatttctggcccagacaatggggctgtggc

SEQ ID NO: 49820 - DNA, 60 bp, Artificial
  Synthetic oligonucleotide
ttggaatttctggcccagacaatggggctgtggctgtattgaaatacaacggcataataa

SEQ ID NO: 49821 - DNA, 60 bp, Artificial
  Synthetic oligonucleotide
gcactaattccaggagcggctttgaaatgatttgggatccaaatgggtggactggaacgg

SEQ ID NO: 49822 - DNA, 60 bp, Artificial
  Synthetic oligonucleotide
ggcactagttggttgacaattggaatttctggcccagacaatggggctgtggctgtattg

SEQ ID NO: 49823 - DNA, 60 bp, Artificial
  Synthetic oligonucleotide
tgcttgccatgatggcaccagttggttgacaattggaatttctggcccagacaatggggc

SEQ ID NO: 49824 - DNA, 60 bp, Artificial
  Synthetic oligonucleotide
ccaataaagtcaactcgatcattgacaaaatgaacactcagtttgaggccgttggaaggg

SEQ ID NO: 49825 - DNA, 60 bp, Artificial
  Synthetic oligonucleotide
ccaataaggtcaactcgatcattgacaaaatgaacactcagtttgaggccgttggaaggg

SEQ ID NO: 49826 - DNA, 60 bp, Artificial
  Synthetic oligonucleotide
ccaataaggtcaactcgatcattgacaaaatgaacactcagtttgaggccgttggacggg

SEQ ID NO: 49827 - DNA, 60 bp, Artificial
  Synthetic oligonucleotide
ccaacaaggtcaactcgatcattgacaaaatgaacactcagtttgaggccgttggaaggg

SEQ ID NO: 49828 - DNA, 60 bp, Artificial
  Synthetic oligonucleotide
ccaataaggtcaactcgatcattgacaaaatgaacactcagtttgaggccgttggaagag

SEQ ID NO: 49829 - DNA, 60 bp, Artificial
  Synthetic oligonucleotide
ggtcaactcgatcattgacaaaatgaacactcagtttgaggccgttggaagggaatttaa

SEQ ID NO: 49830 - DNA, 60 bp, Artificial
  Synthetic oligonucleotide
ctaataaggtcaactcgatcattgacaaaatgaacactcagtttgaggccgttggaaggg

SEQ ID NO: 49831 - DNA, 59 bp, Artificial
  Synthetic oligonucleotide
ccaacactgtgacaagctttcaggtagactgctttctttggcatgtccgcaaacgattt

SEQ ID NO: 49832 - DNA, 60 bp, Artificial
  Synthetic oligonucleotide
ccaacactgtgacaagctttcaggtagactgctttctttggcatgtccgcaaacgatttg

SEQ ID NO: 49833 - DNA, 60 bp, Artificial
  Synthetic oligonucleotide
tccaacactgtgttaagctttcaggtagactgctttctttggcatgtccgcaaacgattt

SEQ ID NO: 49834 - DNA, 60 bp, Artificial
  Synthetic oligonucleotide
ccaacactgtgctaagttttcaggtagactgctttctttggcatgtccgcaaacgatttg

SEQ ID NO: 49835 - DNA, 60 bp, Artificial
  Synthetic oligonucleotide
ggtcgccagacctatgactggacattgaatagaaaccagccggctgcaaccgctttggcc

SEQ ID NO: 49836 - DNA, 60 bp, Artificial
  Synthetic oligonucleotide
gttatcatggaggtcgttttcccaaatgaagtgggagctagaatattgacatcagagtcc

SEQ ID NO: 49837 - DNA, 60 bp, Artificial
  Synthetic oligonucleotide
tgttatcatggaggtcgttttcccaaatgaagtgggagctagaatattgacatcagagtc

SEQ ID NO: 49838 - DNA, 60 bp, Artificial
  Synthetic oligonucleotide
tgtcatcatggaggtcgttttcccaaatgaagtgggagctagaatattgacatcagagtc

SEQ ID NO: 49839 - DNA, 60 bp, Artificial
  Synthetic oligonucleotide
aaacagattgtgtattggaagcaatggctttccttgaagaatcccacccagggatctttg

SEQ ID NO: 49840 - DNA, 60 bp, Artificial
  Synthetic oligonucleotide
gcacaaacagattgtgtattggaagcaatggctttccttgaagaatcccacccagggatc

SEQ ID NO: 49841 - DNA, 60 bp, Artificial
  Synthetic oligonucleotide
aaaagggttttcatttaaatacggcaatggtgtttggatcgggagaaccaaaagcactag

SEQ ID NO: 49842 - DNA, 60 bp, Artificial
  Synthetic oligonucleotide
gtaaaagggttttcatttaaatacggcaatggtgtttggatcgggagaaccaaaagcact

SEQ ID NO: 49843 - DNA, 54 bp, Artificial
  Synthetic oligonucleotide
agtcttctaaccgaggtcgaaacgtacgttctctctatcgtcccatcaggcccc

SEQ ID NO: 49844 - DNA, 60 bp, Artificial
  Synthetic oligonucleotide
caaaatttggagtatcaaataggatatatatgcagtggagttttcggagacaacccacgc

SEQ ID NO: 49845 - DNA, 60 bp, Artificial
  Synthetic oligonucleotide
tggagtcctcatcgggggacttgaatggaatgataacacagttcgagtctctgaaactct

SEQ ID NO: 49846 - DNA, 60 bp, Artificial
  Synthetic oligonucleotide
gggtcctaatcggaggacttgaatggaatgataacacagttcgagtctctgaaactctac

SEQ ID NO: 49847 - DNA, 57 bp, Artificial
  Synthetic oligonucleotide
ctcatcggaggacttgaatggaatgataacacagttcgagtctctgaaactctacag

SEQ ID NO: 49848 - DNA, 60 bp, Artificial
  Synthetic oligonucleotide
atgttcgagagtaagagcatgaagctacggacacaaataccagcagaaatgcttgcaaac

SEQ ID NO: 49849 - DNA, 60 bp, Artificial
  Synthetic oligonucleotide
tgttcgaaagtaagagcatgaagctacggacacaaataccagcagaaatgcttgcaaaca

SEQ ID NO: 49850 - DNA, 60 bp, Artificial
  Synthetic oligonucleotide
gagagtaagagcatgaagctacggacacaaataccagcagaaatgcttgcaaacattgac

SEQ ID NO: 49851 - DNA, 60 bp, Artificial
  Synthetic oligonucleotide
gtaagagcatgaagctacggacacaaataccagcagaaatgcttgcaaacattgacctga

SEQ ID NO: 49852 - DNA, 60 bp, Artificial
  Synthetic oligonucleotide
acgatccctgggttttgcttaatgcgtcttggttcaactccttcctcacacatgcactga

SEQ ID NO: 49853 - DNA, 60 bp, Artificial
  Synthetic oligonucleotide
gcctgattaacgatccctgggttttgcttaatgcgtcttggttcaactccttcctcacac

SEQ ID NO: 49854 - DNA, 60 bp, Artificial
  Synthetic oligonucleotide
cgatccctgggttttgcttaatgcgtcttggttcaactccttcctcacacatgcactgaa

SEQ ID NO: 49855 - DNA, 60 bp, Artificial
  Synthetic oligonucleotide
cgatccctgggttttgcttaatgcgtcttggttcaactccttcctcacacatgcactgta

SEQ ID NO: 49856 - DNA, 60 bp, Artificial
  Synthetic oligonucleotide
ccctgggttttgcttaatgcgtcttggttcaactccttcctcacacatgcactgagatag

SEQ ID NO: 49857 - DNA, 60 bp, Artificial
  Synthetic oligonucleotide
gatccctgggttttgcttaatgcgtcttggttcaactccttcctcacacatgcactgaga

SEQ ID NO: 49858 - DNA, 60 bp, Artificial
  Synthetic oligonucleotide
gaagcaattgaggagtgcctgattaacgatccctgggttttgcttaatgcgtcttggttc

SEQ ID NO: 49859 - DNA, 60 bp, Artificial
  Synthetic oligonucleotide
gcaattgaggagtgcctgattaacgatccctgggttttgcttaatgcgtcttggttcaac

SEQ ID NO: 49860 - DNA, 60 bp, Artificial
  Synthetic oligonucleotide
gacactgtgggttggtcttggccagacggtgctgagttgccattcaccattgacaagtag

SEQ ID NO: 49861 - DNA, 60 bp, Artificial
  Synthetic oligonucleotide
agtgacactgtgggttggtcttggccagacggtgctgagttgccattcaccattgacaag

SEQ ID NO: 49862 - DNA, 60 bp, Artificial
  Synthetic oligonucleotide
gtgacactgtgggttggtcttggccagacggtgctgagttgccattcaccattgacaagt

SEQ ID NO: 49863 - DNA, 60 bp, Artificial
  Synthetic oligonucleotide
aaagccaccagagggcttgtggtggacaccaccaataggatcatagtagggggtgaaaca

SEQ ID NO: 49864 - DNA, 60 bp, Artificial
  Synthetic oligonucleotide
ctcgggctttcatgcttaggggatcgcaaatagagtacgacatgaaagccaccagagggc

SEQ ID NO: 49865 - DNA, 60 bp, Artificial
  Synthetic oligonucleotide
gcaggtagtatccaagacagagacaagaagcaaacaaatgttcctcgggctttcatgctt

SEQ ID NO: 49866 - DNA, 60 bp, Artificial
  Synthetic oligonucleotide
aaacaggggtgtttgaggagcaacccaggtgctacctagtagacactccagaccacggat

SEQ ID NO: 49867 - DNA, 60 bp, Artificial
  Synthetic oligonucleotide
gagagagggcaaaggagggcccgaagggtatgtccaaacaggggtgtttgaggagcaacc

SEQ ID NO: 49868 - DNA, 60 bp, Artificial
  Synthetic oligonucleotide
gggtgaaacagtcctgagagagggcaaaggagggcccgaagggtatgtccaaacaggggt

SEQ ID NO: 49869 - DNA, 60 bp, Artificial
  Synthetic oligonucleotide
gaggagcaacccaggtgctacctagtagacactccagaccacggattgtcgatgggcctc

SEQ ID NO: 49870 - DNA, 60 bp, Artificial
  Synthetic oligonucleotide
taccaacacacaagatctaagcgacacgcgctccatagacaatctatgcggagaacttgt

SEQ ID NO: 49871 - DNA, 60 bp, Artificial
  Synthetic oligonucleotide
gcacccctactagaacccctacttgacatctgctactatggatccttcatagaaccgggc

SEQ ID NO: 49872 - DNA, 60 bp, Artificial
  Synthetic oligonucleotide
agaatttgtggacagtttcttcatgcatcactccaaagaccacaaggccttcttgatcca

SEQ ID NO: 49873 - DNA, 60 bp, Artificial
  Synthetic oligonucleotide
ccgggctttgaacagaccttcggattttacccagccggaaagagagaatttgtggacagt

SEQ ID NO: 49874 - DNA, 60 bp, Artificial
  Synthetic oligonucleotide
gtaaggtgcagacacaagaatctgcagtacacattgccagatctcttattgacagcaaca

SEQ ID NO: 49875 - DNA, 60 bp, Artificial
  Synthetic oligonucleotide
caaagtctgccgtgtgacagagctagacagcaccgtacagccgtacacctctgccactag

SEQ ID NO: 49876 - DNA, 60 bp, Artificial
  Synthetic oligonucleotide
tccggcttctataccacatactctgctgcaagtgttctgcccccaatacaccactctaga

SEQ ID NO: 49877 - DNA, 60 bp, Artificial
  Synthetic oligonucleotide
ctgccactagagagtttgtgctgggagaaacgctcaatgtatacacccaacatgagaatg

SEQ ID NO: 49878 - DNA, 60 bp, Artificial
  Synthetic oligonucleotide
gtctgccgtgtgacagagctagacagcaccgtacagccgtacacctctgccactagagag

SEQ ID NO: 49879 - DNA, 60 bp, Artificial
  Synthetic oligonucleotide
gagaacttgtgaagagatctctgaagtgcagatgcccaaaggagactctggtcgccaacc

SEQ ID NO: 49880 - DNA, 50 bp, Artificial
  Synthetic oligonucleotide
ccactctagacagcaagaggaaagcacacatgggagcagtagagaagctg

SEQ ID NO: 49881 - DNA, 60 bp, Artificial
  Synthetic oligonucleotide
agcaaaaacaagcgatggacagagaagaacccgcggaatcagagtgcaccttaagagctc

SEQ ID NO: 49882 - DNA, 60 bp, Artificial
  Synthetic oligonucleotide
gcgatggacagagaagaacccgcggaatcagagtgcaccttaagagctcttgtagaagag

SEQ ID NO: 49883 - DNA, 60 bp, Artificial
  Synthetic oligonucleotide
atagaaccgggctttgaacagaccttcggattttacccagccggaaagagagaatttgtg

SEQ ID NO: 49884 - DNA, 60 bp, Artificial
  Synthetic oligonucleotide
aggactgctgagatggcacatttcttgtgcagcaaatatcactatgtgcataccaacaca

SEQ ID NO: 49885 - DNA, 60 bp, Artificial
  Synthetic oligonucleotide
cagctgcacagacaggcagatagatgagatcaagattagtgcccccaagaacgcacccct

SEQ ID NO: 49886 - DNA, 60 bp, Artificial
  Synthetic oligonucleotide
ttattgacagcaacaaaaagtggctgcccaccgttgtagaccacacccccaggactgctg

SEQ ID NO: 49887 - DNA, 60 bp, Artificial
  Synthetic oligonucleotide
ccacggattgtcgatgggcctctccagattctgtgtacactctcaaggtcggtactttca

SEQ ID NO: 49888 - DNA, 60 bp, Artificial
  Synthetic oligonucleotide
tcggtactttcaatacgagaagaagatctctatatgggaggagaccgacaacatcaaagc

SEQ ID NO: 49889 - DNA, 60 bp, Artificial
  Synthetic oligonucleotide
cgagaagaagatctctatatgggaggagaccgacaacatcaaagcgactatcgactccca

SEQ ID NO: 49890 - DNA, 60 bp, Artificial
  Synthetic oligonucleotide
cagcaagagggcaaggattgtgtagtcgcagaacgggagtacagcttttttcttgaaaaa

SEQ ID NO: 49891 - DNA, 60 bp, Artificial
  Synthetic oligonucleotide
gatctctgaagtgcagatgcccaaaggagactctggtcgccaacctagacaagatcacca

SEQ ID NO: 49892 - DNA, 51 bp, Artificial
  Synthetic oligonucleotide
gtcgccaacctagacaagatcaccatacaagggagaccgatgagggaagtg

SEQ ID NO: 49893 - DNA, 60 bp, Artificial
  Synthetic oligonucleotide
gagctcccctacctgggaatatgccgagtggctatgggtctcagtacacaccacacaatg

SEQ ID NO: 49894 - DNA, 60 bp, Artificial
  Synthetic oligonucleotide
ccacacaatgaagattaggagcaccaagttctctatccttaacagtgaccaccctcgcat

SEQ ID NO: 49895 - DNA, 60 bp, Artificial
  Synthetic oligonucleotide
gaagattaggagcaccaagttctctatccttaacagtgaccaccctcgcattgaggtgaa

SEQ ID NO: 49896 - DNA, 60 bp, Artificial
  Synthetic oligonucleotide
accctcgcattgaggtgaaaaaggtcttctcattgagcccggatgtgcaagtgaccatac

SEQ ID NO: 49897 - DNA, 57 bp, Artificial
  Synthetic oligonucleotide
aaaaggtcttctcattgagcccggatgtgcaagtgaccataccttataggagattca

SEQ ID NO: 49898 - DNA, 57 bp, Artificial
  Synthetic oligonucleotide
gtgaccataccttataggagattcaaagggaaagcgaaggtctatttccaaaacgac

SEQ ID NO: 49899 - DNA, 60 bp, Artificial
  Synthetic oligonucleotide
ggagtacgagaggtcctcttcctccaggaaccaacctgagcggcagtgaattcatagata

SEQ ID NO: 49900 - DNA, 60 bp, Artificial
  Synthetic oligonucleotide
ggcaacatgctcgaagagtaccaagaccctgcagagacgaccgtgcaaagtctagtgccc

SEQ ID NO: 49901 - DNA, 60 bp, Artificial
  Synthetic oligonucleotide
agcgatccagactggcaccagtgtccaagaaagcgagcaaagatgtcttaccttgctata

SEQ ID NO: 49902 - DNA, 60 bp, Artificial
  Synthetic oligonucleotide
tatataccaagaccctttcagcagagccaaaagcctgctgaagtccaccatactgcacgc

SEQ ID NO: 49903 - DNA, 60 bp, Artificial
  Synthetic oligonucleotide
gcctccctctgtcaccagaactcaattggaaagagccagctcttagcaaagtctgccgtg

SEQ ID NO: 49904 - DNA, 60 bp, Artificial
  Synthetic oligonucleotide
actatcctggacctaggagaatccaagagaaccagggcaaacatagtagtaccagattac

SEQ ID NO: 49905 - DNA, 60 bp, Artificial
  Synthetic oligonucleotide
ggtccaagtacggaagccagaccagcctagaagtagttaacgccattctatatgcggaag

SEQ ID NO: 49906 - DNA, 60 bp, Artificial
  Synthetic oligonucleotide
accagattactggtccaagtacggaagccagaccagcctagaagtagttaacgccattct

SEQ ID NO: 49907 - DNA, 60 bp, Artificial
  Synthetic oligonucleotide
aaggtataccacaagcaagaaggatcatgcaccccagatgagactagtgtattcagtgag

SEQ ID NO: 49908 - DNA, 60 bp, Artificial
  Synthetic oligonucleotide
ctacaacacattcaaaaggtataccacaagcaagaaggatcatgcaccccagatgagact

SEQ ID NO: 49909 - DNA, 60 bp, Artificial
  Synthetic oligonucleotide
attcagtgagaaaaccatggccaatcagcatgactcccagcaaggagatccctctggtgt

SEQ ID NO: 49910 - DNA, 60 bp, Artificial
  Synthetic oligonucleotide
agatgagactagtgtattcagtgagaaaaccatggccaatcagcatgactcccagcaagg

SEQ ID NO: 49911 - DNA, 60 bp, Artificial
  Synthetic oligonucleotide
ctccccttcagaaagcctgtacaggcatgtcccactatagaggaggtaaatccggcttct

SEQ ID NO: 49912 - DNA, 60 bp, Artificial
  Synthetic oligonucleotide
acgccattctatatgcggaagacttgaaagtacagagatttttcagcacagaatggggtg

SEQ ID NO: 49913 - DNA, 60 bp, Artificial
  Synthetic oligonucleotide
atgtgaagatgtccctcaacaaaaggcaggtgatagattttataagcggtgaagaagatc

SEQ ID NO: 49914 - DNA, 60 bp, Artificial
  Synthetic oligonucleotide
gacaagctagcaaagaacttgctggctgtacatgtctgctctgatgtgaagatgtccctc

SEQ ID NO: 49915 - DNA, 60 bp, Artificial
  Synthetic oligonucleotide
gaagaagatcccaccctccacacagcagagcatctaacaagcttggccctggatgacagc

SEQ ID NO: 49916 - DNA, 60 bp, Artificial
  Synthetic oligonucleotide
cctcaacaaaaggcaggtgatagattttataagcggtgaagaagatcccaccctccacac

SEQ ID NO: 49917 - DNA, 60 bp, Artificial
  Synthetic oligonucleotide
cgaagttatgtgcaatccctgtcttcaggaacctcctgtgagtttctgagatcattagac

SEQ ID NO: 49918 - DNA, 60 bp, Artificial
  Synthetic oligonucleotide
gacgaaaccgtgtgtaataggatctggaagatccaccgggacctacagtcaagtgacctc

SEQ ID NO: 49919 - DNA, 60 bp, Artificial
  Synthetic oligonucleotide
atcattagacaagctagcaaagaacttgctggctgtacatgtctgctctgatgtgaagat

SEQ ID NO: 49920 - DNA, 60 bp, Artificial
  Synthetic oligonucleotide
gtgcaatccctgtcttcaggaacctcctgtgagtttctgagatcattagacaagctagca

SEQ ID NO: 49921 - DNA, 54 bp, Artificial
  Synthetic oligonucleotide
ccttcgaccagggaaaacttgcctatgaccgagacgtagtgctcatcgggtgga

SEQ ID NO: 49922 - DNA, 60 bp, Artificial
  Synthetic oligonucleotide
ccctccacacagcagagcatctaacaagcttggccctggatgacagcccttctgcagtgg

SEQ ID NO: 49923 - DNA, 60 bp, Artificial
  Synthetic oligonucleotide
ccaacctaccagtgaggtctttcagcgaagtctgctgtgctgaggcacgggcggctataa

SEQ ID NO: 49924 - DNA, 60 bp, Artificial
  Synthetic oligonucleotide
aaccactgtggaccatatggccataatcaagaagtacacatcaggaagacaagagaagaa

SEQ ID NO: 49925 - DNA, 55 bp, Artificial
  Synthetic oligonucleotide
taatcctgagaggatcagtggcccataagtcctgcttgcctgcttgtgtgtacgg

SEQ ID NO: 49926 - DNA, 60 bp, Artificial
  Synthetic oligonucleotide
caacacatttccagcgaaagagaagagtgagggacaacatgaccaagaaaatggtcacac

SEQ ID NO: 49927 - DNA, 60 bp, Artificial
  Synthetic oligonucleotide
ttgtgtttacgctcaccgtgcccagtgagcgaggactgcagcgtagacgctttgtccaga

SEQ ID NO: 49928 - DNA, 57 bp, Artificial
  Synthetic oligonucleotide
caagaaaggggactcagcaattatgaaaagtgaattggaatatggtaactgcaacat

SEQ ID NO: 49929 - DNA, 60 bp, Artificial
  Synthetic oligonucleotide
aattgtcaagaaaggggactcagcaattatgaaaagtgaattggaatatggtaactgcaa

SEQ ID NO: 49930 - DNA, 60 bp, Artificial
  Synthetic oligonucleotide
attgtaaagaaaggggactcagcaattatgaaaagtgaattggaatatggtaactgcaac

SEQ ID NO: 49931 - DNA, 60 bp, Artificial
  Synthetic oligonucleotide
aaattgtcaagaaaggggactcagcaattatgaaaagtgaattggaatatggtaactgca

SEQ ID NO: 49932 - DNA, 60 bp, Artificial
  Synthetic oligonucleotide
attgtcaagaaaggggactcagcaattatgaaaagtgaattggaatatggtaactgcaac

SEQ ID NO: 49933 - DNA, 54 bp, Artificial
  Synthetic oligonucleotide
agaaaggggactcagcaattatgaaaagtgaattggaatatggtaactgcgaca

SEQ ID NO: 49934 - DNA, 54 bp, Artificial
  Synthetic oligonucleotide
agaaaggggactcagcaattatgaaaagtgaattggaatatggtaactgcaaca

SEQ ID NO: 49935 - DNA, 56 bp, Artificial
  Synthetic oligonucleotide
caagaaaggggactcagcaattatgaaaagtgaattggaatatggtaactgcaaca

SEQ ID NO: 49936 - DNA, 50 bp, Artificial
  Synthetic oligonucleotide
caagaaaggggactcagcaattatgaaaagtgaattggaatatggtaact

SEQ ID NO: 49937 - DNA, 60 bp, Artificial
  Synthetic oligonucleotide
ttgtcaagaaaggggactcagcaattatgaaaagtgaattggaatatggtaactgcaaca

SEQ ID NO: 49938 - DNA, 60 bp, Artificial
  Synthetic oligonucleotide
cgatcttatgaacagatggaaactggtggagaacgccagaatgctactgagatcagggca

SEQ ID NO: 49939 - DNA, 60 bp, Artificial
  Synthetic oligonucleotide
ctcattgttcaggcacttagggacaacctggaacctggaactttcgatcttggagggctg

SEQ ID NO: 49940 - DNA, 56 bp, Artificial
  Synthetic oligonucleotide
ggggacttgaatggaatgataacacagttcgagtctctgaaactctacagagattc

SEQ ID NO: 49941 - DNA, 51 bp, Artificial
  Synthetic oligonucleotide
ggggacttgaatggaatgataacacagttcgagtctctgaaactctacaga

SEQ ID NO: 49942 - DNA, 57 bp, Artificial
  Synthetic oligonucleotide
cgactatgaaggaaggctgatccagaacagcataacaatagagagaatggttctctc

SEQ ID NO: 49943 - DNA, 60 bp, Artificial
  Synthetic oligonucleotide
acaatggggctgtggctgtattgaaatacaatggcataataacagacaccatcaagagtt

SEQ ID NO: 49944 - DNA, 60 bp, Artificial
  Synthetic oligonucleotide
cgtctcaaggcaccaaacgatcttatgaacagatggaaactggtggagaacgccagaatg

SEQ ID NO: 49945 - DNA, 60 bp, Artificial
  Synthetic oligonucleotide
ttggaatttccagcatggtggaggccatggtgtctagggcccgaattgatgcacgaattg

SEQ ID NO: 49946 - DNA, 60 bp, Artificial
  Synthetic oligonucleotide
actctacagagattcgcttggagaagcagtaatgaggatgggagacctccactccctcca

SEQ ID NO: 49947 - DNA, 60 bp, Artificial
  Synthetic oligonucleotide
gcacacaaaatgccattaacgggattacaaacaaggtgaactctattatcgagaaaatga

SEQ ID NO: 49948 - DNA, 53 bp, Artificial
  Synthetic oligonucleotide
gcacacaaaatgccattaacgggattacaaacaaggtgaacactgttatcgag

SEQ ID NO: 49949 - DNA, 60 bp, Artificial
  Synthetic oligonucleotide
gcacacaaaatgccattaacgggattacaaacaaggtgaactctgttatcgagaaaatga

SEQ ID NO: 49950 - DNA, 60 bp, Artificial
  Synthetic oligonucleotide
gatctactcaactgtcgccagttcactggtgcttttggtctccctgggggcaatcagctt

SEQ ID NO: 49951 - DNA, 60 bp, Artificial
  Synthetic oligonucleotide
ggccgccagacctatgactggacattgaatagaaaccagcctgctgcaactgctttggcc

SEQ ID NO: 49952 - DNA, 60 bp, Artificial
  Synthetic oligonucleotide
caggagttgagaagcctaaatttctcccagatttgtatgactacaaagagaaccgattta

SEQ ID NO: 49953 - DNA, 60 bp, Artificial
  Synthetic oligonucleotide
acatgactcttgaggaaatgtcaagggactggtccatgctcatacccaagcagaaagtgg

SEQ ID NO: 49954 - DNA, 60 bp, Artificial
  Synthetic oligonucleotide
ctttcaggtagactgctttctttggcatgtccgcaaacaatttgcagaccaagaactggg

SEQ ID NO: 49955 - DNA, 60 bp, Artificial
  Synthetic oligonucleotide
caggtagactgctttctttggcatgtccgcaaacaatttgcagaccaagaactgggtgat

SEQ ID NO: 49956 - DNA, 60 bp, Artificial
  Synthetic oligonucleotide
ggtacgcattcgcattgaataaggggtctggttctggaattatgatgtcggatgctcagg

SEQ ID NO: 49957 - DNA, 60 bp, Artificial
  Synthetic oligonucleotide
tgtgtaggctaccatgctaacaactccacagacactgtcgacacaatactggagaaaaat

SEQ ID NO: 49958 - DNA, 60 bp, Artificial
  Synthetic oligonucleotide
tgggcctagtatgtgccacttgtgagcagattgcagattcacagcatcggtctcacagac

SEQ ID NO: 49959 - DNA, 60 bp, Artificial
  Synthetic oligonucleotide
cgactatgaaggaaggctgattcagaacagcataacaatagagagaatggttctctctgc

SEQ ID NO: 49960 - DNA, 60 bp, Artificial
  Synthetic oligonucleotide
gactatgaaggaaggctgattcagaacagcataacaatagagagaatggttctctctgca

SEQ ID NO: 49961 - DNA, 60 bp, Artificial
  Synthetic oligonucleotide
gttcaacaaacaagagtggataaactgacccaaggccgccagacctatgactggacattg

SEQ ID NO: 49962 - DNA, 60 bp, Artificial
  Synthetic oligonucleotide
gggaatgctgagattgaagatctcatatttctggcacggtctgcactcatcctgagagga

SEQ ID NO: 49963 - DNA, 60 bp, Artificial
  Synthetic oligonucleotide
cggaggacttgaatggaatgataacacagttcgagtcactgaaactatacagagattcgc

SEQ ID NO: 49964 - DNA, 60 bp, Artificial
  Synthetic oligonucleotide
gtaataggatttggaagattcaccgggacctacagtcaagtgacctcaccaccactgtgc

SEQ ID NO: 49965 - DNA, 60 bp, Artificial
  Synthetic oligonucleotide
cttcgatgagtcttggtacttacatggcatgtctgctttttcagatggtgtgcctggata

SEQ ID NO: 49966 - DNA, 60 bp, Artificial
  Synthetic oligonucleotide
gttggccgtgcacgtctgctctgatgtgaagatgtccctcaacaagagacaagtgataga

SEQ ID NO: 49967 - DNA, 60 bp, Artificial
  Synthetic oligonucleotide
gtaataggatctggaagatccaccgggacctacagtcaagtgacctcaccaccactgtgc

SEQ ID NO: 49968 - DNA, 60 bp, Artificial
  Synthetic oligonucleotide
ctccaaacattgaaaataagagtacatgaggggtatgaggaattcacaatggttgggcgg

SEQ ID NO: 49969 - DNA, 60 bp, Artificial
  Synthetic oligonucleotide
gccagttggaatttccagcatggtggaggccatggtgtctagggcccgaattgatgcacg

SEQ ID NO: 49970 - DNA, 60 bp, Artificial
  Synthetic oligonucleotide
ggccagttggaatttccagcatggtggaggccatggtgtctagggcccgaattgatgcac

SEQ ID NO: 49971 - DNA, 60 bp, Artificial
  Synthetic oligonucleotide
tgtcacctctgactaaagggattttgggatttgtgttcacgctcaccgtgcccagtgagc

SEQ ID NO: 49972 - DNA, 60 bp, Artificial
  Synthetic oligonucleotide
cctgtcacctctgactaaagggattttgggatttgtgttcacgctcaccgtgcccagtga

SEQ ID NO: 49973 - DNA, 60 bp, Artificial
  Synthetic oligonucleotide
aacttctggagaggcgagaatggacgaagaacaaggattgcatatgagagaatgtgcaac

SEQ ID NO: 49974 - DNA, 60 bp, Artificial
  Synthetic oligonucleotide
aacgatccctgggttttgcttaatgcgtcttggttcaactccttcctcgcacatgcactg

SEQ ID NO: 49975 - DNA, 60 bp, Artificial
  Synthetic oligonucleotide
caatagacggagtcaccaataaggtcaactcgatcattgacaaaatgaacactcagtttg

SEQ ID NO: 49976 - DNA, 60 bp, Artificial
  Synthetic oligonucleotide
ctggtcctgttatgtacatttacagctacatatgcagacacaatatgtataggctaccat

SEQ ID NO: 49977 - DNA, 60 bp, Artificial
  Synthetic oligonucleotide
ctggtcctgttatgtgcacttgcagctacagatgcagacacaatatgtataggctaccat

SEQ ID NO: 49978 - DNA, 60 bp, Artificial
  Synthetic oligonucleotide
catgagtaatgaaggatcttatttcttcggagacaatgcagaggaatatgacaattgagg

SEQ ID NO: 49979 - DNA, 60 bp, Artificial
  Synthetic oligonucleotide
agaatatggggaagatccgaaaatcgaaacgaacaaatttgctgcaatatgcacacactt

SEQ ID NO: 49980 - DNA, 60 bp, Artificial
  Synthetic oligonucleotide
ggctagacaaatggtgcaggcaatgaggacaattgggactcaccctagctccagtgcagg

SEQ ID NO: 49981 - DNA, 60 bp, Artificial
  Synthetic oligonucleotide
ggctaggcaaatggtgcaggcaatgaggacaattgggactcaccctagctccagtacagg

SEQ ID NO: 49982 - DNA, 60 bp, Artificial
  Synthetic oligonucleotide
ggctaggcaaatggtgcaggcaatgaggacaattgggactcaccctagctccagtacggg

SEQ ID NO: 49983 - DNA, 60 bp, Artificial
  Synthetic oligonucleotide
ggctaggcaaatggtgcaggcaatgaggacaattgggactcaccctagctccagtgcagg

SEQ ID NO: 49984 - DNA, 60 bp, Artificial
  Synthetic oligonucleotide
gcaatggactccaacactcttgaactgagaagcagatattgggctataagaaccagaagc

SEQ ID NO: 49985 - DNA, 60 bp, Artificial
  Synthetic oligonucleotide
aagggtggataaactgacccaaggtcgccagacctatgactggacattgaatagaaacca

SEQ ID NO: 49986 - DNA, 60 bp, Artificial
  Synthetic oligonucleotide
gccagacctatgactggacattgaatagaaaccaaccggctgcaactgctttggccaaca

SEQ ID NO: 49987 - DNA, 60 bp, Artificial
  Synthetic oligonucleotide
ccagacctatgactggacattgaatagaaaccaaccggctgcaactgctttggccaacac

SEQ ID NO: 49988 - DNA, 60 bp, Artificial
  Synthetic oligonucleotide
aggtcgccagacctatgactggacattgaatagaaaccaaccggctgcaactgctttggc

SEQ ID NO: 49989 - DNA, 60 bp, Artificial
  Synthetic oligonucleotide
gagtggataaactgacccaaggtcgccagacctatgactggacattgaatagaaaccaac

SEQ ID NO: 49990 - DNA, 60 bp, Artificial
  Synthetic oligonucleotide
accaaatactgtcaatttattcaacagtggcgagttccctagcactggcaatcatggtag

SEQ ID NO: 49991 - DNA, 60 bp, Artificial
  Synthetic oligonucleotide
ggacttataatgctgaacttctggttctcatggaaaatgagagaaccctagactttcatg

SEQ ID NO: 49992 - DNA, 60 bp, Artificial
  Synthetic oligonucleotide
ataatgctgaacttctggttctcatggaaaatgaaagaactctagacttccatgactcaa

SEQ ID NO: 49993 - DNA, 60 bp, Artificial
  Synthetic oligonucleotide
gaagacggattcctagatgtctggacatataatgctgaacttctggttctcatggaaaat

SEQ ID NO: 49994 - DNA, 60 bp, Artificial
  Synthetic oligonucleotide
gctttcaggtagactgctttctttggcatgtccgcaatcgatttgcagaccaagaactgg

SEQ ID NO: 49995 - DNA, 60 bp, Artificial
  Synthetic oligonucleotide
gctttcaggtagactgctttctttggcatgtccgcaaacgacttgcagaccaagagctgg

SEQ ID NO: 49996 - DNA, 60 bp, Artificial
  Synthetic oligonucleotide
gctttcaggtagactgctttctttggcatgtccgcaaaagacttgcagaccaagaactgg

SEQ ID NO: 49997 - DNA, 60 bp, Artificial
  Synthetic oligonucleotide
gaggactgaaatcataagaatgatggaaagtgccaaaccagaagacgtgtccttccaggg

SEQ ID NO: 49998 - DNA, 60 bp, Artificial
  Synthetic oligonucleotide
gaggactgaaatcataagaatgatggaaagtgccaaaccagaagacgtgtctttccaggg

SEQ ID NO: 49999 - DNA, 60 bp, Artificial
  Synthetic oligonucleotide
tgaggactgaaatcataagaatgatggaaagtgccaaaccagaagatgtgtcattccagg

SEQ ID NO: 50000 - DNA, 60 bp, Artificial
  Synthetic oligonucleotide
acatgaggactgaaatcataagaatgatggaaagtgccaaaccagaagacgtgtccttcc

SEQ ID NO: 50001 - DNA, 60 bp, Artificial
  Synthetic oligonucleotide
acatgaggactgaaatcataagaatgatggaaagtgccaaaccagaagacgtgtctttcc

SEQ ID NO: 50002 - DNA, 60 bp, Artificial
  Synthetic oligonucleotide
gcaggacatctgacatgaggactgaaatcataagaatgatggaaagtgccagatcagaag

SEQ ID NO: 50003 - DNA, 60 bp, Artificial
  Synthetic oligonucleotide
tgaaggcaggacatctgacatgaggactgaaatcataagaatgatggaaagtgccagatc

SEQ ID NO: 50004 - DNA, 60 bp, Artificial
  Synthetic oligonucleotide
tactgagggcagaacgtctgacttgaggactgaaatcataagaatgatggaaagtgccag

SEQ ID NO: 50005 - DNA, 60 bp, Artificial
  Synthetic oligonucleotide
ctttccttgaagaatcccacccagggatctttgaaaactcgtgtcttgaaacaatggaaa

SEQ ID NO: 50006 - DNA, 60 bp, Artificial
  Synthetic oligonucleotide
ctttccttgaagaatcccacccagggatctttgaaaactcatgtcttgaaacgatggaag

SEQ ID NO: 50007 - DNA, 60 bp, Artificial
  Synthetic oligonucleotide
gctttccttgaagaatcccacccagggatctttgaaaactcgtgtcttggaacgatggaa

SEQ ID NO: 50008 - DNA, 60 bp, Artificial
  Synthetic oligonucleotide
ggctttccttgaagaatcccacccagggatctttgaaaactcgtgtcttgaaacaatgga

SEQ ID NO: 50009 - DNA, 60 bp, Artificial
  Synthetic oligonucleotide
gctttccttgaagaatcccacccagggatctttgaaaactcttgtcttgaaacgatggaa

SEQ ID NO: 50010 - DNA, 60 bp, Artificial
  Synthetic oligonucleotide
ggctttccttgaagaatcccacccagggatctttgaaaactcatgtcttgaaacgatgga

SEQ ID NO: 50011 - DNA, 60 bp, Artificial
  Synthetic oligonucleotide
ggctttcctcgaagaatcccacccagggatctttgaaaactcatgtcttgaaacgatgga

SEQ ID NO: 50012 - DNA, 60 bp, Artificial
  Synthetic oligonucleotide
cggatatgcacaaacagattgtgtgttggaagcaatggctttccttgaagaatcccaccc

SEQ ID NO: 50013 - DNA, 60 bp, Artificial
  Synthetic oligonucleotide
ttggaagcaatggctttccttgaagaatcccacccagggatctttgaaaactcatgtctt

SEQ ID NO: 50014 - DNA, 60 bp, Artificial
  Synthetic oligonucleotide
tgtagcaatggtgttctcacaggaggattgcatgataaaggcagtccgaggcgatctgaa

SEQ ID NO: 50015 - DNA, 60 bp, Artificial
  Synthetic oligonucleotide
caatggtgttctcacaggaggattgcatgataaaggcagtccgaggcgatctgaatttcg

SEQ ID NO: 50016 - DNA, 60 bp, Artificial
  Synthetic oligonucleotide
gtagcaatggtgttctcacaggaggattgcatgataaaggcagtccgaggcgatctgaat

SEQ ID NO: 50017 - DNA, 60 bp, Artificial
  Synthetic oligonucleotide
atggtgttctcacaggaggattgcatgataaaggcagtccgaggcgatctgaatttcgta

SEQ ID NO: 50018 - DNA, 60 bp, Artificial
  Synthetic oligonucleotide
caagaaatacacatcaggaagacaagagaagaaccctgctctcagaatgaaatggatgat

SEQ ID NO: 50019 - DNA, 60 bp, Artificial
  Synthetic oligonucleotide
ggtgttctcacaggaggattgcatgataaaggcagtccgaggcgatctgaatttcgtgaa

SEQ ID NO: 50020 - DNA, 60 bp, Artificial
  Synthetic oligonucleotide
ctcacaggaggattgcatgataaaggcagtccgaggcgatctgaatttcgtgaacagagc

SEQ ID NO: 50021 - DNA, 60 bp, Artificial
  Synthetic oligonucleotide
gcagtggagttttcggagacaatccacgccccaatgatggaacaggtagttgtggtccgg

SEQ ID NO: 50022 - DNA, 60 bp, Artificial
  Synthetic oligonucleotide
ggcttttggcctagtgtgtgccacttgtgagcagattgcagattcacggcatcggtctca

SEQ ID NO: 50023 - DNA, 60 bp, Artificial
  Synthetic oligonucleotide
caccgatctcgaggctctcatggagtggctaaagacaagaccaatcctgtcacctctaac

SEQ ID NO: 50024 - DNA, 60 bp, Artificial
  Synthetic oligonucleotide
gctctcatggagtggctaaagacaagaccaatcctgtcacctctgactaaagggattttg

SEQ ID NO: 50025 - DNA, 60 bp, Artificial
  Synthetic oligonucleotide
ctcgaggctctcatggagtggctaaagacaagaccaatcctgtcacctctgactaaaggg

SEQ ID NO: 50026 - DNA, 60 bp, Artificial
  Synthetic oligonucleotide
caccgatctcgaagctctcatggagtggctaaagacaagaccaatcctgtcacctctgac

SEQ ID NO: 50027 - DNA, 60 bp, Artificial
  Synthetic oligonucleotide
catggaatggctaaagacaagaccaatcctgtcacctctgactaaagggattttgggatt

SEQ ID NO: 50028 - DNA, 60 bp, Artificial
  Synthetic oligonucleotide
ctcatggagtggctaaagacaagaccaatcctgtcacctctgactaaagggattttggga

SEQ ID NO: 50029 - DNA, 60 bp, Artificial
  Synthetic oligonucleotide
aacaccgatctcgaagctctcatggagtggctaaagacaagaccaatcctgtcacctctg

SEQ ID NO: 50030 - DNA, 60 bp, Artificial
  Synthetic oligonucleotide
cgccgatctcgaggctctcatggagtggctaaagacaagaccaatcctgtcacctctgac

SEQ ID NO: 50031 - DNA, 60 bp, Artificial
  Synthetic oligonucleotide
agatctaatgtcacaatcccgcacccgcgagatactaacaaaaaccactgtggaccatat

SEQ ID NO: 50032 - DNA, 60 bp, Artificial
  Synthetic oligonucleotide
gtggcgagttccctagcactggcaatcatggtagctggtctattcctatggatgtgctcc

SEQ ID NO: 50033 - DNA, 60 bp, Artificial
  Synthetic oligonucleotide
gataatcactcaccgagtgacatcaacatcatggcgtctcaaggcaccaaacgatcttat

SEQ ID NO: 50034 - DNA, 60 bp, Artificial
  Synthetic oligonucleotide
gtagataatcactcaccgagtgacatcaacatcatggcgtctcaaggcaccaaacgatct

SEQ ID NO: 50035 - DNA, 60 bp, Artificial
  Synthetic oligonucleotide
ctggaactttcgatcttggagggctatatgaagcaatcgaggagtgcctgattaatgatc

SEQ ID NO: 50036 - DNA, 60 bp, Artificial
  Synthetic oligonucleotide
gggaccttcgatcttggagggctatatgaagcaatcgaggagtgcctgattaatgatccc

SEQ ID NO: 50037 - DNA, 60 bp, Artificial
  Synthetic oligonucleotide
gaactttcgatcttggagggctatatgaagcaatcgaggagtgcctgattaacgatccct

SEQ ID NO: 50038 - DNA, 60 bp, Artificial
  Synthetic oligonucleotide
ccttcgatcttggagggctatatgaagcaatcgaggagtgcctgattaatgatccctggg

SEQ ID NO: 50039 - DNA, 60 bp, Artificial
  Synthetic oligonucleotide
atgtgtaaatggctcttgctttactgtaatgactgacggaccaagtaatggtcaggcatc

SEQ ID NO: 50040 - DNA, 60 bp, Artificial
  Synthetic oligonucleotide
tgcctgccatgatggcaccagttggttgacaattggaatttctggcccagacaatggggc

SEQ ID NO: 50041 - DNA, 60 bp, Artificial
  Synthetic oligonucleotide
ccatgatggcaccagttggttgacaattggaatttctggcccagacaatggggctgtagc

SEQ ID NO: 50042 - DNA, 60 bp, Artificial
  Synthetic oligonucleotide
atggcaccagttggttgacaattggaatttctggcccagacaatggggctgtggctgtat

SEQ ID NO: 50043 - DNA, 60 bp, Artificial
  Synthetic oligonucleotide
ggcaccagttggttgacaattggaatttctggcccagacaatggggctgtggctgtattg

SEQ ID NO: 50044 - DNA, 60 bp, Artificial
  Synthetic oligonucleotide
gcatgtgtaaatggctcttgctttactgtaatgactgacggaccaagtaatggtcaggcg

SEQ ID NO: 50045 - DNA, 60 bp, Artificial
  Synthetic oligonucleotide
gcatgtgtaaatggctcttgctttactgtaatgactgacggaccaagtaatggtcaggca

SEQ ID NO: 50046 - DNA, 60 bp, Artificial
  Synthetic oligonucleotide
gaggagataagccgagaatggtacatgctgatgcctaggcagaaaataactggaggcctt

SEQ ID NO: 50047 - DNA, 60 bp, Artificial
  Synthetic oligonucleotide
aaaataactggaggccttatggtgaaaatggaccaagccataatggataagagaattatc

SEQ ID NO: 50048 - DNA, 60 bp, Artificial
  Synthetic oligonucleotide
gtgacaaagacataatggattccaacacgataacctcgtttcaggtagattgttatctat

SEQ ID NO: 50049 - DNA, 60 bp, Artificial
  Synthetic oligonucleotide
cataagaaagctactcagtatgagagacatgtgtgatgctccctttgatgacaggctccg

SEQ ID NO: 50050 - DNA, 60 bp, Artificial
  Synthetic oligonucleotide
taaagggaagaggcagcacacttggactcgatctaagagtggctacaatggaggggaaaa

SEQ ID NO: 50051 - DNA, 60 bp, Artificial
  Synthetic oligonucleotide
aaatatacagagattcgcttggggaatccatgatgagaatgggggacctccactccctcc

SEQ ID NO: 50052 - DNA, 60 bp, Artificial
  Synthetic oligonucleotide
cctcgtcggtggacttgaatggaatgataactcaattcgagcgtctgaaaatatacagag

SEQ ID NO: 50053 - DNA, 60 bp, Artificial
  Synthetic oligonucleotide
cctcaaaatagccattgcttccagtcctgctcctcggtatatcactgatatgagcataga

SEQ ID NO: 50054 - DNA, 60 bp, Artificial
  Synthetic oligonucleotide
cattgcttccagtcctgctcctcggtatatcactgatatgagcatagaggagataagccg

SEQ ID NO: 50055 - DNA, 60 bp, Artificial
  Synthetic oligonucleotide
tggattccaacacgataacctcgtttcaggtagattgttatctatggcacataagaaagc

SEQ ID NO: 50056 - DNA, 60 bp, Artificial
  Synthetic oligonucleotide
tgagcatagaggagataagccgagaatggtacatgctgatgcctaggcagaaaataactg

SEQ ID NO: 50057 - DNA, 60 bp, Artificial
  Synthetic oligonucleotide
gataacattcttgcaagcattgcaactcttacttgaagttgagagtgagataaggacttt

SEQ ID NO: 50058 - DNA, 60 bp, Artificial
  Synthetic oligonucleotide
ggaggccttatggtgaaaatggaccaagccataatggataagagaattatccttaaagca

SEQ ID NO: 50059 - DNA, 60 bp, Artificial
  Synthetic oligonucleotide
gcaagcattgcaactcttacttgaagttgagagtgagataaggactttctcttttcagct

SEQ ID NO: 50060 - DNA, 60 bp, Artificial
  Synthetic oligonucleotide
cattggtctctctgagggcattcacagaagatggtgctattgtggctgaaatatctccca

SEQ ID NO: 50061 - DNA, 60 bp, Artificial
  Synthetic oligonucleotide
gagaattatccttaaagcaaatttctcagtcctatttgatcaactagagacattggtctc

SEQ ID NO: 50062 - DNA, 60 bp, Artificial
  Synthetic oligonucleotide
atcctcgtcggtggacttgaatggaatgataactcaattcgagcgtctgaaaatatacag

SEQ ID NO: 50063 - DNA, 60 bp, Artificial
  Synthetic oligonucleotide
gggcattcacagaagatggtgctattgtggctgaaatatctcccattccctccatgccag

SEQ ID NO: 50064 - DNA, 60 bp, Artificial
  Synthetic oligonucleotide
aaccatgcgcagacttgcagaccaaagtctcccaccgaacttctccagccttgaaaactt

SEQ ID NO: 50065 - DNA, 60 bp, Artificial
  Synthetic oligonucleotide
aaccatgcgcagacttgccgaccaaagtctcccaccgaacttctccagccttgaaaactt

SEQ ID NO: 50066 - DNA, 60 bp, Artificial
  Synthetic oligonucleotide
cgcagacttgccgaccaaagtctcccaccgaacttctccagccttgaaaactttagagcc

SEQ ID NO: 50067 - DNA, 60 bp, Artificial
  Synthetic oligonucleotide
ggaaccatgcgcaggcttgccgaccaaagtctcccaccgaacttctccagccttggaaac

SEQ ID NO: 50068 - DNA, 60 bp, Artificial
  Synthetic oligonucleotide
aaccatgcgcagacttgccgaccaaagtctcccaccgaacttctccagccttgaaaacct

SEQ ID NO: 50069 - DNA, 60 bp, Artificial
  Synthetic oligonucleotide
aaccatgcgcagaattgcagaccaaagtctcccaccgaacttctccagccttgaaaactt

SEQ ID NO: 50070 - DNA, 60 bp, Artificial
  Synthetic oligonucleotide
cgcaggcttgccgaccaaagtctcccaccgaacttctccagccttgaaaattttagagcc

SEQ ID NO: 50071 - DNA, 60 bp, Artificial
  Synthetic oligonucleotide
cgcagaattgcagaccaaagtctcccaccgaacttctccagccttgaaaactttagagcc

SEQ ID NO: 50072 - DNA, 60 bp, Artificial
  Synthetic oligonucleotide
cgcagacttgccgaccaaagtctcccaccgaacttctccagccttgaaaaccttagagcc

SEQ ID NO: 50073 - DNA, 60 bp, Artificial
  Synthetic oligonucleotide
cgcagacttgcagaccaaagtctcccaccgaacttctccagccttgaaaactttagagcc

SEQ ID NO: 50074 - DNA, 60 bp, Artificial
  Synthetic oligonucleotide
ggaccttcgatcttggagggctatatgaagcaattgaggagtgcctgattaacggtccct

SEQ ID NO: 50075 - DNA, 60 bp, Artificial
  Synthetic oligonucleotide
gcaatgaaagaatatggggaagatccgaaaatcgaaacgaacaagtttgctgcaatatgc

SEQ ID NO: 50076 - DNA, 60 bp, Artificial
  Synthetic oligonucleotide
aatgaaggaatatggggaagatccgaaaatcgaaacgaacaaattcgcagcaatatgcac

SEQ ID NO: 50077 - DNA, 60 bp, Artificial
  Synthetic oligonucleotide
caatgaaagaatatggggaagatccgaaaatcgaaacgaacaagtttgctgcaatatgca

SEQ ID NO: 50078 - DNA, 60 bp, Artificial
  Synthetic oligonucleotide
aatgaaagaatatggggaagatccgaaaatcgaaacgaacaaattcactgcaatatgcac

SEQ ID NO: 50079 - DNA, 60 bp, Artificial
  Synthetic oligonucleotide
aatgaaagaatatggggaagatccgaaaatcgaaacgaacaagtttgctgcaatatgcac

SEQ ID NO: 50080 - DNA, 60 bp, Artificial
  Synthetic oligonucleotide
aagaatatggggaagatccgaaaatcgaaacgaacaagtttgctgcaatatgcacacact

SEQ ID NO: 50081 - DNA, 60 bp, Artificial
  Synthetic oligonucleotide
cggtgtcccctaacggggcatatggggtaaaagggttttcatttaaatacggcaatggtg

SEQ ID NO: 50082 - DNA, 60 bp, Artificial
  Synthetic oligonucleotide
tccggtgtcctctaacggggcatatggggtaaaagggttttcatttaaatacggcaatgg

SEQ ID NO: 50083 - DNA, 60 bp, Artificial
  Synthetic oligonucleotide
ggtccggtgtcccctaacggggcatatggggtaaaagggttttcatttaaatacggcaat

SEQ ID NO: 50084 - DNA, 60 bp, Artificial
  Synthetic oligonucleotide
atagtcagccttgttaaaagtgatcagatttgcattggttaccatgcaaacaactcgaca

SEQ ID NO: 50085 - DNA, 60 bp, Artificial
  Synthetic oligonucleotide
caataatcagccttgttaaaagtgatcagatttgcattggttaccatgcaaacaactcga

SEQ ID NO: 50086 - DNA, 60 bp, Artificial
  Synthetic oligonucleotide
caatagtcagccttgttaaaagtgatcagatttgcattggttaccatgcaaacaactcga

SEQ ID NO: 50087 - DNA, 51 bp, Artificial
  Synthetic oligonucleotide
gatcttatttcttcggagacaatgcagaggagtatgacaattaaagaaaaa

SEQ ID NO: 50088 - DNA, 60 bp, Artificial
  Synthetic oligonucleotide
gtgaccacagaagtggcttttggcctagtgtgtgccacttgtgagcagattgctgattca

SEQ ID NO: 50089 - DNA, 60 bp, Artificial
  Synthetic oligonucleotide
ggcttcgccgagatcagaagtccctaagaggaagaggcagcactcttggtctggacatcg

SEQ ID NO: 50090 - DNA, 60 bp, Artificial
  Synthetic oligonucleotide
tcgccgagatcagaagtccctaagaggaagaggcagcactcttggtctggacatcagaac

SEQ ID NO: 50091 - DNA, 60 bp, Artificial
  Synthetic oligonucleotide
tcgccgagatcagaagtccctaagaggaagaggcagcactcttggtctggacatcgaaac

SEQ ID NO: 50092 - DNA, 60 bp, Artificial
  Synthetic oligonucleotide
aatgggggcgataaactctagtatgccattccacaacatacaccctctcaccatcgggga

SEQ ID NO: 50093 - DNA, 60 bp, Artificial
  Synthetic oligonucleotide
tccaaacgaggagatcattcgagctgaagaagctgtgggagcaaacccgctcaaaggcag

SEQ ID NO: 50094 - DNA, 60 bp, Artificial
  Synthetic oligonucleotide
ccggtgcacttgccagttgcatgggtctcatatacaacaggatgggaacggtgaccacag

SEQ ID NO: 50095 - DNA, 60 bp, Artificial
  Synthetic oligonucleotide
gtgcacttgccagttgcatgggtctcatatacaacaggatgggaacggtgactacggaag

SEQ ID NO: 50096 - DNA, 60 bp, Artificial
  Synthetic oligonucleotide
tgcgcttgccagttgcatgggtctcatatacaacaggatgggaacggtgactacggaagt

SEQ ID NO: 50097 - DNA, 60 bp, Artificial
  Synthetic oligonucleotide
ccggtgcacttgccagttgcatgggtctcatatacaacaggatgggaacggtgactacgg

SEQ ID NO: 50098 - DNA, 60 bp, Artificial
  Synthetic oligonucleotide
gtgcacttgccagttgcatgggtctcatatacaacaggatgggaacggtgaccacagaag

SEQ ID NO: 50099 - DNA, 60 bp, Artificial
  Synthetic oligonucleotide
gtgcacttgccagttgcatgggtctcatatacaacaggatgggaacggtgactacagaag

SEQ ID NO: 50100 - DNA, 60 bp, Artificial
  Synthetic oligonucleotide
gcttgccagttgcatgggtctcatatacaacaggatgggaacggtgactacggaagtggc

SEQ ID NO: 50101 - DNA, 60 bp, Artificial
  Synthetic oligonucleotide
cttgccagttgcatgggtctcatatacaacaggatgggaacggtgactacggaagtggct

SEQ ID NO: 50102 - DNA, 60 bp, Artificial
  Synthetic oligonucleotide
gggcacttgccagttgcatgggtctcatatacaacaggatgggaacggtgactacggaag

SEQ ID NO: 50103 - DNA, 60 bp, Artificial
  Synthetic oligonucleotide
tgcacttgccagttgcatgggtctcatatacaacaggatgggaacggtgactacggaagt

SEQ ID NO: 50104 - DNA, 60 bp, Artificial
  Synthetic oligonucleotide
gtgcacttgccagttgcatgggtctcatatacaacaggatgggaacggtgaccacggaag

SEQ ID NO: 50105 - DNA, 60 bp, Artificial
  Synthetic oligonucleotide
attgagcatcaatgaactgagcaatcttgcgaaaggggagaaagctaatgtgctgatagg

SEQ ID NO: 50106 - DNA, 60 bp, Artificial
  Synthetic oligonucleotide
gactccaacactcttgaactgagaagcagatattgggctataagaaccagaagcggaggc

SEQ ID NO: 50107 - DNA, 59 bp, Artificial
  Synthetic oligonucleotide
gaattcggatggccatcaattagtgtcgaatcatttaaaaacgaccttgtttctactaa

SEQ ID NO: 50108 - DNA, 57 bp, Artificial
  Synthetic oligonucleotide
gaattcggatggccatcaattagtgtcgaatagtttaaaaacgaccttgtttctact

SEQ ID NO: 50109 - DNA, 60 bp, Artificial
  Synthetic oligonucleotide
tcaaataggatatatatgcagtggagttttcggagacaatccacgccccaatgatggaac

SEQ ID NO: 50110 - DNA, 60 bp, Artificial
  Synthetic oligonucleotide
gtatcaaataggatatatatgcagtggagttttcggagacaatccacgccccaatgatgg

SEQ ID NO: 50111 - DNA, 60 bp, Artificial
  Synthetic oligonucleotide
ataggatatatatgcagtggagttttcggagacaatccacgccccaatgatggaacaggt

SEQ ID NO: 50112 - DNA, 60 bp, Artificial
  Synthetic oligonucleotide
aataggatatatatgcagtggagttttcggagacaatccacgccccaatgatggaacagg

SEQ ID NO: 50113 - DNA, 55 bp, Artificial
  Synthetic oligonucleotide
cttcctttgacatgaacaatgaaggatcttatttcttcggagacaatgcagagga

SEQ ID NO: 50114 - DNA, 60 bp, Artificial
  Synthetic oligonucleotide
cttcctttgacatgagtaacgaaggatcttatttcttcggagacaatgcagaggaatatg

SEQ ID NO: 50115 - DNA, 60 bp, Artificial
  Synthetic oligonucleotide
ccagaggagttcaaattgcttcaaatgagaacatggaaacaatggactccagtactcttg

SEQ ID NO: 50116 - DNA, 60 bp, Artificial
  Synthetic oligonucleotide
accagaggagttcaaattgcttcaaatgagaacatggaaacaatggactccagtactctt

SEQ ID NO: 50117 - DNA, 60 bp, Artificial
  Synthetic oligonucleotide
ctgtatcaagctttcaggtagactgctttctttggcatgtccgcaaacgatttgcagacc

SEQ ID NO: 50118 - DNA, 60 bp, Artificial
  Synthetic oligonucleotide
ctgtgacaagctttcaggtagactgctttctttggcatgtccgcaaacgatttgcagacc

SEQ ID NO: 50119 - DNA, 60 bp, Artificial
  Synthetic oligonucleotide
cattccttgaccggcttcgccgagatcagaagtccctaagaggaagaggcaacactcttg

SEQ ID NO: 50120 - DNA, 60 bp, Artificial
  Synthetic oligonucleotide
gaagctacgaacacaaataccagcagaaatgcttgcaaacattgacctgaaatacttcaa

SEQ ID NO: 50121 - DNA, 60 bp, Artificial
  Synthetic oligonucleotide
atcggacagggacatttgaattcacgagctttttctaccgctatggatttgtagccaatt

SEQ ID NO: 50122 - DNA, 60 bp, Artificial
  Synthetic oligonucleotide
ggagatcattcgagctgaagaagctgtgggagcaaacccgttcaaaggcaggactgttgg

SEQ ID NO: 50123 - DNA, 60 bp, Artificial
  Synthetic oligonucleotide
caaatactgtcaatttattcaacagtggcgagttccctagcactggcaatcatggtagct

SEQ ID NO: 50124 - DNA, 60 bp, Artificial
  Synthetic oligonucleotide
tactgtcaatttattcaacagtggcgagttccctagcactggcaatcatggtagctggtc

SEQ ID NO: 50125 - DNA, 52 bp, Artificial
  Synthetic oligonucleotide
aaaaccactgtggaccatatggccataatcaagaaatacacatcaggaagac

SEQ ID NO: 50126 - DNA, 51 bp, Artificial
  Synthetic oligonucleotide
aaaaccactgtggaccatatggccataatcaagaaatacacatcaggaaga

SEQ ID NO: 50127 - DNA, 60 bp, Artificial
  Synthetic oligonucleotide
acagaactcaaactcagtgactatgaagggaggcttatccagaacagcataacaatagag

SEQ ID NO: 50128 - DNA, 60 bp, Artificial
  Synthetic oligonucleotide
gactggacattgaatagaaaccaaccggctgcaactgctttggccaacactatagaaatc

SEQ ID NO: 50129 - DNA, 60 bp, Artificial
  Synthetic oligonucleotide
agcaaaagcagggtagataatcactcaccgagtgacatccacatcatggcgtctcaaggc

SEQ ID NO: 50130 - DNA, 60 bp, Artificial
  Synthetic oligonucleotide
cagggtagataatcactcaccgagtgacatccacatcatggcgtctcaaggcaccaaacg

SEQ ID NO: 50131 - DNA, 60 bp, Artificial
  Synthetic oligonucleotide
caagagtggtcccaagaggacaactgtccaccagaggagttcaaattgcttcaaatgaga

SEQ ID NO: 50132 - DNA, 60 bp, Artificial
  Synthetic oligonucleotide
ctttcaggtagactgctttctttggcatgtccgcaaacgatttgcagaccaagaactggg

SEQ ID NO: 50133 - DNA, 60 bp, Artificial
  Synthetic oligonucleotide
ccaagaactgggtgatgccccattccttgaccggcttcgccgagatcagaagtccctaag

SEQ ID NO: 50134 - DNA, 54 bp, Artificial
  Synthetic oligonucleotide
cactcactgagtgacatccacatcatggcgtctcaaggcaccaaacgatcttat

SEQ ID NO: 50135 - DNA, 60 bp, Artificial
  Synthetic oligonucleotide
caccgagtgacatcaacttcatggcgtctcaaggcaccaaacgatcttatgaacagatgg

SEQ ID NO: 50136 - DNA, 60 bp, Artificial
  Synthetic oligonucleotide
caccgagtgacatcaacatcatggcgtctcaaggcaccaaacgatcttatgaacagatgg

SEQ ID NO: 50137 - DNA, 60 bp, Artificial
  Synthetic oligonucleotide
tacagtggcgagttccctagcactggcaatcatggtagctggtctatccttatggatgtg

SEQ ID NO: 50138 - DNA, 60 bp, Artificial
  Synthetic oligonucleotide
tattctacagtggcgagttccctagcactggcaatcatggtagctggtctatccttatgg

SEQ ID NO: 50139 - DNA, 60 bp, Artificial
  Synthetic oligonucleotide
gcaaaaggcagggtagataatcactcaccgagtgacatcaacatcatggcgtctcaaggc

SEQ ID NO: 50140 - DNA, 60 bp, Artificial
  Synthetic oligonucleotide
agcgaaagcagggtagataatcactcaccgagtgacatcaacatcatggcgtctcaaggc

SEQ ID NO: 50141 - DNA, 60 bp, Artificial
  Synthetic oligonucleotide
agcaaaagcagggtagataatcactcaccgagtgacatcaacatcatggcgtctcaaggc

SEQ ID NO: 50142 - DNA, 60 bp, Artificial
  Synthetic oligonucleotide
cctttgacatgaacaatgaaggatcttatttcttcggagacaatgcagaggagtatgaca

SEQ ID NO: 50143 - DNA, 60 bp, Artificial
  Synthetic oligonucleotide
ggaacttaccaaatactgtcaatttattctacagtggcgagttccctagcactggcaatc

SEQ ID NO: 50144 - DNA, 60 bp, Artificial
  Synthetic oligonucleotide
ccaaatactgtcaatttattctacagtggcgagttccctagcactggcaatcatgatagc

SEQ ID NO: 50145 - DNA, 60 bp, Artificial
  Synthetic oligonucleotide
aagggtcaactctcccgaggagatctggagctgccggtgcagcagtaaagggagtaggga

SEQ ID NO: 50146 - DNA, 60 bp, Artificial
  Synthetic oligonucleotide
gggatttccagcatggtggaggccatggtgtctagggcccgaattgatgcgcgaattgac

SEQ ID NO: 50147 - DNA, 60 bp, Artificial
  Synthetic oligonucleotide
ggattccaacactgtgttaagctttcaggtagactgctttctttggcatgtccgcaaacg

SEQ ID NO: 50148 - DNA, 60 bp, Artificial
  Synthetic oligonucleotide
ctgtgtcagactttcaggtagactgctttctttggcatgtccgcaaacgatttgcagacc

SEQ ID NO: 50149 - DNA, 60 bp, Artificial
  Synthetic oligonucleotide
gtaagagcatgaagttacgaacacaaataccagcagaaatgcttgcaaacattgatctta

SEQ ID NO: 50150 - DNA, 60 bp, Artificial
  Synthetic oligonucleotide
catgttcgaaagtaagagcatgaagttacgaacacaaataccagcagaaatgcttgcaaa

SEQ ID NO: 50151 - DNA, 60 bp, Artificial
  Synthetic oligonucleotide
cgaaagtaagagcatgaagttacgaacacaaataccagcagaaatgcttgcaaacattga

SEQ ID NO: 50152 - DNA, 60 bp, Artificial
  Synthetic oligonucleotide
acatgttcgaaagtaagagcatgaagttacgaacacaaataccagcagaaatgcttgcaa

SEQ ID NO: 50153 - DNA, 60 bp, Artificial
  Synthetic oligonucleotide
aagtaagagcatgaagttacgaacacaaataccagcagaaatgcttgcaaacattgatct

SEQ ID NO: 50154 - DNA, 60 bp, Artificial
  Synthetic oligonucleotide
aaagtaagagcatgaagttacgaacacaaataccagcagaaatgcttgcaaacattgatc

SEQ ID NO: 50155 - DNA, 60 bp, Artificial
  Synthetic oligonucleotide
cgaaagcaagagcatgaagttacgaacacaaataccagcagaaatgcttgcaaacattga

SEQ ID NO: 50156 - DNA, 60 bp, Artificial
  Synthetic oligonucleotide
aaagtaagagcatgaagttacgaacacaaataccagcagaaatgcttgcaaacattgacc

SEQ ID NO: 50157 - DNA, 60 bp, Artificial
  Synthetic oligonucleotide
gttcatgctcatgcccaagcagaaagtggcaggttccctttgcatcaaaatggaccaggc

SEQ ID NO: 50158 - DNA, 60 bp, Artificial
  Synthetic oligonucleotide
ttcatgctcatgcccaagcagaaagtggcaggttccctttgcatcaaaatggaccaggca

SEQ ID NO: 50159 - DNA, 58 bp, Artificial
  Synthetic oligonucleotide
tcatgctcatgcccaagcagaaagtggcaggttccctttgcatcaaaatggaccaggc

SEQ ID NO: 50160 - DNA, 60 bp, Artificial
  Synthetic oligonucleotide
gtttatgctcatgcccaagcagaaagtggcaggttccctttgcatcaaaatggaccaggc

SEQ ID NO: 50161 - DNA, 60 bp, Artificial
  Synthetic oligonucleotide
attccttgaccggcttcgccgagatcagaagtccctaagaggaagaggcagcactcttgg

SEQ ID NO: 50162 - DNA, 60 bp, Artificial
  Synthetic oligonucleotide
attccttgaccggcttcgccgagatcagaagtccctaagaggaagaggcaacactcttgg

SEQ ID NO: 50163 - DNA, 60 bp, Artificial
  Synthetic oligonucleotide
ccggcttcgccgagatcagaagtccctaagaggaagaggcaacactcttggtctggacat

SEQ ID NO: 50164 - DNA, 60 bp, Artificial
  Synthetic oligonucleotide
atcggcttcgccgagatcagaagtccctaagaggaagaggcaacactcttggtctggaca

SEQ ID NO: 50165 - DNA, 60 bp, Artificial
  Synthetic oligonucleotide
gcaggcaaaccatttgaatggatgtcaatccgactttacttttcttgaaagtgccagcgc

SEQ ID NO: 50166 - DNA, 60 bp, Artificial
  Synthetic oligonucleotide
gcaggcaaaccatttgaatggatgtcaatccgactttacttttcttgaaagtaccagcgc

SEQ ID NO: 50167 - DNA, 60 bp, Artificial
  Synthetic oligonucleotide
agcaaaagcaggcaaccatttgaatggatgtcaatccgactttacttttcttgaaagtac

SEQ ID NO: 50168 - DNA, 60 bp, Artificial
  Synthetic oligonucleotide
gcaggcaaaccatttgaatggatgtcaatccgactttacttttcttgaaagtaccagtgc

SEQ ID NO: 50169 - DNA, 60 bp, Artificial
  Synthetic oligonucleotide
ggaacttaccaaatactgtcaatttattcaacagtggcgagttccctagcactggcaatc

SEQ ID NO: 50170 - DNA, 60 bp, Artificial
  Synthetic oligonucleotide
ccaacactgtgtcaagctttcaggtagactgctttctttggcatgtccgcaatcgatttg

SEQ ID NO: 50171 - DNA, 60 bp, Artificial
  Synthetic oligonucleotide
ttccaacactgtgtcaagctttcaggtagactgctttctttggcatgtccgcaagcgatt

SEQ ID NO: 50172 - DNA, 60 bp, Artificial
  Synthetic oligonucleotide
tgatgcaagggtcaactctcccgaggagatctggagctgctggtgcagcagtaaagggag

SEQ ID NO: 50173 - DNA, 60 bp, Artificial
  Synthetic oligonucleotide
tgatgcaaggatcaactctcccgaggagatctggagctgctggtgcagcagtaaagggag

SEQ ID NO: 50174 - DNA, 53 bp, Artificial
  Synthetic oligonucleotide
aagggtcaactctcccgaggagatctggagctgctggtgcagcagtaaagggg

SEQ ID NO: 50175 - DNA, 50 bp, Artificial
  Synthetic oligonucleotide
gatcttatttcttcggagacaatgcagaggagtatgacaattaagaaccc

SEQ ID NO: 50176 - DNA, 60 bp, Artificial
  Synthetic oligonucleotide
ggaccttcgatcttggagggctatatgaagcaattgaggaatgcctgattaacgatccct

SEQ ID NO: 50177 - DNA, 60 bp, Artificial
  Synthetic oligonucleotide
aatgaaagaatatggggaagatccgaaaatcgaaactaacaaatttgctgcaatatgcac

SEQ ID NO: 50178 - DNA, 58 bp, Artificial
  Synthetic oligonucleotide
tactaacaaaaaccactgtggaccatatggccataatcaagaaatacacatcaggaag

SEQ ID NO: 50179 - DNA, 60 bp, Artificial
  Synthetic oligonucleotide
agatactaacaaaaaccactgtggaccatatggccataatcaagaaatacacatcaggaa

SEQ ID NO: 50180 - DNA, 50 bp, Artificial
  Synthetic oligonucleotide
aaaaccactgtggaccatatggccataatcaagaaatacacatcaggaag

SEQ ID NO: 50181 - DNA, 60 bp, Artificial
  Synthetic oligonucleotide
ataatgctgaacttctggttctcatggaaaatgaaagaactctagatttccatgactcaa

SEQ ID NO: 50182 - DNA, 60 bp, Artificial
  Synthetic oligonucleotide
gatgtctggacatataatgctgaacttctggttctcatggaaaatgagagaaccctagac

SEQ ID NO: 50183 - DNA, 60 bp, Artificial
  Synthetic oligonucleotide
aatgaatcgggacggctaatagatttcctcaaggatgtgatggaatcaatggataaggaa

SEQ ID NO: 50184 - DNA, 60 bp, Artificial
  Synthetic oligonucleotide
acactgaaggcagaacatctgacatgaggactgaaatcataagaatgatggaaagtgcca

SEQ ID NO: 50185 - DNA, 60 bp, Artificial
  Synthetic oligonucleotide
ggagcaggtagttgtggtccggtgtcctctaacggggcatatggggtaaaagggttttca

SEQ ID NO: 50186 - DNA, 60 bp, Artificial
  Synthetic oligonucleotide
tggagcaggtagttgtggtccggtgtcctctaacggggcatatggggtaaaagggttttc

SEQ ID NO: 50187 - DNA, 60 bp, Artificial
  Synthetic oligonucleotide
gccagttggaatttccagcatggtggaggccatggtgtctagggcccgaattgacgcacg

SEQ ID NO: 50188 - DNA, 60 bp, Artificial
  Synthetic oligonucleotide
ttggaatttccagcatggtggaggccatggtgtctagggcccgaattgacgcacgaattg

SEQ ID NO: 50189 - DNA, 60 bp, Artificial
  Synthetic oligonucleotide
ttggaatttccagcatggtggaggccatggtgtctagggcccgaattgacgcacgaatcg

SEQ ID NO: 50190 - DNA, 60 bp, Artificial
  Synthetic oligonucleotide
gttggaatttccagcatggtggaggccatggtgtctagggcccgaattgacgcacgaatt

SEQ ID NO: 50191 - DNA, 52 bp, Artificial
  Synthetic oligonucleotide
ttggaatttccagcatggtggaggccatggtgtctagggcccgaattgacgc

SEQ ID NO: 50192 - DNA, 60 bp, Artificial
  Synthetic oligonucleotide
tggaatagatcctttccgtctgcttcaaaacagccaggtctttagtctcattagaccaaa

SEQ ID NO: 50193 - DNA, 60 bp, Artificial
  Synthetic oligonucleotide
gagaagggtactctctggttggaatagatcctttccgtctgcttcaaaacagccaggtct

SEQ ID NO: 50194 - DNA, 60 bp, Artificial
  Synthetic oligonucleotide
gagagaagggtactctctggttggaatagatcctttccgtctgcttcaaaacagccaggt

SEQ ID NO: 50195 - DNA, 60 bp, Artificial
  Synthetic oligonucleotide
tactgtcaatttattcaacagtggtgagttccctagcactggcaatcatggtagctggtc

SEQ ID NO: 50196 - DNA, 60 bp, Artificial
  Synthetic oligonucleotide
ccaaatactgtcaatttattctacggtggcgagttccctagcactggcaatcatggtagc

SEQ ID NO: 50197 - DNA, 60 bp, Artificial
  Synthetic oligonucleotide
agcgaaagcaggcaaaccatttgaatggatgtcaatccgactttacttttcttgaaagta

SEQ ID NO: 50198 - DNA, 60 bp, Artificial
  Synthetic oligonucleotide
agcaaaagcaggcaaaccatttgaatggatgtcaatccgactttacttttcttgaaagta

SEQ ID NO: 50199 - DNA, 60 bp, Artificial
  Synthetic oligonucleotide
agcaaaagcaggcaaaccatttgaatggatgtcaatccgactttacttttcttgaaagtg

SEQ ID NO: 50200 - DNA, 60 bp, Artificial
  Synthetic oligonucleotide
ggaacttaccagatactgtcaatttattcaacagtggcgagttccctagcactggcaatc

SEQ ID NO: 50201 - DNA, 60 bp, Artificial
  Synthetic oligonucleotide
gtggatacgctgcagacaaagaatccactcaaaaggcaatagatggagtcaccaataagg

SEQ ID NO: 50202 - DNA, 60 bp, Artificial
  Synthetic oligonucleotide
gtggatacgctgcagacaaagaatccactcaaaaggcaatagatggagtcaccaataaag

SEQ ID NO: 50203 - DNA, 60 bp, Artificial
  Synthetic oligonucleotide
cggggcatatggggtaaaagggttttcatttaaatacggcaatggtgtctggatcgggag

SEQ ID NO: 50204 - DNA, 60 bp, Artificial
  Synthetic oligonucleotide
gtggcgagttccctagcactggcaatcatggtggctggtctatctttatggatgtgctcc

SEQ ID NO: 50205 - DNA, 60 bp, Artificial
  Synthetic oligonucleotide
tactgagggcagaacgtctgacatgaggactgaaatcataagaatgatggaaagtgccag

SEQ ID NO: 50206 - DNA, 60 bp, Artificial
  Synthetic oligonucleotide
gtactgagggcagaacgtctgacatgaggactgaaatcataagaatgatggaaagtgcca

SEQ ID NO: 50207 - DNA, 60 bp, Artificial
  Synthetic oligonucleotide
ctacagtggcgagttccctagcactggcaatcatggtagctggtctattcctatggatgt

SEQ ID NO: 50208 - DNA, 60 bp, Artificial
  Synthetic oligonucleotide
ctgaatgtgcatgtgtaaatggctcttgctttactgtaatgactgatggaccaagtaatg

SEQ ID NO: 50209 - DNA, 60 bp, Artificial
  Synthetic oligonucleotide
cagggtagataatcactcaccgagtgacatcaacaacatggcgtctcaaggcaccaaacg

SEQ ID NO: 50210 - DNA, 60 bp, Artificial
  Synthetic oligonucleotide
ttgctgccagaaacatagtgagaagggcaacagtatcagcagatccactagcatctctat

SEQ ID NO: 50211 - DNA, 60 bp, Artificial
  Synthetic oligonucleotide
cagatactatcaatctactcaacagtggcgagttccctagcactggcaatcatggtagct

SEQ ID NO: 50212 - DNA, 60 bp, Artificial
  Synthetic oligonucleotide
ccaaacattgaaaataagagtacatgaggggtatgaggaattcacaatggttgggcggag

SEQ ID NO: 50213 - DNA, 60 bp, Artificial
  Synthetic oligonucleotide
acaaacattaaaaataagagtacatgaggggtatgaggaattcacaatggttgggcggag

SEQ ID NO: 50214 - DNA, 60 bp, Artificial
  Synthetic oligonucleotide
catggaatggctaaagacaagaccaatcctgtcacctctgactaaggggattttggggtt

SEQ ID NO: 50215 - DNA, 60 bp, Artificial
  Synthetic oligonucleotide
catggaatggctaaagacaagaccaatcctgtcacctctgactaaggggattttagggtt

SEQ ID NO: 50216 - DNA, 60 bp, Artificial
  Synthetic oligonucleotide
atgagtcttctaaccgaggtcgaaacgtacgttctctctattgtcctgtcaggccccctc

SEQ ID NO: 50217 - DNA, 60 bp, Artificial
  Synthetic oligonucleotide
tgtcaatttattcaacagtggcgagttccctagcactggcaatcatggtggctggtctat

SEQ ID NO: 50218 - DNA, 60 bp, Artificial
  Synthetic oligonucleotide
agaaataacattccatggggctaaggaggtcgcactcagctactcaaccggtgcacttgc

SEQ ID NO: 50219 - DNA, 60 bp, Artificial
  Synthetic oligonucleotide
gaaataacattccatggggctaaggaggtcgcactcagctactcaaccggtgcacttgcc

SEQ ID NO: 50220 - DNA, 60 bp, Artificial
  Synthetic oligonucleotide
ttggaatttctggcccagacaatggggctgtggctgtattgaaatacaatggcataataa

SEQ ID NO: 50221 - DNA, 60 bp, Artificial
  Synthetic oligonucleotide
gcagaacatctgacatgaggactgaaatcataagaatgatggaaagtgccagaccagaag

SEQ ID NO: 50222 - DNA, 60 bp, Artificial
  Synthetic oligonucleotide
tgaaggcagaacatctgacatgaggactgaaatcataagaatgatggaaagtgccagacc

SEQ ID NO: 50223 - DNA, 60 bp, Artificial
  Synthetic oligonucleotide
gggcagaacgtctgacttgaggactgaaatcataagaatgatggaaagtgccagaccaga

SEQ ID NO: 50224 - DNA, 60 bp, Artificial
  Synthetic oligonucleotide
cgagttccctagcactggcaatcatggtagctggtctatctttatggatgtgctccaatg

SEQ ID NO: 50225 - DNA, 60 bp, Artificial
  Synthetic oligonucleotide
aagggtcaactctcccgaggagatctggagctgccggtgcagcagtgaagggggtaggga

SEQ ID NO: 50226 - DNA, 53 bp, Artificial
  Synthetic oligonucleotide
aaggatcaactctcccgaggagatctggagctgccggtgcagcaataaagggg

SEQ ID NO: 50227 - DNA, 53 bp, Artificial
  Synthetic oligonucleotide
aagggtcaactctcccgaggagatctggagctgccggtgcagcagtgaagggg

SEQ ID NO: 50228 - DNA, 60 bp, Artificial
  Synthetic oligonucleotide
aaggatcaactctcccgaggagatctggagctgccggtgcagcaataaagggggtaggga

SEQ ID NO: 50229 - DNA, 60 bp, Artificial
  Synthetic oligonucleotide
ttgagtcctggaatgatgatgggcatgttcaacatgctaagtacagttttaggagtctca

SEQ ID NO: 50230 - DNA, 60 bp, Artificial
  Synthetic oligonucleotide
gtccaggaatgatgatgggcatgttcaacatgctgagtacagtcttaggagtctcaatcc

SEQ ID NO: 50231 - DNA, 60 bp, Artificial
  Synthetic oligonucleotide
cgggactctagcatacttactgacagccagacagcgaccagaagaattcggatggccatc

SEQ ID NO: 50232 - DNA, 60 bp, Artificial
  Synthetic oligonucleotide
cgggactctagcatacttactgacagccagacagcgaccaaaagaattcgaatggccatc

SEQ ID NO: 50233 - DNA, 60 bp, Artificial
  Synthetic oligonucleotide
acggaaacgggactctagcatacttactgacagccagacagcgaccaaaagaattcgaat

SEQ ID NO: 50234 - DNA, 60 bp, Artificial
  Synthetic oligonucleotide
acggaaacgggactctagcatacttactgacagccagacagcgaccagaagaattcggat

SEQ ID NO: 50235 - DNA, 60 bp, Artificial
  Synthetic oligonucleotide
ccaacactgtgtcagactttcaggtagactgctttctttggcatgtccgcaaacgatttg

SEQ ID NO: 50236 - DNA, 60 bp, Artificial
  Synthetic oligonucleotide
atggatgtcaatccgactttacttttcttgaaagtaccagtgcaaaatgctataagtacc

SEQ ID NO: 50237 - DNA, 60 bp, Artificial
  Synthetic oligonucleotide
ttgaatggatgtcaatccgactttacttttcttgaaagtaccagtgcaaaatgctataag

SEQ ID NO: 50238 - DNA, 52 bp, Artificial
  Synthetic oligonucleotide
tgcatgataaaggcagtccgaggcgatctgaatttcgtaaacagagcaaacc

SEQ ID NO: 50239 - DNA, 60 bp, Artificial
  Synthetic oligonucleotide
cacaggaggattgcatgataaaggcagtccgaggcgatctgaatttcgtaaacagagcaa

SEQ ID NO: 50240 - DNA, 60 bp, Artificial
  Synthetic oligonucleotide
aggaggattgcatgataaaggcagtccgaggcgatctgaatttcgtaaacagagcaaacc

SEQ ID NO: 50241 - DNA, 57 bp, Artificial
  Synthetic oligonucleotide
atgagtcttctaaccgaggtcgaaacgtacgttctctttatcatcccgtcaggcccc

SEQ ID NO: 50242 - DNA, 60 bp, Artificial
  Synthetic oligonucleotide
aagatgagtcttctaaccgaggtcgaaacgtacgttctctctatcatcccgtcaggcccc

SEQ ID NO: 50243 - DNA, 59 bp, Artificial
  Synthetic oligonucleotide
agatgagtcttctaaccgaggtcgaaacgtacgttctctctatcatcccgtcaggcccc

SEQ ID NO: 50244 - DNA, 60 bp, Artificial
  Synthetic oligonucleotide
gatgagtcttctaaccgaggtcgaaacgtacgttctctctatcatcccgtcaggccccct

SEQ ID NO: 50245 - DNA, 60 bp, Artificial
  Synthetic oligonucleotide
atgagtcttctaaccgaggtcgaaacgtacgttctctttatcatcccgtcaggccccctc

SEQ ID NO: 50246 - DNA, 60 bp, Artificial
  Synthetic oligonucleotide
atgagtcttctaaccgaggtcgaaacgtacgttctctctatcattccgtcaggccccctc

SEQ ID NO: 50247 - DNA, 58 bp, Artificial
  Synthetic oligonucleotide
gatgagtcttctaaccgaggtcgaaacgtacgttctctctatcatcccgtcaggcccc

SEQ ID NO: 50248 - DNA, 57 bp, Artificial
  Synthetic oligonucleotide
atgagtcttctaaccgaggtcgaaacgtacgttctctctattgtcccgtcaggcccc

SEQ ID NO: 50249 - DNA, 57 bp, Artificial
  Synthetic oligonucleotide
atgagtcttctaaccgaggtcgaaacgtacgttctctctatcatcccgtcaggcccc

SEQ ID NO: 50250 - DNA, 60 bp, Artificial
  Synthetic oligonucleotide
atgagtcttctaaccgaggtcgaaacgtacgttctctctatcgtccggtcaggccccctc

SEQ ID NO: 50251 - DNA, 53 bp, Artificial
  Synthetic oligonucleotide
atgagtcttctaaccgaggtcgaaacgtacgttctctctatcatcccgtcagg

SEQ ID NO: 50252 - DNA, 60 bp, Artificial
  Synthetic oligonucleotide
atgagtcttctaaccgaggtcgaaacgtacgttctctctattgtcccgtcaggccccctc

SEQ ID NO: 50253 - DNA, 57 bp, Artificial
  Synthetic oligonucleotide
atgagtcttctaaccgaggtcgaaacgtacgttctctctatcattccgtcaggcccc

SEQ ID NO: 50254 - DNA, 57 bp, Artificial
  Synthetic oligonucleotide
atgagtcttctaaccgaggtcgaaacgtacgttctctctatcgtccggtcaggcccc

SEQ ID NO: 50255 - DNA, 60 bp, Artificial
  Synthetic oligonucleotide
ccactagaggggttcaaattgcttcaaatgagaacatggaggcaatggactccaacactc

SEQ ID NO: 50256 - DNA, 53 bp, Artificial
  Synthetic oligonucleotide
cttcctttgacatgagtaatgaaggatcttatttcttcggagacaatgcagag

SEQ ID NO: 50257 - DNA, 60 bp, Artificial
  Synthetic oligonucleotide
cttcctttgacatgaacaatgaaggatcttatttcttcggagacaatgcagaggagtatg

SEQ ID NO: 50258 - DNA, 60 bp, Artificial
  Synthetic oligonucleotide
gactatgaagggaggctgatccagaacagcataacaatagagagaatggcactctcagca

SEQ ID NO: 50259 - DNA, 60 bp, Artificial
  Synthetic oligonucleotide
tgactatgaagggaggctgatccagaacagcataacaatagagagaatggcactctcagc

SEQ ID NO: 50260 - DNA, 60 bp, Artificial
  Synthetic oligonucleotide
caagagtggataaactgacccaaggtcgccagacctatgactggacattgaatagaaacc

SEQ ID NO: 50261 - DNA, 60 bp, Artificial
  Synthetic oligonucleotide
caaatactgtcaatttattcaacagtggcgagttccctagcactggcaatcatggtggct

SEQ ID NO: 50262 - DNA, 56 bp, Artificial
  Synthetic oligonucleotide
gactatgaaggaaggctgatccagaacagcataacaatagagagaatggttctctc

SEQ ID NO: 50263 - DNA, 60 bp, Artificial
  Synthetic oligonucleotide
ctgtgtcaagctttcaggtagactgctttctttggcatgtccgcaagcgatttgcagacc

SEQ ID NO: 50264 - DNA, 60 bp, Artificial
  Synthetic oligonucleotide
aatgaactgagcaatcttgcgaaaggggagaaagctaatgtgctgatagggcaaggagac

SEQ ID NO: 50265 - DNA, 60 bp, Artificial
  Synthetic oligonucleotide
caatgaactgagcaatcttgcgaaaggggagaaagctaatgtgctgatagggcaaggaga

SEQ ID NO: 50266 - DNA, 60 bp, Artificial
  Synthetic oligonucleotide
gtctggacttataatgctgaacttctggttctcatggaaaatgagagaactctagacttt

SEQ ID NO: 50267 - DNA, 60 bp, Artificial
  Synthetic oligonucleotide
gatgtctggacttataatgctgaacttctggttctcatggaaaatgagagaactctagac

SEQ ID NO: 50268 - DNA, 60 bp, Artificial
  Synthetic oligonucleotide
ctggacttataatgctgaacttctggttctcatggaaaatgagagaactctagactttca

SEQ ID NO: 50269 - DNA, 60 bp, Artificial
  Synthetic oligonucleotide
tggacttataatgctgaacttctggttctcatggaaaatgagagaactctagactttcat

SEQ ID NO: 50270 - DNA, 60 bp, Artificial
  Synthetic oligonucleotide
actgtcaatttattcaacagtggcgagttccctagcactggcaatcatggtagctggtct

SEQ ID NO: 50271 - DNA, 60 bp, Artificial
  Synthetic oligonucleotide
cggtctaacagccaatgaatcgggacggctaatagatttcctcaaggatgtgatggaatc

SEQ ID NO: 50272 - DNA, 60 bp, Artificial
  Synthetic oligonucleotide
acggtttgacggctaatgaatcaggaaggctaatagatttcctcaaggatgtgatggaat

SEQ ID NO: 50273 - DNA, 60 bp, Artificial
  Synthetic oligonucleotide
cggtttgacggctaatgaatcaggaaggctaatagatttcctcaaggatgtgatggaatc

SEQ ID NO: 50274 - DNA, 60 bp, Artificial
  Synthetic oligonucleotide
aaccatgcgcagacttgccgatcaaagtctcccaccgaacttctccagccttgaaaactt

SEQ ID NO: 50275 - DNA, 60 bp, Artificial
  Synthetic oligonucleotide
cgcagacttgccgatcaaagtctcccaccgaacttctccagccttgaaaactttagagcc

SEQ ID NO: 50276 - DNA, 56 bp, Artificial
  Synthetic oligonucleotide
gatcttatttcttcggagacaatgcagaggagtatgacaattaaagaaaaataccc

SEQ ID NO: 50277 - DNA, 60 bp, Artificial
  Synthetic oligonucleotide
gatcttatttcttcggagacaatgcagaggagtatgacaattaaagaaaaatacccttgt

SEQ ID NO: 50278 - DNA, 55 bp, Artificial
  Synthetic oligonucleotide
gatcttatttcttcggagacaatgcagaggagtatgacaattaaagaaaaatacc

SEQ ID NO: 50279 - DNA, 60 bp, Artificial
  Synthetic oligonucleotide
gatggaagacggattcctagatgtctggacttataatgctgaacttctggttctcatgga

SEQ ID NO: 50280 - DNA, 60 bp, Artificial
  Synthetic oligonucleotide
ttgaaaataagagtacatgaggggtatgaggaattcacaatggttgggcagagggcaaca

SEQ ID NO: 50281 - DNA, 60 bp, Artificial
  Synthetic oligonucleotide
ccaaacattgaaaataagagtacatgaggggtatgaggaattcacaatggttgggcagag

SEQ ID NO: 50282 - DNA, 60 bp, Artificial
  Synthetic oligonucleotide
aaaagtcttacataaatcggacagggacatttgagttcacaagctttttctaccgctatg

SEQ ID NO: 50283 - DNA, 60 bp, Artificial
  Synthetic oligonucleotide
gggagactgtgaagattcaatggtctcaagaccccacgatgctgtacaataagatggagt

SEQ ID NO: 50284 - DNA, 60 bp, Artificial
  Synthetic oligonucleotide
ctgggagactgtgaagattcaatggtctcaagaccccacgatgctgtacaataagatgga

SEQ ID NO: 50285 - DNA, 60 bp, Artificial
  Synthetic oligonucleotide
ggaccttagagtctcaagtttcatcagagggacaagagtggtcccaagaggaaagctatc

SEQ ID NO: 50286 - DNA, 60 bp, Artificial
  Synthetic oligonucleotide
ggaccttagagtctcaagtttcatcagagggacaagagtggtcccaagagggcagctatc

SEQ ID NO: 50287 - DNA, 58 bp, Artificial
  Synthetic oligonucleotide
ggaccttagagtctcaagtttcatcagagggacaagagtggtcccaagaggacagcta

SEQ ID NO: 50288 - DNA, 60 bp, Artificial
  Synthetic oligonucleotide
catggaaaatgagagaactctagactttcatgactcaaatgtcaagaacctttacgacaa

SEQ ID NO: 50289 - DNA, 60 bp, Artificial
  Synthetic oligonucleotide
ctcatggaaaatgagagaactctagactttcatgactcaaatgtcaagaacctttacgac

SEQ ID NO: 50290 - DNA, 60 bp, Artificial
  Synthetic oligonucleotide
tcaagagtctgaatgtgcatgtgtaaatggctcttgctttactgtaatgactgatggacc

SEQ ID NO: 50291 - DNA, 60 bp, Artificial
  Synthetic oligonucleotide
taattccaggagcggctttgaaatgatttgggatccaaatgggtggactggaacggacag

SEQ ID NO: 50292 - DNA, 60 bp, Artificial
  Synthetic oligonucleotide
gaagtcctcacagaacattaatgagttgtcctgtgggtgaggctccctccccatacaact

SEQ ID NO: 50293 - DNA, 56 bp, Artificial
  Synthetic oligonucleotide
gaagccctcacagaacattaatgagttgtcctgtgggtgaggctccctccccatat

SEQ ID NO: 50294 - DNA, 60 bp, Artificial
  Synthetic oligonucleotide
gaagccctcacagaacattaatgagttgtcctgtgggtgaggctccctccccatataact

SEQ ID NO: 50295 - DNA, 60 bp, Artificial
  Synthetic oligonucleotide
aagccctcacagaacattaatgagttgtcctgtgggtgaggctccctccccatataactc

SEQ ID NO: 50296 - DNA, 60 bp, Artificial
  Synthetic oligonucleotide
ggagccctcacagaacattaatgagttgtcctgtgggtgaggctccctccccatataact

SEQ ID NO: 50297 - DNA, 60 bp, Artificial
  Synthetic oligonucleotide
gagccctcacagaacattaatgagttgtcctgtgggtgaggctccctccccatataactc

SEQ ID NO: 50298 - DNA, 59 bp, Artificial
  Synthetic oligonucleotide
agccctcacagaacattaatgagttgtcctgtgggtgaggctccctccccatataactc

SEQ ID NO: 50299 - DNA, 60 bp, Artificial
  Synthetic oligonucleotide
agccctcacagaacattaatgagttgtcctgtgggtgaggctccctccccatataactca

SEQ ID NO: 50300 - DNA, 60 bp, Artificial
  Synthetic oligonucleotide
ggacccaaggatgtgctctctgatgcaagggtcaactctcccgaggagatctggagctgc

SEQ ID NO: 50301 - DNA, 60 bp, Artificial
  Synthetic oligonucleotide
catggtggaggccatggtgtctagggcccgaattgacgcacgaattgatttcgagtctgg

SEQ ID NO: 50302 - DNA, 60 bp, Artificial
  Synthetic oligonucleotide
gctgcagacaaagaatccactcaaaaggcaatagatggagtcaccaataaggtcaactcg

SEQ ID NO: 50303 - DNA, 60 bp, Artificial
  Synthetic oligonucleotide
caaaagcattaattccaggagcggctttgaaatgatttgggatccaaatgggtggactgg

SEQ ID NO: 50304 - DNA, 60 bp, Artificial
  Synthetic oligonucleotide
aaccaaaagcactaattccaggagcggctttgaaatgatttgggatccaaatgggtggac

SEQ ID NO: 50305 - DNA, 60 bp, Artificial
  Synthetic oligonucleotide
gggagaaccaaaagcactaattccaggagcggctttgaaatgatttgggatccaaatgga

SEQ ID NO: 50306 - DNA, 60 bp, Artificial
  Synthetic oligonucleotide
agccctaattccaggagcggctttgaaatgatttgggatccaaatgggtggactgaaacg

SEQ ID NO: 50307 - DNA, 60 bp, Artificial
  Synthetic oligonucleotide
gtagataatcactcaccgagtgacatcaacttcatggcgtctcaaggcaccaaacgatct

SEQ ID NO: 50308 - DNA, 60 bp, Artificial
  Synthetic oligonucleotide
agtggcattgggagattctacatacagatgtgcacagaactcaaactcagtgactatgaa

SEQ ID NO: 50309 - DNA, 60 bp, Artificial
  Synthetic oligonucleotide
cagtggcgagttccctagcactggcaatcatggtggctggtctatctttatggatgtgct

SEQ ID NO: 50310 - DNA, 60 bp, Artificial
  Synthetic oligonucleotide
atggatgtcaatccgactttacttttcttgaaagtaccagtacaaaatgctataagtacc

SEQ ID NO: 50311 - DNA, 60 bp, Artificial
  Synthetic oligonucleotide
ttcaacagtttatatgcatctccacaactcgaggggttttcagctgaatcaagaaaattg

SEQ ID NO: 50312 - DNA, 60 bp, Artificial
  Synthetic oligonucleotide
gtttatatgcatctccacaactcgaggggttttcagctgaatcaagaaaattgcttctca

SEQ ID NO: 50313 - DNA, 60 bp, Artificial
  Synthetic oligonucleotide
tgctgacccgaggctggagccacacaagtgggaaaagtactgcgttctcgagataggaga

SEQ ID NO: 50314 - DNA, 60 bp, Artificial
  Synthetic oligonucleotide
ctctcttactgatccgaggctggagccacacaagtgggaaaagtactgtgtcctcgagat

SEQ ID NO: 50315 - DNA, 56 bp, Artificial
  Synthetic oligonucleotide
gtgagtatggaattctctcttactgatccgaggctggagccacacaagtgggaaaa

SEQ ID NO: 50316 - DNA, 60 bp, Artificial
  Synthetic oligonucleotide
ccaccagaggggttcaaattgcttcaaatgagaacatggaagcaatagactccaacactc

SEQ ID NO: 50317 - DNA, 60 bp, Artificial
  Synthetic oligonucleotide
ccaccagaggggttcaaattgcttcaaatgagaacatggaagctatggactccaacactc

SEQ ID NO: 50318 - DNA, 60 bp, Artificial
  Synthetic oligonucleotide
ccaccagaggggttcaaattgcttcaaatgagaacatggaggcaatggactccaacactc

SEQ ID NO: 50319 - DNA, 60 bp, Artificial
  Synthetic oligonucleotide
gatcttatttcttcggagacaatgcagaggagtattacaattaaagaaaaatacccttgt

SEQ ID NO: 50320 - DNA, 60 bp, Artificial
  Synthetic oligonucleotide
cctccaaacattgaaaataagagtacatgaggggtatgaggaattcacaatggttgggcg

SEQ ID NO: 50321 - DNA, 60 bp, Artificial
  Synthetic oligonucleotide
gaatcgggacggctaatagatttcctcaaggatgtgatggaatcaatggataaggaagaa

SEQ ID NO: 50322 - DNA, 60 bp, Artificial
  Synthetic oligonucleotide
aatgaactgagcaatcttgcgaagggagagaaggctaatgtgctaattgggcaaggagac

SEQ ID NO: 50323 - DNA, 60 bp, Artificial
  Synthetic oligonucleotide
ctgggagcagatgtacactccaggaggggaagtgagaaatgatgatattgaccaaagctt

SEQ ID NO: 50324 - DNA, 60 bp, Artificial
  Synthetic oligonucleotide
cgagccatttcaatccctggtccctaaggcagccagaggtcaatacagcggattcgtgag

SEQ ID NO: 50325 - DNA, 60 bp, Artificial
  Synthetic oligonucleotide
tggtggaataagaatggtagacatcctgaggcagaatccaacagaggaacaagccgtgga

SEQ ID NO: 50326 - DNA, 60 bp, Artificial
  Synthetic oligonucleotide
aggtgggggccagaatactaacatcggaatcacaactgacaataacaaaagagaaaaagg

SEQ ID NO: 50327 - DNA, 60 bp, Artificial
  Synthetic oligonucleotide
cgagtgcacgagggatatgaagaattcacaatggttgggagaagagcaacagctatcctc

SEQ ID NO: 50328 - DNA, 60 bp, Artificial
  Synthetic oligonucleotide
tgaatactccagcacagagagggtggtggtgagcatcgaccgctttttaagggttcggga

SEQ ID NO: 50329 - DNA, 60 bp, Artificial
  Synthetic oligonucleotide
aatagagcaaaccagcggttgaaccccatgcaccaactcttgaggcacttccaaaaggat

SEQ ID NO: 50330 - DNA, 60 bp, Artificial
  Synthetic oligonucleotide
cttctcccctttgctgctgctccaccggaacagagtaggatgcagttctcctccctaact

SEQ ID NO: 50331 - DNA, 60 bp, Artificial
  Synthetic oligonucleotide
tgagaggaatgaacaaggacaaaccctctggagcaaaacaaatgacgccggctcagaccg

SEQ ID NO: 50332 - DNA, 60 bp, Artificial
  Synthetic oligonucleotide
agagtaatggaaatttcattgctccagaatatgcatacaaaattgtcaagaaaggggact

SEQ ID NO: 50333 - DNA, 60 bp, Artificial
  Synthetic oligonucleotide
tgaccggtttcgccgagatcagaagtccctaagaggaagaggcaacactcttggtctgga

SEQ ID NO: 50334 - DNA, 60 bp, Artificial
  Synthetic oligonucleotide
atgctgaacttctggttctcatggaaaatgagagaactctagactttcatgactcaaatg

SEQ ID NO: 50335 - DNA, 60 bp, Artificial
  Synthetic oligonucleotide
gggaacggtgactacggaagtggcttttggcctagtgtgtgccacttgtgagcagattgc

SEQ ID NO: 50336 - DNA, 60 bp, Artificial
  Synthetic oligonucleotide
cagaggattcgtgtactttgttgaaacattagcgaggagtatctgtgagaaacttgagca

SEQ ID NO: 50337 - DNA, 60 bp, Artificial
  Synthetic oligonucleotide
acagtggcgagttccctagcactggcaatcatggtagctggtctatctttatggatgtgc

SEQ ID NO: 50338 - DNA, 60 bp, Artificial
  Synthetic oligonucleotide
agtggcgagttccctagcactggcaatcatggtagctggtctatctttatggatgtgctc

SEQ ID NO: 50339 - DNA, 60 bp, Artificial
  Synthetic oligonucleotide
aacagtggcgagttccctagcactggcaatcatggtagctggtctatctttatggatgtg

SEQ ID NO: 50340 - DNA, 60 bp, Artificial
  Synthetic oligonucleotide
caacagtggcgagttccctagcactggcaatcatggtagctggtctatctttatggatgt

SEQ ID NO: 50341 - DNA, 60 bp, Artificial
  Synthetic oligonucleotide
cagggtagataatcactcaccgagtgacatcaacatcatggcgtctcaaggcaccaaacg

SEQ ID NO: 50342 - DNA, 60 bp, Artificial
  Synthetic oligonucleotide
ctgtgtcaagctttcaggtagactgctttctttggcatgtccgcaaacgacttgcagacc

SEQ ID NO: 50343 - DNA, 60 bp, Artificial
  Synthetic oligonucleotide
ctgtgtcaagctttcaggtagactgctttctttggcatgtccgcaaacaatttgcagacc

SEQ ID NO: 50344 - DNA, 60 bp, Artificial
  Synthetic oligonucleotide
cttagatggggtgaagcctctaattttgagagattgtagtgtagctggatggctcctcgg

SEQ ID NO: 50345 - DNA, 60 bp, Artificial
  Synthetic oligonucleotide
ccttgatggagtgaagcctctaattttgagagattgtagtgtagctggatggctcctcgg

SEQ ID NO: 50346 - DNA, 60 bp, Artificial
  Synthetic oligonucleotide
caaatactgtcaatttattccacagtagcgagttccctagcactggcaatcatggtagct

SEQ ID NO: 50347 - DNA, 60 bp, Artificial
  Synthetic oligonucleotide
ttttggggtttgtgttcacgctcaccgtgcccagtgagcgaggactgcaacgtagacggt

SEQ ID NO: 50348 - DNA, 60 bp, Artificial
  Synthetic oligonucleotide
ctggttctcatggaaaatgagagaactctagactttcatgactcaaatgtcaagaacctt

SEQ ID NO: 50349 - DNA, 60 bp, Artificial
  Synthetic oligonucleotide
ctgtgtcaagcttccaggtagactgctttctttggcatgtccgcaaacgatttgcagacc

SEQ ID NO: 50350 - DNA, 57 bp, Artificial
  Synthetic oligonucleotide
tgactatgaaggaaggctgattcagaacagcataacaatagagagaatggttctctc

SEQ ID NO: 50351 - DNA, 60 bp, Artificial
  Synthetic oligonucleotide
caatttactcaacagtggcgagttccctagcactggcaatcatggtagctggtctatctt

SEQ ID NO: 50352 - DNA, 60 bp, Artificial
  Synthetic oligonucleotide
gatcatccgtcacgaaggaagaggaagtgcttacaggcaacctccaaacattgaaaataa

SEQ ID NO: 50353 - DNA, 60 bp, Artificial
  Synthetic oligonucleotide
caagcggatcatccgtcaagaaggaagaggaagtgcttacaggcaacctccaaacattga

SEQ ID NO: 50354 - DNA, 60 bp, Artificial
  Synthetic oligonucleotide
caagtggatcatccgtcaagaaggaagaggaagtgcttacaggcaacctccaaacattga

SEQ ID NO: 50355 - DNA, 60 bp, Artificial
  Synthetic oligonucleotide
acaagtggatcatccgtcaagaaggaagaggaagtgcttacaggcaacctccaaacattg

SEQ ID NO: 50356 - DNA, 60 bp, Artificial
  Synthetic oligonucleotide
acaagcggatcatccgtcaagaaggaagaggaagtgcttacaggcaacctccaaacattg

SEQ ID NO: 50357 - DNA, 60 bp, Artificial
  Synthetic oligonucleotide
gttgggatttccagcatggtggaggccatggtgtctagggcccgaattgatgcgcgaatt

SEQ ID NO: 50358 - DNA, 60 bp, Artificial
  Synthetic oligonucleotide
gcatgtgtaaatggctcttgctttactgtaatgactgacggaccaagtaatggtcaagca

SEQ ID NO: 50359 - DNA, 60 bp, Artificial
  Synthetic oligonucleotide
atcaatttactcaacagtggcgagttccctagcactggcaatcatggtagctggtctatc

SEQ ID NO: 50360 - DNA, 60 bp, Artificial
  Synthetic oligonucleotide
caagtttcatcagagggacaagagtggtcccaagaggacagctatccaccagaggggttc

SEQ ID NO: 50361 - DNA, 60 bp, Artificial
  Synthetic oligonucleotide
caagtttcatcagagggacaagagtggtcccaagaggacagctatccaccagaggagttc

SEQ ID NO: 50362 - DNA, 60 bp, Artificial
  Synthetic oligonucleotide
caagtttcatcagagggacaagagtggtcccaagaggacagctatccaccagaggggtcc

SEQ ID NO: 50363 - DNA, 56 bp, Artificial
  Synthetic oligonucleotide
gatcttatttcttcggagacaatgcagaggagtatgacaattaaagataaataccc

SEQ ID NO: 50364 - DNA, 54 bp, Artificial
  Synthetic oligonucleotide
gatcttatttcttcggagacaatgcagaggagtatgacaattaaagaaaaatac

SEQ ID NO: 50365 - DNA, 60 bp, Artificial
  Synthetic oligonucleotide
caacagtagtgagttccctagcactggcaatcatggtagctggtctatctttatggatgt

SEQ ID NO: 50366 - DNA, 56 bp, Artificial
  Synthetic oligonucleotide
cgagttccctagcactggcaatcatggtagctggtctatctttatggatgtgctcc

SEQ ID NO: 50367 - DNA, 60 bp, Artificial
  Synthetic oligonucleotide
caacagtggtgagttccctagcactggcaatcatggtagctggtctatctttatggatgt

SEQ ID NO: 50368 - DNA, 55 bp, Artificial
  Synthetic oligonucleotide
catgactcaaatgtcaagaacctttacgacaaggtccgactacagcttagggata

SEQ ID NO: 50369 - DNA, 60 bp, Artificial
  Synthetic oligonucleotide
catgactcaaatgtcaagaacctttacgacaaggtccgactacagcttagggataatgca

SEQ ID NO: 50370 - DNA, 60 bp, Artificial
  Synthetic oligonucleotide
cgaaagtaagagcatgaagttacggacacaaataccagcagaaatgcttgcaaacattga

SEQ ID NO: 50371 - DNA, 60 bp, Artificial
  Synthetic oligonucleotide
gaacatggaggcaatggactccaacactcttgaactgagaagcagatattgggctataag

SEQ ID NO: 50372 - DNA, 60 bp, Artificial
  Synthetic oligonucleotide
gggatctttgaaaactcgtgtcttgaaacgatggaaattgttcaacaaacaagggtggat

SEQ ID NO: 50373 - DNA, 60 bp, Artificial
  Synthetic oligonucleotide
ctgaaaataagagtacatgaggggtatgaggaattcacaatggttgggcggagagcaaca

SEQ ID NO: 50374 - DNA, 60 bp, Artificial
  Synthetic oligonucleotide
gctgaacttctggttctcatggaaaatgagagaactctagactttcatgattcaaatgtc

SEQ ID NO: 50375 - DNA, 60 bp, Artificial
  Synthetic oligonucleotide
attgagcatcaatgaactgagcaatcttgcgaaaggggagaaagcaaatgtactgatagg

SEQ ID NO: 50376 - DNA, 60 bp, Artificial
  Synthetic oligonucleotide
attaagcatcaatgaactgagcaatcttgcgaagggggagaaagctaatgtgctgatagg

SEQ ID NO: 50377 - DNA, 60 bp, Artificial
  Synthetic oligonucleotide
attgagcatcaatgaactgagcaatcttgcgaagggggagaaagctaatgtgctgatagg

SEQ ID NO: 50378 - DNA, 60 bp, Artificial
  Synthetic oligonucleotide
gaaccctagactttcatgactcaaatgtcaagaacctttacgacaaggtccgactacagc

SEQ ID NO: 50379 - DNA, 60 bp, Artificial
  Synthetic oligonucleotide
agaactctagactttcatgactcaaatgtcaagaacctttacgacaaggtccgactacag

SEQ ID NO: 50380 - DNA, 60 bp, Artificial
  Synthetic oligonucleotide
gggatctttgaaaactcgtgtcttgaaacgatggaaattgttcaacaaacaagagtggat

SEQ ID NO: 50381 - DNA, 60 bp, Artificial
  Synthetic oligonucleotide
gggatctttgaaaactcgtgtcttgaaacgatggaaattgttcaacaaacaagagtggac

SEQ ID NO: 50382 - DNA, 60 bp, Artificial
  Synthetic oligonucleotide
aagagtacatgaggggtatgaggaattcacaatggttgggcggagggcaacagctatcct

SEQ ID NO: 50383 - DNA, 60 bp, Artificial
  Synthetic oligonucleotide
aaaagtacatgaggggtatgaggaattcacaatggttgggcggagggcaacagctatcct

SEQ ID NO: 50384 - DNA, 60 bp, Artificial
  Synthetic oligonucleotide
gaaaataagagtacatgaggggtatgaggaattcacaatggttgggcggagggcaacagc

SEQ ID NO: 50385 - DNA, 60 bp, Artificial
  Synthetic oligonucleotide
aaacgaggagatcattcgagctgaagaagctgtgggagcaaacccgttcaaaggcaggac

SEQ ID NO: 50386 - DNA, 60 bp, Artificial
  Synthetic oligonucleotide
agcactaattccaggagcggctttgaaatgatttgggatccaaatgggtggactggaacg

SEQ ID NO: 50387 - DNA, 60 bp, Artificial
  Synthetic oligonucleotide
cccaagaggacagctatccaccagaggggttcaaattgcttcaaatgagaacatggaagc

SEQ ID NO: 50388 - DNA, 60 bp, Artificial
  Synthetic oligonucleotide
atagaaaccagccggctgcaactgctttggccaacactatagaaatcttcagatcgaacg

SEQ ID NO: 50389 - DNA, 60 bp, Artificial
  Synthetic oligonucleotide
gggagcaaacccgttcaaaggcaggactgttggtttcagatggaggaccaaatctataca

SEQ ID NO: 50390 - DNA, 60 bp, Artificial
  Synthetic oligonucleotide
tgggagcaaacccgttcaaaggcaggactgttggtttcagatggaggaccaaatctatac

SEQ ID NO: 50391 - DNA, 60 bp, Artificial
  Synthetic oligonucleotide
ggggacaataccaaatggaatgagaatcagaatcctaggatgtttctggcaatgataacg

SEQ ID NO: 50392 - DNA, 60 bp, Artificial
  Synthetic oligonucleotide
agaaaccaaccggctgcaactgctttggccaacactatagaaatcttcagatcgaacggt

SEQ ID NO: 50393 - DNA, 60 bp, Artificial
  Synthetic oligonucleotide
ctggagacaataccaaatggaatgagaatcagaatcctaggatgtttctggcaatgataa

SEQ ID NO: 50394 - DNA, 60 bp, Artificial
  Synthetic oligonucleotide
atagaaaccaaccggctgcaactgctttggccaacactatagaaatcttcagatcgaacg

SEQ ID NO: 50395 - DNA, 60 bp, Artificial
  Synthetic oligonucleotide
atagaaaccaaccggctgcaactgctttggccaacactatagaaatcttcagatcaaacg

SEQ ID NO: 50396 - DNA, 60 bp, Artificial
  Synthetic oligonucleotide
ctgtgttcaactacaataaggcaaccaaaaggcttaccgttcttggaaaggacgcaggtg

SEQ ID NO: 50397 - DNA, 60 bp, Artificial
  Synthetic oligonucleotide
gtaaggggcaattcccctgtgttcaactacaataaggcaaccaaaaggcttaccgttctc

SEQ ID NO: 50398 - DNA, 60 bp, Artificial
  Synthetic oligonucleotide
cgtaaggggcaattcccctgtgttcaactacaataaggcaaccaaaaggcttaccgttct

SEQ ID NO: 50399 - DNA, 60 bp, Artificial
  Synthetic oligonucleotide
aagagtacatgaggggtatgaggaattcacaatggttgggcggagagcaacagctatctt

SEQ ID NO: 50400 - DNA, 60 bp, Artificial
  Synthetic oligonucleotide
aagaatacatgaggggtatgaggaattcacaatggttgggcggagagcaacagctatctt

SEQ ID NO: 50401 - DNA, 60 bp, Artificial
  Synthetic oligonucleotide
aagagtctgaatgtgcatgtgtaaatggctcttgctttactgtaatgactgacggaccta

SEQ ID NO: 50402 - DNA, 60 bp, Artificial
  Synthetic oligonucleotide
aagagtctgaatgtgcatgtgtaaatggctcttgctttactgtaatgactgacggaccaa

SEQ ID NO: 50403 - DNA, 60 bp, Artificial
  Synthetic oligonucleotide
tgcttgccatgatggcaccagttggttgacaattggaatttctggcccagacagtggggc

SEQ ID NO: 50404 - DNA, 60 bp, Artificial
  Synthetic oligonucleotide
ccatgatggcaccagttggttgacaattggaatttctggcccagacagtggggctgtggc

SEQ ID NO: 50405 - DNA, 60 bp, Artificial
  Synthetic oligonucleotide
aacaagagtggtcccaagaggacagctatctaccagaggagttcaaattgcttcaaatga

SEQ ID NO: 50406 - DNA, 60 bp, Artificial
  Synthetic oligonucleotide
tcaacagtggcaagttccctagcactggcaatcatggtagctggtctatctttatggatg

SEQ ID NO: 50407 - DNA, 60 bp, Artificial
  Synthetic oligonucleotide
gtggcaagttccctagcactggcaatcatggtagctggtctatctttatggatgtgctcc

SEQ ID NO: 50408 - DNA, 60 bp, Artificial
  Synthetic oligonucleotide
gtacatgaggggtatgaggaattcacaatggttgggcggagagcaacagctatcctgagg

SEQ ID NO: 50409 - DNA, 60 bp, Artificial
  Synthetic oligonucleotide
atggattccaacactgtatcaagctttcaggtagactgctttctttggcatgtccgcaaa

SEQ ID NO: 50410 - DNA, 60 bp, Artificial
  Synthetic oligonucleotide
ccggctgcaactgctttggccaacactatagaaatcttcagatcgaacggtctaacagcc

SEQ ID NO: 50411 - DNA, 60 bp, Artificial
  Synthetic oligonucleotide
atgactggacattgaatagaaaccaaccggctgcaactgctttggccaacactatagaaa

SEQ ID NO: 50412 - DNA, 60 bp, Artificial
  Synthetic oligonucleotide
acagctatccaccagaggagttcaaattgcttcaaatgagaacatggaagcaatggactc

SEQ ID NO: 50413 - DNA, 60 bp, Artificial
  Synthetic oligonucleotide
gactgctttctttggcatgtccgcaaacgatttgcagaccaagaactgggtgatgcccca

SEQ ID NO: 50414 - DNA, 60 bp, Artificial
  Synthetic oligonucleotide
tctttggcatgtccgcaaacgatttgcagaccaagaactgggtgatgccccattccttga

SEQ ID NO: 50415 - DNA, 60 bp, Artificial
  Synthetic oligonucleotide
ccttcgatcttggagggctatatgaagcaattgaggagtgcctgattaacggtccctggg

SEQ ID NO: 50416 - DNA, 60 bp, Artificial
  Synthetic oligonucleotide
aattgcttctcattgttcaggcacttagggacaacctggaacctgggaccttcgatcttg

SEQ ID NO: 50417 - DNA, 60 bp, Artificial
  Synthetic oligonucleotide
gtggcgagttccctagcactggcaatcatggtggctggtctatctttgtggatgtgctcc

SEQ ID NO: 50418 - DNA, 60 bp, Artificial
  Synthetic oligonucleotide
aaggatacatgttcgaaagcaagagcatgaagttacgaacacaaataccagcagaaatgc

SEQ ID NO: 50419 - DNA, 60 bp, Artificial
  Synthetic oligonucleotide
ggcaaggaagacaagagatatggcccagcattaagcatcaatgaactgagcaatcttgcg

SEQ ID NO: 50420 - DNA, 60 bp, Artificial
  Synthetic oligonucleotide
aatcaagaaatacacatcaggaagacaagagaagaaccctgctctcagaatgaaatggat

SEQ ID NO: 50421 - DNA, 60 bp, Artificial
  Synthetic oligonucleotide
atcaagaaatacacatcaggaagacaagagaagaaccctgctctcagaatgaaatggatg

SEQ ID NO: 50422 - DNA, 60 bp, Artificial
  Synthetic oligonucleotide
ccacaagaggggttcaaattgcttcaaatgagaacatggaagcaatggactccaacactc

SEQ ID NO: 50423 - DNA, 59 bp, Artificial
  Synthetic oligonucleotide
cagacggcaaaaatagtgaatttagcttgtccttcatgaaaaaatgccttgtttctact

SEQ ID NO: 50424 - DNA, 60 bp, Artificial
  Synthetic oligonucleotide
atgtgtaaatggctcttgctttactgtaatgactgacggaccaagtaatgggcaggcatc

SEQ ID NO: 50425 - DNA, 57 bp, Artificial
  Synthetic oligonucleotide
atgagtcttctaaccgaggtcgaaacgtacgttctctctattgtcctgtcaggcccc

SEQ ID NO: 50426 - DNA, 60 bp, Artificial
  Synthetic oligonucleotide
aaagatgagtcttctaaccgaggtcgaaacgtacgttctctctatcatcccgtcaggccc

SEQ ID NO: 50427 - DNA, 60 bp, Artificial
  Synthetic oligonucleotide
ctcatacaggaggccggttggaatttccagtatggtggaggccatggtgtctagggcccg

SEQ ID NO: 50428 - DNA, 60 bp, Artificial
  Synthetic oligonucleotide
ggccatgggtatctttcaatcaaaatttggagtatcaaataggatatatatgcagtggag

SEQ ID NO: 50429 - DNA, 51 bp, Artificial
  Synthetic oligonucleotide
cttctaaccgaggtcgaaacgtacgttctctctatcatcccgtcaggcccc

SEQ ID NO: 50430 - DNA, 60 bp, Artificial
  Synthetic oligonucleotide
cagaatatgcatacaaaattgtcaagaaaggggactcagcaattatgaaaagtgaagtgg

SEQ ID NO: 50431 - DNA, 60 bp, Artificial
  Synthetic oligonucleotide
caatagccagtcttgttaaaagtgatcagatttgcattggttaccatgcaaacaactcga

SEQ ID NO: 50432 - DNA, 60 bp, Artificial
  Synthetic oligonucleotide
atggaccagcattgagcatcaatgaactgagcaatcttgcgaagggggagaaagctaatg

SEQ ID NO: 50433 - DNA, 60 bp, Artificial
  Synthetic oligonucleotide
gctttccttgaagaatcccacccagggatctttgaaaactcgtgtcttgaaacgatggaa

SEQ ID NO: 50434 - DNA, 60 bp, Artificial
  Synthetic oligonucleotide
gaagaatcccacccagggatctttgaaaactcgtgtcttgaaacgatggaaattgttcaa

SEQ ID NO: 50435 - DNA, 55 bp, Artificial
  Synthetic oligonucleotide
gaacggctgcattgagggcaagctttctcaaatgtcaaaagaagtgaatgccaga

SEQ ID NO: 50436 - DNA, 60 bp, Artificial
  Synthetic oligonucleotide
gaacggctgtattgagggcaagctttctcaaatgtcaaaagaagtgaatgctagaattga

SEQ ID NO: 50437 - DNA, 60 bp, Artificial
  Synthetic oligonucleotide
cggctgcattgagggcaagctttctcaaatgtcaaaagaagtgaatgctagaattgagac

SEQ ID NO: 50438 - DNA, 60 bp, Artificial
  Synthetic oligonucleotide
aatgaaagagtatggggaagatccgaaaatcgaaacgaacaaatttgccgcaatatgcac

SEQ ID NO: 50439 - DNA, 60 bp, Artificial
  Synthetic oligonucleotide
caatagtcagtcttgttaaaagtgatcagatttgcattggttaccatgcaaacaattcga

SEQ ID NO: 50440 - DNA, 60 bp, Artificial
  Synthetic oligonucleotide
gagaactgaaatcataagaatgatggaaagtgccagaccagaagatgtgtcattccaggg

SEQ ID NO: 50441 - DNA, 60 bp, Artificial
  Synthetic oligonucleotide
gaggactgaaatcataagaatgatggaaagtgccagaccagaagatgtgtcattccaggg

SEQ ID NO: 50442 - DNA, 60 bp, Artificial
  Synthetic oligonucleotide
tgaggactgaaatcataagaatgatggaaagtgccagaccagaagatgtgtcattccagg

SEQ ID NO: 50443 - DNA, 60 bp, Artificial
  Synthetic oligonucleotide
catgaggactgaaatcataagaatgatggaaagtgccagaccagaagatgtgtcattcca

SEQ ID NO: 50444 - DNA, 60 bp, Artificial
  Synthetic oligonucleotide
gcagaacgtctgacatgaggactgaaatcataagaatgatggaaagtgccagaccagaag

SEQ ID NO: 50445 - DNA, 60 bp, Artificial
  Synthetic oligonucleotide
gggcagaacgtctgacatgaggactgaaatcataagaatgatggaaagtgccagaccaga

SEQ ID NO: 50446 - DNA, 60 bp, Artificial
  Synthetic oligonucleotide
ggtagacatcctgaggcagaatccaacagaggaacaagccgtggatatatgcaaggcagc

SEQ ID NO: 50447 - DNA, 60 bp, Artificial
  Synthetic oligonucleotide
agacatcctcaggcaaaatccaacagaggaacaagccgtggatatatgcaaggcagcaat

SEQ ID NO: 50448 - DNA, 60 bp, Artificial
  Synthetic oligonucleotide
aagccgtggatatatgcaaggcagcaatgggcttgaggattagctcatctttcagcttcg

SEQ ID NO: 50449 - DNA, 54 bp, Artificial
  Synthetic oligonucleotide
ataatgctgaacttctggttctcatggaaaatgagagaactctagacttccatg

SEQ ID NO: 50450 - DNA, 60 bp, Artificial
  Synthetic oligonucleotide
ataatgctgaacttctggttctcatggaaaatgagagaactctagacttccatgactcaa

SEQ ID NO: 50451 - DNA, 60 bp, Artificial
  Synthetic oligonucleotide
ctcgaggctctcatggaatggctaaagacaagaccaatcctgtcacctctgactaagggg

SEQ ID NO: 50452 - DNA, 60 bp, Artificial
  Synthetic oligonucleotide
tggaggacggattcctagatgtctggacttataatgctgaacttctggttctcatggaaa

SEQ ID NO: 50453 - DNA, 60 bp, Artificial
  Synthetic oligonucleotide
ggaggacggattcctagatgtctggacttataatgctgaacttctggttctcatggaaaa

SEQ ID NO: 50454 - DNA, 60 bp, Artificial
  Synthetic oligonucleotide
ggaagacggattcctagatgtctggacttataatgctgaacttctggttctcatggagaa

SEQ ID NO: 50455 - DNA, 60 bp, Artificial
  Synthetic oligonucleotide
acggattcctagatgtctggacttataatgctgaacttctggttctcatggaaaatgaga

SEQ ID NO: 50456 - DNA, 60 bp, Artificial
  Synthetic oligonucleotide
gaagacggattcctagatgtctggacttataatgctgaacttctggttctcatggaaaat

SEQ ID NO: 50457 - DNA, 60 bp, Artificial
  Synthetic oligonucleotide
gattcctagatgtctggacttataatgctgaacttctggttctcatggaaaatgagagaa

SEQ ID NO: 50458 - DNA, 60 bp, Artificial
  Synthetic oligonucleotide
cggattcctagatgtctggacttataatgctgaacttctggttctcatggaaaatgagag

SEQ ID NO: 50459 - DNA, 60 bp, Artificial
  Synthetic oligonucleotide
ctggcatggctcaaatcggccatgggtatctttcaatcaaaatttggagtatcgaatagg

SEQ ID NO: 50460 - DNA, 60 bp, Artificial
  Synthetic oligonucleotide
tggcatggctcaaatcggccatgggtatctttcaatcaaaatttggagtatcaaatagga

SEQ ID NO: 50461 - DNA, 60 bp, Artificial
  Synthetic oligonucleotide
atggttcaaatcggccatgggtatctttcaatcaaaatttggagtatcaaataggatata

SEQ ID NO: 50462 - DNA, 60 bp, Artificial
  Synthetic oligonucleotide
ggcatggctcaaatcggccatgggtatctttcaatcaaaatttggagtatcaaataggat

SEQ ID NO: 50463 - DNA, 60 bp, Artificial
  Synthetic oligonucleotide
gcatggctcaaatcggccatgggtatctttcaatcaaaatttggagtatcaaataggata

SEQ ID NO: 50464 - DNA, 60 bp, Artificial
  Synthetic oligonucleotide
catggctccaatcggccatgggtatctttcaatcaaaatttggagtatcaaataggatat

SEQ ID NO: 50465 - DNA, 60 bp, Artificial
  Synthetic oligonucleotide
atggctcaaatcggccatgggtatctttcaatcaaaatttggagtatcaaataggatata

SEQ ID NO: 50466 - DNA, 60 bp, Artificial
  Synthetic oligonucleotide
catggtggaggccatggtgtctagggcccgaattgacgcacgaatcgatttcgagtctgg

SEQ ID NO: 50467 - DNA, 60 bp, Artificial
  Synthetic oligonucleotide
gtcaatttattctacagtggcgagttccctagcactggcaatcatggtagctggtctatc

SEQ ID NO: 50468 - DNA, 60 bp, Artificial
  Synthetic oligonucleotide
aatgagaggactctagactttcatgactcaaatgtcaagaacctttacgacaaggtccgg

SEQ ID NO: 50469 - DNA, 60 bp, Artificial
  Synthetic oligonucleotide
catacttactgacagccagacagcgaccaaaagaattcggatggccatcaattagtgtcg

SEQ ID NO: 50470 - DNA, 60 bp, Artificial
  Synthetic oligonucleotide
gggagattctacatacagatgtgcacagaactcaaactcagtgactatgaagggaggctg

SEQ ID NO: 50471 - DNA, 60 bp, Artificial
  Synthetic oligonucleotide
gggaggttctacatacagatgtgcacagaactcaaactcagtgactatgaagggaggctg

SEQ ID NO: 50472 - DNA, 60 bp, Artificial
  Synthetic oligonucleotide
gggaggttctacatacagatgtgcacagaactcaaactcagtgactatgaagggaggctt

SEQ ID NO: 50473 - DNA, 60 bp, Artificial
  Synthetic oligonucleotide
cgggaggttctacatacagatgtgcacagaactcaaactcagtgactatgaagggaggct

SEQ ID NO: 50474 - DNA, 60 bp, Artificial
  Synthetic oligonucleotide
accaaatattgtcaatttattcaacagtggcgagttccctagcactggcaatcatggtag

SEQ ID NO: 50475 - DNA, 60 bp, Artificial
  Synthetic oligonucleotide
ccaagagctgggtgatgccccattccttgaccggcttcgccgagatcagaagtccctaag

SEQ ID NO: 50476 - DNA, 60 bp, Artificial
  Synthetic oligonucleotide
atgcgtaaatggctcttgctttactgtaatgactgatggaccgagcaatgggcaagcatc

SEQ ID NO: 50477 - DNA, 60 bp, Artificial
  Synthetic oligonucleotide
aaggagagcaacagtatcagcagatccactagcatcactgttggagatgtgccatagcac

SEQ ID NO: 50478 - DNA, 60 bp, Artificial
  Synthetic oligonucleotide
ggcaaaatccaacagaggaacaagccgtggatatatgcaaggcagcaatgggtctgagga

SEQ ID NO: 50479 - DNA, 60 bp, Artificial
  Synthetic oligonucleotide
gtaaggagggcaacagtatcagcagatccactagcatcactgttggagatgtgccatagc

SEQ ID NO: 50480 - DNA, 60 bp, Artificial
  Synthetic oligonucleotide
gtcccacccaggaatctttgaaaactcgtgtcttgaaacgatggaagttgttcaacaaac

SEQ ID NO: 50481 - DNA, 60 bp, Artificial
  Synthetic oligonucleotide
gaaaatgagagaactctagactttcatgactcaaatgtcaagaacctttacgacaaggtc

SEQ ID NO: 50482 - DNA, 60 bp, Artificial
  Synthetic oligonucleotide
tgactatgaagggaggctgatccagaacagcataacaatagagagaatggtactctcagc

SEQ ID NO: 50483 - DNA, 60 bp, Artificial
  Synthetic oligonucleotide
tgactatgaagggaggctgatccagaacagcataacaatagagagaatggtactctctgc

SEQ ID NO: 50484 - DNA, 60 bp, Artificial
  Synthetic oligonucleotide
gactatgaagggaggctgatccagaacagcataacaatagagagaatggtactttctgca

SEQ ID NO: 50485 - DNA, 60 bp, Artificial
  Synthetic oligonucleotide
gactatgaagggaggctgatccagaacagcataacaatagagagaatggtactctcagca

SEQ ID NO: 50486 - DNA, 60 bp, Artificial
  Synthetic oligonucleotide
gactatgaagggaggctgatccagaacagcataacaatagagagaatggtactctctgca

SEQ ID NO: 50487 - DNA, 60 bp, Artificial
  Synthetic oligonucleotide
tgactatgaagggaggctgatccagaacagcataacaatagagagaatggtactttctgc

SEQ ID NO: 50488 - DNA, 60 bp, Artificial
  Synthetic oligonucleotide
ggggctgtagctgtattgaaatacaatggcataataacagacactatcaagagttggagg

SEQ ID NO: 50489 - DNA, 60 bp, Artificial
  Synthetic oligonucleotide
ggggctgtggctgtattgaaatacaatggcataataacagacactatcaagagttggagg

SEQ ID NO: 50490 - DNA, 60 bp, Artificial
  Synthetic oligonucleotide
ggggcggtggctgtattgaaatacaatggcataataacagacactatcaagagttggagg

SEQ ID NO: 50491 - DNA, 60 bp, Artificial
  Synthetic oligonucleotide
acaatggggctgtggctgtattgaaatacaatggcataataacagacactatcaagagtt

SEQ ID NO: 50492 - DNA, 60 bp, Artificial
  Synthetic oligonucleotide
ccaccagaggggttcaaattgcttcaaatgagaacatggaagcaatggactccaacactc

SEQ ID NO: 50493 - DNA, 60 bp, Artificial
  Synthetic oligonucleotide
ccagaggggttcaaattgcttcaaatgagaacatggaagcaatggactccaacactcttg

SEQ ID NO: 50494 - DNA, 60 bp, Artificial
  Synthetic oligonucleotide
gacagctatccaccagaggagttcaaattgcttcaaatgagaacatggaagcaatggact

SEQ ID NO: 50495 - DNA, 60 bp, Artificial
  Synthetic oligonucleotide
ataatgctgaacttctggttctcatggaaaatgagagaactctagactttcatgactcaa

SEQ ID NO: 50496 - DNA, 60 bp, Artificial
  Synthetic oligonucleotide
ccatgatggcaccagttggttgacaattggaatttctggcccagacaatggggcggtggc

SEQ ID NO: 50497 - DNA, 60 bp, Artificial
  Synthetic oligonucleotide
gagaactgaaatcataagaatgatggaaagtgccagaccagaagatgtgtcgttccaggg

SEQ ID NO: 50498 - DNA, 60 bp, Artificial
  Synthetic oligonucleotide
agttcatatcggaggccagttggaatttccagcatggtggaggccatggtgtctagggcc

SEQ ID NO: 50499 - DNA, 60 bp, Artificial
  Synthetic oligonucleotide
ttggaatttccagcatggtggaggccatggtgtcaagggcccgaattgacgcacgaattg

SEQ ID NO: 50500 - DNA, 60 bp, Artificial
  Synthetic oligonucleotide
ttggaatttccagcatggtggaggccatggtgtctagggcccgtattgacgcacgaattg

SEQ ID NO: 50501 - DNA, 60 bp, Artificial
  Synthetic oligonucleotide
tgttcgaaagtaagagcatgaagttacgaacacaaataccagcagaaatgcttgcaagca

SEQ ID NO: 50502 - DNA, 60 bp, Artificial
  Synthetic oligonucleotide
acatgttcgagagtaagagcatgaagctacgaacacaaataccagcagaaatgcttgcaa

SEQ ID NO: 50503 - DNA, 60 bp, Artificial
  Synthetic oligonucleotide
ggaatttaccaaatactgtcaatttattctacagtggcgagttccctagcactggcaatc

SEQ ID NO: 50504 - DNA, 60 bp, Artificial
  Synthetic oligonucleotide
cttaccaaatactgtcaatttattctacagtggcgagttccctagcactggcaatcatgg

SEQ ID NO: 50505 - DNA, 60 bp, Artificial
  Synthetic oligonucleotide
tattcaacagtggcgagttccctagcactggcaatcatggtagctggtctatctttatgg

SEQ ID NO: 50506 - DNA, 60 bp, Artificial
  Synthetic oligonucleotide
tcccgcactcgcgagatactaacaaaaaccactgtggaccatatggccataatcaagaaa

SEQ ID NO: 50507 - DNA, 60 bp, Artificial
  Synthetic oligonucleotide
atctagatggagtgaagcctctaattttgagagattgtagtgtagctggatggctcctcg

SEQ ID NO: 50508 - DNA, 60 bp, Artificial
  Synthetic oligonucleotide
cttgaagagtcccacccaggaatctttgaaaactcgtgtcttgaaacgatggaagttgtt

SEQ ID NO: 50509 - DNA, 60 bp, Artificial
  Synthetic oligonucleotide
gctttccttgaagaatctcacccaggaatctttgaaaactcgtgtcttgaaacgatggaa

SEQ ID NO: 50510 - DNA, 60 bp, Artificial
  Synthetic oligonucleotide
gctgaacttctggttctcatggaaaatgagagaactctagactttcatgactcaaatgtc

SEQ ID NO: 50511 - DNA, 60 bp, Artificial
  Synthetic oligonucleotide
aagggtcaactctcccgaggagatctggagctgctggtgcagcagtaaagggggtaggga

SEQ ID NO: 50512 - DNA, 60 bp, Artificial
  Synthetic oligonucleotide
ccttgaccggcttcgccgagatcagaagtccctaagaggaagaggcaacactcttggtct

SEQ ID NO: 50513 - DNA, 60 bp, Artificial
  Synthetic oligonucleotide
gaaaccaaccggctgcaactgctttggccaacactatagaaatcttcagatcaaacggtc

SEQ ID NO: 50514 - DNA, 60 bp, Artificial
  Synthetic oligonucleotide
ccggctgcaactgctttggccaacactatagaaatcttcagatcaaacggtctaacagcc

SEQ ID NO: 50515 - DNA, 60 bp, Artificial
  Synthetic oligonucleotide
ggatcttagagtctcaagtttcatcagagggacaagagtggtcccaagaggacagctatc

SEQ ID NO: 50516 - DNA, 60 bp, Artificial
  Synthetic oligonucleotide
ggaccttagagtctcaagtttcatcagagggacaagagtggtcccaagaggacagctatc

SEQ ID NO: 50517 - DNA, 60 bp, Artificial
  Synthetic oligonucleotide
cagggatctttgaaaactcgtgtcttgaaacgatggaaattgttcaacaaacaagagtgg

SEQ ID NO: 50518 - DNA, 60 bp, Artificial
  Synthetic oligonucleotide
cccagggatctttgaaaactcgtgtcttgaaacgatggaaattgttcaacaaacaagagt

SEQ ID NO: 50519 - DNA, 60 bp, Artificial
  Synthetic oligonucleotide
agaatcccacccagggatctttgaaaactcgtgtcttgaaacgatggaaattgttcaaca

SEQ ID NO: 50520 - DNA, 60 bp, Artificial
  Synthetic oligonucleotide
ccacccagggatctttgaaaactcgtgtcttgaaacgatggaaattgttcaacaaacaag

SEQ ID NO: 50521 - DNA, 60 bp, Artificial
  Synthetic oligonucleotide
tgcagaccaagaactgggtgatgccccattccttgaccggcttcgccgagatcagaagtc

SEQ ID NO: 50522 - DNA, 60 bp, Artificial
  Synthetic oligonucleotide
acgatttgcagaccaagaactgggtgatgccccattccttgaccggcttcgccgagatca

SEQ ID NO: 50523 - DNA, 60 bp, Artificial
  Synthetic oligonucleotide
aaaagacttgcagaccaagaactgggtgatgccccattccttgaccggcttcgccgagat

SEQ ID NO: 50524 - DNA, 60 bp, Artificial
  Synthetic oligonucleotide
ccgcaaaagatttgcagaccaagaactgggtgatgccccattccttgaccggcttcgccg

SEQ ID NO: 50525 - DNA, 60 bp, Artificial
  Synthetic oligonucleotide
tgtccgcaaacaatttgcagaccaagaactgggtgatgccccattccttgaccggcttcg

SEQ ID NO: 50526 - DNA, 60 bp, Artificial
  Synthetic oligonucleotide
cgatttgcagaccaagaactgggtgatgccccattccttgaccggcttcgccgagatcag

SEQ ID NO: 50527 - DNA, 60 bp, Artificial
  Synthetic oligonucleotide
aatcgatttgcagaccaagaactgggtgatgccccattccttgaccggcttcgccgagat

SEQ ID NO: 50528 - DNA, 60 bp, Artificial
  Synthetic oligonucleotide
gctgcagataaagaatccactcaaaaggcaatagatggagtcaccaataaggtcaactcg

SEQ ID NO: 50529 - DNA, 60 bp, Artificial
  Synthetic oligonucleotide
tgcttgccatgatggcaccagttggttgacaattggaatttctggtccagacaatggggc

SEQ ID NO: 50530 - DNA, 60 bp, Artificial
  Synthetic oligonucleotide
tgcttgccatgatggcaccagttggttgacaattggaatttcgggcccagacaatggggc

SEQ ID NO: 50531 - DNA, 60 bp, Artificial
  Synthetic oligonucleotide
ccatgatggcaccagttggttgacaattggaatttcgggcccagacaatggggctgtggc

SEQ ID NO: 50532 - DNA, 60 bp, Artificial
  Synthetic oligonucleotide
ccatgatggcaccagttggttgacaattggaatttctggtccagacaatggggctgtggc

SEQ ID NO: 50533 - DNA, 60 bp, Artificial
  Synthetic oligonucleotide
atagtcagtcttgttaaaagtgatcagatttgcattggttaccatgcaaacaactcaaca

SEQ ID NO: 50534 - DNA, 60 bp, Artificial
  Synthetic oligonucleotide
ctggattcagagtgaattcaacaaggcatgtgaattgacagattcgagttggattgaact

SEQ ID NO: 50535 - DNA, 60 bp, Artificial
  Synthetic oligonucleotide
gatgtgcacagaactcaaactcagtgactatgaagggaggcttatccagaacagcataac

SEQ ID NO: 50536 - DNA, 60 bp, Artificial
  Synthetic oligonucleotide
tagactttcatgactcaaatgtcaagaacctttacgacaaggtccgactacagcttaggg

SEQ ID NO: 50537 - DNA, 60 bp, Artificial
  Synthetic oligonucleotide
tctagactttcatgactcaaatgtcaagaacctttacgacaaggtccgactacagcttag

SEQ ID NO: 50538 - DNA, 60 bp, Artificial
  Synthetic oligonucleotide
ctagactttcatgactcaaatgtcaagaacctttacgacaaggtccgactacagcttagg

SEQ ID NO: 50539 - DNA, 60 bp, Artificial
  Synthetic oligonucleotide
accacagaagtggcttttggcctagtgtgtgccacttgtgagcagattgcagattcacag

SEQ ID NO: 50540 - DNA, 60 bp, Artificial
  Synthetic oligonucleotide
actacggaagtggcttttggcctagtgtgtgccacttgtgagcagattgcagattcacag

SEQ ID NO: 50541 - DNA, 60 bp, Artificial
  Synthetic oligonucleotide
accacggaagtggcttttggcctagtgtgtgccacttgtgagcagattgcagattcacag

SEQ ID NO: 50542 - DNA, 60 bp, Artificial
  Synthetic oligonucleotide
ctacggaagtggcttttggcctagtgtgtgccacttgtgagcagattgcagattcacagc

SEQ ID NO: 50543 - DNA, 60 bp, Artificial
  Synthetic oligonucleotide
gtgactacggaagtggcttttggcctagtgtgtgccacttgtgagcagattgcagattca

SEQ ID NO: 50544 - DNA, 60 bp, Artificial
  Synthetic oligonucleotide
gtgaccacagaagtggcttttggcctagtgtgtgccacttgtgagcagattgcagattca

SEQ ID NO: 50545 - DNA, 60 bp, Artificial
  Synthetic oligonucleotide
actacagaagtggcttttggcctagtgtgtgccacttgtgagcagattgcagattcacag

SEQ ID NO: 50546 - DNA, 60 bp, Artificial
  Synthetic oligonucleotide
ggcttttggcctagtgtgtgccacttgtgagcagattgcagattcacagcatcggtctca

SEQ ID NO: 50547 - DNA, 60 bp, Artificial
  Synthetic oligonucleotide
gaagtggcttttggcctagtgtgtgccacttgtgagcagattgcagattcacagcatcgg

SEQ ID NO: 50548 - DNA, 60 bp, Artificial
  Synthetic oligonucleotide
gcttttggcctagtgtgtgccacttgtgagcagattgcagattcacagcatcggtctcac

SEQ ID NO: 50549 - DNA, 60 bp, Artificial
  Synthetic oligonucleotide
ccacggaagtggcttttggcctagtgtgtgccacttgtgagcagattgcagattcacagc

SEQ ID NO: 50550 - DNA, 60 bp, Artificial
  Synthetic oligonucleotide
ggaagtggcttttggcctagtgtgtgccacttgtgagcagattgcagattcacagcatcg

SEQ ID NO: 50551 - DNA, 60 bp, Artificial
  Synthetic oligonucleotide
atggattccaacactgtgtcaagctttcaggtagactgctttctttggcatgtccgcaaa

SEQ ID NO: 50552 - DNA, 60 bp, Artificial
  Synthetic oligonucleotide
ccaacactgtgtcaagctttcaggtagactgctttctttggcatgtccgcaaaagacttg

SEQ ID NO: 50553 - DNA, 60 bp, Artificial
  Synthetic oligonucleotide
ggattccaacactgtgtcaagctttcaggtagactgctttctttggcatgtccgcaaaag

SEQ ID NO: 50554 - DNA, 60 bp, Artificial
  Synthetic oligonucleotide
atggatcccaacactgtgtcaagctttcaggtagactgctttctttggcatgtccgcaaa

SEQ ID NO: 50555 - DNA, 60 bp, Artificial
  Synthetic oligonucleotide
ccaacactgtgtcaagctttcaggtagactgctttctttggcatgtccgcaaacgacttg

SEQ ID NO: 50556 - DNA, 60 bp, Artificial
  Synthetic oligonucleotide
ccaacactgtgtcaagctttcaggtagactgctttctttggcatgtccgcaaacgatttg

SEQ ID NO: 50557 - DNA, 60 bp, Artificial
  Synthetic oligonucleotide
ggattccaacactgtgtcaagctttcaggtagactgctttctttggcatgtccgcaaacg

SEQ ID NO: 50558 - DNA, 60 bp, Artificial
  Synthetic oligonucleotide
attcaacagtggcgagttccctagcactggcaatcatggtggctggtctatctttatgga

SEQ ID NO: 50559 - DNA, 60 bp, Artificial
  Synthetic oligonucleotide
attggtgggacggactccaatcctctgatgatttcgctctcatcgtaaatgcaccgaatc

SEQ ID NO: 50560 - DNA, 60 bp, Artificial
  Synthetic oligonucleotide
acggattcctagatgtctggacttataatgctgaaattctggttctcatggaaaatgaga

SEQ ID NO: 50561 - DNA, 60 bp, Artificial
  Synthetic oligonucleotide
cggattcctagatgtctggacttataatgctgaaattctggttctcatggaaaatgagag

SEQ ID NO: 50562 - DNA, 60 bp, Artificial
  Synthetic oligonucleotide
cacctgatgatatggcattccaatctaaatgatgccacatatcagagaacaagagctctc

SEQ ID NO: 50563 - DNA, 50 bp, Artificial
  Synthetic oligonucleotide
aggaaggctgatccagaacagcataacaatagagagaatgattctctctg

SEQ ID NO: 50564 - DNA, 60 bp, Artificial
  Synthetic oligonucleotide
ggtcccaagaggacaactgtccaccagaggagttcaaattgcttcaaatgagaacatgga

SEQ ID NO: 50565 - DNA, 57 bp, Artificial
  Synthetic oligonucleotide
gaattcggatggccatcaattagtgtcgaattgtttaaaaacgaccttgtttctact

SEQ ID NO: 50566 - DNA, 57 bp, Artificial
  Synthetic oligonucleotide
gaattcggatggccatcaattagtgtcgaattgtttaaaaacgaccttgtttctaca

SEQ ID NO: 50567 - DNA, 60 bp, Artificial
  Synthetic oligonucleotide
tgactatgaaggaaggctgatccagaacagcataacaatagagagaatggtactctctgc

SEQ ID NO: 50568 - DNA, 60 bp, Artificial
  Synthetic oligonucleotide
gactatgaaggaaggctgatccagaacagcataacaatagagagaatggtactctctgca

SEQ ID NO: 50569 - DNA, 60 bp, Artificial
  Synthetic oligonucleotide
cgaacggtctaacagccaatgaatcgggacggctaatagatttcctcaaggatgtgatgg

SEQ ID NO: 50570 - DNA, 60 bp, Artificial
  Synthetic oligonucleotide
gggagattctacatacagatgtgcactgaactcaaactcagtgactatgaagggagactg

SEQ ID NO: 50571 - DNA, 60 bp, Artificial
  Synthetic oligonucleotide
cctttgacatgagtaacgaaggatcttatttcttcggagacaatgcagaggaatatgaca

SEQ ID NO: 50572 - DNA, 60 bp, Artificial
  Synthetic oligonucleotide
aagacctctattaatagatggtacagcctcattgagtcctggaatgatgatgggcatgtt

SEQ ID NO: 50573 - DNA, 60 bp, Artificial
  Synthetic oligonucleotide
cctctattaatagatggtacagcctcattgagtcctggaatgatgatgggcatgttcaac

SEQ ID NO: 50574 - DNA, 60 bp, Artificial
  Synthetic oligonucleotide
ttgggagactgtgaagattcaatggtctcaagatcccacaatgctgtacaataaaatgga

SEQ ID NO: 50575 - DNA, 60 bp, Artificial
  Synthetic oligonucleotide
gggagactgtgaagattcaatggtctcaagatcccacaatgctgtacaataagatggagt

SEQ ID NO: 50576 - DNA, 60 bp, Artificial
  Synthetic oligonucleotide
gggagactgtgaagattcaatggtctcaagatcccacaatgctgtacaataaaatggagt

SEQ ID NO: 50577 - DNA, 60 bp, Artificial
  Synthetic oligonucleotide
ttgggagactgtgaagattcaatggtctcaagatcccacaatgctgtacaataagatgga

SEQ ID NO: 50578 - DNA, 60 bp, Artificial
  Synthetic oligonucleotide
ctaagagatctaatgtcacaatcccgcacccgcgagatactcactaaaaccactgtggac

SEQ ID NO: 50579 - DNA, 60 bp, Artificial
  Synthetic oligonucleotide
ctaatgtcacaatcccgcacccgcgagatactcactaaaaccactgtggaccatatggcc

SEQ ID NO: 50580 - DNA, 60 bp, Artificial
  Synthetic oligonucleotide
gggaggttctacgtacagatgtgcacagaactcaaactcagtgactatgaagggaggctg

SEQ ID NO: 50581 - DNA, 50 bp, Artificial
  Synthetic oligonucleotide
aggaaggctgatccagaacagcataacaatagagagaatggttctctctg

SEQ ID NO: 50582 - DNA, 59 bp, Artificial
  Synthetic oligonucleotide
aaccatgcgcagacttgccgaccaaagtctcccaccgaacttctccagccttgagaact

SEQ ID NO: 50583 - DNA, 60 bp, Artificial
  Synthetic oligonucleotide
aaccatgcgcagacttgccgaccaaagtctcccaccgaacttctccagccttgagaactt

SEQ ID NO: 50584 - DNA, 60 bp, Artificial
  Synthetic oligonucleotide
ccaaatactgtcaatttattctacagtggcgagttccctagcactggcaatcatggtagc

SEQ ID NO: 50585 - DNA, 60 bp, Artificial
  Synthetic oligonucleotide
caaatactgtcaatttattctacagtggcgagttccctagcactggcaatcatggtagct

SEQ ID NO: 50586 - DNA, 60 bp, Artificial
  Synthetic oligonucleotide
ctgtcaatttattctacagtggcgagttccctagcactggcaatcatggtagctggtcta

SEQ ID NO: 50587 - DNA, 54 bp, Artificial
  Synthetic oligonucleotide
cactcactgagtgacatcaacatcatggcgtctcaaggcaccaaacgatcttat

SEQ ID NO: 50588 - DNA, 60 bp, Artificial
  Synthetic oligonucleotide
ttattcaacagtggcgagttccctagcactggcaatcatggtggctggtctatctttgtg

SEQ ID NO: 50589 - DNA, 60 bp, Artificial
  Synthetic oligonucleotide
tattcaacagtggcgagttccctagcactggcaatcatggtggctggtctatctttatgg

SEQ ID NO: 50590 - DNA, 60 bp, Artificial
  Synthetic oligonucleotide
ccgagatcagaagtccctaagaggaagaggcaacactcttggtctggacatcgaaacagc

SEQ ID NO: 50591 - DNA, 60 bp, Artificial
  Synthetic oligonucleotide
gccgagatcagaagtccctaagaggaagaggcaacactcttggtctggacatcgaaacag

SEQ ID NO: 50592 - DNA, 60 bp, Artificial
  Synthetic oligonucleotide
cttctaaccgaggtcgaaacgtacgttctctctatcatcccgtcaggccccctcaaagcc

SEQ ID NO: 50593 - DNA, 60 bp, Artificial
  Synthetic oligonucleotide
ccaggagcggctttgaaatgatttgggatccaaatgggtggactgaaacggacagtagct

SEQ ID NO: 50594 - DNA, 60 bp, Artificial
  Synthetic oligonucleotide
gtggcgagttccctagcactggcaatcatggtagctggtctatccttatggatgtgctcc

SEQ ID NO: 50595 - DNA, 60 bp, Artificial
  Synthetic oligonucleotide
gcaacacccggaatgcaaatcagaggattcgtgtactttgttgaaacattagcgaggagt

SEQ ID NO: 50596 - DNA, 60 bp, Artificial
  Synthetic oligonucleotide
tgcaacacccggaatgcaaatcagaggattcgtgtactttgttgaaacattagcgaggag

SEQ ID NO: 50597 - DNA, 60 bp, Artificial
  Synthetic oligonucleotide
gagttccctagcactggcaatcatggtagctggtctatccttatggatgtgctccaatgg

SEQ ID NO: 50598 - DNA, 60 bp, Artificial
  Synthetic oligonucleotide
cgagttccctagcactggcaatcatggtagctggtctatccttatggatgtgctccaatg

SEQ ID NO: 50599 - DNA, 60 bp, Artificial
  Synthetic oligonucleotide
gcagaacatctgacatgaggactgagatcataagaatgatggaaagtgccagaccagaag

SEQ ID NO: 50600 - DNA, 60 bp, Artificial
  Synthetic oligonucleotide
tgaaggcagaacatctgacatgaggactgagatcataagaatgatggaaagtgccagacc

SEQ ID NO: 50601 - DNA, 59 bp, Artificial
  Synthetic oligonucleotide
cgactatgaaggaaggctgatccagaacagcataacaatagagagaatggttctctctg

SEQ ID NO: 50602 - DNA, 58 bp, Artificial
  Synthetic oligonucleotide
gactatgaaggaaggctgatccagaacagcataacaatagagagaatggttctctctg

SEQ ID NO: 50603 - DNA, 51 bp, Artificial
  Synthetic oligonucleotide
gcgatagtcagtcttgttaaaagtgatcagatttgcattggttaccatgca

SEQ ID NO: 50604 - DNA, 51 bp, Artificial
  Synthetic oligonucleotide
gcaatagccagtcttgttaaaagtgatcagatttgcattggttaccatgca

SEQ ID NO: 50605 - DNA, 60 bp, Artificial
  Synthetic oligonucleotide
tattccacagtagcgagttccctagcactggcaatcatggtagctggtctatccttatgg

SEQ ID NO: 50606 - DNA, 60 bp, Artificial
  Synthetic oligonucleotide
ggtcccaagaggacagctatctaccagaggagttcaaattgcttcaaatgagaacatgga

SEQ ID NO: 50607 - DNA, 60 bp, Artificial
  Synthetic oligonucleotide
ttttgggatttgtgttcacgctcaccgtgcccagtgagcgaggactgcagcgtagacgct

SEQ ID NO: 50608 - DNA, 60 bp, Artificial
  Synthetic oligonucleotide
agggattttgggatttgtgttcacgctcaccgtgcccagtgagcgaggactgcagcgtag

SEQ ID NO: 50609 - DNA, 57 bp, Artificial
  Synthetic oligonucleotide
gaattcgaatggccatcaattagtgtcgaattgtttaaaaacgaccttgtttctact

SEQ ID NO: 50610 - DNA, 57 bp, Artificial
  Synthetic oligonucleotide
ggattcggatggccatctattagtgtcgaattgtttaaaaacgaccttgtttctact

SEQ ID NO: 50611 - DNA, 60 bp, Artificial
  Synthetic oligonucleotide
acaaacattaaaaataagaatacatgaggggtatgaggaattcacaatggttgggcggag

SEQ ID NO: 50612 - DNA, 60 bp, Artificial
  Synthetic oligonucleotide
ccaaacattgaaaataaaagtacatgaggggtatgaggaattcacaatggttgggcggag

SEQ ID NO: 50613 - DNA, 60 bp, Artificial
  Synthetic oligonucleotide
acagtctatatgcatctccacaactcgaggggttttcagctgaatcaagaaaattgcttc

SEQ ID NO: 50614 - DNA, 60 bp, Artificial
  Synthetic oligonucleotide
ccatatgaccataatcaagaaatacacatcaggaagacaagagaagaaccctgctctcag

SEQ ID NO: 50615 - DNA, 60 bp, Artificial
  Synthetic oligonucleotide
tggaccatatggccataatcaagaaatacacatcaggaagacaagagaagaaccccgctc

SEQ ID NO: 50616 - DNA, 60 bp, Artificial
  Synthetic oligonucleotide
gtggaccatatggccataatcaagaaatacacatcaggaagacaagagaagaaccctgct

SEQ ID NO: 50617 - DNA, 60 bp, Artificial
  Synthetic oligonucleotide
tgtggaccatatggccataatcaagaaatacacatcaggaagacaagagaagaaccctgc

SEQ ID NO: 50618 - DNA, 60 bp, Artificial
  Synthetic oligonucleotide
ccactgtggaccatatggccataatcaagaaatacacatcaggaagacaagagaagaacc

SEQ ID NO: 50619 - DNA, 60 bp, Artificial
  Synthetic oligonucleotide
aaccactgtggaccatatggccataatcaagaaatacacatcaggaagacaagagaagaa

SEQ ID NO: 50620 - DNA, 60 bp, Artificial
  Synthetic oligonucleotide
tgcatgtgtaaatggctcttgctttactgtaatgactgatggaccaagtaatgggcaggc

SEQ ID NO: 50621 - DNA, 60 bp, Artificial
  Synthetic oligonucleotide
aacactgtgtcaagctttcaggtagactgctttctttggcatgtccgcaaacgatttgca

SEQ ID NO: 50622 - DNA, 55 bp, Artificial
  Synthetic oligonucleotide
tcatcctgagaggatcagtggcccataagtcctgcttgcctgcttgtgtgtacgg

SEQ ID NO: 50623 - DNA, 60 bp, Artificial
  Synthetic oligonucleotide
cagtcttgttaaaagtgatcagatttgcattggttaccatgcaaacaactcgacagagca

SEQ ID NO: 50624 - DNA, 60 bp, Artificial
  Synthetic oligonucleotide
gtggcaatggtgttctcacaggaggattgcatgataaaggcagtccgaggcgatctgaat

SEQ ID NO: 50625 - DNA, 60 bp, Artificial
  Synthetic oligonucleotide
caagggagtgggtacgctgcagacaaagaatccactcaaaaggcaatagatggagtcacc

SEQ ID NO: 50626 - DNA, 60 bp, Artificial
  Synthetic oligonucleotide
cgagcaggggagtgggtacgctgcagacaaagaatccactcaaaaggcaatagatggagt

SEQ ID NO: 50627 - DNA, 60 bp, Artificial
  Synthetic oligonucleotide
caggggaatgggtacgctgcagacaaagaatccactcaaaaggcaatagatggagtcacc

SEQ ID NO: 50628 - DNA, 60 bp, Artificial
  Synthetic oligonucleotide
caggggagtgggtacgctgcagacaaagaatccactcaaaaggcaatagatggagtcacc

SEQ ID NO: 50629 - DNA, 60 bp, Artificial
  Synthetic oligonucleotide
cagggaagtgggtacgctgcagacaaagaatccactcaaaaggcaatagatggagtcacc

SEQ ID NO: 50630 - DNA, 60 bp, Artificial
  Synthetic oligonucleotide
tctagatggagtgaagcctctaattttaagagattgtagtgtagctggatggctcctcgg

SEQ ID NO: 50631 - DNA, 60 bp, Artificial
  Synthetic oligonucleotide
cgggttcctagatatctggacttataatgctgaacttctggttctcatggaaaatgagag

SEQ ID NO: 50632 - DNA, 60 bp, Artificial
  Synthetic oligonucleotide
tcgtgtcttgaaacgatggaaattgttcaacaaacaagagtggataaactgacccaaggt

SEQ ID NO: 50633 - DNA, 60 bp, Artificial
  Synthetic oligonucleotide
gtcttgaaacaatggaaattgttcaacaaacaagagtggataaactgacccaaggtcgcc

SEQ ID NO: 50634 - DNA, 60 bp, Artificial
  Synthetic oligonucleotide
acgacgatgttgatcagagtttgatcatcgctgccagaaacattgttaggagagcaacgg

SEQ ID NO: 50635 - DNA, 60 bp, Artificial
  Synthetic oligonucleotide
actttgagagagaagggtactctctggttggaatagatcctttccgcctgcttcaaaaca

SEQ ID NO: 50636 - DNA, 60 bp, Artificial
  Synthetic oligonucleotide
tactgagggcaggacgtctgacatgaggactgaaatcataagaatgatggaaagtgccag

SEQ ID NO: 50637 - DNA, 57 bp, Artificial
  Synthetic oligonucleotide
gactgaaatcataagaatgatggaaagtgccagaccagaagatgtgtctttccaggg

SEQ ID NO: 50638 - DNA, 60 bp, Artificial
  Synthetic oligonucleotide
gaggactgaaatcataagaatgatggaaagtgccagaccagaagatgtgtctttccaggg

SEQ ID NO: 50639 - DNA, 60 bp, Artificial
  Synthetic oligonucleotide
gggcaggacgtctgacatgaggactgaaatcataagaatgatggaaagtgccagaccaga

SEQ ID NO: 50640 - DNA, 60 bp, Artificial
  Synthetic oligonucleotide
ttgctccagaatatgcatacaaaattgtcaagaaaggggactcaacaatcatgaaaagtg

SEQ ID NO: 50641 - DNA, 60 bp, Artificial
  Synthetic oligonucleotide
gctccagaatatgcatacaaaattgtcaagaaaggggactcaacaatcatgaaaagtgaa

SEQ ID NO: 50642 - DNA, 60 bp, Artificial
  Synthetic oligonucleotide
tgggatagatcctttccgtctgcttcaaaacagccaggtctttagtctcattagaccaaa

SEQ ID NO: 50643 - DNA, 60 bp, Artificial
  Synthetic oligonucleotide
ggaatagatcctttccgtctgcttcaaaacagccaggtctttagtctcattagaccaaat

SEQ ID NO: 50644 - DNA, 53 bp, Artificial
  Synthetic oligonucleotide
aatgctgtggatgttgacgatggtcattttgtcaacatagagctggagtaaaa

SEQ ID NO: 50645 - DNA, 60 bp, Artificial
  Synthetic oligonucleotide
gaagaactgaaacacctattgagcagaataaaccattttgagaaaattcaaatcatcccc

SEQ ID NO: 50646 - DNA, 60 bp, Artificial
  Synthetic oligonucleotide
ggcttcgccgagatcagaagtccctaagaggaagaggcagcacccttggtctggacatcg

SEQ ID NO: 50647 - DNA, 60 bp, Artificial
  Synthetic oligonucleotide
tggataaactgacccaaggtcgccaaacctatgactggacattgaatagaaaccaaccgg

SEQ ID NO: 50648 - DNA, 60 bp, Artificial
  Synthetic oligonucleotide
gctacttaataagagcactgacactgaacacaatgacaaaagatgcagaaagaggcaagt

SEQ ID NO: 50649 - DNA, 60 bp, Artificial
  Synthetic oligonucleotide
gcatgaagttacgaacacaaataccagcagaaatgcttgcaaacattgatcttaagtact

SEQ ID NO: 50650 - DNA, 60 bp, Artificial
  Synthetic oligonucleotide
cgaaagtaagagcatgaagctacgaacacaaataccagcagaaatgcttgcaaacattga

SEQ ID NO: 50651 - DNA, 60 bp, Artificial
  Synthetic oligonucleotide
cgatttgcagaccgagaactgggtgatgccccattccttgaccggcttcgccgagatcag

SEQ ID NO: 50652 - DNA, 51 bp, Artificial
  Synthetic oligonucleotide
agaaatgggtgatgccccattccttgaccggcttcgccgagatcagaagtc

SEQ ID NO: 50653 - DNA, 60 bp, Artificial
  Synthetic oligonucleotide
atgtccgcaaacgatttgcagaccgagaactgggtgatgccccattccttgaccggcttc

SEQ ID NO: 50654 - DNA, 60 bp, Artificial
  Synthetic oligonucleotide
tgtccgcaaacgatttgcagaccgagaactgggtgatgccccattccttgaccggcttcg

SEQ ID NO: 50655 - DNA, 60 bp, Artificial
  Synthetic oligonucleotide
ggccagtggatatgactttgagagagaagggtactctctagttggaatagatcctttccg

SEQ ID NO: 50656 - DNA, 60 bp, Artificial
  Synthetic oligonucleotide
tacagaggaatcttcccttcgaaagagcgaccattatggcagcattcacagggaatactg

SEQ ID NO: 50657 - DNA, 60 bp, Artificial
  Synthetic oligonucleotide
ttagagagccgttcatctcatgctcccacttggaatgcagaactttctttttgactcagg

SEQ ID NO: 50658 - DNA, 56 bp, Artificial
  Synthetic oligonucleotide
tgttaaaagtgatcagatttgcattggttaccatgcaaacaactcaacagagcagg

SEQ ID NO: 50659 - DNA, 60 bp, Artificial
  Synthetic oligonucleotide
agcaagattaaaaagagaggaaataagtggagtaaaattggaatcaataggaacttacca

SEQ ID NO: 50660 - DNA, 60 bp, Artificial
  Synthetic oligonucleotide
cctccaaacattgaaaataagagtacatgaaggatatgaggaattcacaatggttgggcg

SEQ ID NO: 50661 - DNA, 60 bp, Artificial
  Synthetic oligonucleotide
gagatgtgtcacagcacacaaattggtgggataaggatggtggacatccttagacaaaat

SEQ ID NO: 50662 - DNA, 60 bp, Artificial
  Synthetic oligonucleotide
gttttcggagacaatccacgccccaatgatggaacaggtagttgtggtccgatgtcccct

SEQ ID NO: 50663 - DNA, 60 bp, Artificial
  Synthetic oligonucleotide
agttttcggagacaatccacgccccaatgatggaacaggtagttgtggcccgatgtcccc

SEQ ID NO: 50664 - DNA, 60 bp, Artificial
  Synthetic oligonucleotide
gctgcaactgctttggccaacactatagaggtcttcagatcgaacggtctaacagccaat

SEQ ID NO: 50665 - DNA, 60 bp, Artificial
  Synthetic oligonucleotide
gctgcaactgctttggccaacactatagaagtcttcagatcgaacggtctaacagccaat

SEQ ID NO: 50666 - DNA, 60 bp, Artificial
  Synthetic oligonucleotide
gatatggaccagcattgagcatcaatgaactgagcaatcttgcaaaaggggagaaggcta

SEQ ID NO: 50667 - DNA, 60 bp, Artificial
  Synthetic oligonucleotide
ggagtatcaaataggatatatatgcagtggagttttcggagacaatccacgccccaatga

SEQ ID NO: 50668 - DNA, 60 bp, Artificial
  Synthetic oligonucleotide
gaggatacatgttcgagagtaagagcatgaagttgcgaacacaaataccagcagaaatgc

SEQ ID NO: 50669 - DNA, 60 bp, Artificial
  Synthetic oligonucleotide
ggaccttagagtctcaagtttcatcagagggacaagagtggtcccaagaggacagctata

SEQ ID NO: 50670 - DNA, 60 bp, Artificial
  Synthetic oligonucleotide
agagtaagagcatgaagctacggacacaaataccagcagaaatgcttgcaaacattgacc

SEQ ID NO: 50671 - DNA, 60 bp, Artificial
  Synthetic oligonucleotide
gtaagagcatgaagttacgaacacaaataccagcagaaatgcttgcaaacattgacctta

SEQ ID NO: 50672 - DNA, 60 bp, Artificial
  Synthetic oligonucleotide
aagtaagagcatgaagttacgaacacaaataccagcagaaatgcttgcaaacattgacct

SEQ ID NO: 50673 - DNA, 60 bp, Artificial
  Synthetic oligonucleotide
ggccatgggtgtctttcaatcaaaatttggagtatcaaataggatatatatgcagtggag

SEQ ID NO: 50674 - DNA, 60 bp, Artificial
  Synthetic oligonucleotide
gtctcaaggcaccaaacgatcttatgaacaaatggaaactggtggagaacgccagaatgc

SEQ ID NO: 50675 - DNA, 60 bp, Artificial
  Synthetic oligonucleotide
actacggaagtggcttttggcctagtatgtgccacttgtgagcagattgcagattcacag

SEQ ID NO: 50676 - DNA, 60 bp, Artificial
  Synthetic oligonucleotide
gtaactacggaagtggcttttggcctagtatgtgccacttgtgagcagattgcagattca

SEQ ID NO: 50677 - DNA, 60 bp, Artificial
  Synthetic oligonucleotide
tgaagatctcatatttctggcacggtctgcactcatcctgagaggatccgtagcccataa

SEQ ID NO: 50678 - DNA, 60 bp, Artificial
  Synthetic oligonucleotide
gtgggggcgataaactctagtatgccattccacaatatacaccctctcaccatcggggaa

SEQ ID NO: 50679 - DNA, 60 bp, Artificial
  Synthetic oligonucleotide
tgggggcgataaactctagtatgccattccacaatatacaccctctcaccatcggggaat

SEQ ID NO: 50680 - DNA, 60 bp, Artificial
  Synthetic oligonucleotide
taggggcgataaactctagtatgccattccacaatatacaccctctcaccatcggggagt

SEQ ID NO: 50681 - DNA, 60 bp, Artificial
  Synthetic oligonucleotide
taagagattgtagtgtagctggatggctcctcgggaacccaatgtgtgacgaattcatca

SEQ ID NO: 50682 - DNA, 60 bp, Artificial
  Synthetic oligonucleotide
ggtacaccaaaaccacatactggtgggatggactccaatcctctgatgatttcgctctca

SEQ ID NO: 50683 - DNA, 60 bp, Artificial
  Synthetic oligonucleotide
ggcaatggtgtttggatcgggagaaccaaaagcactaattccaggagcggctttgaaatg

SEQ ID NO: 50684 - DNA, 60 bp, Artificial
  Synthetic oligonucleotide
atacggcaatggtgtttggatcgggagaaccaaaagcactaattccaggagcggctttga

SEQ ID NO: 50685 - DNA, 60 bp, Artificial
  Synthetic oligonucleotide
caataatcagtcttgttaaaagtgatcagatttgcattggttaccatgcaaacaactcta

SEQ ID NO: 50686 - DNA, 60 bp, Artificial
  Synthetic oligonucleotide
caataatcggtcttgttaaaagtgatcagatttgcattggttaccatgcaaacaactcga

SEQ ID NO: 50687 - DNA, 60 bp, Artificial
  Synthetic oligonucleotide
gcatagtcagccttgttaaaagtgatcagatttgcattggttaccatgcaaacaactcga

SEQ ID NO: 50688 - DNA, 60 bp, Artificial
  Synthetic oligonucleotide
gtctatgagggaagagtatcggcaggaacagcagagtgctgtggatgttgacgatggtca

SEQ ID NO: 50689 - DNA, 60 bp, Artificial
  Synthetic oligonucleotide
cctgagtctatgagggaagagtatcggcaggaacagcagagtgctgtggatgttgacgat

SEQ ID NO: 50690 - DNA, 60 bp, Artificial
  Synthetic oligonucleotide
ggactccaacactcttgaactgagaagcagatattgggctataagaaccagaagcggagg

SEQ ID NO: 50691 - DNA, 60 bp, Artificial
  Synthetic oligonucleotide
ggaatccaacactcttgaactgagaagcagatattgggctataagaaccagaagcggagg

SEQ ID NO: 50692 - DNA, 60 bp, Artificial
  Synthetic oligonucleotide
ataatgctgaacttctggttctcatggaaaatgagagaactctagactttcatgattcaa

SEQ ID NO: 50693 - DNA, 60 bp, Artificial
  Synthetic oligonucleotide
agtcagtcttgttaaaagtgatcagatttgcattggttaccatgcaaacaactcgacaga

SEQ ID NO: 50694 - DNA, 60 bp, Artificial
  Synthetic oligonucleotide
gacaagagtggtcccaagaggacagctatccaccagaggggttcaaattgcttcaaatga

SEQ ID NO: 50695 - DNA, 60 bp, Artificial
  Synthetic oligonucleotide
acggaaacgggactccagcatacttactgacagccagacagcgaccaaaagaattcggat

SEQ ID NO: 50696 - DNA, 60 bp, Artificial
  Synthetic oligonucleotide
acggaaacgggactctagcatacttactgacagtcagacagcgaccaaaagaattcggat

SEQ ID NO: 50697 - DNA, 60 bp, Artificial
  Synthetic oligonucleotide
aagggtcaactctcccgaggagatctggagctgccggtgcagcagtgaagggagtaggga

SEQ ID NO: 50698 - DNA, 60 bp, Artificial
  Synthetic oligonucleotide
cgatggaaattgttcaacaaacaagagtggataaactgacccaaggtcgccagacttatg

SEQ ID NO: 50699 - DNA, 60 bp, Artificial
  Synthetic oligonucleotide
ctcgtgtcttgaaacgatggaaattgttcaacaaacaagagtggataaactgacccaagg

SEQ ID NO: 50700 - DNA, 60 bp, Artificial
  Synthetic oligonucleotide
caggcaacctccaaacattgaaaataagagtacatgaagggtatgaggaattcacaatgg

SEQ ID NO: 50701 - DNA, 60 bp, Artificial
  Synthetic oligonucleotide
gctcacaggcaacctccaaacattgaaaataagagtacatgaaggatatgaggaattcac

SEQ ID NO: 50702 - DNA, 60 bp, Artificial
  Synthetic oligonucleotide
gccaacactatagaggtcttcagatcgaacggtctaacagccaatgaatcggggagactg

SEQ ID NO: 50703 - DNA, 60 bp, Artificial
  Synthetic oligonucleotide
cgaccttgggccagcaacagctcagatggctcttcagctattcatcaaggactacagata

SEQ ID NO: 50704 - DNA, 60 bp, Artificial
  Synthetic oligonucleotide
tctggttggaatagatcctttccgtctgcttcaaaacagccaggtctttagtctcattag

SEQ ID NO: 50705 - DNA, 60 bp, Artificial
  Synthetic oligonucleotide
ggttggaatagatcctttccgtctgcttcaaaacagccaggtctttagtctcattagacc

SEQ ID NO: 50706 - DNA, 60 bp, Artificial
  Synthetic oligonucleotide
gttggaatagatcctttccgtctgcttcaaaacagccaggtctttagtctcattagacca

SEQ ID NO: 50707 - DNA, 60 bp, Artificial
  Synthetic oligonucleotide
ggtcgccagacctatgactggacattgaatagaaaccagccggctgcaactgctttggcc

SEQ ID NO: 50708 - DNA, 60 bp, Artificial
  Synthetic oligonucleotide
tatccagaacagcataacaatagagagaatggtactctctgcatttgatgaacgaaggaa

SEQ ID NO: 50709 - DNA, 60 bp, Artificial
  Synthetic oligonucleotide
tatccagaacagcataacaatagagagaatggtactctctgcatttgatgaacgaagaaa

SEQ ID NO: 50710 - DNA, 60 bp, Artificial
  Synthetic oligonucleotide
gaggcttatccagaacagcataacaatagagagaatggtactctctgcatttgatgaacg

SEQ ID NO: 50711 - DNA, 60 bp, Artificial
  Synthetic oligonucleotide
ggccatgggtatctttcaatcaaaacttggagtatcaaataggatatatatgcagtggag

SEQ ID NO: 50712 - DNA, 60 bp, Artificial
  Synthetic oligonucleotide
ctagttctcatggaaaatgagagaactctagactttcatgactcaaatgtcaagaacctt

SEQ ID NO: 50713 - DNA, 60 bp, Artificial
  Synthetic oligonucleotide
ttctcatggaaaatgagagaactctagactttcatgactcaaatgtcaagaacctttacg

SEQ ID NO: 50714 - DNA, 60 bp, Artificial
  Synthetic oligonucleotide
atgggagtgcagatgcagcgattcaagtgatcctcttgttgttgccgcaagtatcattgg

SEQ ID NO: 50715 - DNA, 60 bp, Artificial
  Synthetic oligonucleotide
ggaagacggattcctagatgtctggacttataatgctgaacttctggttctcatggaaaa

SEQ ID NO: 50716 - DNA, 60 bp, Artificial
  Synthetic oligonucleotide
catgactcaaatgtcaagaacctttacgacaaggtccgactacagcttagggataatgct

SEQ ID NO: 50717 - DNA, 60 bp, Artificial
  Synthetic oligonucleotide
ataatcaagaaatacacatcaggaagacaagagaagaatcctgctctcagaatgaaatgg

SEQ ID NO: 50718 - DNA, 60 bp, Artificial
  Synthetic oligonucleotide
ggaccttagagtctcaagtttcatcagagggacaagagtgatcccaagagggcagctatc

SEQ ID NO: 50719 - DNA, 60 bp, Artificial
  Synthetic oligonucleotide
ggaccttagagtctcaagtttcatcagagggacaagagtggttccaagaggacaactatc

SEQ ID NO: 50720 - DNA, 60 bp, Artificial
  Synthetic oligonucleotide
ggtacaccaaaactacatattggtgggacggactccaatcctctgatgatttcgctctca

SEQ ID NO: 50721 - DNA, 60 bp, Artificial
  Synthetic oligonucleotide
cttgcaatagtcagtcttgttaaaagtgatcagatttgcattggttaccatgcaaacaac

SEQ ID NO: 50722 - DNA, 60 bp, Artificial
  Synthetic oligonucleotide
tttgcaatagtcagtcttgttaaaagtgatcagatttgcattggttaccatgcaaacaac

SEQ ID NO: 50723 - DNA, 60 bp, Artificial
  Synthetic oligonucleotide
tcattctgagaggatcggtggcccataagtcctgcttgcctgcttgtgtgtacggacttg

SEQ ID NO: 50724 - DNA, 60 bp, Artificial
  Synthetic oligonucleotide
tgatcttggaccagcaacagctcagatggctcttcagctatttatcaaggactacagata

SEQ ID NO: 50725 - DNA, 60 bp, Artificial
  Synthetic oligonucleotide
aacaacgatcttggaccagcaacagctcagatggctcttcagctattcatcaaggactac

SEQ ID NO: 50726 - DNA, 60 bp, Artificial
  Synthetic oligonucleotide
caacgatcttggaccagcaacagctcagatggctcttcagctattcatcaaggactacag

SEQ ID NO: 50727 - DNA, 60 bp, Artificial
  Synthetic oligonucleotide
caacagtcagtcttgttaaaagtgatcagatttgcattggttaccatgcaaacaattcaa

SEQ ID NO: 50728 - DNA, 60 bp, Artificial
  Synthetic oligonucleotide
gatatgactttgagagagaagggtactctctggttggaatagaccctttccgtctgcttc

SEQ ID NO: 50729 - DNA, 60 bp, Artificial
  Synthetic oligonucleotide
tgtcacctctggctgtgacatggtggaataggaatgggccaacgacaagtacagtccatt

SEQ ID NO: 50730 - DNA, 60 bp, Artificial
  Synthetic oligonucleotide
tctcccctagctgtaacttggtggaacaggaatgggccaacgacaagtacagtccattat

SEQ ID NO: 50731 - DNA, 60 bp, Artificial
  Synthetic oligonucleotide
cctctggctgtgacatggtggaataggaatgggccaacgacaagtacagtccattatcca

SEQ ID NO: 50732 - DNA, 60 bp, Artificial
  Synthetic oligonucleotide
aagaagggtactctctggttggaatagatcctttccgtctgcttcaaaacagccaggtct

SEQ ID NO: 50733 - DNA, 52 bp, Artificial
  Synthetic oligonucleotide
agatcgaacggtctaacagccaatgaatcgggacggctaatagatttcctca

SEQ ID NO: 50734 - DNA, 60 bp, Artificial
  Synthetic oligonucleotide
ggccaacactatagaaatcttcagatcgaacggtctaacagccaatgaatcgggacggct

SEQ ID NO: 50735 - DNA, 60 bp, Artificial
  Synthetic oligonucleotide
actacagaagtggcttttggcctagtgtgtgccacttgtgagcagattgcagattcccag

SEQ ID NO: 50736 - DNA, 60 bp, Artificial
  Synthetic oligonucleotide
actactgaagtggcttttggcctagtgtgtgccacttgtgagcagattgcagattcacag

SEQ ID NO: 50737 - DNA, 60 bp, Artificial
  Synthetic oligonucleotide
actacggaagtggcttttggcctagtgtgtgccacttgtgagcagattgcagattcgcag

SEQ ID NO: 50738 - DNA, 60 bp, Artificial
  Synthetic oligonucleotide
ggagtatcaaataggatatatatgcagtggagttttcggggacaatccacgccccaatga

SEQ ID NO: 50739 - DNA, 60 bp, Artificial
  Synthetic oligonucleotide
atgtgtaaatggctcttgctttactgtaatgactgatggaccaagtaatggtcaggcatc

SEQ ID NO: 50740 - DNA, 60 bp, Artificial
  Synthetic oligonucleotide
ctcaagagtctgagtgtgcatgtgtaaatggctcttgctttactgtaatgactgacggac

SEQ ID NO: 50741 - DNA, 60 bp, Artificial
  Synthetic oligonucleotide
gtgtaaatggctcttgctttactgtaatgactgatggaccaagtaatggtcaggcatcac

SEQ ID NO: 50742 - DNA, 60 bp, Artificial
  Synthetic oligonucleotide
atgtgtaaatggctcttgctttactgtaatgactgatgggccaagtaatgggcaggcatc

SEQ ID NO: 50743 - DNA, 60 bp, Artificial
  Synthetic oligonucleotide
atgtgtaaatggctcttgctttactgtaatgactgatggaccaagtagtgggcaggcatc

SEQ ID NO: 50744 - DNA, 60 bp, Artificial
  Synthetic oligonucleotide
ccaccagaggggttcaaattgcttcaaatgagaacatggaggcaatggaatccaacactc

SEQ ID NO: 50745 - DNA, 60 bp, Artificial
  Synthetic oligonucleotide
ccaccagaggggttcaaattgcttcaaatgagaacatggaagccatggactccaacactc

SEQ ID NO: 50746 - DNA, 60 bp, Artificial
  Synthetic oligonucleotide
tctagtatgccattccacaacatacaccctctcaccatcggggaatgccccaaatatgtg

SEQ ID NO: 50747 - DNA, 60 bp, Artificial
  Synthetic oligonucleotide
ctctagtatgccattccacaacatacaccctctcaccatcggggaatgccccaaatatgt

SEQ ID NO: 50748 - DNA, 60 bp, Artificial
  Synthetic oligonucleotide
tctagatggattgaagcctctaattttgagagattgtagtgtagctggatggctcctcgg

SEQ ID NO: 50749 - DNA, 60 bp, Artificial
  Synthetic oligonucleotide
ggatacgcaaatccaaacgaggagatcattcgagctaaagaagctgtgggagcaaacccg

SEQ ID NO: 50750 - DNA, 60 bp, Artificial
  Synthetic oligonucleotide
gaggggatacgcaaatccaaacgaggagatcattcgagctaaagaagctgtgggagcaaa

SEQ ID NO: 50751 - DNA, 52 bp, Artificial
  Synthetic oligonucleotide
agtgctgtggatgttgacgatggtcattttgtcaacatagaattggagtaaa

SEQ ID NO: 50752 - DNA, 60 bp, Artificial
  Synthetic oligonucleotide
aaggatcaactctcccgaggagatctggagctgccggtgcagcagtgaagggggtaggga

SEQ ID NO: 50753 - DNA, 53 bp, Artificial
  Synthetic oligonucleotide
aaggatcaactctcccgaggagatctggagctgccggtgcagcagtgaagggg

SEQ ID NO: 50754 - DNA, 60 bp, Artificial
  Synthetic oligonucleotide
gtttggacttataatgctgaacttctggttctcatggaaaatgagagaactctagacttt

SEQ ID NO: 50755 - DNA, 60 bp, Artificial
  Synthetic oligonucleotide
tggtggaggccatggtgtctagggcccgaattgacgcacgaattgatttcgagtctggga

SEQ ID NO: 50756 - DNA, 60 bp, Artificial
  Synthetic oligonucleotide
gtggaggccatggtgtctagggcccgaattgacgcacgaattgatttcgagtctggaagg

SEQ ID NO: 50757 - DNA, 60 bp, Artificial
  Synthetic oligonucleotide
ggccagtggatatgactttgagagagaagggtactctctggttgggatagatcctttccg

SEQ ID NO: 50758 - DNA, 60 bp, Artificial
  Synthetic oligonucleotide
ttagagagccattcatctcatgctcccacttggaatgcagaactttctttttgactcagg

SEQ ID NO: 50759 - DNA, 60 bp, Artificial
  Synthetic oligonucleotide
cctagatggagtgaagcctctaattttaagagattgtagtgtagctggatggctcctcgg

SEQ ID NO: 50760 - DNA, 60 bp, Artificial
  Synthetic oligonucleotide
tgagtgtgcatgtgtaaatggctcttgctttactgtaatgactgacggaccaagtaatgg

SEQ ID NO: 50761 - DNA, 60 bp, Artificial
  Synthetic oligonucleotide
ggccagtggatatgactttgagagagaagggtactctctggttggaatagatcctttccg

SEQ ID NO: 50762 - DNA, 60 bp, Artificial
  Synthetic oligonucleotide
tccagcatggtggaggccatggtgtctagggcccgaattgacgcacgaattgatttcgag

SEQ ID NO: 50763 - DNA, 60 bp, Artificial
  Synthetic oligonucleotide
ttggaatttccagcatggtggaggccatggtgtctaggggccgaattgacgcacgaattg

SEQ ID NO: 50764 - DNA, 60 bp, Artificial
  Synthetic oligonucleotide
caacgaacaggggagtgggtacgctgcagacaaagaatccactcaaaaggcaatagatgg

SEQ ID NO: 50765 - DNA, 60 bp, Artificial
  Synthetic oligonucleotide
caatgagcaggggagtgggtacgctgcagacaaagaatccactcaaaaggcaatagatgg

SEQ ID NO: 50766 - DNA, 60 bp, Artificial
  Synthetic oligonucleotide
caatgggcaggggagtgggtacgctgcagacaaagaatccactcaaaaggcaatagatgg

SEQ ID NO: 50767 - DNA, 60 bp, Artificial
  Synthetic oligonucleotide
caatgaacaggggagtgggtacgctgcagacaaagaatccactcaaaaggcaatagatgg

SEQ ID NO: 50768 - DNA, 60 bp, Artificial
  Synthetic oligonucleotide
gggaatgctgaaatcgaagatctcatcttcctggcacggtctgcactcatcctgagagga

SEQ ID NO: 50769 - DNA, 60 bp, Artificial
  Synthetic oligonucleotide
ggcgtctcaaggcaccaaacgatcttatgagcagatggaaactggtggagaacgccagaa

SEQ ID NO: 50770 - DNA, 60 bp, Artificial
  Synthetic oligonucleotide
atgagtcttctaaccgaggtcgaaacgtacgttctctctgtcatcccgtcaggccccctc

SEQ ID NO: 50771 - DNA, 53 bp, Artificial
  Synthetic oligonucleotide
atgagccttctaaccgaggtcgaaacgtacgttctctctatcatcccgtcagg

SEQ ID NO: 50772 - DNA, 57 bp, Artificial
  Synthetic oligonucleotide
atgagtcttctaaccgaggtcgaaacgtacgttctctctgtcatcccgtcaggcccc

SEQ ID NO: 50773 - DNA, 53 bp, Artificial
  Synthetic oligonucleotide
aaaatgagtcttctaaccgaggtcgaaacgtacgttctctctatcatcccatc

SEQ ID NO: 50774 - DNA, 60 bp, Artificial
  Synthetic oligonucleotide
gccacttgtgagcagattgcagattcacagcatcggtctcacagacagatggcaactatc

SEQ ID NO: 50775 - DNA, 60 bp, Artificial
  Synthetic oligonucleotide
gtgtgccacttgtgagcagattgcagattcacagcatcggtctcacagacagatggcaac

SEQ ID NO: 50776 - DNA, 60 bp, Artificial
  Synthetic oligonucleotide
aaccatgcgcagacttgctgaccaaagtctcccaccgaacttctccagccttgaaaactt

SEQ ID NO: 50777 - DNA, 60 bp, Artificial
  Synthetic oligonucleotide
agaaggaagacggaaaactaatctgtatggattcattataaaaggaagatcccacttgag

SEQ ID NO: 50778 - DNA, 60 bp, Artificial
  Synthetic oligonucleotide
gtatgattacaaagagaaccgattcattgaaattggagtgacacggagggaagttcacat

SEQ ID NO: 50779 - DNA, 57 bp, Artificial
  Synthetic oligonucleotide
aaccatgcgcagacttgccgaccaaagtctcccaccgaacttctccagccttgaaaa

SEQ ID NO: 50780 - DNA, 60 bp, Artificial
  Synthetic oligonucleotide
aaccatgcgcagacttgccgaccaaagtctcccaccgaacttctccagccttgaaaaatt

SEQ ID NO: 50781 - DNA, 60 bp, Artificial
  Synthetic oligonucleotide
caggaaccatgcgcaggcttgccgaccaaagtctcccaccgaacttctccagccttgaaa

SEQ ID NO: 50782 - DNA, 60 bp, Artificial
  Synthetic oligonucleotide
cttggagggctatatgaagcaattgaggagtgcctgattaacgatccctgggttttgctt

SEQ ID NO: 50783 - DNA, 60 bp, Artificial
  Synthetic oligonucleotide
ccttcgatcttggagggctatatgaagcaattgaggagtgcctgattaacgatccctggg

SEQ ID NO: 50784 - DNA, 60 bp, Artificial
  Synthetic oligonucleotide
ttctcattgctcaggcacttagggacaacctggaacctgggaccttcgatcttggagggc

SEQ ID NO: 50785 - DNA, 60 bp, Artificial
  Synthetic oligonucleotide
ctcattgctcaggcacttagggacaacctggaacctgggaccttcgatcttggagggcta

SEQ ID NO: 50786 - DNA, 60 bp, Artificial
  Synthetic oligonucleotide
ctaatctgtatggattcattataaaaggaagatcccacttgaggaatgataccgatgtgg

SEQ ID NO: 50787 - DNA, 60 bp, Artificial
  Synthetic oligonucleotide
aactaatctgtatggattcattataaaaggaagatcccacttgaggaatgataccgatgt

SEQ ID NO: 50788 - DNA, 60 bp, Artificial
  Synthetic oligonucleotide
ggaccttcgatcttggggggctatatgaagcaattgaggagtgcctgattaatgatccct

SEQ ID NO: 50789 - DNA, 60 bp, Artificial
  Synthetic oligonucleotide
cattgttcaggcacttagggacaacctggaacctgggaccttcgatcttggtgggctata

SEQ ID NO: 50790 - DNA, 60 bp, Artificial
  Synthetic oligonucleotide
tcattgctcaggcacttagggacaacctggaacctgggaccttcgatcttggagggctat

SEQ ID NO: 50791 - DNA, 60 bp, Artificial
  Synthetic oligonucleotide
tttgcttaatgcgtcttggttcaactccttcctcgcacatgcactgaaatagttggggca

SEQ ID NO: 50792 - DNA, 60 bp, Artificial
  Synthetic oligonucleotide
ggttttgcttaatgcgtcttggttcaactccttcctcgcacatgcactgaaatagttggg

SEQ ID NO: 50793 - DNA, 60 bp, Artificial
  Synthetic oligonucleotide
ggctgcattgagggcaagctttctcaaatgtcaaaagaagtgaatgctagaattgagcca

SEQ ID NO: 50794 - DNA, 60 bp, Artificial
  Synthetic oligonucleotide
cgcagacttgctgaccaaagtctcccaccgaacttctccagccttgaaaactttagagcc

SEQ ID NO: 50795 - DNA, 60 bp, Artificial
  Synthetic oligonucleotide
gaatggctgcattgagggcaagctttctcaaatgtcaaaagaagtgaatgctagaattga

SEQ ID NO: 50796 - DNA, 60 bp, Artificial
  Synthetic oligonucleotide
cgatccctgggttttgcttaatgcgtcttggttcaactccttcctcgcacatgcactgaa

SEQ ID NO: 50797 - DNA, 60 bp, Artificial
  Synthetic oligonucleotide
cgcagacttgcagaccaaagtctcccaccgaacttctccagccttgaaaactttagaacc

SEQ ID NO: 50798 - DNA, 60 bp, Artificial
  Synthetic oligonucleotide
gctatatgaagcaattgaggagtgcctgattaacgatccctgggttttgcttaatgcgtc

SEQ ID NO: 50799 - DNA, 60 bp, Artificial
  Synthetic oligonucleotide
tgaggagtgcctgattaacgatccctgggttttgcttaatgcgtcttggttcaactcctt

SEQ ID NO: 50800 - DNA, 60 bp, Artificial
  Synthetic oligonucleotide
tggggggctatatgaagcaattgaggagtgcctgattaacgatccctgggttttgcttaa

SEQ ID NO: 50801 - DNA, 60 bp, Artificial
  Synthetic oligonucleotide
ggagggctatatgaagcaattgaggagtgcctgattaacgatccctgggttttgcttaat

SEQ ID NO: 50802 - DNA, 59 bp, Artificial
  Synthetic oligonucleotide
ggggctatatgaagcaattgaggagtgcctgattaatgatccctgggttttgcttaatg

SEQ ID NO: 50803 - DNA, 60 bp, Artificial
  Synthetic oligonucleotide
gtgggctatatgaagcaattgaggagtgcctgattaacgatccttgggttttgcttaatg

SEQ ID NO: 50804 - DNA, 60 bp, Artificial
  Synthetic oligonucleotide
agtggcattgggaggttttacatacagatgtgcacagaactcaaactcagtgactatgaa

SEQ ID NO: 50805 - DNA, 60 bp, Artificial
  Synthetic oligonucleotide
aatgtgcatgtgtaaatggctcttgctttactgtaatgactgatggaccaagtaatgggc

SEQ ID NO: 50806 - DNA, 60 bp, Artificial
  Synthetic oligonucleotide
ttggcctagtgtgtgccacttgtgagcagattgcagattcacagcatcggtctcacagac

SEQ ID NO: 50807 - DNA, 60 bp, Artificial
  Synthetic oligonucleotide
tgtgtgccacttgtgagcagattgcagattcacagcatcggtctcacagacagatggcaa

SEQ ID NO: 50808 - DNA, 60 bp, Artificial
  Synthetic oligonucleotide
atcctgtcacctctgactaaagggattttgggatttgtattcacgctcaccgtgcccagt

SEQ ID NO: 50809 - DNA, 60 bp, Artificial
  Synthetic oligonucleotide
gcccagtgagcgaggactgcagcgtagacgctttgtccagaacgccctaaacggaaatgg

SEQ ID NO: 50810 - DNA, 60 bp, Artificial
  Synthetic oligonucleotide
gctcaggcacttagggacaacctggaacctgggaccttcgatcttggagggctatatgaa

SEQ ID NO: 50811 - DNA, 60 bp, Artificial
  Synthetic oligonucleotide
caggcacttagggacaacctggaacctgggaccttcgatcttggagggctatatgaagca

SEQ ID NO: 50812 - DNA, 60 bp, Artificial
  Synthetic oligonucleotide
caggcacttagggacaacctggaacctgggaccttcgatcttggtgggctatatgaagca

SEQ ID NO: 50813 - DNA, 60 bp, Artificial
  Synthetic oligonucleotide
caatgagcagggaagtgggtacgctgcagacaaagaatccactcaaaaggcaatagatgg

SEQ ID NO: 50814 - DNA, 60 bp, Artificial
  Synthetic oligonucleotide
caatgagcaggggaatgggtacgctgcagacaaagaatccactcaaaaggcaatagatgg

SEQ ID NO: 50815 - DNA, 60 bp, Artificial
  Synthetic oligonucleotide
ggggttcctaattctaggcaaggaggataaaagatatggaccagcattgagcatcaatga

SEQ ID NO: 50816 - DNA, 60 bp, Artificial
  Synthetic oligonucleotide
gaagtatacgtcagggagacaggagaagaatcctgctcttaggatgaaatggatgatggc

SEQ ID NO: 50817 - DNA, 60 bp, Artificial
  Synthetic oligonucleotide
gtaaaaccagattcctaccagtagcgggcgggacaagcagcgtgtatatcgaggtgttgc

SEQ ID NO: 50818 - DNA, 60 bp, Artificial
  Synthetic oligonucleotide
aggaattcacaatggttgggcgaagggcaacagccattctaaggaaagcaaccagaaggc

SEQ ID NO: 50819 - DNA, 60 bp, Artificial
  Synthetic oligonucleotide
gttaggagagcaacagtatcagcagacccgttggcttcgctcttggagatgtgccatagt

SEQ ID NO: 50820 - DNA, 60 bp, Artificial
  Synthetic oligonucleotide
tggtcgtgagcattgatcgtttcttgagggtccgagaccagagggggaacgtgctcttgt

SEQ ID NO: 50821 - DNA, 60 bp, Artificial
  Synthetic oligonucleotide
aacgaattgagcaatcttgcgaaaggggagaaggctaatgtgttgatagggcaaggagac

SEQ ID NO: 50822 - DNA, 60 bp, Artificial
  Synthetic oligonucleotide
ggcgtcccaaggcaccaaacgatcttatgaacagatggaaactggtggagaacgccagaa

SEQ ID NO: 50823 - DNA, 60 bp, Artificial
  Synthetic oligonucleotide
ggcgactcaaggcaccaaacgatcttatgaacagatggaaactggtggagaacgccagaa

SEQ ID NO: 50824 - DNA, 60 bp, Artificial
  Synthetic oligonucleotide
aaggaagacaaaagatatggaccagcattgagcatcaatgaactgagcaatcttgcaaaa

SEQ ID NO: 50825 - DNA, 60 bp, Artificial
  Synthetic oligonucleotide
gtggatatgactttgagagagaagggtactctctagttggaatagatcctttccgtctgc

SEQ ID NO: 50826 - DNA, 60 bp, Artificial
  Synthetic oligonucleotide
cattgccccagaatatgcatacaaaattgtcaagaaaggggactcaacaattatgaaaag

SEQ ID NO: 50827 - DNA, 60 bp, Artificial
  Synthetic oligonucleotide
gtgtaaatggctcttgctttactgtaatgactgatggaccaagtaatgggcaggcatcat

SEQ ID NO: 50828 - DNA, 60 bp, Artificial
  Synthetic oligonucleotide
atgtgtaaatggctcttgctttactgtaatgactgatggaccaagtaatgggcaagcatc

SEQ ID NO: 50829 - DNA, 60 bp, Artificial
  Synthetic oligonucleotide
atgtgtaaatggctcttgctttactgtaatgactgatggaccaagtaatgggcaggcatc

SEQ ID NO: 50830 - DNA, 60 bp, Artificial
  Synthetic oligonucleotide
gcatgtgtaaatggctcttgctttactgtaatgactgatggaccaagtaatgggcaggcc

SEQ ID NO: 50831 - DNA, 60 bp, Artificial
  Synthetic oligonucleotide
aacagacactatcaagagttggaggaacaacatactgagaactcaagagtctgaatgtgc

SEQ ID NO: 50832 - DNA, 60 bp, Artificial
  Synthetic oligonucleotide
tatatgcagtggagttttcggagacaatccacgccccaatgatggaacaggtagttgtgg

SEQ ID NO: 50833 - DNA, 60 bp, Artificial
  Synthetic oligonucleotide
atgcagtggagttttcggagacaatccacgccccaatgatggaacaggtagttgtgatcc

SEQ ID NO: 50834 - DNA, 60 bp, Artificial
  Synthetic oligonucleotide
atatatatgcagtggagttttcggagacaatccacgccccaatgatggaacaggtagttg

SEQ ID NO: 50835 - DNA, 60 bp, Artificial
  Synthetic oligonucleotide
tatatatgcagtggagttttcggagacaatccacgccccaatgatggaacaggtagttgt

SEQ ID NO: 50836 - DNA, 60 bp, Artificial
  Synthetic oligonucleotide
gcagtggggttttcggagacaatccacgccccaatgatggaacaggtagttgtggtccgg

SEQ ID NO: 50837 - DNA, 60 bp, Artificial
  Synthetic oligonucleotide
gcagtggagttttcggagacaatccacgccccaatgatggaacaggtagttgtggtccga

SEQ ID NO: 50838 - DNA, 60 bp, Artificial
  Synthetic oligonucleotide
atgcagtggagttttcggagacaatccacgccccaatgatggaacaggtagttgtggccc

SEQ ID NO: 50839 - DNA, 60 bp, Artificial
  Synthetic oligonucleotide
atgcagtggagttttcggagacaatccacgccccaatgatggaacaggtagttgtggtcc

SEQ ID NO: 50840 - DNA, 52 bp, Artificial
  Synthetic oligonucleotide
gtgacgtactggggacatttgatactgtccagataataaagctgctaccatt

SEQ ID NO: 50841 - DNA, 52 bp, Artificial
  Synthetic oligonucleotide
gggacgtactggggacatttgatactgtccagataataaagctgctaccatt

SEQ ID NO: 50842 - DNA, 50 bp, Artificial
  Synthetic oligonucleotide
gtgacgtactggggacatttgatactgtccagataataaagctgctacca

SEQ ID NO: 50843 - DNA, 60 bp, Artificial
  Synthetic oligonucleotide
caagtttcatcagagggacgagagtggtcccaagaggacagctatccaccagaggggttc

SEQ ID NO: 50844 - DNA, 60 bp, Artificial
  Synthetic oligonucleotide
ggcaaagaagacaaaagatatggaccagcattgagcatcaacgaattgagcaatcttgcg

SEQ ID NO: 50845 - DNA, 60 bp, Artificial
  Synthetic oligonucleotide
ctcccttaatggttgcatacatgttggaaagggaactggtccgcaaaaccaggttcctac

SEQ ID NO: 50846 - DNA, 60 bp, Artificial
  Synthetic oligonucleotide
ataaggcaaccaaaagacttaccgttcttggaaaggacgcaggtgcattaacagaggatc

SEQ ID NO: 50847 - DNA, 60 bp, Artificial
  Synthetic oligonucleotide
aagattgtaagattgctcccttaatggttgcatacatgttggaaagggaactggtccgca

SEQ ID NO: 50848 - DNA, 60 bp, Artificial
  Synthetic oligonucleotide
acgattgtaagattgctcccttaatggttgcatacatgttggaaagggaactggtccgca

SEQ ID NO: 50849 - DNA, 60 bp, Artificial
  Synthetic oligonucleotide
ctcccttaatggttgcatacatgttggaaagggaactggtccgcaaaactagattcctac

SEQ ID NO: 50850 - DNA, 60 bp, Artificial
  Synthetic oligonucleotide
ctcccttaatggttgcatacatgttggaaagggaactggtccgcaaaaccagattcctac

SEQ ID NO: 50851 - DNA, 60 bp, Artificial
  Synthetic oligonucleotide
aagaaatacacatcaggaagacaagagaagaaccctgctctcagaatgaaatggatgatg

SEQ ID NO: 50852 - DNA, 60 bp, Artificial
  Synthetic oligonucleotide
aagattgtaaaattgctcccttaatggttgcatacatgttggaaagggaactggtccgca

SEQ ID NO: 50853 - DNA, 60 bp, Artificial
  Synthetic oligonucleotide
atgacgatgttgaccagagtttgatcatcgctgccagaaacattgttaggagagcaacgg

SEQ ID NO: 50854 - DNA, 60 bp, Artificial
  Synthetic oligonucleotide
ctgacaggattagattgcataagaccttgtttctgggttgagctaatcagagggcggcct

SEQ ID NO: 50855 - DNA, 60 bp, Artificial
  Synthetic oligonucleotide
cggtctcatgaacagatggaaactggtggagaacgccagaatgctactgagatcagggca

SEQ ID NO: 50856 - DNA, 60 bp, Artificial
  Synthetic oligonucleotide
caaacgatctcatgaacagatggaaactggtggagaacgccagaatgctactgagatcag

SEQ ID NO: 50857 - DNA, 60 bp, Artificial
  Synthetic oligonucleotide
acggtctcatgaacagatggaaactggtggagaacgccagaatgctactgagatcagggc

SEQ ID NO: 50858 - DNA, 60 bp, Artificial
  Synthetic oligonucleotide
tctcaagtttcatcagagggacaagagtggtcccaagaggacagctatccaccagagggg

SEQ ID NO: 50859 - DNA, 55 bp, Artificial
  Synthetic oligonucleotide
agtgctgtggatgttgacgatggtcattttgtcaacatagaattggagtaaaaaa

SEQ ID NO: 50860 - DNA, 60 bp, Artificial
  Synthetic oligonucleotide
aacgatccctgggttttgcttaatgcgtcttggttcaactccttcatcgcacatgcactg

SEQ ID NO: 50861 - DNA, 60 bp, Artificial
  Synthetic oligonucleotide
gcaattgaggagtgcctgattaacgatccttgggttttgcttaatgcgtcttggttcaac

SEQ ID NO: 50862 - DNA, 60 bp, Artificial
  Synthetic oligonucleotide
ttttgcttaatgcgtcttggttcaactccttcctcacacatgcactgaaatagttgtggc

SEQ ID NO: 50863 - DNA, 60 bp, Artificial
  Synthetic oligonucleotide
ccctgggttttgcttaatgcgtcttggttcaactccttcctcacacatgcactgaaatag

SEQ ID NO: 50864 - DNA, 60 bp, Artificial
  Synthetic oligonucleotide
ataggatatatatgcagtggggttttcggagacaatccacgccccaatgatggaacaggt

SEQ ID NO: 50865 - DNA, 60 bp, Artificial
  Synthetic oligonucleotide
atgtgtaaatggctcttgctttactgtaatgaccgacggaccaagtaatggtcaggcatc

SEQ ID NO: 50866 - DNA, 60 bp, Artificial
  Synthetic oligonucleotide
tggaccagcattgagcatcaatgaactgagcaatcttgcgaaaggggagaaagcaaatgt

SEQ ID NO: 50867 - DNA, 60 bp, Artificial
  Synthetic oligonucleotide
ggaccttagagtctcaagtttcatcagagggacgagagtggtcccaagaggacagctatc

SEQ ID NO: 50868 - DNA, 60 bp, Artificial
  Synthetic oligonucleotide
tttctaattctgggcaaagaagacaaaagatatggaccagcattgagcatcaacgaattg

SEQ ID NO: 50869 - DNA, 60 bp, Artificial
  Synthetic oligonucleotide
acctattgacaatgtcatggggatgatcgggatactacctgacatgactccaagcacaga

SEQ ID NO: 50870 - DNA, 60 bp, Artificial
  Synthetic oligonucleotide
ggccatgggtatctttcaaccaaaatttggagtatcaaataggatatatatgcagtggag

SEQ ID NO: 50871 - DNA, 60 bp, Artificial
  Synthetic oligonucleotide
ggccatgggtatccttcaatcaaaatttggagtatcaaataggatatatatgcagtggag

SEQ ID NO: 50872 - DNA, 60 bp, Artificial
  Synthetic oligonucleotide
gaaccgttcatctcatgctcccacttggaatgcagaactttctttttgactcagggagcc

SEQ ID NO: 50873 - DNA, 60 bp, Artificial
  Synthetic oligonucleotide
gagccgttcatctcatgctcccacttggaatgcagaactttctttttgactcagggagcc

SEQ ID NO: 50874 - DNA, 60 bp, Artificial
  Synthetic oligonucleotide
gagcctttcatctcatgctcccacttggaatgcagaactttctttttgactcagggagcc

SEQ ID NO: 50875 - DNA, 60 bp, Artificial
  Synthetic oligonucleotide
gagccattcatctcatgctcccacttggaatgcagaactttctttttgactcagggagcc

SEQ ID NO: 50876 - DNA, 60 bp, Artificial
  Synthetic oligonucleotide
ctgaggaacaagctgtggatatatgcaaagcagcaatgggtctgaggattagttcatcct

SEQ ID NO: 50877 - DNA, 60 bp, Artificial
  Synthetic oligonucleotide
aggaacaagctgtggatatatgcaaagcagcaatgggtctgaggattagttcatccttta

SEQ ID NO: 50878 - DNA, 60 bp, Artificial
  Synthetic oligonucleotide
catgattcaaatgtcaagaacctttacgacaaggtccgactacagcttagggataatgca

SEQ ID NO: 50879 - DNA, 60 bp, Artificial
  Synthetic oligonucleotide
caatagtcagtcttgttaagagtgatcagatttgcattggttaccatgcaaacaactcaa

SEQ ID NO: 50880 - DNA, 60 bp, Artificial
  Synthetic oligonucleotide
caatagtcagtattgttaaaagtgatcagatttgcattggttaccatgcaaacaactcga

SEQ ID NO: 50881 - DNA, 60 bp, Artificial
  Synthetic oligonucleotide
caatagtcagtcttgttaaaggtgatcagatttgcattggttaccatgcaaacaactcga

SEQ ID NO: 50882 - DNA, 60 bp, Artificial
  Synthetic oligonucleotide
ttctaggcaaggaggacaaaaggtatggaccagcattgagcatcaatgaactgagcactc

SEQ ID NO: 50883 - DNA, 60 bp, Artificial
  Synthetic oligonucleotide
ctgcaactgctttggccaacactatagaaatcttcagatcgaacggtctaacagccaatg

SEQ ID NO: 50884 - DNA, 60 bp, Artificial
  Synthetic oligonucleotide
cctgctgcaactgctttggccaacactatagaaatcttcagatcgaacggtctaacagcc

SEQ ID NO: 50885 - DNA, 60 bp, Artificial
  Synthetic oligonucleotide
tgctccagaatatgcatacaaaattgtcaagaaaggggactcagcaattatgaaaagtga

SEQ ID NO: 50886 - DNA, 60 bp, Artificial
  Synthetic oligonucleotide
gctccagaatatgcatacaaaattgtcaagaaaggggactcagcaattatgaaaagcgaa

SEQ ID NO: 50887 - DNA, 60 bp, Artificial
  Synthetic oligonucleotide
gaagtgcttacaggcaacctccaaacattgaaaataagagtacatgaagggtatgaggaa

SEQ ID NO: 50888 - DNA, 60 bp, Artificial
  Synthetic oligonucleotide
attgctccagaatatgcatacaaaattgtcaagaaaggggactcaacaattatgaaaagt

SEQ ID NO: 50889 - DNA, 60 bp, Artificial
  Synthetic oligonucleotide
ttgctccagaatatgcatacaaaattgtcaagaaaggggactcaacaattatgaaaagtg

SEQ ID NO: 50890 - DNA, 60 bp, Artificial
  Synthetic oligonucleotide
gctccagaatatgcatacaaaattgtcaagaaaggggactcaacaattatgaaaagtgaa

SEQ ID NO: 50891 - DNA, 60 bp, Artificial
  Synthetic oligonucleotide
agcggcattgggaggttctacatacagatgtgcacagaactcaaactcagtgaccatgaa

SEQ ID NO: 50892 - DNA, 60 bp, Artificial
  Synthetic oligonucleotide
gaatgccgaaattgaagatctcatttttctggcacggtctgcactcatcctgagaggatc

SEQ ID NO: 50893 - DNA, 60 bp, Artificial
  Synthetic oligonucleotide
gaatgctgagattgaagatctcatttttctggcacggtctgcactcatcctgagaggatc

SEQ ID NO: 50894 - DNA, 60 bp, Artificial
  Synthetic oligonucleotide
tcatcctgagaggatcagtagcccataagtcctgcttgcctgcttgtgtgtacggacttg

SEQ ID NO: 50895 - DNA, 60 bp, Artificial
  Synthetic oligonucleotide
ggaatgatgatgggcatgttcaacatgctgagtacagttctgggagtctcaatcttgaac

SEQ ID NO: 50896 - DNA, 60 bp, Artificial
  Synthetic oligonucleotide
caagttttatcagagggacaagagtggtcccaagaggacagctatccaccagaggggttc

SEQ ID NO: 50897 - DNA, 60 bp, Artificial
  Synthetic oligonucleotide
ctttgttgaaacactagcgaggagtatctgtgagaaacttgagcaatctggactcccagt

SEQ ID NO: 50898 - DNA, 60 bp, Artificial
  Synthetic oligonucleotide
cggtacaccaaaaccacatattggtgggacggactccaatcctctgatgatttcgctctc

SEQ ID NO: 50899 - DNA, 60 bp, Artificial
  Synthetic oligonucleotide
acaccaaaaccacatattggtgggacggactccaatcctctgatgatttcgctctcatcg

SEQ ID NO: 50900 - DNA, 60 bp, Artificial
  Synthetic oligonucleotide
ggtacaccaaaaccacatattggtgggacggactccaatcctctgatgatttcgctctca

SEQ ID NO: 50901 - DNA, 60 bp, Artificial
  Synthetic oligonucleotide
ggtacaccaaaaccacatattggtgggacggactccaatcctctgatgatttcgctctaa

SEQ ID NO: 50902 - DNA, 60 bp, Artificial
  Synthetic oligonucleotide
ctttgttgaaacattagcgaggagtatctgtgagaaacttgagcaatctggactcccagt

SEQ ID NO: 50903 - DNA, 60 bp, Artificial
  Synthetic oligonucleotide
aaggctggactgttggtttcagatggaggaccaaatctatacaatatccgaaatctccat

SEQ ID NO: 50904 - DNA, 60 bp, Artificial
  Synthetic oligonucleotide
tgggaacaaacccgttcaaaggcaggactgttggtttcagatggaggaccaaatctatac

SEQ ID NO: 50905 - DNA, 60 bp, Artificial
  Synthetic oligonucleotide
tgtactttgttgaaacattagcgaggagtatctgtgagaaacttgagcaatctggactcc

SEQ ID NO: 50906 - DNA, 60 bp, Artificial
  Synthetic oligonucleotide
gggaacaaacccgttcaaaggcaggactgttggtttcagatggaggaccaaatctataca

SEQ ID NO: 50907 - DNA, 60 bp, Artificial
  Synthetic oligonucleotide
ggaagcaaacccgttcaaaggcaggactgttggtttcagatggaggaccaaatctataca

SEQ ID NO: 50908 - DNA, 60 bp, Artificial
  Synthetic oligonucleotide
tggaagcaaacccgttcaaaggcaggactgttggtttcagatggaggaccaaatctatac

SEQ ID NO: 50909 - DNA, 60 bp, Artificial
  Synthetic oligonucleotide
aaggcaggactgttggtttcagatggaggaccaaatctatacaatatccgaaatctccat

SEQ ID NO: 50910 - DNA, 60 bp, Artificial
  Synthetic oligonucleotide
gggcagaacgtctgacatgaggactgaaatcataagaatgatggaaagtgccaggccaga

SEQ ID NO: 50911 - DNA, 60 bp, Artificial
  Synthetic oligonucleotide
gggcagaacgtctgacatgaggactgaaatcataagaatgatggaaagtgccaaaccaga

SEQ ID NO: 50912 - DNA, 60 bp, Artificial
  Synthetic oligonucleotide
tactgagggcagaacgtctgacatgaggactgaaatcataagaatgatggaaagtgccaa

SEQ ID NO: 50913 - DNA, 60 bp, Artificial
  Synthetic oligonucleotide
aatactgagggcagaacgtctgacatgaggactgaaatcataagaatgatggaaagtgcc

SEQ ID NO: 50914 - DNA, 60 bp, Artificial
  Synthetic oligonucleotide
caacaatgctgtagtaatgccagctcatggcccagccaagagtatggaatatgatgctgt

SEQ ID NO: 50915 - DNA, 60 bp, Artificial
  Synthetic oligonucleotide
cagaacattaatgagttgtcctgtgggtgaggctccctccccatataactcaaggtttga

SEQ ID NO: 50916 - DNA, 60 bp, Artificial
  Synthetic oligonucleotide
acaccaaaaccacatattggtgggacggactccaatcctctgatgattttgctctcatcg

SEQ ID NO: 50917 - DNA, 60 bp, Artificial
  Synthetic oligonucleotide
agaagatggaagacggatttctagatgtctggacttataatgctgaacttctggttctca

SEQ ID NO: 50918 - DNA, 60 bp, Artificial
  Synthetic oligonucleotide
gaagatggaagacggatttctagatgtctggacttataatgctgaacttctggttctcat

SEQ ID NO: 50919 - DNA, 60 bp, Artificial
  Synthetic oligonucleotide
gatggaagacggatttctagatgtctggacttataatgctgaacttctggttctcatgga

SEQ ID NO: 50920 - DNA, 60 bp, Artificial
  Synthetic oligonucleotide
ggcaggaacagcagagtgctgtggatgttgacgatggtcattttgtcaacatagaattag

SEQ ID NO: 50921 - DNA, 60 bp, Artificial
  Synthetic oligonucleotide
gcatgtccgcaaacgatttgcagaccaagaactgggtgatgccccattccttgaccggct

SEQ ID NO: 50922 - DNA, 60 bp, Artificial
  Synthetic oligonucleotide
gcggctttgaaatgatttgggatccaaatgggtggactggaacggacagtagcttttcgg

SEQ ID NO: 50923 - DNA, 60 bp, Artificial
  Synthetic oligonucleotide
gagcggctttgaaatgatttgggatccaaatgggtggactggaacggacagtagcttttc

SEQ ID NO: 50924 - DNA, 60 bp, Artificial
  Synthetic oligonucleotide
catggtggaggccatggtgtctagggcccgaattgatgcacggattgacttcgagtctgg

SEQ ID NO: 50925 - DNA, 60 bp, Artificial
  Synthetic oligonucleotide
gagccattcatctcatgctcccacttggaatgcagaactttctttttgactcagggatcc

SEQ ID NO: 50926 - DNA, 60 bp, Artificial
  Synthetic oligonucleotide
caggcaacctccaaacattgaaaataagagtacatgaggggtatgaggaattcacaatgg

SEQ ID NO: 50927 - DNA, 60 bp, Artificial
  Synthetic oligonucleotide
ggcaacctccaaacattgaaaataagagtacatgaggggtatgaggaattcacaatggtt

SEQ ID NO: 50928 - DNA, 60 bp, Artificial
  Synthetic oligonucleotide
cttacaggcaacctccaaacattgaaaataagagtacatgaggggtatgaggaattcaca

SEQ ID NO: 50929 - DNA, 60 bp, Artificial
  Synthetic oligonucleotide
cgggactccagcatacttactgacagccagacagcgaccaaaagaattcggatggccatc

SEQ ID NO: 50930 - DNA, 60 bp, Artificial
  Synthetic oligonucleotide
ggaaacgggactctagcatacttactgacagccagacagcgaccaaaagaattcggatgg

SEQ ID NO: 50931 - DNA, 60 bp, Artificial
  Synthetic oligonucleotide
caaacgatcttatgaacagatggaaactggtggagaacgccagaatgctactgagatcag

SEQ ID NO: 50932 - DNA, 60 bp, Artificial
  Synthetic oligonucleotide
tgcagattcacagcatcggtctcacagacagatggcaactatcaccaacccactaatcag

SEQ ID NO: 50933 - DNA, 60 bp, Artificial
  Synthetic oligonucleotide
agattcacagcatcggtctcacagacagatggcaactatcaccaacccactaatcaggca

SEQ ID NO: 50934 - DNA, 60 bp, Artificial
  Synthetic oligonucleotide
agattcccagcatcggtctcacagacagatggcaactatcaccaacccactaatcaggca

SEQ ID NO: 50935 - DNA, 60 bp, Artificial
  Synthetic oligonucleotide
gattcacagcatcggtctcacagacagatggcaactatcaccaacccactaatcaggcat

SEQ ID NO: 50936 - DNA, 60 bp, Artificial
  Synthetic oligonucleotide
ggattcacagcatcggtctcacagacagatggcaactatcaccaacccactaatcaggca

SEQ ID NO: 50937 - DNA, 60 bp, Artificial
  Synthetic oligonucleotide
ccaacacagtgtcaagctttcaggtagactgctttctttggcatgtccgcaaacgatttg

SEQ ID NO: 50938 - DNA, 60 bp, Artificial
  Synthetic oligonucleotide
atggaccccaacactgtgtcaagctttcaggtagactgctttctttggcatgtccgcaaa

SEQ ID NO: 50939 - DNA, 60 bp, Artificial
  Synthetic oligonucleotide
ggaccccaacactgtgtcaagctttcaggtagactgctttctttggcatgtccgcaaacg

SEQ ID NO: 50940 - DNA, 60 bp, Artificial
  Synthetic oligonucleotide
tatggattccaacactgtgtcaagctttcaggtagactgctttctttggcatgtccgcaa

SEQ ID NO: 50941 - DNA, 60 bp, Artificial
  Synthetic oligonucleotide
cccaacactgtgtcaagctttcaggtagactgctttctttggcatgtccgcaaacgattt

SEQ ID NO: 50942 - DNA, 60 bp, Artificial
  Synthetic oligonucleotide
ggatcccaacactgtgtcaagctttcaggtagactgctttctttggcatgtccgcaaacg

SEQ ID NO: 50943 - DNA, 60 bp, Artificial
  Synthetic oligonucleotide
atggactccaacactgtgtcaagctttcaggtagactgctttctttggcatgtccgcaaa

SEQ ID NO: 50944 - DNA, 60 bp, Artificial
  Synthetic oligonucleotide
atggattccaacactgtgttaagctttcaggtagactgctttctttggcatgtccgcaaa

SEQ ID NO: 50945 - DNA, 60 bp, Artificial
  Synthetic oligonucleotide
ggactccaacactgtgtcaagctttcaggtagactgctttctttggcatgtccgcaaacg

SEQ ID NO: 50946 - DNA, 60 bp, Artificial
  Synthetic oligonucleotide
aggattgtaagattgctcctttaatggtggcatacatgttggaaagggaactggtccgca

SEQ ID NO: 50947 - DNA, 60 bp, Artificial
  Synthetic oligonucleotide
caagtttcatcagaggaacaagagtggtcccaagaggacagctatccaccagaggggttc

SEQ ID NO: 50948 - DNA, 60 bp, Artificial
  Synthetic oligonucleotide
cagatggcaactatcaccaacccactaatcaggcatgagaacagaatggtgctggccagc

SEQ ID NO: 50949 - DNA, 60 bp, Artificial
  Synthetic oligonucleotide
gcatcggtctcacagacagatggcaactatcaccaacccactaatcaggcatgagaacag

SEQ ID NO: 50950 - DNA, 60 bp, Artificial
  Synthetic oligonucleotide
ccagaagcggctttgaaatgatttgggatccaaatgggtggactggaacggacagtagct

SEQ ID NO: 50951 - DNA, 60 bp, Artificial
  Synthetic oligonucleotide
cgtctgcttcaaaacagccaggtctttagtctcattagaccaaatgagaatccagcacat

SEQ ID NO: 50952 - DNA, 60 bp, Artificial
  Synthetic oligonucleotide
cgcctgcttcaaaacagccaggtctttagtctcattagaccaaatgagaatccagcacat

SEQ ID NO: 50953 - DNA, 60 bp, Artificial
  Synthetic oligonucleotide
ttccgtctgcttcaaaacagccaggtctttagtctcattagaccaaatgagaatccagca

SEQ ID NO: 50954 - DNA, 60 bp, Artificial
  Synthetic oligonucleotide
ccgtctgcttcaaaacagccaggtctttagtctcattagaccaaatgagaatccagcaca

SEQ ID NO: 50955 - DNA, 60 bp, Artificial
  Synthetic oligonucleotide
caacgagcaggggagtgggtacgctgcagacaaagaatccactcaaaaggcaatagatgg

SEQ ID NO: 50956 - DNA, 60 bp, Artificial
  Synthetic oligonucleotide
ccgcaaacgatttgcagaccaagaactgggtgatgccccattccttgaccggcttcgtcg

SEQ ID NO: 50957 - DNA, 60 bp, Artificial
  Synthetic oligonucleotide
ccgcaaacgatttgtagaccaagaactgggtgatgccccattccttgaccggcttcgccg

SEQ ID NO: 50958 - DNA, 60 bp, Artificial
  Synthetic oligonucleotide
ccccattccttgaccggcttcgccgagatcagaagtccctaagaggaagaggcagcactc

SEQ ID NO: 50959 - DNA, 60 bp, Artificial
  Synthetic oligonucleotide
tgtccgcaaacgatttgtagaccaagaactgggtgatgccccattccttgaccggcttcg

SEQ ID NO: 50960 - DNA, 60 bp, Artificial
  Synthetic oligonucleotide
ttgaccggcttcgccgagatcagaagtccctaagaggaagaggcaacactcttggtctgg

SEQ ID NO: 50961 - DNA, 60 bp, Artificial
  Synthetic oligonucleotide
gctttcaggtagactgctttctttggcatgtccgcaagcgatttgcagaccaagaactgg

SEQ ID NO: 50962 - DNA, 60 bp, Artificial
  Synthetic oligonucleotide
accggcttcgccgagatcagaagtccctaagaggaagaggcagcacccttggtctggaca

SEQ ID NO: 50963 - DNA, 60 bp, Artificial
  Synthetic oligonucleotide
gtgtcaagctttcaggtagactgctttctttggcatgtccgcaaacgatttgcagaccga

SEQ ID NO: 50964 - DNA, 60 bp, Artificial
  Synthetic oligonucleotide
tcaagctttcaggtagactgctttctttggcatgtccgcaaacgatttgcagaccaagaa

SEQ ID NO: 50965 - DNA, 60 bp, Artificial
  Synthetic oligonucleotide
tcgtcgagatcagaagtccctaagaggaagaggcaacactcttggtctggacatcgaaac

SEQ ID NO: 50966 - DNA, 60 bp, Artificial
  Synthetic oligonucleotide
ctgtgttaagctttcaggtagactgctttctttggcatgtccgcaaacgatttgcagacc

SEQ ID NO: 50967 - DNA, 60 bp, Artificial
  Synthetic oligonucleotide
tgtgtcaagctttcaggtagactgctttctttggcatgtccgcaaacgatttgcagaccg

SEQ ID NO: 50968 - DNA, 60 bp, Artificial
  Synthetic oligonucleotide
ctgtgtcaagctttcaggtagactgctttctttggcatgtccgcaaaagatttgcagacc

SEQ ID NO: 50969 - DNA, 60 bp, Artificial
  Synthetic oligonucleotide
agaccaagaactgggtgatgccccattccttgaccggcttcgccgagatcagaagtccct

SEQ ID NO: 50970 - DNA, 60 bp, Artificial
  Synthetic oligonucleotide
tgcagaccgagaactgggtgatgccccattccttgaccggcttcgccgagatcagaagtc

SEQ ID NO: 50971 - DNA, 60 bp, Artificial
  Synthetic oligonucleotide
ttcgccgagatcagaagtccctaagaggaagaggcaacactcttggtctggacatcgaaa

SEQ ID NO: 50972 - DNA, 60 bp, Artificial
  Synthetic oligonucleotide
caaaagcactaattccaggagcggctttgaaatgatttgggatccaaatgggtggactga

SEQ ID NO: 50973 - DNA, 60 bp, Artificial
  Synthetic oligonucleotide
caaaagcactaattccaggagcggctttgaaatgatttgggatccaaatgggtggattgg

SEQ ID NO: 50974 - DNA, 60 bp, Artificial
  Synthetic oligonucleotide
gcactaattccaggagcggctttgaaatgatttgggatccaaatgggtggactgaaacgg

SEQ ID NO: 50975 - DNA, 60 bp, Artificial
  Synthetic oligonucleotide
gccctagttccaggagcggctttgaaatgatttgggatccaaatgggtggactgaaacgg

SEQ ID NO: 50976 - DNA, 60 bp, Artificial
  Synthetic oligonucleotide
agccctagttccaggagcggctttgaaatgatttgggatccaaatgggtggactgaaacg

SEQ ID NO: 50977 - DNA, 60 bp, Artificial
  Synthetic oligonucleotide
aagcactaattccaggagcggctttgaaatgatttgggatccaaatgggtggactggaac

SEQ ID NO: 50978 - DNA, 60 bp, Artificial
  Synthetic oligonucleotide
agcactagttccaggagcggctttgaaatgatttgggatccaaatgggtggactgaaacg

SEQ ID NO: 50979 - DNA, 60 bp, Artificial
  Synthetic oligonucleotide
ataatgccgaacttctggttctcatggaaaatgagagaactctagactttcatgactcaa

SEQ ID NO: 50980 - DNA, 60 bp, Artificial
  Synthetic oligonucleotide
acaatgccgaacttctggttctcatggaaaatgagagaactctagactttcatgactcaa

SEQ ID NO: 50981 - DNA, 60 bp, Artificial
  Synthetic oligonucleotide
ccactagaggagttcaaattgcttcaaatgagaacatggaaacaatggactccagcactc

SEQ ID NO: 50982 - DNA, 60 bp, Artificial
  Synthetic oligonucleotide
accatatggccataatcaagaaatacacatcaggaagacaagaaaagaaccctgctctca

SEQ ID NO: 50983 - DNA, 60 bp, Artificial
  Synthetic oligonucleotide
gcactcgcgagatactaacaaaaaccactgtggaccatatggccataatcaagaaataca

SEQ ID NO: 50984 - DNA, 55 bp, Artificial
  Synthetic oligonucleotide
aaaaccactgtggaccatatggccataatcaagaaatacacatcaggaagacaag

SEQ ID NO: 50985 - DNA, 60 bp, Artificial
  Synthetic oligonucleotide
accatatggccataatcaagaaatacacatcaggaagacaggagaagaaccctgctctca

SEQ ID NO: 50986 - DNA, 60 bp, Artificial
  Synthetic oligonucleotide
tatggccataatcaagaaatacacatcaggaagacaagagaagaaccctgctctcagaat

SEQ ID NO: 50987 - DNA, 60 bp, Artificial
  Synthetic oligonucleotide
gtggaccatatggccataatcaagaaatacacatcaggaagacaagaaaagaaccctgcc

SEQ ID NO: 50988 - DNA, 60 bp, Artificial
  Synthetic oligonucleotide
aaccactgttgaccatatggccataatcaagaaatacacatcaggaagacaagagaagaa

SEQ ID NO: 50989 - DNA, 60 bp, Artificial
  Synthetic oligonucleotide
ccatatggccataatcaagaaatacacatcaggaagacaagaaaagaaccctgctctcag

SEQ ID NO: 50990 - DNA, 60 bp, Artificial
  Synthetic oligonucleotide
ccatatggccataatcaagaaatacacatcaggaagacaggagaagaaccctgctctcag

SEQ ID NO: 50991 - DNA, 60 bp, Artificial
  Synthetic oligonucleotide
accatatggccataatcaagaaatacacatcaggaagacaagagaagaaccctgctctca

SEQ ID NO: 50992 - DNA, 60 bp, Artificial
  Synthetic oligonucleotide
accatatggccataatcaagaaatacacatcaggaagacaagagaagaaccccgctctca

SEQ ID NO: 50993 - DNA, 60 bp, Artificial
  Synthetic oligonucleotide
cgagatactaacaaaaaccactgtggaccatatggccataatcaagaaatacacatcagg

SEQ ID NO: 50994 - DNA, 60 bp, Artificial
  Synthetic oligonucleotide
cgagatactaacaaaaaccactgttgaccatatggccataatcaagaaatacacatcagg

SEQ ID NO: 50995 - DNA, 60 bp, Artificial
  Synthetic oligonucleotide
agtcccgcactcgcgagatactaacaaaaaccactgtggaccatatggccataatcaaga

SEQ ID NO: 50996 - DNA, 60 bp, Artificial
  Synthetic oligonucleotide
ccatatggccataatcaagaaatacacatcaggaagacaagaaaagaaccctgccctcag

SEQ ID NO: 50997 - DNA, 60 bp, Artificial
  Synthetic oligonucleotide
ccatatggccataatcaagaaatacacatcaggaagacaagagaagaaccccgctctcag

SEQ ID NO: 50998 - DNA, 60 bp, Artificial
  Synthetic oligonucleotide
cactccctccaaagcagaaacgctacatggcgagaagagttgagtcagaagtttgaagag

SEQ ID NO: 50999 - DNA, 60 bp, Artificial
  Synthetic oligonucleotide
aaatatacagagattcgcttggggaatccgtgatgagaatgggggacctccactccctcc

SEQ ID NO: 51000 - DNA, 60 bp, Artificial
  Synthetic oligonucleotide
ttacttgaagttgagagtgagataaggacattttcttttcagcttatttagtactaaaaa

SEQ ID NO: 51001 - DNA, 60 bp, Artificial
  Synthetic oligonucleotide
gcttcgagcagataacgttcttgcaagcattgcaactcttacttgaagttgagagtgaga

SEQ ID NO: 51002 - DNA, 60 bp, Artificial
  Synthetic oligonucleotide
aaactgagaacagcttcgagcagataacgttcttgcaagcattgcaactcttacttgaag

SEQ ID NO: 51003 - DNA, 60 bp, Artificial
  Synthetic oligonucleotide
gtttgaagagatcagatggttaattgcagaatgcagaaacatattaacaaaaactgagaa

SEQ ID NO: 51004 - DNA, 60 bp, Artificial
  Synthetic oligonucleotide
tagactcagaagagatcaaaaggcattaaagggaagaggcagcacacttgggctcgacct

SEQ ID NO: 51005 - DNA, 60 bp, Artificial
  Synthetic oligonucleotide
gcatccagccctgctcctcggtacattaccgacatgagcatagaggaaataagcagggaa

SEQ ID NO: 51006 - DNA, 60 bp, Artificial
  Synthetic oligonucleotide
gagcatagaggaaataagcagggaatggtacatgctcatgccaaggcagaagataacagg

SEQ ID NO: 51007 - DNA, 60 bp, Artificial
  Synthetic oligonucleotide
attagtctcactgagggctttcacagacgatggcgccattgtagctgaaatatctcccat

SEQ ID NO: 51008 - DNA, 55 bp, Artificial
  Synthetic oligonucleotide
tcacagacgatggcgccattgtagctgaaatatctcccattccttctatgccagg

SEQ ID NO: 51009 - DNA, 60 bp, Artificial
  Synthetic oligonucleotide
gcatagaggaaataagcagggaatggtacatgctcatgccaaggcagaagataacagggg

SEQ ID NO: 51010 - DNA, 51 bp, Artificial
  Synthetic oligonucleotide
gaggcagcacacttgggctcgacctgcgagtggccacaatggaaggcaaaa

SEQ ID NO: 51011 - DNA, 60 bp, Artificial
  Synthetic oligonucleotide
gaggcagcacacttgggctcgacctgcgagtggccacaatggaaggcaaaaagattgttg

SEQ ID NO: 51012 - DNA, 60 bp, Artificial
  Synthetic oligonucleotide
ctcaaaattgcaattgcatccagccctgctcctcggtacattaccgacatgagcatagag

SEQ ID NO: 51013 - DNA, 60 bp, Artificial
  Synthetic oligonucleotide
tgctccctttgatgatagactcagaagagatcaaaaggcattaaagggaagaggcagcac

SEQ ID NO: 51014 - DNA, 60 bp, Artificial
  Synthetic oligonucleotide
ggcacataagaaaactgctcagcatgagagacatgtgtgatgctccctttgatgatagac

SEQ ID NO: 51015 - DNA, 60 bp, Artificial
  Synthetic oligonucleotide
tgctatctatggcacataagaaaactgctcagcatgagagacatgtgtgatgctcccttt

SEQ ID NO: 51016 - DNA, 60 bp, Artificial
  Synthetic oligonucleotide
tggactccaacacgataacctcgtttcaggtagattgctatctatggcacataagaaaac

SEQ ID NO: 51017 - DNA, 60 bp, Artificial
  Synthetic oligonucleotide
gtgacaaatacataatggactccaacacgataacctcgtttcaggtagattgctatctat

SEQ ID NO: 51018 - DNA, 60 bp, Artificial
  Synthetic oligonucleotide
aggataacactcaaagcaaatttctctgtcctatttgatcaactggaaacattagtctca

SEQ ID NO: 51019 - DNA, 60 bp, Artificial
  Synthetic oligonucleotide
ggggtctgatggtgaaaatggatcaggccattatggacaagaggataacactcaaagcaa

SEQ ID NO: 51020 - DNA, 60 bp, Artificial
  Synthetic oligonucleotide
gcaaatttctctgtcctatttgatcaactggaaacattagtctcactgagggctttcaca

SEQ ID NO: 51021 - DNA, 60 bp, Artificial
  Synthetic oligonucleotide
agataacagggggtctgatggtgaaaatggatcaggccattatggacaagaggataacac

SEQ ID NO: 51022 - DNA, 53 bp, Artificial
  Synthetic oligonucleotide
aagggtcaactctcccgaggagatctggagctgctggtgcagcagtgaagggg

SEQ ID NO: 51023 - DNA, 60 bp, Artificial
  Synthetic oligonucleotide
aagggtcaactctcccgaggagatctggagctgctggtgcagcagtgaagggggtaggga

SEQ ID NO: 51024 - DNA, 60 bp, Artificial
  Synthetic oligonucleotide
ggccggtggatatgactttgagagagaagggtactctctggttggaatagatcctttccg

SEQ ID NO: 51025 - DNA, 60 bp, Artificial
  Synthetic oligonucleotide
tcccgggaatgctgaaattgaagatctcatttttctggcacggtctgcactcatcctgag

SEQ ID NO: 51026 - DNA, 60 bp, Artificial
  Synthetic oligonucleotide
ccctgggaatgctgaaattgaagatctcatttttctggcacggtctgcactcatcctgag

SEQ ID NO: 51027 - DNA, 60 bp, Artificial
  Synthetic oligonucleotide
tcctgggaatgctgaaattgaagatctcatttttctggcacggtctgcactcatcctgag

SEQ ID NO: 51028 - DNA, 60 bp, Artificial
  Synthetic oligonucleotide
gtgtgaatggctcttgctttactgtaatgactgacggaccaagtaatggtcaggcatcac

SEQ ID NO: 51029 - DNA, 60 bp, Artificial
  Synthetic oligonucleotide
atgtgtgaatggctcttgctttactgtaatgactgacggaccaagtaatggtcaggcatc

SEQ ID NO: 51030 - DNA, 60 bp, Artificial
  Synthetic oligonucleotide
gagccgtctgtctcatgctcccacttggaatgcagaactttctttttgactcagggagcc

SEQ ID NO: 51031 - DNA, 60 bp, Artificial
  Synthetic oligonucleotide
ataatgctgaacttctggttctcatggaaaatgagagaactttagacttccatgactcaa

SEQ ID NO: 51032 - DNA, 51 bp, Artificial
  Synthetic oligonucleotide
agtgctgtggatgttgacgatggtcattttgtcaacctagaattggagtaa

SEQ ID NO: 51033 - DNA, 60 bp, Artificial
  Synthetic oligonucleotide
gcagcggagttttcggggacaatccacgccccaatgatggaacaggtagttgtggtccgg

SEQ ID NO: 51034 - DNA, 60 bp, Artificial
  Synthetic oligonucleotide
gcagtggagttttcggggacaatccacgccccaatgatggaacaggtagttgtggtccgg

SEQ ID NO: 51035 - DNA, 60 bp, Artificial
  Synthetic oligonucleotide
ggccatgggtatctttcaatcaaaacttggagtatcaaataggatatatatgcagtgggg

SEQ ID NO: 51036 - DNA, 60 bp, Artificial
  Synthetic oligonucleotide
tctggcccagacaatggggctgtggctgtattgaaatacaatggcataataacagacact

SEQ ID NO: 51037 - DNA, 60 bp, Artificial
  Synthetic oligonucleotide
taagagattgtagtgtagctggatggctcctcggaaacccaatgtgtgacgaattcatca

SEQ ID NO: 51038 - DNA, 60 bp, Artificial
  Synthetic oligonucleotide
gattaggaagaggatacatgttcgagagtaagagcatgaagttgcgaacacaaataccag

SEQ ID NO: 51039 - DNA, 60 bp, Artificial
  Synthetic oligonucleotide
ggtcgtcagacctatgactggacattgaatagaaaccaaccggctgcaaccgctttggcc

SEQ ID NO: 51040 - DNA, 60 bp, Artificial
  Synthetic oligonucleotide
accagaggagttcaaattgcttcaaatgagaacatggaaacaatggactccagcactctt

SEQ ID NO: 51041 - DNA, 51 bp, Artificial
  Synthetic oligonucleotide
aatgctgtggatgttgacgatggtcattttgtcaacatagaattggagtaa

SEQ ID NO: 51042 - DNA, 60 bp, Artificial
  Synthetic oligonucleotide
ggcaggaacagcagaatgctgtggatgttgacgatggtcattttgtcaacatagaattgg

SEQ ID NO: 51043 - DNA, 51 bp, Artificial
  Synthetic oligonucleotide
agtgctgtggatgttgacgatggtcattttgtcaacatagaattggagtaa

SEQ ID NO: 51044 - DNA, 60 bp, Artificial
  Synthetic oligonucleotide
ccttagacaaaacccaacagaagagcaagctgtggatatatgcaaagcagcaatgggtct

SEQ ID NO: 51045 - DNA, 60 bp, Artificial
  Synthetic oligonucleotide
ggacttataatgctgaacttctggttctcatggaaaatgagagaactctagactttcatg

SEQ ID NO: 51046 - DNA, 60 bp, Artificial
  Synthetic oligonucleotide
ctgaggaacaagctgtggatatatgcaaagcagcaatgggtctgagaatcagttcatcct

SEQ ID NO: 51047 - DNA, 60 bp, Artificial
  Synthetic oligonucleotide
ctgaggaacaggctgtggatatatgcaaagcagcaatgggtctgagaatcagttcatcct

SEQ ID NO: 51048 - DNA, 60 bp, Artificial
  Synthetic oligonucleotide
ctgaggaacaagctgtggatatatgcaaagcagcaatgggtctgaggatcagttcatcct

SEQ ID NO: 51049 - DNA, 60 bp, Artificial
  Synthetic oligonucleotide
ctgaggaacaagctgtggatatatgcaaagcagcaatgggtctgaggatcagttcttcct

SEQ ID NO: 51050 - DNA, 60 bp, Artificial
  Synthetic oligonucleotide
gaaattcttccctagtagttcatacaggaggccagttggaatttccagcatggtggaggc

SEQ ID NO: 51051 - DNA, 60 bp, Artificial
  Synthetic oligonucleotide
ttgggatctccagcatggtggaggccatggtgtctagggcccggattgatgcacggattg

SEQ ID NO: 51052 - DNA, 60 bp, Artificial
  Synthetic oligonucleotide
ttggaatttccagcatggtggaggccatggtgtctagggcccgaattgatgcacggattg

SEQ ID NO: 51053 - DNA, 60 bp, Artificial
  Synthetic oligonucleotide
gtgcacttgccagttgcatgggtctcatatacaacaggatgggaacggtgactactgaag

SEQ ID NO: 51054 - DNA, 60 bp, Artificial
  Synthetic oligonucleotide
acaatgctgaacttctggttctcatggaaaatgagagaactctagactttcatgactcaa

SEQ ID NO: 51055 - DNA, 60 bp, Artificial
  Synthetic oligonucleotide
gaccatgaagggaggctgatccagaacagcataacaatagagagaatggtactttctgca

SEQ ID NO: 51056 - DNA, 60 bp, Artificial
  Synthetic oligonucleotide
tgaccatgaagggaggctgatccagaacagcataacaatagagagaatggtactttctgc

SEQ ID NO: 51057 - DNA, 60 bp, Artificial
  Synthetic oligonucleotide
agcagagcagaatgcagttttcttctctaactgtgaatgtgagaggctctggaatgagaa

SEQ ID NO: 51058 - DNA, 60 bp, Artificial
  Synthetic oligonucleotide
ctgagggggttcctaattctaggcaaggaggacaaaagatatggaccagcattgagcatc

SEQ ID NO: 51059 - DNA, 60 bp, Artificial
  Synthetic oligonucleotide
ggactgcaaagatgttagcgatctaagacagtatgacagtgatgaaccagaatctagatc

SEQ ID NO: 51060 - DNA, 60 bp, Artificial
  Synthetic oligonucleotide
gatgttagcgatctaagacagtatgacagtgatgaaccagaatctagatcactagcaagc

SEQ ID NO: 51061 - DNA, 60 bp, Artificial
  Synthetic oligonucleotide
caggagtcgagaaaccaaaatttctcccagatttgtatgactacaaagagaaccgattca

SEQ ID NO: 51062 - DNA, 60 bp, Artificial
  Synthetic oligonucleotide
atttctcccagatttgtatgactacaaagagaaccgattcatcgaaattggagtgacacg

SEQ ID NO: 51063 - DNA, 60 bp, Artificial
  Synthetic oligonucleotide
attcctcccagatttgtatgactacaaagagaaccgattcatcgaaattggagtgacacg

SEQ ID NO: 51064 - DNA, 60 bp, Artificial
  Synthetic oligonucleotide
gactttgaggactgcaaagatgttagcgatctaagacagtatgacagtgatgaaccagaa

SEQ ID NO: 51065 - DNA, 60 bp, Artificial
  Synthetic oligonucleotide
gattttgaggactgcaaagatgttagcgatctaagacagtatgacagtgatgaaccagaa

SEQ ID NO: 51066 - DNA, 60 bp, Artificial
  Synthetic oligonucleotide
gactttgaggactgcaaagatgttagcgatctaagacagtatgacagtgatgaaccagag

SEQ ID NO: 51067 - DNA, 60 bp, Artificial
  Synthetic oligonucleotide
tttgaggactgcaaagatgttagcgatctaagacagtatgacagtgatgaaccagaatct

SEQ ID NO: 51068 - DNA, 60 bp, Artificial
  Synthetic oligonucleotide
agttgagaaacctaaattcctcccagatttgtatgactacaaagagaaccgattcatcga

SEQ ID NO: 51069 - DNA, 60 bp, Artificial
  Synthetic oligonucleotide
ttaaacaagaagatggaagacggattcctagatgtctggacttataatgctgaacttctg

SEQ ID NO: 51070 - DNA, 60 bp, Artificial
  Synthetic oligonucleotide
gggagaggatacatgttcgaaagtaagagcatgaagttgcgaacacaaataccagcagaa

SEQ ID NO: 51071 - DNA, 60 bp, Artificial
  Synthetic oligonucleotide
ggtcgccagacttatgactggacattgaatagaaaccaaccggctgcaactgctttggcc

SEQ ID NO: 51072 - DNA, 60 bp, Artificial
  Synthetic oligonucleotide
tccattcgtcagccataaggaaattgaatctgtcaacaatgctgtagtaatgccagctca

SEQ ID NO: 51073 - DNA, 60 bp, Artificial
  Synthetic oligonucleotide
ggaagcaaacccgttcaaaagcaggactgttggtttcagatggaggaccaaatctataca

SEQ ID NO: 51074 - DNA, 60 bp, Artificial
  Synthetic oligonucleotide
caggggatttgtgtactttgttgaaacactagcgaggagtatctgtgagaaacttgagca

SEQ ID NO: 51075 - DNA, 60 bp, Artificial
  Synthetic oligonucleotide
gcaatggctttccttgaagaatcccacccagggatctttgaaaactcgtgtcttgaaacg

SEQ ID NO: 51076 - DNA, 60 bp, Artificial
  Synthetic oligonucleotide
gagcactgacactgaacacaatgacaaaagatgcagaaagaggcaaattgaagaggcgag

SEQ ID NO: 51077 - DNA, 56 bp, Artificial
  Synthetic oligonucleotide
gtacaccaaaaccacatattggtgggacggactccaatcctctgatgatttcgctc

SEQ ID NO: 51078 - DNA, 60 bp, Artificial
  Synthetic oligonucleotide
acaacaaacacagagactggagcaccccaactcaacccgattgatggaccactacctgag

SEQ ID NO: 51079 - DNA, 60 bp, Artificial
  Synthetic oligonucleotide
tcttgaaagtaccagtgcaaaatgctataagtaccacattcccttatactggagaccctc

SEQ ID NO: 51080 - DNA, 60 bp, Artificial
  Synthetic oligonucleotide
cctccaaacattgaaaataagagtacatgaggggtatgaggaattcacaatggttgggca

SEQ ID NO: 51081 - DNA, 60 bp, Artificial
  Synthetic oligonucleotide
catgaacagatggaaactggtggagaacgccagaatgctactgagatcagggcatctgtt

SEQ ID NO: 51082 - DNA, 60 bp, Artificial
  Synthetic oligonucleotide
tatgaacagatggaaactggtggagaacgccagaatgctactgagatcagggcatctgtt

SEQ ID NO: 51083 - DNA, 60 bp, Artificial
  Synthetic oligonucleotide
cttatgaacagatggaaactggtggagaacgccagaatgctactgagatcagggcatctg

SEQ ID NO: 51084 - DNA, 60 bp, Artificial
  Synthetic oligonucleotide
tcttatgaacagatggaaactggtggagaacgccagaatgctactgagatcagggcatct

SEQ ID NO: 51085 - DNA, 60 bp, Artificial
  Synthetic oligonucleotide
aacaccgatctcgaggctctcatggagtggctaaagacaagaccaatcctgtcacctctg

SEQ ID NO: 51086 - DNA, 60 bp, Artificial
  Synthetic oligonucleotide
ccgatctcgaggctctcatggagtggctaaagacaagaccaatcctgtcacctctgacta

SEQ ID NO: 51087 - DNA, 59 bp, Artificial
  Synthetic oligonucleotide
ccaagaggacaactgtccactaggggagttcaaattgcttcaaatgagaacatggaaac

SEQ ID NO: 51088 - DNA, 60 bp, Artificial
  Synthetic oligonucleotide
ggctcttgctttactgtaatgactgatggaccaagtaatggtcaggcatcacataagatc

SEQ ID NO: 51089 - DNA, 60 bp, Artificial
  Synthetic oligonucleotide
ggcaaaatccaactgaggaacaagctgtggatatatgcaaagcagcaatgggtctgagaa

SEQ ID NO: 51090 - DNA, 60 bp, Artificial
  Synthetic oligonucleotide
aggcaaaatccaactgaggaacaagctgtggatatatgcaaagcagcaatgggtctgagg

SEQ ID NO: 51091 - DNA, 60 bp, Artificial
  Synthetic oligonucleotide
taggcaaaatccaactgaggaacaagctgtggatatatgcaaagcagcaatgggtctgag

SEQ ID NO: 51092 - DNA, 60 bp, Artificial
  Synthetic oligonucleotide
tagacaaaatccaactgaggaacaagctgtggatatatgcaaagcagcaatgggtctgag

SEQ ID NO: 51093 - DNA, 60 bp, Artificial
  Synthetic oligonucleotide
ggcaaaatccaactgaggaacaagctgtggatatatgcaaagcagcaatgggtctgagga

SEQ ID NO: 51094 - DNA, 60 bp, Artificial
  Synthetic oligonucleotide
taggggcgataaactctagtatgccattccacaacatccaccctctcaccatcggggaat

SEQ ID NO: 51095 - DNA, 60 bp, Artificial
  Synthetic oligonucleotide
taggggcgataaactctagtatgccattccacaacatccaccctctcaccatcggagaat

SEQ ID NO: 51096 - DNA, 60 bp, Artificial
  Synthetic oligonucleotide
cgggactctagcatacttactgacagtcagacagcgaccaaaagaattcggatggccatc

SEQ ID NO: 51097 - DNA, 60 bp, Artificial
  Synthetic oligonucleotide
ctgtgttaagcttccaggtagactgctttctttggcatgtccgcaaacgatttgcagacc

SEQ ID NO: 51098 - DNA, 60 bp, Artificial
  Synthetic oligonucleotide
atgacgatgttgaccagagtttggtcatcgctgccagaaacattgttaggagagcaacgg

SEQ ID NO: 51099 - DNA, 60 bp, Artificial
  Synthetic oligonucleotide
aataacgaccttgggccagcaacagctcagatggctcttcagctattcatcaaggactac

SEQ ID NO: 51100 - DNA, 60 bp, Artificial
  Synthetic oligonucleotide
taaacaacgaccttgggccagcaacagctcagatggctcttcagctattcatcaaggact

SEQ ID NO: 51101 - DNA, 60 bp, Artificial
  Synthetic oligonucleotide
gaagtgcttacaggcaacctccaaacattgaaaataagagtacatgaggggtatgaggaa

SEQ ID NO: 51102 - DNA, 60 bp, Artificial
  Synthetic oligonucleotide
ggacatccttagacaaaacccaacagaagagcaagctgtggatatatgcaaagcagcaat

SEQ ID NO: 51103 - DNA, 60 bp, Artificial
  Synthetic oligonucleotide
gttttcggagacaatccacgccccaatgatggaacaggtagttgtggtccggtgtcccct

SEQ ID NO: 51104 - DNA, 60 bp, Artificial
  Synthetic oligonucleotide
taggatatatatgcagtggagttttcggagacaatccacgccccaatgatggaacaggta

SEQ ID NO: 51105 - DNA, 60 bp, Artificial
  Synthetic oligonucleotide
gagttttcggagacaatccacgccccaatgatggaacaggtagttgtggtccggtgtccc

SEQ ID NO: 51106 - DNA, 60 bp, Artificial
  Synthetic oligonucleotide
atctgttccaccattgaagagctcagacggccaaaatagtgaatttagcttgtccttcgt

SEQ ID NO: 51107 - DNA, 54 bp, Artificial
  Synthetic oligonucleotide
agtgctgtggatgttgacgatggtcattttgtcaacatagaattggagtaaaac

SEQ ID NO: 51108 - DNA, 60 bp, Artificial
  Synthetic oligonucleotide
ctgtatggattcattataaaaggaagatcccacttgaggaatgataccgatgtggtaaat

SEQ ID NO: 51109 - DNA, 60 bp, Artificial
  Synthetic oligonucleotide
gggcaggggagtgggtacgctgcagacaaagaatccactcaaaaggcaatagatggagtc

SEQ ID NO: 51110 - DNA, 60 bp, Artificial
  Synthetic oligonucleotide
caggggagtgggtacgctgcagacaaagaatccactcaaaaggcaatagatggagtaacc

SEQ ID NO: 51111 - DNA, 60 bp, Artificial
  Synthetic oligonucleotide
ctcacaagaggattgcatgataaaagcagtacgaggtgatttgaattttgtcaacagagc

SEQ ID NO: 51112 - DNA, 50 bp, Artificial
  Synthetic oligonucleotide
atctgttccaccattgaagagctcagacggccaaaatagtgaatttagct

SEQ ID NO: 51113 - DNA, 53 bp, Artificial
  Synthetic oligonucleotide
atctgttccaccattgaagagctcagacggccaaaatagtgaatttagcttgt

SEQ ID NO: 51114 - DNA, 52 bp, Artificial
  Synthetic oligonucleotide
atctgttccaccattgaagagctcagacggccaaaatagtgaatttagcttg

SEQ ID NO: 51115 - DNA, 60 bp, Artificial
  Synthetic oligonucleotide
aaggtctacaaaacctatttcgaaaaggtcgaaaggttaaaacatggaaccttcggtccc

SEQ ID NO: 51116 - DNA, 60 bp, Artificial
  Synthetic oligonucleotide
aacacctattgagcagaataaaccattttgagaaaattcagatcatccccaaaagttctt

SEQ ID NO: 51117 - DNA, 60 bp, Artificial
  Synthetic oligonucleotide
caagtttcattagagggacaagagtggtcccaagaggacagctatccaccagaggagttc

SEQ ID NO: 51118 - DNA, 60 bp, Artificial
  Synthetic oligonucleotide
aatgagagaactctagactttcatgactcaaatgtcaagaacctttacgacaaggtccgg

SEQ ID NO: 51119 - DNA, 60 bp, Artificial
  Synthetic oligonucleotide
agagaactctagactttcatgactcaaatgtcaagaacctttacgacaaggtccgactac

SEQ ID NO: 51120 - DNA, 60 bp, Artificial
  Synthetic oligonucleotide
ggctagacagatggtgcaggcaatgaggacaattgggactcatcctaactctagtgctgg

SEQ ID NO: 51121 - DNA, 60 bp, Artificial
  Synthetic oligonucleotide
gacagaagccctcacagaacattgatgagttgtcctgtgggtgaggctccctccccatat

SEQ ID NO: 51122 - DNA, 57 bp, Artificial
  Synthetic oligonucleotide
gtctcattagaccaaatgagaatccagcacataagagtcaattagtgtggatggctt

SEQ ID NO: 51123 - DNA, 57 bp, Artificial
  Synthetic oligonucleotide
gtctcattagaccaaatgagaatccagcacataagagtcaattagtgtggatggcat

SEQ ID NO: 51124 - DNA, 60 bp, Artificial
  Synthetic oligonucleotide
cctagatggggtgaagcctctaattttgagagattgtagtgtagctggatggctcctcgg

SEQ ID NO: 51125 - DNA, 60 bp, Artificial
  Synthetic oligonucleotide
ttgaggaccttagagtctcaagtttcatcagagggacaagagtggtcccaagaggacagc

SEQ ID NO: 51126 - DNA, 60 bp, Artificial
  Synthetic oligonucleotide
gaatgctgaaattgaagatctcatttttctagcacggtctgcactcatcctgagaggatc

SEQ ID NO: 51127 - DNA, 60 bp, Artificial
  Synthetic oligonucleotide
gaatgctgaaattgaagatctcatctttctggcacggtctgcactcatcctgagaggatc

SEQ ID NO: 51128 - DNA, 51 bp, Artificial
  Synthetic oligonucleotide
ttttctagcacggtctgcactcatcctgagaggatcagtagcccataagtc

SEQ ID NO: 51129 - DNA, 51 bp, Artificial
  Synthetic oligonucleotide
ttttctggcacggtctgcactcatcctgagaggatcaatagcccataagtc

SEQ ID NO: 51130 - DNA, 60 bp, Artificial
  Synthetic oligonucleotide
tgctgaaattgaagatctcatctttctggcacggtctgcactcatcctgagaggatcagt

SEQ ID NO: 51131 - DNA, 60 bp, Artificial
  Synthetic oligonucleotide
ccaggagcggctttgaaatgatttgggatccaaatgggtggactggaacggacagtagct

SEQ ID NO: 51132 - DNA, 60 bp, Artificial
  Synthetic oligonucleotide
ttccaggagcggctttgaaatgatttgggatccaaatgggtggactggaacggacagtag

SEQ ID NO: 51133 - DNA, 60 bp, Artificial
  Synthetic oligonucleotide
agcactaattccaggagcggctttgaaatgatttgggatccaaatgggtggcctgaaacg

SEQ ID NO: 51134 - DNA, 60 bp, Artificial
  Synthetic oligonucleotide
aattccaggagcggctttgaaatgatttgggatccaaatgggtggactggaacggacagt

SEQ ID NO: 51135 - DNA, 60 bp, Artificial
  Synthetic oligonucleotide
agcactaattccaggagcggctttgaaatgatttgggatccaaatgggtggactgaaaca

SEQ ID NO: 51136 - DNA, 60 bp, Artificial
  Synthetic oligonucleotide
agcactaattccaggagcggctttgaaatgatttgggatccaaatgggtggtctgaaacg

SEQ ID NO: 51137 - DNA, 60 bp, Artificial
  Synthetic oligonucleotide
ccaggagcggctttgaaatgatttgggatccaaatgggtggactggaacggacagtagtt

SEQ ID NO: 51138 - DNA, 60 bp, Artificial
  Synthetic oligonucleotide
caacagccagtcttgttaaaagtgatcagatttgcattggttaccatgcaaacaattcaa

SEQ ID NO: 51139 - DNA, 60 bp, Artificial
  Synthetic oligonucleotide
ccagaatatgcatacaaaattgtcaagaaaggggactcagcaattatgaaaagcgaattg

SEQ ID NO: 51140 - DNA, 59 bp, Artificial
  Synthetic oligonucleotide
atggcgtctcaaggcaccaaacgatcttatgaacagatggaaactggtggagaacgcca

SEQ ID NO: 51141 - DNA, 60 bp, Artificial
  Synthetic oligonucleotide
tgactatgaagggaggctgatccagaacagcataacaatagagagaatggtactctccgc

SEQ ID NO: 51142 - DNA, 60 bp, Artificial
  Synthetic oligonucleotide
tgactatgaagggagactgatccagaacagcataacaatagagagaatggtactctctgc

SEQ ID NO: 51143 - DNA, 60 bp, Artificial
  Synthetic oligonucleotide
gactatgaagggagactgatccagaacagcataacaatagagagaatggtactctctgca

SEQ ID NO: 51144 - DNA, 60 bp, Artificial
  Synthetic oligonucleotide
gactatgaagggaggctgatccagaacagcataacaatagagagaatggtactctccgca

SEQ ID NO: 51145 - DNA, 60 bp, Artificial
  Synthetic oligonucleotide
ggaggaacaacatactgagaactcaagagtctgaatgtgcatgtgtaaatggctcttgct

SEQ ID NO: 51146 - DNA, 60 bp, Artificial
  Synthetic oligonucleotide
ctcatgtcttgaaacgatggaagttgttcagcaaacaagagtggataaactgacccaagg

SEQ ID NO: 51147 - DNA, 60 bp, Artificial
  Synthetic oligonucleotide
ctcatgtcttgaaacgatggaagtcgttcagcaaacaagagtggataaactgacccaagg

SEQ ID NO: 51148 - DNA, 60 bp, Artificial
  Synthetic oligonucleotide
aaataggatatatatgcagtggagttttcggagacaatccacgccccaatgatggaacag

SEQ ID NO: 51149 - DNA, 60 bp, Artificial
  Synthetic oligonucleotide
taggcaaaatccaactgaggaacaagctgtggatatatgcaaagcagcaatgggtttgag

SEQ ID NO: 51150 - DNA, 60 bp, Artificial
  Synthetic oligonucleotide
ctatgagtcttctaaccgaggtcgaaacgtacgttctctctatcatcccgtcaggccccc

SEQ ID NO: 51151 - DNA, 60 bp, Artificial
  Synthetic oligonucleotide
tgaaagatgagtcttctaaccgaggtcgaaacgtacgttctctctatcgtcccgtcaggc

SEQ ID NO: 51152 - DNA, 59 bp, Artificial
  Synthetic oligonucleotide
ctatgagtcttctaaccgaggtcgaaacgtacgttctctctatcatcccgtcaggcccc

SEQ ID NO: 51153 - DNA, 60 bp, Artificial
  Synthetic oligonucleotide
aaaatgagtcttctaaccgaggtcgaaacgtacgttctctctatcatcccgtcaggcccc

SEQ ID NO: 51154 - DNA, 60 bp, Artificial
  Synthetic oligonucleotide
gaaagatgagtcttctaaccgaggtcgaaacgtacgttctctctatcatcccgtcaggcc

SEQ ID NO: 51155 - DNA, 60 bp, Artificial
  Synthetic oligonucleotide
gggaggttctacatacagatgtgcacagaactcaaactcagtgactatgaaggaaggctg

SEQ ID NO: 51156 - DNA, 60 bp, Artificial
  Synthetic oligonucleotide
agaaaatggaagacggattcctagatgtctggacttataatgctgaacttctggttctca

SEQ ID NO: 51157 - DNA, 51 bp, Artificial
  Synthetic oligonucleotide
cgtacgttctctctatcatcccgtcaggccccctcaaagccgagatcgcgc

SEQ ID NO: 51158 - DNA, 60 bp, Artificial
  Synthetic oligonucleotide
gccgaacttctggttctcatggaaaatgagagaactctagactttcatgactcaaatgtc

SEQ ID NO: 51159 - DNA, 60 bp, Artificial
  Synthetic oligonucleotide
gccgaacttctggttctcatggaaaatgagagaactctagactttcatgactcaaatgtt

SEQ ID NO: 51160 - DNA, 60 bp, Artificial
  Synthetic oligonucleotide
gatatgactttgagagagaagggtactctctggttggaatagatcctttccgtctgcttc

SEQ ID NO: 51161 - DNA, 60 bp, Artificial
  Synthetic oligonucleotide
gatatgactttgagagagaagggtactctctggttggaatagatcctttccgcctgcttc

SEQ ID NO: 51162 - DNA, 55 bp, Artificial
  Synthetic oligonucleotide
tgagaggatcagtagcccataagtcctgcttgcctgcttgtgtgtacggacttgc

SEQ ID NO: 51163 - DNA, 60 bp, Artificial
  Synthetic oligonucleotide
cagcttaaggacaacgcgagggaactgggtaatggttgtttcgagttctaccacaaatgt

SEQ ID NO: 51164 - DNA, 60 bp, Artificial
  Synthetic oligonucleotide
cagcctctgctacccaggggattttaatgactacgaagaactgaaacacctattgagcag

SEQ ID NO: 51165 - DNA, 60 bp, Artificial
  Synthetic oligonucleotide
tgaaaagcggcttggcatatggtaactgtgatactaagtgtcaaactccagtgggtgcga

SEQ ID NO: 51166 - DNA, 60 bp, Artificial
  Synthetic oligonucleotide
gggaggctgatccagaacagcataacaatagagagaatggtactctctgcatttgacgaa

SEQ ID NO: 51167 - DNA, 60 bp, Artificial
  Synthetic oligonucleotide
gggaggctgatccagaacagcataacaatagagagaatggtactctctgcatttgatgaa

SEQ ID NO: 51168 - DNA, 60 bp, Artificial
  Synthetic oligonucleotide
agggaggctgatccagaacagcataacaatagagagaatggtactctctgcatttgatga

SEQ ID NO: 51169 - DNA, 60 bp, Artificial
  Synthetic oligonucleotide
gggaggctgatccagaacagcataacaatagagagaatggtactctctgcattcgatgaa

SEQ ID NO: 51170 - DNA, 60 bp, Artificial
  Synthetic oligonucleotide
ggcaggaacagcagagtgctgtggatgttgacgatggtcattttgtcaacatagaattgg

SEQ ID NO: 51171 - DNA, 60 bp, Artificial
  Synthetic oligonucleotide
catgcccaagacatactggaaaagacacacaacgggaagctctgcgatctagatggagtg

SEQ ID NO: 51172 - DNA, 60 bp, Artificial
  Synthetic oligonucleotide
gcccaagacatactggaaaagacacacaacgggaagctctgcgatctagatggagtgaag

SEQ ID NO: 51173 - DNA, 60 bp, Artificial
  Synthetic oligonucleotide
tacacatgcccaagacatactggaaaagacacacaacgggaagctctgcgatctagatgg

SEQ ID NO: 51174 - DNA, 60 bp, Artificial
  Synthetic oligonucleotide
acacatgcccaagacatactggaaaagacacacaacgggaagctctgcgatctagatggg

SEQ ID NO: 51175 - DNA, 60 bp, Artificial
  Synthetic oligonucleotide
acacatgcccaagacatactggaaaagacacacaacgggaagctctgcgatctagatgga

SEQ ID NO: 51176 - DNA, 60 bp, Artificial
  Synthetic oligonucleotide
aagagtacataaggggtatgaggaattcacaatggttgggcggagagcaacagctatctt

SEQ ID NO: 51177 - DNA, 60 bp, Artificial
  Synthetic oligonucleotide
ggcaccaaacgatcttatgaacagatggaaactggtggagaacgccagagtgccactgag

SEQ ID NO: 51178 - DNA, 60 bp, Artificial
  Synthetic oligonucleotide
taagagtacatgaggggtatgaggaattcacaatggttgggcggagagcaacagctatcc

SEQ ID NO: 51179 - DNA, 60 bp, Artificial
  Synthetic oligonucleotide
aagagtacatgaggggtatgaggaattcacaatggttgggcggagagcaacggctatcct

SEQ ID NO: 51180 - DNA, 60 bp, Artificial
  Synthetic oligonucleotide
aagagtacatgaggggtatgaggaattcacaatggttgggcggagagcaacagctatcct

SEQ ID NO: 51181 - DNA, 60 bp, Artificial
  Synthetic oligonucleotide
ctgattctaggcaaggaagacaaaagatatggaccagcattgagcatcaatgaactgagc

SEQ ID NO: 51182 - DNA, 60 bp, Artificial
  Synthetic oligonucleotide
agagttggaggaacaacatactgagaactcaagagtctgaatgtgcatgtgtaaatggct

SEQ ID NO: 51183 - DNA, 60 bp, Artificial
  Synthetic oligonucleotide
atcaaaagttggaggaacaacatactgagaactcaagagtctgaatgtgcatgtgtaaat

SEQ ID NO: 51184 - DNA, 60 bp, Artificial
  Synthetic oligonucleotide
atcaagagttggaggaacaacatactgagaactcaagagtctgaatgtgcatgtgtaaat

SEQ ID NO: 51185 - DNA, 60 bp, Artificial
  Synthetic oligonucleotide
cactatcaagagttggaggaacaacatactgagaactcaagagtctgaatgtgcatgtgt

SEQ ID NO: 51186 - DNA, 60 bp, Artificial
  Synthetic oligonucleotide
gaggaacaacatactgagaactcaagagtctgaatgtgcatgtgtaaatggctcctgctt

SEQ ID NO: 51187 - DNA, 60 bp, Artificial
  Synthetic oligonucleotide
gaggaacaacatactgagaactcaagagtctgaatgtgcatgtgtaaatggctcttgctt

SEQ ID NO: 51188 - DNA, 60 bp, Artificial
  Synthetic oligonucleotide
gagttggaggaacaacatactgagaactcaagagtctgaatgtgcatgtgtaaatggctc

SEQ ID NO: 51189 - DNA, 60 bp, Artificial
  Synthetic oligonucleotide
caccatcggggaatgccccaaatatgtgaaatcaaacagattagtccttgcgactgggct

SEQ ID NO: 51190 - DNA, 60 bp, Artificial
  Synthetic oligonucleotide
ccctctcaccatcggggaatgccccaaatatgtgaaatcaaacagattagtccttgcgac

SEQ ID NO: 51191 - DNA, 60 bp, Artificial
  Synthetic oligonucleotide
cggggaatgccccaaatatgtgaaatcaaacagattagtccttgcgactgggctcagaaa

SEQ ID NO: 51192 - DNA, 60 bp, Artificial
  Synthetic oligonucleotide
atcggggaatgccccaaatatgtgaaatcaaacagattagtccttgcgactgggctcaga

SEQ ID NO: 51193 - DNA, 60 bp, Artificial
  Synthetic oligonucleotide
catcggggaatgccccaaatatgtgaaatcaaacagattagtccttgcgactgggctcag

SEQ ID NO: 51194 - DNA, 60 bp, Artificial
  Synthetic oligonucleotide
ccatcggggaatgccccaaatatgtgaaatcaaacagattagtccttgcgactgggctca

SEQ ID NO: 51195 - DNA, 60 bp, Artificial
  Synthetic oligonucleotide
tcaccatcggggaatgccccaaatatgtgaaatcaaacagattagtccttgcgacagggc

SEQ ID NO: 51196 - DNA, 60 bp, Artificial
  Synthetic oligonucleotide
gcttccaggtagactgctttctttggcatgtccgcaaacgatttgcagaccaagaactgg

SEQ ID NO: 51197 - DNA, 60 bp, Artificial
  Synthetic oligonucleotide
tttctaattctaggcaaggaagacaaaagatatggaccagcattgagcatcaatgaactg

SEQ ID NO: 51198 - DNA, 60 bp, Artificial
  Synthetic oligonucleotide
ttcctaattctaggcaaggaagacaaaagatatggaccagcattgagcatcaatgaactg

SEQ ID NO: 51199 - DNA, 60 bp, Artificial
  Synthetic oligonucleotide
gcagcggagttttcggagacaatccacgccccaatgatggaacaggtagttgtggcccga

SEQ ID NO: 51200 - DNA, 60 bp, Artificial
  Synthetic oligonucleotide
ccttagagtttcaagtttcatcagagggacaagagtggtcccaagaggacagctatccac

SEQ ID NO: 51201 - DNA, 60 bp, Artificial
  Synthetic oligonucleotide
gaccttagagtttcaagtttcatcagagggacaagagtggtcccaagaggacagctatcc

SEQ ID NO: 51202 - DNA, 60 bp, Artificial
  Synthetic oligonucleotide
ggatcttagagtttcaagtttcatcagagggacaagagtggtcccaagaggacagctatc

SEQ ID NO: 51203 - DNA, 60 bp, Artificial
  Synthetic oligonucleotide
ggaccttagagtttcaagtttcatcagagggacaagagtggtcccaagaggacagctatc

SEQ ID NO: 51204 - DNA, 60 bp, Artificial
  Synthetic oligonucleotide
ctcattgttcaggcacttagggacaacctggaacctgggaccttcgatcttggagggcta

SEQ ID NO: 51205 - DNA, 60 bp, Artificial
  Synthetic oligonucleotide
ccagcattgagcatcaatgaactgagcaatcttgcaaaaggggagaaagctaatgtgctg

SEQ ID NO: 51206 - DNA, 60 bp, Artificial
  Synthetic oligonucleotide
gacaggattagattgcataagaccttgtttctgggttgagttaatcagagggcggcctaa

SEQ ID NO: 51207 - DNA, 60 bp, Artificial
  Synthetic oligonucleotide
gacaggattagattgcataagaccttgtttctgggttgagttaatcagaggtcggcctaa

SEQ ID NO: 51208 - DNA, 60 bp, Artificial
  Synthetic oligonucleotide
ggattagattgcataagaccttgtttctgggttgagttaatcagagggcggcccaaagag

SEQ ID NO: 51209 - DNA, 60 bp, Artificial
  Synthetic oligonucleotide
aagatgagtcttctaaccgaggtcgaaacgtacgttctctctgtcatcccgtcaggcccc

SEQ ID NO: 51210 - DNA, 60 bp, Artificial
  Synthetic oligonucleotide
ccttcgatcttggagggctatatgaagcaattgaggagtgcctgattaatgatccctggg

SEQ ID NO: 51211 - DNA, 60 bp, Artificial
  Synthetic oligonucleotide
ggaagtggacaacaaacacagagactggagcaccccaactcaacccgattgatggaccgc

SEQ ID NO: 51212 - DNA, 60 bp, Artificial
  Synthetic oligonucleotide
ggacaacaaacacagagactggagcaccccaactcaacccgattgatggaccactacctg

SEQ ID NO: 51213 - DNA, 60 bp, Artificial
  Synthetic oligonucleotide
ctgttcactataagacaagaaatggccagtaggggtctatgggattcctttcgtcagtcc

SEQ ID NO: 51214 - DNA, 60 bp, Artificial
  Synthetic oligonucleotide
aagagtacatgaggggtatgaggaattcacaatggttgggcagagggcaacagctatcct

SEQ ID NO: 51215 - DNA, 60 bp, Artificial
  Synthetic oligonucleotide
taagagtacatgaggggtatgaggaattcacaatggttgggcggagggcaacagctatct

SEQ ID NO: 51216 - DNA, 60 bp, Artificial
  Synthetic oligonucleotide
ttcatcagagggacaagagtggtcccaagaggacagctatctaccagaggggttcaaatt

SEQ ID NO: 51217 - DNA, 60 bp, Artificial
  Synthetic oligonucleotide
acgttcatgcaagccttacaactactgcttgaagtggagcaagagataagaactttctcg

SEQ ID NO: 51218 - DNA, 60 bp, Artificial
  Synthetic oligonucleotide
gtgcacttgccagttgcatgggtctcatatacaacaggatgggagcggtgactacggaag

SEQ ID NO: 51219 - DNA, 60 bp, Artificial
  Synthetic oligonucleotide
cctcatcggaggacttgaatggaatgataacacggttcgagtctctgaaattatacagag

SEQ ID NO: 51220 - DNA, 60 bp, Artificial
  Synthetic oligonucleotide
ggatcctcatcggaggacttgaatggaatgataacacggttcgagtctctgaagctctac

SEQ ID NO: 51221 - DNA, 60 bp, Artificial
  Synthetic oligonucleotide
aaaatgcaattggggtcctcatcggaggacttgaatggaatgataacacggttcgagtct

SEQ ID NO: 51222 - DNA, 60 bp, Artificial
  Synthetic oligonucleotide
aaaatgcaattgggatcctcatcggaggacttgaatggaatgataacacggttcgagtct

SEQ ID NO: 51223 - DNA, 60 bp, Artificial
  Synthetic oligonucleotide
gggtcctcatcggaggacttgaatggaatgataacacggttcgagtctctgaagctctac

SEQ ID NO: 51224 - DNA, 55 bp, Artificial
  Synthetic oligonucleotide
aaaatgcaattggcgtcctcatcggaggacttgaatggaatgataacacggttcg

SEQ ID NO: 51225 - DNA, 60 bp, Artificial
  Synthetic oligonucleotide
tcctcatcggaggacttgaatggaatgataacacggttcgagtctctgaaattatacaga

SEQ ID NO: 51226 - DNA, 60 bp, Artificial
  Synthetic oligonucleotide
gggtactcatcggaggacttgaatggaatgataacacggttcgagtctctgaagctctac

SEQ ID NO: 51227 - DNA, 60 bp, Artificial
  Synthetic oligonucleotide
ggcaccaaacgatcttatgagcagatggaaactggtggagaacgccagaatgctactgag

SEQ ID NO: 51228 - DNA, 60 bp, Artificial
  Synthetic oligonucleotide
ccagcattgagcatcaatgaactgagcaatcttgcgaaaggggagaaagctaacgtgttg

SEQ ID NO: 51229 - DNA, 60 bp, Artificial
  Synthetic oligonucleotide
ccagcattgagcatcaatgaactgagcaatcttgcgaaaggggagaaagctaatgtgctg

SEQ ID NO: 51230 - DNA, 60 bp, Artificial
  Synthetic oligonucleotide
gcggctttgaaatgatttgggatccaaatgggtggactggaacggacagtagcttctcgg

SEQ ID NO: 51231 - DNA, 60 bp, Artificial
  Synthetic oligonucleotide
agaagcggctttgaaatgatttgggatccaaatgggtggactggaacggacagtagcttt

SEQ ID NO: 51232 - DNA, 60 bp, Artificial
  Synthetic oligonucleotide
cgagagtggataaactgacccaaggtcgccagacctatgactggacattgaatagaaacc

SEQ ID NO: 51233 - DNA, 60 bp, Artificial
  Synthetic oligonucleotide
gctgagtcgagaaaattgcttctcattgttcaggcacttagggacaacctggaacctgga

SEQ ID NO: 51234 - DNA, 60 bp, Artificial
  Synthetic oligonucleotide
agatatggaccagcattgagcatcaatgaactgagcaatcttgcaaaaggggagaaagct

SEQ ID NO: 51235 - DNA, 60 bp, Artificial
  Synthetic oligonucleotide
ttcctaattctaggcaaggaggacaaaagatatggaccagcattgagcatcaatgaactg

SEQ ID NO: 51236 - DNA, 60 bp, Artificial
  Synthetic oligonucleotide
caatgagcaggggagtggatacgctgcagacaaagaatccactcaaaaggcaatagatgg

SEQ ID NO: 51237 - DNA, 60 bp, Artificial
  Synthetic oligonucleotide
ccttcgatcttggaggactatatgaagcaattgaggagtgcctgattaacgatccctggg

SEQ ID NO: 51238 - DNA, 60 bp, Artificial
  Synthetic oligonucleotide
cgggactcaagcatacttactgacagccagacagcgaccaaaagaattcggatggccatc

SEQ ID NO: 51239 - DNA, 60 bp, Artificial
  Synthetic oligonucleotide
catacttactgacagccagacagcgaccaaaagaattcgaatggccttcaattagtgtcg

SEQ ID NO: 51240 - DNA, 60 bp, Artificial
  Synthetic oligonucleotide
acggaaacgggactcaagcatacttactgacagccagacagcgaccaaaagaattcggat

SEQ ID NO: 51241 - DNA, 60 bp, Artificial
  Synthetic oligonucleotide
caaacagattgtgtattggaagcaatggctttccttgaagaatcccacccagggatcttt

SEQ ID NO: 51242 - DNA, 60 bp, Artificial
  Synthetic oligonucleotide
gaacggctgcattgagggcaagctttctcaaatgtcaaaagaagtgaacgctagaattga

SEQ ID NO: 51243 - DNA, 60 bp, Artificial
  Synthetic oligonucleotide
gaacggctgcattgagggcaagctttctcaaatgtcaaaagaggtgaatgctagaattga

SEQ ID NO: 51244 - DNA, 60 bp, Artificial
  Synthetic oligonucleotide
gaacggctgcattgagggcaagctttctcaaatgtctaaagaagtgaatgctagaattga

SEQ ID NO: 51245 - DNA, 60 bp, Artificial
  Synthetic oligonucleotide
cggctgcattgagggcaagctttctcaaatgtcaaaagaagtgaatgccagaatcgagcc

SEQ ID NO: 51246 - DNA, 60 bp, Artificial
  Synthetic oligonucleotide
gaggctgtggctgtattgaaatacaatggcataataacagacactatcaagagttggagg

SEQ ID NO: 51247 - DNA, 60 bp, Artificial
  Synthetic oligonucleotide
tgaggctgtggctgtattgaaatacaatggcataataacagacactatcaagagttggag

SEQ ID NO: 51248 - DNA, 60 bp, Artificial
  Synthetic oligonucleotide
gttgagaggatttctgattctaggcaaggaagacaaaagatatggaccagcattgagcat

SEQ ID NO: 51249 - DNA, 60 bp, Artificial
  Synthetic oligonucleotide
ccatatggccataatcaagaaatacacatcaggaagacaagagaagaaccctgctctccg

SEQ ID NO: 51250 - DNA, 60 bp, Artificial
  Synthetic oligonucleotide
gagatccgaatgcattattgaaacaccgatttgaaataattgaaggaagagaccgaccga

SEQ ID NO: 51251 - DNA, 60 bp, Artificial
  Synthetic oligonucleotide
gagatccgaatgcattattgaaacaccgatttgaaataattgaaggaagagaccgaacga

SEQ ID NO: 51252 - DNA, 60 bp, Artificial
  Synthetic oligonucleotide
gagatccgaatgcattattgaaacaccgatttgaaataattgaaggaagagacagaacga

SEQ ID NO: 51253 - DNA, 60 bp, Artificial
  Synthetic oligonucleotide
gaggctgtggctgtattgaaatacaatggcataataacagacactatcaaaagttggagg

SEQ ID NO: 51254 - DNA, 60 bp, Artificial
  Synthetic oligonucleotide
acaatgaggctgtggctgtattgaaatacaatggcataataacagacactatcaagagtt

SEQ ID NO: 51255 - DNA, 60 bp, Artificial
  Synthetic oligonucleotide
ggcccagacaatgaggctgtggctgtattgaaatacaatggcataataacagacactatc

SEQ ID NO: 51256 - DNA, 60 bp, Artificial
  Synthetic oligonucleotide
tgtattgaaatacaatggcataataacagacactatcaaaagttggagaaacaacatatt

SEQ ID NO: 51257 - DNA, 60 bp, Artificial
  Synthetic oligonucleotide
acaatgaggctgtggctgtattgaaatacaatggcataataacagacactatcaaaagtt

SEQ ID NO: 51258 - DNA, 54 bp, Artificial
  Synthetic oligonucleotide
ggggctatatgaagcaattgaggagtgcctgattaatgatccctgggttttgct

SEQ ID NO: 51259 - DNA, 60 bp, Artificial
  Synthetic oligonucleotide
acaatggggctgtggctgtgttgaaatacaatggcataataacagacactatcaagagtt

SEQ ID NO: 51260 - DNA, 54 bp, Artificial
  Synthetic oligonucleotide
atagatggcacggcctcattgagtcctggaatgatgatgggcatgttcaacatg

SEQ ID NO: 51261 - DNA, 60 bp, Artificial
  Synthetic oligonucleotide
tttgaatggatgtcaatccgactttacttttcttgaaagtaccagtgcaaaatgctataa

SEQ ID NO: 51262 - DNA, 60 bp, Artificial
  Synthetic oligonucleotide
atttgaatggatgtcaatccgactttacttttcttgaaagtaccagtgcaaaatgctata

SEQ ID NO: 51263 - DNA, 59 bp, Artificial
  Synthetic oligonucleotide
ccagttggaatttccagcatggtggaggccatggtgtccagggcccgaattgacgcacg

SEQ ID NO: 51264 - DNA, 60 bp, Artificial
  Synthetic oligonucleotide
tgccagtgcaaaatgctataagtaccacattcccttatactggagatcctccatacagcc

SEQ ID NO: 51265 - DNA, 60 bp, Artificial
  Synthetic oligonucleotide
gagtctgagtgtgcatgtgtaaatggctcttgctttactgtaatgactgacggaccaagt

SEQ ID NO: 51266 - DNA, 60 bp, Artificial
  Synthetic oligonucleotide
gaatgtgcatgtgtaaatggctcttgctttactgtaatgactgacggaccaagtaatggg

SEQ ID NO: 51267 - DNA, 60 bp, Artificial
  Synthetic oligonucleotide
gagtctgaatgtgcatgtgtaaatggctcttgctttactgtaatgactgacggaccaagt

SEQ ID NO: 51268 - DNA, 60 bp, Artificial
  Synthetic oligonucleotide
cgattcattgagattggagtgacacggagggaagttcatacatactatctggagaaagcc

SEQ ID NO: 51269 - DNA, 60 bp, Artificial
  Synthetic oligonucleotide
gaccgattcattgagattggagtgacacggagggaagttcatacatactatctggagaaa

SEQ ID NO: 51270 - DNA, 60 bp, Artificial
  Synthetic oligonucleotide
caagtttcatcagagggacaagagtggtcccaagaggacaactatccaccagaggggttc

SEQ ID NO: 51271 - DNA, 60 bp, Artificial
  Synthetic oligonucleotide
cgccagacctatgactggacattgaatagaaaccaaccggctgcaactgctttggccaac

SEQ ID NO: 51272 - DNA, 60 bp, Artificial
  Synthetic oligonucleotide
gtcgccagacctatgactggacattgaatagaaaccaaccggctgcaactgctttggcca

SEQ ID NO: 51273 - DNA, 60 bp, Artificial
  Synthetic oligonucleotide
gttcaggcacttagggacaacctggaacctgggactttcgatcttggagggctatatgaa

SEQ ID NO: 51274 - DNA, 60 bp, Artificial
  Synthetic oligonucleotide
gtgcatgtgtaaatggctcttgctttactgtaatgactgacggaccaagtaatggtcagg

SEQ ID NO: 51275 - DNA, 60 bp, Artificial
  Synthetic oligonucleotide
ggattctaacactgtgtcaagctttcaggtagactgctttctttggcatgtccgcaaacg

SEQ ID NO: 51276 - DNA, 60 bp, Artificial
  Synthetic oligonucleotide
gggtcccaacactgtgtcaagctttcaggtagactgctttctttggcatgtccgcaaacg

SEQ ID NO: 51277 - DNA, 60 bp, Artificial
  Synthetic oligonucleotide
gtcccaaggcaccaaacgatcttatgaacagatggaaactagtggagaacgccagaatgc

SEQ ID NO: 51278 - DNA, 60 bp, Artificial
  Synthetic oligonucleotide
cggctgcattgagggcaagctttctcaaatgtctaaagaagtgaacgccagaattgagcc

SEQ ID NO: 51279 - DNA, 60 bp, Artificial
  Synthetic oligonucleotide
cggctgcattgagggcaagctttctcaaatgtcaaaagaagtgaacgctagaattgaacc

SEQ ID NO: 51280 - DNA, 60 bp, Artificial
  Synthetic oligonucleotide
cgcaggcttgccgaccgaagtctcccaccgaacttctccagccttgaaaactttagagcc

SEQ ID NO: 51281 - DNA, 60 bp, Artificial
  Synthetic oligonucleotide
aaccatgcgcaggcttgccgaccgaagtctcccaccgaacttctccagccttgaaaactt

SEQ ID NO: 51282 - DNA, 60 bp, Artificial
  Synthetic oligonucleotide
caaacagattgtgtattggaagcaatggctttccttgaagaatcccacccaggaatcttt

SEQ ID NO: 51283 - DNA, 60 bp, Artificial
  Synthetic oligonucleotide
ctatgaagaactgaaacacctattgagcagaataaaccattttgagaaaattcagatcat

SEQ ID NO: 51284 - DNA, 60 bp, Artificial
  Synthetic oligonucleotide
agatgtgcacagaactcaaactcagtgactatgaagggaggctgatccagaacagcataa

SEQ ID NO: 51285 - DNA, 60 bp, Artificial
  Synthetic oligonucleotide
gatgtgcacagaactcaaactcagtgactatgaagggaggctgatccagaacagcataac

SEQ ID NO: 51286 - DNA, 60 bp, Artificial
  Synthetic oligonucleotide
tgtgcacagaactcaaactcagtgactatgaagggaggctgatccagaacagcataacaa

SEQ ID NO: 51287 - DNA, 60 bp, Artificial
  Synthetic oligonucleotide
gcacagaactcaaactcagtgactatgaagggaggctgatccagaacagcataacaatag

SEQ ID NO: 51288 - DNA, 60 bp, Artificial
  Synthetic oligonucleotide
gcactaactccaggagcggctttgaaatgatttgggatccaaatgggtggactggaacgg

SEQ ID NO: 51289 - DNA, 60 bp, Artificial
  Synthetic oligonucleotide
gaccggcttcgccgagatcagaagtccctaagaggaaggggcaacactcttggtctggac

SEQ ID NO: 51290 - DNA, 60 bp, Artificial
  Synthetic oligonucleotide
ggaccttagagtctcaagtttcatcagagggacaagagtggtcccaagaggacaactatc

SEQ ID NO: 51291 - DNA, 60 bp, Artificial
  Synthetic oligonucleotide
tcttatgaacagatggaaactggtggagaacgccagaatgctacggagatcagggcatct

SEQ ID NO: 51292 - DNA, 60 bp, Artificial
  Synthetic oligonucleotide
aagaacgttactgttacacatgcccaagacatactggaaaagacacacaacgggaagctc

SEQ ID NO: 51293 - DNA, 60 bp, Artificial
  Synthetic oligonucleotide
tatgactacaaagagaaccgattcattgaaattggagtgacacggagggaagttcataca

SEQ ID NO: 51294 - DNA, 60 bp, Artificial
  Synthetic oligonucleotide
caaatgcagaaccaaagaaggaagacggaaaactaatctgtatggattcattataaaagg

SEQ ID NO: 51295 - DNA, 60 bp, Artificial
  Synthetic oligonucleotide
ttgtgttcacgctcaccgtgcccagtgagcgaggactgcagcgtagacgatttgtccaga

SEQ ID NO: 51296 - DNA, 60 bp, Artificial
  Synthetic oligonucleotide
ggcaaggaagacaaaagatatggaccagcattgagcatcaatgaactgagcaatcttgca

SEQ ID NO: 51297 - DNA, 60 bp, Artificial
  Synthetic oligonucleotide
cctggaacctgggaccttcgatcttggagggctatatgaagcaattgaggagtgcctgat

SEQ ID NO: 51298 - DNA, 60 bp, Artificial
  Synthetic oligonucleotide
catgttcgaaagtaagagcatgaagttgcgaacacaaataccagcagaaatgcttgcaaa

SEQ ID NO: 51299 - DNA, 60 bp, Artificial
  Synthetic oligonucleotide
tgttcgaaagtaagagcatgaagctacgaacacaaataccagcagaaatgcttgcaaaca

SEQ ID NO: 51300 - DNA, 60 bp, Artificial
  Synthetic oligonucleotide
gttatctatggcacataagaaagctactcagtatgagagacatgtgtgatgctccctttg

SEQ ID NO: 51301 - DNA, 60 bp, Artificial
  Synthetic oligonucleotide
tttcaggtagattgttatctatggcacataagaaagctactcagtatgagagacatgtgt

SEQ ID NO: 51302 - DNA, 55 bp, Artificial
  Synthetic oligonucleotide
taaggactttctcttttcagcttatttaatactaaaaaacacccttgtttctact

SEQ ID NO: 51303 - DNA, 60 bp, Artificial
  Synthetic oligonucleotide
cattggtctccctgagggcattcacagaagatggtgctattgtggctgaaatatctccca

SEQ ID NO: 51304 - DNA, 60 bp, Artificial
  Synthetic oligonucleotide
tattgaaacaccgatttgaaataattgaaggaagagaccgaacgatggcctggactgcgg

SEQ ID NO: 51305 - DNA, 60 bp, Artificial
  Synthetic oligonucleotide
ggctaggcagatggtgcaggcaatgaggacaattgggactcatcctaactctagtgccgg

SEQ ID NO: 51306 - DNA, 60 bp, Artificial
  Synthetic oligonucleotide
gggagcggtgactacggaagtggcttttggcctagtgtgtgccacttgtgagcagattgc

SEQ ID NO: 51307 - DNA, 60 bp, Artificial
  Synthetic oligonucleotide
gctttaggcctagtgtgtgccacttgtgagcagattgcagattcacagcatcggtctcac

SEQ ID NO: 51308 - DNA, 60 bp, Artificial
  Synthetic oligonucleotide
gcctttggcctagtgtgtgccacttgtgagcagattgcagattcacagcatcggtctcac

SEQ ID NO: 51309 - DNA, 60 bp, Artificial
  Synthetic oligonucleotide
tagttcatacaggagaccagttggaatttccagcatggtggaggccatggtgtccagggc

SEQ ID NO: 51310 - DNA, 60 bp, Artificial
  Synthetic oligonucleotide
ccaagacatactggaaaagacacacaacgggaagctctgcgatctagatggagtgaagcc

SEQ ID NO: 51311 - DNA, 60 bp, Artificial
  Synthetic oligonucleotide
aagagtacatgaggggtatgaggaattcacaatggttgggcgaagggcaacagctatctt

SEQ ID NO: 51312 - DNA, 60 bp, Artificial
  Synthetic oligonucleotide
ccttcgatcttggagggctatatgaagcaatcgaggagtgcctgattaacgatccctggg

SEQ ID NO: 51313 - DNA, 60 bp, Artificial
  Synthetic oligonucleotide
ttgcttctcattgttcaggcacttagggacaacctggaacctgggaccttcgatcttggg

SEQ ID NO: 51314 - DNA, 60 bp, Artificial
  Synthetic oligonucleotide
tgcttctaattgttcaggcacttagggacaacctggaacctgggaccttcgatcttgggg

SEQ ID NO: 51315 - DNA, 60 bp, Artificial
  Synthetic oligonucleotide
tgcttctcattgttcaggcacttagggacaacctggaacctgggaccttcgatcttgggg

SEQ ID NO: 51316 - DNA, 60 bp, Artificial
  Synthetic oligonucleotide
gcttctcattgttcaggcacttagggacaacctggaacctgggaccttcgatcttggagg

SEQ ID NO: 51317 - DNA, 60 bp, Artificial
  Synthetic oligonucleotide
ttccttgaccggcttcgccgagatcagaagtccctaagaggaagaggcagcactcttggt

SEQ ID NO: 51318 - DNA, 60 bp, Artificial
  Synthetic oligonucleotide
tccttgaccggcttcgccgagatcagaagtccctgagaggaagaggcaacactcttggtc

SEQ ID NO: 51319 - DNA, 60 bp, Artificial
  Synthetic oligonucleotide
gaccaagaactgggtgatgccccatttctagaccggcttcgccgagatcagaagtccctg

SEQ ID NO: 51320 - DNA, 60 bp, Artificial
  Synthetic oligonucleotide
ccaagaactgggtgatgccccatttctagaccggcttcgccgagatcagaagtccctgag

SEQ ID NO: 51321 - DNA, 60 bp, Artificial
  Synthetic oligonucleotide
aaggggattcctaattctaggcaatgaggacaaaagatatggaccagcattgagcatcaa

SEQ ID NO: 51322 - DNA, 60 bp, Artificial
  Synthetic oligonucleotide
acggaagcgggactctagcatacttactgacagccagacagcgaccaaaagaattcggat

SEQ ID NO: 51323 - DNA, 60 bp, Artificial
  Synthetic oligonucleotide
acgaaaacgggactctagcatacttactgacagccagacagcgaccaaaaggattcggat

SEQ ID NO: 51324 - DNA, 60 bp, Artificial
  Synthetic oligonucleotide
atgaaacggaaacgggactctagcatacttactgacagccagacagcgaccaaaagaatt

SEQ ID NO: 51325 - DNA, 60 bp, Artificial
  Synthetic oligonucleotide
aatgaaacggaaacgggactctagcatacttactgacagccagacagcgaccaaaagaat

SEQ ID NO: 51326 - DNA, 60 bp, Artificial
  Synthetic oligonucleotide
ctctagcatacttactgacagccagacagcgaccaaaagaattcgaatggccttcaatta

SEQ ID NO: 51327 - DNA, 60 bp, Artificial
  Synthetic oligonucleotide
aaacgggactctagcatacttactgacagccagacagcgaccaaaagaattcggatggcc

SEQ ID NO: 51328 - DNA, 60 bp, Artificial
  Synthetic oligonucleotide
tacttactgacagccagacagcgaccaaaagaattcggatggccatcaattagtgtcgaa

SEQ ID NO: 51329 - DNA, 59 bp, Artificial
  Synthetic oligonucleotide
ctagcatacttactgacagccagacagcgaccaaaagaattcggatggccatcaattag

SEQ ID NO: 51330 - DNA, 60 bp, Artificial
  Synthetic oligonucleotide
ggatgtcaatccgactttacttttcttgaaagtaccagtgcaaaatgctataagtaccac

SEQ ID NO: 51331 - DNA, 60 bp, Artificial
  Synthetic oligonucleotide
aatggatgtcaatccgactttacttttcttgaaagtaccagtgcaaaatgctataagtac

SEQ ID NO: 51332 - DNA, 60 bp, Artificial
  Synthetic oligonucleotide
aagtatcccattgcagggccactgaatacataatgaagggagtgtacataaacacagccc

SEQ ID NO: 51333 - DNA, 60 bp, Artificial
  Synthetic oligonucleotide
tgtgtattggaagcaatggctttccttgaagaatcccacccagggatctttgaaaactcg

SEQ ID NO: 51334 - DNA, 60 bp, Artificial
  Synthetic oligonucleotide
cgcaccaatattcagaaaaggggaagtggacaacaaacacagagactggagcaccccaac

SEQ ID NO: 51335 - DNA, 60 bp, Artificial
  Synthetic oligonucleotide
ccaccagaggagttcaaattgcttcaaatgagaacatggaaacaatggactccagcactc

SEQ ID NO: 51336 - DNA, 60 bp, Artificial
  Synthetic oligonucleotide
aaccactgtggaccatatggccataatcaagaaatacacgtcaggaagacaagagaagaa

SEQ ID NO: 51337 - DNA, 60 bp, Artificial
  Synthetic oligonucleotide
taaattaagcatcgaagacccgagtcatgagggagaggggataccgctgtatgatgcaat

SEQ ID NO: 51338 - DNA, 60 bp, Artificial
  Synthetic oligonucleotide
actcaaaaggcaatagatggagtcaccaataaggtcaactcgatcattgacaaaatgaac

SEQ ID NO: 51339 - DNA, 60 bp, Artificial
  Synthetic oligonucleotide
gataacgttcatgcaagccttacaactactgcttgaagtggagcaagagataagaacttt

SEQ ID NO: 51340 - DNA, 60 bp, Artificial
  Synthetic oligonucleotide
atggcgtctcaaggcaccaaacgatcttatgaacagatggagactggtggagaacgccag

SEQ ID NO: 51341 - DNA, 60 bp, Artificial
  Synthetic oligonucleotide
gtctcaaggcaccaaacgatcttatgagcagatggaaactggtggagaacgccagaatgc

SEQ ID NO: 51342 - DNA, 60 bp, Artificial
  Synthetic oligonucleotide
gttgagaggatttctgattctaggcaaagaagacaaaagatatggaccagcattgagcat

SEQ ID NO: 51343 - DNA, 60 bp, Artificial
  Synthetic oligonucleotide
agttgagaaacctaaatttctcccagatttgtatgactacaaagagaaccgattcatcga

SEQ ID NO: 51344 - DNA, 60 bp, Artificial
  Synthetic oligonucleotide
caccacaggagtcgagaaacctaaatttctcccagatttgtatgactacaaagagaaccg

SEQ ID NO: 51345 - DNA, 60 bp, Artificial
  Synthetic oligonucleotide
caggagtcgagaaacctaaatttctcccagatttgtatgactacaaagagaaccgattca

SEQ ID NO: 51346 - DNA, 60 bp, Artificial
  Synthetic oligonucleotide
tattgaaacaccgatttgaaataattgaaggaagagacagaacgatggcctggactgtgg

SEQ ID NO: 51347 - DNA, 60 bp, Artificial
  Synthetic oligonucleotide
tattgaaacaccgatttgaaataattgaaggaagggaccgaacgatggcctggactgtgg

SEQ ID NO: 51348 - DNA, 60 bp, Artificial
  Synthetic oligonucleotide
tattgaaacaccgatttgaaataattgaaggaagagaccgaacgattgcctggactgtgg

SEQ ID NO: 51349 - DNA, 60 bp, Artificial
  Synthetic oligonucleotide
tattgaaacaccgatttgaaataattgaaggaagagaccgaccgatggcctggactgtgg

SEQ ID NO: 51350 - DNA, 60 bp, Artificial
  Synthetic oligonucleotide
gagaaccgattcattgaaattggagtgacacggagggaagttcatacatactatctggag

SEQ ID NO: 51351 - DNA, 60 bp, Artificial
  Synthetic oligonucleotide
gtagcttttcagtgaaacaagatatagtagcaataactgattggtcaggatatagcggga

SEQ ID NO: 51352 - DNA, 60 bp, Artificial
  Synthetic oligonucleotide
gaccatgcgcagacttgcagaccaaagtctcccaccgaacttctccagccttgaaaactt

SEQ ID NO: 51353 - DNA, 60 bp, Artificial
  Synthetic oligonucleotide
aaatacggcaatggtgtttggatcgggagaaccaaaagcactaattccaggagcggcttt

SEQ ID NO: 51354 - DNA, 60 bp, Artificial
  Synthetic oligonucleotide
aatacggcaatggtgtttggatcgggagaaccaaaagcactaattccaggagcggctttg

SEQ ID NO: 51355 - DNA, 60 bp, Artificial
  Synthetic oligonucleotide
cacagacactatcaagagttggaggaacaacatactgagaactcaagagtctgaatgtgc

SEQ ID NO: 51356 - DNA, 60 bp, Artificial
  Synthetic oligonucleotide
gacactatcaagagttggaggaacaacatactgagaactcaagagtctgaatgtgcatgt

SEQ ID NO: 51357 - DNA, 60 bp, Artificial
  Synthetic oligonucleotide
aagagtctgaatgtgcatgtgtaaatggctcttgctttactgtaatgactgatggaccaa

SEQ ID NO: 51358 - DNA, 60 bp, Artificial
  Synthetic oligonucleotide
tttaaatacggcaatggtgtttggatcgggagaaccaaaagcactaattccaggagcggc

SEQ ID NO: 51359 - DNA, 60 bp, Artificial
  Synthetic oligonucleotide
gaactgacaggattagattgcataagaccttgtttctgggttgagttaatcagaggacgg

SEQ ID NO: 51360 - DNA, 60 bp, Artificial
  Synthetic oligonucleotide
gaactgacaggattagattgcataagaccttgtttctgggttgagttaatcagagggcgg

SEQ ID NO: 51361 - DNA, 60 bp, Artificial
  Synthetic oligonucleotide
gggagaaccaaaagcactaattccaggagcggctttgaaatgatttgggatccaaatggg

SEQ ID NO: 51362 - DNA, 60 bp, Artificial
  Synthetic oligonucleotide
gaactgacaggattagattgcataagaccttgtttctgggttgagttagtcagagggcgg

SEQ ID NO: 51363 - DNA, 54 bp, Artificial
  Synthetic oligonucleotide
aaaaccactgtggaccatatggccataatcaagaaatacacatcaggaagacaa

SEQ ID NO: 51364 - DNA, 60 bp, Artificial
  Synthetic oligonucleotide
tggaccatatggccataatcaagaaatacacatcaggaagacaggagaagaaccctgctc

SEQ ID NO: 51365 - DNA, 60 bp, Artificial
  Synthetic oligonucleotide
tggcgtctcaaggcaccaaacgatcttatgaacagatggaaactggtggagaacgccaga

SEQ ID NO: 51366 - DNA, 60 bp, Artificial
  Synthetic oligonucleotide
ccaacactgtgtcaagcttccaggtagactgctttctttggcatgtccgcaaacgatttg

SEQ ID NO: 51367 - DNA, 60 bp, Artificial
  Synthetic oligonucleotide
caaacactgtgtcaagcttccaggtagactgctttctttggcatgtccgcaaacgatttg

SEQ ID NO: 51368 - DNA, 60 bp, Artificial
  Synthetic oligonucleotide
gttacagtgcagaatttgcatttaaatttgtgagttcagattgtagttaaaaacaccctt

SEQ ID NO: 51369 - DNA, 60 bp, Artificial
  Synthetic oligonucleotide
tctagcatacttactgacagccagacagcgcccaaaagaattcggatggccatcaattag

SEQ ID NO: 51370 - DNA, 60 bp, Artificial
  Synthetic oligonucleotide
catacttactgacagccagacagcgcccaaaagaattcggatggccatcaattagtgtcg

SEQ ID NO: 51371 - DNA, 60 bp, Artificial
  Synthetic oligonucleotide
cagaatttgcatttgaatttgtgagttcagattgtagttaaaaacacccttgtttctact

SEQ ID NO: 51372 - DNA, 60 bp, Artificial
  Synthetic oligonucleotide
cagaatttgcatttaaatttgtgagttcagattgtagttaaaaacacccttgtttcaact

SEQ ID NO: 51373 - DNA, 60 bp, Artificial
  Synthetic oligonucleotide
cagaatttgcatttgaatctgtgagttcagattgtagttaaaaacacccttgtttctact

SEQ ID NO: 51374 - DNA, 60 bp, Artificial
  Synthetic oligonucleotide
atagatggcacggcctcattgagtcctggaatgatgatgggcatgttcaacatgctgagt

SEQ ID NO: 51375 - DNA, 60 bp, Artificial
  Synthetic oligonucleotide
cagcctcattgagtcctggaatgatgatgggcatgttcaacatgctgagtacagtcttag

SEQ ID NO: 51376 - DNA, 60 bp, Artificial
  Synthetic oligonucleotide
catggaatggctaaagacaagaccaatcctgtcacctttgactaaggggattttagggtt

SEQ ID NO: 51377 - DNA, 60 bp, Artificial
  Synthetic oligonucleotide
ggctctcatggaatggctaaagacaagaccaatcctgtcacctctgactaaggggatttt

SEQ ID NO: 51378 - DNA, 60 bp, Artificial
  Synthetic oligonucleotide
ttcatcagagggacaagagtggtcccaagaggacagctatccaccagaggggttcaaatt

SEQ ID NO: 51379 - DNA, 52 bp, Artificial
  Synthetic oligonucleotide
ttttggcctagtgtgtgccacttgtgagcagattgctgattcacagcatcgg

SEQ ID NO: 51380 - DNA, 60 bp, Artificial
  Synthetic oligonucleotide
ccaaacactgaaaataagagtacatgaggggtatgaggaattcacaatggttgggcggag

SEQ ID NO: 51381 - DNA, 60 bp, Artificial
  Synthetic oligonucleotide
actcaaaaggcaatagatggagtcaccaataaggtcaactcaatcattgacaaaatgaac

SEQ ID NO: 51382 - DNA, 60 bp, Artificial
  Synthetic oligonucleotide
ggagggtagagaatttgaacaagaaaatggaagacgggtttctagatgtttggacttaca

SEQ ID NO: 51383 - DNA, 60 bp, Artificial
  Synthetic oligonucleotide
gaagatggaagacgggtttctagatgtttggacttataatgccgagcttctggttctcat

SEQ ID NO: 51384 - DNA, 60 bp, Artificial
  Synthetic oligonucleotide
ccatatggctataatcaagaaatacacatcaggaagacaagagaagaaccctgctctcag

SEQ ID NO: 51385 - DNA, 60 bp, Artificial
  Synthetic oligonucleotide
ggtactctctggttggaatagatcctttccgtctgcttcaaaacagccaggtcttcagtc

SEQ ID NO: 51386 - DNA, 60 bp, Artificial
  Synthetic oligonucleotide
gcaaacaagagtggataaactgacccaaggtcgccagacctatgactggacattgaatag

SEQ ID NO: 51387 - DNA, 60 bp, Artificial
  Synthetic oligonucleotide
ggcataataacagacactatcaagagttggaggaacaacatactgagaactcaagagtct

SEQ ID NO: 51388 - DNA, 60 bp, Artificial
  Synthetic oligonucleotide
cctagatggagtgaagcctctaattttgagagattgtagtgtagctggatggctcctcgg

SEQ ID NO: 51389 - DNA, 60 bp, Artificial
  Synthetic oligonucleotide
tctagacggagtgaagcctctaattttaagagattgtagtgtagctggatggctcctcgg

SEQ ID NO: 51390 - DNA, 60 bp, Artificial
  Synthetic oligonucleotide
tctagatggggtgaggcctctaattttgagagattgtagtgtagctggatggctcctcgg

SEQ ID NO: 51391 - DNA, 60 bp, Artificial
  Synthetic oligonucleotide
atctagatggagtgaagcctctaattttaagagattgtagtgtagctggatggctcctcg

SEQ ID NO: 51392 - DNA, 60 bp, Artificial
  Synthetic oligonucleotide
ggcgtctcaaggcaccaaacgatcttatgaacaaatggaaactggtggagaacgccagaa

SEQ ID NO: 51393 - DNA, 60 bp, Artificial
  Synthetic oligonucleotide
tatgcaagccttacaactactgcttgaagtggagcaagagataagagccttctcgtttca

SEQ ID NO: 51394 - DNA, 52 bp, Artificial
  Synthetic oligonucleotide
atgctgtggatgttgacgatggtcattttgtcaacatagagctggagtaaaa

SEQ ID NO: 51395 - DNA, 60 bp, Artificial
  Synthetic oligonucleotide
gcaagccttacaactactgcttgaagtggagcaagagataagaactttctcgtttcagct

SEQ ID NO: 51396 - DNA, 60 bp, Artificial
  Synthetic oligonucleotide
gtctcattagaccaaatgagaatccagcacataaaagtcaactggtatggatggcatgcc

SEQ ID NO: 51397 - DNA, 60 bp, Artificial
  Synthetic oligonucleotide
ggaactatgcgcaggcttgccgaccaaagtctcccacctaatttctccagccttgagaac

SEQ ID NO: 51398 - DNA, 60 bp, Artificial
  Synthetic oligonucleotide
cacaggaacaatgcgcaggcttgccgaccaaagtctcccaccgaatttctccagccttga

SEQ ID NO: 51399 - DNA, 58 bp, Artificial
  Synthetic oligonucleotide
aaaactgggtgatgccccattccttgaccggcttcgccgagatcagaagtccctaaga

SEQ ID NO: 51400 - DNA, 60 bp, Artificial
  Synthetic oligonucleotide
ctgacaggactagattgcataagaccttgtttctgggttgagttgatcagagggcggccc

SEQ ID NO: 51401 - DNA, 60 bp, Artificial
  Synthetic oligonucleotide
ctgacagggctagattgcataagaccttgtttctgggttgagttaatcagagggcggccc

SEQ ID NO: 51402 - DNA, 60 bp, Artificial
  Synthetic oligonucleotide
ctgacaggactagattgcataagaccttgtttctgggttgagttaatcagagggcggccc

SEQ ID NO: 51403 - DNA, 60 bp, Artificial
  Synthetic oligonucleotide
ttgttcaggcacttagggacaacctggaacccgggaccttcgatcttggagggctatatg

SEQ ID NO: 51404 - DNA, 60 bp, Artificial
  Synthetic oligonucleotide
atcgagaaaactgctactcattgttcaggcacttagggacaacctggaacctggaacttt

SEQ ID NO: 51405 - DNA, 60 bp, Artificial
  Synthetic oligonucleotide
tcatatcggaggccagttggaatttccagcatggtggaggccatggtgtctagggcccga

SEQ ID NO: 51406 - DNA, 51 bp, Artificial
  Synthetic oligonucleotide
gagagtcacccaagggagtggaggaaggctccatcgggaaagtgtgcagaa

SEQ ID NO: 51407 - DNA, 60 bp, Artificial
  Synthetic oligonucleotide
cgttttcccaaatgaagtgggagctagaatattgacatcagaatcgcaattgacaataac

SEQ ID NO: 51408 - DNA, 60 bp, Artificial
  Synthetic oligonucleotide
tcgttttcccaaatgaagtgggagctagaatattgacatcagaatcgcaattgacaataa

SEQ ID NO: 51409 - DNA, 60 bp, Artificial
  Synthetic oligonucleotide
atggcgtctcaaggcaccaaacgatcttatgaacaaatggaaactggtggagaacgccag

SEQ ID NO: 51410 - DNA, 60 bp, Artificial
  Synthetic oligonucleotide
caggcaacctccagacattgaaaataagagtacatgaggggtatgaggaattcacaatgg

SEQ ID NO: 51411 - DNA, 60 bp, Artificial
  Synthetic oligonucleotide
cggctgcattgagggcaagctttctcaaatgtcaaaagaagtgaatgctagaattgaacc

SEQ ID NO: 51412 - DNA, 60 bp, Artificial
  Synthetic oligonucleotide
actcattgttcaggcacttagggacaacctggaacctggaacttttgatcttggagggct

SEQ ID NO: 51413 - DNA, 60 bp, Artificial
  Synthetic oligonucleotide
cacagagactggagcaccccaactcaacccgattgatggaccactacctgaggataatga

SEQ ID NO: 51414 - DNA, 60 bp, Artificial
  Synthetic oligonucleotide
agagactggagcaccccaactcaacccgattgatggaccactacctgaggataatgagcc

SEQ ID NO: 51415 - DNA, 60 bp, Artificial
  Synthetic oligonucleotide
ggagactggagcaccccaactcaacccgattgatggaccactacctgaggataatgagcc

SEQ ID NO: 51416 - DNA, 60 bp, Artificial
  Synthetic oligonucleotide
gagactggagcaccccaactcaacccgattgatggaccactacctgaggataatgagccc

SEQ ID NO: 51417 - DNA, 60 bp, Artificial
  Synthetic oligonucleotide
ccgagatcagaagtccctaagaggaagaggcaacactcttggtctggacatcgagacagc

SEQ ID NO: 51418 - DNA, 60 bp, Artificial
  Synthetic oligonucleotide
ataaactgacccaaggtcgccagacctatgactggacattgaatagaaaccaaccggctg

SEQ ID NO: 51419 - DNA, 60 bp, Artificial
  Synthetic oligonucleotide
cgaaaaccactgtggaccatatggccataatcaagaaatacacatcaggaagacaagaga

SEQ ID NO: 51420 - DNA, 60 bp, Artificial
  Synthetic oligonucleotide
tggaccatatggccataatcaagaaatacacatcaggaagacaagagaagaatcctgctc

SEQ ID NO: 51421 - DNA, 59 bp, Artificial
  Synthetic oligonucleotide
aaaaccactgtggaccatatggccataatcaagaaatacacatcaggaagacaagagaa

SEQ ID NO: 51422 - DNA, 60 bp, Artificial
  Synthetic oligonucleotide
caacgagcaagggagtgggtacgctgcagacaaagaatccactcaaaaggcaatagatgg

SEQ ID NO: 51423 - DNA, 59 bp, Artificial
  Synthetic oligonucleotide
tagcttttcagtgaaacaagatatcgtagcaataactgattggtcaggatatagcggga

SEQ ID NO: 51424 - DNA, 60 bp, Artificial
  Synthetic oligonucleotide
gtctcattagaccaaatgagaatccagcacataagagtcaattggtatggatggcatgcc

SEQ ID NO: 51425 - DNA, 60 bp, Artificial
  Synthetic oligonucleotide
gttacagtgcagaatttgcatctaaatttgtgagttcagattgtagttaaaaacaccctt

SEQ ID NO: 51426 - DNA, 60 bp, Artificial
  Synthetic oligonucleotide
ggcaccaaacggtcctatgaacagatggaaactggtggagaacgccagaatgctactgag

SEQ ID NO: 51427 - DNA, 60 bp, Artificial
  Synthetic oligonucleotide
ggcaccaaacggtcttatgaacagatggaaactggtggagaacgccagaatgctactgag

SEQ ID NO: 51428 - DNA, 60 bp, Artificial
  Synthetic oligonucleotide
gtctcaaggcaccaaacggtcctatgaacagatggaaactggtggagaacgccagaatgc

SEQ ID NO: 51429 - DNA, 60 bp, Artificial
  Synthetic oligonucleotide
gtctcaaggcaccaaacggtcttatgaacagatggaaactggtggagaacgccagaatgc

SEQ ID NO: 51430 - DNA, 60 bp, Artificial
  Synthetic oligonucleotide
tatgaacagatggaaactggtggagaacgccagaatgctacggagatcagggcatctgtt

SEQ ID NO: 51431 - DNA, 60 bp, Artificial
  Synthetic oligonucleotide
cttatgaacagatggaaactggtggagaacgccagaatgctacggagatcagggcatctg

SEQ ID NO: 51432 - DNA, 60 bp, Artificial
  Synthetic oligonucleotide
ggtccagacaatggggctgtggctgtattgaaatacaatggcataataacagacaccatc

SEQ ID NO: 51433 - DNA, 60 bp, Artificial
  Synthetic oligonucleotide
aaagcaggactgttggtttcagatggaggaccaaatctatacaatatccggaatctccac

SEQ ID NO: 51434 - DNA, 60 bp, Artificial
  Synthetic oligonucleotide
gggagcaaacccgctcaaaggcaggactgttggtttcagatggaggaccaaatctataca

SEQ ID NO: 51435 - DNA, 60 bp, Artificial
  Synthetic oligonucleotide
aaggcaggactgttggtttcagatggaggaccaaatctatacaatatccggaatctccac

SEQ ID NO: 51436 - DNA, 60 bp, Artificial
  Synthetic oligonucleotide
gtcccaaatatgtgaaatcaaacagattagtccttgcgactgggctcagaaatagccctc

SEQ ID NO: 51437 - DNA, 60 bp, Artificial
  Synthetic oligonucleotide
gccccaaatatgtgaaatcaaacagattagtccttgcgactgggctcagaaatagccctc

SEQ ID NO: 51438 - DNA, 60 bp, Artificial
  Synthetic oligonucleotide
atgccccaagtatgtgaaatcaaacagattagtccttgcgactgggctcagaaatagccc

SEQ ID NO: 51439 - DNA, 60 bp, Artificial
  Synthetic oligonucleotide
gaatgccccaaatatgtgaaatcaaacagattagtccttgcgactgggctcagaaatagc

SEQ ID NO: 51440 - DNA, 60 bp, Artificial
  Synthetic oligonucleotide
cttctcattgctcaggcacttagggacaacctggaacctgggaccttcgatcttggaggg

SEQ ID NO: 51441 - DNA, 60 bp, Artificial
  Synthetic oligonucleotide
ccccagcagttcatatcggaggccagttggaatttccagcatggtggaggccatggtgtc

SEQ ID NO: 51442 - DNA, 60 bp, Artificial
  Synthetic oligonucleotide
ccccagcagttcatatcggaggccagttggaatttccagcatggtggaggccatggtttc

SEQ ID NO: 51443 - DNA, 60 bp, Artificial
  Synthetic oligonucleotide
ccctagcagttcatacaggaggccagttggaatttccagcatggtggaggccatggtgtc

SEQ ID NO: 51444 - DNA, 60 bp, Artificial
  Synthetic oligonucleotide
ccctctcaccatcggggaatgccccaaatatgtgaaatcaaacagattagtccttgcaac

SEQ ID NO: 51445 - DNA, 60 bp, Artificial
  Synthetic oligonucleotide
aacagtcaggtgtttagcctcattagatcaaatgagaatccagcacataagagtcaactg

SEQ ID NO: 51446 - DNA, 60 bp, Artificial
  Synthetic oligonucleotide
aacagccaggtgtttagcctcattagatcaaatgagaatccagcacataagagtcaactg

SEQ ID NO: 51447 - DNA, 60 bp, Artificial
  Synthetic oligonucleotide
gaaatacacatcaggaagacaggagaagaatcctgctctcagaatgaaatggatgatggc

SEQ ID NO: 51448 - DNA, 60 bp, Artificial
  Synthetic oligonucleotide
ctggaaccttcgatcttggagggctatatgaagcaatcgaggagtgcctgattaatgatc

SEQ ID NO: 51449 - DNA, 60 bp, Artificial
  Synthetic oligonucleotide
ggaccttcgatcttggagggctatatgaagcaatcgaggagtgcctgattaacgatccct

SEQ ID NO: 51450 - DNA, 60 bp, Artificial
  Synthetic oligonucleotide
gagatccgaatgcattgttgaaacaccgatttgaaataattgaaggaagagaccgaacga

SEQ ID NO: 51451 - DNA, 60 bp, Artificial
  Synthetic oligonucleotide
ggaatgatgatgggcatgttcaacatgctgagtacagtcttaggggtctcaatcctgaat

SEQ ID NO: 51452 - DNA, 60 bp, Artificial
  Synthetic oligonucleotide
cagcctcattgagccctggaatgatgatgggcatgttcaacatgctgagtacagtcttag

SEQ ID NO: 51453 - DNA, 50 bp, Artificial
  Synthetic oligonucleotide
tagaccaaatgagaatccagcacataagagtcaattagtgtggatggcat

SEQ ID NO: 51454 - DNA, 60 bp, Artificial
  Synthetic oligonucleotide
gctgaatcaagaaaattgcttctcattgttcaggcacttagggacaacctggaacctggg

SEQ ID NO: 51455 - DNA, 60 bp, Artificial
  Synthetic oligonucleotide
gaagttcttccccagcagttcatatcggaggccagttggaatttccagcatggtggaggc

SEQ ID NO: 51456 - DNA, 60 bp, Artificial
  Synthetic oligonucleotide
aaaattcttccccagcagttcatatcggaggccagttggaatttccagcatggtggaggc

SEQ ID NO: 51457 - DNA, 60 bp, Artificial
  Synthetic oligonucleotide
gaaattcttccccagcagttcatatcggaggccagttggaatttccagcatggtggaggc

SEQ ID NO: 51458 - DNA, 60 bp, Artificial
  Synthetic oligonucleotide
ttcttccccagcagttcatatcggaggccagttggaatttccagcatggtggaggccatg

SEQ ID NO: 51459 - DNA, 59 bp, Artificial
  Synthetic oligonucleotide
ccagttggaatttccagcatggtggaggccatgatgtctagggcccgaattgacgcacg

SEQ ID NO: 51460 - DNA, 60 bp, Artificial
  Synthetic oligonucleotide
gggcagaacgtccgacatgaggactgaaatcataagaatgatggaaagtgccagaccaga

SEQ ID NO: 51461 - DNA, 60 bp, Artificial
  Synthetic oligonucleotide
acatgaggactgaaatcataagaatgatggaaagtgccagaccagaagacgtgtctttcc

SEQ ID NO: 51462 - DNA, 60 bp, Artificial
  Synthetic oligonucleotide
aagggtcaactctcccgaggagatctggagctgctggtgcagcagtaaagggagtcggga

SEQ ID NO: 51463 - DNA, 60 bp, Artificial
  Synthetic oligonucleotide
ccctagcactggcaatcatgatagctggtctatctttatggatgtgctccaatggatcgt

SEQ ID NO: 51464 - DNA, 60 bp, Artificial
  Synthetic oligonucleotide
cgcaaacgatttgcagaccaagaaatgggtgatgccccattccttgaccggcttcgccga

SEQ ID NO: 51465 - DNA, 60 bp, Artificial
  Synthetic oligonucleotide
gagatccgaatgcattattgaaacaccgatttgaaataattgaaggaagggaccgaacga

SEQ ID NO: 51466 - DNA, 60 bp, Artificial
  Synthetic oligonucleotide
caagcagcggaagccatggaggttgctagtcaggctaggcagatggtgcaggcaatgagg

SEQ ID NO: 51467 - DNA, 60 bp, Artificial
  Synthetic oligonucleotide
aatacaatggcataataacagacactatcaagagttggaggaacaacatactgagaactc

SEQ ID NO: 51468 - DNA, 60 bp, Artificial
  Synthetic oligonucleotide
actaatctgtatggattcattataaaaggaagatcccacttgaggaatgataccgatgtg

SEQ ID NO: 51469 - DNA, 60 bp, Artificial
  Synthetic oligonucleotide
tggcatgtccgcaaacgatttgcagaccaagaactgggtgatgccccattccttgaccgg

SEQ ID NO: 51470 - DNA, 60 bp, Artificial
  Synthetic oligonucleotide
ggattagattgcataagaccttgtttctgggttgagctaatcagagggcggcccaaagag

SEQ ID NO: 51471 - DNA, 60 bp, Artificial
  Synthetic oligonucleotide
ggggctgtggctgtattgaaatacaatggcataataacagacaccatcaagagttggagg

SEQ ID NO: 51472 - DNA, 60 bp, Artificial
  Synthetic oligonucleotide
gattgcataagaccttgtttctgggttgagttaatcagagggcggcccaaagagagcaca

SEQ ID NO: 51473 - DNA, 60 bp, Artificial
  Synthetic oligonucleotide
gggtcctcatcggaggacttgaatggaatgataacacagttcgagtctctgaagctctac

SEQ ID NO: 51474 - DNA, 60 bp, Artificial
  Synthetic oligonucleotide
cctcatcggaggacttgaatggaatgataacacagttcgagtctctgaaactatacagag

SEQ ID NO: 51475 - DNA, 60 bp, Artificial
  Synthetic oligonucleotide
tcctcatcggaggacttgaatggaatgataacacagttcgagtctctgaaactatacaga

SEQ ID NO: 51476 - DNA, 55 bp, Artificial
  Synthetic oligonucleotide
actatgaagggaggctgatccagaacagcataacaatagagagaatggttctctc

SEQ ID NO: 51477 - DNA, 60 bp, Artificial
  Synthetic oligonucleotide
tgaagggaggctgatccagaacagcataacaatagagagaatggttctctctgcatttga

SEQ ID NO: 51478 - DNA, 53 bp, Artificial
  Synthetic oligonucleotide
tgaaggaaggctgatccagaacagcataacaatagagagaatggttctctctg

SEQ ID NO: 51479 - DNA, 51 bp, Artificial
  Synthetic oligonucleotide
tgaaggaaggctgatccagaacagcataacaatagagagaatggttctctc

SEQ ID NO: 51480 - DNA, 60 bp, Artificial
  Synthetic oligonucleotide
actatgaagggaggctgatccagaacagcataacaatagagagaatggttctctctgcat

SEQ ID NO: 51481 - DNA, 51 bp, Artificial
  Synthetic oligonucleotide
tgaagggaggctgatccagaacagcataacaatagagagaatggttctctc

SEQ ID NO: 51482 - DNA, 60 bp, Artificial
  Synthetic oligonucleotide
catctgacatgaggactgaaatcataagaatgatggaaagtgccagaccagaagatgtgt

SEQ ID NO: 51483 - DNA, 60 bp, Artificial
  Synthetic oligonucleotide
gcagaacgtctgacatgaggactgaaatcataagaatgatggaaagtgccagaccagagg

SEQ ID NO: 51484 - DNA, 60 bp, Artificial
  Synthetic oligonucleotide
gggcagaacttctgacatgaggactgaaatcataagaatgatggaaagtgccagaccaga

SEQ ID NO: 51485 - DNA, 60 bp, Artificial
  Synthetic oligonucleotide
cgcactcgcgagatactaacaaaaaccactgtggaccatatggccataatcaagaaatac

SEQ ID NO: 51486 - DNA, 60 bp, Artificial
  Synthetic oligonucleotide
agtccctccttttttagaaatgtggtatggcttatcaaaaagaacagtacatacccaaca

SEQ ID NO: 51487 - DNA, 60 bp, Artificial
  Synthetic oligonucleotide
agatctaatgtcacagtcccgcactcgcgagatactgacaaaaaccactgtggaccatat

SEQ ID NO: 51488 - DNA, 50 bp, Artificial
  Synthetic oligonucleotide
gatcttatttcttcggagacaatgcagaggagtatgacaattaaagaaaa

SEQ ID NO: 51489 - DNA, 60 bp, Artificial
  Synthetic oligonucleotide
ttggtgatccaaatgtgttattgaaacaccgatttgaaataattgaaggaagagaccgaa

SEQ ID NO: 51490 - DNA, 60 bp, Artificial
  Synthetic oligonucleotide
agtgttggtaatgaaacggaaacgggactctagcatacttactgacagccagacagcgac

SEQ ID NO: 51491 - DNA, 60 bp, Artificial
  Synthetic oligonucleotide
ctgcaaaacagtcaggtgtttagcctcattagaccaaatgagaatccagcacataagagt

SEQ ID NO: 51492 - DNA, 60 bp, Artificial
  Synthetic oligonucleotide
gaggactgaaatcataagaatgatggaaagtgccagaccagaagacgtgtctttccaggg

SEQ ID NO: 51493 - DNA, 60 bp, Artificial
  Synthetic oligonucleotide
ttggaatttccagcatggtggaggccatggtgtccagggcccgaattgacgcacgaattg

SEQ ID NO: 51494 - DNA, 60 bp, Artificial
  Synthetic oligonucleotide
ttggaatttccagcatggtggaggccatggtgtccagggcccgaattgatgcacgaattg

SEQ ID NO: 51495 - DNA, 60 bp, Artificial
  Synthetic oligonucleotide
ctgggaccttcgatcttggagggctatatgaagcaattgaggagtgcctgattaatgatc

SEQ ID NO: 51496 - DNA, 51 bp, Artificial
  Synthetic oligonucleotide
agtgctgtggatgttgacgatggtcattttgtcaacatagagttggagtaa

SEQ ID NO: 51497 - DNA, 60 bp, Artificial
  Synthetic oligonucleotide
ggcaggagcaacagagtgctgtggatgttgacgatggtcattttgtcaacatagagctgg

SEQ ID NO: 51498 - DNA, 54 bp, Artificial
  Synthetic oligonucleotide
agtgctgtggatgttgacgatggtcattttgtcaacatagaattggagtcaaaa

SEQ ID NO: 51499 - DNA, 53 bp, Artificial
  Synthetic oligonucleotide
agtgctgtggatgttgacgatggtcattttgtcaacatagaactggagtaaaa

SEQ ID NO: 51500 - DNA, 60 bp, Artificial
  Synthetic oligonucleotide
tcgcgagatactaacaaaaaccactgtggaccatatggccataatcaagaaatacacatc

SEQ ID NO: 51501 - DNA, 60 bp, Artificial
  Synthetic oligonucleotide
cgagatactaacaaaaaccactgtggaccatatggccataatcaagaaatacacgtcagg

SEQ ID NO: 51502 - DNA, 60 bp, Artificial
  Synthetic oligonucleotide
ctcagcatgtccataccagggaaggtcctccttttttagaaatgtggtatggcttatcaa

SEQ ID NO: 51503 - DNA, 60 bp, Artificial
  Synthetic oligonucleotide
atttctcccagatttgtatgactacaaagagaaccgattcattgaaattggagtgacacg

SEQ ID NO: 51504 - DNA, 60 bp, Artificial
  Synthetic oligonucleotide
cgtcgccttaaatacggtttgaaaagagggccttctacggaaggagtgcctgagtccatg

SEQ ID NO: 51505 - DNA, 60 bp, Artificial
  Synthetic oligonucleotide
tcgtcgccttaaatacggtttgaaaagagggccttctacggaaggagtacctgagtctat

SEQ ID NO: 51506 - DNA, 60 bp, Artificial
  Synthetic oligonucleotide
cgtcgccttaaatacggtttgaaaagagggccttctacggcaggggcacctgagtctatg

SEQ ID NO: 51507 - DNA, 60 bp, Artificial
  Synthetic oligonucleotide
cgtcgccttaaatacggtttgaaaagagggccttctacgaaaggagtgcctgagtctatg

SEQ ID NO: 51508 - DNA, 60 bp, Artificial
  Synthetic oligonucleotide
aaatacacatcaggaagacaggagaagaaccctgctctcagaatgaaatggatgatggcg

SEQ ID NO: 51509 - DNA, 60 bp, Artificial
  Synthetic oligonucleotide
caggggagcggatacgctgcagacaaagaatccactcaaaaggcaatagatggagtcacc

SEQ ID NO: 51510 - DNA, 60 bp, Artificial
  Synthetic oligonucleotide
aaacgatttgcagaccaagaactgggtgatgccccatttctagaccggcttcgccgagat

SEQ ID NO: 51511 - DNA, 60 bp, Artificial
  Synthetic oligonucleotide
gcaaacgatttgcagaccaagaactgggtgatgccccatttctagaccggcttcgccgag

SEQ ID NO: 51512 - DNA, 58 bp, Artificial
  Synthetic oligonucleotide
ttttttagaaatgtggtatggcttatcaaaaaggacaatgcatacccaacaataaaga

SEQ ID NO: 51513 - DNA, 60 bp, Artificial
  Synthetic oligonucleotide
tgcattattgaaacaccgatttgaaataattgaaggaagagaccgaacgatggcctggac

SEQ ID NO: 51514 - DNA, 60 bp, Artificial
  Synthetic oligonucleotide
tattgaaacaccgatttgaaataattgaaggaagagaccgaacgatggcctggactgtgg

SEQ ID NO: 51515 - DNA, 60 bp, Artificial
  Synthetic oligonucleotide
tgttgaaacaccgatttgaaataattgaaggaagagaccgaacgatggcctggactgtgg

SEQ ID NO: 51516 - DNA, 60 bp, Artificial
  Synthetic oligonucleotide
gaaacaccgatttgaaataattgaaggaagagaccgaacgatggcctggactgtggtgaa

SEQ ID NO: 51517 - DNA, 56 bp, Artificial
  Synthetic oligonucleotide
ggcaactatcaccaacccactaatcaggcatgagaacagaatggtgctggccagca

SEQ ID NO: 51518 - DNA, 60 bp, Artificial
  Synthetic oligonucleotide
caaattcatttatcgtcgccttaaatacggtttgaaaagagggccttctacggcaggggc

SEQ ID NO: 51519 - DNA, 60 bp, Artificial
  Synthetic oligonucleotide
caaattcatttatcgtcgccttaaatacggtttgaaaagagggccttctacggcaggggt

SEQ ID NO: 51520 - DNA, 60 bp, Artificial
  Synthetic oligonucleotide
caaatgcatttatcgtcgccttaaatacggtttgaaaagagggccttctacggaaggggt

SEQ ID NO: 51521 - DNA, 60 bp, Artificial
  Synthetic oligonucleotide
aaatgtatttatcgtcgccttaaatacggtttgaaaggagggccttctacggaaggagtg

SEQ ID NO: 51522 - DNA, 60 bp, Artificial
  Synthetic oligonucleotide
caaattcatttatcgtcgccttaaatacggtttgaaaagagggccttctatggcaggggt

SEQ ID NO: 51523 - DNA, 60 bp, Artificial
  Synthetic oligonucleotide
caaatgcatttatcgtcgccttaaatacggtttgaaaagagggccttctacggcaggggt

SEQ ID NO: 51524 - DNA, 60 bp, Artificial
  Synthetic oligonucleotide
caaatgcctttatcgtcgccttaaatacggtttgaaaagagggcctgctacggcaggggt

SEQ ID NO: 51525 - DNA, 60 bp, Artificial
  Synthetic oligonucleotide
caaatgcatttatcgtcgccttaaatacggtttgaaaagagggcctgctacggcaggggt

SEQ ID NO: 51526 - DNA, 60 bp, Artificial
  Synthetic oligonucleotide
caaatgcatttatcgtcgccttaaatacggtttgaaaagagggccttccacggaaggagt

SEQ ID NO: 51527 - DNA, 60 bp, Artificial
  Synthetic oligonucleotide
agttccctagcactggcaatcatgatagctggtctatctttatggatgtgctccaatgga

SEQ ID NO: 51528 - DNA, 60 bp, Artificial
  Synthetic oligonucleotide
gcgaaagcaggagttcaaaatgaatccaaatcagaagataataaccatcggatcaatctg

SEQ ID NO: 51529 - DNA, 60 bp, Artificial
  Synthetic oligonucleotide
gcgaaagcaggagttcaaaatgaatccaaatcagaagataacaaccatcggatcaatctg

SEQ ID NO: 51530 - DNA, 60 bp, Artificial
  Synthetic oligonucleotide
gcaaaagcaggagttcaaaatgaatccaaatcagaagataataactattgggtcaatctg

SEQ ID NO: 51531 - DNA, 60 bp, Artificial
  Synthetic oligonucleotide
agcgaaagcaggagttcaaaatgaatccaaatcagaagataataaccatcggatcaatct

SEQ ID NO: 51532 - DNA, 60 bp, Artificial
  Synthetic oligonucleotide
agcaaaagcaggagttcaaaatgaatccaaatcagaagataataaccatcggatcaatct

SEQ ID NO: 51533 - DNA, 60 bp, Artificial
  Synthetic oligonucleotide
agcaaaagcaggagttcaaaatgaatccaaatcagaagataataactattgggtcaatct

SEQ ID NO: 51534 - DNA, 60 bp, Artificial
  Synthetic oligonucleotide
agcgaaagcaggagttcaaaatgaatccaaatcagaagataacaaccatcggatcaatct

SEQ ID NO: 51535 - DNA, 60 bp, Artificial
  Synthetic oligonucleotide
agcaaaagcaggagttcaaaatgaatccaaatcagaagataatgaccatcggatcaatct

SEQ ID NO: 51536 - DNA, 60 bp, Artificial
  Synthetic oligonucleotide
gcaggagttcaaaatgaatccaaatcagaagataataaccatcggatcaatctgtatggt

SEQ ID NO: 51537 - DNA, 60 bp, Artificial
  Synthetic oligonucleotide
gcaggagttcaaaatgaatccaaatcagaagataatgaccatcggatcaatctgtatggt

SEQ ID NO: 51538 - DNA, 60 bp, Artificial
  Synthetic oligonucleotide
caatgagcaggggagcggatacgctgcagacaaagaatccactcaaaaggcaatagatgg

SEQ ID NO: 51539 - DNA, 55 bp, Artificial
  Synthetic oligonucleotide
caaaagatatggaccagcattgagcatcaatgaactgagcaatcttgcgaagggg

SEQ ID NO: 51540 - DNA, 60 bp, Artificial
  Synthetic oligonucleotide
caaaagatatggaccagcattgagcatcaatgaactgagcaatcttgcgaagggggagaa

SEQ ID NO: 51541 - DNA, 60 bp, Artificial
  Synthetic oligonucleotide
ggaatttctggcccagacaatgaggctgtggctgtattgaaatacaatggcataataaca

SEQ ID NO: 51542 - DNA, 57 bp, Artificial
  Synthetic oligonucleotide
ggattcggatggccatcaattagtgtcgaattgtttaaaaacgaccttgtttctact

SEQ ID NO: 51543 - DNA, 60 bp, Artificial
  Synthetic oligonucleotide
caaaagaattcggatggccatcaattagtgtcgaattgtttaaaaacgaccttgtttcta

SEQ ID NO: 51544 - DNA, 53 bp, Artificial
  Synthetic oligonucleotide
tcggatggccatcaattagtgtcgaattgtttaaaaacgaccttgtttctact

SEQ ID NO: 51545 - DNA, 60 bp, Artificial
  Synthetic oligonucleotide
atggctttccttgaagaatcccacccagggatctttgaaaactcgtgtcttgaaacgatg

SEQ ID NO: 51546 - DNA, 60 bp, Artificial
  Synthetic oligonucleotide
tgaagacctgagggtatcaagcttcatcagagggacaagagtggtcccaagaggacaact

SEQ ID NO: 51547 - DNA, 60 bp, Artificial
  Synthetic oligonucleotide
catggtggaggccatggtgtctagggcccgaattgacgcacgaattgatttcgaatctgg

SEQ ID NO: 51548 - DNA, 60 bp, Artificial
  Synthetic oligonucleotide
ttgtgtattggaagcaatggctttccttgaagaatcccacccagggatctttgaaaactc

SEQ ID NO: 51549 - DNA, 60 bp, Artificial
  Synthetic oligonucleotide
ttggaagcaatggctttccttgaagaatcccacccagggatctttgaaaactcgtgtctt

SEQ ID NO: 51550 - DNA, 60 bp, Artificial
  Synthetic oligonucleotide
ttttagggtttgtgtttacgctcaccgtgcccagtgagcgaggactgcagcgtagacgat

SEQ ID NO: 51551 - DNA, 60 bp, Artificial
  Synthetic oligonucleotide
aggggattttagggtttgtgtttacgctcaccgtgcccagtgagcgaggactgcagcgta

SEQ ID NO: 51552 - DNA, 60 bp, Artificial
  Synthetic oligonucleotide
ccaggagcggctttgaaatgatttgggatccaaatgggtggacaggaacggacagtagct

SEQ ID NO: 51553 - DNA, 60 bp, Artificial
  Synthetic oligonucleotide
ccaggagcggctttgaaatgatttgggatccaaatgggtggactggaacggacagcagct

SEQ ID NO: 51554 - DNA, 60 bp, Artificial
  Synthetic oligonucleotide
ccaggagcggctttgaaatgatttgggatccaaatgggtggactggaacggacagtaatt

SEQ ID NO: 51555 - DNA, 60 bp, Artificial
  Synthetic oligonucleotide
agcggctttgaaatgatttgggatccaaatgggtggactgaaacggacagtagcttttca

SEQ ID NO: 51556 - DNA, 60 bp, Artificial
  Synthetic oligonucleotide
gcggctttgaaatgatttgggatccaaatgggtggactgaaacggacagtagcttttcag

SEQ ID NO: 51557 - DNA, 58 bp, Artificial
  Synthetic oligonucleotide
gggctatatgaagcaattgaggagtgcctgattaacgatccctgggttttgcttaatg

SEQ ID NO: 51558 - DNA, 60 bp, Artificial
  Synthetic oligonucleotide
gggctatatgaagcaattgaggagtgcctgattaacgatccctgggttttgcttaatgcg

SEQ ID NO: 51559 - DNA, 60 bp, Artificial
  Synthetic oligonucleotide
cgagatactgacaaaaaccactgtggaccatatggccataatcaagaaatacacatcagg

SEQ ID NO: 51560 - DNA, 60 bp, Artificial
  Synthetic oligonucleotide
cgagatactaacgaaaaccactgtggaccatatggccataatcaagaaatacacatcagg

SEQ ID NO: 51561 - DNA, 60 bp, Artificial
  Synthetic oligonucleotide
cccattgcagggccactgaatacataatgaagggagtgtacataaacacagccctgttga

SEQ ID NO: 51562 - DNA, 56 bp, Artificial
  Synthetic oligonucleotide
tcattagatcaaatgagaatccagcacataagagtcaactggtatggatggcatgc

SEQ ID NO: 51563 - DNA, 60 bp, Artificial
  Synthetic oligonucleotide
accttagagtctcaagtttcatcagagggacaagagtggtcccaagaggacagctatcca

SEQ ID NO: 51564 - DNA, 60 bp, Artificial
  Synthetic oligonucleotide
ttgaccggcttcgccgagatcagaagtccctaagaggaagaggcagcactcttggtctgg

SEQ ID NO: 51565 - DNA, 60 bp, Artificial
  Synthetic oligonucleotide
caggtgtttagcctcattagaccaaatgagaatccagcacataagagtcaactggtatgg

SEQ ID NO: 51566 - DNA, 60 bp, Artificial
  Synthetic oligonucleotide
gaatcgagaaaattgcttctaattgttcaggcacttagggacaacctggaacctgggacc

SEQ ID NO: 51567 - DNA, 60 bp, Artificial
  Synthetic oligonucleotide
gctgaatcaagaaaattgcttctcattgctcaggcacttagggacaacctggaacctggg

SEQ ID NO: 51568 - DNA, 60 bp, Artificial
  Synthetic oligonucleotide
ttggaagcaatggctttccttgaagaatcccacccaggaatctttgaaaactcgtgtctt

SEQ ID NO: 51569 - DNA, 59 bp, Artificial
  Synthetic oligonucleotide
ccagttggaatttccagcatggtggaggccatggtgtctagggcccgaattgacgcacg

SEQ ID NO: 51570 - DNA, 60 bp, Artificial
  Synthetic oligonucleotide
aagaaaattgcttctcattgttcaggcacttagggacaacctggaacctgggaccttcga

SEQ ID NO: 51571 - DNA, 60 bp, Artificial
  Synthetic oligonucleotide
gcttttggcctagtgtgtgccacttgtgagcagattgctgattcacagcatcggtctcac

SEQ ID NO: 51572 - DNA, 60 bp, Artificial
  Synthetic oligonucleotide
tggaagcaatggctttccttgaagaatcccacccagggatctttgaaaattcgtgtcttg

SEQ ID NO: 51573 - DNA, 60 bp, Artificial
  Synthetic oligonucleotide
ctcaccgagtgacatcaacatcatggcgtctcaaggcaccaaacgatcttatgaacagat

SEQ ID NO: 51574 - DNA, 60 bp, Artificial
  Synthetic oligonucleotide
gtgacatcaacatcatggcgtctcaaggcaccaaacgatcttatgaacagatggaaactg

SEQ ID NO: 51575 - DNA, 60 bp, Artificial
  Synthetic oligonucleotide
ggttttacatacagatgtgcacagaactcaaactcagtgactatgaagggaggctgatcc

SEQ ID NO: 51576 - DNA, 60 bp, Artificial
  Synthetic oligonucleotide
gggaggttttacatacagatgtgcacagaactcaaactcagtgactatgaagggaggctg

SEQ ID NO: 51577 - DNA, 60 bp, Artificial
  Synthetic oligonucleotide
gatggaagacgggtttctagatgtttggacttataatgccgaacttctggttctcatgga

SEQ ID NO: 51578 - DNA, 60 bp, Artificial
  Synthetic oligonucleotide
cgtcgccttaaatacggtttgaaaagagggccttctacggaaggagtgcctgagtctatg

SEQ ID NO: 51579 - DNA, 60 bp, Artificial
  Synthetic oligonucleotide
ttttagggtttgtgttcacgctcaccgtgcccagtgagcgaggactgcagcgtagacgct

SEQ ID NO: 51580 - DNA, 51 bp, Artificial
  Synthetic oligonucleotide
caatagatggagtcaccaataaggtcaactcaattattgacaaaatgaaca

SEQ ID NO: 51581 - DNA, 60 bp, Artificial
  Synthetic oligonucleotide
gggaacggtgaccacagaagtggcttttggcctagtgtgtgccacttgtgagcagattgc

SEQ ID NO: 51582 - DNA, 60 bp, Artificial
  Synthetic oligonucleotide
ctcattactcaggcacttagggacaacctggaacctgggaccttcgatcttggagggcta

SEQ ID NO: 51583 - DNA, 60 bp, Artificial
  Synthetic oligonucleotide
gagatccgaacgcattattgaaacaccgatttgaaataattgaaggaagagaccgaacga

SEQ ID NO: 51584 - DNA, 60 bp, Artificial
  Synthetic oligonucleotide
gagatcagaatgcattattgaaacaccgatttgaaataattgaaggaagagaccgaacga

SEQ ID NO: 51585 - DNA, 60 bp, Artificial
  Synthetic oligonucleotide
gcaataaactctagtatgccattccacaacatacaccctctcaccatcggggaatgcccc

SEQ ID NO: 51586 - DNA, 60 bp, Artificial
  Synthetic oligonucleotide
agcaaaagcagggtgacaaagacataatggattccaacactgtgttaagctttcaggtag

SEQ ID NO: 51587 - DNA, 60 bp, Artificial
  Synthetic oligonucleotide
gcaaaagcagggtgacaaagacataatggattccaacacgataacctcgtttcaggtaga

SEQ ID NO: 51588 - DNA, 60 bp, Artificial
  Synthetic oligonucleotide
agcaaaagcagggtgacaaagacataatggattccaacacgataacctcgtttcaggtag

SEQ ID NO: 51589 - DNA, 60 bp, Artificial
  Synthetic oligonucleotide
ccgattggtcaggatatagcgggagttttgtccagcacccagaaatgacaggattagatt

SEQ ID NO: 51590 - DNA, 60 bp, Artificial
  Synthetic oligonucleotide
acacatgctcaagacatactggaaaagacacacaacgggaagctctgcgatctagatgga

SEQ ID NO: 51591 - DNA, 60 bp, Artificial
  Synthetic oligonucleotide
gaacgttactgttacacatgcccaagacatactggaaaagacacacaacgggaagctctg

SEQ ID NO: 51592 - DNA, 60 bp, Artificial
  Synthetic oligonucleotide
ctgaaacacctattgagcagaataaaccattttgagaaaattcagatcatccccaaaagt

SEQ ID NO: 51593 - DNA, 60 bp, Artificial
  Synthetic oligonucleotide
tgttgaaagatgagtcttctaaccgaggtcgaaacgtacgttctctctatcatcccgtca

SEQ ID NO: 51594 - DNA, 60 bp, Artificial
  Synthetic oligonucleotide
gtatggaaagtgtaagaaacgggacatatgactacccacagtattcagaagaagcaagat

SEQ ID NO: 51595 - DNA, 60 bp, Artificial
  Synthetic oligonucleotide
ggtcgaagttcttgctgatggatgctctaaaattaagcattgaggacccgagtcatgaag

SEQ ID NO: 51596 - DNA, 60 bp, Artificial
  Synthetic oligonucleotide
ggtcaaaattcttgctgatggatgccctaaaattaagcattgaggacccgagtcatgaag

SEQ ID NO: 51597 - DNA, 60 bp, Artificial
  Synthetic oligonucleotide
agaaccaaagaaggaagacggaaaactaatctgtatggattcattataaaaggaagatcc

SEQ ID NO: 51598 - DNA, 55 bp, Artificial
  Synthetic oligonucleotide
gagttccctagcactggcaatcatgatagctggtctatctttatggatgtgctcc

SEQ ID NO: 51599 - DNA, 54 bp, Artificial
  Synthetic oligonucleotide
agttccctagcactggcaatcatgatagctggtctatctttatggatgtgctcc

SEQ ID NO: 51600 - DNA, 55 bp, Artificial
  Synthetic oligonucleotide
agaaatgggtgatgccccattccttgaccggcttcgccgagatcagaagtcccta

SEQ ID NO: 51601 - DNA, 60 bp, Artificial
  Synthetic oligonucleotide
acagacagatggcaactatcaccaacccactaatcaggcatgagaacagaatggtgctgg

SEQ ID NO: 51602 - DNA, 51 bp, Artificial
  Synthetic oligonucleotide
ttagaccaaatgagaatccagcacataagagtcaattagtatggatggcat

SEQ ID NO: 51603 - DNA, 51 bp, Artificial
  Synthetic oligonucleotide
ttagaccaaatgagaatccagcacataagagtcaattagtgtggatggcat

SEQ ID NO: 51604 - DNA, 55 bp, Artificial
  Synthetic oligonucleotide
gaacggctgcattgagggcaagctttctcaaatgtcaaaagaagtgaatgccaaa

SEQ ID NO: 51605 - DNA, 55 bp, Artificial
  Synthetic oligonucleotide
gaacggctgcattgagggcaagctttctcaaatgtcaaaagaagtgaacgccaga

SEQ ID NO: 51606 - DNA, 60 bp, Artificial
  Synthetic oligonucleotide
gaacggctgcattgagggcaagctttctcaaatgtccaaagaagtgaacgccaggattga

SEQ ID NO: 51607 - DNA, 55 bp, Artificial
  Synthetic oligonucleotide
gaacggctgcattgagggcaagctttctcaaatgtccaaagaagtgaatgccaga

SEQ ID NO: 51608 - DNA, 60 bp, Artificial
  Synthetic oligonucleotide
gaacggctgcattgagggcaagctttctcaaatgtctaaagaagtgaacgccagaattga

SEQ ID NO: 51609 - DNA, 60 bp, Artificial
  Synthetic oligonucleotide
gaacggctgcattgagggcaagctttctcaaatgtcaaaagaagtgaatgccagaatcga

SEQ ID NO: 51610 - DNA, 60 bp, Artificial
  Synthetic oligonucleotide
aaaggagaatagagaatttaaacaagaagatggaagacgggtttctagatgtttggactt

SEQ ID NO: 51611 - DNA, 60 bp, Artificial
  Synthetic oligonucleotide
aaccatgcgcaggcttgccgaccaaagtctcccaccgaacttctccagccttgaaaactt

SEQ ID NO: 51612 - DNA, 51 bp, Artificial
  Synthetic oligonucleotide
gcaatagtcagtcttgttaaaagtgaccagatttgcattggttaccatgca

SEQ ID NO: 51613 - DNA, 58 bp, Artificial
  Synthetic oligonucleotide
aaaactgggtgatgccccatttctagaccggcttcgccgagatcagaagtccctaaga

SEQ ID NO: 51614 - DNA, 60 bp, Artificial
  Synthetic oligonucleotide
acgttactgttacacatgcccaagacatactggaaaagacacacaacgggaagctctgcg

SEQ ID NO: 51615 - DNA, 60 bp, Artificial
  Synthetic oligonucleotide
cgttactgttacacatgcccaagacatactggaaaagacacacaacgggaagctctgcga

SEQ ID NO: 51616 - DNA, 60 bp, Artificial
  Synthetic oligonucleotide
ccagaatatgcatacaaaattgtcaagaaaggggactcagcaattatgaaaagtgaattg

SEQ ID NO: 51617 - DNA, 60 bp, Artificial
  Synthetic oligonucleotide
cgactatgaagggaggctgatccagaacagcataacaatagagagaatggttctctctgc

SEQ ID NO: 51618 - DNA, 57 bp, Artificial
  Synthetic oligonucleotide
tgactatgaagggaggctgatccagaacagcataacaatagagagaatggttctctc

SEQ ID NO: 51619 - DNA, 57 bp, Artificial
  Synthetic oligonucleotide
cgactatgaagggaggctgatccagaacagcataacaatagagagaatggttctctc

SEQ ID NO: 51620 - DNA, 60 bp, Artificial
  Synthetic oligonucleotide
tgactatgaagggaggctgatccagaacagcataacaatagagagaatggttctctctgc

SEQ ID NO: 51621 - DNA, 60 bp, Artificial
  Synthetic oligonucleotide
gaccatgcgcagacttgcagaccaaagtctcccaccgaacttctccagccttgaaaaatt

SEQ ID NO: 51622 - DNA, 57 bp, Artificial
  Synthetic oligonucleotide
gaccatgcgcagacttgcagaccaaagtctcccaccgaacttctccagccttgaaaa

SEQ ID NO: 51623 - DNA, 60 bp, Artificial
  Synthetic oligonucleotide
tgggaagtccctccttttttagaaatgtggtatggcttatcaaaaagaacagtacatacc

SEQ ID NO: 51624 - DNA, 60 bp, Artificial
  Synthetic oligonucleotide
cctctgatgatttcgctctcatcgtaaatgcaccgaatcatgagggaatacaagcaggag

SEQ ID NO: 51625 - DNA, 60 bp, Artificial
  Synthetic oligonucleotide
atcctctgatgatttcgctctcatcgtaaatgcaccgaatcatgagggaatacaagcagg

SEQ ID NO: 51626 - DNA, 60 bp, Artificial
  Synthetic oligonucleotide
tcctctgatgatttcgctctcatcgtaaatgcaccgaatcatgagggaatacaagcagga

SEQ ID NO: 51627 - DNA, 60 bp, Artificial
  Synthetic oligonucleotide
cgaggctggagccacacaagtgggaaaagtactgtgttctcgagataggagacatgctcc

SEQ ID NO: 51628 - DNA, 60 bp, Artificial
  Synthetic oligonucleotide
tactgacccgaggctggagccacacaagtgggaaaagtactgtgtccttgagataggaga

SEQ ID NO: 51629 - DNA, 60 bp, Artificial
  Synthetic oligonucleotide
actgatccgaggctggagccacacaagtgggaaaagtactgtgtcctcgagataggagac

SEQ ID NO: 51630 - DNA, 60 bp, Artificial
  Synthetic oligonucleotide
cccgaggctggagccacacaagtgggaaaagtactgtgttctcgagataggagacatgct

SEQ ID NO: 51631 - DNA, 60 bp, Artificial
  Synthetic oligonucleotide
ccgaggctggagccacacaagtgggaaaagtactgtgttcttgaaataggggacatgctc

SEQ ID NO: 51632 - DNA, 60 bp, Artificial
  Synthetic oligonucleotide
cgaggctggagccacacaagtgggaaaagtactgtgttcttgaaataggagacatgctcc

SEQ ID NO: 51633 - DNA, 56 bp, Artificial
  Synthetic oligonucleotide
caatactaaatttcttactgagaaagctgtggcttcagtaacattagcgggcaatt

SEQ ID NO: 51634 - DNA, 60 bp, Artificial
  Synthetic oligonucleotide
ttatgaacagatggaaactggtggagaacgccagaatgctactgagatcagggcatctgt

SEQ ID NO: 51635 - DNA, 60 bp, Artificial
  Synthetic oligonucleotide
gcatggtggaggccatggtgtctagggcccgaattgacgcacgaattgatttcgagtctg

SEQ ID NO: 51636 - DNA, 60 bp, Artificial
  Synthetic oligonucleotide
cagatgtgcactgaactcaaactcagcgactatgaagggaggctgatccagaacagcata

SEQ ID NO: 51637 - DNA, 60 bp, Artificial
  Synthetic oligonucleotide
gtagcttctcggtgaaacaagatatagtagcaataactgattggtcaggatatagcggga

SEQ ID NO: 51638 - DNA, 60 bp, Artificial
  Synthetic oligonucleotide
caccgatctcgaggctctcatggaatggctgaagacaagaccaatcctgtcacctctgac

SEQ ID NO: 51639 - DNA, 60 bp, Artificial
  Synthetic oligonucleotide
caaatgcatttatcgtcgccttaaatacggtttgaaaagagggccttctaagacaggggt

SEQ ID NO: 51640 - DNA, 60 bp, Artificial
  Synthetic oligonucleotide
gcgtactggaatggaccccaggatgtgctctctgatgcaaggatcaactctcccgaggag

SEQ ID NO: 51641 - DNA, 60 bp, Artificial
  Synthetic oligonucleotide
cgggatcaagtgagcaggcagcggaagccatggaggtcgctaatcaggctaggcaaatgg

SEQ ID NO: 51642 - DNA, 60 bp, Artificial
  Synthetic oligonucleotide
catcagcaataccaattttcttactgagaaagctgtggcttcagtaacattagcgggcaa

SEQ ID NO: 51643 - DNA, 60 bp, Artificial
  Synthetic oligonucleotide
gtggatacgctgcagatagagaatccactcaaaaggcaatagatggagtcaccaataagg

SEQ ID NO: 51644 - DNA, 60 bp, Artificial
  Synthetic oligonucleotide
accggcttcgccgagatcagaagtccctaagaggaaggggcaacactcttggtctggaca

SEQ ID NO: 51645 - DNA, 60 bp, Artificial
  Synthetic oligonucleotide
attttaagagattgtagtgtagctggatggctcctcgggaacccaatgtgtgatgaattc

SEQ ID NO: 51646 - DNA, 60 bp, Artificial
  Synthetic oligonucleotide
attttaagagattgtagtgtagctggatggctcctcgggaacccaatgtgtgacgaattc

SEQ ID NO: 51647 - DNA, 60 bp, Artificial
  Synthetic oligonucleotide
ttaagagattgtagtgtagctggatggctcctcgggaacccaatgtgtgatgaattcatc

SEQ ID NO: 51648 - DNA, 56 bp, Artificial
  Synthetic oligonucleotide
ggggttcctaattctaggcaaggaggacaaaagatatggaccagcattgagcatca

SEQ ID NO: 51649 - DNA, 60 bp, Artificial
  Synthetic oligonucleotide
gaagtggcttttggcctagtgtgtgccacttgtgagcagattgctgattcacagcatcgg

SEQ ID NO: 51650 - DNA, 60 bp, Artificial
  Synthetic oligonucleotide
agaagtggcttttggcctagtgtgtgccacttgtgagcagattgctgattcacagcatcg

SEQ ID NO: 51651 - DNA, 60 bp, Artificial
  Synthetic oligonucleotide
caacgagtgacatcaacatcatggcgtctcaaggcaccaaacgatcttatgaacagatgg

SEQ ID NO: 51652 - DNA, 60 bp, Artificial
  Synthetic oligonucleotide
actcaccgagtgacatcaacatcatggcgtctcaaggcaccaaacgatcttatgaacaga

SEQ ID NO: 51653 - DNA, 60 bp, Artificial
  Synthetic oligonucleotide
cttcagtctcattagaccaaatgagaatccagcacataaaagtcaactggtatggatggc

SEQ ID NO: 51654 - DNA, 60 bp, Artificial
  Synthetic oligonucleotide
ggacctgagagtctcaagtttcatcagagggacaagagtggtcccaagaggacagctatc

SEQ ID NO: 51655 - DNA, 60 bp, Artificial
  Synthetic oligonucleotide
gccgatctcgaggctctcatggagtggctaaagacaagaccaatcctgtcacctctgact

SEQ ID NO: 51656 - DNA, 60 bp, Artificial
  Synthetic oligonucleotide
agaaaaggggaagtggacaacaaacacagagactggagcaccccaactcaacccgattga

SEQ ID NO: 51657 - DNA, 60 bp, Artificial
  Synthetic oligonucleotide
ggggaagtggacaacaaacacagagactggagcaccccaactcaacccgattgatgggcc

SEQ ID NO: 51658 - DNA, 60 bp, Artificial
  Synthetic oligonucleotide
ggggaagtggacaacaaacacagagactggagcaccccaactcaacccgattgatggacc

SEQ ID NO: 51659 - DNA, 60 bp, Artificial
  Synthetic oligonucleotide
gaaaggggaaagtggacaacaaacacagagactggagcaccccaactcaacccgattgat

SEQ ID NO: 51660 - DNA, 60 bp, Artificial
  Synthetic oligonucleotide
gaaaaggggaagtggacaacaaacacagagactggagcaccccaactcaacccgattgat

SEQ ID NO: 51661 - DNA, 60 bp, Artificial
  Synthetic oligonucleotide
cggcaggggtacctgagtctatgagggaagagtatcggcaggaacagcagaatgctgtgg

SEQ ID NO: 51662 - DNA, 60 bp, Artificial
  Synthetic oligonucleotide
ggcaggggtacctgagtctatgagggaagagtatcggcaggaacagcagaatgctgtgga

SEQ ID NO: 51663 - DNA, 60 bp, Artificial
  Synthetic oligonucleotide
tggcaggggtacctgagtctatgagggaagagtatcggcaggaacagcagaatgctgtgg

SEQ ID NO: 51664 - DNA, 60 bp, Artificial
  Synthetic oligonucleotide
ggggctgtggctgtgttgaaatacaatggcataataacagacactatcaagagttggagg

SEQ ID NO: 51665 - DNA, 54 bp, Artificial
  Synthetic oligonucleotide
cagaatgctgtggatgttgacgatggtcattttgtcaacatagaattggagtaa

SEQ ID NO: 51666 - DNA, 60 bp, Artificial
  Synthetic oligonucleotide
tttttagaaatgtggtatggcttatcaaaaagaacagtacatacccaacaataaagacaa

SEQ ID NO: 51667 - DNA, 60 bp, Artificial
  Synthetic oligonucleotide
tttttagaaatgtggtatggcttatcaaaaagaacagtacatacccaacaataaagaaaa

SEQ ID NO: 51668 - DNA, 60 bp, Artificial
  Synthetic oligonucleotide
ccttttttagaaatgtggtatggcttatcaaaaagaacagtacatacccaacaataaagg

SEQ ID NO: 51669 - DNA, 60 bp, Artificial
  Synthetic oligonucleotide
ccaccagaggggttcaaattgcttcaaatgagaacatggaagtaatggactccaacactc

SEQ ID NO: 51670 - DNA, 51 bp, Artificial
  Synthetic oligonucleotide
cgtacgttctctctatcgtcccgtcaggccccctcaaagccgagatcgcgc

SEQ ID NO: 51671 - DNA, 51 bp, Artificial
  Synthetic oligonucleotide
cgtacgttctttctatcgtcccgtcaggccccctcaaagccgagatcgcgc

SEQ ID NO: 51672 - DNA, 60 bp, Artificial
  Synthetic oligonucleotide
tgattatgaagggaggctgatccagaacagcataacaatagagagaatggtactctctgc

SEQ ID NO: 51673 - DNA, 60 bp, Artificial
  Synthetic oligonucleotide
aagaactgaaacacctattgagcagaataaaccattttgagaaaattcaaatcatcccca

SEQ ID NO: 51674 - DNA, 60 bp, Artificial
  Synthetic oligonucleotide
acctgggaccttcgatcttggggggctatatgaagcaattgaggagtgcctgattaatga

SEQ ID NO: 51675 - DNA, 60 bp, Artificial
  Synthetic oligonucleotide
gaaccttcgatcttggagggctatatgaagcaatcgaggagtgcctgattaatgatccct

SEQ ID NO: 51676 - DNA, 60 bp, Artificial
  Synthetic oligonucleotide
ggaccttcgatcttggagggctatatgaagcaatcgaggagtgcctgattaatgatccct

SEQ ID NO: 51677 - DNA, 60 bp, Artificial
  Synthetic oligonucleotide
tggaaccttcgatcttggagggctatatgaagcaatcgaggagtgcctgattaatgatcc

SEQ ID NO: 51678 - DNA, 60 bp, Artificial
  Synthetic oligonucleotide
ctccaacactgtgtcaagctttcaggtagactgctttctttggcatgtccgcaagcgatt

SEQ ID NO: 51679 - DNA, 60 bp, Artificial
  Synthetic oligonucleotide
gtgttggaagcaatggctttccttgaagaatcccacccagggatctttgaaaactcatgt

SEQ ID NO: 51680 - DNA, 60 bp, Artificial
  Synthetic oligonucleotide
gttgagaggatttctaattctaggcaaagaagacaaaagatatggaccagcattgagcat

SEQ ID NO: 51681 - DNA, 60 bp, Artificial
  Synthetic oligonucleotide
atggaaattgttcagcaaacaagagtggataaactgacccaaggtcgccagacctatgac

SEQ ID NO: 51682 - DNA, 60 bp, Artificial
  Synthetic oligonucleotide
taacagacactatcaagagttggaggaacaacatactgagaactcaagagtctgaatgtg

SEQ ID NO: 51683 - DNA, 60 bp, Artificial
  Synthetic oligonucleotide
cataataacagacactatcaagagttggaggaacaacatactgagaactcaagagtctga

SEQ ID NO: 51684 - DNA, 60 bp, Artificial
  Synthetic oligonucleotide
cacagtcaacagaacacaccaatattcagaaaaggggaagtggacaacaaacacggagac

SEQ ID NO: 51685 - DNA, 60 bp, Artificial
  Synthetic oligonucleotide
attcagaaaaggggaagtggacaacaaacacagagactggagcaccccaactcaacccga

SEQ ID NO: 51686 - DNA, 60 bp, Artificial
  Synthetic oligonucleotide
cgcagtcttgcactcgcgagatactgactaaaaccactgtggaccatatggccataatca

SEQ ID NO: 51687 - DNA, 60 bp, Artificial
  Synthetic oligonucleotide
ctcagcatgtccacaccagggaaggtcctccttttttagaaatgtggtatggcttatcaa

SEQ ID NO: 51688 - DNA, 60 bp, Artificial
  Synthetic oligonucleotide
catgtccatacctgggaagtccctccttttttagaaatgtggtatggcttatcaaaaaga

SEQ ID NO: 51689 - DNA, 60 bp, Artificial
  Synthetic oligonucleotide
catgtccatacctgggtagttcctccttttttagaaatgtggtatggcttatcaaaaaga

SEQ ID NO: 51690 - DNA, 60 bp, Artificial
  Synthetic oligonucleotide
catgtccatacctgggtagtccctccttttttagaaatgtggtatggcttatcaaaaaga

SEQ ID NO: 51691 - DNA, 60 bp, Artificial
  Synthetic oligonucleotide
ctcagcatgtccataccagggaagatcctccttttttagaaatgtggtatggcttatcaa

SEQ ID NO: 51692 - DNA, 60 bp, Artificial
  Synthetic oligonucleotide
ctcagcatgtccatacctgggaagtccctccttttttagaaatgtggtatggcttatcaa

SEQ ID NO: 51693 - DNA, 60 bp, Artificial
  Synthetic oligonucleotide
gtggaggccatggtgtctagggcccgaattgacgcacgaattgatttcgagtctgggagg

SEQ ID NO: 51694 - DNA, 60 bp, Artificial
  Synthetic oligonucleotide
gaagggactatatgaagcaattgaggagtgcctgattaatgatcactggcttttgcgtaa

SEQ ID NO: 51695 - DNA, 60 bp, Artificial
  Synthetic oligonucleotide
tcaagtgagcaggcagcggaagccatggaggtcgctaatcaggctaggcagatggtgcag

SEQ ID NO: 51696 - DNA, 60 bp, Artificial
  Synthetic oligonucleotide
gaaattcttccccagcagctcatatcggaggccagttggaatttccagcatggtggaggc

SEQ ID NO: 51697 - DNA, 60 bp, Artificial
  Synthetic oligonucleotide
tcttccctagcagttcatataggaggccagttggaatttccagcatggtggaggcatgat

SEQ ID NO: 51698 - DNA, 60 bp, Artificial
  Synthetic oligonucleotide
ctgacagccagacagcgaccaaaagaattcggatggccatcaattagtgtcgaattgttt

SEQ ID NO: 51699 - DNA, 56 bp, Artificial
  Synthetic oligonucleotide
acactgtgagttggtcttggccagacggtgctgagttgccattcaccattgacaag

SEQ ID NO: 51700 - DNA, 56 bp, Artificial
  Synthetic oligonucleotide
agtgacactgttagttggtcttggccagacggtgctgagttgccattcaccattga

SEQ ID NO: 51701 - DNA, 60 bp, Artificial
  Synthetic oligonucleotide
agtgacactgtgagctggtcttggccagacggtgctgagttgccattcaccattgacaag

SEQ ID NO: 51702 - DNA, 60 bp, Artificial
  Synthetic oligonucleotide
gacactgtgagctggtcttggccagacggtgctgagttgccattcaccattgacaagtag

SEQ ID NO: 51703 - DNA, 60 bp, Artificial
  Synthetic oligonucleotide
agtgacactgttagttggtcttggccagacggtgctgagttgccattcaccattgacaag

SEQ ID NO: 51704 - DNA, 60 bp, Artificial
  Synthetic oligonucleotide
gacactgttagttggtcttggccagacggtgctgagttgccattcaccattgacaagtag

SEQ ID NO: 51705 - DNA, 60 bp, Artificial
  Synthetic oligonucleotide
gtgacactgtgagttggtcttggccagacggtgctgagttgccattcaccattgacaagt

SEQ ID NO: 51706 - DNA, 60 bp, Artificial
  Synthetic oligonucleotide
gacactgtaggttggtcttggccagacggtgctgagttgccattcaccattgacaagtag

SEQ ID NO: 51707 - DNA, 59 bp, Artificial
  Synthetic oligonucleotide
acactgtgagttggtcttggccagacggtgctgagttgccattcaccattgacaagtaa

SEQ ID NO: 51708 - DNA, 60 bp, Artificial
  Synthetic oligonucleotide
caaccggctgcaactgctttggccaacactatagaaatcttcagatcgaacggtctaaca

SEQ ID NO: 51709 - DNA, 60 bp, Artificial
  Synthetic oligonucleotide
ccagccggctgcaactgctttggccaacactatagaaatcttcagatcgaacggcctaac

SEQ ID NO: 51710 - DNA, 60 bp, Artificial
  Synthetic oligonucleotide
ggaaccaaccggctgcaactgctttggccaacactatagaaatcttcagatcgaacggtc

SEQ ID NO: 51711 - DNA, 60 bp, Artificial
  Synthetic oligonucleotide
ataggaaccaaccggctgcaactgctttggccaacactatagaaatcttcagatcgaacg

SEQ ID NO: 51712 - DNA, 60 bp, Artificial
  Synthetic oligonucleotide
tccttgaagaatcccacccagggatctttgaaaactcgtgtcttgaaacgatggaaattg

SEQ ID NO: 51713 - DNA, 60 bp, Artificial
  Synthetic oligonucleotide
ccaccagaggggttcaaattgcttcaaatgagaacatggaagcaatggactccagcactc

SEQ ID NO: 51714 - DNA, 60 bp, Artificial
  Synthetic oligonucleotide
aaacgatttgcagaccaaaaactgggtgatgccccattccttgaccggcttcgccgagat

SEQ ID NO: 51715 - DNA, 60 bp, Artificial
  Synthetic oligonucleotide
tgttgcttggtcggcaagtgcttgtcatgatggcactagttggttgaccattggaatttc

SEQ ID NO: 51716 - DNA, 60 bp, Artificial
  Synthetic oligonucleotide
tgttgcttggtcggcaagtgcttgtcatgatggcactagttggttgacaattggaatttc

SEQ ID NO: 51717 - DNA, 60 bp, Artificial
  Synthetic oligonucleotide
tgttgcttggtcggcaagtgcttgtcatgatggcactggttggttgacaattggaatttc

SEQ ID NO: 51718 - DNA, 60 bp, Artificial
  Synthetic oligonucleotide
cacagaaaacagcttcgaacagataacgtttatgcaagccttacaactactgcttgaagt

SEQ ID NO: 51719 - DNA, 60 bp, Artificial
  Synthetic oligonucleotide
gcttcgaacagataacgtttatgcaagccttacaactactgcttgaagtggagcaagaga

SEQ ID NO: 51720 - DNA, 60 bp, Artificial
  Synthetic oligonucleotide
tacagaaaacagcttcgaacagataacgtttatgcaagccttacaactactgcttgaagt

SEQ ID NO: 51721 - DNA, 60 bp, Artificial
  Synthetic oligonucleotide
cagttcgtacaggagaccagttggaatttccagcatggtggaggccatggtgtctagggc

SEQ ID NO: 51722 - DNA, 60 bp, Artificial
  Synthetic oligonucleotide
ctgaaacacctattgagcagaataaaccattttgagaaaattcaaatcatccccaaaagt

SEQ ID NO: 51723 - DNA, 60 bp, Artificial
  Synthetic oligonucleotide
ctgaaacatctattgagcagaataaaccattttgagaaaattcaaatcatccccaaaagt

SEQ ID NO: 51724 - DNA, 60 bp, Artificial
  Synthetic oligonucleotide
tgtcgcagtcccgcactcgcgagatactgacaaaaaccactgtggaccatatggccataa

SEQ ID NO: 51725 - DNA, 60 bp, Artificial
  Synthetic oligonucleotide
gaagggtactctctggttggaatagatcctttccgtctgcttcaaaacagccaggtcttc

SEQ ID NO: 51726 - DNA, 60 bp, Artificial
  Synthetic oligonucleotide
cgaggctggagccacacaagtgggaaaagtactgtgtcctcgagataggagacatgctcc

SEQ ID NO: 51727 - DNA, 60 bp, Artificial
  Synthetic oligonucleotide
cccgaggctggagccacacaagtgggaaaagtactgtgtcctcgagataggagacatgct

SEQ ID NO: 51728 - DNA, 60 bp, Artificial
  Synthetic oligonucleotide
ctgattctaggcaaagaagacaaaagatatggaccagcattgagcatcaatgaactgagc

SEQ ID NO: 51729 - DNA, 60 bp, Artificial
  Synthetic oligonucleotide
ctaattctaggcaaagaagacaaaagatatggaccagcattgagcatcaatgaactgagc

SEQ ID NO: 51730 - DNA, 58 bp, Artificial
  Synthetic oligonucleotide
gtcgaaacgtacgttctctctatcatcccgtcaggccccctcaaagccgagatcgcgc

SEQ ID NO: 51731 - DNA, 60 bp, Artificial
  Synthetic oligonucleotide
tcgaaacgtacgttctctctatcatcccgtcaggccccctcaaagccgagatcgcgcaga

SEQ ID NO: 51732 - DNA, 60 bp, Artificial
  Synthetic oligonucleotide
cgcaggcttgccgaccaaagtctcccaccgaacttctccagccttgaaaactttagagcc

SEQ ID NO: 51733 - DNA, 60 bp, Artificial
  Synthetic oligonucleotide
gcagtggagttttcggagacaatccgcgccccaatgatggaacaggtagttgtggtccgg

SEQ ID NO: 51734 - DNA, 60 bp, Artificial
  Synthetic oligonucleotide
tatatgcatctccacaactcgaggggttttcagctgaatcaagaaaattgcttctcattg

SEQ ID NO: 51735 - DNA, 60 bp, Artificial
  Synthetic oligonucleotide
atacagatgtgcactgaactcaaactcagcgactatgaagggaggctgatccagaacagc

SEQ ID NO: 51736 - DNA, 60 bp, Artificial
  Synthetic oligonucleotide
cccagatttgtatgattacaaggagaaccgattcattgaaattggagtgacacggaggga

SEQ ID NO: 51737 - DNA, 51 bp, Artificial
  Synthetic oligonucleotide
caatagatggagtcaccaataaggtcaactcgatcattgacaaaatgaaca

SEQ ID NO: 51738 - DNA, 60 bp, Artificial
  Synthetic oligonucleotide
caccaatattcagaaaaggggaagtggacaacaaacacagagactggagcaccccaactc

SEQ ID NO: 51739 - DNA, 60 bp, Artificial
  Synthetic oligonucleotide
gggaggttctacatacagatgtgcactgaactcaaactcagtgactatgaagggaggctg

SEQ ID NO: 51740 - DNA, 60 bp, Artificial
  Synthetic oligonucleotide
tagttcatacaggagaccagttggaatttccagcatggtggaggccatgatgtctagggc

SEQ ID NO: 51741 - DNA, 60 bp, Artificial
  Synthetic oligonucleotide
gggaagagtatcggcaggaacagcagaatgctgtggatgttgacgatggtcattttgtca

SEQ ID NO: 51742 - DNA, 60 bp, Artificial
  Synthetic oligonucleotide
gagggaagagtatcggcaggaacagcagaatgctgtggatgttgacgatggtcattttgt

SEQ ID NO: 51743 - DNA, 60 bp, Artificial
  Synthetic oligonucleotide
ggaggaacaacatactgagaactcaagagtctgaatgtgcatgtgtaaatggttcttgct

SEQ ID NO: 51744 - DNA, 60 bp, Artificial
  Synthetic oligonucleotide
gaggcaatcattgtagcaatggtgttctcacaggaggattgcatgataaaggcagtccga

SEQ ID NO: 51745 - DNA, 60 bp, Artificial
  Synthetic oligonucleotide
ggtattgcatttgactcaagggacctgctgggaacagatgtacactccaggcggagaagt

SEQ ID NO: 51746 - DNA, 60 bp, Artificial
  Synthetic oligonucleotide
caatcgctgaagcaatcattgtagcaatggtgttctcacaggaggattgcatgataaagg

SEQ ID NO: 51747 - DNA, 60 bp, Artificial
  Synthetic oligonucleotide
acattgaaaataagagtacatgaggggtatgaggaattcacaatggtcgggcggagggca

SEQ ID NO: 51748 - DNA, 60 bp, Artificial
  Synthetic oligonucleotide
acaggcaacctccaaacattgaaaataagagtacatgaggggtatgaggaattcacaatg

SEQ ID NO: 51749 - DNA, 60 bp, Artificial
  Synthetic oligonucleotide
aagtgctcacaggcaacctccaaacattgaaaataagagtacatgaggggtatgaggaat

SEQ ID NO: 51750 - DNA, 60 bp, Artificial
  Synthetic oligonucleotide
gcacacagattggtgggataaggatggtggacatccttaggcaaaatccaactgaggaac

SEQ ID NO: 51751 - DNA, 60 bp, Artificial
  Synthetic oligonucleotide
ctcaagggacctgctgggaacagatgtacactccaggcggagaagtgagaaatgacgatg

SEQ ID NO: 51752 - DNA, 60 bp, Artificial
  Synthetic oligonucleotide
gacaataacatattcatcatcaatgatgtgggaaatcaacggtcctgagtcagtgcttgt

SEQ ID NO: 51753 - DNA, 60 bp, Artificial
  Synthetic oligonucleotide
tcattgtagcaatggtgttctcacaggaggattgcatgataaaggcagtccgaggcgatc

SEQ ID NO: 51754 - DNA, 60 bp, Artificial
  Synthetic oligonucleotide
gcgtactggaatggaccccaggatgtgctctctaatgcaaggatcaactctcccgaggag

SEQ ID NO: 51755 - DNA, 60 bp, Artificial
  Synthetic oligonucleotide
tgtcttgaaacgatggaaattgttcaacaaacaagagtggataaactgacccaaggtcgc

SEQ ID NO: 51756 - DNA, 60 bp, Artificial
  Synthetic oligonucleotide
gagttggaggagcaacatactgagaactcaagagtctgaatgtgcatgtgtaaatggctc

SEQ ID NO: 51757 - DNA, 58 bp, Artificial
  Synthetic oligonucleotide
atttggaatgcagaactttctttttgactcagggagccttactgaatgacaagcactc

SEQ ID NO: 51758 - DNA, 60 bp, Artificial
  Synthetic oligonucleotide
gatatgactttgagagagaagggtactctctggttggaatagatcctttccgtttgcttc

SEQ ID NO: 51759 - DNA, 60 bp, Artificial
  Synthetic oligonucleotide
gatatgactttgagagagaagggtactctctggttggaatagatcctttccgtttgctcc

SEQ ID NO: 51760 - DNA, 60 bp, Artificial
  Synthetic oligonucleotide
accggctccgccgagatcagaagtccctaagaggaagaggcaacactcttggtctggaca

SEQ ID NO: 51761 - DNA, 60 bp, Artificial
  Synthetic oligonucleotide
tactgagggcagaacatctgacatgaggactgaaatcataagaatgatggaaagtgccag

SEQ ID NO: 51762 - DNA, 60 bp, Artificial
  Synthetic oligonucleotide
gatatgactttgagagagaagggtactctctggttgggatagatcctttccgtttgcttc

SEQ ID NO: 51763 - DNA, 60 bp, Artificial
  Synthetic oligonucleotide
gatatgactttgagagagaagggtactctctggtgggaatagatcctttccgtctgcttc

SEQ ID NO: 51764 - DNA, 60 bp, Artificial
  Synthetic oligonucleotide
gatatgactttgagagagaagggtactctctggttggaatagatcccttccgtctgcttc

SEQ ID NO: 51765 - DNA, 60 bp, Artificial
  Synthetic oligonucleotide
gatgggacagcctcattgagccctgggatgatgatgggcatgttcaacatgctgagtaca

SEQ ID NO: 51766 - DNA, 65 bp, Artificial
  Synthetic oligonucleotide
cgactatgaagaattgaaacacctattgagcagaataaaccattttgagaaaatacagatcatcc

SEQ ID NO: 51767 - DNA, 60 bp, Artificial
  Synthetic oligonucleotide
gaaacacctattgagcagaataaaccattttgagaaaatacagatcatccccaaaagttc

SEQ ID NO: 51768 - DNA, 60 bp, Artificial
  Synthetic oligonucleotide
ggaatgagaatactcataaggggcaattcccctgtgttcaactacaataaggcaaccaaa

SEQ ID NO: 51769 - DNA, 60 bp, Artificial
  Synthetic oligonucleotide
ggaatgagaatactcgtaaggggcaattcccctgtgttcaactacaataaggcaaccaaa

SEQ ID NO: 51770 - DNA, 60 bp, Artificial
  Synthetic oligonucleotide
gagaatactcgtaaggggcaattcccctgtgttcaactacaataaggcaaccaaaaggct

SEQ ID NO: 51771 - DNA, 60 bp, Artificial
  Synthetic oligonucleotide
gagaatactcataaggggcaattcccctgtgttcaactacaataaggcaaccaaaaggct

SEQ ID NO: 51772 - DNA, 60 bp, Artificial
  Synthetic oligonucleotide
gatggagtttgaaccgttccaatccttggtacctaaagctgccagaggtcaatacagtgg

SEQ ID NO: 51773 - DNA, 60 bp, Artificial
  Synthetic oligonucleotide
gtgaatgtgagaggctcaggaatgagaatactcgtaaggggcaattcccctgtgttcaac

SEQ ID NO: 51774 - DNA, 60 bp, Artificial
  Synthetic oligonucleotide
ccaagcattgaaaataagagtacatgaggggtatgaggaattcacaatggttgggcggag

SEQ ID NO: 51775 - DNA, 60 bp, Artificial
  Synthetic oligonucleotide
agcggacaagagaataatagagatggttcctgaaaggaatgaacaagggcagacgctctg

SEQ ID NO: 51776 - DNA, 60 bp, Artificial
  Synthetic oligonucleotide
ggtgttctcacaggaggattgcatgataaaggcagtccgaggcgatctgaatttcgtaaa

SEQ ID NO: 51777 - DNA, 60 bp, Artificial
  Synthetic oligonucleotide
cgggactctagcatacttactgacagccagacagcgaccaaaagaattcggatggccatt

SEQ ID NO: 51778 - DNA, 60 bp, Artificial
  Synthetic oligonucleotide
ccccacgatgctgtacaataagatggagtttgaaccgttccaatccttggtacccaaagc

SEQ ID NO: 51779 - DNA, 60 bp, Artificial
  Synthetic oligonucleotide
ccccacgatgctgtacaataagatggagtttgaaccgttccaatccttggtacctaaagc

SEQ ID NO: 51780 - DNA, 60 bp, Artificial
  Synthetic oligonucleotide
actaacaaaaaccactgtggaccatatggccataatcaagaaatacacatcaggaagaca

SEQ ID NO: 51781 - DNA, 60 bp, Artificial
  Synthetic oligonucleotide
ctcacaggaggattgcatgataaaggcagtccgaggcgatctgaatttcgtaaacagagc

SEQ ID NO: 51782 - DNA, 60 bp, Artificial
  Synthetic oligonucleotide
gtctcaagaccccacgatgctgtacaataagatggagtttgaaccgttccaatccttggt

SEQ ID NO: 51783 - DNA, 60 bp, Artificial
  Synthetic oligonucleotide
aagagtacatgaggggtatgaggaattcacaatggttgggcggagggcaacagctattct

SEQ ID NO: 51784 - DNA, 60 bp, Artificial
  Synthetic oligonucleotide
gcaatggtgttctcacaggaggattgcatgataaaggcagtccgaggcgatctgaatttc

SEQ ID NO: 51785 - DNA, 60 bp, Artificial
  Synthetic oligonucleotide
ctcaaccggtgcactcgccagttgcatgggtctcatatacaacaggatgggaacggtgac

SEQ ID NO: 51786 - DNA, 60 bp, Artificial
  Synthetic oligonucleotide
cgcactcagctactcaaccggtgcacttgccagttgcatgggtctcatatacaacaggat

SEQ ID NO: 51787 - DNA, 53 bp, Artificial
  Synthetic oligonucleotide
aaaatgagtcttctaaccgaggtcgaaacgtacgttctctctatcatcccgtc

SEQ ID NO: 51788 - DNA, 60 bp, Artificial
  Synthetic oligonucleotide
aacctaaatttctcccagatttgtatgactacaaagagaaccgattcattgaaattggag

SEQ ID NO: 51789 - DNA, 60 bp, Artificial
  Synthetic oligonucleotide
atttctcccagatttgtatgactacaaagagaaccgattcattgaaattggagtgactcg

SEQ ID NO: 51790 - DNA, 53 bp, Artificial
  Synthetic oligonucleotide
ggggcgataaactctagtatgccattccacaacatacaccctctcaccatcgg

SEQ ID NO: 51791 - DNA, 56 bp, Artificial
  Synthetic oligonucleotide
ggggcgataaactctagtatgccattccacaacatacaccctctcaccatcgggga

SEQ ID NO: 51792 - DNA, 60 bp, Artificial
  Synthetic oligonucleotide
taggggcgataaactctagtatgccattccacaacatacaccctctcaccatcggggaat

SEQ ID NO: 51793 - DNA, 60 bp, Artificial
  Synthetic oligonucleotide
taggagcgataaactctagtatgccattccacaacatacaccctctcaccatcggggaat

SEQ ID NO: 51794 - DNA, 60 bp, Artificial
  Synthetic oligonucleotide
aatcaggctaggcagatggtgcaggcaatgaggacaattgggactcatcctaactctagt

SEQ ID NO: 51795 - DNA, 60 bp, Artificial
  Synthetic oligonucleotide
cgctaatcaggctaggcagatggtgcaggcaatgaggacaattgggactcatcctaactc

SEQ ID NO: 51796 - DNA, 60 bp, Artificial
  Synthetic oligonucleotide
tggggctaaggaggtcgcactcagctactcaaccggtgcacttgccagttgcatgggtct

SEQ ID NO: 51797 - DNA, 60 bp, Artificial
  Synthetic oligonucleotide
gaacttaccaaatactgtcaatttattcaacagtggcgagttccctagcactggcaatca

SEQ ID NO: 51798 - DNA, 60 bp, Artificial
  Synthetic oligonucleotide
gcgataaattctagtatgccattccacaacatacaccctctcaccatcggggaatgcccc

SEQ ID NO: 51799 - DNA, 60 bp, Artificial
  Synthetic oligonucleotide
gcgataagctctagtatgccattccacaacatacaccctctcaccatcggggaatgcccc

SEQ ID NO: 51800 - DNA, 60 bp, Artificial
  Synthetic oligonucleotide
aagaaagttgcttctcattgttcaggcacttagggacaacctggaacctgggaccttcga

SEQ ID NO: 51801 - DNA, 60 bp, Artificial
  Synthetic oligonucleotide
gaaaattgcttctcattgttcaggcacttagggacaacctggaacctgggaccttcgatc

SEQ ID NO: 51802 - DNA, 60 bp, Artificial
  Synthetic oligonucleotide
cagaaaattgcttctcattgttcaggcacttagggacaacctggaacctgggaccttcga

SEQ ID NO: 51803 - DNA, 60 bp, Artificial
  Synthetic oligonucleotide
caagaaaattgcttctcattgttcaggcacttagggacaacctggaacctgggaccttcg

SEQ ID NO: 51804 - DNA, 60 bp, Artificial
  Synthetic oligonucleotide
tctgtatggattcattataaaaggaagatcccacttgaggaatgataccgatgtggtaaa

SEQ ID NO: 51805 - DNA, 60 bp, Artificial
  Synthetic oligonucleotide
atctgtatggattcattataaaaggaagatcccacttgaggaatgataccgatgtggtaa

SEQ ID NO: 51806 - DNA, 60 bp, Artificial
  Synthetic oligonucleotide
cggcgaaatcacatgtgtgtgcagggataattggcatggctcaaatcggccatgggtatc

SEQ ID NO: 51807 - DNA, 60 bp, Artificial
  Synthetic oligonucleotide
atggattccaacactctgtcaagctttcaggtagactgctttctttggcatgtccgcaaa

SEQ ID NO: 51808 - DNA, 60 bp, Artificial
  Synthetic oligonucleotide
atggattccaacacagtgtcaagctttcaggtagactgctttctttggcatgtccgcaaa

SEQ ID NO: 51809 - DNA, 60 bp, Artificial
  Synthetic oligonucleotide
ggcattccaatctaaatgatgccacatatcagagaacgagagccctcgtgcgtactggaa

SEQ ID NO: 51810 - DNA, 60 bp, Artificial
  Synthetic oligonucleotide
tgcgtactggaatggaccccaggatgtgctctctgatgcaaggatcaactctcccaagga

SEQ ID NO: 51811 - DNA, 56 bp, Artificial
  Synthetic oligonucleotide
ggcaactatcaccaacccactaatcaggcatgagaacagaatggtgctagccagca

SEQ ID NO: 51812 - DNA, 60 bp, Artificial
  Synthetic oligonucleotide
ctgcaatctgttcgagaaattcttccccagcagttcatatcggaggccagttggaatttc

SEQ ID NO: 51813 - DNA, 60 bp, Artificial
  Synthetic oligonucleotide
ctgcaatttattcgagaaattcttccccagcagttcatatcggaggccagttggaatttc

SEQ ID NO: 51814 - DNA, 60 bp, Artificial
  Synthetic oligonucleotide
agaaattcttccccagcagttcatatcggaggccagttggaatttccagcatggtggagg

SEQ ID NO: 51815 - DNA, 60 bp, Artificial
  Synthetic oligonucleotide
ctgcaatctattcgagaaattcttccccagcagttcatatcggaggccagttggaatttc

SEQ ID NO: 51816 - DNA, 60 bp, Artificial
  Synthetic oligonucleotide
gggatacatgttcgaaagtaagagcatgaagttacgaacacaaataccagcagaaatgct

SEQ ID NO: 51817 - DNA, 60 bp, Artificial
  Synthetic oligonucleotide
tggacattgaatagaaaccaaccggctgcaactgctttggccaacactatagaaatcttc

SEQ ID NO: 51818 - DNA, 60 bp, Artificial
  Synthetic oligonucleotide
gagtacagtcctaggagtctcaatcctgaatcttggacagaaaaggtacaccaaaaccac

SEQ ID NO: 51819 - DNA, 60 bp, Artificial
  Synthetic oligonucleotide
aattaggaaaaggatacatgttcgaaagtaagagcatgaagttacgaacacaaataccag

SEQ ID NO: 51820 - DNA, 60 bp, Artificial
  Synthetic oligonucleotide
aaggatacatgttcgaaagtaagagcatgaagttacgaacacaaataccagcagaaatgc

SEQ ID NO: 51821 - DNA, 60 bp, Artificial
  Synthetic oligonucleotide
gattaggaaaaggatacatgttcgaaagtaagagcatgaagttacgaacacaaataccag

SEQ ID NO: 51822 - DNA, 60 bp, Artificial
  Synthetic oligonucleotide
aattaggaaagggatacatgttcgaaagtaagagcatgaagttacgaacacaaataccag

SEQ ID NO: 51823 - DNA, 60 bp, Artificial
  Synthetic oligonucleotide
atagaaaccaaccggctgcaactgctttggccaacactatagaaatcttcagatcgaatg

SEQ ID NO: 51824 - DNA, 60 bp, Artificial
  Synthetic oligonucleotide
gattaggaagaggatacatgttcgaaagtaagagcatgaagttacgaacacaaataccag

SEQ ID NO: 51825 - DNA, 60 bp, Artificial
  Synthetic oligonucleotide
ctcaaccggtgcacttgccagttgcatgggtctcatatacaacaggatgggaacggtgac

SEQ ID NO: 51826 - DNA, 60 bp, Artificial
  Synthetic oligonucleotide
cagctatccaccagaggggttcaaattgcttcaaatgagaacatggaaacaatggactcc

SEQ ID NO: 51827 - DNA, 60 bp, Artificial
  Synthetic oligonucleotide
acagctatccaccagaggggttcaaattgcttcaaatgagaacatggaaacaatggactc

SEQ ID NO: 51828 - DNA, 60 bp, Artificial
  Synthetic oligonucleotide
ccaccagaggggttcaaattgcttcaaatgagaacatggaaacaatggactccaacactc

SEQ ID NO: 51829 - DNA, 59 bp, Artificial
  Synthetic oligonucleotide
attgaccgtttcttaagggttcgagatcagcgggggaacgtactcttatctcccgaaga

SEQ ID NO: 51830 - DNA, 60 bp, Artificial
  Synthetic oligonucleotide
attgaccgtttcttaagggttcgagatcagcgggggaacgtgctcttatctcccgaagag

SEQ ID NO: 51831 - DNA, 59 bp, Artificial
  Synthetic oligonucleotide
attgaccgtttcttaagggttcgagatcagcgggggaacgtgctcttatctcccgaaga

SEQ ID NO: 51832 - DNA, 60 bp, Artificial
  Synthetic oligonucleotide
tgtgaatgtgagaggctcaggaatgagaatactcgtaaggggcaattcccctgtgttcaa

SEQ ID NO: 51833 - DNA, 60 bp, Artificial
  Synthetic oligonucleotide
attgaccgtttcttaagggttcgagatcagcgggggaacgtactcttatctcccgaagag

SEQ ID NO: 51834 - DNA, 60 bp, Artificial
  Synthetic oligonucleotide
agcagagcaggatgcagttttcttctctaactgtgaatgtgagaggctcaggaatgagaa

SEQ ID NO: 51835 - DNA, 50 bp, Artificial
  Synthetic oligonucleotide
catgataaaggcagtcagaggcgatctgaatttcgtaaacagagcaaacc

SEQ ID NO: 51836 - DNA, 60 bp, Artificial
  Synthetic oligonucleotide
gcagagcaggatgcagttttcttctctaactgtgaatgtgagaggctcaggaatgagaat

SEQ ID NO: 51837 - DNA, 60 bp, Artificial
  Synthetic oligonucleotide
gtgacgtactggggacatttgatactgtccagataataaagctgctaccatttgcagcag

SEQ ID NO: 51838 - DNA, 60 bp, Artificial
  Synthetic oligonucleotide
cagttctcttctctaactgtgaatgtgagaggctcaggaatgagaatactcgtaaggggc

SEQ ID NO: 51839 - DNA, 60 bp, Artificial
  Synthetic oligonucleotide
acttgatgatatggcattccaatctaaatgatgccacatatcagagaacgagagctctcg

SEQ ID NO: 51840 - DNA, 60 bp, Artificial
  Synthetic oligonucleotide
cacttgatgatatggcattccaatctaaatgatgccacatatcagagaacgagagctctc

SEQ ID NO: 51841 - DNA, 60 bp, Artificial
  Synthetic oligonucleotide
atctgatgatctggcattccaatctaaatgatgccacataccagaggacaagggctctcg

SEQ ID NO: 51842 - DNA, 57 bp, Artificial
  Synthetic oligonucleotide
tgatgatatggcattccaatctaaatgatgccacatatcagaggacgagagctctcg

SEQ ID NO: 51843 - DNA, 60 bp, Artificial
  Synthetic oligonucleotide
acctgatgatatggcattccaatctaaatgatgccacatatcaaagaacgagagctctcg

SEQ ID NO: 51844 - DNA, 60 bp, Artificial
  Synthetic oligonucleotide
gcttttggcctagtgtgtgccacttgtgagcagattgcagactcacagcaccggtctcac

SEQ ID NO: 51845 - DNA, 60 bp, Artificial
  Synthetic oligonucleotide
atttggaatgcagaactttctttttgactcagggagctttactgaatgacaagcactcca

SEQ ID NO: 51846 - DNA, 60 bp, Artificial
  Synthetic oligonucleotide
ggctaggcaaatggtgcaggcaatgaggacaattgggactcatcctaactctagtgctgg

SEQ ID NO: 51847 - DNA, 60 bp, Artificial
  Synthetic oligonucleotide
ctgacaggtttagattgcataagaccttgtttctgggttgagttaatcagagggcggccc

SEQ ID NO: 51848 - DNA, 60 bp, Artificial
  Synthetic oligonucleotide
acaggattagattgcataagaccttgtttctgggttgagttaatcagagggcggcccaaa

SEQ ID NO: 51849 - DNA, 60 bp, Artificial
  Synthetic oligonucleotide
gcttttggcttagtgtgtgccacttgtgagcagattgcagattcacagcatcggtctcac

SEQ ID NO: 51850 - DNA, 60 bp, Artificial
  Synthetic oligonucleotide
ccggctgcaactgctttggccaacactatagaaatcttcagatcgaatggtctgacagca

SEQ ID NO: 51851 - DNA, 60 bp, Artificial
  Synthetic oligonucleotide
ctggacttataatgctgaacttctggttctcatggaaaatgagagaactctagacttcca

SEQ ID NO: 51852 - DNA, 60 bp, Artificial
  Synthetic oligonucleotide
ggacttataatgctgaacttctggttctcatggaaaatgagagaactctagacttccatg

SEQ ID NO: 51853 - DNA, 60 bp, Artificial
  Synthetic oligonucleotide
gtctggacttataatgctgaacttctggttctcatggaaaatgagagaactctagacttc

SEQ ID NO: 51854 - DNA, 60 bp, Artificial
  Synthetic oligonucleotide
gatgtctggacttataatgctgaacttctggttctcatggaaaatgagagaactctggac

SEQ ID NO: 51855 - DNA, 60 bp, Artificial
  Synthetic oligonucleotide
ggattcctagatgtctggacttataatgctgaacttctggttctcatggaaaatgagaga

SEQ ID NO: 51856 - DNA, 60 bp, Artificial
  Synthetic oligonucleotide
cttcgccgagatcagaagtccctaagaggaagaggcagcactcttggtctggacatcgaa

SEQ ID NO: 51857 - DNA, 60 bp, Artificial
  Synthetic oligonucleotide
ggaccttagggtctcaagtttcatcagaggaacaagagtggtcccaagaggacagctatc

SEQ ID NO: 51858 - DNA, 60 bp, Artificial
  Synthetic oligonucleotide
atttggaatgcagaactttctttttgactcagggagccttactgaatgacaagcactcca

SEQ ID NO: 51859 - DNA, 60 bp, Artificial
  Synthetic oligonucleotide
ggagtcctcacagaacattaatgagttgtcctgtgggtgaggctccctccccatataact

SEQ ID NO: 51860 - DNA, 54 bp, Artificial
  Synthetic oligonucleotide
tcacagaacattaatgagttgtcctgtgggtgaggctccctccccatataactc

SEQ ID NO: 51861 - DNA, 60 bp, Artificial
  Synthetic oligonucleotide
gagtcctcacagaacattaatgagttgtcctgtgggtgaggctccctccccatataactc

SEQ ID NO: 51862 - DNA, 60 bp, Artificial
  Synthetic oligonucleotide
ggcccgtggatatgactttgagagagaagggtactctctggttggaatagatcctttccg

SEQ ID NO: 51863 - DNA, 60 bp, Artificial
  Synthetic oligonucleotide
agttgataaacctaaatttctcccagatttgtatgactacaaagagaaccgattcattga

SEQ ID NO: 51864 - DNA, 60 bp, Artificial
  Synthetic oligonucleotide
gctccagaatatgcatacaaaattgtcaagaaaggggactctgcaattatgagaagtgaa

SEQ ID NO: 51865 - DNA, 60 bp, Artificial
  Synthetic oligonucleotide
gctccagaatatgcatacaaaattgtcaagaaaggggactcagcgattatgaaaagtgaa

SEQ ID NO: 51866 - DNA, 60 bp, Artificial
  Synthetic oligonucleotide
gacagaagcccttacagaacattaatgagttgtcctgtgggtgaggctccctccccatat

SEQ ID NO: 51867 - DNA, 60 bp, Artificial
  Synthetic oligonucleotide
ggtacgcacaaacagattgtgtattggaagcaatggctttccttgaagaatcccacccag

SEQ ID NO: 51868 - DNA, 60 bp, Artificial
  Synthetic oligonucleotide
gatgggcatgttcaacatgctgagtacagtcctaggagtctcaatcctgaatcttggaca

SEQ ID NO: 51869 - DNA, 60 bp, Artificial
  Synthetic oligonucleotide
ctgcaggtctcactcatctgatgatctggcattccaatctaaatgatgccacataccaga

SEQ ID NO: 51870 - DNA, 60 bp, Artificial
  Synthetic oligonucleotide
ctgctggtctcactcatctgatgatctggcattccaatctaaatgatgccacataccaga

SEQ ID NO: 51871 - DNA, 61 bp, Artificial
  Synthetic oligonucleotide
cttaatgttacaaattgggaacataatctcaatatgggtcagtcattcaattcaaacaggg

SEQ ID NO: 51872 - DNA, 60 bp, Artificial
  Synthetic oligonucleotide
gagcggctttgaaatgatttgggatccaaatgggtggactgaaacggacagtagcttttc

SEQ ID NO: 51873 - DNA, 60 bp, Artificial
  Synthetic oligonucleotide
taggggcgataaactctagtatgccattccacaacatacaccctcttaccatcggggaat

SEQ ID NO: 51874 - DNA, 60 bp, Artificial
  Synthetic oligonucleotide
tgggggcgataaactctagtatgccattccacaacatacaccctatcaccatcggggaat

SEQ ID NO: 51875 - DNA, 60 bp, Artificial
  Synthetic oligonucleotide
gagaactgaaatcataagaatgatggaaagtgccagaccagaagatgtgtctttccaggg

SEQ ID NO: 51876 - DNA, 60 bp, Artificial
  Synthetic oligonucleotide
gcccagtgagcgaggactgcaacgtagacgctttgtccagaatgccctaaatggaaatgg

SEQ ID NO: 51877 - DNA, 60 bp, Artificial
  Synthetic oligonucleotide
gcccagtgagcgaggagtgcagcgtagacgctttgtccagaatgccctaaatggaaatgg

SEQ ID NO: 51878 - DNA, 60 bp, Artificial
  Synthetic oligonucleotide
gcccagtgaacgaggactgcagcgtagacgttttgtccagaatgccctaaatggaaatgg

SEQ ID NO: 51879 - DNA, 60 bp, Artificial
  Synthetic oligonucleotide
gagccgttcatttcatgctcccacttggaatgcagaactttctttttgactcagggagcc

SEQ ID NO: 51880 - DNA, 60 bp, Artificial
  Synthetic oligonucleotide
cagcgttcagcccactttctcggtacagaggaaccttcccttcgaaagagcgaccattat

SEQ ID NO: 51881 - DNA, 60 bp, Artificial
  Synthetic oligonucleotide
atggattccaacactgtggcaagctttcaggtagactgctttctttggcatgtccgcaaa

SEQ ID NO: 51882 - DNA, 60 bp, Artificial
  Synthetic oligonucleotide
tttcaggtagactgctttctttggcatgtccgcaagcgatttgcagaccaagaactgggt

SEQ ID NO: 51883 - DNA, 53 bp, Artificial
  Synthetic oligonucleotide
cagcctactttttcggtacagagaaaccttcccttcgaaagagcgaccattat

SEQ ID NO: 51884 - DNA, 60 bp, Artificial
  Synthetic oligonucleotide
gagccgttcatctcatgctcccacctggaatgcagaactttctttttgactcagggagcc

SEQ ID NO: 51885 - DNA, 60 bp, Artificial
  Synthetic oligonucleotide
gtactttgttgaaacactagcgaggagtatctgtgagaaacttgagcaatctggactccc

SEQ ID NO: 51886 - DNA, 60 bp, Artificial
  Synthetic oligonucleotide
gagattcttccccagcagttcatatcggaggccagttggaatttccagcatggtggaggc

SEQ ID NO: 51887 - DNA, 60 bp, Artificial
  Synthetic oligonucleotide
tactgaaggcagaacgtctgacatgaggactgaaatcataagaatgatggaaagtgccag

SEQ ID NO: 51888 - DNA, 60 bp, Artificial
  Synthetic oligonucleotide
gaacggctgcattgagggcaagctttctcaaatgtcgaaagaggtgaatgctagaattga

SEQ ID NO: 51889 - DNA, 60 bp, Artificial
  Synthetic oligonucleotide
gaacggctgcattgagggcaagctttctcaaatgtcaaaaggagtgaacgccagaattga

SEQ ID NO: 51890 - DNA, 60 bp, Artificial
  Synthetic oligonucleotide
ccgaacggctgcattgagggcaagctttctcaaatgtcaaaaggagtgaacgcaagaatt

SEQ ID NO: 51891 - DNA, 60 bp, Artificial
  Synthetic oligonucleotide
gaacggctgcattgagggcaagctttctcaaatgtcaaaagaagtgagcgccagaattga

SEQ ID NO: 51892 - DNA, 59 bp, Artificial
  Synthetic oligonucleotide
gaacggctgcattgagggcaagctttctcaaatgtcaaaagaagtgaacgccagaattg

SEQ ID NO: 51893 - DNA, 60 bp, Artificial
  Synthetic oligonucleotide
gaacggctgcattgagggcaagctttctcaaatgtcaaaggaagtgaacgccagaattga

SEQ ID NO: 51894 - DNA, 57 bp, Artificial
  Synthetic oligonucleotide
gaacggctgcattgagggcaagctttctcaaatgtcaaaagaagtgaatgctagaat

SEQ ID NO: 51895 - DNA, 60 bp, Artificial
  Synthetic oligonucleotide
ccgaacggctgcattgagggcaagctttctcaaatgtcaaaagaagtgaacgccagaatt

SEQ ID NO: 51896 - DNA, 60 bp, Artificial
  Synthetic oligonucleotide
cggctgcattgagggcaagctttctcaaatgtcaaaggaagtgaacgccagaattgagcc

SEQ ID NO: 51897 - DNA, 60 bp, Artificial
  Synthetic oligonucleotide
cggctgcattgagggcaagctttctcaaatgtcaaaaggagtgaacgcaagaattgagcc

SEQ ID NO: 51898 - DNA, 60 bp, Artificial
  Synthetic oligonucleotide
gaacggctgcattgagggcaagctttctcaaatgtcaaaagaagtgaatgctaaaattga

SEQ ID NO: 51899 - DNA, 60 bp, Artificial
  Synthetic oligonucleotide
cggctgcattgagggcaagctttctcaaatgtcaaaagaggtgaatgctagaattgagcc

SEQ ID NO: 51900 - DNA, 60 bp, Artificial
  Synthetic oligonucleotide
gaacggatgcattgagggcaagctttctcaaatgtcaaaagaagtgaacgccagaattga

SEQ ID NO: 51901 - DNA, 60 bp, Artificial
  Synthetic oligonucleotide
cggctgcattgagggcaagctttctcaaatgtcaaaagaagtgaacgccagaattgacgc

SEQ ID NO: 51902 - DNA, 60 bp, Artificial
  Synthetic oligonucleotide
cggatgcattgagggcaagctttctcaaatgtcaaaagaagtgaacgccagaattgagcc

SEQ ID NO: 51903 - DNA, 60 bp, Artificial
  Synthetic oligonucleotide
cggctgcattgagggcaagctttctcaaatgtcaaaagaagtgagcgccagaattgagcc

SEQ ID NO: 51904 - DNA, 60 bp, Artificial
  Synthetic oligonucleotide
cggctgcattgagggcaagctttctcaaatgtcaaaagaagtgaatgctaaaattgagcc

SEQ ID NO: 51905 - DNA, 60 bp, Artificial
  Synthetic oligonucleotide
cggctgcattgagggcaagctttctcaaatgtcaaaaggagtgaacgccagaattgagcc

SEQ ID NO: 51906 - DNA, 60 bp, Artificial
  Synthetic oligonucleotide
cggctgcattgagggcaagctttctcaaatgtcgaaagaggtgaatgctagaattgagcc

SEQ ID NO: 51907 - DNA, 60 bp, Artificial
  Synthetic oligonucleotide
tcagcgttcagcccactttctcggtacagagaaaccttcccttcgaaagagcgaccatca

SEQ ID NO: 51908 - DNA, 60 bp, Artificial
  Synthetic oligonucleotide
tcagcgttcagcccactttctcggtacagagaaaccttcccttcgaaagagcgaccatta

SEQ ID NO: 51909 - DNA, 60 bp, Artificial
  Synthetic oligonucleotide
tttggcctagtgtgtgccacttgtgagcagattgcagattcacagcatcggtctcaccga

SEQ ID NO: 51910 - DNA, 60 bp, Artificial
  Synthetic oligonucleotide
tttggcctagtgtgtgccacttgtgagcagattgcagattcacagcatcggtctcacagg

SEQ ID NO: 51911 - DNA, 60 bp, Artificial
  Synthetic oligonucleotide
cactgatctcgaggctctcatggagtggctaaagacaagaccaatcctgtcacctctgac

SEQ ID NO: 51912 - DNA, 60 bp, Artificial
  Synthetic oligonucleotide
ccgatctcgaagctctcatggagtggctaaagacaagaccaatcctgtcacctctgacca

SEQ ID NO: 51913 - DNA, 50 bp, Artificial
  Synthetic oligonucleotide
agtacgacatagattgaaaattacagaaaacagcttcgaacagataacgt

SEQ ID NO: 51914 - DNA, 60 bp, Artificial
  Synthetic oligonucleotide
tgaccatgaagggaggctgatccagaacagcataacaatagagagaatggtactctctgc

SEQ ID NO: 51915 - DNA, 60 bp, Artificial
  Synthetic oligonucleotide
gaccatgaagggaggctgatccagaacagcataacaatagagagaatggtactctctgca

SEQ ID NO: 51916 - DNA, 60 bp, Artificial
  Synthetic oligonucleotide
gcattcagcccactttctcggtacagagaaaccttcccttcgaaagagcgaccattatgg

SEQ ID NO: 51917 - DNA, 54 bp, Artificial
  Synthetic oligonucleotide
ataatgctgagcttctggttctcatggaaaatgagagaactctagacttccatg

SEQ ID NO: 51918 - DNA, 60 bp, Artificial
  Synthetic oligonucleotide
ataatgctgagcttctggttctcatggaaaatgagagaactctagacttccatgactcaa

SEQ ID NO: 51919 - DNA, 60 bp, Artificial
  Synthetic oligonucleotide
gctgaacttctggttctcatggaaaatgagagaaccctagactttcatgactcaaatgtc

SEQ ID NO: 51920 - DNA, 60 bp, Artificial
  Synthetic oligonucleotide
gctgaacttctggttctcatggaaaatgagagaactctagacttccacgactcaaatgtc

SEQ ID NO: 51921 - DNA, 60 bp, Artificial
  Synthetic oligonucleotide
tgaacttctggttctcatggaaaatgagagaactctagacttccatgactcaaatgtcaa

SEQ ID NO: 51922 - DNA, 60 bp, Artificial
  Synthetic oligonucleotide
gggcagaacatctgacatgaggactgaaatcataagaatgatggaaagtgccagaccaga

SEQ ID NO: 51923 - DNA, 60 bp, Artificial
  Synthetic oligonucleotide
gggcaggacatctgacatgaggactgaaatcataagaatgatggaaagtgccagaccaga

SEQ ID NO: 51924 - DNA, 60 bp, Artificial
  Synthetic oligonucleotide
acatgagaactgaaatcataagaatgatggaaagtgccagaccagaagatgtgtctttcc

SEQ ID NO: 51925 - DNA, 60 bp, Artificial
  Synthetic oligonucleotide
agaactgggtgatgccccattccttgaccggcttcgccgagatcagaagtccctaaaagg

SEQ ID NO: 51926 - DNA, 56 bp, Artificial
  Synthetic oligonucleotide
aaaactgggtgatgccccattccttgaccggcttcgccgagatcagaagtccctaa

SEQ ID NO: 51927 - DNA, 60 bp, Artificial
  Synthetic oligonucleotide
ttcgaaagtaagagcatgaagttacgaacacaaataccagcagaaatgcttgcaaacatt

SEQ ID NO: 51928 - DNA, 60 bp, Artificial
  Synthetic oligonucleotide
gggacagggtacaccatggacacagtcaacagaacacaccaatattcagaaaaggggaag

SEQ ID NO: 51929 - DNA, 60 bp, Artificial
  Synthetic oligonucleotide
gggacaggatacaccatggacacagtcaacagaacacaccaatattcagaaaaggggaag

SEQ ID NO: 51930 - DNA, 60 bp, Artificial
  Synthetic oligonucleotide
gaaaccaaccggctgcaactgctttggccaacactatagaaatcttcagatcgaacggtc

SEQ ID NO: 51931 - DNA, 60 bp, Artificial
  Synthetic oligonucleotide
ccggctgcaactgctttggccaacactatagaaatcttcagatcgaacggtctgacagca

SEQ ID NO: 51932 - DNA, 60 bp, Artificial
  Synthetic oligonucleotide
ccggctgcaactgctttggccaacactatagaaatcttcagatcgaacggcctaacagcc

SEQ ID NO: 51933 - DNA, 60 bp, Artificial
  Synthetic oligonucleotide
accggcttcgccgagatcagaagtccctaagaggaagaagcaacactcttggtctggaca

SEQ ID NO: 51934 - DNA, 60 bp, Artificial
  Synthetic oligonucleotide
gggaggttttacatacagatgtgcacagaactcaaactcagtgactatgaagggaggctt

SEQ ID NO: 51935 - DNA, 60 bp, Artificial
  Synthetic oligonucleotide
ggtcccaagaggacaactatccaccagaggagttcaaattgcttcaaatgagaacatgga

SEQ ID NO: 51936 - DNA, 60 bp, Artificial
  Synthetic oligonucleotide
caccaaaaccacatattggtgggacggactccaatcctctgatgatttcgctctcatcgt

SEQ ID NO: 51937 - DNA, 60 bp, Artificial
  Synthetic oligonucleotide
acaccaaaaccacatattggtgggacggactccaatcctctgatgatttcgctctcatag

SEQ ID NO: 51938 - DNA, 60 bp, Artificial
  Synthetic oligonucleotide
ggtacaccaaaaccacatattggtgggacggactccaatcctctgatgatttcgccctca

SEQ ID NO: 51939 - DNA, 60 bp, Artificial
  Synthetic oligonucleotide
gctggtctcactcatctgatgatctggcattccaatctaaatgatgccacataccagagg

SEQ ID NO: 51940 - DNA, 60 bp, Artificial
  Synthetic oligonucleotide
gcggctttgaaatgatttgggatccaaatgggtggactgaaacggacagtagcttctcgg

SEQ ID NO: 51941 - DNA, 60 bp, Artificial
  Synthetic oligonucleotide
gagcggctttgaaatgatttgggatccaaatgggtggactgaaacggacagtagcttctc

SEQ ID NO: 51942 - DNA, 60 bp, Artificial
  Synthetic oligonucleotide
ttccaggagcggctttgaaatgatttgggatccaaatgggtggactgaaacggacagcaa

SEQ ID NO: 51943 - DNA, 60 bp, Artificial
  Synthetic oligonucleotide
tggatactctgcagacaaagaatccactcaaaaggcaatagatggagtcaccaataaggt

SEQ ID NO: 51944 - DNA, 60 bp, Artificial
  Synthetic oligonucleotide
ataaaatcagagaagacacacattcacatattctcattcactggagaggaaatggccacc

SEQ ID NO: 51945 - DNA, 60 bp, Artificial
  Synthetic oligonucleotide
caagtttcattagagggacaagagtggtcccaagaggacagctatccaccagaggggttc

SEQ ID NO: 51946 - DNA, 60 bp, Artificial
  Synthetic oligonucleotide
tgggggcgataaactctagtatgccattccacaacatacaccctctcactatcggggaat

SEQ ID NO: 51947 - DNA, 60 bp, Artificial
  Synthetic oligonucleotide
taggggcgataaactctagtatgccattccacaacatacaccctctcactatcggggaat

SEQ ID NO: 51948 - DNA, 60 bp, Artificial
  Synthetic oligonucleotide
tgggggcgataaactctagtatgccattccacaacatacaccctctcaccattggggaat

SEQ ID NO: 51949 - DNA, 60 bp, Artificial
  Synthetic oligonucleotide
aatgctgagattgaagatctcatttttctggcacggtctgcactcatcctgagaggatca

SEQ ID NO: 51950 - DNA, 60 bp, Artificial
  Synthetic oligonucleotide
ggctccgccgagatcagaagtccctaagaggaagaggcaacactcttggtctggacatcg

SEQ ID NO: 51951 - DNA, 54 bp, Artificial
  Synthetic oligonucleotide
tcattgttcaggcacttagggacaacctggaacctgggaccttcgatcttgggg

SEQ ID NO: 51952 - DNA, 55 bp, Artificial
  Synthetic oligonucleotide
ctcattgttcaggcacttagggacaacctggaacctgggaccttcgatcttgggg

SEQ ID NO: 51953 - DNA, 60 bp, Artificial
  Synthetic oligonucleotide
tacttctcattgttcaggcacttagggacaacctggaacctgggaccttcgatcttgggg

SEQ ID NO: 51954 - DNA, 58 bp, Artificial
  Synthetic oligonucleotide
cttctcattgttcaggcacttagggacaacctggaacctgggaccttcgatcttgggg

SEQ ID NO: 51955 - DNA, 60 bp, Artificial
  Synthetic oligonucleotide
ggaaggttttatatacagatgtgcactgaactcaaactcagtgactatgaagggaggctg

SEQ ID NO: 51956 - DNA, 60 bp, Artificial
  Synthetic oligonucleotide
gaatatgcatacaaaattgtcaagaaaggggactcagcaattatgaaaagtgaagtggaa

SEQ ID NO: 51957 - DNA, 57 bp, Artificial
  Synthetic oligonucleotide
cgactatgagggaaggctgatccagaacagcataacaatagagagaatggttctctc

SEQ ID NO: 51958 - DNA, 60 bp, Artificial
  Synthetic oligonucleotide
gaatgctgaaattgaagaccttatttttctggcacggtctgcactcatcctgagaggatc

SEQ ID NO: 51959 - DNA, 60 bp, Artificial
  Synthetic oligonucleotide
ggctaggcagatggtgcaggcaatgaggacaattgggactcatcctaactccagtgctgg

SEQ ID NO: 51960 - DNA, 60 bp, Artificial
  Synthetic oligonucleotide
cagcgttcagcccactttctcggtacagagaaaccttcccttcgaaagagcgaccatcat

SEQ ID NO: 51961 - DNA, 60 bp, Artificial
  Synthetic oligonucleotide
cgtctgcttcaaaacagccaggtctttagtctcattaggccaaatgagaatccagcacat

SEQ ID NO: 51962 - DNA, 60 bp, Artificial
  Synthetic oligonucleotide
actacggaagtggcctttggcctagtgtgtgccacttgtgagcagattgcagattcacag

SEQ ID NO: 51963 - DNA, 60 bp, Artificial
  Synthetic oligonucleotide
agggagtgtacataaacacagccctgttgaatgcatcctgtgcagccatggatgactttc

SEQ ID NO: 51964 - DNA, 60 bp, Artificial
  Synthetic oligonucleotide
ctggttctcatggaaaatgagagaactctagactttcatgactcaaatgtcaagaacctc

SEQ ID NO: 51965 - DNA, 60 bp, Artificial
  Synthetic oligonucleotide
gggaggctgatccagaacagcataacaatagagagaatggtactttctgcattcgatgaa

SEQ ID NO: 51966 - DNA, 60 bp, Artificial
  Synthetic oligonucleotide
gggaggttctacatacagatgtgcacagagctcaaactcagtgactatgaagggaggctg

SEQ ID NO: 51967 - DNA, 60 bp, Artificial
  Synthetic oligonucleotide
agacagaagccctcacagaacattaatgagttgtcctgtgggtgaggctccctccccata

SEQ ID NO: 51968 - DNA, 60 bp, Artificial
  Synthetic oligonucleotide
gacagaagccctcacagaacattaatgagttgtcctgtgggtgaggctccctccccatac

SEQ ID NO: 51969 - DNA, 60 bp, Artificial
  Synthetic oligonucleotide
gacagaagccctcacagaacattaatgagttgtcctgtgggtgaggctccctccccatat

SEQ ID NO: 51970 - DNA, 60 bp, Artificial
  Synthetic oligonucleotide
gaatttcattgctccagaatatgcatacaaaattgtcaagaaaggggactcagcaattat

SEQ ID NO: 51971 - DNA, 60 bp, Artificial
  Synthetic oligonucleotide
aaatttcattgctccagaatatgcatacaaaattgtcaagaaaggggactcagcaattat

SEQ ID NO: 51972 - DNA, 55 bp, Artificial
  Synthetic oligonucleotide
aaatttcattgctccagaatatgcatacaaaattgtcaagaaaggggactcagca

SEQ ID NO: 51973 - DNA, 60 bp, Artificial
  Synthetic oligonucleotide
cccagatttgtatgactacaaagagaaccgattcattgaaattggagtgacacgaaggga

SEQ ID NO: 51974 - DNA, 60 bp, Artificial
  Synthetic oligonucleotide
gcagaacgtctgacatgaggactgaaatcataagaatgatggaaagtgctagaccagaag

SEQ ID NO: 51975 - DNA, 60 bp, Artificial
  Synthetic oligonucleotide
aatatataatgaagggagtgtacataaacacagccctgttgaatgcatcctgtgcagcca

SEQ ID NO: 51976 - DNA, 60 bp, Artificial
  Synthetic oligonucleotide
acaggaaccatgcgcaggcttgccgaccaaagtctcccaccgaacttctccagccttgaa

SEQ ID NO: 51977 - DNA, 60 bp, Artificial
  Synthetic oligonucleotide
gtggatatgactttgagagagaagggtactctctggttggaatagatcctttccgcctgc

SEQ ID NO: 51978 - DNA, 60 bp, Artificial
  Synthetic oligonucleotide
atcaagagttggaggaacaatatactgagaactcaagagtctgaatgtgcatgtgtaaat

SEQ ID NO: 51979 - DNA, 60 bp, Artificial
  Synthetic oligonucleotide
cccaaggggacagctatctactagaggagttcaaattgcttcaaatgagaacatggaagc

SEQ ID NO: 51980 - DNA, 57 bp, Artificial
  Synthetic oligonucleotide
tgatgatatggcattccaatctaaatgatgccacatatcagagaacgagagctctcg

SEQ ID NO: 51981 - DNA, 52 bp, Artificial
  Synthetic oligonucleotide
atatggcattccaatctaaatgatgccacatatcagagaacgagagctctcg

SEQ ID NO: 51982 - DNA, 60 bp, Artificial
  Synthetic oligonucleotide
atatggcattccaatctaaatgatgccacatatcagagaacgagagctctcgtgcgtact

SEQ ID NO: 51983 - DNA, 60 bp, Artificial
  Synthetic oligonucleotide
ggtttagattgcataagaccttgtttctgggttgagttaatcagagggcggcccaaagag

SEQ ID NO: 51984 - DNA, 60 bp, Artificial
  Synthetic oligonucleotide
gctgaatcaaggaaattgcttctcattgttcaggcacttagggacaacctggaacctggg

SEQ ID NO: 51985 - DNA, 60 bp, Artificial
  Synthetic oligonucleotide
tcattgttcaggcacttagggacaacctggaacctgggaccttcgatcttggggggctat

SEQ ID NO: 51986 - DNA, 60 bp, Artificial
  Synthetic oligonucleotide
cttctcattgttcaggcacttagggacaacctggaacctgggaccttcgatcttgggggg

SEQ ID NO: 51987 - DNA, 60 bp, Artificial
  Synthetic oligonucleotide
ctcattgttcaggcacttagggacaacctggaacctgggaccttcgatcttggggggcta

SEQ ID NO: 51988 - DNA, 60 bp, Artificial
  Synthetic oligonucleotide
ctttgagagagaagggtactctctggttggaatagatcctttccgtctgcttcaaaacag

SEQ ID NO: 51989 - DNA, 60 bp, Artificial
  Synthetic oligonucleotide
ggcgtctcaaggcaccaaacgatcctatgaacagatggaaactggtggagaacgccagaa

SEQ ID NO: 51990 - DNA, 60 bp, Artificial
  Synthetic oligonucleotide
cgtcgccttaaatacggtttgaaaagagggccttctacggcaggggtacctgagtctatg

SEQ ID NO: 51991 - DNA, 60 bp, Artificial
  Synthetic oligonucleotide
tcgtcgccttaaatacggtttgaaaagagggccttctacggcaggggtacctgagtctat

SEQ ID NO: 51992 - DNA, 60 bp, Artificial
  Synthetic oligonucleotide
aagtaagagcatgaaattacgaacacaaataccagcagaaatgcttgcaaacattgatct

SEQ ID NO: 51993 - DNA, 60 bp, Artificial
  Synthetic oligonucleotide
gtaagagcatgaaattacgaacacaaataccagcagaaatgcttgcaaacattgatctta

SEQ ID NO: 51994 - DNA, 60 bp, Artificial
  Synthetic oligonucleotide
caccgatctcgaggccctcatggagtggctaaagacaagaccaatcctgtcacctctgac

SEQ ID NO: 51995 - DNA, 60 bp, Artificial
  Synthetic oligonucleotide
ttggaggaacaacatactgagaactcaagagtctgaatgtgcatgtgtaaatggctcttg

SEQ ID NO: 51996 - DNA, 60 bp, Artificial
  Synthetic oligonucleotide
tggaggaacaacatactgagaactcaagagtctgaatgtgcatgtgtaaatggctcttgc

SEQ ID NO: 51997 - DNA, 60 bp, Artificial
  Synthetic oligonucleotide
gcgtcctcatcggaggacttgaatggaatgataacacagttcgagtctctgaaactatac

SEQ ID NO: 51998 - DNA, 60 bp, Artificial
  Synthetic oligonucleotide
cgtcctcatcggaggacttgaatggaatgataacacagttcgagtctctgaaactataca

SEQ ID NO: 51999 - DNA, 60 bp, Artificial
  Synthetic oligonucleotide
tggcgtcctcatcggaggacttgaatggaatgataacacagttcgagtctctgaaactat

SEQ ID NO: 52000 - DNA, 60 bp, Artificial
  Synthetic oligonucleotide
cagatcagcgttcagcccactttctcggtgcagagaaaccttcccttcgaaagagcgacc

SEQ ID NO: 52001 - DNA, 60 bp, Artificial
  Synthetic oligonucleotide
ttagagagccattcatctcatgttcccacttggaatgcagaactttctttttgactcagg

SEQ ID NO: 52002 - DNA, 60 bp, Artificial
  Synthetic oligonucleotide
catactgagaactcaagagtctgaatgtgcatgtgtaaatggctcttgctttactgtaat

SEQ ID NO: 52003 - DNA, 60 bp, Artificial
  Synthetic oligonucleotide
gggaggttttacatacagatgtgcactgaactcaaactcagtgactatgaagggaggctg

SEQ ID NO: 52004 - DNA, 60 bp, Artificial
  Synthetic oligonucleotide
taaaagggttttcatttaaatacggcaatggtgtttggatcgggagaaccaaaagcacta

SEQ ID NO: 52005 - DNA, 60 bp, Artificial
  Synthetic oligonucleotide
aagggttttcatttaaatacggcaatggtgtttggatcgggagaaccaaaagcactaact

SEQ ID NO: 52006 - DNA, 60 bp, Artificial
  Synthetic oligonucleotide
ttagggagccgttcatctcatgctcccacttggaatgcagaactttctttttgactcatg

SEQ ID NO: 52007 - DNA, 55 bp, Artificial
  Synthetic oligonucleotide
aatactaattttcttactgagaaagctgtggcttcagtaacattagcgggcaatt

SEQ ID NO: 52008 - DNA, 60 bp, Artificial
  Synthetic oligonucleotide
gagaagggtactctctggttggaatagatcctttccgtttgcttcaaaacagccaggtct

SEQ ID NO: 52009 - DNA, 60 bp, Artificial
  Synthetic oligonucleotide
tactgagggcaggacatctgacatgaggactgaaatcataagaatgatggaaagtgccag

SEQ ID NO: 52010 - DNA, 60 bp, Artificial
  Synthetic oligonucleotide
tcaaatagggtatatatgcagtggagttttcggagacaatccacgccccaatgatggaac

SEQ ID NO: 52011 - DNA, 60 bp, Artificial
  Synthetic oligonucleotide
tcttggggggctatatgaagcaattgaggagtgcctgattaatgatccctgggttttgct

SEQ ID NO: 52012 - DNA, 60 bp, Artificial
  Synthetic oligonucleotide
gggctatatgaagcaattgaggagtgcctgattaatgatccctgggttttgcttaatgcg

SEQ ID NO: 52013 - DNA, 60 bp, Artificial
  Synthetic oligonucleotide
cttggggggctatatgaagcaattgaggagtgcctgattaatgatccctgggttttgctt

SEQ ID NO: 52014 - DNA, 60 bp, Artificial
  Synthetic oligonucleotide
cgtagacgctttgtccagaatgccctaaatggaaatggagatccaaataatatggatagg

SEQ ID NO: 52015 - DNA, 60 bp, Artificial
  Synthetic oligonucleotide
gacgctttgtccagaatgccctaaatggaaatggagatccaaataatatggataaggcag

SEQ ID NO: 52016 - DNA, 60 bp, Artificial
  Synthetic oligonucleotide
acccaaggccgccagacctatgactggacattgaatagaaaccaaccggctgcaactgct

SEQ ID NO: 52017 - DNA, 60 bp, Artificial
  Synthetic oligonucleotide
ggccgccagacctatgactggacattgaatagaaaccaaccggctgcaactgctttggcc

SEQ ID NO: 52018 - DNA, 60 bp, Artificial
  Synthetic oligonucleotide
ataatgctgaacttctggttctcatggaaaatgagagaactctagacttccacgactcaa

SEQ ID NO: 52019 - DNA, 60 bp, Artificial
  Synthetic oligonucleotide
ataatgctgaacttctggttctcatggaaaatgagagaaccctagactttcatgactcaa

SEQ ID NO: 52020 - DNA, 60 bp, Artificial
  Synthetic oligonucleotide
ccatggagctaaggaggtcgcactcagctactcaaccggtgcacttgccagttgcatggg

SEQ ID NO: 52021 - DNA, 60 bp, Artificial
  Synthetic oligonucleotide
accttcgatcttggagggctatatgaagcaattgaggagtgcctgattaacgatccctgg

SEQ ID NO: 52022 - DNA, 60 bp, Artificial
  Synthetic oligonucleotide
tgtccgcaaacgatttgcagaccaagaaatgggtgatgccccattccttgaccggcttcg

SEQ ID NO: 52023 - DNA, 60 bp, Artificial
  Synthetic oligonucleotide
aatcaggctaggcagatggtgcaggcaatgaggacaattgggactcatcctaactccagt

SEQ ID NO: 52024 - DNA, 60 bp, Artificial
  Synthetic oligonucleotide
atgtgtaaatggctcttgctttactgtaatgactgatggaccaagtaatgggcaggcttc

SEQ ID NO: 52025 - DNA, 60 bp, Artificial
  Synthetic oligonucleotide
atgtgtaaatggctcttgctttactgtaatgactgatggaccaagtaatgggcaggcgtc

SEQ ID NO: 52026 - DNA, 60 bp, Artificial
  Synthetic oligonucleotide
tagggtatatatgcagtggagttttcggagacaatccacgccccaatgatggaacaggta

SEQ ID NO: 52027 - DNA, 60 bp, Artificial
  Synthetic oligonucleotide
ggtgatgccccattccttgaccggcttcgccgagatcagaagtccctaaaaggaagaggc

SEQ ID NO: 52028 - DNA, 60 bp, Artificial
  Synthetic oligonucleotide
aaacgatttgcagaccaagaactgagtgatgccccattccttgaccggcttcgccgagat

SEQ ID NO: 52029 - DNA, 60 bp, Artificial
  Synthetic oligonucleotide
cagaccaagaactgagtgatgccccattccttgaccggcttcgccgagatcagaagtccc

SEQ ID NO: 52030 - DNA, 60 bp, Artificial
  Synthetic oligonucleotide
gcaaacgatttgcagaccaaaaactgggtgatgccccattccttgaccggcttcgccgag

SEQ ID NO: 52031 - DNA, 60 bp, Artificial
  Synthetic oligonucleotide
ccccattccttgaccggcttcgccgagatcagaagtccctaaggggaagaggcaacactc

SEQ ID NO: 52032 - DNA, 60 bp, Artificial
  Synthetic oligonucleotide
ttctcattgttcaggcacttagggacaacctggaacctggaaccttcgatcttggggggc

SEQ ID NO: 52033 - DNA, 57 bp, Artificial
  Synthetic oligonucleotide
ttctcattgttcaggcacttagggacaacctggaacctggaaccttcgatcttgggg

SEQ ID NO: 52034 - DNA, 60 bp, Artificial
  Synthetic oligonucleotide
ggcgtctcaaggcaccaaacggtcttatgaacagatggaaactggtggagaacgccagaa

SEQ ID NO: 52035 - DNA, 60 bp, Artificial
  Synthetic oligonucleotide
atcaatagttggaggaacaacatactgagaactcaagagtctgaatgtgcatgtgtaaat

SEQ ID NO: 52036 - DNA, 55 bp, Artificial
  Synthetic oligonucleotide
gttaaaagtgatcagatttgcattggttaccatgcaaacaactcgacagagcagg

SEQ ID NO: 52037 - DNA, 55 bp, Artificial
  Synthetic oligonucleotide
gtcaaaagtgatcagatttgcattggttaccatgcaaacaactcgacagagcagg

SEQ ID NO: 52038 - DNA, 60 bp, Artificial
  Synthetic oligonucleotide
ggccagtggatacgactttgagagagaagggtactctctggttggaatagatcctttccg

SEQ ID NO: 52039 - DNA, 60 bp, Artificial
  Synthetic oligonucleotide
agaactgggtgatgccccattccttgaccggcttcgccgagatcagaagtccctaagggg

SEQ ID NO: 52040 - DNA, 60 bp, Artificial
  Synthetic oligonucleotide
ctctgtcaagctttcaggtagactgctttctttggcatgtccgcaaacgatttgcagacc

SEQ ID NO: 52041 - DNA, 60 bp, Artificial
  Synthetic oligonucleotide
ggactccaacactgtgtcaagctttcaggtagactgctttctttggcatgtccgcaagcg

SEQ ID NO: 52042 - DNA, 60 bp, Artificial
  Synthetic oligonucleotide
cagtgtcaagctttcaggtagactgctttctttggcatgtccgcaaacgatttgcagacc

SEQ ID NO: 52043 - DNA, 60 bp, Artificial
  Synthetic oligonucleotide
gaatcaagaaaattgcttctcattgttcaggcacttagggacaacctggaacctgggacc

SEQ ID NO: 52044 - DNA, 60 bp, Artificial
  Synthetic oligonucleotide
ttagggacaacctggaacctgggaccttcgatcttggggggctatatgaagcaattgagg

SEQ ID NO: 52045 - DNA, 60 bp, Artificial
  Synthetic oligonucleotide
gggaccttcgatcttggggggctatatgaagcaattgaggagtgcctgattaacgatccc

SEQ ID NO: 52046 - DNA, 60 bp, Artificial
  Synthetic oligonucleotide
gaaccttcgatcttggggggctatatgaagcaattgaggagtgcctgattaacgatccct

SEQ ID NO: 52047 - DNA, 60 bp, Artificial
  Synthetic oligonucleotide
ggaccttcgatcttggggggctatatgaagcaattgaggagtgcctgattaacgatccct

SEQ ID NO: 52048 - DNA, 60 bp, Artificial
  Synthetic oligonucleotide
tggggggctatatgaagcaattgaggagtgcctgattaacgatccctgggtattgcttaa

SEQ ID NO: 52049 - DNA, 60 bp, Artificial
  Synthetic oligonucleotide
tagcttctcggtgaaacaagatatagtagcaataactgattggtcaggatatagcgggag

SEQ ID NO: 52050 - DNA, 60 bp, Artificial
  Synthetic oligonucleotide
atttgtatgactacaaagagaaccgattcattgaaattggagtgacacgaagggaagttc

SEQ ID NO: 52051 - DNA, 60 bp, Artificial
  Synthetic oligonucleotide
cattgctccagaatatgcatacaaaattgtcaagaaaggggactcagcaattatgaaaag

SEQ ID NO: 52052 - DNA, 60 bp, Artificial
  Synthetic oligonucleotide
ggcaccaaacgatcctatgaacagatggagactggtggagaacgccagaatgctactgag

SEQ ID NO: 52053 - DNA, 60 bp, Artificial
  Synthetic oligonucleotide
acttggaatgcagaactttctttttgactcagggagccttgctgaatgacaagcactcca

SEQ ID NO: 52054 - DNA, 60 bp, Artificial
  Synthetic oligonucleotide
cgactatgagggaaggctgatccagaacagcataacaatagagagaatggttctctctgc

SEQ ID NO: 52055 - DNA, 59 bp, Artificial
  Synthetic oligonucleotide
ggggctatatgaagcaattgaggagtgcctgattaacgatccctgggttttgcttaatg

SEQ ID NO: 52056 - DNA, 58 bp, Artificial
  Synthetic oligonucleotide
ggggctatatgaagcaattgaggagtgcctgattaacgatccctgggttttgcttaat

SEQ ID NO: 52057 - DNA, 60 bp, Artificial
  Synthetic oligonucleotide
ggggctatatgaagcaattgaggagtgcctgattaacgatccctgggtattgcttaatgc

SEQ ID NO: 52058 - DNA, 60 bp, Artificial
  Synthetic oligonucleotide
ggggggctatatgaagcaattgaggagtgcctgattaacgatccctgggttttgcttaat

SEQ ID NO: 52059 - DNA, 60 bp, Artificial
  Synthetic oligonucleotide
atggcgtctcaaggcaccaaacgatcttatgaacagatggaaactggtggagagcgccag

SEQ ID NO: 52060 - DNA, 60 bp, Artificial
  Synthetic oligonucleotide
ggggcaccccaactcaacccgattgatggaccactacctgaggataatgagcccagtggg

SEQ ID NO: 52061 - DNA, 60 bp, Artificial
  Synthetic oligonucleotide
gagactggggcaccccaactcaacccgattgatggaccactacctgaggataatgagccc

SEQ ID NO: 52062 - DNA, 60 bp, Artificial
  Synthetic oligonucleotide
ggagcaccccaactcaacccgattgatggaccactacctgaggataatgagcccagtggg

SEQ ID NO: 52063 - DNA, 60 bp, Artificial
  Synthetic oligonucleotide
aatcaggctaggcagatggtgcaggcaatgaggacaattgggactcatcctaattctagt

SEQ ID NO: 52064 - DNA, 60 bp, Artificial
  Synthetic oligonucleotide
aatcaggctaggcagatggtgcaggcaatgaggacaattgggactcatcctagctctagt

SEQ ID NO: 52065 - DNA, 60 bp, Artificial
  Synthetic oligonucleotide
ggaggaacaacatactgagaactcaagagtctgaatgtgcatgtgtaaatggctcatgct

SEQ ID NO: 52066 - DNA, 60 bp, Artificial
  Synthetic oligonucleotide
ttgaagaagtacgacatagattgaaaattacagaaaacagcttcgaacagataacgttta

SEQ ID NO: 52067 - DNA, 59 bp, Artificial
  Synthetic oligonucleotide
gattgaagaagtacgacatagattgaaaattacagaaaacagcttcgaacagataacgt

SEQ ID NO: 52068 - DNA, 60 bp, Artificial
  Synthetic oligonucleotide
tcatttaaatacggcaatggtgtttggatcgggagaaccaaaagcactaattccaggagc

SEQ ID NO: 52069 - DNA, 60 bp, Artificial
  Synthetic oligonucleotide
tacggcaatggtgtttggatcgggagaaccaaaagcactaattccaggagcggctttgaa

SEQ ID NO: 52070 - DNA, 60 bp, Artificial
  Synthetic oligonucleotide
gcaggacagatcagcgttcagcccactttctcggtacagagaaaccttcctttcgaaaga

SEQ ID NO: 52071 - DNA, 60 bp, Artificial
  Synthetic oligonucleotide
ttctgcaggacagatcagcgttcagcccactttctcggtacagagaaaccttcctttcga

SEQ ID NO: 52072 - DNA, 60 bp, Artificial
  Synthetic oligonucleotide
cggggacaggatacaccatggacacagtcaacagaacacaccaatattcagaaaagggga

SEQ ID NO: 52073 - DNA, 60 bp, Artificial
  Synthetic oligonucleotide
attgggaggttttatatacagatgtgcactgaactcaaactcagtgactatgaagggagg

SEQ ID NO: 52074 - DNA, 60 bp, Artificial
  Synthetic oligonucleotide
ggggacaatacaaaatggaatgagaatcagaatcctaggatgtttctggcaatgataacg

SEQ ID NO: 52075 - DNA, 60 bp, Artificial
  Synthetic oligonucleotide
cctctattaatagatggtgcagcctcattgagccctggaatgatgatgggcatgttcaac

SEQ ID NO: 52076 - DNA, 60 bp, Artificial
  Synthetic oligonucleotide
ttggtctagtgtgtgccacttgtgagcagattgcagattcacagcatcggtctcacagac

SEQ ID NO: 52077 - DNA, 60 bp, Artificial
  Synthetic oligonucleotide
gcaagggtcaactctcccgaggagatctggagctgccggtgcagcagtgaagggggtggg

SEQ ID NO: 52078 - DNA, 60 bp, Artificial
  Synthetic oligonucleotide
ggcgataaactctagtatgccattccacaacatacaccctctcaccatcggggaatgccc

SEQ ID NO: 52079 - DNA, 60 bp, Artificial
  Synthetic oligonucleotide
agagtctgaatgtgcatgtgtaaatggctcttgctttactgtaatgactgacggaccaag

SEQ ID NO: 52080 - DNA, 60 bp, Artificial
  Synthetic oligonucleotide
ctgaatgtgcatgtgtaaatggctcttgctttactgtaatgactgacggaccaagtaatg

SEQ ID NO: 52081 - DNA, 60 bp, Artificial
  Synthetic oligonucleotide
gcatgtgtaaatggctcttgctttactgtaatgactgacggaccaagtaatgggcaggca

SEQ ID NO: 52082 - DNA, 60 bp, Artificial
  Synthetic oligonucleotide
tgaatgtgcatgtgtaaatggctcttgctttactgtaatgactgatggaccaagtaatgg

SEQ ID NO: 52083 - DNA, 60 bp, Artificial
  Synthetic oligonucleotide
gcatgtgtaaatggctcttgctttactgtaatgactgatggaccaagtaatgggcaggca

SEQ ID NO: 52084 - DNA, 60 bp, Artificial
  Synthetic oligonucleotide
tgactatgaagggagactgatccagaacagcataacaatagagagaatggtactttctgc

SEQ ID NO: 52085 - DNA, 60 bp, Artificial
  Synthetic oligonucleotide
gactatgaagggagactgatccagaacagcataacaatagagagaatggtactttctgca

SEQ ID NO: 52086 - DNA, 60 bp, Artificial
  Synthetic oligonucleotide
gagagctcttgtgcgtactggaatggaccccaggatgtgctctctgatgcaagggtcaac

SEQ ID NO: 52087 - DNA, 60 bp, Artificial
  Synthetic oligonucleotide
gagagctctcgtgcgtactggaatggaccccaggatgtgctctctgatgcaagggtcaac

SEQ ID NO: 52088 - DNA, 60 bp, Artificial
  Synthetic oligonucleotide
acgagagctctcgtgcgtactggaatggaccccaggatgtgctctctgatgcaagggtca

SEQ ID NO: 52089 - DNA, 60 bp, Artificial
  Synthetic oligonucleotide
aacgagagctctcgtgcgtactggaatggaccccaggatgtgctctctgatgcaagggtc

SEQ ID NO: 52090 - DNA, 60 bp, Artificial
  Synthetic oligonucleotide
gcgagctctcgtgcgtactggaatggaccccaggatgtgctctctgatgcaagggtcaac

SEQ ID NO: 52091 - DNA, 60 bp, Artificial
  Synthetic oligonucleotide
aagagctctcgtgcgtactggaatggaccccaggatgtgctctctgatgcaagggtcaac

SEQ ID NO: 52092 - DNA, 60 bp, Artificial
  Synthetic oligonucleotide
gcgtactggaatggaccccaggatgtgctctctgatgcaaggatcaactctcccaaggag

SEQ ID NO: 52093 - DNA, 60 bp, Artificial
  Synthetic oligonucleotide
cttctgggttgagttaatcagagggcggcccaaagagagcacaatttggactagtgggag

SEQ ID NO: 52094 - DNA, 60 bp, Artificial
  Synthetic oligonucleotide
caggaaatactgagggcagaacgtctgacatgaggactgaaatcataagaatgatggaaa

SEQ ID NO: 52095 - DNA, 60 bp, Artificial
  Synthetic oligonucleotide
cgtacgttctctctatcatcccgtcaggccccctcaaagccgagatcgcgcagaaacttg

SEQ ID NO: 52096 - DNA, 60 bp, Artificial
  Synthetic oligonucleotide
tgtccgcaagcgatttgcagaccaagaactgggtgatgccccattccttgaccggcttcg

SEQ ID NO: 52097 - DNA, 60 bp, Artificial
  Synthetic oligonucleotide
ttctgcaggacaaatcagcgttcagcccactttctcggtacagagaaaccttcctttcga

SEQ ID NO: 52098 - DNA, 60 bp, Artificial
  Synthetic oligonucleotide
acgatcttatgaacagatggaaactggtggagaacgccagaatgccactgaaatcagggc

SEQ ID NO: 52099 - DNA, 60 bp, Artificial
  Synthetic oligonucleotide
ttgcaggaaagaacaccgatctcgaggctctcatggagtggctaaagacaagaccaatcc

SEQ ID NO: 52100 - DNA, 60 bp, Artificial
  Synthetic oligonucleotide
atcaagagttggaggaacaacatattgagaactcaagagtctgaatgtgcatgtgtaaat

SEQ ID NO: 52101 - DNA, 60 bp, Artificial
  Synthetic oligonucleotide
atgccgaacttctggttctcatggaaaatgagagaactctagactttcatgactcaaatg

SEQ ID NO: 52102 - DNA, 60 bp, Artificial
  Synthetic oligonucleotide
ccagaatatgcatacaaaattgtcaagaaaggggactcagcaattatgaaaagtgaagtg

SEQ ID NO: 52103 - DNA, 60 bp, Artificial
  Synthetic oligonucleotide
ccccagaatatgcatacaaaattgtcaagaaaggggactcagcaattatgaaaagtgaag

SEQ ID NO: 52104 - DNA, 60 bp, Artificial
  Synthetic oligonucleotide
gacagaagccctcacagaacattaatgagttgtcctgtgggtgaggctccctccccttat

SEQ ID NO: 52105 - DNA, 60 bp, Artificial
  Synthetic oligonucleotide
gaaagaacaccgatctcgaggctctcatggagtggctaaagacaagaccaatcctgtcac

SEQ ID NO: 52106 - DNA, 60 bp, Artificial
  Synthetic oligonucleotide
caccgatctcgaggctctcatggagtggctaaagacaagaccaatcctgtcacctttgac

SEQ ID NO: 52107 - DNA, 60 bp, Artificial
  Synthetic oligonucleotide
atggatttcaacactgtgtcaagctttcaggtagactgctttctttggcatgtccgcaaa

SEQ ID NO: 52108 - DNA, 60 bp, Artificial
  Synthetic oligonucleotide
caccatcaagagttggaggaacaacatactgagaactcaagagtctgaatgtgcatgtgt

SEQ ID NO: 52109 - DNA, 60 bp, Artificial
  Synthetic oligonucleotide
actacggaagtggcttttggcttagtgtgtgccacttgtgagcagattgcagattcacag

SEQ ID NO: 52110 - DNA, 60 bp, Artificial
  Synthetic oligonucleotide
acttggaatgcagaactttctttttgactcagggagccttactgaatgacaagcactcca

SEQ ID NO: 52111 - DNA, 60 bp, Artificial
  Synthetic oligonucleotide
ctgtgtcaagctttcaggtagactgctttctttggcaagtccgcaaacgatttgcagacc

SEQ ID NO: 52112 - DNA, 60 bp, Artificial
  Synthetic oligonucleotide
ggaggaacaatatactgagaactcaagagtctgaatgtgcatgtgtaaatggctcttgct

SEQ ID NO: 52113 - DNA, 60 bp, Artificial
  Synthetic oligonucleotide
aatgcagaactttctttttgactcagggagccttactgaatgacaagcactccaacggga

SEQ ID NO: 52114 - DNA, 60 bp, Artificial
  Synthetic oligonucleotide
cggattcctagatgtctggacttataacgctgaacttctggttctcatggaaaatgagag

SEQ ID NO: 52115 - DNA, 60 bp, Artificial
  Synthetic oligonucleotide
agaaacctaaatttctcccagatttgtatgactacaaagagaaccgattcattgaaattg

SEQ ID NO: 52116 - DNA, 60 bp, Artificial
  Synthetic oligonucleotide
agaccttgtttctgggttgagttaatcagagggcggcccaaagagagcacaatttggact

SEQ ID NO: 52117 - DNA, 60 bp, Artificial
  Synthetic oligonucleotide
taatgagcaggggagtggatacgctgcagacaaagaatccactcaaaaggcaatagatgg

SEQ ID NO: 52118 - DNA, 60 bp, Artificial
  Synthetic oligonucleotide
gaatgctgaaattgaagatctcattttcctggcacggtctgcactcatcctgagaggatc

SEQ ID NO: 52119 - DNA, 60 bp, Artificial
  Synthetic oligonucleotide
tgctgaaattgaagatctcattttcctggcacggtctgcactcatcctgagaggatcagt

SEQ ID NO: 52120 - DNA, 60 bp, Artificial
  Synthetic oligonucleotide
gggaatgccgaaattgaagatctcatcttcctggcacggtctgcactcatcctgagagga

SEQ ID NO: 52121 - DNA, 60 bp, Artificial
  Synthetic oligonucleotide
tgatgagcccagtgggtatgcacaaacagattgtgtattggaagcaatggctttccttga

SEQ ID NO: 52122 - DNA, 60 bp, Artificial
  Synthetic oligonucleotide
ataatgagcccagtgggtatgcacaaacagattgtgtattggaagcaatggctttccttg

SEQ ID NO: 52123 - DNA, 60 bp, Artificial
  Synthetic oligonucleotide
taatgagcccagtgggtatgcacaaacagattgtgtattggaagcaatggctttccttga

SEQ ID NO: 52124 - DNA, 60 bp, Artificial
  Synthetic oligonucleotide
gaccactacctgaggataatgagcccagtgggtatgcacaaacagattgtgtattggaag

SEQ ID NO: 52125 - DNA, 60 bp, Artificial
  Synthetic oligonucleotide
cctgaggataatgagcccagtgggtatgcacaaacagattgtgtattggaagcaatggct

SEQ ID NO: 52126 - DNA, 60 bp, Artificial
  Synthetic oligonucleotide
cccgattgatggaccactacctgaggataatgagcccagtgggtatgcacaaacagattg

SEQ ID NO: 52127 - DNA, 60 bp, Artificial
  Synthetic oligonucleotide
cccaattgatggaccactacctgaggataatgagcccagtgggtatgcacaaacagattg

SEQ ID NO: 52128 - DNA, 60 bp, Artificial
  Synthetic oligonucleotide
ctgtggcaagctttcaggtagactgctttctttggcatgtccgcaaacgatttgcagacc

SEQ ID NO: 52129 - DNA, 60 bp, Artificial
  Synthetic oligonucleotide
atggattccaacactgtgtcaagctttcaggtagactgctttctttggcatgtccgcaag

SEQ ID NO: 52130 - DNA, 60 bp, Artificial
  Synthetic oligonucleotide
atggactccaacactgtgtcaagctttcaggtagactgctttctttggcatgtccgcaag

SEQ ID NO: 52131 - DNA, 60 bp, Artificial
  Synthetic oligonucleotide
ttgccatgatggcaccagttggttgacaattggaatttctggcccagacaatggggctgt

SEQ ID NO: 52132 - DNA, 60 bp, Artificial
  Synthetic oligonucleotide
ccatgacggcaccagttggttgacaattggaatttctggcccagacaatggggctgtggc

SEQ ID NO: 52133 - DNA, 60 bp, Artificial
  Synthetic oligonucleotide
ggcaccagttggttgacaattggaatttctggcccagacagtggggctgtggctgtgttg

SEQ ID NO: 52134 - DNA, 60 bp, Artificial
  Synthetic oligonucleotide
ggcaccagttggttgacaattggaatttctggcccagacaatggggctgtggctgtactg

SEQ ID NO: 52135 - DNA, 60 bp, Artificial
  Synthetic oligonucleotide
tgatggcaccagttggttgacaattggaatttctggcccagacaatggggctgtggctgt

SEQ ID NO: 52136 - DNA, 60 bp, Artificial
  Synthetic oligonucleotide
gacagctatccaccagaggggttcaaattgcttcaaatgagaacatggaaacaatggact

SEQ ID NO: 52137 - DNA, 60 bp, Artificial
  Synthetic oligonucleotide
gaatgctgaaattgaggatctcatttttctggcacggtctgcactcatcctgagaggatc

SEQ ID NO: 52138 - DNA, 60 bp, Artificial
  Synthetic oligonucleotide
ggcaccaaacgatcttacgaacagatggaaactggtggagaacgccagaatgctactgag

SEQ ID NO: 52139 - DNA, 60 bp, Artificial
  Synthetic oligonucleotide
acgatctcatgaacagatggaaactggtggagaacgccagaatgctactgagatcagggc

SEQ ID NO: 52140 - DNA, 60 bp, Artificial
  Synthetic oligonucleotide
gggaggttctacatacagatgtgcacagaactcaaactcagtgactatgaagggagactg

SEQ ID NO: 52141 - DNA, 60 bp, Artificial
  Synthetic oligonucleotide
tttcattgctccagaatatgcatacaaaattgtcaagaaaggggactcagcgattatgaa

SEQ ID NO: 52142 - DNA, 60 bp, Artificial
  Synthetic oligonucleotide
gcttttggcctggtgtgtgccacttgtgagcagattgcagattcacagcatcggtctcac

SEQ ID NO: 52143 - DNA, 60 bp, Artificial
  Synthetic oligonucleotide
ggcgtcaagcgaacaatggagaagacgcaactgctggtctcactcacatgatgatatggc

SEQ ID NO: 52144 - DNA, 60 bp, Artificial
  Synthetic oligonucleotide
ggcgtcaagcgaacaatggagaagacgcaactgctggtctcactcacatgatgatctggc

SEQ ID NO: 52145 - DNA, 59 bp, Artificial
  Synthetic oligonucleotide
ggtattgcatttgactcaaggaacctgctgggaacagatgtacactccaggcggagaag

SEQ ID NO: 52146 - DNA, 60 bp, Artificial
  Synthetic oligonucleotide
ccaaacattgaacataagagtacatgaggggtatgaggaattcacaatggttgggcggag

SEQ ID NO: 52147 - DNA, 60 bp, Artificial
  Synthetic oligonucleotide
cggaacttctggagaggcgataatggacgaagaacaaggattgcatatgagagaatgtgc

SEQ ID NO: 52148 - DNA, 60 bp, Artificial
  Synthetic oligonucleotide
tacaactattgcttgaagtggagcaagagataagaactttctcgtttcagcttatttaat

SEQ ID NO: 52149 - DNA, 60 bp, Artificial
  Synthetic oligonucleotide
cctttgacatgaataacgaaggatcttatttcttcggagacaatgcagaggagtatgaca

SEQ ID NO: 52150 - DNA, 60 bp, Artificial
  Synthetic oligonucleotide
tatagcaatggtgttctcacaagaagattgcatgataaaagcagtccgaggcgatctgaa

SEQ ID NO: 52151 - DNA, 60 bp, Artificial
  Synthetic oligonucleotide
tgctgcctttctgttctgggccatgtccaatggatcttgcagatgcaacatttgtatata

SEQ ID NO: 52152 - DNA, 60 bp, Artificial
  Synthetic oligonucleotide
ctaactcacaagatacagagctctcctttacaattactggagacaataccaaatggaatg

SEQ ID NO: 52153 - DNA, 60 bp, Artificial
  Synthetic oligonucleotide
ggaagacggattcctcgatatctggacttataatgctgaacttctggttctcatggaaaa

SEQ ID NO: 52154 - DNA, 60 bp, Artificial
  Synthetic oligonucleotide
tggaagacggattcctagatgtctggacttataatgctgaacttctggttctcatggaaa

SEQ ID NO: 52155 - DNA, 60 bp, Artificial
  Synthetic oligonucleotide
ccgaacggctgcattgagggcaagctttctcaaatgtcgaaagaagtgaacgccagaatt

SEQ ID NO: 52156 - DNA, 55 bp, Artificial
  Synthetic oligonucleotide
gaacggctgcattgagggcaagctttctcaaatgtccaaagaagtgaatgcaaga

SEQ ID NO: 52157 - DNA, 60 bp, Artificial
  Synthetic oligonucleotide
gaacggctgcattgagggcaagctttctcaaatgtcaaaagaagtgaacgccagaatcga

SEQ ID NO: 52158 - DNA, 60 bp, Artificial
  Synthetic oligonucleotide
atagcatcattgtattttgtggaacttcaggtacctatggaacaggctcatggcctgatg

SEQ ID NO: 52159 - DNA, 60 bp, Artificial
  Synthetic oligonucleotide
atagtatcattgtattttgtggaacttcaggtacctatggaacaggctcatggcctgatg

SEQ ID NO: 52160 - DNA, 60 bp, Artificial
  Synthetic oligonucleotide
atgaggactgaaatcataagaatgatggaaagtgccagaccagaagatgtgtctttccag

SEQ ID NO: 52161 - DNA, 60 bp, Artificial
  Synthetic oligonucleotide
gcaggacatccgacatgaggactgaaatcataagaatgatggaaagtgccagaccagaag

SEQ ID NO: 52162 - DNA, 60 bp, Artificial
  Synthetic oligonucleotide
tgagggcagaacatctgacatgaggactgaaatcataagaatgatggaaagtgccagacc

SEQ ID NO: 52163 - DNA, 60 bp, Artificial
  Synthetic oligonucleotide
cgtcaagcgaacaatggagaagacgcaactgctggtctcacccatctgatgatctggcat

SEQ ID NO: 52164 - DNA, 60 bp, Artificial
  Synthetic oligonucleotide
gcgtcaagcgaacaatggagaagacgcaactgctggtctcacccatctgatgatctggca

SEQ ID NO: 52165 - DNA, 60 bp, Artificial
  Synthetic oligonucleotide
gattctacgtacagatgtgcactgaactcaaactcagcgactatgaaggaaggctgatcc

SEQ ID NO: 52166 - DNA, 60 bp, Artificial
  Synthetic oligonucleotide
ctccacacagagcacaatgggatgctgtgtgcaacaaatctgggacgtcctctcattcta

SEQ ID NO: 52167 - DNA, 60 bp, Artificial
  Synthetic oligonucleotide
tgctccacacagagcacaatgggatgctgtgtgcaacaaatctgggacatcctctcattc

SEQ ID NO: 52168 - DNA, 60 bp, Artificial
  Synthetic oligonucleotide
ctccacacagagcacaatgggatgctgtgtgcaacaaatctgggacatcctctaattcta

SEQ ID NO: 52169 - DNA, 60 bp, Artificial
  Synthetic oligonucleotide
ctccacacagagcacaatgggatgctgtgtgcaacaaacctgggacatcctctcattcta

SEQ ID NO: 52170 - DNA, 60 bp, Artificial
  Synthetic oligonucleotide
ctccacacagagcacaatgggatgctgtgtgcaacaaatttgggacatcctcttatttta

SEQ ID NO: 52171 - DNA, 60 bp, Artificial
  Synthetic oligonucleotide
ctccacacagagcacaatgggatgctgtgtgcaacaaatctgggacatcctctcattcta

SEQ ID NO: 52172 - DNA, 60 bp, Artificial
  Synthetic oligonucleotide
cacagagcacaatgggatgctgtgtgcaacaaacctgggacatcctctcattctagacac

SEQ ID NO: 52173 - DNA, 60 bp, Artificial
  Synthetic oligonucleotide
ctcactatttattcgactgtcgcctcatctcttgtgcttgcaatggggtttgctgccttt

SEQ ID NO: 52174 - DNA, 60 bp, Artificial
  Synthetic oligonucleotide
tatagcattgattccagttatgtgtgctcaggacttgttggagacacaccaaggaacgat

SEQ ID NO: 52175 - DNA, 60 bp, Artificial
  Synthetic oligonucleotide
catgcaccaactcctgaggcacttccaaaaggatgcaaaagtgctgtttcagaactgggg

SEQ ID NO: 52176 - DNA, 60 bp, Artificial
  Synthetic oligonucleotide
ctgagggggtttctaattctaggcaaggaggacaaaagatatggaccagcattgagcatc

SEQ ID NO: 52177 - DNA, 60 bp, Artificial
  Synthetic oligonucleotide
aacactgtgtcaagcttccaggtagactgctttctttggcatgtccgcaaacgatttgca

SEQ ID NO: 52178 - DNA, 60 bp, Artificial
  Synthetic oligonucleotide
tcctcaccatttattcgactgtcgcctcatctcttgttattgcaatggggtttgctgcct

SEQ ID NO: 52179 - DNA, 60 bp, Artificial
  Synthetic oligonucleotide
ctcaccatttattcgactgtcgcctcatctcttgtggttgcaatggggtttgctgccttc

SEQ ID NO: 52180 - DNA, 60 bp, Artificial
  Synthetic oligonucleotide
ctcaccatttattcgactgtcgcctcatctcttgtgcttgcaatagggtttgctgccttc

SEQ ID NO: 52181 - DNA, 60 bp, Artificial
  Synthetic oligonucleotide
ggtgccatagctggattcatagaaggaggttggccagggctagtcgctggctggtatggt

SEQ ID NO: 52182 - DNA, 60 bp, Artificial
  Synthetic oligonucleotide
gtcgcctcatctcttgtgattgcaatggggtttgctgccttcttgttctgggccatgtcc

SEQ ID NO: 52183 - DNA, 60 bp, Artificial
  Synthetic oligonucleotide
cgcctcttctcttgtgattgcaatggggtttgctgccttcttgttctgggccatgtccaa

SEQ ID NO: 52184 - DNA, 60 bp, Artificial
  Synthetic oligonucleotide
cgcctcgtctcttgtgattgcaatggggtttgctgccttcttgttctgggccatgtccaa

SEQ ID NO: 52185 - DNA, 60 bp, Artificial
  Synthetic oligonucleotide
acaaaatcctcaccatttattcgactgtcgcctcatctcttgtgcttgcgatggggtttg

SEQ ID NO: 52186 - DNA, 60 bp, Artificial
  Synthetic oligonucleotide
gatatccttaggcaaaatccaactgaggagcaagctgtggatatatgcaaagcagcaatg

SEQ ID NO: 52187 - DNA, 60 bp, Artificial
  Synthetic oligonucleotide
gacatccttaggcaaaatccaactgaggagcaagctgtggatatatgcaaagcagcaatg

SEQ ID NO: 52188 - DNA, 60 bp, Artificial
  Synthetic oligonucleotide
caagaaaattgcttctaattgttcaggcacttagggacaacctggaacctgggaccttcg

SEQ ID NO: 52189 - DNA, 60 bp, Artificial
  Synthetic oligonucleotide
cgagaaaattgcttctcattgttcaggcacttagggacaacctggaacctgggaccttcg

SEQ ID NO: 52190 - DNA, 60 bp, Artificial
  Synthetic oligonucleotide
tcattgttcaggcacttagggacaacctggaacctggaactttcgatcttggagggctgt

SEQ ID NO: 52191 - DNA, 60 bp, Artificial
  Synthetic oligonucleotide
caagaaagttgcttctcattgttcaggcacttagggacaacctggaacctgggaccttcg

SEQ ID NO: 52192 - DNA, 60 bp, Artificial
  Synthetic oligonucleotide
ctgaatcgagaaagctgctactcattgttcaggcacttagggacaacctggaacctggaa

SEQ ID NO: 52193 - DNA, 60 bp, Artificial
  Synthetic oligonucleotide
gctgaatcaagaaaattgcttctcattgtccaggcacttagggacaacctggaacctggg

SEQ ID NO: 52194 - DNA, 60 bp, Artificial
  Synthetic oligonucleotide
tcatcctgagaggatcagtggcccacaagtcctgcttgcctgcttgtgtgtacggacttg

SEQ ID NO: 52195 - DNA, 60 bp, Artificial
  Synthetic oligonucleotide
atttgaaatcacaggaaccatgcgcaggcttgccgaccaaagtctcccaccgaatttctc

SEQ ID NO: 52196 - DNA, 60 bp, Artificial
  Synthetic oligonucleotide
aaagatttgaaatcacaggaaccatgcgcaggcttgccgaccaaagtctcccaccgaact

SEQ ID NO: 52197 - DNA, 56 bp, Artificial
  Synthetic oligonucleotide
ctatttggagccatagctggattcatagaaggaggttggccaggactagtcgctgg

SEQ ID NO: 52198 - DNA, 60 bp, Artificial
  Synthetic oligonucleotide
ctatttggagccatagctggattcatagaaggaggttggccaggactagtcgctggctgg

SEQ ID NO: 52199 - DNA, 60 bp, Artificial
  Synthetic oligonucleotide
atctgaaggaacttacaaaatcctcaccatttattcgactgtcgcctcatctcttgtgat

SEQ ID NO: 52200 - DNA, 60 bp, Artificial
  Synthetic oligonucleotide
gaaacgggactctagcatacttactgacagccagacagcgaccaaaaggattcggatggc

SEQ ID NO: 52201 - DNA, 60 bp, Artificial
  Synthetic oligonucleotide
tctggaatgtgtcttacagtggaacaagcaaagcatgttcagattcattctacagaagca

SEQ ID NO: 52202 - DNA, 60 bp, Artificial
  Synthetic oligonucleotide
tggtggaatcggaaggttctacatacagatgtgcactgaactcaaactcagcgactacga

SEQ ID NO: 52203 - DNA, 60 bp, Artificial
  Synthetic oligonucleotide
ctcattgttcaggcacttagggacaacctggaacctggaaccttcgatcttgaagggcta

SEQ ID NO: 52204 - DNA, 60 bp, Artificial
  Synthetic oligonucleotide
acaaaatcctcaccatttattcgactgtcgcctcatctcttgtgattgcaatggggtttg

SEQ ID NO: 52205 - DNA, 60 bp, Artificial
  Synthetic oligonucleotide
ggaatgatgatgggcatgttcaacatgctgagcacagtcttaggagtctcaatcctaaat

SEQ ID NO: 52206 - DNA, 60 bp, Artificial
  Synthetic oligonucleotide
atggatgtcaatccgactttacttttcttgaaagtgccagcgcaaaatgctataagtact

SEQ ID NO: 52207 - DNA, 60 bp, Artificial
  Synthetic oligonucleotide
atggatgtcaatccgactttacttttcttgaaagtgccagcgcaaaatgctataagtacc

SEQ ID NO: 52208 - DNA, 60 bp, Artificial
  Synthetic oligonucleotide
caatagtcagtcttgttaaaagtgatcaaatttgcattggttaccatgcaaacaactcga

SEQ ID NO: 52209 - DNA, 60 bp, Artificial
  Synthetic oligonucleotide
cgactgtcgcctcatctcttgtgcttgcaatggggtttgctgcctttctgttctgggcca

SEQ ID NO: 52210 - DNA, 60 bp, Artificial
  Synthetic oligonucleotide
aggagtcagaatgcgtttgcatcaatggaacctgtacggtagtaatgacggatggaagtg

SEQ ID NO: 52211 - DNA, 60 bp, Artificial
  Synthetic oligonucleotide
attcttctaaccgaggtcgaaacgtacgttctctctatcatcccatcaggccccctcaaa

SEQ ID NO: 52212 - DNA, 60 bp, Artificial
  Synthetic oligonucleotide
ggacatccttaggcaaaatccgactgaggagcaagctgtggatatatgcaaagcagcaat

SEQ ID NO: 52213 - DNA, 60 bp, Artificial
  Synthetic oligonucleotide
ggtgctaaaaccgggtcagacattgcgagtgagatccaatgggaatctaattgctccatg

SEQ ID NO: 52214 - DNA, 60 bp, Artificial
  Synthetic oligonucleotide
gcaagccttacaactattgcttgaagtagagcaagagataagaactttctcgtttcagct

SEQ ID NO: 52215 - DNA, 60 bp, Artificial
  Synthetic oligonucleotide
gtagattgttatctatggcacataaggaagctgctcagcatgagagacatgtgtgatgct

SEQ ID NO: 52216 - DNA, 60 bp, Artificial
  Synthetic oligonucleotide
ggtagattgctatctatggcacataagaaagctgctcagcatgagagacatgtgtgatgc

SEQ ID NO: 52217 - DNA, 60 bp, Artificial
  Synthetic oligonucleotide
taagaaagctgctcagcatgagagacatgtgtgatgctccctttgatgatagactcagaa

SEQ ID NO: 52218 - DNA, 60 bp, Artificial
  Synthetic oligonucleotide
ggaaacattagtctcactgagggctttcacagacgatggagccattgtagctgaaatatc

SEQ ID NO: 52219 - DNA, 60 bp, Artificial
  Synthetic oligonucleotide
gatggctaattgcagaatgcagaaacatattaaccaaaactgagaacagcttcgagcaga

SEQ ID NO: 52220 - DNA, 60 bp, Artificial
  Synthetic oligonucleotide
ctcaagattgcaattgcatccagccctgctcctcggtacattactgatatgagcatagag

SEQ ID NO: 52221 - DNA, 60 bp, Artificial
  Synthetic oligonucleotide
cctcgtttcaggtagattgctatctatggcacataagaaagctgctcagcatgagagaca

SEQ ID NO: 52222 - DNA, 60 bp, Artificial
  Synthetic oligonucleotide
gtttgaagagatcagatggctaattgcagaatgcagaaacatattaaccaaaactgagaa

SEQ ID NO: 52223 - DNA, 60 bp, Artificial
  Synthetic oligonucleotide
taacctcgtttcaggtagattgctatctatggcacataagaaagctgctcagcatgagag

SEQ ID NO: 52224 - DNA, 60 bp, Artificial
  Synthetic oligonucleotide
gcatccagccctgctcctcggtacattactgatatgagcatagaggaaataagcagggaa

SEQ ID NO: 52225 - DNA, 60 bp, Artificial
  Synthetic oligonucleotide
caactggaaacattagtctcactgagggctttcacagacgatggtgccattgtagccgaa

SEQ ID NO: 52226 - DNA, 60 bp, Artificial
  Synthetic oligonucleotide
gctttgagcagataacgttcttgcaagcattgcaactcttacttgaagttgagagtgaga

SEQ ID NO: 52227 - DNA, 60 bp, Artificial
  Synthetic oligonucleotide
gagcatagaggaaataagcagggaatggtacatgctcatgcccaggcagaagataacagg

SEQ ID NO: 52228 - DNA, 60 bp, Artificial
  Synthetic oligonucleotide
gcatagaggaaataagcagggaatggtacatgctcatgcccaggcagaagataacagggg

SEQ ID NO: 52229 - DNA, 60 bp, Artificial
  Synthetic oligonucleotide
ggagcaattgaggagtgcctgattaatgatccctgggttttgcttaatgcatcttggttc

SEQ ID NO: 52230 - DNA, 60 bp, Artificial
  Synthetic oligonucleotide
gaagcaattgaggagtgcctgattaatgatccctgggttttgcttaatgcatcttggttc

SEQ ID NO: 52231 - DNA, 60 bp, Artificial
  Synthetic oligonucleotide
gggaggttttacatacagatgtgcactgaactcaaactcagcgactatgaaggaaggctg

SEQ ID NO: 52232 - DNA, 60 bp, Artificial
  Synthetic oligonucleotide
gggaggttctacatacagatgtgcactgaactcaaactcagcgactatgaagggaggctg

SEQ ID NO: 52233 - DNA, 60 bp, Artificial
  Synthetic oligonucleotide
gggagattttacatacagatgtgcactgaactcaaactcagcgactatgaaggaaggctg

SEQ ID NO: 52234 - DNA, 60 bp, Artificial
  Synthetic oligonucleotide
gggagattctacatacagatgtgcactgaactcaaactcagcgactatgaagggaggctg

SEQ ID NO: 52235 - DNA, 60 bp, Artificial
  Synthetic oligonucleotide
tcgcaataatcagcattgtcaaaggtgaccaaatttgcattggttaccatgcaaacaatt

SEQ ID NO: 52236 - DNA, 60 bp, Artificial
  Synthetic oligonucleotide
gcgactatgaaggaaggctgatccaaaacagcataacaatagagagaatggttctatctg

SEQ ID NO: 52237 - DNA, 60 bp, Artificial
  Synthetic oligonucleotide
atcaagagttggaggaacaacatactgagaacccaagagtctgaatgtgcatgtgtaaat

SEQ ID NO: 52238 - DNA, 50 bp, Artificial
  Synthetic oligonucleotide
ttttaaccgaggtcgaaacgtacgttctctctatcatcccatcaggcccc

SEQ ID NO: 52239 - DNA, 60 bp, Artificial
  Synthetic oligonucleotide
aagatgagccttctaaccgaggtcgaaacgtacgttctctctatcgttccgtcaggcccc

SEQ ID NO: 52240 - DNA, 60 bp, Artificial
  Synthetic oligonucleotide
ttagacaaaatccaacagaagagcaagctgtggatatatgcaaagcagcaatgggtctaa

SEQ ID NO: 52241 - DNA, 60 bp, Artificial
  Synthetic oligonucleotide
tgtctttgcagggaagaacacagatcttgaggctctcatggaatggctaaagacaagacc

SEQ ID NO: 52242 - DNA, 60 bp, Artificial
  Synthetic oligonucleotide
gtctttgcagggaagaacacagatcttgaggctctcatggaatggctaaagacaagacca

SEQ ID NO: 52243 - DNA, 60 bp, Artificial
  Synthetic oligonucleotide
gtgttctctgatgcaaggatcaactctcccgagaagatcaggagctgctggtgcagcagt

SEQ ID NO: 52244 - DNA, 60 bp, Artificial
  Synthetic oligonucleotide
cgtcatcatggaggtcgttttcccaaatgaagtgggagctagaatattgacttcagagtc

SEQ ID NO: 52245 - DNA, 60 bp, Artificial
  Synthetic oligonucleotide
tgtcatcatggaggtcgttttcccaaatgaagtgggagctagaatattgacttcagagtc

SEQ ID NO: 52246 - DNA, 60 bp, Artificial
  Synthetic oligonucleotide
tgtcatcatggaggtcgttttcccaaatgaagtgggagctagaatattgacgtcagagtc

SEQ ID NO: 52247 - DNA, 60 bp, Artificial
  Synthetic oligonucleotide
tggcattccaatctgaatgatgccacatatcagagaacaagggcacttgtgcgcactggg

SEQ ID NO: 52248 - DNA, 60 bp, Artificial
  Synthetic oligonucleotide
tggcattccaatctgaatgatgccacatatcagagaacaagggcacttgtacgtactggg

SEQ ID NO: 52249 - DNA, 60 bp, Artificial
  Synthetic oligonucleotide
atgatctggcattccaatctgaatgatgccacatatcaaagaacaagggctctagtgcgt

SEQ ID NO: 52250 - DNA, 60 bp, Artificial
  Synthetic oligonucleotide
catcattgtattttgtggaacttcaggtacctatggaacaggctcatggcctgatggggc

SEQ ID NO: 52251 - DNA, 53 bp, Artificial
  Synthetic oligonucleotide
aagagtgaaacagatgaaaacctcaaaatagccattgcctccagtcctgctcc

SEQ ID NO: 52252 - DNA, 60 bp, Artificial
  Synthetic oligonucleotide
gtgtgatgctccctttgatgacaggctcagaagagaccaaaaggcattaaagggaagagg

SEQ ID NO: 52253 - DNA, 60 bp, Artificial
  Synthetic oligonucleotide
gcatagaggagataagtcgagaatggtatatgctgatgcctaggcagaaaataactggag

SEQ ID NO: 52254 - DNA, 60 bp, Artificial
  Synthetic oligonucleotide
aagagtgaaacagatgaaaacctcaaaatagccattgcctccagtcctgctcctcgatat

SEQ ID NO: 52255 - DNA, 60 bp, Artificial
  Synthetic oligonucleotide
gaggagataagccgagaatggtatatgctgatgcctaggcagaaaataactggaggccta

SEQ ID NO: 52256 - DNA, 60 bp, Artificial
  Synthetic oligonucleotide
gaggagataagtcgagaatggtatatgctgatgcctaggcagaaaataactggaggccta

SEQ ID NO: 52257 - DNA, 60 bp, Artificial
  Synthetic oligonucleotide
ggcttcgccgagatcagaagtccctaaggggaagaggcagcactcttggtctggacatcg

SEQ ID NO: 52258 - DNA, 60 bp, Artificial
  Synthetic oligonucleotide
atttgcagaccaagaactgggtgatgccccattcctcgaccggcttcgccgagatcagaa

SEQ ID NO: 52259 - DNA, 60 bp, Artificial
  Synthetic oligonucleotide
gctttctttggcatgtccgcaaaagatttgcagaccaagaactgggtgatgccccattcc

SEQ ID NO: 52260 - DNA, 60 bp, Artificial
  Synthetic oligonucleotide
cgatagtcagtcttgttaaaagtgatcagatttgcattggttaccatgcaaacaattcaa

SEQ ID NO: 52261 - DNA, 60 bp, Artificial
  Synthetic oligonucleotide
agtcttgttaaaagtgatcagatttgcattggttaccatgcaaacaattcaacagagcag

SEQ ID NO: 52262 - DNA, 60 bp, Artificial
  Synthetic oligonucleotide
ctatagtcagtcttgttaaaagtgatcagatttgcattggttaccatgcaaacaattcaa

SEQ ID NO: 52263 - DNA, 60 bp, Artificial
  Synthetic oligonucleotide
aagattgtaagattgctcctttaatggtggcatacatgttggaaagggaactggtccgca

SEQ ID NO: 52264 - DNA, 60 bp, Artificial
  Synthetic oligonucleotide
atggactccaacactgtgtcaagcttccaggtagactgctttctttggcatgtccgcaaa

SEQ ID NO: 52265 - DNA, 60 bp, Artificial
  Synthetic oligonucleotide
atggattccaacactgtgtcaagcttccaggtagactgctttctttggcatgtccgcaaa

SEQ ID NO: 52266 - DNA, 60 bp, Artificial
  Synthetic oligonucleotide
atggaatccaacactgtgtcaagcttccaggtagactgctttctttggcatgtccgcaaa

SEQ ID NO: 52267 - DNA, 60 bp, Artificial
  Synthetic oligonucleotide
ttgtgtattggaagcaatggctttccttgaagaatcccatccagggatctttgaaaactc

SEQ ID NO: 52268 - DNA, 60 bp, Artificial
  Synthetic oligonucleotide
gtaatggttgtttcgagttctatcacaaatgtgatgatgaatgtatggaaagtgtaagaa

SEQ ID NO: 52269 - DNA, 60 bp, Artificial
  Synthetic oligonucleotide
tgtcgcagtctcgcacccgcgagatactgacaaaaaccactgtggaccatatggccataa

SEQ ID NO: 52270 - DNA, 60 bp, Artificial
  Synthetic oligonucleotide
acaagcttccaggtagactgctttctttggcatgtccgcaaacgatttgcagaccaagaa

SEQ ID NO: 52271 - DNA, 60 bp, Artificial
  Synthetic oligonucleotide
agcttccaggtagactgctttctttggcatgtccgcaaacgatttgcagaccaagaactg

SEQ ID NO: 52272 - DNA, 60 bp, Artificial
  Synthetic oligonucleotide
gcttccaggtagactgctttctttggcatgtccgcaaacgatttgcagaccaagaacggg

SEQ ID NO: 52273 - DNA, 60 bp, Artificial
  Synthetic oligonucleotide
tgtgtcaagctttcaggtagactgctttctttggcatgtccgcaaacgatttgcagacca

SEQ ID NO: 52274 - DNA, 60 bp, Artificial
  Synthetic oligonucleotide
cttccaggtagactgctttctttggcatgtccgcaaacgatttgcagaccaagaactggg

SEQ ID NO: 52275 - DNA, 60 bp, Artificial
  Synthetic oligonucleotide
ggtagactgctttctttggcatgtccgcaaacgatttgcagaccaagaactgggtgatgc

SEQ ID NO: 52276 - DNA, 60 bp, Artificial
  Synthetic oligonucleotide
agctttcaggtagactgctttctttggcatgtccgcaaacgatttgcagaccaagaagtg

SEQ ID NO: 52277 - DNA, 60 bp, Artificial
  Synthetic oligonucleotide
ttccaggtagactgctttctttggcatgtccgcaaacgatttgcagaccaagaactgggt

SEQ ID NO: 52278 - DNA, 60 bp, Artificial
  Synthetic oligonucleotide
ggtagactgctttctttggcatgtccgcaaacgatttgcagaccaagaacggggtgatgc

SEQ ID NO: 52279 - DNA, 60 bp, Artificial
  Synthetic oligonucleotide
caggtagactgctttctttggcatgtccgcaaacgatttgcagaccaagaactgggcgac

SEQ ID NO: 52280 - DNA, 60 bp, Artificial
  Synthetic oligonucleotide
atcctctgatgatttcgctctcatagtgaatgcaccgaatcatgagggaatacaagcagg

SEQ ID NO: 52281 - DNA, 60 bp, Artificial
  Synthetic oligonucleotide
cctctgatgatttcgctctcatagtgaatgcaccgaatcatgagggaatacaagcaggag

SEQ ID NO: 52282 - DNA, 60 bp, Artificial
  Synthetic oligonucleotide
gagaggggccccaggagtgaaagggtgggcctttgacaatggagatgacatttggatggg

SEQ ID NO: 52283 - DNA, 60 bp, Artificial
  Synthetic oligonucleotide
gccatagctggattcatagaaggaggttggccaggactagtcgctggttggtatggtttc

SEQ ID NO: 52284 - DNA, 60 bp, Artificial
  Synthetic oligonucleotide
accatatggccataatcaagaaatacacatcaggaagacaagagaagagccctgctctta

SEQ ID NO: 52285 - DNA, 60 bp, Artificial
  Synthetic oligonucleotide
gaacctggaaccttcgatattggagggctatatgaagcaattgaggagtgcctgattaat

SEQ ID NO: 52286 - DNA, 60 bp, Artificial
  Synthetic oligonucleotide
gcactgacactgaacacaatgacaaaagatgcagaaagaggcaaattgaaaaggagggca

SEQ ID NO: 52287 - DNA, 60 bp, Artificial
  Synthetic oligonucleotide
agaggactatttggagccatagctggattcatagaaggaggttggccaggactagtcgct

SEQ ID NO: 52288 - DNA, 60 bp, Artificial
  Synthetic oligonucleotide
atttgaaattacaggaaccatgcgcaggcttgccgaccaaagtctcccaccgaacttctc

SEQ ID NO: 52289 - DNA, 60 bp, Artificial
  Synthetic oligonucleotide
agatttgagatcacaggaaccatgcgcaggcttgccgaccaaagtctcccaccgaacttc

SEQ ID NO: 52290 - DNA, 60 bp, Artificial
  Synthetic oligonucleotide
ggtactaaaaccgggtcagacattgcgagtgagatccaatgggaatctaattgctccatg

SEQ ID NO: 52291 - DNA, 60 bp, Artificial
  Synthetic oligonucleotide
atgatagatctagcagcagcaactgcagggatcctaataacgagagaggggctccaggag

SEQ ID NO: 52292 - DNA, 60 bp, Artificial
  Synthetic oligonucleotide
tcattctgagaggatcagtggcccataagtcctgcttgcctgcttgtgtgtacggacttg

SEQ ID NO: 52293 - DNA, 60 bp, Artificial
  Synthetic oligonucleotide
tcatcctgagaggatcagtggcccataagtcctgcttgcctgcttgtgtgtacggacttg

SEQ ID NO: 52294 - DNA, 60 bp, Artificial
  Synthetic oligonucleotide
ctgctgttgggaggaagagaatggtcctacatcgtcgaaagaccatcggctgttaatgga

SEQ ID NO: 52295 - DNA, 60 bp, Artificial
  Synthetic oligonucleotide
tctgctgttgggaggaagagaatggtcctacatcgtcgaaagaccatcggctgttaatgg

SEQ ID NO: 52296 - DNA, 60 bp, Artificial
  Synthetic oligonucleotide
tactgttgggaggaagagaatggtcctacatcgtcgaaagaccatcggctgttaatggaa

SEQ ID NO: 52297 - DNA, 55 bp, Artificial
  Synthetic oligonucleotide
ctgtgagcattgaccgtttcttaagggtccgagatcagctggggaacatactcct

SEQ ID NO: 52298 - DNA, 53 bp, Artificial
  Synthetic oligonucleotide
cgaaggcaggctgatccaaaacagcataacaatagagagaatggtcctctctg

SEQ ID NO: 52299 - DNA, 60 bp, Artificial
  Synthetic oligonucleotide
ccggtcctgacaatggggcggtggctgtattgaaatacaatggcataataacagatacta

SEQ ID NO: 52300 - DNA, 60 bp, Artificial
  Synthetic oligonucleotide
acagagaatagctttgaacaaataacatttatgcaagccttacaactactgcttgaagtg

SEQ ID NO: 52301 - DNA, 60 bp, Artificial
  Synthetic oligonucleotide
aacgatggaaattgttcaacaaacaagagtggataaactgacccaaggtcgccagaccta

SEQ ID NO: 52302 - DNA, 51 bp, Artificial
  Synthetic oligonucleotide
gattcattgaaattggagtgacacggagggaagttcacatatactatctag

SEQ ID NO: 52303 - DNA, 60 bp, Artificial
  Synthetic oligonucleotide
gttcacattagcccattgtcaggaagtgctcagcatgtggaggaatgctcctgttacccc

SEQ ID NO: 52304 - DNA, 60 bp, Artificial
  Synthetic oligonucleotide
gtacacattagcccattgtcaggaagtgctcagcatgtggaggaatgctcctgttacccc

SEQ ID NO: 52305 - DNA, 60 bp, Artificial
  Synthetic oligonucleotide
gcaaaatgctataagtaccacattcccttatactggagaccctccatacagccatgggac

SEQ ID NO: 52306 - DNA, 60 bp, Artificial
  Synthetic oligonucleotide
tgcaaaatgctataagtaccacattcccttatactggagaccctccatacagccatggga

SEQ ID NO: 52307 - DNA, 60 bp, Artificial
  Synthetic oligonucleotide
gcaaaatgctataagtaccacattcccttatactggagaccctccatacagccatggaac

SEQ ID NO: 52308 - DNA, 60 bp, Artificial
  Synthetic oligonucleotide
atgatagatctagcagcagcaactgcagggatcctaataacgagagaggggccccaggag

SEQ ID NO: 52309 - DNA, 60 bp, Artificial
  Synthetic oligonucleotide
gcatgtccgcaaacgatttgcagaccaagaactgggtgatgccccatttctagaccggct

SEQ ID NO: 52310 - DNA, 60 bp, Artificial
  Synthetic oligonucleotide
ggcatgtccgcaaacgatttgcagaccaagaactgggtgatgccccatttctagaccggc

SEQ ID NO: 52311 - DNA, 60 bp, Artificial
  Synthetic oligonucleotide
tgcatcttcacaactcgaggggttttcagctgaatcaagaaaattgcttctcattgctca

SEQ ID NO: 52312 - DNA, 60 bp, Artificial
  Synthetic oligonucleotide
gcatcttcacaactcgaggggttttcagctgaatcaagaaaattgcttctcattgctcag

SEQ ID NO: 52313 - DNA, 60 bp, Artificial
  Synthetic oligonucleotide
gatccaatgggaatctaattgctccatggtatggacacgttctctcgggagaaagccatg

SEQ ID NO: 52314 - DNA, 60 bp, Artificial
  Synthetic oligonucleotide
ctatttggggccatagctggattcatagagggaggttggtcagggctagtcgctggttgg

SEQ ID NO: 52315 - DNA, 60 bp, Artificial
  Synthetic oligonucleotide
ggggccatagctggattcatagagggaggttggtcagggctagtcgctggttggtatggg

SEQ ID NO: 52316 - DNA, 60 bp, Artificial
  Synthetic oligonucleotide
taacggaccagaatcagtgctagttaacacatatcagtggatcattaggaattgggagac

SEQ ID NO: 52317 - DNA, 60 bp, Artificial
  Synthetic oligonucleotide
taacggcccagaatcagtgctagttaacacatatcagtggatcattaggaattgggagac

SEQ ID NO: 52318 - DNA, 60 bp, Artificial
  Synthetic oligonucleotide
gtcgcctcatctctcgtgcttgcaatggggtttgctgccttcttgttctgggctatgtcc

SEQ ID NO: 52319 - DNA, 60 bp, Artificial
  Synthetic oligonucleotide
tcgactgtcgcctcatctctcgtgcttgcaatggggtttgctgccttcttgttctgggcc

SEQ ID NO: 52320 - DNA, 60 bp, Artificial
  Synthetic oligonucleotide
ggtactaaaaccaggccagacattgcgagtaagatccaatgggaatctaattgctccatg

SEQ ID NO: 52321 - DNA, 60 bp, Artificial
  Synthetic oligonucleotide
cactattggagatgtgccacagcacacagattggtgggataaggatggtggatatcctta

SEQ ID NO: 52322 - DNA, 60 bp, Artificial
  Synthetic oligonucleotide
gctccgaagagaccaaaaggcattaaagggaagaggcagcacacttggactcgatctaag

SEQ ID NO: 52323 - DNA, 60 bp, Artificial
  Synthetic oligonucleotide
cagaagagaccaaaaggcattaaagggaagaggcagcacacttggactcgacccaagagt

SEQ ID NO: 52324 - DNA, 60 bp, Artificial
  Synthetic oligonucleotide
ggctccgaagagaccaaaaggcattaaagggaagaggcagcacacttggactcgatctaa

SEQ ID NO: 52325 - DNA, 60 bp, Artificial
  Synthetic oligonucleotide
aggcattaaagggaagaggcagcacacttggactcgacctgcgagtggccacaatggaag

SEQ ID NO: 52326 - DNA, 60 bp, Artificial
  Synthetic oligonucleotide
aggcattaaagggaagaggcagcacacttggactcgacctgcgagtggccacaacggaag

SEQ ID NO: 52327 - DNA, 60 bp, Artificial
  Synthetic oligonucleotide
gcggagaagtgagaaatgatgatgttgaccagagtttgatcatcgctgccagaaacattg

SEQ ID NO: 52328 - DNA, 60 bp, Artificial
  Synthetic oligonucleotide
aataacgagagaggggccccaggagtgaaagggtgggcctttgacagtggaaatgacatt

SEQ ID NO: 52329 - DNA, 60 bp, Artificial
  Synthetic oligonucleotide
tagggatcctaataatgagagaggggccccaggagtgaaagggtgggcctttgacaatgg

SEQ ID NO: 52330 - DNA, 60 bp, Artificial
  Synthetic oligonucleotide
gggatcctaataatgagagaggggccccaggagtgaaagggtgggcctttgacaatggaa

SEQ ID NO: 52331 - DNA, 60 bp, Artificial
  Synthetic oligonucleotide
tgttgggatttgtattcacgctcaccgtgcccagtgagcgaggactgcagcgtagacgct

SEQ ID NO: 52332 - DNA, 60 bp, Artificial
  Synthetic oligonucleotide
gcaatggctttccttgaagaatcccacccagggatctttgaaaactcatgtcttgaaacg

SEQ ID NO: 52333 - DNA, 60 bp, Artificial
  Synthetic oligonucleotide
gcaatggctttccttgaagaatcccacccagggatctttggaaactcgtgtcttgaaacg

SEQ ID NO: 52334 - DNA, 60 bp, Artificial
  Synthetic oligonucleotide
gcaatggctttccttgaagaatcccacccagggatctttgaaacctcgtgtcttgaaacg

SEQ ID NO: 52335 - DNA, 60 bp, Artificial
  Synthetic oligonucleotide
gtgcgtactgggatggaccccagaatgtgttctctgatgcaagggtcaactctcccgagg

SEQ ID NO: 52336 - DNA, 60 bp, Artificial
  Synthetic oligonucleotide
atgagtcttctaaccgaggtcgaaacgtacgttctctctatcataccatcaggccccctc

SEQ ID NO: 52337 - DNA, 60 bp, Artificial
  Synthetic oligonucleotide
gaagattctacatacagatgtgcactgaactcaaactcagcgactacgaaggcaggctga

SEQ ID NO: 52338 - DNA, 60 bp, Artificial
  Synthetic oligonucleotide
agattctacatacagatgtgcactgaactcaaactcagcgactatgaggggaggctgatt

SEQ ID NO: 52339 - DNA, 60 bp, Artificial
  Synthetic oligonucleotide
gattctacatacagatgtgcactgaactcaaactcagcgactacgaaggcaggctgatcc

SEQ ID NO: 52340 - DNA, 60 bp, Artificial
  Synthetic oligonucleotide
caggccagacattgcgagtaagatccaatgggaatctaattgctccatggtatggacacg

SEQ ID NO: 52341 - DNA, 60 bp, Artificial
  Synthetic oligonucleotide
ccaggtcagacattgcgagtaagatccaatgggaatctaattgctccatggtatggacac

SEQ ID NO: 52342 - DNA, 60 bp, Artificial
  Synthetic oligonucleotide
atgagttgggtgttccgtttcacttgggaaccaaacaagtgtgcatagcatggtccagct

SEQ ID NO: 52343 - DNA, 60 bp, Artificial
  Synthetic oligonucleotide
ccagatctttccagacacaatctggaatgtgacttacagtggaacaagcaaagcatgttc

SEQ ID NO: 52344 - DNA, 60 bp, Artificial
  Synthetic oligonucleotide
gggccccctcaaagccgagatcgcgcagagacttgaagatgtctttgcagggaagaacac

SEQ ID NO: 52345 - DNA, 60 bp, Artificial
  Synthetic oligonucleotide
cgttctctctatcgtcccgtcaggccccctcaaagccgagatcgcgcagagacttgaaga

SEQ ID NO: 52346 - DNA, 60 bp, Artificial
  Synthetic oligonucleotide
tcgttccgtcaggccccctcaaagccgagatcgcgcagagacttgaagatgtctttgcag

SEQ ID NO: 52347 - DNA, 60 bp, Artificial
  Synthetic oligonucleotide
atcttgaggctctcatggaatggctaaagacaagaccaatcctgtcacctctgactaagg

SEQ ID NO: 52348 - DNA, 60 bp, Artificial
  Synthetic oligonucleotide
cttgaggccctcatggaatggctaaagacaagaccaatcctgtcacctctgactaagggg

SEQ ID NO: 52349 - DNA, 60 bp, Artificial
  Synthetic oligonucleotide
ctggaggctctcatggaatggctaaagacaagaccaatcctgtcacctctgactaagggg

SEQ ID NO: 52350 - DNA, 60 bp, Artificial
  Synthetic oligonucleotide
aggctctcatggaatggctaaagacaagaccaatcctgtcacctctgactaaggggattt

SEQ ID NO: 52351 - DNA, 60 bp, Artificial
  Synthetic oligonucleotide
gtacacattagcccattgtcaggaagtgctcagcatgtggaagaatgctcctgttacccc

SEQ ID NO: 52352 - DNA, 60 bp, Artificial
  Synthetic oligonucleotide
ctgagagggtgactgtgagcattgaccgtttcttaagggtccgagatcagatggggaatg

SEQ ID NO: 52353 - DNA, 60 bp, Artificial
  Synthetic oligonucleotide
ggacctgcattgagcatcaacgaattgagcaatcttgcaaaaggggagaaggctaatgtg

SEQ ID NO: 52354 - DNA, 60 bp, Artificial
  Synthetic oligonucleotide
tgttcgaaagcaagagcatgaagctacggacacaaataccagcagaaatgcttgcaaaca

SEQ ID NO: 52355 - DNA, 60 bp, Artificial
  Synthetic oligonucleotide
cctcaggtacctatggaacaggctcatggcctgatggagcgaatatcaacttcatgccta

SEQ ID NO: 52356 - DNA, 60 bp, Artificial
  Synthetic oligonucleotide
gtcagacattgcgaataagatccaatgggaatctaattgctccatggtatggacacattc

SEQ ID NO: 52357 - DNA, 60 bp, Artificial
  Synthetic oligonucleotide
gagctcttgtgcgtactgggatggaccccagaatgtgctccctgatgcaaggatcaactc

SEQ ID NO: 52358 - DNA, 60 bp, Artificial
  Synthetic oligonucleotide
ggagaatttggcgtcaagcgaacaatggagaagacgcaactgctggtctcactcatatga

SEQ ID NO: 52359 - DNA, 60 bp, Artificial
  Synthetic oligonucleotide
tgattctagttatgtgtgctcaggacttgttggcgacacaccaagaaatgacgatagctc

SEQ ID NO: 52360 - DNA, 60 bp, Artificial
  Synthetic oligonucleotide
ccttgaagaatcccacccagggatctttgaaaactcatgtcttgaaacgatggaagttgt

SEQ ID NO: 52361 - DNA, 60 bp, Artificial
  Synthetic oligonucleotide
caggaggccagttggaatttccagcatggtggaggccatggtgtctagggcccgaattga

SEQ ID NO: 52362 - DNA, 60 bp, Artificial
  Synthetic oligonucleotide
tctttccagacacaatctggaatgtgtcttacagtggaacaagcaaagcatgttcagatt

SEQ ID NO: 52363 - DNA, 60 bp, Artificial
  Synthetic oligonucleotide
gtcagacattgcgagtaagatccaatgggaatctaattgctccatggtatggacacattc

SEQ ID NO: 52364 - DNA, 60 bp, Artificial
  Synthetic oligonucleotide
gtcagacattgcgagtaagatccaatgggaatctaattgctccatggtatggacacatcc

SEQ ID NO: 52365 - DNA, 60 bp, Artificial
  Synthetic oligonucleotide
acccaagagtagctacaatggaagggaaaaagatcgttgaggacattctgaagagtgaaa

SEQ ID NO: 52366 - DNA, 60 bp, Artificial
  Synthetic oligonucleotide
gaggacattctgaagagtgaaacagatgaaaacctcaaaatagccattgcctccagtcct

SEQ ID NO: 52367 - DNA, 60 bp, Artificial
  Synthetic oligonucleotide
gggaaaaagatcgttgaggacattctgaagagtgaaacagatgaaaacctcaaaatagcc

SEQ ID NO: 52368 - DNA, 60 bp, Artificial
  Synthetic oligonucleotide
tgagcatagaggagataagccgagaatggtatatgctgatgcctaggcagaaaataactg

SEQ ID NO: 52369 - DNA, 60 bp, Artificial
  Synthetic oligonucleotide
cactgatatgagtatagaggagataagccgagaatggtatatgctgatgcctaggcagaa

SEQ ID NO: 52370 - DNA, 52 bp, Artificial
  Synthetic oligonucleotide
gtttgaagagatcagatggctcattgctgaatgcaggagtatactgacaaag

SEQ ID NO: 52371 - DNA, 52 bp, Artificial
  Synthetic oligonucleotide
atttgaagagatcagatggctcattgctgaatgcaggaatatactgacaaag

SEQ ID NO: 52372 - DNA, 60 bp, Artificial
  Synthetic oligonucleotide
tcatggaatggctaaagacaagaccaatcctgtcacctctgactaaggggattttagggt

SEQ ID NO: 52373 - DNA, 60 bp, Artificial
  Synthetic oligonucleotide
gaaaggcagaaaatagaaggggtcaagctggaatctgagggaacttacaaaattctcacc

SEQ ID NO: 52374 - DNA, 60 bp, Artificial
  Synthetic oligonucleotide
cgggtatgcacaaacagattgtgtattggaagcaatggctttccttgaagaatcccaccc

SEQ ID NO: 52375 - DNA, 60 bp, Artificial
  Synthetic oligonucleotide
gcagggaagaacacagatcttgaggctctcatggaatggctaaagacaagaccaatcctg

SEQ ID NO: 52376 - DNA, 60 bp, Artificial
  Synthetic oligonucleotide
gcaggaaagaacacagatcttgaggctctcatggaatggctaaagacaagaccaatcctg

SEQ ID NO: 52377 - DNA, 60 bp, Artificial
  Synthetic oligonucleotide
cagggaagaacacagatcttgaggctctcatggaatggctaaagacaagaccaatcctgt

SEQ ID NO: 52378 - DNA, 60 bp, Artificial
  Synthetic oligonucleotide
tttgcagggaagaacacagatcttgaggctctcatggaatggctaaagacaagaccaatc

SEQ ID NO: 52379 - DNA, 60 bp, Artificial
  Synthetic oligonucleotide
ttttgcagggaagaacacagatcttgaggctctcatggaatggctaaagacaagaccaat

SEQ ID NO: 52380 - DNA, 60 bp, Artificial
  Synthetic oligonucleotide
tgcagggaagaacacagatcttgaggctctcatggaatggctaaagacaagaccaatcct

SEQ ID NO: 52381 - DNA, 59 bp, Artificial
  Synthetic oligonucleotide
ttttcagggaagaacacagatcttgaggctctcatggaatggctaaagacaagaccaat

SEQ ID NO: 52382 - DNA, 60 bp, Artificial
  Synthetic oligonucleotide
ctttccttgaagaatcccacccagggatctttgaaaactcatgtcttgaaacgatggagg

SEQ ID NO: 52383 - DNA, 60 bp, Artificial
  Synthetic oligonucleotide
cttgtgatctgctgttgggaggaagagaatggtcctacatcgtcgaaagaccatcggccg

SEQ ID NO: 52384 - DNA, 60 bp, Artificial
  Synthetic oligonucleotide
cttgtgacctgctgttgggaggaagagaatggtcctacatcgtcgaaagaccatcggctg

SEQ ID NO: 52385 - DNA, 60 bp, Artificial
  Synthetic oligonucleotide
gtgttggtaatgaaacggaaacgggactctagcatacttactgacagccagacagcgacc

SEQ ID NO: 52386 - DNA, 60 bp, Artificial
  Synthetic oligonucleotide
atggcccagcattaagcatcaatgaactgagcaatcttgcaaaaggggagaaggctaatg

SEQ ID NO: 52387 - DNA, 60 bp, Artificial
  Synthetic oligonucleotide
tattcgactgtcgcctcatctctcgtgcttgcaatggggtttgctgccttcttgttctgg

SEQ ID NO: 52388 - DNA, 60 bp, Artificial
  Synthetic oligonucleotide
gaacttacaaaatcctcaccatttattcgactgtcgcctcatctcttgtgattgcaatgg

SEQ ID NO: 52389 - DNA, 60 bp, Artificial
  Synthetic oligonucleotide
cttacaaaatcctcaccatttattcgactgtcgcctcatctcttgtgattgcaatggggt

SEQ ID NO: 52390 - DNA, 60 bp, Artificial
  Synthetic oligonucleotide
tattcatcatcaatgatgtgggaaatcaatggtcctgagtcagtgcttgtcaatacttac

SEQ ID NO: 52391 - DNA, 60 bp, Artificial
  Synthetic oligonucleotide
atattcatcatcaatgatgtgggaaatcaatggtcctgagtcagtgcttgtcaatactta

SEQ ID NO: 52392 - DNA, 60 bp, Artificial
  Synthetic oligonucleotide
tccgcaaacgatttgcagaccaagaactgggtgatgccccatttctagcccggcttcgcc

SEQ ID NO: 52393 - DNA, 60 bp, Artificial
  Synthetic oligonucleotide
aggcaccaaacgatcttatgaacagatggaaactggtggagaacgccagaatgccactga

SEQ ID NO: 52394 - DNA, 60 bp, Artificial
  Synthetic oligonucleotide
tccaggattgtaagattgctcctttaatggtggcatacatgttggaaagggaactggttc

SEQ ID NO: 52395 - DNA, 60 bp, Artificial
  Synthetic oligonucleotide
ccaggattgtaagattgctcctttaatggtggcatacatgttggaaagggaactggttcg

SEQ ID NO: 52396 - DNA, 60 bp, Artificial
  Synthetic oligonucleotide
aggattgtaagattgctcctttaatggtggcatacatgttggaaagagaactggtccgga

SEQ ID NO: 52397 - DNA, 60 bp, Artificial
  Synthetic oligonucleotide
atgattacaaggagaaccgattcattgaaattggagtgacacggagggaagttcacatat

SEQ ID NO: 52398 - DNA, 60 bp, Artificial
  Synthetic oligonucleotide
cttgaggctctcatggaatggctaaagccaagaccaatcctgtcacctctgactaagggg

SEQ ID NO: 52399 - DNA, 60 bp, Artificial
  Synthetic oligonucleotide
ctcgaggctctcatggaatggctaaagccaagaccaatcctgtcacctctgactaagggg

SEQ ID NO: 52400 - DNA, 60 bp, Artificial
  Synthetic oligonucleotide
aagctggaatctgaaggaacttacaaaatcctcaccatttattcgactgtcgcctcgtct

SEQ ID NO: 52401 - DNA, 60 bp, Artificial
  Synthetic oligonucleotide
aagctggaatctgaaggaacttacaaaatcctcaccatttattcgactgtcgcctcttct

SEQ ID NO: 52402 - DNA, 60 bp, Artificial
  Synthetic oligonucleotide
agctcaagttgtcatgatgggaaagcatggttacatgtttgtgtcactggggatgataga

SEQ ID NO: 52403 - DNA, 60 bp, Artificial
  Synthetic oligonucleotide
atgatgatgggcatgttcaacatgctgagtacagtattaggagtctcaatcctgaatctt

SEQ ID NO: 52404 - DNA, 55 bp, Artificial
  Synthetic oligonucleotide
acggaaacgggactctagcatacttactgacagccagacagcgaccaaaagaatt

SEQ ID NO: 52405 - DNA, 60 bp, Artificial
  Synthetic oligonucleotide
ttgagccctggaatgatgatgggcatgttcaacatgctaagtacagttttgggagtttca

SEQ ID NO: 52406 - DNA, 54 bp, Artificial
  Synthetic oligonucleotide
atagatggcacagcctcactgagtcctggaatgatgatgggcatgttcaacatg

SEQ ID NO: 52407 - DNA, 60 bp, Artificial
  Synthetic oligonucleotide
catggcgtctcaaggcaccaaacgatcttatgaacagatggaaactggtggagaacgcca

SEQ ID NO: 52408 - DNA, 60 bp, Artificial
  Synthetic oligonucleotide
ctggcgtctcaaggcaccaaacgatcttatgaacagatggaaactggtggagaacgccag

SEQ ID NO: 52409 - DNA, 60 bp, Artificial
  Synthetic oligonucleotide
cactgacactgaacacaatgacaaaagatgcagaaagaggcaaattggaaaggagggcaa

SEQ ID NO: 52410 - DNA, 60 bp, Artificial
  Synthetic oligonucleotide
gatgggctccaatcctctgatgatttcgctctcatagtgaatgcaccgaatcatgagggg

SEQ ID NO: 52411 - DNA, 60 bp, Artificial
  Synthetic oligonucleotide
acgggctccaatcctctgatgatttcgctctcatagtgaatgcaccgaatcatgagggaa

SEQ ID NO: 52412 - DNA, 60 bp, Artificial
  Synthetic oligonucleotide
cgggctccaatcctctgatgatttcgctctcatagtgaatgcaccgaatcatgagggaat

SEQ ID NO: 52413 - DNA, 60 bp, Artificial
  Synthetic oligonucleotide
gcaccagctccaggagcggctttgaaatgatttgggatccaaatgggtggactgaaacgg

SEQ ID NO: 52414 - DNA, 60 bp, Artificial
  Synthetic oligonucleotide
gcaagccttacaactattgcttgaagtggagcaagagataagaaccttctcgtttcagct

SEQ ID NO: 52415 - DNA, 60 bp, Artificial
  Synthetic oligonucleotide
cttgttctgggccatgtccaatggatcttgcagatgcaacatttgtatataattggcaaa

SEQ ID NO: 52416 - DNA, 60 bp, Artificial
  Synthetic oligonucleotide
tgtggaccatatggccataattacgaaatacacatcaggaagacaagagaagaaccccgc

SEQ ID NO: 52417 - DNA, 60 bp, Artificial
  Synthetic oligonucleotide
ccaggctgttcaccataaggcaggaaatggccagtaggggtctatgggattcctttcgtc

SEQ ID NO: 52418 - DNA, 60 bp, Artificial
  Synthetic oligonucleotide
tggtggaggccatggtgtctagggcccgaattgatgcacgaattgacttcgagtctggaa

SEQ ID NO: 52419 - DNA, 60 bp, Artificial
  Synthetic oligonucleotide
ccaaacactgaaaataaaagtacatgaggggtatgaggaattcacaatggttgggcggag

SEQ ID NO: 52420 - DNA, 60 bp, Artificial
  Synthetic oligonucleotide
atgggatgcttgttgacagtattggttcatggtccaaaaacatcctcagaactcaggagt

SEQ ID NO: 52421 - DNA, 60 bp, Artificial
  Synthetic oligonucleotide
cagcagcacaacgagcaatgatggaccaagtgcgagaaagcagaaatcctgggaatgctg

SEQ ID NO: 52422 - DNA, 60 bp, Artificial
  Synthetic oligonucleotide
ggcgtcaggcgaacaatggagaagacgcaactgctggtctcactcacctgatgatctggc

SEQ ID NO: 52423 - DNA, 60 bp, Artificial
  Synthetic oligonucleotide
gttgcaatggggtttgctgccttcttgttctgggccatgtccaatggatcttgcagatgc

SEQ ID NO: 52424 - DNA, 56 bp, Artificial
  Synthetic oligonucleotide
ggatttgtgttcacgctcaccgtgcccagtgagcgaggactgcagcgtagacgctt

SEQ ID NO: 52425 - DNA, 56 bp, Artificial
  Synthetic oligonucleotide
gggtttgtgttcacgctcaccgtgcccagtgagcgaggactgcagcgtagacgatt

SEQ ID NO: 52426 - DNA, 60 bp, Artificial
  Synthetic oligonucleotide
aggatttgtgttcacgctcaccgtgcccagtgagcgaggactgcagcgtagacgctttgt

SEQ ID NO: 52427 - DNA, 60 bp, Artificial
  Synthetic oligonucleotide
tcatggcgtctcaaggcaccaaacgatcttatgagcagatggaaactggtggagaacgcc

SEQ ID NO: 52428 - DNA, 60 bp, Artificial
  Synthetic oligonucleotide
gatgcagaaagaggcaaattgaagaggcgagcaattgcaacacccggaatgcaaatcaga

SEQ ID NO: 52429 - DNA, 57 bp, Artificial
  Synthetic oligonucleotide
gccttcttgttctgggctatgtccaatggatcttgcagatgcaacatttgtatataa

SEQ ID NO: 52430 - DNA, 60 bp, Artificial
  Synthetic oligonucleotide
agctactcctcattgttcaggcacttagggacaacctggaacctggtaccttcgatcttg

SEQ ID NO: 52431 - DNA, 60 bp, Artificial
  Synthetic oligonucleotide
gggaggttttacatacagatgtgcactgaactcaaactcagtgactatgaaggaaggctg

SEQ ID NO: 52432 - DNA, 50 bp, Artificial
  Synthetic oligonucleotide
ttttgcttaatgcatcttggttcaactccttccttacacatgcactgtaa

SEQ ID NO: 52433 - DNA, 60 bp, Artificial
  Synthetic oligonucleotide
ggacaaaagaggtacaccaaaaccacatactggtgggacggactccaatcctctgatgat

SEQ ID NO: 52434 - DNA, 60 bp, Artificial
  Synthetic oligonucleotide
gggcaaaagaggtacaccaaaaccacatactggtgggacggactccaatcctctgatgat

SEQ ID NO: 52435 - DNA, 60 bp, Artificial
  Synthetic oligonucleotide
atcttgaggctctcatggaatggctaaagacaagaccaatcctgtcacctctgaccaagg

SEQ ID NO: 52436 - DNA, 60 bp, Artificial
  Synthetic oligonucleotide
gagaggggaaaatcgtacacgttagcccattgtcaggaagtgctcagcatgtggaggaat

SEQ ID NO: 52437 - DNA, 60 bp, Artificial
  Synthetic oligonucleotide
ggatctggcgtcaagcgaacaatggagaagacgcaactgctggtctcactcacctgatga

SEQ ID NO: 52438 - DNA, 60 bp, Artificial
  Synthetic oligonucleotide
cttgaggctctcatggaatggctaaagacaagaccaatcctgtcacctctgactaaaggg

SEQ ID NO: 52439 - DNA, 60 bp, Artificial
  Synthetic oligonucleotide
gtggcgagttccctagcactggcaatcatgatggctggtctatctttatggatgtgctcc

SEQ ID NO: 52440 - DNA, 60 bp, Artificial
  Synthetic oligonucleotide
gtggcgagttccctagcactggcaatcatgatggctggtctatctttatggatgtgttcc

SEQ ID NO: 52441 - DNA, 60 bp, Artificial
  Synthetic oligonucleotide
cacaggaaccatgcgcaggcttgccgaccaaagtctcccaccgaatttctccagccttga

SEQ ID NO: 52442 - DNA, 60 bp, Artificial
  Synthetic oligonucleotide
ctgaaggcaggacatccgacatgaggactgaaatcataagaatgatggaaagtgccagac

SEQ ID NO: 52443 - DNA, 60 bp, Artificial
  Synthetic oligonucleotide
acaccaaaactacatattggtgggacggactccaatcctctgatgatttcgctctcatcg

SEQ ID NO: 52444 - DNA, 60 bp, Artificial
  Synthetic oligonucleotide
gattctacatacagatgtgcactgaactcaaactcagcgaccacgaaggcaggctgatcc

SEQ ID NO: 52445 - DNA, 60 bp, Artificial
  Synthetic oligonucleotide
caatgaccttggaccagcaacagctcagatggctcttcagctattcatcaaggactacag

SEQ ID NO: 52446 - DNA, 60 bp, Artificial
  Synthetic oligonucleotide
gcgagtaagatccaatgggaatctaattgctccatggtatggacacattctttcaggaga

SEQ ID NO: 52447 - DNA, 60 bp, Artificial
  Synthetic oligonucleotide
catgcatcaactcctgaggcacttccaaaaggatgcaaaagtgctatttcagaactgggg

SEQ ID NO: 52448 - DNA, 60 bp, Artificial
  Synthetic oligonucleotide
atgaggaattcacaatggttgggagaagagcaacagccattctaaggaaagcaaccagaa

SEQ ID NO: 52449 - DNA, 60 bp, Artificial
  Synthetic oligonucleotide
atgagaatccagcacataagagtcaactggtatggatggcatgccattctgcagcatttg

SEQ ID NO: 52450 - DNA, 60 bp, Artificial
  Synthetic oligonucleotide
ggaacaggcagttgcggtccagtgtcctctaacggggcatacggagtgaaagggttttca

SEQ ID NO: 52451 - DNA, 60 bp, Artificial
  Synthetic oligonucleotide
gagccattcatctcatgttcccacttggaatgcagaaccttctttttgactcagggagcc

SEQ ID NO: 52452 - DNA, 60 bp, Artificial
  Synthetic oligonucleotide
cacaggaaccatgcgcaggcttgcagatcaaagtctcccaccgaacttctccagccttga

SEQ ID NO: 52453 - DNA, 60 bp, Artificial
  Synthetic oligonucleotide
ggcgtcaagcaaacaatggagaagacgcaactgctggtctcactcacatgatgatatggc

SEQ ID NO: 52454 - DNA, 50 bp, Artificial
  Synthetic oligonucleotide
tccagctcaagctgccatgatgggaaagcatggttacatgtttgtgtcac

SEQ ID NO: 52455 - DNA, 57 bp, Artificial
  Synthetic oligonucleotide
ttcaccataagacaggaaatggcaagcaggggtctatgggattcctttcgtcagtcc

SEQ ID NO: 52456 - DNA, 60 bp, Artificial
  Synthetic oligonucleotide
aaggggattttagggtttgtgttcacgctcaccgtgcccagtgagcgaggactgcagcgt

SEQ ID NO: 52457 - DNA, 60 bp, Artificial
  Synthetic oligonucleotide
gggccttcttcggaaggagtgcctgagtctatgagggaagagtatcggcaggaacagcag

SEQ ID NO: 52458 - DNA, 60 bp, Artificial
  Synthetic oligonucleotide
atacaatggcataataacggacactatcaagagttggaggaacaacatactgagaactca

SEQ ID NO: 52459 - DNA, 60 bp, Artificial
  Synthetic oligonucleotide
acaatgtcatggggatgattggaatattgcctgacatgacccccagcacggaaatgtcac

SEQ ID NO: 52460 - DNA, 60 bp, Artificial
  Synthetic oligonucleotide
aatgaaagaatatggggaagatccgaaaatcgaaacgaacaaatttgccgcaataagtac

SEQ ID NO: 52461 - DNA, 60 bp, Artificial
  Synthetic oligonucleotide
cgggtacgcacaaacggactgcgtgttggaagcaatggctttccttgaagaatcccaccc

SEQ ID NO: 52462 - DNA, 60 bp, Artificial
  Synthetic oligonucleotide
cgtactggaatggaccccagaatgtgctctctgatgcaagggtcaactctcccgaggaga

SEQ ID NO: 52463 - DNA, 60 bp, Artificial
  Synthetic oligonucleotide
gggccttctacggaaggagtgcctgagtctatgagggaagagtatcggcaggaacagcag

SEQ ID NO: 52464 - DNA, 60 bp, Artificial
  Synthetic oligonucleotide
gctgggtaacggttgtttcgagttctatcacaaatgtgataatgaatgtatggaaagtat

SEQ ID NO: 52465 - DNA, 60 bp, Artificial
  Synthetic oligonucleotide
gggtaacggttgtttcgagttctatcacaaatgtgataatgaatgtatggaaagtataag

SEQ ID NO: 52466 - DNA, 60 bp, Artificial
  Synthetic oligonucleotide
agctgggtaacggttgtttcgagttctatcacaaatgtgataatgaatgtatggaaagta

SEQ ID NO: 52467 - DNA, 60 bp, Artificial
  Synthetic oligonucleotide
ccaataaggtcaactcaattattgacaaaatgaacactcagtttgaggccgttggaaggg

SEQ ID NO: 52468 - DNA, 60 bp, Artificial
  Synthetic oligonucleotide
aagatgagccttctaaccgaggtcgaaacgtacgttctctctatcatcccgtcaggcccc

SEQ ID NO: 52469 - DNA, 60 bp, Artificial
  Synthetic oligonucleotide
cttgaggcactcatggaatggctaaagacaagaccaatcctgtcacctctgactaagggg

SEQ ID NO: 52470 - DNA, 50 bp, Artificial
  Synthetic oligonucleotide
atgaaggatcttatttcttcggagacaatgcagaggagtatgacaattga

SEQ ID NO: 52471 - DNA, 50 bp, Artificial
  Synthetic oligonucleotide
atgaaggatcttatttcttcggagacaatgcagaggaatatgacaattga

SEQ ID NO: 52472 - DNA, 60 bp, Artificial
  Synthetic oligonucleotide
actcaggagtcagaatgcgtttgcatcaatggaacttgtacagtagtaatgactgatgga

SEQ ID NO: 52473 - DNA, 60 bp, Artificial
  Synthetic oligonucleotide
actcaggagtcagaatgcgtttgcatcaatggaacttgtacagtggtaatgactgatgga

SEQ ID NO: 52474 - DNA, 60 bp, Artificial
  Synthetic oligonucleotide
gaactcaggagtcagaatgcgtttgcatcaatggaacttgtacagtggtaatgactgatg

SEQ ID NO: 52475 - DNA, 60 bp, Artificial
  Synthetic oligonucleotide
gaactcaggagtcagaatgcgtttgcatcaatggaacttgtacagtagtaatgactgatg

SEQ ID NO: 52476 - DNA, 60 bp, Artificial
  Synthetic oligonucleotide
actcaggagtcagaatgcgtttgcatcaatgggacctgtacagtagtgatgactgatgga

SEQ ID NO: 52477 - DNA, 60 bp, Artificial
  Synthetic oligonucleotide
ttgaggcactcatggagtggctaaagacaagaccaatcctgtcacctctgactaagggga

SEQ ID NO: 52478 - DNA, 55 bp, Artificial
  Synthetic oligonucleotide
ttgacgataacatattcatcatcaatgatgtgggaaatcaatggccctgagtcag

SEQ ID NO: 52479 - DNA, 55 bp, Artificial
  Synthetic oligonucleotide
ttgacgataacatattcatcatcaatgatgtgggaaatcaatggtcctgagtcag

SEQ ID NO: 52480 - DNA, 60 bp, Artificial
  Synthetic oligonucleotide
gctggaatctgaaggaacttacaaaatcctcaccatttattcgactgtcgcctcgtctct

SEQ ID NO: 52481 - DNA, 60 bp, Artificial
  Synthetic oligonucleotide
attttagggtttgtgtttacgctcaccgtgcccagtgagcgaggactgcagcgtagacga

SEQ ID NO: 52482 - DNA, 60 bp, Artificial
  Synthetic oligonucleotide
ttttaggatttgtgtttacgctcaccgtgcccagtgagcgaggactgcagcgtagacgat

SEQ ID NO: 52483 - DNA, 60 bp, Artificial
  Synthetic oligonucleotide
tctgaaggaacttacaaaatcctcaccatttattcgactgtcgcctcatctcttgtgatt

SEQ ID NO: 52484 - DNA, 60 bp, Artificial
  Synthetic oligonucleotide
ctgaaggaacttacaaaatcctcaccatttattcgactgtcgcctcatctcttgtgattg

SEQ ID NO: 52485 - DNA, 60 bp, Artificial
  Synthetic oligonucleotide
cctgagaggatcagtggcccataagtcctgcttgcctgcttgtgtgtacggacttgctgt

SEQ ID NO: 52486 - DNA, 60 bp, Artificial
  Synthetic oligonucleotide
gtggaggccatggtgtctagggcccgaattgatgcacggattgacttcgagtctggacgg

SEQ ID NO: 52487 - DNA, 60 bp, Artificial
  Synthetic oligonucleotide
ccagcatgatggaggccatggtgtctagggcccgaattgatgcacggattgacttcgagt

SEQ ID NO: 52488 - DNA, 60 bp, Artificial
  Synthetic oligonucleotide
cagatattatcaatctactcaacagtggcgagttccctagcactggcaatcatgatagct

SEQ ID NO: 52489 - DNA, 60 bp, Artificial
  Synthetic oligonucleotide
tgaaggactatatgaagcaattgaggagtgcctgattaatgatccctgggttttgcttaa

SEQ ID NO: 52490 - DNA, 60 bp, Artificial
  Synthetic oligonucleotide
tatagctggattcatagaaggaggttggccagggctagttgctggctggtatggttttca

SEQ ID NO: 52491 - DNA, 60 bp, Artificial
  Synthetic oligonucleotide
tatagctggattcatagaaggaggttggccagggctagttgctggctggtatggtttcca

SEQ ID NO: 52492 - DNA, 60 bp, Artificial
  Synthetic oligonucleotide
gaagcaattgaggagtgcctgattaatgatccctgggttttgcttaatgcatcttgggtc

SEQ ID NO: 52493 - DNA, 60 bp, Artificial
  Synthetic oligonucleotide
aagaaagctactcagtatgagagacatgtgtgatgctccctttgatgacaggctccgaag

SEQ ID NO: 52494 - DNA, 60 bp, Artificial
  Synthetic oligonucleotide
cgtctcaaggcaccaaacgatctcatgaacagatggaaactggtggagaacgccagaatg

SEQ ID NO: 52495 - DNA, 60 bp, Artificial
  Synthetic oligonucleotide
cctgtgacacatgccaaagaattactccacacagagcacaatgggatgctgtgtgcaaca

SEQ ID NO: 52496 - DNA, 51 bp, Artificial
  Synthetic oligonucleotide
cttttctgggccatgtctaatggatcttgcagatgcaacatttgtatataa

SEQ ID NO: 52497 - DNA, 60 bp, Artificial
  Synthetic oligonucleotide
tctggaatgtgtcttacagtggaacaagcaaagcatgttcagattcattctacaggagca

SEQ ID NO: 52498 - DNA, 60 bp, Artificial
  Synthetic oligonucleotide
gggaggttctacatacagatgtgcactgaactcaaactcagcgactatgaagggagactg

SEQ ID NO: 52499 - DNA, 60 bp, Artificial
  Synthetic oligonucleotide
atctgttgggagaatggttggtggaatcggaagattctacatacagatgtgcactgaact

SEQ ID NO: 52500 - DNA, 51 bp, Artificial
  Synthetic oligonucleotide
tgtgttcacgctcaccgtgcccagtgagcgaggactgcagcgtagacgatt

SEQ ID NO: 52501 - DNA, 60 bp, Artificial
  Synthetic oligonucleotide
tgtcatcatggaggtcgttttcccaaatgaagtcggggccaggatattgacatcagaatc

SEQ ID NO: 52502 - DNA, 60 bp, Artificial
  Synthetic oligonucleotide
tgttatcatggaggtcgttttcccaaatgaagttggagccaggatattgacatcagagtc

SEQ ID NO: 52503 - DNA, 60 bp, Artificial
  Synthetic oligonucleotide
tgtcatcatggaggtcgttttcccaaatgaagttggagccaggatattgacattagagtc

SEQ ID NO: 52504 - DNA, 60 bp, Artificial
  Synthetic oligonucleotide
tgtcatcatggaggtcgttttcccaaatgaagttggagccaggatattgacatcagaatc

SEQ ID NO: 52505 - DNA, 60 bp, Artificial
  Synthetic oligonucleotide
tgtcatcatggaggtcgttttcccaaatgaagtaggagctaaaatattgacatcagagtc

SEQ ID NO: 52506 - DNA, 60 bp, Artificial
  Synthetic oligonucleotide
agttgggtgttccgtttcatttggcaaccaaacaagtgtgcatagcatggtccagctcaa

SEQ ID NO: 52507 - DNA, 60 bp, Artificial
  Synthetic oligonucleotide
gcaaccaaacaagtgtgcatagcatggtccagctcaagctgccatgatgggaaagcatgg

SEQ ID NO: 52508 - DNA, 60 bp, Artificial
  Synthetic oligonucleotide
atgcatctccacaactcgaggggttttcagctgaatcaagaaaactgttactcattgttc

SEQ ID NO: 52509 - DNA, 60 bp, Artificial
  Synthetic oligonucleotide
cgactacgaaggcaggctgatccaaaacagcataacaatagagagaatggtcctctctgc

SEQ ID NO: 52510 - DNA, 60 bp, Artificial
  Synthetic oligonucleotide
gcgactacgaaggcaggctgatccaaaacagcataacaatagagagaatggtcctctctg

SEQ ID NO: 52511 - DNA, 58 bp, Artificial
  Synthetic oligonucleotide
gaccacgaaggcaggctgatccaaaacagcataacaatagagagaatggtcctctctg

SEQ ID NO: 52512 - DNA, 58 bp, Artificial
  Synthetic oligonucleotide
gactatgaaagcaggctgatccaaaacagcataacaatagagagaatggtcctctctg

SEQ ID NO: 52513 - DNA, 60 bp, Artificial
  Synthetic oligonucleotide
aggattgtaagattgctcctttaatggtggcttacatgttggaaagggaactagttcgga

SEQ ID NO: 52514 - DNA, 60 bp, Artificial
  Synthetic oligonucleotide
gcgtgctgggatggaccccagaatgtgctctctgatgcaaggatcaactctcccgaggag

SEQ ID NO: 52515 - DNA, 60 bp, Artificial
  Synthetic oligonucleotide
acgcatctccacaactcgaggggttttcagctgaatcaagaaaactgttactcattgttc

SEQ ID NO: 52516 - DNA, 60 bp, Artificial
  Synthetic oligonucleotide
ttatgtgtgctcaggacttgttggcgacacaccaaggaacgatgatagctctagcagcag

SEQ ID NO: 52517 - DNA, 60 bp, Artificial
  Synthetic oligonucleotide
aacggtatcagctgatccactgctatcactattggagatgtgccacagcacacagatcgg

SEQ ID NO: 52518 - DNA, 60 bp, Artificial
  Synthetic oligonucleotide
gggaaaattgtacacattagcccattgtcaggaagtgctcagcatgtggaggaatgctcc

SEQ ID NO: 52519 - DNA, 60 bp, Artificial
  Synthetic oligonucleotide
gagaggggaaaattgtacacattagcccattgtcaggaagtgctcagcatgtggaggaat

SEQ ID NO: 52520 - DNA, 55 bp, Artificial
  Synthetic oligonucleotide
gtgacatccacatcatggcgtctcaaggcaccaaacgatcttatgagcagatgga

SEQ ID NO: 52521 - DNA, 54 bp, Artificial
  Synthetic oligonucleotide
tgacatccacatcatggcgtctcaaggcaccaaacgatcttatgagcagatgga

SEQ ID NO: 52522 - DNA, 54 bp, Artificial
  Synthetic oligonucleotide
gtttgtgttcacgctcaccgtgcccagtgagcgaggactgcagcgtagacgctt

SEQ ID NO: 52523 - DNA, 54 bp, Artificial
  Synthetic oligonucleotide
gtttgtgttcacgctcaccgtgcccagtgagcgaggactgcagcgtagacgatt

SEQ ID NO: 52524 - DNA, 54 bp, Artificial
  Synthetic oligonucleotide
gtttgtgttcacgctcaccgtgcccagtgagcgaggactgcaacgtagacggtt

SEQ ID NO: 52525 - DNA, 60 bp, Artificial
  Synthetic oligonucleotide
tccagctcaagctgccatgatgggaaagcatggttacatgtttgtgtcactggggatgat

SEQ ID NO: 52526 - DNA, 60 bp, Artificial
  Synthetic oligonucleotide
cagctcaagctgccatgatgggaaagcatggttacatgtttgtgtcactggggatgatag

SEQ ID NO: 52527 - DNA, 60 bp, Artificial
  Synthetic oligonucleotide
ggtgatccaaatgcattattgaaacaccgatttgaaataattgaaggaagagaccgaaca

SEQ ID NO: 52528 - DNA, 60 bp, Artificial
  Synthetic oligonucleotide
tggaatggctaaagacaagaccaatcctgtcacctctgactaaggggattttagggtttg

SEQ ID NO: 52529 - DNA, 60 bp, Artificial
  Synthetic oligonucleotide
attcgactgtcgcctcatctcttgtgcttgcaatggggtttgctgccttcctgttctggg

SEQ ID NO: 52530 - DNA, 56 bp, Artificial
  Synthetic oligonucleotide
ctgctggcctcacccatctgatgatctggcattccaatctgaatgatgccacatat

SEQ ID NO: 52531 - DNA, 60 bp, Artificial
  Synthetic oligonucleotide
ctgctggcctcacccatctgatgatctggcattccaatctgaatgatgccacatatcaga

SEQ ID NO: 52532 - DNA, 60 bp, Artificial
  Synthetic oligonucleotide
atgctactgagatcagagcatctgttgggagaatggttggtggaattgggagattctaca

SEQ ID NO: 52533 - DNA, 60 bp, Artificial
  Synthetic oligonucleotide
agaatgctactgagatcagagcatctgttgggagaatggttggtggaatcggaagattct

SEQ ID NO: 52534 - DNA, 60 bp, Artificial
  Synthetic oligonucleotide
gaatgctactgagatcagagcatctgttgggagaatggttggtggaatcggaagattcta

SEQ ID NO: 52535 - DNA, 60 bp, Artificial
  Synthetic oligonucleotide
gccagaatgctactgagatcagagcatctgttgggagaatggttggtggaatcggaagat

SEQ ID NO: 52536 - DNA, 60 bp, Artificial
  Synthetic oligonucleotide
ggtccagctcaagctgccatgatgggaaagcatggttacatgtttgtgtcactggggatg

SEQ ID NO: 52537 - DNA, 60 bp, Artificial
  Synthetic oligonucleotide
acaatgtcatggggatgattggaatattgcctgacatgacccccagcacggaaatgtcat

SEQ ID NO: 52538 - DNA, 60 bp, Artificial
  Synthetic oligonucleotide
ctaatagagggcacagcctcattgagtcctggaatgatgatgggcatgttcaacatgctg

SEQ ID NO: 52539 - DNA, 60 bp, Artificial
  Synthetic oligonucleotide
cctgctagatcaagtagaggactatttggagccatagctggattcatagaaggaggttgg

SEQ ID NO: 52540 - DNA, 60 bp, Artificial
  Synthetic oligonucleotide
gcaagccttacaactattgcttgaagtggagcaagagataagaactttctcatttcagct

SEQ ID NO: 52541 - DNA, 60 bp, Artificial
  Synthetic oligonucleotide
gcaagccttacaactattgcttgaagtggagcaagagataagaactttctcggttcagct

SEQ ID NO: 52542 - DNA, 60 bp, Artificial
  Synthetic oligonucleotide
tcgactgtcgcctcatctcttgtgattgcaatggggtttgctgccttcttgttctgggcc

SEQ ID NO: 52543 - DNA, 60 bp, Artificial
  Synthetic oligonucleotide
cgactgtcgcctcatctcttgtgattgcaatggggtttgctgccttcttgttctgggcca

SEQ ID NO: 52544 - DNA, 60 bp, Artificial
  Synthetic oligonucleotide
atggacttacaatgcagaacttctcgtgctcatggaaaacgaaagaactctggatttcca

SEQ ID NO: 52545 - DNA, 60 bp, Artificial
  Synthetic oligonucleotide
acgaaagaactctggatttccatgattcaaatgtcaagaacctatacgataaggtccgac

SEQ ID NO: 52546 - DNA, 60 bp, Artificial
  Synthetic oligonucleotide
cagggaagtggatatgctgcagacaaagaatctacccagaaagcaatcgatgggatcacc

SEQ ID NO: 52547 - DNA, 60 bp, Artificial
  Synthetic oligonucleotide
ggaggatggcaaggaatggttgacgggtggtacggataccatcatagcaatgagcaggga

SEQ ID NO: 52548 - DNA, 60 bp, Artificial
  Synthetic oligonucleotide
gtttttagatgtatggacttacaatgcagaacttctcgtgctcatggaaaacgaaagaac

SEQ ID NO: 52549 - DNA, 60 bp, Artificial
  Synthetic oligonucleotide
ccaataaagtaaactcaatcattgacaaaatgaacactcaattcgaaaccgttgggaaag

SEQ ID NO: 52550 - DNA, 60 bp, Artificial
  Synthetic oligonucleotide
gggagtgccccaagtatgtcaaatcggacaaactggtccttgcaacaggactaagaaacg

SEQ ID NO: 52551 - DNA, 60 bp, Artificial
  Synthetic oligonucleotide
atgcctcatcaggagtgagttcggcatgcccatacaatggtagatcttcctttttcagga

SEQ ID NO: 52552 - DNA, 60 bp, Artificial
  Synthetic oligonucleotide
tggaaacccaatgtgtgatgaattcctgaatgtaccagaatggtcatacatcgtggaaaa

SEQ ID NO: 52553 - DNA, 60 bp, Artificial
  Synthetic oligonucleotide
aggagattcagcaatcatgggaagtgaattggagtatggtaactgtgacaccaaatgtca

SEQ ID NO: 52554 - DNA, 60 bp, Artificial
  Synthetic oligonucleotide
catgggaagtgaattggagtatggtaactgtgacaccaaatgtcagactccattgggtgc

SEQ ID NO: 52555 - DNA, 51 bp, Artificial
  Synthetic oligonucleotide
gagatcaatcccagaaatagccactagacccaaagtgaacgggcaaagtgg

SEQ ID NO: 52556 - DNA, 60 bp, Artificial
  Synthetic oligonucleotide
agtaatgggaattttatagctcctgaatatgcgtacaaaaatgtcaagaaaggagattca

SEQ ID NO: 52557 - DNA, 60 bp, Artificial
  Synthetic oligonucleotide
gcagaatttgcatctagaattgtgagttcagattataattaaaaacacccttgtttctac

SEQ ID NO: 52558 - DNA, 60 bp, Artificial
  Synthetic oligonucleotide
aaggtccgactccagctgagagacaatgcaaaagaactgggcaacggatgcttcgaattc

SEQ ID NO: 52559 - DNA, 60 bp, Artificial
  Synthetic oligonucleotide
gatttccatgattcaaatgtcaagaacctatacgataaggtccgactccagctgagagac

SEQ ID NO: 52560 - DNA, 60 bp, Artificial
  Synthetic oligonucleotide
cttcgaattctaccacaagtgtgacaatgaatgcatggaaagtgtgagaaatggaacgta

SEQ ID NO: 52561 - DNA, 60 bp, Artificial
  Synthetic oligonucleotide
cgactccagctgagagacaatgcaaaagaactgggcaacggatgcttcgaattctaccac

SEQ ID NO: 52562 - DNA, 60 bp, Artificial
  Synthetic oligonucleotide
tgaacagagaggaaatagacggagtcaaattggaatcaatgggcacctatcagatattat

SEQ ID NO: 52563 - DNA, 60 bp, Artificial
  Synthetic oligonucleotide
taccacaagtgtgacaatgaatgcatggaaagtgtgagaaatggaacgtatgactatccg

SEQ ID NO: 52564 - DNA, 60 bp, Artificial
  Synthetic oligonucleotide
catgatagctggtctatctttttggatgtgttccaatggatcattgcagtgcagaatttg

SEQ ID NO: 52565 - DNA, 60 bp, Artificial
  Synthetic oligonucleotide
aggagtgaggcccctcattctgaaggattgcagtgtagctggatggcttcttggaaaccc

SEQ ID NO: 52566 - DNA, 60 bp, Artificial
  Synthetic oligonucleotide
agcaaaagcaggggtccaaactatgaaaatggaaagaatagtgattgccctcgcaataat

SEQ ID NO: 52567 - DNA, 53 bp, Artificial
  Synthetic oligonucleotide
tcgcaataatcagcattgtcaaaggtgaccaaatttgcattggttaccatgca

SEQ ID NO: 52568 - DNA, 60 bp, Artificial
  Synthetic oligonucleotide
gagcaggttgatacaatcatggaaaagaatgtgacggtcacacatgctcaggatatactg

SEQ ID NO: 52569 - DNA, 60 bp, Artificial
  Synthetic oligonucleotide
acaatgtcatggggatgattggaatattgcctgacatgactcccagcacagaaatgtcac

SEQ ID NO: 52570 - DNA, 60 bp, Artificial
  Synthetic oligonucleotide
ataatgtcatggggatgattggaatattgcctgacatgactcccagcacggaaatgtcac

SEQ ID NO: 52571 - DNA, 60 bp, Artificial
  Synthetic oligonucleotide
acaatgtcatggggatgattggaatattgcctgacatgactcccagcacagaaatgtcat

SEQ ID NO: 52572 - DNA, 60 bp, Artificial
  Synthetic oligonucleotide
acaatgttatggggatgattggaatattgcctgacatgactcccagcacggaaatgtcac

SEQ ID NO: 52573 - DNA, 58 bp, Artificial
  Synthetic oligonucleotide
catggggatgattggaatattgcctgacatgactcccagcacagaaatgtcactgaga

SEQ ID NO: 52574 - DNA, 60 bp, Artificial
  Synthetic oligonucleotide
ataatgtcatggggatgattggaatattgcctgacatgactcccagtacagaaatgtcac

SEQ ID NO: 52575 - DNA, 60 bp, Artificial
  Synthetic oligonucleotide
gtcatggggatgattggaatattgcctgacatgactcccagcacagaaatgtcattgaga

SEQ ID NO: 52576 - DNA, 60 bp, Artificial
  Synthetic oligonucleotide
cggaaggagtgcctgagtctatgagggaagagtatcggcaggagcaacagagtgctgcgg

SEQ ID NO: 52577 - DNA, 60 bp, Artificial
  Synthetic oligonucleotide
cggaaggagtgcctgagtctatgagggaagagtatcggcaggagcaacagagtgctgtgg

SEQ ID NO: 52578 - DNA, 60 bp, Artificial
  Synthetic oligonucleotide
cggaaggagtgcctgagtctatgagggaagagtatcggcaggaacaacagagtgctgtgg

SEQ ID NO: 52579 - DNA, 60 bp, Artificial
  Synthetic oligonucleotide
aaggggtcaagctggaatctgaaggaacttacaaaatcctcaccatttattcgactgtcg

SEQ ID NO: 52580 - DNA, 60 bp, Artificial
  Synthetic oligonucleotide
ggggtcaagctggaatctgaaggaacttacaaaatcctcaccatttattcgactgtcgcc

SEQ ID NO: 52581 - DNA, 60 bp, Artificial
  Synthetic oligonucleotide
gaaggggtcaagctggaatctgaaggaacttacaaaatcctcaccatttattcgactgtc

SEQ ID NO: 52582 - DNA, 60 bp, Artificial
  Synthetic oligonucleotide
cagttatgtgtgctcaggacttgttggcgacacaccaagaaatgatgatagatctagcag

SEQ ID NO: 52583 - DNA, 60 bp, Artificial
  Synthetic oligonucleotide
ccagttatgtgtgctcaggacttgttggcgacacaccaagaaatgatgatagatctagca

SEQ ID NO: 52584 - DNA, 60 bp, Artificial
  Synthetic oligonucleotide
caattattgtagcaatggtgttctcacaggaggagtgtatgataaaggcagtccgtggcg

SEQ ID NO: 52585 - DNA, 60 bp, Artificial
  Synthetic oligonucleotide
caattattgtagcaatggtgttctcacaggaggagtgtatgataaaggcagtccgcggcg

SEQ ID NO: 52586 - DNA, 60 bp, Artificial
  Synthetic oligonucleotide
ggaatttaccaaatactgtcaatttattcaacagtagcgagttccctaacactggcaatc

SEQ ID NO: 52587 - DNA, 60 bp, Artificial
  Synthetic oligonucleotide
ggaatttaccaaatactgtcaatttattcaacagtagcgagttccctagcactggcaatc

SEQ ID NO: 52588 - DNA, 60 bp, Artificial
  Synthetic oligonucleotide
cctgacaaaaaccactgtggaccatatggccataattacgaaatacacatcaggaagaca

SEQ ID NO: 52589 - DNA, 58 bp, Artificial
  Synthetic oligonucleotide
tgtcgcagtctcgcactcgcgagatacttacaaaaaccactgtggaccatatggccat

SEQ ID NO: 52590 - DNA, 60 bp, Artificial
  Synthetic oligonucleotide
tactaacaaaaaccactgtggaccatatggccataatcaagaaatacacatcaggaagac

SEQ ID NO: 52591 - DNA, 60 bp, Artificial
  Synthetic oligonucleotide
cttacaaaatcctcaccatttattcgactgtcgcctcatctcttgtggttgcaatggggt

SEQ ID NO: 52592 - DNA, 60 bp, Artificial
  Synthetic oligonucleotide
gaacttacaaaatcctcaccatttattcgactgtcgcctcatctcttgtggttgcaatgg

SEQ ID NO: 52593 - DNA, 60 bp, Artificial
  Synthetic oligonucleotide
cagaagagaccaaaaggcattaaagggaagaggcagcacacttgggctcgacctaagaat

SEQ ID NO: 52594 - DNA, 60 bp, Artificial
  Synthetic oligonucleotide
ttgcagaccaagaactgggtgatgccccatttctagaccggctccgccgggatcagaagt

SEQ ID NO: 52595 - DNA, 60 bp, Artificial
  Synthetic oligonucleotide
acatgttcgagagtaagagcatgaagctacggacacaaataccagcagaaatgcttgcaa

SEQ ID NO: 52596 - DNA, 60 bp, Artificial
  Synthetic oligonucleotide
gggcatctgttgggagaatggttggtggaatcggaagattctacatacagatgtgcactg

SEQ ID NO: 52597 - DNA, 55 bp, Artificial
  Synthetic oligonucleotide
aaccgattcattgaaattggagtgacacggagggaagttcacatatactatctag

SEQ ID NO: 52598 - DNA, 60 bp, Artificial
  Synthetic oligonucleotide
gaagcctctaattttaagagattgtagtgtagctggatggctcctcgggaacccaatgtg

SEQ ID NO: 52599 - DNA, 60 bp, Artificial
  Synthetic oligonucleotide
gcgataaactctagtatgccattccacaacatccaccctctcaccatcggggaatgcccc

SEQ ID NO: 52600 - DNA, 60 bp, Artificial
  Synthetic oligonucleotide
cgggaaactctgcgatctagatggagtgaagcctctaattttaagagattgtagtgtagc

SEQ ID NO: 52601 - DNA, 60 bp, Artificial
  Synthetic oligonucleotide
cgggaagctctgcgatctagatggagtgaagcctctaattttaagagattgtagtgtagc

SEQ ID NO: 52602 - DNA, 60 bp, Artificial
  Synthetic oligonucleotide
ggagtgaagcctctaattttaagagattgtagtgtagctggatggctcctcgggaaccca

SEQ ID NO: 52603 - DNA, 60 bp, Artificial
  Synthetic oligonucleotide
ggagtgaagcctctaattttaagagattgtagtgtagctggatggctcctcgggaatcca

SEQ ID NO: 52604 - DNA, 60 bp, Artificial
  Synthetic oligonucleotide
gacacacaacgggaagctctgcgatctagatggagtgaagcctctaattttaagagattg

SEQ ID NO: 52605 - DNA, 60 bp, Artificial
  Synthetic oligonucleotide
gacacacaacgggaaactctgcgatctagatggagtgaagcctctaattttaagagattg

SEQ ID NO: 52606 - DNA, 60 bp, Artificial
  Synthetic oligonucleotide
tttttaaccgaggtcgaaacgtacgttctctctatcatcccatcaggccccctcaaagcc

SEQ ID NO: 52607 - DNA, 60 bp, Artificial
  Synthetic oligonucleotide
caggccagacattgcgagtaagatccaacgggaatctaattgctccatggtatggacacg

SEQ ID NO: 52608 - DNA, 60 bp, Artificial
  Synthetic oligonucleotide
cgactatgaaggaaggctgatccaaaacagcataacaatagagagaatggttctatctgc

SEQ ID NO: 52609 - DNA, 60 bp, Artificial
  Synthetic oligonucleotide
gggcagaagaggtacaccaaaaccacatactggtgggatggactccaatcctctgatgat

SEQ ID NO: 52610 - DNA, 60 bp, Artificial
  Synthetic oligonucleotide
ttgggcagaagaggtacaccaaaaccacatactggtgggatggactccaatcctctgatg

SEQ ID NO: 52611 - DNA, 60 bp, Artificial
  Synthetic oligonucleotide
acaaaatccttaccatttattcgactgtcgcctcatctctcgtacttgcaatggggtttg

SEQ ID NO: 52612 - DNA, 60 bp, Artificial
  Synthetic oligonucleotide
acaaaatccttaccatttattcgactgtcgcctcatctcttgtacttgcaatggggtttg

SEQ ID NO: 52613 - DNA, 60 bp, Artificial
  Synthetic oligonucleotide
cgtactggaatggaccccagaatgtgttctctgatgcaagggtcaactctcccgaggaga

SEQ ID NO: 52614 - DNA, 60 bp, Artificial
  Synthetic oligonucleotide
tcgcaatcccgcacccgcgagatactaacaaaaaccactgtggaccatatggccataatt

SEQ ID NO: 52615 - DNA, 60 bp, Artificial
  Synthetic oligonucleotide
aatgtcgcaatcccgcacccgcgagatactaacaaaaaccactgtggaccatatggccat

SEQ ID NO: 52616 - DNA, 60 bp, Artificial
  Synthetic oligonucleotide
taggccaagtgtcaaggcccatgttcctgtatgtgagaaccaatgggacttctaagatca

SEQ ID NO: 52617 - DNA, 60 bp, Artificial
  Synthetic oligonucleotide
tccggaatctccacattccagaggtctgcttgaaatgggaattgatggatgaagattacc

SEQ ID NO: 52618 - DNA, 60 bp, Artificial
  Synthetic oligonucleotide
gtgtcttacagtggaacaagcaaagcatgttcagattcattctacagaagcatgagatgg

SEQ ID NO: 52619 - DNA, 60 bp, Artificial
  Synthetic oligonucleotide
tggaatgtgtcttacagtggaacaagcaaagcatgttcagattcattctacagaagcatg

SEQ ID NO: 52620 - DNA, 60 bp, Artificial
  Synthetic oligonucleotide
cttgaaagtaccagtgcaaaatgctataagtaccacattcccttatactggagaccctcc

SEQ ID NO: 52621 - DNA, 61 bp, Artificial
  Synthetic oligonucleotide
ctctaataggcctgttatagatataagtatggcagattatagcattgattccagttatgtg

SEQ ID NO: 52622 - DNA, 60 bp, Artificial
  Synthetic oligonucleotide
gtcgtattttgtggcacttcaggcacctatggaacaggctcatggcctgatggggcgaat

SEQ ID NO: 52623 - DNA, 60 bp, Artificial
  Synthetic oligonucleotide
gctttccttgaggaatcccacccagggatctttgaaaactcgtgtcttgaaacgatggaa

SEQ ID NO: 52624 - DNA, 60 bp, Artificial
  Synthetic oligonucleotide
ccttaggcaaaatccgactgaggagcaagctgtggatatatgcaaagcagcaatgggcct

SEQ ID NO: 52625 - DNA, 60 bp, Artificial
  Synthetic oligonucleotide
tcaacatcatggcgtctcaaggcaccaaacgatcttatgaacagatggaaactggtggag

SEQ ID NO: 52626 - DNA, 60 bp, Artificial
  Synthetic oligonucleotide
tgatgatctggcattccaatctgaatgatgccacatatcaaagaacaagagctctagtgc

SEQ ID NO: 52627 - DNA, 60 bp, Artificial
  Synthetic oligonucleotide
tgatctggcattccaatctgaatgatgccacatatcaaagaacaagagctctagtgcgta

SEQ ID NO: 52628 - DNA, 60 bp, Artificial
  Synthetic oligonucleotide
gatctggcattccaatctgaatgatgccacatatcaaagaacaagagctctagtgcgtac

SEQ ID NO: 52629 - DNA, 60 bp, Artificial
  Synthetic oligonucleotide
gacgtggccgattggagagtcacctaagggagtggaggaaggctccatcggaaaggtgtg

SEQ ID NO: 52630 - DNA, 60 bp, Artificial
  Synthetic oligonucleotide
gagaacaagagctctagtgcgtactgggatggaccccagaatgtgctctctgatgcaagg

SEQ ID NO: 52631 - DNA, 60 bp, Artificial
  Synthetic oligonucleotide
atatggccataatcaaaaagtacacatcaggaaggcaagagaagaaccccgcactcagaa

SEQ ID NO: 52632 - DNA, 60 bp, Artificial
  Synthetic oligonucleotide
catagcatggtccagctcaagctgccatgatgggaaagcatggttacatgtttgtgtcac

SEQ ID NO: 52633 - DNA, 60 bp, Artificial
  Synthetic oligonucleotide
cctacaaaatcctcaccatttattcgactgtcgcctcatctcttgtgcttgcgatggggt

SEQ ID NO: 52634 - DNA, 60 bp, Artificial
  Synthetic oligonucleotide
gggtttgctgccttcctgttctgggccatgtccaatggatcttgcagatgcaacatttgt

SEQ ID NO: 52635 - DNA, 60 bp, Artificial
  Synthetic oligonucleotide
ggggtttgctgccttcctgttctgggccatgtccaatggatcttgcagatgcaacatttg

SEQ ID NO: 52636 - DNA, 60 bp, Artificial
  Synthetic oligonucleotide
caaaatcctcaccatttattcgactgtcgcctcatctcttgtgattgcaatggggtttgc

SEQ ID NO: 52637 - DNA, 60 bp, Artificial
  Synthetic oligonucleotide
gagaggggaaaatcgtacacattagcccattgtcaggaagtgctcagcatgtggaggaat

SEQ ID NO: 52638 - DNA, 60 bp, Artificial
  Synthetic oligonucleotide
aatgaaagagtatggggaagatccgaaaatcgaaacgaacaagtttgctgcaatatgcac

SEQ ID NO: 52639 - DNA, 60 bp, Artificial
  Synthetic oligonucleotide
cctgctagatcaagtagaggactatttggagccatagctggattcatagagggaggttgg

SEQ ID NO: 52640 - DNA, 60 bp, Artificial
  Synthetic oligonucleotide
ggcgtcaagcaaacaatggagaagacgcaactgctggtctcactcatctgatgatctggc

SEQ ID NO: 52641 - DNA, 60 bp, Artificial
  Synthetic oligonucleotide
catttattcgactgtcgcctcatctcttgtgattgcaatggggtttgctgccttcttgtt

SEQ ID NO: 52642 - DNA, 60 bp, Artificial
  Synthetic oligonucleotide
tggaatcaataggaatttaccaaatactgtcaatttattcaacagtggcgagttccctag

SEQ ID NO: 52643 - DNA, 60 bp, Artificial
  Synthetic oligonucleotide
ggaatttaccaaatactgtcaatttattcaacagtggcgagttccctagcactggcaatc

SEQ ID NO: 52644 - DNA, 60 bp, Artificial
  Synthetic oligonucleotide
ggagggctgtatgaagcaattgaggagtgcctgattaacgatccctgggttttgcttaat

SEQ ID NO: 52645 - DNA, 60 bp, Artificial
  Synthetic oligonucleotide
ggaacctgggaccttcgatcttggagggctatatgaagcaattgaggagtgcctgattaa

SEQ ID NO: 52646 - DNA, 60 bp, Artificial
  Synthetic oligonucleotide
gggctgtatgaagcaattgaggagtgcctgattaacgatccctgggttttgcttaatgcg

SEQ ID NO: 52647 - DNA, 60 bp, Artificial
  Synthetic oligonucleotide
tgtgacacatgccaaagaattgctccacacagagcacaatgggatgctgtgtgcaacaaa

SEQ ID NO: 52648 - DNA, 60 bp, Artificial
  Synthetic oligonucleotide
caccgagtgacatccacatcatggcgtctcaaggcaccaaacgatcttatgagcagatgg

SEQ ID NO: 52649 - DNA, 60 bp, Artificial
  Synthetic oligonucleotide
caccgagtgacatccgcatcatggcgtctcaaggcaccaaacgatcttatgagcagatgg

SEQ ID NO: 52650 - DNA, 60 bp, Artificial
  Synthetic oligonucleotide
atcctcaccatttattcgactgtcgcctcatctcttgtgcttgcaatggggtttgctgcc

SEQ ID NO: 52651 - DNA, 60 bp, Artificial
  Synthetic oligonucleotide
atttgaaatcacaggaacaatgcgcaggcttgccgaccaaagtctcccaccgaatttctc

SEQ ID NO: 52652 - DNA, 60 bp, Artificial
  Synthetic oligonucleotide
ggttcatggtctaaaagcatcctcagaactcaggagtcagaatgcgtttgcatcaatgga

SEQ ID NO: 52653 - DNA, 52 bp, Artificial
  Synthetic oligonucleotide
caaaatgcaataagtaccacattcccttatactggagatcccccatatagcc

SEQ ID NO: 52654 - DNA, 60 bp, Artificial
  Synthetic oligonucleotide
caaacagcagcacaacgagcaatgatggaccaagtgcgggaaagcagaaatcctgggaat

SEQ ID NO: 52655 - DNA, 60 bp, Artificial
  Synthetic oligonucleotide
gtgaactgagcaatcttgcgaaaggggagaaagctaatgtgctgatagggcaaggagacg

SEQ ID NO: 52656 - DNA, 60 bp, Artificial
  Synthetic oligonucleotide
gccccatggtatggacacattctttcaggagaaagccatggaagaatcctgaagaccgat

SEQ ID NO: 52657 - DNA, 60 bp, Artificial
  Synthetic oligonucleotide
aggggatccaatagacccgttctatatataaatatggcagattatagcattgattccagt

SEQ ID NO: 52658 - DNA, 60 bp, Artificial
  Synthetic oligonucleotide
gtattttgtggaacttcaggtacctatggaacaggctcatggcctgatggggcaaatatc

SEQ ID NO: 52659 - DNA, 60 bp, Artificial
  Synthetic oligonucleotide
gtattttgtggaacctcaggtacctatggaacaggctcatggcctgatggagcgaatatc

SEQ ID NO: 52660 - DNA, 60 bp, Artificial
  Synthetic oligonucleotide
gtattctgtggaacttcaggtacctatggaacaggctcatggcctgatggggcaaatatc

SEQ ID NO: 52661 - DNA, 57 bp, Artificial
  Synthetic oligonucleotide
ctaatagagggcacagcctcattgagtcctggaatgatgatgggcatgttcaacatg

SEQ ID NO: 52662 - DNA, 58 bp, Artificial
  Synthetic oligonucleotide
atagcatcattgtattttgtggaacttcaggtacctatggaacaggctcatggcctga

SEQ ID NO: 52663 - DNA, 60 bp, Artificial
  Synthetic oligonucleotide
atgagccttctaaccgaggtcgaaacgtacgttctctctatcatcccgtcaggccccctc

SEQ ID NO: 52664 - DNA, 60 bp, Artificial
  Synthetic oligonucleotide
gtattttgtggaacctcaggtacctatggaacaggctcatggcctgatggggcgaatatc

SEQ ID NO: 52665 - DNA, 60 bp, Artificial
  Synthetic oligonucleotide
gtattttgtggaacttcaggtacctatggaacaggctcatggcctgatggggcgaatatc

SEQ ID NO: 52666 - DNA, 60 bp, Artificial
  Synthetic oligonucleotide
tttgtggaacctcaggtacctatggaacaggctcatggcctgatggggcgaatatcaact

SEQ ID NO: 52667 - DNA, 60 bp, Artificial
  Synthetic oligonucleotide
tttgtggaacatcaggtacctatggaacaggctcatggcctgatggggcgaatatcaact

SEQ ID NO: 52668 - DNA, 60 bp, Artificial
  Synthetic oligonucleotide
gtggaacttcaggtacctatggaacaggctcatggcctgatggggcgaatatcaatttca

SEQ ID NO: 52669 - DNA, 60 bp, Artificial
  Synthetic oligonucleotide
tttgtgggacatcaggtacctatggaacaggctcatggcctgatggggcgaatatcaact

SEQ ID NO: 52670 - DNA, 60 bp, Artificial
  Synthetic oligonucleotide
ctaactcacaagatacagagctctcctttacaattactggggacaacaccaaatggaatg

SEQ ID NO: 52671 - DNA, 60 bp, Artificial
  Synthetic oligonucleotide
gctctcgtgcgtactgggatggaccccagaatgtgctctctgatgcaaggatcaactctt

SEQ ID NO: 52672 - DNA, 60 bp, Artificial
  Synthetic oligonucleotide
ggagacgtagtgctggtaatgaaacggaaacgggactctagcatacttactgacagccag

SEQ ID NO: 52673 - DNA, 60 bp, Artificial
  Synthetic oligonucleotide
ttgagccctggaatgatgatgggcatgttcaacatgctaagtacagttttaggagtctcg

SEQ ID NO: 52674 - DNA, 60 bp, Artificial
  Synthetic oligonucleotide
cgatcttggaccagcaacagctcagatggctcttcagctattcatcaaggactataggta

SEQ ID NO: 52675 - DNA, 60 bp, Artificial
  Synthetic oligonucleotide
ttgcagaccaagaactgggtgatgccccatttctagaccggcttcgccgagatcagaagt

SEQ ID NO: 52676 - DNA, 60 bp, Artificial
  Synthetic oligonucleotide
gatccctgggttttgcttaatgcatcttggttcaactccttcctcacacatgcactgaaa

SEQ ID NO: 52677 - DNA, 60 bp, Artificial
  Synthetic oligonucleotide
cattgccattccacaatgtcagtaaatatgcatttggaaactgcccaaaatatgttggag

SEQ ID NO: 52678 - DNA, 60 bp, Artificial
  Synthetic oligonucleotide
tacattgccattccacaatgtcagtaaatatgcatttggaaactgcccaaaatatgttgg

SEQ ID NO: 52679 - DNA, 60 bp, Artificial
  Synthetic oligonucleotide
gaggagtgcctgattaatgatccctgggttttgcttaatgcatcttggttcaactccttc

SEQ ID NO: 52680 - DNA, 60 bp, Artificial
  Synthetic oligonucleotide
cattgtattttgtggaacttcaggtacctatggaacaggctcatggcctgatggggcgaa

SEQ ID NO: 52681 - DNA, 60 bp, Artificial
  Synthetic oligonucleotide
atgagtcttctaaccgaggtcgaaacgtacgttctctctatcatcccatcaggcccccac

SEQ ID NO: 52682 - DNA, 56 bp, Artificial
  Synthetic oligonucleotide
ggtctcactcatttgatgatctggcattccaatctgaatgatgccacatatcagag

SEQ ID NO: 52683 - DNA, 51 bp, Artificial
  Synthetic oligonucleotide
ggtctcactcatttgatgatctggcattccaatctgaatgatgccacatat

SEQ ID NO: 52684 - DNA, 60 bp, Artificial
  Synthetic oligonucleotide
tgtccgcaaacgatttgcagaccaagaactgggcgatgccccatttctagaccggctccg

SEQ ID NO: 52685 - DNA, 60 bp, Artificial
  Synthetic oligonucleotide
gtgctgatagggcaaggagacgtagtgctggtaatgaaacggaaacgggactctagcata

SEQ ID NO: 52686 - DNA, 60 bp, Artificial
  Synthetic oligonucleotide
tcttctgtcaaagagaaggacatgaccaaagagttctttgaaaacagatcggagacatgg

SEQ ID NO: 52687 - DNA, 60 bp, Artificial
  Synthetic oligonucleotide
gaaggacatgaccaaagagttctttgaaaacagatcggagacatggccaattggagagtc

SEQ ID NO: 52688 - DNA, 60 bp, Artificial
  Synthetic oligonucleotide
ggttggtggaatcggaagattctacatacagatgtgcactgaactcaaactcagcgacta

SEQ ID NO: 52689 - DNA, 60 bp, Artificial
  Synthetic oligonucleotide
ggaatcggaaaattctacatacagatgtgcactgaactcaaactcagcgactacgaaggc

SEQ ID NO: 52690 - DNA, 60 bp, Artificial
  Synthetic oligonucleotide
atcggaagattctacatacagatgtgcactgaactcaaactcagcgactacgaaggcagg

SEQ ID NO: 52691 - DNA, 60 bp, Artificial
  Synthetic oligonucleotide
gctgggagcagatgtacactccaggaggggaggtaagaaatgatgatgttgaccaaagtt

SEQ ID NO: 52692 - DNA, 60 bp, Artificial
  Synthetic oligonucleotide
cacaggaacaatgcgcaggcttgccgaccaaagtctcccaccgaacttctccagccttga

SEQ ID NO: 52693 - DNA, 52 bp, Artificial
  Synthetic oligonucleotide
aacacaatgacaaaagatgcagaaagaggcaagttgaagaggagggcaattg

SEQ ID NO: 52694 - DNA, 60 bp, Artificial
  Synthetic oligonucleotide
gacactgaacacaatgacaaaagatgcagaaagaggcaaattggaaaggagggcaattgc

SEQ ID NO: 52695 - DNA, 60 bp, Artificial
  Synthetic oligonucleotide
cttggagggctatatgaagcaattgaggagtgcctgattaatgatccctgggttttgctt

SEQ ID NO: 52696 - DNA, 60 bp, Artificial
  Synthetic oligonucleotide
ttcgatcttggagggctatatgaagcaattgaggagtgcctgattaatgatccctgggtt

SEQ ID NO: 52697 - DNA, 60 bp, Artificial
  Synthetic oligonucleotide
tggcattccaatctgaatgatgccacatatcagagaacaagagctctagtgcgtactggg

SEQ ID NO: 52698 - DNA, 60 bp, Artificial
  Synthetic oligonucleotide
tggcattccaatctgaatgatgccacatatcagagaacaagagctctagtgcgtacaggg

SEQ ID NO: 52699 - DNA, 60 bp, Artificial
  Synthetic oligonucleotide
actaagaagcagatactgggctataaggaccaggagtggaggaaacaccaaccaacatag

SEQ ID NO: 52700 - DNA, 60 bp, Artificial
  Synthetic oligonucleotide
aatgaaagagtatggggaagatccgaaaatcgaaacgaacaagtttgcggcaatatgcac

SEQ ID NO: 52701 - DNA, 60 bp, Artificial
  Synthetic oligonucleotide
ctggaatgatgatgggcatgttcaacatgctgagcacagttttaggagtctcaattctga

SEQ ID NO: 52702 - DNA, 60 bp, Artificial
  Synthetic oligonucleotide
gtcctggaatgatgatgggcatgttcaacatgctgagtacagtcttaggagtctcaatcc

SEQ ID NO: 52703 - DNA, 57 bp, Artificial
  Synthetic oligonucleotide
gcgagttccctagcactggcaatcatgatagctggtctatctttatggatgtgctcc

SEQ ID NO: 52704 - DNA, 60 bp, Artificial
  Synthetic oligonucleotide
agaaatacacatcaggaagacaagagaagaaccctgctctcagaatgaaatggatgatgg

SEQ ID NO: 52705 - DNA, 60 bp, Artificial
  Synthetic oligonucleotide
cagcagcacaacgagcaatgatggaccaagtgcgggaaagcagaaatcctgggaatgctg

SEQ ID NO: 52706 - DNA, 60 bp, Artificial
  Synthetic oligonucleotide
cagaagagcaagctgtggatatatgcaaagcagcaatgggtctaaggatcagttcatcct

SEQ ID NO: 52707 - DNA, 60 bp, Artificial
  Synthetic oligonucleotide
aaatcctcactatttattcgactgtcgcctcatctcttgtgattgcaatggggtttgctg

SEQ ID NO: 52708 - DNA, 60 bp, Artificial
  Synthetic oligonucleotide
aaaagaacgttactgttacacatgcccaagacatactggaaaagacacacaacgggaagc

SEQ ID NO: 52709 - DNA, 60 bp, Artificial
  Synthetic oligonucleotide
aagaacgtcactgttacacatgcccaagacatactggaaaagacacacaacgggaagctc

SEQ ID NO: 52710 - DNA, 60 bp, Artificial
  Synthetic oligonucleotide
gacgcaactgctggtctcacccatctgatgatctggcattccaatctgaatgatgccaca

SEQ ID NO: 52711 - DNA, 60 bp, Artificial
  Synthetic oligonucleotide
cgcaactgctggtctcacccatctgatgatctggcattccaatctgaatgatgccacata

SEQ ID NO: 52712 - DNA, 60 bp, Artificial
  Synthetic oligonucleotide
caaacgatttgcagaccaagaactgggtgatgccccattccttgatcggcttcgccgaga

SEQ ID NO: 52713 - DNA, 60 bp, Artificial
  Synthetic oligonucleotide
aaacgatttgcagaccaagaactgggtgatgccccatttccagaccggcttcgccgggat

SEQ ID NO: 52714 - DNA, 60 bp, Artificial
  Synthetic oligonucleotide
ggagaatttggcgtcaagcgaacaatggagaagacgcaactgctggcctcacccatctga

SEQ ID NO: 52715 - DNA, 60 bp, Artificial
  Synthetic oligonucleotide
aattggaatcaataggaacttaccaaatactgtcaatttattcaacagtggcgagttccc

SEQ ID NO: 52716 - DNA, 60 bp, Artificial
  Synthetic oligonucleotide
tggaatcaataggaacttaccaaatactgtcaatttattcaacagtggcgagttccctag

SEQ ID NO: 52717 - DNA, 60 bp, Artificial
  Synthetic oligonucleotide
agaactgaaacacctattgagcagaataaaccattttgagaaaattcaaatcatccccaa

SEQ ID NO: 52718 - DNA, 60 bp, Artificial
  Synthetic oligonucleotide
ccatatggccataatcaagaaatacacatcaggaagacaagagaagagccctgctcttag

SEQ ID NO: 52719 - DNA, 58 bp, Artificial
  Synthetic oligonucleotide
atggccataatcaagaaatacacatcaggaagacaggagaagaatcctgcactcagaa

SEQ ID NO: 52720 - DNA, 60 bp, Artificial
  Synthetic oligonucleotide
atggccataatcaagaaatacacatcaggaagacaggagaagaatcctgcactcagaatg

SEQ ID NO: 52721 - DNA, 60 bp, Artificial
  Synthetic oligonucleotide
ggtcgtcagacctatgactggacattgaatagaaaccagccggctgcaactgctttggcc

SEQ ID NO: 52722 - DNA, 60 bp, Artificial
  Synthetic oligonucleotide
atttgaaatcacaggaacaatgcgcaggcttgccgatcaaagtctcccaccgaatttctc

SEQ ID NO: 52723 - DNA, 60 bp, Artificial
  Synthetic oligonucleotide
ccaaacaagtgtgcatagcatggtccagctcaagctgccatgatgggaaagcatggttac

SEQ ID NO: 52724 - DNA, 60 bp, Artificial
  Synthetic oligonucleotide
ccatttattcgactgtcgcctcatctcttgtacttgcaatggggtttgctgccttcttgt

SEQ ID NO: 52725 - DNA, 60 bp, Artificial
  Synthetic oligonucleotide
gtcgcctcatctcttgtgattgcaatggggtttgctgccttcttgttctgggctatgtcc

SEQ ID NO: 52726 - DNA, 60 bp, Artificial
  Synthetic oligonucleotide
ttggcgtcaagcgaacaatggagaagacgcaactgctggtctcacccatctgatgatctg

SEQ ID NO: 52727 - DNA, 60 bp, Artificial
  Synthetic oligonucleotide
atgtcgcaatctcgcactcgcgagatactgacaaaaaccactgtggatcatatggccata

SEQ ID NO: 52728 - DNA, 54 bp, Artificial
  Synthetic oligonucleotide
gagcagatggaaactggtggagaacgccagaatgctactgagatcagagcatct

SEQ ID NO: 52729 - DNA, 60 bp, Artificial
  Synthetic oligonucleotide
ggcaaaatccaactgaggagcaagctgtggatatatgcaaagcagcaatgggtctgagaa

SEQ ID NO: 52730 - DNA, 60 bp, Artificial
  Synthetic oligonucleotide
ttgcagaccaagaactgggtgatgccccattccttgaccggcttcgccgagatcagaagt

SEQ ID NO: 52731 - DNA, 60 bp, Artificial
  Synthetic oligonucleotide
agacaagaccaatcctgtcacctctgactaaggggattttagggtttgtgttcacgctca

SEQ ID NO: 52732 - DNA, 60 bp, Artificial
  Synthetic oligonucleotide
tgttatcatggaggtcgttttcccaaatgaagtgggagctagaatattgacatcagaatc

SEQ ID NO: 52733 - DNA, 52 bp, Artificial
  Synthetic oligonucleotide
cttgttctgggccatgtccaatggatcttgcaggtgcaacatttgtatataa

SEQ ID NO: 52734 - DNA, 60 bp, Artificial
  Synthetic oligonucleotide
gcccagcattaagcatcaatgaactgagcaatcttgcaaaaggggagaaggctaatgtgc

SEQ ID NO: 52735 - DNA, 60 bp, Artificial
  Synthetic oligonucleotide
cgatccctgggttttgcttaatgcatcttggttcaactccttcctcgcacatgcactgaa

SEQ ID NO: 52736 - DNA, 60 bp, Artificial
  Synthetic oligonucleotide
acaaaatccttaccatttattcgactgtcgcctcatctcttgtgcttgcaatggggtttg

SEQ ID NO: 52737 - DNA, 60 bp, Artificial
  Synthetic oligonucleotide
atttgaaatcacaggaaccatgcgcaggcttgccgaccaaagtctcccaccgaacttctc

SEQ ID NO: 52738 - DNA, 60 bp, Artificial
  Synthetic oligonucleotide
gggaggttttacatacagatgtgcactgaactcaaactcagcgaccaagaaggaaggttg

SEQ ID NO: 52739 - DNA, 60 bp, Artificial
  Synthetic oligonucleotide
ataacatttatgcaagccttacaactactgcttgaagtggagcaagagataagaactttc

SEQ ID NO: 52740 - DNA, 60 bp, Artificial
  Synthetic oligonucleotide
aagagggccttctacggaaggagtgcctgagtctatgagggaagagtatcggcaggaaca

SEQ ID NO: 52741 - DNA, 59 bp, Artificial
  Synthetic oligonucleotide
gttccagcagatgcgagatgtgcttggaacatttgacactattccaataataaaacttc

SEQ ID NO: 52742 - DNA, 60 bp, Artificial
  Synthetic oligonucleotide
ttgaggattagctcatctttcagcttcggtgggttcactttcaaaagaacaagcggatca

SEQ ID NO: 52743 - DNA, 60 bp, Artificial
  Synthetic oligonucleotide
ttgaggattagctcatctttcagcttcggtggattcactttcaaaagaacaagcggatcg

SEQ ID NO: 52744 - DNA, 60 bp, Artificial
  Synthetic oligonucleotide
cagcaaatgcgagatgtgcttggaacatttgacactgtccaaataataaaacttctcccc

SEQ ID NO: 52745 - DNA, 60 bp, Artificial
  Synthetic oligonucleotide
gacgagcagtcaattgctgaggcaataattgtggccatggtattttcacaagaggattgc

SEQ ID NO: 52746 - DNA, 60 bp, Artificial
  Synthetic oligonucleotide
gcagttctccctcctgactgggaatgtgagaggatcaggaatgaggatactggtaagagg

SEQ ID NO: 52747 - DNA, 60 bp, Artificial
  Synthetic oligonucleotide
agagtaggatgcagttttcctcactgactgtgaatgtgagaggatcaggaatgaggatac

SEQ ID NO: 52748 - DNA, 60 bp, Artificial
  Synthetic oligonucleotide
cacaagaggattgcatgatcaaggcagttcggggcgatctgaactttgtcaatagggcaa

SEQ ID NO: 52749 - DNA, 60 bp, Artificial
  Synthetic oligonucleotide
cacaagaggattgcatgatcaaggcagttcgaggtgatttgaactttgtcaacagagcga

SEQ ID NO: 52750 - DNA, 60 bp, Artificial
  Synthetic oligonucleotide
gattcgtgagaacactgttccagcagatgcgagatgtgcttggaacatttgacactattc

SEQ ID NO: 52751 - DNA, 60 bp, Artificial
  Synthetic oligonucleotide
gatgtgggagatcaatggtcctgagtcagtgctggtcaacacttatcagtggatcatcag

SEQ ID NO: 52752 - DNA, 60 bp, Artificial
  Synthetic oligonucleotide
gattgaggattagctcatctttcagcttcggtgggttcactttcaaaagaacaagcggat

SEQ ID NO: 52753 - DNA, 60 bp, Artificial
  Synthetic oligonucleotide
gtaagaggtaattctccagtgttcaattacaacaaggccacaaagaggcttacagtcctc

SEQ ID NO: 52754 - DNA, 60 bp, Artificial
  Synthetic oligonucleotide
cagttttcctcactgactgtgaatgtgagaggatcaggaatgaggatactggtaagaggc

SEQ ID NO: 52755 - DNA, 60 bp, Artificial
  Synthetic oligonucleotide
gagagacgaacagtcaattgctgaagcaataattgtggccatggtattttcacaagagga

SEQ ID NO: 52756 - DNA, 60 bp, Artificial
  Synthetic oligonucleotide
gagagacgagcagtcaattgctgaggcaataattgtggccatggtattttcacaagagga

SEQ ID NO: 52757 - DNA, 60 bp, Artificial
  Synthetic oligonucleotide
tttgcagggaaaaacacagatcttgaggctctcatggaatggctaaagacaagaccaatc

SEQ ID NO: 52758 - DNA, 60 bp, Artificial
  Synthetic oligonucleotide
ggatttggcgtcaagcgaacaatggagaagacgcaactgctggtcttacccacctgatga

SEQ ID NO: 52759 - DNA, 60 bp, Artificial
  Synthetic oligonucleotide
gtgattgcaatggggtttgctgccttcttgttctgggccatgtccaatggatcttgcaga

SEQ ID NO: 52760 - DNA, 60 bp, Artificial
  Synthetic oligonucleotide
attgcaatggggtttgctgccttcttgttctgggccatgtccaatggatcttgcagatgc

SEQ ID NO: 52761 - DNA, 60 bp, Artificial
  Synthetic oligonucleotide
taagatccaatgggaatctaattgctccatggtatggacacattctttcaggagagagcc

SEQ ID NO: 52762 - DNA, 60 bp, Artificial
  Synthetic oligonucleotide
ccatatggccataattaagaaatacacatcaggaagacaagagaagaacccttctctcag

SEQ ID NO: 52763 - DNA, 60 bp, Artificial
  Synthetic oligonucleotide
cactgtggaccatatggccataattaagaaatacacatcaggaagacaagagaagaaccc

SEQ ID NO: 52764 - DNA, 60 bp, Artificial
  Synthetic oligonucleotide
caatggggtttgctgccttcctgttctgggccatgtccaatggatcttgcagatgcaaca

SEQ ID NO: 52765 - DNA, 60 bp, Artificial
  Synthetic oligonucleotide
ccttcgatattggagggctatatgaagcaattgaggagtgcctgattaatgatccctggg

SEQ ID NO: 52766 - DNA, 60 bp, Artificial
  Synthetic oligonucleotide
gggaccttcgatcttggagggctatatgaagcaattgaggagtgcctgattaatgatccc

SEQ ID NO: 52767 - DNA, 60 bp, Artificial
  Synthetic oligonucleotide
agcttccaggtagactgctttctttggcatgtccgcaaacgatttgcagaccgagaactg

SEQ ID NO: 52768 - DNA, 60 bp, Artificial
  Synthetic oligonucleotide
tctagtgcgtactgggatggaccccagaatgtgttctctgatgcaaggatcaactctccc

SEQ ID NO: 52769 - DNA, 53 bp, Artificial
  Synthetic oligonucleotide
tgggacttgtgcagtagtaatgactgatggaagtgcatcaggaaaggccgata

SEQ ID NO: 52770 - DNA, 54 bp, Artificial
  Synthetic oligonucleotide
gtttgtgtttacgctcaccgtgcccagtgagcgaggactgcagcgtagacgatt

SEQ ID NO: 52771 - DNA, 60 bp, Artificial
  Synthetic oligonucleotide
ctgactaaggggattttagggtttgtgtttacgctcaccgtgcccagtgagcgaggactg

SEQ ID NO: 52772 - DNA, 60 bp, Artificial
  Synthetic oligonucleotide
ggccctgtccactttcggaatcaagtcaaaatacgccgcagggttgacataaacccaggc

SEQ ID NO: 52773 - DNA, 60 bp, Artificial
  Synthetic oligonucleotide
accatttattcgactgtcgcctcatctcttgtgcttgcaatggggtttgctgccttccta

SEQ ID NO: 52774 - DNA, 60 bp, Artificial
  Synthetic oligonucleotide
aaatatacagagattcgcttggggaatccgtgatgaggatgggggacctccactccctcc

SEQ ID NO: 52775 - DNA, 60 bp, Artificial
  Synthetic oligonucleotide
aaatatacagagattcgcttggggaatccgtgatgaggatgagagacctccactccctcc

SEQ ID NO: 52776 - DNA, 60 bp, Artificial
  Synthetic oligonucleotide
acatgttcgaaagcaagagcatgaagttacggacacaaataccagcagaaatgcttgcaa

SEQ ID NO: 52777 - DNA, 60 bp, Artificial
  Synthetic oligonucleotide
acaaaatcctcaccatttattcgactgtcgcctcatctcttgtgcttgcaatggggtttg

SEQ ID NO: 52778 - DNA, 60 bp, Artificial
  Synthetic oligonucleotide
ctagactgttcaccataaggcaggaaatggccagtagaggtctctgggattcctttcgtc

SEQ ID NO: 52779 - DNA, 60 bp, Artificial
  Synthetic oligonucleotide
cgactgtcgcctcatctcttgtggttgcaatggggtttgctgccttcttgttctgggcca

SEQ ID NO: 52780 - DNA, 60 bp, Artificial
  Synthetic oligonucleotide
aggagaatttggcgtcaagcgaacaatggagaagacgcaactgctggtctcacccatctg

SEQ ID NO: 52781 - DNA, 60 bp, Artificial
  Synthetic oligonucleotide
tggccataatcaagaaatacacatcaggaagacaagagaagaaccctgctctcagaatga

SEQ ID NO: 52782 - DNA, 60 bp, Artificial
  Synthetic oligonucleotide
gagaggggccccaggagtgaaagggtgggcctttgacagtggaaatgacatttggatggg

SEQ ID NO: 52783 - DNA, 60 bp, Artificial
  Synthetic oligonucleotide
cttgaaagtgccagtgcaaaatgctataagtaccacattcccttatactggagatcctcc

SEQ ID NO: 52784 - DNA, 60 bp, Artificial
  Synthetic oligonucleotide
aagtgccagtgcaaaatgctataagtaccacattcccttatactggagatcctccataca

SEQ ID NO: 52785 - DNA, 60 bp, Artificial
  Synthetic oligonucleotide
tcaatttattcaacagtggcgagttccctagcactggcaatcatgatggctggtctatct

SEQ ID NO: 52786 - DNA, 60 bp, Artificial
  Synthetic oligonucleotide
ttattcaacagtggcgagttccctagcactggcaatcatgatggctggtctatctttatg

SEQ ID NO: 52787 - DNA, 60 bp, Artificial
  Synthetic oligonucleotide
tgtgtcttacagtggaacaagcaaagcatgttcagattcattctacaggagcatgagatg

SEQ ID NO: 52788 - DNA, 60 bp, Artificial
  Synthetic oligonucleotide
atgtatcgtgcggtcttggtaaatgttatcaatttgcacttgggcagggaaccactttgg

SEQ ID NO: 52789 - DNA, 60 bp, Artificial
  Synthetic oligonucleotide
gtcaagcgaacaatggagaagacgcaactgctggtcttacccacctgatgatctggcatt

SEQ ID NO: 52790 - DNA, 60 bp, Artificial
  Synthetic oligonucleotide
caatcattgtagcaatggtgttctcacaggaggattgcatgataaaagcagtccgaggcg

SEQ ID NO: 52791 - DNA, 60 bp, Artificial
  Synthetic oligonucleotide
tgcgtttgcatcaatggaacttgtacagtagtaatgactgatggaagtgcatcaggaagg

SEQ ID NO: 52792 - DNA, 60 bp, Artificial
  Synthetic oligonucleotide
cgtttgcatcaatggaacttgtacagtagtaatgactgatggaagtgcatcaggaagggc

SEQ ID NO: 52793 - DNA, 60 bp, Artificial
  Synthetic oligonucleotide
gattttgagagggaagggtactctctggttggaatagatcctttccgtctgcttcagaac

SEQ ID NO: 52794 - DNA, 60 bp, Artificial
  Synthetic oligonucleotide
cctcattgtgttttgtggaacttcaggtacctatggaacaggctcatggcctgatggggc

SEQ ID NO: 52795 - DNA, 60 bp, Artificial
  Synthetic oligonucleotide
gtggaatgcttgttgacagtattggttcatggtctaaaaacatcctcagaactcaggagt

SEQ ID NO: 52796 - DNA, 60 bp, Artificial
  Synthetic oligonucleotide
atgggatgcttgttgacagtattggttcatggtctaaaaacatcctcagaactcaggagt

SEQ ID NO: 52797 - DNA, 60 bp, Artificial
  Synthetic oligonucleotide
agaaatacacatcaggaagacaagagaagaacccttctctcagaatgaaatggatgatgg

SEQ ID NO: 52798 - DNA, 60 bp, Artificial
  Synthetic oligonucleotide
ctgttcaccataagacaggacctggctagcaggggtctatgggattcctttcgtcagtcc

SEQ ID NO: 52799 - DNA, 60 bp, Artificial
  Synthetic oligonucleotide
caggccaaacattgcgagtacgatccaatgggaatctaattgctccatggtatggacacg

SEQ ID NO: 52800 - DNA, 60 bp, Artificial
  Synthetic oligonucleotide
ccatatggccataatcaagaaatacacatcaggaagacaagagaagaatcctgctctcag

SEQ ID NO: 52801 - DNA, 60 bp, Artificial
  Synthetic oligonucleotide
ggttttacatacagatgtgcactgaactcaaactcagcgactatgaaggaaggctgatcc

SEQ ID NO: 52802 - DNA, 60 bp, Artificial
  Synthetic oligonucleotide
ccaacacgataacctcgtttcaggtagattgttatctatggcacataaggaagctgctca

SEQ ID NO: 52803 - DNA, 60 bp, Artificial
  Synthetic oligonucleotide
gaacatgatctcaatatgggtcagtcattcaattcagacagggaatcaacgccaagctga

SEQ ID NO: 52804 - DNA, 60 bp, Artificial
  Synthetic oligonucleotide
ccaatcagcaatactaaatttcttactgagaaagctgtggcttcagcaacattagcgggc

SEQ ID NO: 52805 - DNA, 60 bp, Artificial
  Synthetic oligonucleotide
tggaatagttagcttaatgttacaaattgggaacatgatctcaatatgggtcagtcattc

SEQ ID NO: 52806 - DNA, 60 bp, Artificial
  Synthetic oligonucleotide
tcagggagctttgctgaatgacaagcactccaatgggacagtcaaagacagaagccctca

SEQ ID NO: 52807 - DNA, 60 bp, Artificial
  Synthetic oligonucleotide
ccatcggatcaatctgtatggtaattggaatagttagcttaatgttacaaattgggaaca

SEQ ID NO: 52808 - DNA, 60 bp, Artificial
  Synthetic oligonucleotide
cgaattggatgctcctaattatcactatgaggagtgctcctgttatcctgatgccggcga

SEQ ID NO: 52809 - DNA, 60 bp, Artificial
  Synthetic oligonucleotide
gtggtccggtgtcccctaacggggcatatggggtaaaagggttttcatttaaatacggca

SEQ ID NO: 52810 - DNA, 60 bp, Artificial
  Synthetic oligonucleotide
gaactgacaggattagattgcataagaccttgtttctgggttgagttggtcagagggcgg

SEQ ID NO: 52811 - DNA, 60 bp, Artificial
  Synthetic oligonucleotide
ggctcttgctttactgtaatgactgatggaccaagtagtgggcaggcatcatataagatc

SEQ ID NO: 52812 - DNA, 60 bp, Artificial
  Synthetic oligonucleotide
ggtggactggaacggacagcagcttttcggtgaagcaagatatcgtagcaataactgatt

SEQ ID NO: 52813 - DNA, 60 bp, Artificial
  Synthetic oligonucleotide
tcaacgccaagccgaaccaatcagcaatactaaatttcttactgagaaagctgtggcttc

SEQ ID NO: 52814 - DNA, 60 bp, Artificial
  Synthetic oligonucleotide
ggaacggacagcagcttttcggtgaagcaagatatcgtagcaataactgattggtcagga

SEQ ID NO: 52815 - DNA, 60 bp, Artificial
  Synthetic oligonucleotide
gattgcataagaccttgtttctgggttgagttaatcagagggcggcctaaagagagcaca

SEQ ID NO: 52816 - DNA, 60 bp, Artificial
  Synthetic oligonucleotide
atgatggaacaggtagttgtggtccggtgtcccctaacggggcatatggggtaaaagggt

SEQ ID NO: 52817 - DNA, 60 bp, Artificial
  Synthetic oligonucleotide
tcctgatgccggcgaaatcacatgtgtgtgcagggataattggcatggctcaaataggcc

SEQ ID NO: 52818 - DNA, 60 bp, Artificial
  Synthetic oligonucleotide
gctcctgttatcctgatgccggcgaaatcacatgtgtgtgcagggataattggcatggct

SEQ ID NO: 52819 - DNA, 60 bp, Artificial
  Synthetic oligonucleotide
ggccgattggagaatcacctaagggagtggaggaaggctccatcgggaaggtgtgcagga

SEQ ID NO: 52820 - DNA, 60 bp, Artificial
  Synthetic oligonucleotide
cggagatgtggccgattggagaatcacctaagggagtggaggaaggctccatcgggaagg

SEQ ID NO: 52821 - DNA, 60 bp, Artificial
  Synthetic oligonucleotide
cctctgttacccagggaatttcaacgactatgaagaactgaaacacctattgagcagaat

SEQ ID NO: 52822 - DNA, 57 bp, Artificial
  Synthetic oligonucleotide
cctctgttacccagggaatttcaacgactatgaagaactgaaacacctattgagcag

SEQ ID NO: 52823 - DNA, 60 bp, Artificial
  Synthetic oligonucleotide
caatgacctctgttacccaggggatttcaatgactatgaagaactgaaacacctattgag

SEQ ID NO: 52824 - DNA, 60 bp, Artificial
  Synthetic oligonucleotide
agcaagagcatgaagctacggacacaaataccagcagaaatgcttgcaaacattgacctg

SEQ ID NO: 52825 - DNA, 58 bp, Artificial
  Synthetic oligonucleotide
taggtcaagtttcaaggcccatgttcctgtatgtgagaaccaacggaacctccaagat

SEQ ID NO: 52826 - DNA, 60 bp, Artificial
  Synthetic oligonucleotide
tcatctcttgtgattgcaatggggtttgctgccttcttgttctgggccatgtccaatgga

SEQ ID NO: 52827 - DNA, 60 bp, Artificial
  Synthetic oligonucleotide
tgcatagcatggtccagctcaagctgccatgatgggaaagcatggttacatgtttgtgtc

SEQ ID NO: 52828 - DNA, 60 bp, Artificial
  Synthetic oligonucleotide
tgtgcatagcatggtccagctcaagctgccatgatgggaaagcatggttacatgtttgtg

SEQ ID NO: 52829 - DNA, 60 bp, Artificial
  Synthetic oligonucleotide
ccaggaggggaagtgagaaatgatgatgttgaccagagtctgatcattgctgccaggaac

SEQ ID NO: 52830 - DNA, 60 bp, Artificial
  Synthetic oligonucleotide
ggcaaattgaagaggcgagcaattgcaacacccggaatgcaaatcagagggttcgtgtac

SEQ ID NO: 52831 - DNA, 60 bp, Artificial
  Synthetic oligonucleotide
cttaccatttattcgactgtcgcctcatctcttgtgcttgcagtggggtttgctgccttc

SEQ ID NO: 52832 - DNA, 60 bp, Artificial
  Synthetic oligonucleotide
agtgactatgaagggagactgatccaaaacagcataacaatagagagaatggttctctcg

SEQ ID NO: 52833 - DNA, 60 bp, Artificial
  Synthetic oligonucleotide
cactattggagatgtgccacagcacacagattggtgggacaaggatggtggatatcctta

SEQ ID NO: 52834 - DNA, 60 bp, Artificial
  Synthetic oligonucleotide
cacggaacctttggccccgttcattttcggaatcaagtcaaaatacgccgcagggttgac

SEQ ID NO: 52835 - DNA, 60 bp, Artificial
  Synthetic oligonucleotide
gccccgttcatttccggaatcaagtcaaaatacgccgcagggttgacataaacccgggcc

SEQ ID NO: 52836 - DNA, 60 bp, Artificial
  Synthetic oligonucleotide
gccctgttcatttccggaatcaagtcaaaatacgccgcagggttgacataaaccctggcc

SEQ ID NO: 52837 - DNA, 60 bp, Artificial
  Synthetic oligonucleotide
acggaacctttggccccgttcatttccggaatcaagtcaaaatacgccgcagggttgaca

SEQ ID NO: 52838 - DNA, 60 bp, Artificial
  Synthetic oligonucleotide
cacggaacctttggccccgttcatttccggaatcaagtcaaaatacgccgcagggttgac

SEQ ID NO: 52839 - DNA, 60 bp, Artificial
  Synthetic oligonucleotide
gaggatacatgttcgaaagtaagagcatgaagttgcgaacacaaataccagcagaaatgc

SEQ ID NO: 52840 - DNA, 60 bp, Artificial
  Synthetic oligonucleotide
tccaacactgtgtcaagcttccaggtagactgctttctttggcatgtccgcaaacgattt

SEQ ID NO: 52841 - DNA, 60 bp, Artificial
  Synthetic oligonucleotide
gatggaggccatggtgtctagggcccgaattgatgcacgggttgacttcgagtctggaag

SEQ ID NO: 52842 - DNA, 50 bp, Artificial
  Synthetic oligonucleotide
aggcaggctgatccaaaacagcataacaatagagagaatggtcctctctg

SEQ ID NO: 52843 - DNA, 60 bp, Artificial
  Synthetic oligonucleotide
ggaaacaatggactccagcactcttgaactgagaagcagatactgggctataaggaccag

SEQ ID NO: 52844 - DNA, 60 bp, Artificial
  Synthetic oligonucleotide
taagatccaatgggaatctaattgctccatggtatggacacattctttcaggagagagca

SEQ ID NO: 52845 - DNA, 60 bp, Artificial
  Synthetic oligonucleotide
ttagggaaagggtacatgttcgaaagcaagagcatgaagctacggacacaaataccagcg

SEQ ID NO: 52846 - DNA, 60 bp, Artificial
  Synthetic oligonucleotide
aatacaatgacaaaagatgcagaaagaggcaaattgaagaggcgagcaattgcaacaccc

SEQ ID NO: 52847 - DNA, 60 bp, Artificial
  Synthetic oligonucleotide
gagcactgacactgaatacaatgacaaaagatgcagaaagaggcaaattgaagaggcgag

SEQ ID NO: 52848 - DNA, 60 bp, Artificial
  Synthetic oligonucleotide
gccctgttcatttccggaatcaagtcaaaatacgccgcagggttgacatgaaccctggcc

SEQ ID NO: 52849 - DNA, 60 bp, Artificial
  Synthetic oligonucleotide
tggccctgttcatttccggaatcaagtcaaaatacgccgcagggttgacatgaaccctgg

SEQ ID NO: 52850 - DNA, 60 bp, Artificial
  Synthetic oligonucleotide
cctttggccctgttcatttccggaatcaagtcaaaatacgccgcagggttgacatgaacc

SEQ ID NO: 52851 - DNA, 60 bp, Artificial
  Synthetic oligonucleotide
acagataacgttcttacaggcattgcaactcttacttgaagttgagagtgagataagaac

SEQ ID NO: 52852 - DNA, 60 bp, Artificial
  Synthetic oligonucleotide
atcctcatcggcggacttgaatggaatgataactcaattcgagcgtctgaaaatatacag

SEQ ID NO: 52853 - DNA, 60 bp, Artificial
  Synthetic oligonucleotide
tcaaaaggcattaaagggaagaggcagcacacttggactcgacctgcgagtggccacaat

SEQ ID NO: 52854 - DNA, 60 bp, Artificial
  Synthetic oligonucleotide
caaagggcattaaagggaagaggcagcacacttgggctcgacctgcgagtggctacaatg

SEQ ID NO: 52855 - DNA, 60 bp, Artificial
  Synthetic oligonucleotide
acagataacgttcttacaggcattgcaactcttacttgaagttgagagtgagataaggac

SEQ ID NO: 52856 - DNA, 60 bp, Artificial
  Synthetic oligonucleotide
acagataacgtttttacaggcattgcaactcttacttgaagttgagagtgagataaggac

SEQ ID NO: 52857 - DNA, 60 bp, Artificial
  Synthetic oligonucleotide
cggcggacttgaatggaatgataactcaattcgagcgtctgaaaatatacagagattcgc

SEQ ID NO: 52858 - DNA, 60 bp, Artificial
  Synthetic oligonucleotide
tacaggcattgcaactcttacttgaagttgagagtgagataaggactttctcctttcagc

SEQ ID NO: 52859 - DNA, 60 bp, Artificial
  Synthetic oligonucleotide
acaggcattgcaactcttacttgaagttgagagtgagataagaactttctcttttcagct

SEQ ID NO: 52860 - DNA, 60 bp, Artificial
  Synthetic oligonucleotide
acaggcattgcaactcttacttgaagttgagagtgagataaggactttctcttttcagct

SEQ ID NO: 52861 - DNA, 60 bp, Artificial
  Synthetic oligonucleotide
agcatgagagacatgtgtgatgctccctttgatgatagactcagaagagatcaaaaggca

SEQ ID NO: 52862 - DNA, 60 bp, Artificial
  Synthetic oligonucleotide
cagcatgagagacatgtgtgatgctccctttgatgatagactcagaagagatcaaagggc

SEQ ID NO: 52863 - DNA, 60 bp, Artificial
  Synthetic oligonucleotide
aagctgctcagcatgagagacatgtgtgatgctccctttgatgacaggctcagaagagac

SEQ ID NO: 52864 - DNA, 60 bp, Artificial
  Synthetic oligonucleotide
ctatggcacataaggaagctgctcagcatgagagacatgtgtgatgctccctttgatgac

SEQ ID NO: 52865 - DNA, 60 bp, Artificial
  Synthetic oligonucleotide
gctgctcagcatgagagacatgtgtgatgctccctttgatgacaggctcagaagagacca

SEQ ID NO: 52866 - DNA, 60 bp, Artificial
  Synthetic oligonucleotide
aaagctgctcagcatgagagacatgtgtgatgctccctttgatgacagactcagaagaga

SEQ ID NO: 52867 - DNA, 60 bp, Artificial
  Synthetic oligonucleotide
cagtatgagagacatgtgtgatgctccctttgatgacaggctccgaagagaccaaaaggc

SEQ ID NO: 52868 - DNA, 60 bp, Artificial
  Synthetic oligonucleotide
gctgctcagcatgagagacatgtgtgatgctccctttgatgacagactcagaagagatca

SEQ ID NO: 52869 - DNA, 60 bp, Artificial
  Synthetic oligonucleotide
tgggtgtcccgtttcatttgggaacccaacaagtgtgcatagcatggtccagctcaagtt

SEQ ID NO: 52870 - DNA, 60 bp, Artificial
  Synthetic oligonucleotide
gttgggtgttccatttcacttgggaaccaaacaagtgtgcatagcatggtccagctcaag

SEQ ID NO: 52871 - DNA, 60 bp, Artificial
  Synthetic oligonucleotide
gggtgtcccgtttcatttgggaacccaacaagtgtgcatagcatggtccagctcaagttg

SEQ ID NO: 52872 - DNA, 60 bp, Artificial
  Synthetic oligonucleotide
tgggtgtcccgtttcatttggggaccaaacaagtgtgcatagcatggtccagctcaagct

SEQ ID NO: 52873 - DNA, 60 bp, Artificial
  Synthetic oligonucleotide
ccaaacaagtgtgcatagcatggtccagctcaagctgtcatgatgggaaagaatggttac

SEQ ID NO: 52874 - DNA, 60 bp, Artificial
  Synthetic oligonucleotide
gtgttccgtttcacttgggaaccaaacaagtgtgcatagcatggtccagctcaagttgcc

SEQ ID NO: 52875 - DNA, 60 bp, Artificial
  Synthetic oligonucleotide
ttggcgtcaagcgaacaatggagaagacgcaacagctggtctcacccatctgatgatctg

SEQ ID NO: 52876 - DNA, 60 bp, Artificial
  Synthetic oligonucleotide
ttggcgtcaagcgaacaatggagaagacgcaacttctggtctcacccatctgatgatctg

SEQ ID NO: 52877 - DNA, 60 bp, Artificial
  Synthetic oligonucleotide
ggcgtcaagcgaacaatggagaagacgcaacagctggtctcacccatctgatgatctggc

SEQ ID NO: 52878 - DNA, 60 bp, Artificial
  Synthetic oligonucleotide
ggcgtcaagcgaacaatggagaagacgcaaccgctggtctcactcatctgatgatctggc

SEQ ID NO: 52879 - DNA, 60 bp, Artificial
  Synthetic oligonucleotide
ggcgtcaagcgaacaatggagaagacgcaacttctggtctcacccatctgatgatctggc

SEQ ID NO: 52880 - DNA, 60 bp, Artificial
  Synthetic oligonucleotide
gacgatcatttgagctgaagaagctgtgggagcaaacccgttcgaaggcaggactgttgg

SEQ ID NO: 52881 - DNA, 60 bp, Artificial
  Synthetic oligonucleotide
gtcgcctcatctctcgtgcttgcaatggggtttgctgccttcttgttctgggccatgtcc

SEQ ID NO: 52882 - DNA, 60 bp, Artificial
  Synthetic oligonucleotide
gtcgcctcatctcttgttattgcaatggggtttgctgccttcttgttctgggccatgtcc

SEQ ID NO: 52883 - DNA, 58 bp, Artificial
  Synthetic oligonucleotide
tcgtgcggtcttggtaaatgttatcaatttgcacttgggcagggaaccactttgaaaa

SEQ ID NO: 52884 - DNA, 60 bp, Artificial
  Synthetic oligonucleotide
ggtccagctcaagctgccatgatgggaaagcatggttacatatttgtgtcactggggatg

SEQ ID NO: 52885 - DNA, 50 bp, Artificial
  Synthetic oligonucleotide
gtttcaaggcccatgttcctgtatgtgagaaccaacggaacctccaagat

SEQ ID NO: 52886 - DNA, 60 bp, Artificial
  Synthetic oligonucleotide
gccgaacttctggttctcatggaaaatgaaagaactctagactttcatgactcaaatgtt

SEQ ID NO: 52887 - DNA, 60 bp, Artificial
  Synthetic oligonucleotide
gaaaatgagagaactctagactttcatgactcaaatgtcaagaacctttacgaaaaggtc

SEQ ID NO: 52888 - DNA, 60 bp, Artificial
  Synthetic oligonucleotide
aatgaaagaactctagactttcatgactcaaatgtcaagaacctttacgacaaggtccga

SEQ ID NO: 52889 - DNA, 60 bp, Artificial
  Synthetic oligonucleotide
gaaaatgagagaactctagactttcatgactcaaatgtcaagaacctttacgacaaggtt

SEQ ID NO: 52890 - DNA, 60 bp, Artificial
  Synthetic oligonucleotide
ggccttccttgaagaatcccacccagggatctttgaaaactcatgtcttgaaacgatgga

SEQ ID NO: 52891 - DNA, 60 bp, Artificial
  Synthetic oligonucleotide
aaacgatttgcagaccaagaactgggtgatgccccgtttctagaccggcttcgccgagat

SEQ ID NO: 52892 - DNA, 60 bp, Artificial
  Synthetic oligonucleotide
acgatttgcagaccaagaactgggtgatgccccgtttctagaccggcttcgccgagatca

SEQ ID NO: 52893 - DNA, 60 bp, Artificial
  Synthetic oligonucleotide
cctcagaactcaggagtcagaatgcgtttgcatcaatggaacttgtacagtagtaatgac

SEQ ID NO: 52894 - DNA, 60 bp, Artificial
  Synthetic oligonucleotide
tgtggaccatatggccataatcaagaaatacacatcaggaagacaagagaagaatcctgc

SEQ ID NO: 52895 - DNA, 60 bp, Artificial
  Synthetic oligonucleotide
accatatggccataatcaagaaatacacatcaggaagacaagagaagaatcctgctctca

SEQ ID NO: 52896 - DNA, 60 bp, Artificial
  Synthetic oligonucleotide
agaaaggggactcagcaattatgaaaagtgaattggaatatggtaactgcaacaccaagt

SEQ ID NO: 52897 - DNA, 60 bp, Artificial
  Synthetic oligonucleotide
ctagtgcgtactgggatggaccccagaatgtgttctctaatgcaaggatcaactctcccg

SEQ ID NO: 52898 - DNA, 60 bp, Artificial
  Synthetic oligonucleotide
tctagtgcgtactgggatggaccccagaatgtgttctctgatgcaaggatccactctccc

SEQ ID NO: 52899 - DNA, 60 bp, Artificial
  Synthetic oligonucleotide
tcagagcatctgttgggagaatggttggtggaatcgggaggttctacatacagatgtgca

SEQ ID NO: 52900 - DNA, 60 bp, Artificial
  Synthetic oligonucleotide
ggtacaccaaaaccacgtactggtgggacggactccaatcctctgatgatttcgccctca

SEQ ID NO: 52901 - DNA, 60 bp, Artificial
  Synthetic oligonucleotide
attttagggtttgtgttcacgctcaccgtgcccagtgagcgaggactgcagcgtatacta

SEQ ID NO: 52902 - DNA, 60 bp, Artificial
  Synthetic oligonucleotide
ttttggggtttgtgttcacgctcaccgtgcccagtgagcgaggactgcagcgtagacggt

SEQ ID NO: 52903 - DNA, 59 bp, Artificial
  Synthetic oligonucleotide
ttagggtttgtgttcacgctcaccgtgcccagtgagcgaggactgcagcgtagacgatt

SEQ ID NO: 52904 - DNA, 60 bp, Artificial
  Synthetic oligonucleotide
ttttagggtttgtgttcacgctcaccgtgcccagtgagcgaggactgcagcgtagacggt

SEQ ID NO: 52905 - DNA, 60 bp, Artificial
  Synthetic oligonucleotide
ggaacttaccaaatattgtcaatttattcaacagtggcgagttccctagcactggcaatc

SEQ ID NO: 52906 - DNA, 60 bp, Artificial
  Synthetic oligonucleotide
cactccctccaaaacagaaacgctacatggcgagacgagttgagtcagaagtttgaggaa

SEQ ID NO: 52907 - DNA, 60 bp, Artificial
  Synthetic oligonucleotide
cgcttggggaatccgtgatgaggatgagagacctccactccctccaaaacagaaacgcta

SEQ ID NO: 52908 - DNA, 60 bp, Artificial
  Synthetic oligonucleotide
tccgcaaacgatttgcagaccaagaactgggtgatgccccatttctagaccggcttcgcc

SEQ ID NO: 52909 - DNA, 60 bp, Artificial
  Synthetic oligonucleotide
gaacggctgcattgagggcaagctttctcaaatgtcaaaggaggtgaacgccagaattga

SEQ ID NO: 52910 - DNA, 60 bp, Artificial
  Synthetic oligonucleotide
cggctgcattgagggcaagctttctcaaatgtcaaaagaagtgaacgccagaatcgagcc

SEQ ID NO: 52911 - DNA, 60 bp, Artificial
  Synthetic oligonucleotide
atggatgtcaatccgactttacttttcttgaaagttccagcgcagaatgccataagcact

SEQ ID NO: 52912 - DNA, 60 bp, Artificial
  Synthetic oligonucleotide
gaatggatgtcaatccgactttacttttcttgaaagtaccagtgcaaaatgctataagta

SEQ ID NO: 52913 - DNA, 57 bp, Artificial
  Synthetic oligonucleotide
gcccaggagtgaaagggtgggcctttgacaatggaaatgatgtttggatgggaagaa

SEQ ID NO: 52914 - DNA, 60 bp, Artificial
  Synthetic oligonucleotide
ggcccaggagtgaaagggtgggcctttgacaatggaaatgatgtttggatgggacgaaca

SEQ ID NO: 52915 - DNA, 60 bp, Artificial
  Synthetic oligonucleotide
actatgtcaagctttcaggtagactgctttctttggcatgtccgcaaacgatttgcagac

SEQ ID NO: 52916 - DNA, 60 bp, Artificial
  Synthetic oligonucleotide
actgtgtcaagctttcaggtagactgctttctttggcatgtccgcaaacgatttgcagac

SEQ ID NO: 52917 - DNA, 60 bp, Artificial
  Synthetic oligonucleotide
gtattgatagggcaaggagacgtagtgttggtaatgaaacggaaacgggactctagcata

SEQ ID NO: 52918 - DNA, 60 bp, Artificial
  Synthetic oligonucleotide
gtattgatagggcaaggagacgtagagttggtaatgaaacggaaacgggactctagcata

SEQ ID NO: 52919 - DNA, 60 bp, Artificial
  Synthetic oligonucleotide
ctggggacaacaccaaatggaatgagaatcagaatcctagagtgtttctagcgatgataa

SEQ ID NO: 52920 - DNA, 60 bp, Artificial
  Synthetic oligonucleotide
ccgggcggagaagtgagaaatgatgatgttgaccagagtttgatcattgctgctagaaac

SEQ ID NO: 52921 - DNA, 60 bp, Artificial
  Synthetic oligonucleotide
cccgggcggagaagtgagaaatgatgatgttgaccagagtttgatcattgctgctagaaa

SEQ ID NO: 52922 - DNA, 60 bp, Artificial
  Synthetic oligonucleotide
ggcgcttcaaggcaccaaacgatcttatgagcagatggaaactggtggagaacgccagaa

SEQ ID NO: 52923 - DNA, 60 bp, Artificial
  Synthetic oligonucleotide
cccaagaggacaactgtccaccagaggagttcaaatagcttcaaatgagaacatggaacc

SEQ ID NO: 52924 - DNA, 60 bp, Artificial
  Synthetic oligonucleotide
ccatttattcgactgtcgcctcatctcttgtgcttgcaatggggtttgctgccttcttgt

SEQ ID NO: 52925 - DNA, 60 bp, Artificial
  Synthetic oligonucleotide
atgatgtgggaaatcaatggtcctgagtcagtacttgttaacacctatcaatggatcatc

SEQ ID NO: 52926 - DNA, 60 bp, Artificial
  Synthetic oligonucleotide
gagaaaaatgatgactaactcacaagatacagagctctcctttacaattactggggataa

SEQ ID NO: 52927 - DNA, 60 bp, Artificial
  Synthetic oligonucleotide
gagaaagatgatgactaactcacaagatacagagctctcctttacaattactggggacaa

SEQ ID NO: 52928 - DNA, 60 bp, Artificial
  Synthetic oligonucleotide
agagaaattgacgataacatattcatcatcaatgatgtgggaaatcaatggtcctgagtc

SEQ ID NO: 52929 - DNA, 60 bp, Artificial
  Synthetic oligonucleotide
aagggagtgtatattaatacagcgttgctcaatgcatcttgtgcagccatggatgacttc

SEQ ID NO: 52930 - DNA, 60 bp, Artificial
  Synthetic oligonucleotide
tcttgttctgggccatgtccaatggatcttgcaggtgcaacatttgtatataattggcaa

SEQ ID NO: 52931 - DNA, 60 bp, Artificial
  Synthetic oligonucleotide
tggaatctgaaggaacttacaaaatcctcaccatttattcgactgtcgcctcatctcttg

SEQ ID NO: 52932 - DNA, 60 bp, Artificial
  Synthetic oligonucleotide
gtgctgatagggcaaggagacgtagttttggtaatgaaacggaaacgggactctagcata

SEQ ID NO: 52933 - DNA, 60 bp, Artificial
  Synthetic oligonucleotide
ttgcaggaaagaacaccgatctcgaggctctcatggaatggctaaagacaagaccaatcc

SEQ ID NO: 52934 - DNA, 60 bp, Artificial
  Synthetic oligonucleotide
taggagagcaacagtatcagcagacccattggcttcgctcttggagatgtgccatagtac

SEQ ID NO: 52935 - DNA, 60 bp, Artificial
  Synthetic oligonucleotide
gagaaccttatgtgtcgtgcggtcttggtaaatgttaccaatttgcacttgggcagggga

SEQ ID NO: 52936 - DNA, 60 bp, Artificial
  Synthetic oligonucleotide
cagcctcattgagccctggaatgatgatgggcatgtttaacatgctgagtacagtcttag

SEQ ID NO: 52937 - DNA, 60 bp, Artificial
  Synthetic oligonucleotide
cgccgaaagaggcaaattaaagagaagagcaattgcaacacccggaatgcaaatcagagg

SEQ ID NO: 52938 - DNA, 60 bp, Artificial
  Synthetic oligonucleotide
gggagattctacatacagatgtgcactgaactcaaactcagtgactatgaagggagacta

SEQ ID NO: 52939 - DNA, 60 bp, Artificial
  Synthetic oligonucleotide
gaatgtgacttacagtggaacaagcaaagcatgttcaaactcattctacaggagtatgag

SEQ ID NO: 52940 - DNA, 60 bp, Artificial
  Synthetic oligonucleotide
gaggctgattcagaacagcataacaatagagagaatggttctctctgcatttgatgaaag

SEQ ID NO: 52941 - DNA, 60 bp, Artificial
  Synthetic oligonucleotide
ggtactaaaaccaggccaaacattgcgagtaagatccaatgggaatctaattgctccatg

SEQ ID NO: 52942 - DNA, 60 bp, Artificial
  Synthetic oligonucleotide
ggcgtcaagcgaacaatggagaagacgcaactgctggtctcactcatatgatgatctggc

SEQ ID NO: 52943 - DNA, 60 bp, Artificial
  Synthetic oligonucleotide
ggcgtcaagcgaacaatggagaagacgcaactgctggtcttacccacctgatgatctggc

SEQ ID NO: 52944 - DNA, 60 bp, Artificial
  Synthetic oligonucleotide
cactggagaagaaatggccactaaagctgactacacccttgatgaagagagcagggcaag

SEQ ID NO: 52945 - DNA, 60 bp, Artificial
  Synthetic oligonucleotide
acacacgcccaagacatactggaaaagacacacaacgggaagctctgcgatctagacgga

SEQ ID NO: 52946 - DNA, 60 bp, Artificial
  Synthetic oligonucleotide
ctagaaaggcagaaaatagaaggggtcaagctggaatctgagggaacttacaaaattctc

SEQ ID NO: 52947 - DNA, 60 bp, Artificial
  Synthetic oligonucleotide
actggtgggacggactccaatcctctgatgatttcgccctcatagtgaatgcaccaaatc

SEQ ID NO: 52948 - DNA, 60 bp, Artificial
  Synthetic oligonucleotide
ccacatactggtgggacggactccaatcctctgatgatttcgccctcatagtgaatgcac

SEQ ID NO: 52949 - DNA, 60 bp, Artificial
  Synthetic oligonucleotide
atttgaaatcacaggaacaatgcgcaggcttgccgaccaaagtctcccaccgaacttctc

SEQ ID NO: 52950 - DNA, 60 bp, Artificial
  Synthetic oligonucleotide
ccaggattgtaagattgctcctttaatggtggcatacatgttggaaagagaactggttcg

SEQ ID NO: 52951 - DNA, 60 bp, Artificial
  Synthetic oligonucleotide
cggaatttctggagaggtgaaaatggacgaagaacaaggattgcatatgagagaatgtgc

SEQ ID NO: 52952 - DNA, 60 bp, Artificial
  Synthetic oligonucleotide
atggatgtcaatccgactttacttttcttgaaagttccagcgcaaaatgccataagcacc

SEQ ID NO: 52953 - DNA, 60 bp, Artificial
  Synthetic oligonucleotide
ggatgtcaatccgactttacttttcttgaaagttccagcgcaaaatgccataagcaccac

SEQ ID NO: 52954 - DNA, 60 bp, Artificial
  Synthetic oligonucleotide
ggcgtcccaaggcaccaaacgatcttatgagcagatggaaactggtggagaacgccagaa

SEQ ID NO: 52955 - DNA, 56 bp, Artificial
  Synthetic oligonucleotide
tagggtttgctgccttcttgttctgggccatgtccaatggatcttgcagatgcaac

SEQ ID NO: 52956 - DNA, 60 bp, Artificial
  Synthetic oligonucleotide
gatcggaatttctggagaggtgaaaatggacgaagaacaaggattgcatatgagagaatg

SEQ ID NO: 52957 - DNA, 60 bp, Artificial
  Synthetic oligonucleotide
agataaggcctcttctaatagatggtacagcctcattgagccctggaatgatgatgggca

SEQ ID NO: 52958 - DNA, 60 bp, Artificial
  Synthetic oligonucleotide
aaataaggcctcttctaatagatggtacagcctcattgagccctggaatgatgatgggca

SEQ ID NO: 52959 - DNA, 60 bp, Artificial
  Synthetic oligonucleotide
gtgttctctgatgcaaggatcaactctcccgaggagatctggagctgctggtgcagcagt

SEQ ID NO: 52960 - DNA, 60 bp, Artificial
  Synthetic oligonucleotide
catggagtggctaaagacaagaccaatcctgtcacctctgactaaagggatgttgggatt

SEQ ID NO: 52961 - DNA, 60 bp, Artificial
  Synthetic oligonucleotide
agaatgtgctctctgatgcaaggatcaactctcccgagaagatctggagctgctgggcca

SEQ ID NO: 52962 - DNA, 60 bp, Artificial
  Synthetic oligonucleotide
ctcaaggcaccaaacgatcttatgagcagatggaaactggtggagaacgccagaatgcta

SEQ ID NO: 52963 - DNA, 60 bp, Artificial
  Synthetic oligonucleotide
tgtgtcaagcttccaggtagactgctttctttggcatgtccgcaaacgatttgcagacca

SEQ ID NO: 52964 - DNA, 60 bp, Artificial
  Synthetic oligonucleotide
cacggaacctttggccctgttcatttccggaatcaagtcaaaatacgccgcagggttgac

SEQ ID NO: 52965 - DNA, 60 bp, Artificial
  Synthetic oligonucleotide
aagaattgctccacacagagcacaatgggatgctgtgtgcaacaaatctgggacatcctc

SEQ ID NO: 52966 - DNA, 60 bp, Artificial
  Synthetic oligonucleotide
aatctgaaggaacttacaaaatcctcaccatttattcgactgtcgcctcatctcttgtgc

SEQ ID NO: 52967 - DNA, 60 bp, Artificial
  Synthetic oligonucleotide
cactgtggaccatatggccataatcaagaaatacacatcaggaaggcaagagaagaaccc

SEQ ID NO: 52968 - DNA, 60 bp, Artificial
  Synthetic oligonucleotide
ggcaccaaacgatcttatgaacagatggaaactggtggagaacgccagaatgctaccgag

SEQ ID NO: 52969 - DNA, 60 bp, Artificial
  Synthetic oligonucleotide
ctcaaactcagcgactacgaaggcaggctgatccaaaacagcataacaatagagagaatg

SEQ ID NO: 52970 - DNA, 60 bp, Artificial
  Synthetic oligonucleotide
gactgctttctttggcatgtccgcaaacgatttgcagaccaagaagtgggtgatgcccca

SEQ ID NO: 52971 - DNA, 60 bp, Artificial
  Synthetic oligonucleotide
ccaggtagactgttttctttggcatgtccgcaaacgatttgcagaccaagaactgggtga

SEQ ID NO: 52972 - DNA, 60 bp, Artificial
  Synthetic oligonucleotide
ctgctttctttggcatgtccgcaaacgatttgcagaccaaaaactgggtgatgccccatt

SEQ ID NO: 52973 - DNA, 57 bp, Artificial
  Synthetic oligonucleotide
gccttcttgttctgggccatgtccaatggatcttgcagatgcaacatttgtatataa

SEQ ID NO: 52974 - DNA, 60 bp, Artificial
  Synthetic oligonucleotide
gctgccttcatgttctgggccatgtccaatggatcttgcagatgcaacatttgtatataa

SEQ ID NO: 52975 - DNA, 60 bp, Artificial
  Synthetic oligonucleotide
tgctgccttcatgttctgggccatgtccaatggatcttgcagatgcaacatttgtatata

SEQ ID NO: 52976 - DNA, 60 bp, Artificial
  Synthetic oligonucleotide
ggcgtcaggcgaacaatggagaagacgcaactgctggtctcactcacatgatgatctggc

SEQ ID NO: 52977 - DNA, 60 bp, Artificial
  Synthetic oligonucleotide
acatacagatgtgcactgaactcaaactcagcgaccatgaagggaggctgatccagaaca

SEQ ID NO: 52978 - DNA, 60 bp, Artificial
  Synthetic oligonucleotide
actctacttttcttgaaagtgccagtgcaaaatgctataagtaccacattcccttatact

SEQ ID NO: 52979 - DNA, 60 bp, Artificial
  Synthetic oligonucleotide
ccaataaggtcaactcaatcattgacaaaatgaacactcagtttgaggccattggaaggg

SEQ ID NO: 52980 - DNA, 60 bp, Artificial
  Synthetic oligonucleotide
ccacatatcaaagaacaagagctctagtgcgtactgggatggaccccagaatgtgttctc

SEQ ID NO: 52981 - DNA, 60 bp, Artificial
  Synthetic oligonucleotide
acagtggaacaagcaaagcatgttcagattcattctacaggagtatgagatggctgactc

SEQ ID NO: 52982 - DNA, 60 bp, Artificial
  Synthetic oligonucleotide
tcttgttctgggccatgtccaatggatcttgcagatgcaacatttgtatataattggcaa

SEQ ID NO: 52983 - DNA, 60 bp, Artificial
  Synthetic oligonucleotide
ataacatttatgcaagccttacaactattgcttgaagtggagcaagagataagaaccttc

SEQ ID NO: 52984 - DNA, 60 bp, Artificial
  Synthetic oligonucleotide
agaagacgcaactgctggtctcacccatctgatgatctggcattccaatctgaatgatgc

SEQ ID NO: 52985 - DNA, 60 bp, Artificial
  Synthetic oligonucleotide
ggagaagacgcaactgctggtctcacccatctgatgatctggcattccaatctgaatgat

SEQ ID NO: 52986 - DNA, 60 bp, Artificial
  Synthetic oligonucleotide
ctgtggatatatgcaaagcagcaatgggtctgaggattagttcatcctttagctttggag

SEQ ID NO: 52987 - DNA, 60 bp, Artificial
  Synthetic oligonucleotide
ctcagcgactacgaaggcaggctgatccaaaacagcataacaatagagagaatggtcctc

SEQ ID NO: 52988 - DNA, 60 bp, Artificial
  Synthetic oligonucleotide
ggtgctatagctggattcatagaaggaggttggccagggctagttgctggctggtatggt

SEQ ID NO: 52989 - DNA, 60 bp, Artificial
  Synthetic oligonucleotide
gtggatatgactttgagagagaagggtactctctggtcggaatagatccttttcgtctgc

SEQ ID NO: 52990 - DNA, 60 bp, Artificial
  Synthetic oligonucleotide
ggaccatatggccataatcaagaaatacacatcaggaaggcaagagaagaaccccgcact

SEQ ID NO: 52991 - DNA, 60 bp, Artificial
  Synthetic oligonucleotide
aaggaacctacaaaatcctcaccatttattcgactgtcgcctcatctcttgttattgcag

SEQ ID NO: 52992 - DNA, 60 bp, Artificial
  Synthetic oligonucleotide
aaggaacctacaaaatcctcaccatttattcgactgtcgcctcatctcttgttattgcaa

SEQ ID NO: 52993 - DNA, 60 bp, Artificial
  Synthetic oligonucleotide
gaacctacaaaatcctcaccatttattcgactgtcgcctcatctcttgttattgcagtgg

SEQ ID NO: 52994 - DNA, 60 bp, Artificial
  Synthetic oligonucleotide
tgagtgacatccacatcatggcgtctcaaggcaccaaacgatcttatgagcagatggaaa

SEQ ID NO: 52995 - DNA, 60 bp, Artificial
  Synthetic oligonucleotide
caagcgaacaatggagaagacgcaactgctggtctcacccatctgatgatctggcattcc

SEQ ID NO: 52996 - DNA, 60 bp, Artificial
  Synthetic oligonucleotide
ccctagtagttcatacaggaggccagttggaatttccagcatggtggaggccatggtgtc

SEQ ID NO: 52997 - DNA, 60 bp, Artificial
  Synthetic oligonucleotide
ccgggtcagacattgcgagtgagatccaatgggaatctaattgctccatggtatggacac

SEQ ID NO: 52998 - DNA, 60 bp, Artificial
  Synthetic oligonucleotide
ataaggcctcttctaatagatggtacagcctcattgagtcctggaatgatgatgggcatg

SEQ ID NO: 52999 - DNA, 54 bp, Artificial
  Synthetic oligonucleotide
atcaagagttggaggaacagcatactgagaactcaagagtctgaatgtgcatgt

SEQ ID NO: 53000 - DNA, 60 bp, Artificial
  Synthetic oligonucleotide
ggaggaacaacatactgagaactcaagagtctgaatgtgcatgtataaatggctcttgct

SEQ ID NO: 53001 - DNA, 60 bp, Artificial
  Synthetic oligonucleotide
ggaggaacaacatactgagaactcaagagtctgaatgtgcatgtgtgaatggctcttgct

SEQ ID NO: 53002 - DNA, 60 bp, Artificial
  Synthetic oligonucleotide
gaaagaggcaaattgaagaggcgagcaattgcaacacccggaatgcaaatcagagggttc

SEQ ID NO: 53003 - DNA, 60 bp, Artificial
  Synthetic oligonucleotide
ggcgtcaagcgaacaatggagaagacgcaactgctggcctcacccatctgatgatctggc

SEQ ID NO: 53004 - DNA, 60 bp, Artificial
  Synthetic oligonucleotide
gtgggatgggctccaatcctctgatgatttcgctctcatagtgaatgcaccgaatcatga

SEQ ID NO: 53005 - DNA, 60 bp, Artificial
  Synthetic oligonucleotide
ggcaaggagacgtagtgttggtaatgaaacggaaacgggactctagcatacttactgaca

SEQ ID NO: 53006 - DNA, 60 bp, Artificial
  Synthetic oligonucleotide
tttgtggaacatcaggcacctatggaacaggctcatggcctgatggggcgaatatcaact

SEQ ID NO: 53007 - DNA, 60 bp, Artificial
  Synthetic oligonucleotide
tttgtggaacttcaggtacttatggaacaggctcatggcctgatggggcgaatatcatct

SEQ ID NO: 53008 - DNA, 60 bp, Artificial
  Synthetic oligonucleotide
atacagatgtgcactgaactcaaactcagcgactacgaaggcaggctgatccaaaacagc

SEQ ID NO: 53009 - DNA, 60 bp, Artificial
  Synthetic oligonucleotide
cgactgtcgcctcatctcttgtgcttgcaatggggtttgctgccttcttgttctgggcca

SEQ ID NO: 53010 - DNA, 53 bp, Artificial
  Synthetic oligonucleotide
tcttgttctgggccatgtccaatggatcttgcagatgcaacatttgtatataa

SEQ ID NO: 53011 - DNA, 54 bp, Artificial
  Synthetic oligonucleotide
ttcttgttctgggccatgtccaatggatcttgcagatgcaacatttgtatataa

SEQ ID NO: 53012 - DNA, 53 bp, Artificial
  Synthetic oligonucleotide
tccttttctgggccatgtccaatggatcttgcagatgcaacatttgtatataa

SEQ ID NO: 53013 - DNA, 60 bp, Artificial
  Synthetic oligonucleotide
ctgttcaccataagacaggaactggctagcaggggtctatgggattcctttcgtcagtcc

SEQ ID NO: 53014 - DNA, 60 bp, Artificial
  Synthetic oligonucleotide
aaattctcacaatttattcgactgtcgcctcatctcttgtgcttgcaatggggtttgctg

SEQ ID NO: 53015 - DNA, 51 bp, Artificial
  Synthetic oligonucleotide
cagatggaaactggtggagaacgccagaatgctactgagatcagagcatct

SEQ ID NO: 53016 - DNA, 57 bp, Artificial
  Synthetic oligonucleotide
atgagtcttctaaccgaggtcgaaacgtacgttctctctatcataccatcaggcccc

SEQ ID NO: 53017 - DNA, 60 bp, Artificial
  Synthetic oligonucleotide
atgagtcttctaaccgaggtcgaaacgtacgttctctctatcgtcccgtcgggccccctc

SEQ ID NO: 53018 - DNA, 57 bp, Artificial
  Synthetic oligonucleotide
atgagtcttctaaccgaggtcgaaacgtacgttctctctatcgtcccgtcgggcccc

SEQ ID NO: 53019 - DNA, 60 bp, Artificial
  Synthetic oligonucleotide
ccaataaggtcaactcaatcattgacaaaatgaacactcagtttgaggccgttggaaggg

SEQ ID NO: 53020 - DNA, 60 bp, Artificial
  Synthetic oligonucleotide
tggaatcactaataaggtcaactcaatcattgacaaaatgaacactcagtttgaggccgt

SEQ ID NO: 53021 - DNA, 60 bp, Artificial
  Synthetic oligonucleotide
ctaataaggtcaactcaatcattgacaaaatgaacactcagtttgaggccgttggaaagg

SEQ ID NO: 53022 - DNA, 60 bp, Artificial
  Synthetic oligonucleotide
ggattccaacactgtgtcaagcttccaggtagactgctttctttggcatgtccgcaaacg

SEQ ID NO: 53023 - DNA, 60 bp, Artificial
  Synthetic oligonucleotide
ggactccaacactgtgtcaagcttccaggtagactgctttctttggcatgtccgcaaacg

SEQ ID NO: 53024 - DNA, 50 bp, Artificial
  Synthetic oligonucleotide
caactcctgaggcacttccaaaaggatgcaaaagtgttgtttcagaactg

SEQ ID NO: 53025 - DNA, 50 bp, Artificial
  Synthetic oligonucleotide
cagctcctgaggcacttccaaaaggatgcaaaagtgttgtttcagaactg

SEQ ID NO: 53026 - DNA, 60 bp, Artificial
  Synthetic oligonucleotide
catgcatcaactcctgaggcacttccaaaaggatgcaaaggtgctatttcagaactgggg

SEQ ID NO: 53027 - DNA, 60 bp, Artificial
  Synthetic oligonucleotide
atcccatgcaccaactcctgaggcacttccaaaaggatgcaaaagtgctgtttcagaact

SEQ ID NO: 53028 - DNA, 60 bp, Artificial
  Synthetic oligonucleotide
atagcatcattgtattttgtggaacatcaggtacctatggaacaggctcatggcctgatg

SEQ ID NO: 53029 - DNA, 60 bp, Artificial
  Synthetic oligonucleotide
ggcgtcaagcgaacaatggagaagacgcaactgctggtctcactcacctgatgatctggc

SEQ ID NO: 53030 - DNA, 60 bp, Artificial
  Synthetic oligonucleotide
atggaccagcattgagcatcaacgaattgagcaatcttgcgaaaggggagaaagctaatg

SEQ ID NO: 53031 - DNA, 60 bp, Artificial
  Synthetic oligonucleotide
ggaccagcattgagcatcaacgaattgagcaatcttgcgaaaggggagaaagctaatgtg

SEQ ID NO: 53032 - DNA, 60 bp, Artificial
  Synthetic oligonucleotide
gtgttccgtttcatttggcaaccaaacaagtgtgcatagcatggtccagctcaagctgcc

SEQ ID NO: 53033 - DNA, 60 bp, Artificial
  Synthetic oligonucleotide
catttggcaaccaaacaagtgtgcatagcatggtccagctcaagctgccatgatgggaaa

SEQ ID NO: 53034 - DNA, 60 bp, Artificial
  Synthetic oligonucleotide
tgagttgggtgttccgtttcatttggcaaccaaacaagtgtgcatagcatggtccagctc

SEQ ID NO: 53035 - DNA, 60 bp, Artificial
  Synthetic oligonucleotide
ttgccccatggtatggacacattctttcaggagaaagccatggaagaatcctgaagaccg

SEQ ID NO: 53036 - DNA, 60 bp, Artificial
  Synthetic oligonucleotide
ttgctccatggtatggacacattctttcaggagaaagccatggaagaatcctgaagactg

SEQ ID NO: 53037 - DNA, 60 bp, Artificial
  Synthetic oligonucleotide
ttgccccatggtatggacacattctttcaggagaaagccatggaagaatcctgaagactg

SEQ ID NO: 53038 - DNA, 60 bp, Artificial
  Synthetic oligonucleotide
ggaggaacaacatactgagaacccaagagtctgaatgtgcatgtgtaaatggctcttgct

SEQ ID NO: 53039 - DNA, 60 bp, Artificial
  Synthetic oligonucleotide
ggaggaacaacgtactgagaacccaagagtctgaatgtgcatgtgtaaatggctcttgct

SEQ ID NO: 53040 - DNA, 60 bp, Artificial
  Synthetic oligonucleotide
cttcaggtacctatggaacaggctcatggcctgatggggcgaatatcaatttcatgccta

SEQ ID NO: 53041 - DNA, 60 bp, Artificial
  Synthetic oligonucleotide
acgtacgttctctctatcatcccgtcaggccccctcaaagccgagatcgcgcagagactt

SEQ ID NO: 53042 - DNA, 60 bp, Artificial
  Synthetic oligonucleotide
tatatgcagcggagttttcggagacaatccacgccccaatgatggaacaggcagttgcgg

SEQ ID NO: 53043 - DNA, 60 bp, Artificial
  Synthetic oligonucleotide
gtatcaaataggatatatatgcagcggagttttcggagacaatccacgccccaatgatgg

SEQ ID NO: 53044 - DNA, 60 bp, Artificial
  Synthetic oligonucleotide
ggcaccaaacgatctcatgaacagatggaaactggtggagaacgccagaatgctactgag

SEQ ID NO: 53045 - DNA, 60 bp, Artificial
  Synthetic oligonucleotide
aagatgatgactaactcacaagatacagagctctcctttacaattactggagacaacacc

SEQ ID NO: 53046 - DNA, 60 bp, Artificial
  Synthetic oligonucleotide
gagtccagatctttccagacacaatctggaatgtgacttacagtggaacaagcaaagcat

SEQ ID NO: 53047 - DNA, 60 bp, Artificial
  Synthetic oligonucleotide
tgtggccgattggagagtcacctaagggagtggaggaaggctccatcgggaaggtgtgca

SEQ ID NO: 53048 - DNA, 60 bp, Artificial
  Synthetic oligonucleotide
cggagatgtggccgattggagagtcacctaagggagtggaggaaggctccatcgggaagg

SEQ ID NO: 53049 - DNA, 60 bp, Artificial
  Synthetic oligonucleotide
gacgataacatattcatcatcaatgatgtgggaaatcaatggtcctgagtcagtacttgt

SEQ ID NO: 53050 - DNA, 60 bp, Artificial
  Synthetic oligonucleotide
aaatatacagagattcgcttggggagtccgtgatgagaatgggggacctccactccctcc

SEQ ID NO: 53051 - DNA, 60 bp, Artificial
  Synthetic oligonucleotide
gagatcactggaaccatgcgcagacttgccgaccaaagtctcccaccgaacttctccagc

SEQ ID NO: 53052 - DNA, 53 bp, Artificial
  Synthetic oligonucleotide
gctataccacaaatgtgatgaccagtgcatggagacaattcggaacgggacct

SEQ ID NO: 53053 - DNA, 60 bp, Artificial
  Synthetic oligonucleotide
atcctctgatgatttcgctctcatagtgaatgcaccaaatcatgagggaatacaagcagg

SEQ ID NO: 53054 - DNA, 60 bp, Artificial
  Synthetic oligonucleotide
tcctctgatgatttcgctctcatagtgaatgcaccaaatcatgagggaatacaagcagga

SEQ ID NO: 53055 - DNA, 58 bp, Artificial
  Synthetic oligonucleotide
gtcaggaagtgctcagcatgtggaggaatgctcctgttacccccggtatccagaagtt

SEQ ID NO: 53056 - DNA, 60 bp, Artificial
  Synthetic oligonucleotide
caggaagtgctcagcatgtggaggaatgctcctgttacccccggtatccagaagttagat

SEQ ID NO: 53057 - DNA, 60 bp, Artificial
  Synthetic oligonucleotide
atgggatgcttgttgacagtattggttcatggtctaaaaacatactcagaactcaggagt

SEQ ID NO: 53058 - DNA, 60 bp, Artificial
  Synthetic oligonucleotide
gtggaatgcttgttgacagtattggttcatggtctaaaaacatcctccgaactcaggagt

SEQ ID NO: 53059 - DNA, 60 bp, Artificial
  Synthetic oligonucleotide
tagcattgattccagttatgtgtgctcaggacttgttggcgacacaccaaggaacgatga

SEQ ID NO: 53060 - DNA, 60 bp, Artificial
  Synthetic oligonucleotide
tgaagggctatatggagcaattgaggagtgcctgattaatgatccctgggttttgcttaa

SEQ ID NO: 53061 - DNA, 60 bp, Artificial
  Synthetic oligonucleotide
ctatatggagcaattgaggagtgcctgattaatgatccctgggttttgcttaatgcatct

SEQ ID NO: 53062 - DNA, 60 bp, Artificial
  Synthetic oligonucleotide
agtaagatccaatgggaatctaattgctccatggtatggacacattctttcaggagagag

SEQ ID NO: 53063 - DNA, 60 bp, Artificial
  Synthetic oligonucleotide
ggctaatgtgctaattgggcaaggagacgtagtgttggtaatgaaacggaaacgggactc

SEQ ID NO: 53064 - DNA, 60 bp, Artificial
  Synthetic oligonucleotide
ggctaatgtgttgatagggcaaggagacgtagtgttggtaatgaaacggaaacgggactc

SEQ ID NO: 53065 - DNA, 60 bp, Artificial
  Synthetic oligonucleotide
aaggctaatgtgttgatagggcaaggagacgtagtgttggtaatgaaacggaaacgggac

SEQ ID NO: 53066 - DNA, 60 bp, Artificial
  Synthetic oligonucleotide
aaggctaatgtgctaattgggcaaggagacgtagtgttggtaatgaaacggaaacgggac

SEQ ID NO: 53067 - DNA, 60 bp, Artificial
  Synthetic oligonucleotide
aaagctaatgtgttgatagggcaaggagacgtagtgttggtaatgaaacggaaacgggac

SEQ ID NO: 53068 - DNA, 60 bp, Artificial
  Synthetic oligonucleotide
atcaagagttggaggaacaacatactgagaactcaagagtctgaatgtgcatgtataaat

SEQ ID NO: 53069 - DNA, 60 bp, Artificial
  Synthetic oligonucleotide
atcaagagttggaggaacaacatactgagaactcaagagtctgaatgtgcatgtgtgaat

SEQ ID NO: 53070 - DNA, 60 bp, Artificial
  Synthetic oligonucleotide
aacggacactatcaagagttggaggaacaacatactgagaactcaagagtctgaatgtgc

SEQ ID NO: 53071 - DNA, 60 bp, Artificial
  Synthetic oligonucleotide
agaggggaaaatcgtacacattagccctttgtcaggaagtgctcagcatgtggaggaatg

SEQ ID NO: 53072 - DNA, 60 bp, Artificial
  Synthetic oligonucleotide
gggaaaatcgtacacattagcccgttgtcaggaagtgctcagcatgtggaggaatgctcc

SEQ ID NO: 53073 - DNA, 60 bp, Artificial
  Synthetic oligonucleotide
gcagggaagaacacagatctcgaggctctcatggaatggctaaagacaagaccaatcctg

SEQ ID NO: 53074 - DNA, 60 bp, Artificial
  Synthetic oligonucleotide
ggaagaacacagatctcgaggctctcatggaatggctaaagacaagaccaatcctgtcac

SEQ ID NO: 53075 - DNA, 60 bp, Artificial
  Synthetic oligonucleotide
ggcgtcaagcgaacaatggagaagacgcaactgctggtctcacccatctgatgatctggc

SEQ ID NO: 53076 - DNA, 60 bp, Artificial
  Synthetic oligonucleotide
ccgagaactgggtgatgccccatttctagaccggcttcgccgagatcagaagtccctgag

SEQ ID NO: 53077 - DNA, 60 bp, Artificial
  Synthetic oligonucleotide
ccaattgagcacattgcaagtatgagaaggaactattttacagcggaagtatcccattgc

SEQ ID NO: 53078 - DNA, 60 bp, Artificial
  Synthetic oligonucleotide
ttattctactgtcgcctcatctcttgtgattgcaatggggtttgctgccttcttgttctg

SEQ ID NO: 53079 - DNA, 60 bp, Artificial
  Synthetic oligonucleotide
ttattcaactgtcgcctcatctcttgtgattgcaatggggtttgctgccttcttgttctg

SEQ ID NO: 53080 - DNA, 60 bp, Artificial
  Synthetic oligonucleotide
ccttaccatttattcgactgtcgcctcatctcttgtgcttgcaatggggtttgctgcctt

SEQ ID NO: 53081 - DNA, 60 bp, Artificial
  Synthetic oligonucleotide
ctcaccatttattcgactgtcgcctcatctcttgtgcttgcaatggggtttgctgccttc

SEQ ID NO: 53082 - DNA, 60 bp, Artificial
  Synthetic oligonucleotide
gtctcaaggcaccaaacgatcctatgaacagatggaaactggtggagaacgccagaatgc

SEQ ID NO: 53083 - DNA, 60 bp, Artificial
  Synthetic oligonucleotide
tccgcgaattcctatcgaagaatccagatctttccagacacaatctggaatgtgacttac

SEQ ID NO: 53084 - DNA, 60 bp, Artificial
  Synthetic oligonucleotide
ttaaaaccaggctgttcaccataaggcaggaaatggccagtaggggtctatgggattcct

SEQ ID NO: 53085 - DNA, 54 bp, Artificial
  Synthetic oligonucleotide
tagcgaggagtatctgtgagaaacttgagcaatctggactcccagttggaggga

SEQ ID NO: 53086 - DNA, 60 bp, Artificial
  Synthetic oligonucleotide
ggcctcttctaatagatggtacagcctcattgagtcctggaatgatgatgggcatgttca

SEQ ID NO: 53087 - DNA, 60 bp, Artificial
  Synthetic oligonucleotide
catgcatcaactcctgaggcacttccaaaaggatgcaaaggtgctatttcaagactgggg

SEQ ID NO: 53088 - DNA, 60 bp, Artificial
  Synthetic oligonucleotide
cagagcaaatcaacgactgaaccccatgcaccaactcctgaggcacttccaaaaggatgc

SEQ ID NO: 53089 - DNA, 60 bp, Artificial
  Synthetic oligonucleotide
acactgtgtcaagtttccaggtagactgctttctttggcatgtccgcaaacggtttgcag

SEQ ID NO: 53090 - DNA, 60 bp, Artificial
  Synthetic oligonucleotide
acactgtgtcaagcttccaggtagactgctttctttggcatgtccgcaaacggtttgcag

SEQ ID NO: 53091 - DNA, 60 bp, Artificial
  Synthetic oligonucleotide
ccaacactgtgtcaagctttcaggtagactgctttctttggcatgtccgcaaaagatttg

SEQ ID NO: 53092 - DNA, 60 bp, Artificial
  Synthetic oligonucleotide
caaacactgtgtcaagctttcaggtagactgctttctttggcatgtccgcaaacgatttg

SEQ ID NO: 53093 - DNA, 60 bp, Artificial
  Synthetic oligonucleotide
ctaacactgtgtcaagcttccaggtagactgctttctttggcatgtccgcaaacgatttg

SEQ ID NO: 53094 - DNA, 60 bp, Artificial
  Synthetic oligonucleotide
tccaacactgtgtcaagctttcaggtagactgctttctttggcatgtccgcaaacgattt

SEQ ID NO: 53095 - DNA, 60 bp, Artificial
  Synthetic oligonucleotide
agacaagaccaatcctgtcacctctgactaaggggattttagggtttgtgtttacgctca

SEQ ID NO: 53096 - DNA, 60 bp, Artificial
  Synthetic oligonucleotide
aatggctaaagacaagaccaatcctgtcacctctgactaaggggattttaggatttgtgt

SEQ ID NO: 53097 - DNA, 60 bp, Artificial
  Synthetic oligonucleotide
gtgagaagagcaacagtatcagcagacccattggcatctctattggagatgtgccacagc

SEQ ID NO: 53098 - DNA, 60 bp, Artificial
  Synthetic oligonucleotide
acaaatgggtcttctgtcaaaaaggaggaagaagtgcttacaggcaacctccaaacattg

SEQ ID NO: 53099 - DNA, 56 bp, Artificial
  Synthetic oligonucleotide
aaaaggaggaagaagtgcttacaggcaacctccaaacattgaaaataagagtacat

SEQ ID NO: 53100 - DNA, 60 bp, Artificial
  Synthetic oligonucleotide
ggatgggctccaatcctctgatgatttcgctctcatagtgaatgcgccgaatcatgaggg

SEQ ID NO: 53101 - DNA, 60 bp, Artificial
  Synthetic oligonucleotide
tgtcgcagtctcgcactcgcgagatactgacaaaaaccactgtggaccatatggctataa

SEQ ID NO: 53102 - DNA, 60 bp, Artificial
  Synthetic oligonucleotide
acatgttcgaaagcaagagcatgaagctacggacacaaataccagcagaaatgcttgcaa

SEQ ID NO: 53103 - DNA, 60 bp, Artificial
  Synthetic oligonucleotide
aatcctcaccatttattcgactgtcgcctcatctcttgtggttgcaatggggtttgctgc

SEQ ID NO: 53104 - DNA, 60 bp, Artificial
  Synthetic oligonucleotide
gatggcaactaccaccaacccactaatcaggcatgagaacagaatggtactagccagcac

SEQ ID NO: 53105 - DNA, 60 bp, Artificial
  Synthetic oligonucleotide
tgattccagttatgtgtgctcaggacttgttggcgacacaccaagaaatgatgataggtc

SEQ ID NO: 53106 - DNA, 60 bp, Artificial
  Synthetic oligonucleotide
gattccagttatgtgtgctcaggacttgttggcgacacaccaagaactgacgatagctcc

SEQ ID NO: 53107 - DNA, 60 bp, Artificial
  Synthetic oligonucleotide
cttcctttgacatgagtaacgaggggtcttatttcttcggagacaatgcagaggaatatg

SEQ ID NO: 53108 - DNA, 60 bp, Artificial
  Synthetic oligonucleotide
tgggagcagatgtacacaccaggaggggaagtgagaaatgatgatgttgaccagagtttg

SEQ ID NO: 53109 - DNA, 60 bp, Artificial
  Synthetic oligonucleotide
gaaggaacttacaaaatcctcaccatttattcgactgtcgcctcatctcttgtgattgca

SEQ ID NO: 53110 - DNA, 60 bp, Artificial
  Synthetic oligonucleotide
aaggaacttacaaaatcctcaccatttattcgactgtcgcctcatctcttgtgattgcaa

SEQ ID NO: 53111 - DNA, 60 bp, Artificial
  Synthetic oligonucleotide
gcattggttaccatgcaaacaattcaacagagcaggttgacacaatcatggaaaagaacg

SEQ ID NO: 53112 - DNA, 60 bp, Artificial
  Synthetic oligonucleotide
aagtgatcagatttgcattggttaccatgcaaacaattcaacagagcaggttgacacaat

SEQ ID NO: 53113 - DNA, 51 bp, Artificial
  Synthetic oligonucleotide
tgcattggttaccatgcaaacaattcaacagagcaggttgacacaatcatg

SEQ ID NO: 53114 - DNA, 60 bp, Artificial
  Synthetic oligonucleotide
ccctgggttttgcttaatgcatcttggttcaactccttcctcacacatgcactgagatag

SEQ ID NO: 53115 - DNA, 60 bp, Artificial
  Synthetic oligonucleotide
ccctgggttttgcttaatgcatcttggttcaactccttcctcacacatgcactgaagtag

SEQ ID NO: 53116 - DNA, 60 bp, Artificial
  Synthetic oligonucleotide
taatgatccctgggctttgcttaatgcatcttggttcaactccttcctcacacatgcact

SEQ ID NO: 53117 - DNA, 60 bp, Artificial
  Synthetic oligonucleotide
gatccctgggctttgcttaatgcatcttggttcaactccttcctcacacatgcactgaaa

SEQ ID NO: 53118 - DNA, 58 bp, Artificial
  Synthetic oligonucleotide
tccctgggttttgcttaatgcatcttggttcaactccttcctcacacatgcactgaga

SEQ ID NO: 53119 - DNA, 60 bp, Artificial
  Synthetic oligonucleotide
ggtccagctcaagctgccatgatgggaaggcatggttacatgtttgtgtcactggggatg

SEQ ID NO: 53120 - DNA, 60 bp, Artificial
  Synthetic oligonucleotide
gcattagcgggtaattcatctctttgcccaatcagtggatgggctatatacagcaaggac

SEQ ID NO: 53121 - DNA, 60 bp, Artificial
  Synthetic oligonucleotide
cactagcaggcaattcctctctctgccccatcagtggatgggctatatacagcaaggaca

SEQ ID NO: 53122 - DNA, 59 bp, Artificial
  Synthetic oligonucleotide
gtaatgactgacggaccaagtaatgggcaggcctcatacaagatcttcaagatagaaaa

SEQ ID NO: 53123 - DNA, 60 bp, Artificial
  Synthetic oligonucleotide
gtaatgactgacggaccaagtaatgggcaggcctcatacaagatcttcaagatagaaaaa

SEQ ID NO: 53124 - DNA, 60 bp, Artificial
  Synthetic oligonucleotide
caagtaatggccaggcctcatacaagatcttcaagatagaaaaggggagggtagtcaaat

SEQ ID NO: 53125 - DNA, 60 bp, Artificial
  Synthetic oligonucleotide
gagaccctccatacagccatgggacagggacaggatacaccatggacacagtcaacagaa

SEQ ID NO: 53126 - DNA, 60 bp, Artificial
  Synthetic oligonucleotide
cgggaacaggatacaccatggacacagtcaacaggacacatcaatactcagaaaagggga

SEQ ID NO: 53127 - DNA, 60 bp, Artificial
  Synthetic oligonucleotide
tttattcgactgtcgcctcatctcttgtgattgcaatggggtttgctgccttcttgttct

SEQ ID NO: 53128 - DNA, 60 bp, Artificial
  Synthetic oligonucleotide
tgctagtgaggtaatgtgtgtatgcagagacaactggcatggttcaaatcgaccatgggt

SEQ ID NO: 53129 - DNA, 60 bp, Artificial
  Synthetic oligonucleotide
ggcatggttcaaatcgaccatgggtgtccttcaatcagaatctagaatatcaaataggat

SEQ ID NO: 53130 - DNA, 60 bp, Artificial
  Synthetic oligonucleotide
gaccatgggtgtccttcaatcagaatctagaatatcaaataggatacatatgcagcggag

SEQ ID NO: 53131 - DNA, 58 bp, Artificial
  Synthetic oligonucleotide
caggaccttctttctaactcaaggggccttgttgaatgacaagcattccaatggaacc

SEQ ID NO: 53132 - DNA, 60 bp, Artificial
  Synthetic oligonucleotide
tgatggaacaggcagttgtggtccagtgtcttctaatggggcatatggagtaaaggggtt

SEQ ID NO: 53133 - DNA, 60 bp, Artificial
  Synthetic oligonucleotide
ggaacaggcagttgtggtccagtgtcttctaatggggcatatggagtaaaggggttttca

SEQ ID NO: 53134 - DNA, 51 bp, Artificial
  Synthetic oligonucleotide
taaaggggttttcatttaaatacggtaatggtgtttggataggaagaacta

SEQ ID NO: 53135 - DNA, 60 bp, Artificial
  Synthetic oligonucleotide
tgggtttgagatgatttgggatcccaatgggtggacagagacagacagcagtttctctgt

SEQ ID NO: 53136 - DNA, 60 bp, Artificial
  Synthetic oligonucleotide
aatcagacatacatcaacataagtaataccaatttaattgcaggacaggctgtagctcca

SEQ ID NO: 53137 - DNA, 60 bp, Artificial
  Synthetic oligonucleotide
aacataagtaataccaatttaattgcaggacaggctgtagctccagtaacactagcaggc

SEQ ID NO: 53138 - DNA, 60 bp, Artificial
  Synthetic oligonucleotide
atttcaatatgggttagccattcaatccaaactggaagtcagaactaccccgaaacatgc

SEQ ID NO: 53139 - DNA, 60 bp, Artificial
  Synthetic oligonucleotide
gggttagccattcaatccaaactggaagtcagaactaccccgaaacatgcaatcaaagtg

SEQ ID NO: 53140 - DNA, 60 bp, Artificial
  Synthetic oligonucleotide
cagcaaggacaatggtataagaataggttccaagggagatgtatttgtcatcagagagcc

SEQ ID NO: 53141 - DNA, 60 bp, Artificial
  Synthetic oligonucleotide
gatgtatttgtcatcagagagccttttatttcatgctctcacttggaatgcaggaccttc

SEQ ID NO: 53142 - DNA, 60 bp, Artificial
  Synthetic oligonucleotide
tgtagctccagtaacactagcaggcaattcctctctctgccccatcagtggatgggctat

SEQ ID NO: 53143 - DNA, 60 bp, Artificial
  Synthetic oligonucleotide
gatgggctatatacagcaaggacaatggtataagaataggttccaagggagatgtatttg

SEQ ID NO: 53144 - DNA, 60 bp, Artificial
  Synthetic oligonucleotide
acagatactatcaagagttggagagacaacatattgagaacacaagagtctgaatgtgcc

SEQ ID NO: 53145 - DNA, 60 bp, Artificial
  Synthetic oligonucleotide
gccttgcttctgggttgagctgatcagaggaagacccaaggagaatacaatctggaccag

SEQ ID NO: 53146 - DNA, 60 bp, Artificial
  Synthetic oligonucleotide
tgaatgtgcctgtattaatggttcttgctttaccataatgactgatggaccaagtaatgg

SEQ ID NO: 53147 - DNA, 60 bp, Artificial
  Synthetic oligonucleotide
gtagtcaaatcagttgagttgaatgcccctaattaccactatgaggagtgctcctgttat

SEQ ID NO: 53148 - DNA, 60 bp, Artificial
  Synthetic oligonucleotide
ggccaggcctcatacaagatcttcaagatagaaaaggggagggtagtcaaatcagttgag

SEQ ID NO: 53149 - DNA, 60 bp, Artificial
  Synthetic oligonucleotide
ctcctgttatcctgatgctagtgaggtaatgtgtgtatgcagagacaactggcatggttc

SEQ ID NO: 53150 - DNA, 60 bp, Artificial
  Synthetic oligonucleotide
gagttgaatgcccctaattaccactatgaggagtgctcctgttatcctgatgctagtgag

SEQ ID NO: 53151 - DNA, 60 bp, Artificial
  Synthetic oligonucleotide
gaaccctaatgagctgccctgttggtgaagctccttctccatacaattcaaggtttgagt

SEQ ID NO: 53152 - DNA, 60 bp, Artificial
  Synthetic oligonucleotide
ctatagaaccctaatgagctgccctgttggtgaagctccttctccatacaattcaaggtt

SEQ ID NO: 53153 - DNA, 60 bp, Artificial
  Synthetic oligonucleotide
gagttggagagacaacatattgagaacacaagagtctgaatgtgcctgtattaatggttc

SEQ ID NO: 53154 - DNA, 60 bp, Artificial
  Synthetic oligonucleotide
tctgggttgagctgatcagaggaagacccaaggagaatacaatctggaccagtgggagca

SEQ ID NO: 53155 - DNA, 60 bp, Artificial
  Synthetic oligonucleotide
gcctgtattaatggttcttgctttaccataatgactgatggaccaagtaatggccaggcc

SEQ ID NO: 53156 - DNA, 60 bp, Artificial
  Synthetic oligonucleotide
cagcatccagaactgacggggttggattgcatgaggccttgcttctgggttgagctgatc

SEQ ID NO: 53157 - DNA, 60 bp, Artificial
  Synthetic oligonucleotide
agcggaagttttgttcagcatccagaactgacggggttggattgcatgaggccttgcttc

SEQ ID NO: 53158 - DNA, 60 bp, Artificial
  Synthetic oligonucleotide
aagatattgtagcaataactgattggtcaggatatagcggaagttttgttcagcatccag

SEQ ID NO: 53159 - DNA, 60 bp, Artificial
  Synthetic oligonucleotide
agagagccttttatttcatgctctcacttggaatgcaggaccttctttctaactcaaggg

SEQ ID NO: 53160 - DNA, 60 bp, Artificial
  Synthetic oligonucleotide
caaataggatacatatgcagcggagtttttggagacaacccgcgccccaatgatggaaca

SEQ ID NO: 53161 - DNA, 60 bp, Artificial
  Synthetic oligonucleotide
caatagtcagtcttgttaagagtgatcagatttgcattggttaccatgcaaacaattcaa

SEQ ID NO: 53162 - DNA, 60 bp, Artificial
  Synthetic oligonucleotide
caatagccagtcttgttaaaggtgatcagatttgcattggttaccatgcaaacaattcaa

SEQ ID NO: 53163 - DNA, 60 bp, Artificial
  Synthetic oligonucleotide
ggcaaattgaagaggcgagcaattgcaacacccggaatgcaaatcagaggattcgtgtac

SEQ ID NO: 53164 - DNA, 60 bp, Artificial
  Synthetic oligonucleotide
cgagatcagaagtccctaagaggaagaggcagcactcttggtctggacatcagaaccgcc

SEQ ID NO: 53165 - DNA, 60 bp, Artificial
  Synthetic oligonucleotide
aatctgaaggaacctacaaaatcctcaccatttattcgactgtcgcctcatctcttgtgc

SEQ ID NO: 53166 - DNA, 60 bp, Artificial
  Synthetic oligonucleotide
tgtgcatagcatggtccagctcaagctgccatgatgggaaagcatggttacatgcttgtg

SEQ ID NO: 53167 - DNA, 60 bp, Artificial
  Synthetic oligonucleotide
tgtgcatagcatggtccagctcaagctgccatgatgggaaagcatggttacatgtctgtg

SEQ ID NO: 53168 - DNA, 60 bp, Artificial
  Synthetic oligonucleotide
catagcatggtccagctcaagctgccatgatgggaaagcatggttacatgtctgtgtcac

SEQ ID NO: 53169 - DNA, 60 bp, Artificial
  Synthetic oligonucleotide
acatttatgcaagccttgcaactattgcttgaagtggagcaagagataagaactttctcg

SEQ ID NO: 53170 - DNA, 60 bp, Artificial
  Synthetic oligonucleotide
gtggaattgggagattctacatacagatgtgcactgaactcaaactcagcgactatgaag

SEQ ID NO: 53171 - DNA, 60 bp, Artificial
  Synthetic oligonucleotide
ttttgaaaaggtcgaaaggttaaaacatggaacctttggccctgtccacttcagaaatca

SEQ ID NO: 53172 - DNA, 60 bp, Artificial
  Synthetic oligonucleotide
ttgtgtattggaagcaatggctttccttgaagaatcccacccagggatctttggaaactc

SEQ ID NO: 53173 - DNA, 60 bp, Artificial
  Synthetic oligonucleotide
gctgatagggcaaggagacgtagtgttggtaatgaaacggaaacgggactctagcatact

SEQ ID NO: 53174 - DNA, 60 bp, Artificial
  Synthetic oligonucleotide
gatagggcaaggagacgtagtgttggtaatgaaacggaaacgggactctagcatacttac

SEQ ID NO: 53175 - DNA, 60 bp, Artificial
  Synthetic oligonucleotide
gtgctgatagggcaaggagacgtagtgttggtaatgaaacggaaacgggactctagcata

SEQ ID NO: 53176 - DNA, 60 bp, Artificial
  Synthetic oligonucleotide
catgctgggagcagatgtacactccaggaggggaagtgagaaatgatgatattgaccaaa

SEQ ID NO: 53177 - DNA, 60 bp, Artificial
  Synthetic oligonucleotide
ctatttaataagagcactgacactgaacacaatgacaaaagatgcagaaagaggcaaatt

SEQ ID NO: 53178 - DNA, 60 bp, Artificial
  Synthetic oligonucleotide
gggtttgctgccttcttgttctgggccatgtccaatggatcttgcagatgcaacatttgt

SEQ ID NO: 53179 - DNA, 60 bp, Artificial
  Synthetic oligonucleotide
gctttgagcagataacgttcttgcaggcattgcaactcttacttgaagttgagagtgaga

SEQ ID NO: 53180 - DNA, 60 bp, Artificial
  Synthetic oligonucleotide
gcttcgagcagataacgttcttgcaggcattgcaactcttacttgaagttgagagtgaga

SEQ ID NO: 53181 - DNA, 60 bp, Artificial
  Synthetic oligonucleotide
aagtattgcatttgactcaaggaacctgctgggagcagatgtacacaccaggaggggaag

SEQ ID NO: 53182 - DNA, 60 bp, Artificial
  Synthetic oligonucleotide
cccgttctatatataaatatggcagattatagcattgattccagttatgtgtgctcaggg

SEQ ID NO: 53183 - DNA, 60 bp, Artificial
  Synthetic oligonucleotide
tctagcagcagcaactgcagggatcctaataatgagaggggaaacccaggagtgaaaggg

SEQ ID NO: 53184 - DNA, 60 bp, Artificial
  Synthetic oligonucleotide
ctctagcagcagcaactgcagggatcctaataatgagaggggaaacccaggagtgaaagg

SEQ ID NO: 53185 - DNA, 60 bp, Artificial
  Synthetic oligonucleotide
tatgataaacaatgaccttggaccagcaacagctcagatggctcttcagctattcatcaa

SEQ ID NO: 53186 - DNA, 60 bp, Artificial
  Synthetic oligonucleotide
gattctacatacagatgtgcactgaactcaaactcagcgactatgaaagcaggctgatcc

SEQ ID NO: 53187 - DNA, 60 bp, Artificial
  Synthetic oligonucleotide
accgaggtcgaaacgtacgttctctctatcatcccgtcaggccccctcaaagccgagatc

SEQ ID NO: 53188 - DNA, 60 bp, Artificial
  Synthetic oligonucleotide
gaggggaaacccaggagtgaaagggtgggcctttgacaatggagatgatgtttggatggg

SEQ ID NO: 53189 - DNA, 60 bp, Artificial
  Synthetic oligonucleotide
agaggggaaacccaggagtgaaagggtgggcctttgacaatggagatgatgtttggatgg

SEQ ID NO: 53190 - DNA, 60 bp, Artificial
  Synthetic oligonucleotide
gaggggaaacccaggagtgaaagggtgggcctttgacaatggggatgatgtttggatggg

SEQ ID NO: 53191 - DNA, 60 bp, Artificial
  Synthetic oligonucleotide
atcctcagaactcaggagtcagaatgcgtttgcatcaatggaacctgtgcagtagtaatg

SEQ ID NO: 53192 - DNA, 60 bp, Artificial
  Synthetic oligonucleotide
atcctcagaactcaggagtcagaatgcgtttgcatcaatggaacctgtacggtagtaatg

SEQ ID NO: 53193 - DNA, 60 bp, Artificial
  Synthetic oligonucleotide
acatcctcagaactcaggagtcagaatgcgtttgcatcaatggaacctgtacggtagtaa

SEQ ID NO: 53194 - DNA, 60 bp, Artificial
  Synthetic oligonucleotide
atcctcagaactcaggagtcagaatgcgtttgcatcaatggaacctgcacggtagtaatg

SEQ ID NO: 53195 - DNA, 60 bp, Artificial
  Synthetic oligonucleotide
ctaaaagcatcctcagaactcaggagtcagaatgcgtttgcatcaatggaacttgtacag

SEQ ID NO: 53196 - DNA, 60 bp, Artificial
  Synthetic oligonucleotide
atcctcagaactcaggagtcagaatgcgtttgcatcaatggaacttgtacagtagtaatg

SEQ ID NO: 53197 - DNA, 60 bp, Artificial
  Synthetic oligonucleotide
taacgatccctgggttttgcttaatgcgtcttggttcaactccttcctcacacatgcact

SEQ ID NO: 53198 - DNA, 60 bp, Artificial
  Synthetic oligonucleotide
ccacagtagtccattgtcaggaagtgctcagcatgtggaggaatgctcctgttaccccag

SEQ ID NO: 53199 - DNA, 60 bp, Artificial
  Synthetic oligonucleotide
tccacagtagtccattgtcaggaagtgctcagcatgtggaggaatgctcctgttacccca

SEQ ID NO: 53200 - DNA, 60 bp, Artificial
  Synthetic oligonucleotide
agaaatacacatcaggaagacaagagaagaaccctgccctcagaatgaaatggatgatgg

SEQ ID NO: 53201 - DNA, 60 bp, Artificial
  Synthetic oligonucleotide
cacaggggaggaaatggcaaccaaagcggactacacccttgatgaagagagcagggcaag

SEQ ID NO: 53202 - DNA, 60 bp, Artificial
  Synthetic oligonucleotide
ggcaattattgtagcaatggtgttctcacaggaagattgcatgataaaggcagtccgagg

SEQ ID NO: 53203 - DNA, 60 bp, Artificial
  Synthetic oligonucleotide
cttgttctgggccatgtccaatggatcttgcaggtgcaacatttgtatataattggcaaa

SEQ ID NO: 53204 - DNA, 60 bp, Artificial
  Synthetic oligonucleotide
cactggggatgatagaaatgcgactgctagcatcatttatgatgggatgcttaccgacag

SEQ ID NO: 53205 - DNA, 60 bp, Artificial
  Synthetic oligonucleotide
cactggggatgatagaaatgcgactgctagcttcatttatgatgggatgcttgtcgacag

SEQ ID NO: 53206 - DNA, 60 bp, Artificial
  Synthetic oligonucleotide
gggcagaagaggtacaccaaaaccacatactggtgggatgggctccaatcctctgatgat

SEQ ID NO: 53207 - DNA, 60 bp, Artificial
  Synthetic oligonucleotide
accacacaaatgggagaagtactgtgttcttgaagtaggtgacatgctcctgagaacttc

SEQ ID NO: 53208 - DNA, 60 bp, Artificial
  Synthetic oligonucleotide
accacacaaatgggagaagtactgtgttcttgaagtaggggacatgctcctgagaacttc

SEQ ID NO: 53209 - DNA, 60 bp, Artificial
  Synthetic oligonucleotide
tacacattagcccattgtcaggaagtgctcagcatgtggaggaatgttcctgttatcccc

SEQ ID NO: 53210 - DNA, 60 bp, Artificial
  Synthetic oligonucleotide
cagtcccgcactcgcgagatactaacaaagaccactgtggaccatatggccataatcaag

SEQ ID NO: 53211 - DNA, 60 bp, Artificial
  Synthetic oligonucleotide
acagtattggttcatggtctaaaagcatcctcagaactcaggagtcagaatgcgtttgca

SEQ ID NO: 53212 - DNA, 60 bp, Artificial
  Synthetic oligonucleotide
ggagttgggtaatggttgtttcgagttctatcacaaatgtgataatgaatgtatggaaag

SEQ ID NO: 53213 - DNA, 60 bp, Artificial
  Synthetic oligonucleotide
catggaatggttaaagacaagaccaatcctgtcacctctgactaaggggattttagggtt

SEQ ID NO: 53214 - DNA, 60 bp, Artificial
  Synthetic oligonucleotide
tcaaaaagtacacatcaggaagacaagagaagaaccccgcactcaggatgaagtggatga

SEQ ID NO: 53215 - DNA, 60 bp, Artificial
  Synthetic oligonucleotide
gactgctggtctcagatggaggaccaaatctatacaatatccggaatctccacattccgg

SEQ ID NO: 53216 - DNA, 60 bp, Artificial
  Synthetic oligonucleotide
gcaatggggtttgctgccttcttgttctgggccatgtccaatggatcttgcagatgcaac

SEQ ID NO: 53217 - DNA, 60 bp, Artificial
  Synthetic oligonucleotide
tagggatcctaataacgagagaggggccccaggagtgaaagggtgggcctttgacaatgg

SEQ ID NO: 53218 - DNA, 60 bp, Artificial
  Synthetic oligonucleotide
gggatcctaataacgagagaggggccccaggagtgaaagggtgggcctttgacaatggaa

SEQ ID NO: 53219 - DNA, 60 bp, Artificial
  Synthetic oligonucleotide
aagagcccttgtgcgtactgggatggaccccagaatgtgctctctgatgcaaggatcaac

SEQ ID NO: 53220 - DNA, 60 bp, Artificial
  Synthetic oligonucleotide
acgatcttacgaacagatggaaactggtggagaacgccagaatgctactgagatcagggc

SEQ ID NO: 53221 - DNA, 60 bp, Artificial
  Synthetic oligonucleotide
gggaatgctgaaattgaagaccttatcttcctggcacggtctgcactcatcctgagagga

SEQ ID NO: 53222 - DNA, 60 bp, Artificial
  Synthetic oligonucleotide
gcgataaactctagtatgccattccacaacatacaccctctaaccatcggggaatgcccc

SEQ ID NO: 53223 - DNA, 51 bp, Artificial
  Synthetic oligonucleotide
ggggcgataaactctagtatgccattccacaacatacaccctctcaccatc

SEQ ID NO: 53224 - DNA, 60 bp, Artificial
  Synthetic oligonucleotide
gcgataaactctagtatgccattccacaacatacaccctctcactatcggggaatgcccc

SEQ ID NO: 53225 - DNA, 60 bp, Artificial
  Synthetic oligonucleotide
ttgcagaccaagaactgggtgatgccccatttctagaccggcttcgccgggatcagaagt

SEQ ID NO: 53226 - DNA, 60 bp, Artificial
  Synthetic oligonucleotide
atttgcagaccaagaactgggtgatgccccatttctagaccggcttcgccgggatcagaa

SEQ ID NO: 53227 - DNA, 60 bp, Artificial
  Synthetic oligonucleotide
aacgatccctgggttttgcttaatgcatcttggttcaactccttcctcgcacatgcactg

SEQ ID NO: 53228 - DNA, 60 bp, Artificial
  Synthetic oligonucleotide
ctggaatgatgatgggcatgttcaacatgctgagtacagtcttaggagtttcaatcctga

SEQ ID NO: 53229 - DNA, 60 bp, Artificial
  Synthetic oligonucleotide
caatctactcaacagtggcgagttccctagcactggcaatcatgatagctggtctatctt

SEQ ID NO: 53230 - DNA, 52 bp, Artificial
  Synthetic oligonucleotide
accaccaccaacccactaatcaggcatgagaacagaatggtgctggccagca

SEQ ID NO: 53231 - DNA, 60 bp, Artificial
  Synthetic oligonucleotide
cctgattaatgatccctgggttttgcttaatgcatcttggttcaactccttcctcacaca

SEQ ID NO: 53232 - DNA, 60 bp, Artificial
  Synthetic oligonucleotide
gtctcaaggcaccaaacgatcttacgaacagatggaaactggtggagaacgccagaatgc

SEQ ID NO: 53233 - DNA, 60 bp, Artificial
  Synthetic oligonucleotide
ggcattaaagggaagaggcagcacacttggactcgacccaagagtagctacaatggaagg

SEQ ID NO: 53234 - DNA, 60 bp, Artificial
  Synthetic oligonucleotide
tcagaagagatcataaggcattaaagggaagaggcagcacacttggactcgacctgcgag

SEQ ID NO: 53235 - DNA, 60 bp, Artificial
  Synthetic oligonucleotide
caggggagtgggtacgctgcagacaaagagtccactcaaaaggcaatagatggagtcacc

SEQ ID NO: 53236 - DNA, 60 bp, Artificial
  Synthetic oligonucleotide
caggggagcgggtatgctgcagacaaagaatccactcaaaaggcaatagatggagtcacc

SEQ ID NO: 53237 - DNA, 60 bp, Artificial
  Synthetic oligonucleotide
caggggagtgggtacgctgctgacaaagaatccactcaaaaggcaatagatggagtcacc

SEQ ID NO: 53238 - DNA, 60 bp, Artificial
  Synthetic oligonucleotide
caggggagtggatacgccgcagacaaagaatccactcaaaaggcaatagatggagtcacc

SEQ ID NO: 53239 - DNA, 60 bp, Artificial
  Synthetic oligonucleotide
caggggagtgggtacgctgctgacaaagagtccactcaaaaggcaatagatggagtcacc

SEQ ID NO: 53240 - DNA, 60 bp, Artificial
  Synthetic oligonucleotide
gagcatctgttgggagaatggttggtggaatcggaagattctacatacagatgtgcactg

SEQ ID NO: 53241 - DNA, 60 bp, Artificial
  Synthetic oligonucleotide
tcagagcatctgttgggagaatggttggtggaatcggaagattctacatacagatgtgca

SEQ ID NO: 53242 - DNA, 60 bp, Artificial
  Synthetic oligonucleotide
cagagcatctgttgggagaatggttggtggaatcggaagattctacatacagatgtgcac

SEQ ID NO: 53243 - DNA, 60 bp, Artificial
  Synthetic oligonucleotide
gattccagttatgtgtgctcaggacttgttggtgacacaccaaggaatgacgatagatct

SEQ ID NO: 53244 - DNA, 60 bp, Artificial
  Synthetic oligonucleotide
tgattccagttatgtgtgctcaggacttgttggtgacacaccaagaaatgatgatagatc

SEQ ID NO: 53245 - DNA, 60 bp, Artificial
  Synthetic oligonucleotide
ggggtcaagctggaatctgagggaacttacaaaatcctcaccatttattcgactgtcgcc

SEQ ID NO: 53246 - DNA, 60 bp, Artificial
  Synthetic oligonucleotide
ggggtaaagctggaatctgagggaacttacaaaatcctcaccatttattcgactgtcgcc

SEQ ID NO: 53247 - DNA, 60 bp, Artificial
  Synthetic oligonucleotide
ggagaatttggcgtcaagcgaacaatggagaagacgcaactgctggtctcactcacatga

SEQ ID NO: 53248 - DNA, 60 bp, Artificial
  Synthetic oligonucleotide
tccttgaggaatcccacccagggatctttgaaaactcgtgtcttgaaacgatggaagttg

SEQ ID NO: 53249 - DNA, 60 bp, Artificial
  Synthetic oligonucleotide
agacgagcgattgcaacacccggaatgcaaatcagaggattcgtgcactttgtcgaagca

SEQ ID NO: 53250 - DNA, 60 bp, Artificial
  Synthetic oligonucleotide
tgtcacagtctcgcactcgcgagatactgacaaaaaccactgtggaccatatggccataa

SEQ ID NO: 53251 - DNA, 60 bp, Artificial
  Synthetic oligonucleotide
tgtcgcagtctcgcactcgcgagatactgacaaaaaccactgtggaccatatggccataa

SEQ ID NO: 53252 - DNA, 60 bp, Artificial
  Synthetic oligonucleotide
cttgtaatctactgttgggaggaagagaatggtcctacatcgtcgaaagaccatcggctg

SEQ ID NO: 53253 - DNA, 60 bp, Artificial
  Synthetic oligonucleotide
cttgtgatctactgttgggaggaagagaatggtcctacatcgtcgaaagaccatcggctg

SEQ ID NO: 53254 - DNA, 60 bp, Artificial
  Synthetic oligonucleotide
cttgtgatatactgttgggaggaagagaatggtcctacatcgtcgaaagaccatcggctg

SEQ ID NO: 53255 - DNA, 60 bp, Artificial
  Synthetic oligonucleotide
cttgtaatctactgttgggaggaagagaatggtcctacatcgtcgaaagaccatcggcta

SEQ ID NO: 53256 - DNA, 60 bp, Artificial
  Synthetic oligonucleotide
gtcgaaacactagcaaggagcatttgtgagaaacttgagcaatctggactcccagttgga

SEQ ID NO: 53257 - DNA, 60 bp, Artificial
  Synthetic oligonucleotide
ggagctgggtaacggttgtttcgagttctatcacaaatgtgatgatgaatgtatggaaag

SEQ ID NO: 53258 - DNA, 60 bp, Artificial
  Synthetic oligonucleotide
ccaggagcggctttgaaatgatttgggatccaaatgggtggactggaacggacagtaact

SEQ ID NO: 53259 - DNA, 60 bp, Artificial
  Synthetic oligonucleotide
caatagccagtcttgttaaaggtgatcagatttgcattggttaccatgcaaacaactcga

SEQ ID NO: 53260 - DNA, 60 bp, Artificial
  Synthetic oligonucleotide
ttggaatttccagtatggtggaggccatggtgtctagggcccgaattgatgcacgaattg

SEQ ID NO: 53261 - DNA, 60 bp, Artificial
  Synthetic oligonucleotide
gagaggggaaaattgttcacattagcccattgtcaggaagtgctcagcatgtggaggaat

SEQ ID NO: 53262 - DNA, 60 bp, Artificial
  Synthetic oligonucleotide
tgtccgcaaacaatttgcagaccaagaactgggtgatgccccatttctagaccggctccg

SEQ ID NO: 53263 - DNA, 60 bp, Artificial
  Synthetic oligonucleotide
cagtgaactgagcaatcttgcaaaaggggagaaagctaatgtgctgatagggcaaggaga

SEQ ID NO: 53264 - DNA, 60 bp, Artificial
  Synthetic oligonucleotide
caatgaactgagcaatcttgcaaaaggggagaaagctaatgtgctgatagggcaaggaga

SEQ ID NO: 53265 - DNA, 60 bp, Artificial
  Synthetic oligonucleotide
aatgaactgagcaatcttgcaaaaggggagaaagctaatgtgctgatagggcaaggagac

SEQ ID NO: 53266 - DNA, 60 bp, Artificial
  Synthetic oligonucleotide
tgcatctccacaactcgaggggttttcagctgaatcaagaaaattgcttctcattgttca

SEQ ID NO: 53267 - DNA, 60 bp, Artificial
  Synthetic oligonucleotide
gcatctccacaactcgaggggttttcagctgaatcaagaaaattgcttctcattgctcag

SEQ ID NO: 53268 - DNA, 60 bp, Artificial
  Synthetic oligonucleotide
tgttgggagaatggttggtggaatcggaaggttctacatacagatgtgcactgaactcaa

SEQ ID NO: 53269 - DNA, 60 bp, Artificial
  Synthetic oligonucleotide
ggagaatggtcggtggaatcggaaaattctacatacagatgtgcactgaactcaaactca

SEQ ID NO: 53270 - DNA, 60 bp, Artificial
  Synthetic oligonucleotide
gggagaatggttggtggaatcggaagattctacatacagatgtgcactgaactcaaactc

SEQ ID NO: 53271 - DNA, 60 bp, Artificial
  Synthetic oligonucleotide
ggccgccagacctatgactggacattgaatagaaaccagccggctgcaactgctttggcc

SEQ ID NO: 53272 - DNA, 60 bp, Artificial
  Synthetic oligonucleotide
ttattcgactgtcgcctcatctcttgtgattgcaatggggtttgctgccttcttgttctg

SEQ ID NO: 53273 - DNA, 60 bp, Artificial
  Synthetic oligonucleotide
gttcatacaggagaccggttgggatttccagcatggtggaggccatggtgtctagggccc

SEQ ID NO: 53274 - DNA, 55 bp, Artificial
  Synthetic oligonucleotide
cttcctttgacatgagtaacgaaggatcttatttcttcggagacaatgcagagga

SEQ ID NO: 53275 - DNA, 60 bp, Artificial
  Synthetic oligonucleotide
ggccagttggaatttccagcatggtggaggccatggtatctagggcccgaattgatgcac

SEQ ID NO: 53276 - DNA, 60 bp, Artificial
  Synthetic oligonucleotide
ttggaatttccagcatggtggaggccatggtatctagggcccgaattgatgcacgaattg

SEQ ID NO: 53277 - DNA, 60 bp, Artificial
  Synthetic oligonucleotide
gccagttggaatttccagcatggtggaggccatggtatctagggcccgaattgatgcacg

SEQ ID NO: 53278 - DNA, 60 bp, Artificial
  Synthetic oligonucleotide
cacagatcttgaggctctcatggaatggctaaagacaagaccaatcctgtcacctctgac

SEQ ID NO: 53279 - DNA, 60 bp, Artificial
  Synthetic oligonucleotide
atagatggcacagcctcactgagtcctggaatgatgatgggcatgttcaacatgctgagt

SEQ ID NO: 53280 - DNA, 60 bp, Artificial
  Synthetic oligonucleotide
ggtattgaaaccaggtcagacattgcgagtaagatccaatgggaatctaattgctccatg

SEQ ID NO: 53281 - DNA, 60 bp, Artificial
  Synthetic oligonucleotide
tcctcaccatttattcgactgtcgcctcatctcttgtgattgcaatggggtttgctgcct

SEQ ID NO: 53282 - DNA, 60 bp, Artificial
  Synthetic oligonucleotide
ctcaccatttattcgactgtcgcctcatctcttgtgattgcaatggggtttgctgccttc

SEQ ID NO: 53283 - DNA, 60 bp, Artificial
  Synthetic oligonucleotide
tccgcaaacgatttgcagaccaagaactgggtgatgccccattccttgaccggcttcgcc

SEQ ID NO: 53284 - DNA, 60 bp, Artificial
  Synthetic oligonucleotide
tggaccatatggccataatcaagaagtacacatcaggaagacaagagaagaaccctgctc

SEQ ID NO: 53285 - DNA, 60 bp, Artificial
  Synthetic oligonucleotide
gaaagaacacagatcttgaggctctcatggaatggctaaagacaagaccaatcctgtcac

SEQ ID NO: 53286 - DNA, 60 bp, Artificial
  Synthetic oligonucleotide
ggaagaacacagatcttgaggctctcatggaatggctaaagacaagaccaatcctgtcac

SEQ ID NO: 53287 - DNA, 60 bp, Artificial
  Synthetic oligonucleotide
acacagatcttgaggcactcatggaatggctaaagacaagaccaatcctgtcacctctga

SEQ ID NO: 53288 - DNA, 60 bp, Artificial
  Synthetic oligonucleotide
caactattgcttgaagtggagcaagagataagaactttctcgtttcagcttatttaatga

SEQ ID NO: 53289 - DNA, 60 bp, Artificial
  Synthetic oligonucleotide
tgtgcatggcatggtccagctcaagctgccatgatgggaaggcatggttacatgtttgtg

SEQ ID NO: 53290 - DNA, 60 bp, Artificial
  Synthetic oligonucleotide
tgtgcatagcatggtccagctcaagctgccatgatgggaaggcatggttacatgtttgtg

SEQ ID NO: 53291 - DNA, 60 bp, Artificial
  Synthetic oligonucleotide
catggcatggtccagctcaagctgccatgatgggaaggcatggttacatgtttgtgtcac

SEQ ID NO: 53292 - DNA, 60 bp, Artificial
  Synthetic oligonucleotide
gcgtacagggatggaccccaggatgtgctctctgatgcaaggatcaactctcccgagaag

SEQ ID NO: 53293 - DNA, 60 bp, Artificial
  Synthetic oligonucleotide
acagtagcttttcggtgaagcaagatatcgtagcaataactgattggtcaggatatagcg

SEQ ID NO: 53294 - DNA, 60 bp, Artificial
  Synthetic oligonucleotide
tcagtcgaattggatgctcctaattatcactatgaggagtgctcctgttatcctgatgcc

SEQ ID NO: 53295 - DNA, 60 bp, Artificial
  Synthetic oligonucleotide
taaatagtgacactgtgggttggtcttggccagacggtgctgagttgccattcaccattg

SEQ ID NO: 53296 - DNA, 60 bp, Artificial
  Synthetic oligonucleotide
catgtttgtgtcactggggatgatagaaatgcgactgctagcatcatttatgatgggatg

SEQ ID NO: 53297 - DNA, 60 bp, Artificial
  Synthetic oligonucleotide
gtgtcactggggatgatagaaatgcgactgctagcatcatttatgatgggatgcttaccg

SEQ ID NO: 53298 - DNA, 60 bp, Artificial
  Synthetic oligonucleotide
gtgtcactggggatgatagaaatgcgactgctagcattatttatgatgggatgcttaccg

SEQ ID NO: 53299 - DNA, 60 bp, Artificial
  Synthetic oligonucleotide
catgcttgtgtcactggggatgatagaaatgcgactgctagcattatttatgatgggatg

SEQ ID NO: 53300 - DNA, 60 bp, Artificial
  Synthetic oligonucleotide
gatgggaaagcatggttacatgtttgtgtcactggggatgatagaaatgcgactgctagc

SEQ ID NO: 53301 - DNA, 60 bp, Artificial
  Synthetic oligonucleotide
catgtttgtgtcactggggatgatagaaatgcgactgctagcttcatttatgatgggatg

SEQ ID NO: 53302 - DNA, 60 bp, Artificial
  Synthetic oligonucleotide
catgcttgtgtcactggggatgatagaaatgcgactgctagcatcatttatgatgggatg

SEQ ID NO: 53303 - DNA, 60 bp, Artificial
  Synthetic oligonucleotide
gaaacgggactctagcatacttactgacagccagacagcgaccaaaagaattcggatggc

SEQ ID NO: 53304 - DNA, 60 bp, Artificial
  Synthetic oligonucleotide
aaatcctcaccatttattcgactgtcgcctcatctcttgtgattgcaatggggtttgctg

SEQ ID NO: 53305 - DNA, 60 bp, Artificial
  Synthetic oligonucleotide
caggccaaacattgcgagtaagatccaatgggaatctaattgctccatggtatggacacg

SEQ ID NO: 53306 - DNA, 60 bp, Artificial
  Synthetic oligonucleotide
tgcttgccatgatggcaccagttggttgaccattggaatttctggtccagacaatggggc

SEQ ID NO: 53307 - DNA, 60 bp, Artificial
  Synthetic oligonucleotide
ccatgatggcaccagttggttgaccattggaatttctggtccagacaatggggctgtggc

SEQ ID NO: 53308 - DNA, 60 bp, Artificial
  Synthetic oligonucleotide
ttgacaattggaatttctggtccagacaatggggctgtggctgtgttgaaatacaatggc

SEQ ID NO: 53309 - DNA, 60 bp, Artificial
  Synthetic oligonucleotide
tgctgccttcttgttctgggccatgtccaatggatcttgcagatgcaacatttgtatata

SEQ ID NO: 53310 - DNA, 60 bp, Artificial
  Synthetic oligonucleotide
gctgccttcttgttctgggccatgtccaatggatcttgcagatgcaacatttgtatataa

SEQ ID NO: 53311 - DNA, 60 bp, Artificial
  Synthetic oligonucleotide
acgtacgttctctctatcatcccatcaggccccctcaaagccgagatcgcgcagagactt

SEQ ID NO: 53312 - DNA, 60 bp, Artificial
  Synthetic oligonucleotide
gagctctcgtgcgtactgggatggaccccagaatgtgctctctgatgcaaggatcaactc

SEQ ID NO: 53313 - DNA, 60 bp, Artificial
  Synthetic oligonucleotide
aagagctctcgtgcgtactgggatggaccccagaatgtgctctctgatgcaaggatcaac

SEQ ID NO: 53314 - DNA, 60 bp, Artificial
  Synthetic oligonucleotide
tgaaagagtatggggaagatccgaaaatcgaaacgaacaaatttgctgcaatatgcacac

SEQ ID NO: 53315 - DNA, 60 bp, Artificial
  Synthetic oligonucleotide
tgtcgcagtctcgcactcgcgagatactgacaaaaaccacggtggaccatatggccataa

SEQ ID NO: 53316 - DNA, 54 bp, Artificial
  Synthetic oligonucleotide
attcttctaaccgaggtcgaaacgtacgttctctctatcatcccatcaggcccc

SEQ ID NO: 53317 - DNA, 60 bp, Artificial
  Synthetic oligonucleotide
gtgctctctgatgcaaggatcaactctcccgagaagatctggagctgctggtgcagcagt

SEQ ID NO: 53318 - DNA, 60 bp, Artificial
  Synthetic oligonucleotide
agaggtacaccaaaaccacatactggtgggacggactccaatcctctgatgatttcgccc

SEQ ID NO: 53319 - DNA, 60 bp, Artificial
  Synthetic oligonucleotide
aaccaaaagcaccagctccaggagcggctttgaaatgatttgggatccaaatgggtggac

SEQ ID NO: 53320 - DNA, 60 bp, Artificial
  Synthetic oligonucleotide
tgcatcttcacaactcgaggggttttcagctgaatcaagaaagttgcttctcattgctca

SEQ ID NO: 53321 - DNA, 60 bp, Artificial
  Synthetic oligonucleotide
ggtccagttcaagctgtcatgatgggagggcatggttacatgtttgtgtcactggggatg

SEQ ID NO: 53322 - DNA, 60 bp, Artificial
  Synthetic oligonucleotide
tgtccgcaaacgatttgcagaccaagaactgggtgatgccccatttctagaccggcttcg

SEQ ID NO: 53323 - DNA, 60 bp, Artificial
  Synthetic oligonucleotide
cctgctagatcaagtagaggactatttggggccatagctggattcatagagggaggttgg

SEQ ID NO: 53324 - DNA, 60 bp, Artificial
  Synthetic oligonucleotide
gaaagaggcaaattgaagaggcgagcaattgcaacacccggaatgcaaatcagaggattc

SEQ ID NO: 53325 - DNA, 60 bp, Artificial
  Synthetic oligonucleotide
tgcagaaagaggcaaattgaagaggcgagcaattgcaacacccggaatgcaaatcagagg

SEQ ID NO: 53326 - DNA, 60 bp, Artificial
  Synthetic oligonucleotide
gaaagaggcaaattgaagaggcgagcgattgcaacacccggaatgcaaatcagaggattc

SEQ ID NO: 53327 - DNA, 60 bp, Artificial
  Synthetic oligonucleotide
gcagaaagaggcaaattgaaaaggcgggccattgcaacacccggaatgcaaatcagagga

SEQ ID NO: 53328 - DNA, 60 bp, Artificial
  Synthetic oligonucleotide
ttgctccacacagagcacaatgggatgctgtgtgcaacaaatctgggacatcctcttatt

SEQ ID NO: 53329 - DNA, 60 bp, Artificial
  Synthetic oligonucleotide
ctccacacagagcacaatgggatgctgtgtgcaacaaatctgggacatcctcttattcta

SEQ ID NO: 53330 - DNA, 60 bp, Artificial
  Synthetic oligonucleotide
ggcaaattgaaaaggcgagcaattgcaacacccggaatgcaaatcagaggattcgtgtac

SEQ ID NO: 53331 - DNA, 60 bp, Artificial
  Synthetic oligonucleotide
gaaagaggcaaattgaaaaggcgagcaattgcaacacccggaatgcaaatcagaggattc

SEQ ID NO: 53332 - DNA, 60 bp, Artificial
  Synthetic oligonucleotide
ttacaaaatcctcaccatttattcgactgtcgcctcatctcttgtgcttgcaatggggtt

SEQ ID NO: 53333 - DNA, 60 bp, Artificial
  Synthetic oligonucleotide
tccctcactgacccgaggcttgaaccgcacaaatgggagaagtactgtgttcttgaaata

SEQ ID NO: 53334 - DNA, 50 bp, Artificial
  Synthetic oligonucleotide
gtattgataggacaaggagacgtagtgttggtaatgaaacggaaacggga

SEQ ID NO: 53335 - DNA, 60 bp, Artificial
  Synthetic oligonucleotide
attaatgatccctgggttttgcttaatgcatcttggtttaactccttcctcacacatgca

SEQ ID NO: 53336 - DNA, 60 bp, Artificial
  Synthetic oligonucleotide
taatgatccctgggttttgcttaatgcatcttggtttaactccttcctcacacatgcact

SEQ ID NO: 53337 - DNA, 60 bp, Artificial
  Synthetic oligonucleotide
ccatttattcgactgtcgcctcatctcttgtgcttgcaatggggtttgctgccttcctgt

SEQ ID NO: 53338 - DNA, 60 bp, Artificial
  Synthetic oligonucleotide
ccaataaggtcaactcgatcattgacaaaatgaacactcagtttgaggccattggaaggg

SEQ ID NO: 53339 - DNA, 60 bp, Artificial
  Synthetic oligonucleotide
catcaatgaactgagcaatcttgcgaaaggagagaaagctaatgtgctgatagggcaagg

SEQ ID NO: 53340 - DNA, 60 bp, Artificial
  Synthetic oligonucleotide
gccccaggagtgaaagggtgggcctttgacagtggaaatgacatttggatgggaagaacg

SEQ ID NO: 53341 - DNA, 60 bp, Artificial
  Synthetic oligonucleotide
tatttggagccatagctggattcatagaaggaggttggccaggactagtagctggttggt

SEQ ID NO: 53342 - DNA, 60 bp, Artificial
  Synthetic oligonucleotide
gcgtactgggatggaccccaggatgtgctctctgatgcaaggatcaactctcccgaggag

SEQ ID NO: 53343 - DNA, 60 bp, Artificial
  Synthetic oligonucleotide
tggggtttgctgccttcttgttctgggccatgtccaatggatcttgcagatgcaacattt

SEQ ID NO: 53344 - DNA, 60 bp, Artificial
  Synthetic oligonucleotide
atggggtttgctgccttcttgttctgggccatgtccaatggatcttgcagatgcaacatt

SEQ ID NO: 53345 - DNA, 60 bp, Artificial
  Synthetic oligonucleotide
ggggtttgctgccttcttgttctgggccatgtccaatggatcttgcagatgcaacatttg

SEQ ID NO: 53346 - DNA, 60 bp, Artificial
  Synthetic oligonucleotide
ggaagattctacatacagatgtgcactgaactcaaactcagcgactacgaaggcaggctg

SEQ ID NO: 53347 - DNA, 60 bp, Artificial
  Synthetic oligonucleotide
taacgatccctgggttttgcttaatgcatcttggttcaactccttcctcacacatgcact

SEQ ID NO: 53348 - DNA, 60 bp, Artificial
  Synthetic oligonucleotide
taatgatccctgggttttgcttaatgcatcttggttcaactccttcctcacacatgcact

SEQ ID NO: 53349 - DNA, 60 bp, Artificial
  Synthetic oligonucleotide
aatgatccctgggttttgcttaatgcatcttggttcaactccttcctcacacatgcactg

SEQ ID NO: 53350 - DNA, 60 bp, Artificial
  Synthetic oligonucleotide
attaatgatccctgggttttgcttaatgcatcttggttcaactccttcctcacacatgca

SEQ ID NO: 53351 - DNA, 58 bp, Artificial
  Synthetic oligonucleotide
taacgatccctgggttttgcttaatgcatcttggttcaactccttcctcacacatgca

SEQ ID NO: 53352 - DNA, 60 bp, Artificial
  Synthetic oligonucleotide
ttattcgactgtcgcctcatctcttgttattgcaatggggtttgctgccttcttgttctg

SEQ ID NO: 53353 - DNA, 60 bp, Artificial
  Synthetic oligonucleotide
atagaaggggtcaagctggaatctgagggaacttacaaaatcctcaccatttattcgact

SEQ ID NO: 53354 - DNA, 60 bp, Artificial
  Synthetic oligonucleotide
ctgtgtcaagcttccaggtagactgctttctttggcatgtccgcaaacaatttgcagacc

SEQ ID NO: 53355 - DNA, 60 bp, Artificial
  Synthetic oligonucleotide
ataacatttatgcaagccttacaactattgcttgaagtggagcaagagataagaactttc

SEQ ID NO: 53356 - DNA, 60 bp, Artificial
  Synthetic oligonucleotide
aataacatttatgcaagccttacaactattgcttgaagtggagcaagagataagaacttt

SEQ ID NO: 53357 - DNA, 60 bp, Artificial
  Synthetic oligonucleotide
acatttatgcaagccttacaactattgcttgaagtggagcaagagataagaactttctcg

SEQ ID NO: 53358 - DNA, 60 bp, Artificial
  Synthetic oligonucleotide
ataacgtttatgcaagccttacaactattgcttgaagtggagcaagagataagaactttc

SEQ ID NO: 53359 - DNA, 60 bp, Artificial
  Synthetic oligonucleotide
acctttatgcaagccttacaactattgcttgaagtggagcaagagataagaactttctcg

SEQ ID NO: 53360 - DNA, 60 bp, Artificial
  Synthetic oligonucleotide
gtgttggaagcaatggctttccttgaagaatcccacccagggatctttgaaaactcgtgt

SEQ ID NO: 53361 - DNA, 60 bp, Artificial
  Synthetic oligonucleotide
accgctgtatgatgcaatcaaatgcatgaaaacatttttcggctggaaagagcccaacat

SEQ ID NO: 53362 - DNA, 60 bp, Artificial
  Synthetic oligonucleotide
gtatcagcagacccattggcatctctattggagatgtgccacagcacacagattggtgga

SEQ ID NO: 53363 - DNA, 60 bp, Artificial
  Synthetic oligonucleotide
agaccactgtggaccatatggccataattaagaaatacacatcaggaagacaggagaaga

SEQ ID NO: 53364 - DNA, 60 bp, Artificial
  Synthetic oligonucleotide
acataagagtcaactggtatggatggcatgtcattctgcagcatttgaagacctgagagt

SEQ ID NO: 53365 - DNA, 60 bp, Artificial
  Synthetic oligonucleotide
ggaagattctacatacagatgtgcactgaactcaaacttagcgactacgaaggcaggctg

SEQ ID NO: 53366 - DNA, 60 bp, Artificial
  Synthetic oligonucleotide
caaacagcagcacaacgagcaatgatggaccaagtgcgagaaagcaggaatcctggtaat

SEQ ID NO: 53367 - DNA, 60 bp, Artificial
  Synthetic oligonucleotide
gcaagccttgcaactactgcttgaagtggagcaagagataagaactttctcgtttcagct

SEQ ID NO: 53368 - DNA, 60 bp, Artificial
  Synthetic oligonucleotide
agccttacaactactgcttgaagtggagcaagagataagaactttctcgtttcagcttat

SEQ ID NO: 53369 - DNA, 60 bp, Artificial
  Synthetic oligonucleotide
gccttacaactactgcttgaagtggagcaagagataagaactttctcgtttcagcttatt

SEQ ID NO: 53370 - DNA, 60 bp, Artificial
  Synthetic oligonucleotide
ctgaaggaacttacaaaatcctcactatttattcgactgtcgcctcatctcttgtgattg

SEQ ID NO: 53371 - DNA, 60 bp, Artificial
  Synthetic oligonucleotide
tggaatcaataggaacttaccaaatattgtcaatttattcaacagtggcgagttccctag

SEQ ID NO: 53372 - DNA, 60 bp, Artificial
  Synthetic oligonucleotide
tgcaagccttacaactattgcttgaagtggagcaagagataagaactttctcgtttcagc

SEQ ID NO: 53373 - DNA, 60 bp, Artificial
  Synthetic oligonucleotide
agctaatgtgctgatagggcaaggagacgtagtgttggtaatgaaacggaaacgggactc

SEQ ID NO: 53374 - DNA, 55 bp, Artificial
  Synthetic oligonucleotide
acggaaacgggactcaagcatacttactgacagccagacagcgaccaaaagaatt

SEQ ID NO: 53375 - DNA, 60 bp, Artificial
  Synthetic oligonucleotide
acggaaacgggattctagcatacttactgacagccagacagcgaccaaaagaattcggat

SEQ ID NO: 53376 - DNA, 60 bp, Artificial
  Synthetic oligonucleotide
tgcattgagtcctggaatgatgatgggcatgttcaacatgctgagtacagtcttaggagt

SEQ ID NO: 53377 - DNA, 60 bp, Artificial
  Synthetic oligonucleotide
ataacatttatgcaagccttgcaactactgcttgaagtggagcaagagataagaactttc

SEQ ID NO: 53378 - DNA, 60 bp, Artificial
  Synthetic oligonucleotide
ggattgaaaagagggccttctacggaaggagtgcctgagtctatgagggaagaatatcgg

SEQ ID NO: 53379 - DNA, 60 bp, Artificial
  Synthetic oligonucleotide
ctccctttgatgacaggctcagaagagaccaaaaggcattaaagggaagaggcagcacac

SEQ ID NO: 53380 - DNA, 60 bp, Artificial
  Synthetic oligonucleotide
cgtcctggaagcgatggctttccttgaagaatcccacccagggatctttgaaaactcgtg

SEQ ID NO: 53381 - DNA, 53 bp, Artificial
  Synthetic oligonucleotide
tcttgttctgggccatgtccaatggatcttgcagatgcaacatttgtatatga

SEQ ID NO: 53382 - DNA, 60 bp, Artificial
  Synthetic oligonucleotide
gtggaatcggaagattctacatacagatgtgcactgaactcaaactcagcgactatgaaa

SEQ ID NO: 53383 - DNA, 60 bp, Artificial
  Synthetic oligonucleotide
gtggaatcggaagattctacatacagatgtgcactgaactcaaactcagcgactacgaag

SEQ ID NO: 53384 - DNA, 59 bp, Artificial
  Synthetic oligonucleotide
cattgttaggagagcaacagtatcagcagacccattggcttcgctattggagatgtgcc

SEQ ID NO: 53385 - DNA, 60 bp, Artificial
  Synthetic oligonucleotide
gaagggtatgaggaattcacaatggttgggcagagggcaacagctatcctgaggaaagca

SEQ ID NO: 53386 - DNA, 53 bp, Artificial
  Synthetic oligonucleotide
ttttgcttaatgcatcttggttcaactccttcctcacacatgcactgaaatag

SEQ ID NO: 53387 - DNA, 60 bp, Artificial
  Synthetic oligonucleotide
ggcctcttctaatagatggtacagcctcattgagccctggaatgatgatgggcatgttca

SEQ ID NO: 53388 - DNA, 60 bp, Artificial
  Synthetic oligonucleotide
gaggactgaaatcataagaatgatggaaagtgccaaaccagaagatgtgtctttccaggg

SEQ ID NO: 53389 - DNA, 60 bp, Artificial
  Synthetic oligonucleotide
acatgaggactgaaatcataagaatgatggaaagtgccaaaccagaagatgtgtctttcc

SEQ ID NO: 53390 - DNA, 60 bp, Artificial
  Synthetic oligonucleotide
atgtataaatggctcttgctttactgtaatgactgatggaccaagtaatgggcaggcatc

SEQ ID NO: 53391 - DNA, 60 bp, Artificial
  Synthetic oligonucleotide
tcaaataggatatatatgcagtggagtttttggagacaatccacgccccaatgatggaac

SEQ ID NO: 53392 - DNA, 60 bp, Artificial
  Synthetic oligonucleotide
tcaaataggatatatttgcagtggagtttttggagacaatccacgccccaatgatggaac

SEQ ID NO: 53393 - DNA, 60 bp, Artificial
  Synthetic oligonucleotide
taaatggctcttgctttactgtaatgactgatggaccaagcaatgggcaggcatcatata

SEQ ID NO: 53394 - DNA, 60 bp, Artificial
  Synthetic oligonucleotide
gtgtgaatggctcttgctttactgtaatgactgatggaccaagtagtgggcaggcatcat

SEQ ID NO: 53395 - DNA, 60 bp, Artificial
  Synthetic oligonucleotide
tgagaactcaagagtctgaatgtgcatgtgtaaatggctcttgctttactgtaatgactg

SEQ ID NO: 53396 - DNA, 60 bp, Artificial
  Synthetic oligonucleotide
atgtgtgaatggctcttgctttactgtaatgactgatggaccaagtagtgggcaggcatc

SEQ ID NO: 53397 - DNA, 60 bp, Artificial
  Synthetic oligonucleotide
caggagcggctttgaaatgatttgggatccaaatgggtggactggaacggacagtagctt

SEQ ID NO: 53398 - DNA, 60 bp, Artificial
  Synthetic oligonucleotide
gtagcttttcggtgaagcaagatatcgtagcaataactgattggtcaggatatagcggga

SEQ ID NO: 53399 - DNA, 60 bp, Artificial
  Synthetic oligonucleotide
cacaggaacaatgcgcaggcttgccgaccaaagtctcccaccgaatttctctagccttga

SEQ ID NO: 53400 - DNA, 60 bp, Artificial
  Synthetic oligonucleotide
ccttggaccagcaacagctcagatggctcttcagctattcatcaaggactacagatacac

SEQ ID NO: 53401 - DNA, 60 bp, Artificial
  Synthetic oligonucleotide
acttattgttcaggcacttagggacaacctggaacctggaaccttcgacattgaaggact

SEQ ID NO: 53402 - DNA, 60 bp, Artificial
  Synthetic oligonucleotide
ctaattgttcaggcacttagggacaacctggaacctgggaccttcgatcttggagggctg

SEQ ID NO: 53403 - DNA, 60 bp, Artificial
  Synthetic oligonucleotide
ctcattgttcaggcacttagggacaacctggaacctggaaccttcgacattgaaggacta

SEQ ID NO: 53404 - DNA, 60 bp, Artificial
  Synthetic oligonucleotide
cctcattgttcaggcacttagggacaacctggaacctggtaccttcgatcttggagggct

SEQ ID NO: 53405 - DNA, 60 bp, Artificial
  Synthetic oligonucleotide
ctcattgttcaggcacttagggacaacctggaacctggaaccttcaacattgaaggacta

SEQ ID NO: 53406 - DNA, 60 bp, Artificial
  Synthetic oligonucleotide
tggctaaagacaagaccaatcctgtcacctctgactaaggggattttagggtttgtgttc

SEQ ID NO: 53407 - DNA, 60 bp, Artificial
  Synthetic oligonucleotide
tggctaaagacaagaccaatcctgtcacctctgactaaggggattttagggtttgtgttt

SEQ ID NO: 53408 - DNA, 60 bp, Artificial
  Synthetic oligonucleotide
ctaaagacaagaccaatcctgtcacctctgactaaggggattttagggtttgtgttcacg

SEQ ID NO: 53409 - DNA, 60 bp, Artificial
  Synthetic oligonucleotide
aatggctaaagacaagaccaatcctgtcacctctgactaaggggattttagggtttgtgt

SEQ ID NO: 53410 - DNA, 60 bp, Artificial
  Synthetic oligonucleotide
atagcatcattgtattttgtggaacctcaggtacctatggaacaggctcatggcctgatg

SEQ ID NO: 53411 - DNA, 60 bp, Artificial
  Synthetic oligonucleotide
gtggacttcaaatagcatcattgtattttgtggaacttcaggtacctatggaacaggctc

SEQ ID NO: 53412 - DNA, 60 bp, Artificial
  Synthetic oligonucleotide
ttgtgtattggaagcaatggctttccttgaagaatcccacccagggatctttgaaacctc

SEQ ID NO: 53413 - DNA, 53 bp, Artificial
  Synthetic oligonucleotide
tccaactgaggagcaagctgtggatatatgcaaagcagcaatgggtctgagaa

SEQ ID NO: 53414 - DNA, 60 bp, Artificial
  Synthetic oligonucleotide
gcgtactgggatggaccccagaatgtgctctctgatgcaaggatcaactctcccgaggag

SEQ ID NO: 53415 - DNA, 60 bp, Artificial
  Synthetic oligonucleotide
cctctattaatagatggtacagcctcattgagccctggaatgatgatgggcatgttcaac

SEQ ID NO: 53416 - DNA, 60 bp, Artificial
  Synthetic oligonucleotide
cctctattaatagatggcacagcctcattgagccctggaatgatgatgggcatgttcaac

SEQ ID NO: 53417 - DNA, 60 bp, Artificial
  Synthetic oligonucleotide
cctctattgatagatggtgcagcctcattgagccctggaatgatgatgggcatgttcaac

SEQ ID NO: 53418 - DNA, 60 bp, Artificial
  Synthetic oligonucleotide
aagacctctattgatagatggtgcagcctcattgagccctggaatgatgatgggcatgtt

SEQ ID NO: 53419 - DNA, 60 bp, Artificial
  Synthetic oligonucleotide
aagacctctattaatagatggtgcagcctcattgagccctggaatgatgatgggcatgtt

SEQ ID NO: 53420 - DNA, 60 bp, Artificial
  Synthetic oligonucleotide
aagacctctattaatagatggtacagcctcattgagccctggaatgatgatgggcatgtt

SEQ ID NO: 53421 - DNA, 60 bp, Artificial
  Synthetic oligonucleotide
agacctctattaatagatggtacagcctcattgagccctggaatgatgatgggcatgttc

SEQ ID NO: 53422 - DNA, 60 bp, Artificial
  Synthetic oligonucleotide
agacctctattaatagatggcacagcctcattgagccctggaatgatgatgggcatgttc

SEQ ID NO: 53423 - DNA, 60 bp, Artificial
  Synthetic oligonucleotide
ctcatgaacagatggaaactggtggagaacgccagaatgctactgagatcagggcatctg

SEQ ID NO: 53424 - DNA, 60 bp, Artificial
  Synthetic oligonucleotide
gtggaatcggaagattctacatacagatgtgcactgaactcaaactcagcgaccacgaag

SEQ ID NO: 53425 - DNA, 60 bp, Artificial
  Synthetic oligonucleotide
cgggattctagcatacttactgacagccagacagcgaccaaaagaattcggatggccatc

SEQ ID NO: 53426 - DNA, 60 bp, Artificial
  Synthetic oligonucleotide
ctctagcatacttactgacagccagacagcgaccaaaagaattcggatggccatcaatta

SEQ ID NO: 53427 - DNA, 60 bp, Artificial
  Synthetic oligonucleotide
caagtgggtcatctgtcaaaagagaagaggaagtgcttacaggcaacctccaaacattga

SEQ ID NO: 53428 - DNA, 60 bp, Artificial
  Synthetic oligonucleotide
caagtggatcatccgtcacgaaggaagaggaagtgcttacaggcaacctccaaacattga

SEQ ID NO: 53429 - DNA, 60 bp, Artificial
  Synthetic oligonucleotide
acaagtggatcatccgtcatgaaggaagaggaagtgcttacaggcaacctccaaacattg

SEQ ID NO: 53430 - DNA, 60 bp, Artificial
  Synthetic oligonucleotide
caagtggatcatccgtcatgaaggaagaggaagtgcttacaggcaacctccaaacattga

SEQ ID NO: 53431 - DNA, 60 bp, Artificial
  Synthetic oligonucleotide
acaagtggatcatccgtcacgaaggaagaggaagtgcttacaggcaacctccaaacattg

SEQ ID NO: 53432 - DNA, 60 bp, Artificial
  Synthetic oligonucleotide
acaagtgggtcatctgtcaaaagagaagaggaagtgcttacaggcaacctccaaacattg

SEQ ID NO: 53433 - DNA, 60 bp, Artificial
  Synthetic oligonucleotide
ctggaaccttcgacattggaggactatatgaagcaattgaggagtgcctgattaatgatc

SEQ ID NO: 53434 - DNA, 60 bp, Artificial
  Synthetic oligonucleotide
ctggaaccttcgacattgaaggactatatgaagcaattgaggagtgcctgattaatgatc

SEQ ID NO: 53435 - DNA, 60 bp, Artificial
  Synthetic oligonucleotide
tggttggtggaatcggaagattctacatacagatgtgcactgaactcaaactcagcgact

SEQ ID NO: 53436 - DNA, 60 bp, Artificial
  Synthetic oligonucleotide
gattccagttatgtgtgctcaggacttgttggcgacacaccaagaaatgatgatagatct

SEQ ID NO: 53437 - DNA, 60 bp, Artificial
  Synthetic oligonucleotide
tttcaggtagactgctttctttggcatgtccgcaaaagatttgcagaccaagaactgggt

SEQ ID NO: 53438 - DNA, 60 bp, Artificial
  Synthetic oligonucleotide
agctttcaggtagactgctttctttggcatgtccgcaaacgttttgcagaccaagaaatg

SEQ ID NO: 53439 - DNA, 60 bp, Artificial
  Synthetic oligonucleotide
gctttcaggtagactgctttctttggcatgtccgcaaaagatttgcagaccaagaactgg

SEQ ID NO: 53440 - DNA, 60 bp, Artificial
  Synthetic oligonucleotide
gggatcccaataacgagagaggggccccaggagtgaaagggtgggcctttgacaatggaa

SEQ ID NO: 53441 - DNA, 60 bp, Artificial
  Synthetic oligonucleotide
ctaataacgagagaggggccccaggagtgaaagggtgggcctttgacaatggagatgaca

SEQ ID NO: 53442 - DNA, 60 bp, Artificial
  Synthetic oligonucleotide
gctgccttcttgttctgggccatgtccaatggatcttgcaggtgcaacatttgtatataa

SEQ ID NO: 53443 - DNA, 60 bp, Artificial
  Synthetic oligonucleotide
caattattgtagcaatggtgttctcacaggaggagtgcatgataaaggcagtccgtggcg

SEQ ID NO: 53444 - DNA, 60 bp, Artificial
  Synthetic oligonucleotide
tccatagtagcccattgtcaggaagtgctcagcatgtagaggaatgttcctgttatcccc

SEQ ID NO: 53445 - DNA, 60 bp, Artificial
  Synthetic oligonucleotide
ggagaaccgattcattgaaattggagtgacacggagggaagttcacatatactatctaga

SEQ ID NO: 53446 - DNA, 60 bp, Artificial
  Synthetic oligonucleotide
ccaggtcagacattgcgagtaagatccgatgggaatctaattgctccatggtatggacac

SEQ ID NO: 53447 - DNA, 60 bp, Artificial
  Synthetic oligonucleotide
cggtttgcagaccaagaactgggtgatgccccatttctagaccggcttcgccgggatcag

SEQ ID NO: 53448 - DNA, 60 bp, Artificial
  Synthetic oligonucleotide
caaacgatttgcagaccaagaactgggtgatgccccatttctagaccggcttcgccgaga

SEQ ID NO: 53449 - DNA, 60 bp, Artificial
  Synthetic oligonucleotide
aaacgatttgcagaccaagaactgggtgatgccccatttctagaccggcttcgccgggat

SEQ ID NO: 53450 - DNA, 60 bp, Artificial
  Synthetic oligonucleotide
gcaaacgatttgcagaccaagaactgggtgatgccccatttctagaccggcttcgccggg

SEQ ID NO: 53451 - DNA, 60 bp, Artificial
  Synthetic oligonucleotide
gcaaacggtttgcagaccaagaactgggtgatgccccatttctagaccggcttcgccggg

SEQ ID NO: 53452 - DNA, 60 bp, Artificial
  Synthetic oligonucleotide
ccgcaaacgatttgcagaccaagaactgggtgatgccccatttctagaccggcttcgccg

SEQ ID NO: 53453 - DNA, 60 bp, Artificial
  Synthetic oligonucleotide
cgatttgcagaccaagaactgggtgatgccccatttctagaccggcttcgccgggatcag

SEQ ID NO: 53454 - DNA, 60 bp, Artificial
  Synthetic oligonucleotide
ccaggccagacattgcgagtaagatccaatgggaatctaattgctccatggtatgggcac

SEQ ID NO: 53455 - DNA, 60 bp, Artificial
  Synthetic oligonucleotide
ctggggacaacaccaaatggaatgagaatcagaatcctcgagtgtttctagcgatgataa

SEQ ID NO: 53456 - DNA, 60 bp, Artificial
  Synthetic oligonucleotide
gcaatggggtttgctgccttccttttctgggccatgtccaatggatcttgcagatgcaac

SEQ ID NO: 53457 - DNA, 60 bp, Artificial
  Synthetic oligonucleotide
actgagaagcagatactgggctataaggaccaggagtggaggaaacaccaaccaacatag

SEQ ID NO: 53458 - DNA, 60 bp, Artificial
  Synthetic oligonucleotide
caaaattctcaccatttattcgactgtcgcctcatctcttgtgcttgcaatagggtttgc

SEQ ID NO: 53459 - DNA, 60 bp, Artificial
  Synthetic oligonucleotide
ggagccatagctggattcatagaaggaggttggccaggactagtagctggttggtatggt

SEQ ID NO: 53460 - DNA, 60 bp, Artificial
  Synthetic oligonucleotide
ttggtgctatagctggattcatagaaggaggttggccaggactagttgctggctggtatg

SEQ ID NO: 53461 - DNA, 58 bp, Artificial
  Synthetic oligonucleotide
ttggtgctatagctggattcatagaaggaggttggccaggactagttgctggctggta

SEQ ID NO: 53462 - DNA, 60 bp, Artificial
  Synthetic oligonucleotide
ggtgctatagctggattcatagaaggaggttggccaggactagttgctggctggtatgga

SEQ ID NO: 53463 - DNA, 60 bp, Artificial
  Synthetic oligonucleotide
ggtgccatagctggattcatagaaggaggttggccagggctagttgccggctggtacggt

SEQ ID NO: 53464 - DNA, 60 bp, Artificial
  Synthetic oligonucleotide
tgtccgcaaacgatttgcagaccaagaactgggtgatgccccatttctagaccggctccg

SEQ ID NO: 53465 - DNA, 60 bp, Artificial
  Synthetic oligonucleotide
ttataaaaggaagatcccatttgagaaatgacaccgatgtggtaaactttgtgagcatgg

SEQ ID NO: 53466 - DNA, 60 bp, Artificial
  Synthetic oligonucleotide
cactccctccaaagcagaaacgctacatggcgagaagagttgagtcagaagtttgaagaa

SEQ ID NO: 53467 - DNA, 60 bp, Artificial
  Synthetic oligonucleotide
gtacacattagcccattgtcagggagtgctcagcatgtggaggaatgctcctgttacccc

SEQ ID NO: 53468 - DNA, 60 bp, Artificial
  Synthetic oligonucleotide
gatggagtgaagcctctaattttaagagattgtagtgtagctggatggctcctcgggaac

SEQ ID NO: 53469 - DNA, 60 bp, Artificial
  Synthetic oligonucleotide
cctctgttacccagggagtttcaacgactatgaagaactgaaacacctattgagcagaat

SEQ ID NO: 53470 - DNA, 60 bp, Artificial
  Synthetic oligonucleotide
acctctgttacccagggagtttcaacgactatgaagaactgaaacacctattgagcagaa

SEQ ID NO: 53471 - DNA, 60 bp, Artificial
  Synthetic oligonucleotide
gacctctgttatccagggagtttcaacgactatgaagaactgaaacacctattgagcaga

SEQ ID NO: 53472 - DNA, 60 bp, Artificial
  Synthetic oligonucleotide
gattccaacacgataacctcgtttcaggtagattgttatctctggcacgtaagaaagcta

SEQ ID NO: 53473 - DNA, 60 bp, Artificial
  Synthetic oligonucleotide
tccaacacgataacctcgtttcaggtagattgctatctatggcacataagaaagctgctc

SEQ ID NO: 53474 - DNA, 60 bp, Artificial
  Synthetic oligonucleotide
ggactccaacacgataacctcgtttcaggtagattgctatctatggcacataagaaagct

SEQ ID NO: 53475 - DNA, 60 bp, Artificial
  Synthetic oligonucleotide
aaacgatttgcagaccaagaactgggtgatgccccattccttgaccggcttcgtcgagat

SEQ ID NO: 53476 - DNA, 60 bp, Artificial
  Synthetic oligonucleotide
cctagatggagtaaagcctctaattttgagagattgtagtgtagctggatggctcctcgg

SEQ ID NO: 53477 - DNA, 60 bp, Artificial
  Synthetic oligonucleotide
tctagatggagtgaagcctctaattttaaaagattgtagtgtagctggatggctcctcgg

SEQ ID NO: 53478 - DNA, 60 bp, Artificial
  Synthetic oligonucleotide
cttcctttgacatgaataacgaaggatcttatttcttcggagacaatgcagaggagtatg

SEQ ID NO: 53479 - DNA, 58 bp, Artificial
  Synthetic oligonucleotide
cttcctttgacatgagtaacgaaggatcttatttcttcggagacaatgcagaggagta

SEQ ID NO: 53480 - DNA, 60 bp, Artificial
  Synthetic oligonucleotide
cttcctttgacatgagtaacgaaggatcttatttcttcggagacaatgcagaggagtatg

SEQ ID NO: 53481 - DNA, 60 bp, Artificial
  Synthetic oligonucleotide
cctttgacatgagtaacgaaggatcttatttcttcggagacaatgcagaggagtatgaca

SEQ ID NO: 53482 - DNA, 60 bp, Artificial
  Synthetic oligonucleotide
caatagatggagtcaccaataaggtcaactcaatcattgacaaaatgaacactcagtttg

SEQ ID NO: 53483 - DNA, 60 bp, Artificial
  Synthetic oligonucleotide
taagatccaatgggaatctaattgctccatggtatggacacatcctttcaggagagagcc

SEQ ID NO: 53484 - DNA, 60 bp, Artificial
  Synthetic oligonucleotide
ccagcacttcatgccatgacggcatctcaaggatgtcaatctgcatgtcaggacctaata

SEQ ID NO: 53485 - DNA, 54 bp, Artificial
  Synthetic oligonucleotide
gagtctctgaaactctacagagattcgcttggagaagcagtgatgagaatgggg

SEQ ID NO: 53486 - DNA, 60 bp, Artificial
  Synthetic oligonucleotide
cggaaggagtgcctgagtctatgagggaagaatatcggcaggagcaacagggtgctgtgg

SEQ ID NO: 53487 - DNA, 60 bp, Artificial
  Synthetic oligonucleotide
cggaaggagtgcctgagtctatgagggaagaatatcggcaggagcaacagagtgctgtgg

SEQ ID NO: 53488 - DNA, 60 bp, Artificial
  Synthetic oligonucleotide
tgtgtttgcatcaatggaacttgtacagtagtaatgactgatggaagtgcatcaggaaag

SEQ ID NO: 53489 - DNA, 60 bp, Artificial
  Synthetic oligonucleotide
ctgatgatttcgccctcatagtgaatgcaccgaatcatgagggaatacaagcaggagtgg

SEQ ID NO: 53490 - DNA, 60 bp, Artificial
  Synthetic oligonucleotide
gagagtagtgtattgtggacatccaatagtatagtagcactctgtggatccaaggagcga

SEQ ID NO: 53491 - DNA, 60 bp, Artificial
  Synthetic oligonucleotide
gtagtgtattgtggacatccaatagtatagtagcactctgtggatccaaggagcgattgg

SEQ ID NO: 53492 - DNA, 60 bp, Artificial
  Synthetic oligonucleotide
tgaaggcaaaagctgcatcaataggtgtttttatgtggagttgataagaggaaggccgca

SEQ ID NO: 53493 - DNA, 60 bp, Artificial
  Synthetic oligonucleotide
cttactgacagccagacagcgaccaaaagaattcggatggccatcaattagtgtagaatt

SEQ ID NO: 53494 - DNA, 60 bp, Artificial
  Synthetic oligonucleotide
accagtcaaacaagtgtggtaccaaatattggcagtagaccatgggtgagaggccaaagc

SEQ ID NO: 53495 - DNA, 60 bp, Artificial
  Synthetic oligonucleotide
actagtcaaacaagtgtggtaccaaatattggcagtagaccatgggtgagaggccaaagc

SEQ ID NO: 53496 - DNA, 60 bp, Artificial
  Synthetic oligonucleotide
gatatccacatcatggcgtctcaaggcaccaaacgatcttatgagcagatggaaactggt

SEQ ID NO: 53497 - DNA, 60 bp, Artificial
  Synthetic oligonucleotide
ttatcagatactatcaatctattcaacagtggcgagttccctagcactggcaatcatggt

SEQ ID NO: 53498 - DNA, 60 bp, Artificial
  Synthetic oligonucleotide
caatctattcaacagtggcgagttccctagcactggcaatcatggtagctggtctatctt

SEQ ID NO: 53499 - DNA, 60 bp, Artificial
  Synthetic oligonucleotide
gacgggcaaacttgtgacatcgtcaatggtgctctgggaagcccaggctgcgatcacctg

SEQ ID NO: 53500 - DNA, 60 bp, Artificial
  Synthetic oligonucleotide
atggcccagcattgagcatcaatgaactgagcaatcttgcaaaaggagagaaggctaatg

SEQ ID NO: 53501 - DNA, 60 bp, Artificial
  Synthetic oligonucleotide
tttcatcaaatcgaaaaggaattctcagaagtagaagggagaattcaagaccttgagaaa

SEQ ID NO: 53502 - DNA, 60 bp, Artificial
  Synthetic oligonucleotide
ggaggtcgttttcccaaatgaagtgggagctagaatattgacatcagaatcgcaattgac

SEQ ID NO: 53503 - DNA, 60 bp, Artificial
  Synthetic oligonucleotide
gaccttttcgttgaacgcagcaatgctttcagcaactgttacccttatgatgtgccagat

SEQ ID NO: 53504 - DNA, 60 bp, Artificial
  Synthetic oligonucleotide
ggtgttctcacaagaggattgcatgataaaggcagtccgaggtgatctgaatttcgtaaa

SEQ ID NO: 53505 - DNA, 60 bp, Artificial
  Synthetic oligonucleotide
ccaagtagaagtcgtcactgcccaggaattagtggaatcgcaacatctaccggagttgtg

SEQ ID NO: 53506 - DNA, 60 bp, Artificial
  Synthetic oligonucleotide
cgacggcagcatgcccttatgctggagcaaacagcttctacagaaatttaatatggctgg

SEQ ID NO: 53507 - DNA, 60 bp, Artificial
  Synthetic oligonucleotide
ccaaggtatgcctttgcaatgaatagaggttctggatctggtattataatttcagataca

SEQ ID NO: 53508 - DNA, 56 bp, Artificial
  Synthetic oligonucleotide
ccaaggtatgcctttgcaatgaatagaggttctggatctggtattataatttcaga

SEQ ID NO: 53509 - DNA, 60 bp, Artificial
  Synthetic oligonucleotide
ggtgtgacggcagcatgcccttctgctggagcaaacagcttctacagaaatttaatatgg

SEQ ID NO: 53510 - DNA, 60 bp, Artificial
  Synthetic oligonucleotide
ggtacgacggcagcatgcccttatgctggagcaaacagcttctacagaaatttaatatgg

SEQ ID NO: 53511 - DNA, 60 bp, Artificial
  Synthetic oligonucleotide
gacggcagcatgcccttctgctggagcaaacagcttctacagaaatttaatatggctggt

SEQ ID NO: 53512 - DNA, 60 bp, Artificial
  Synthetic oligonucleotide
ttttgtggcacttcaggtacttatggaacaggctcatggcctgatggggcgaatatcaat

SEQ ID NO: 53513 - DNA, 60 bp, Artificial
  Synthetic oligonucleotide
tttgtggaacctcaggtacttatggaacaggctcatggcctgatggggcgaatatcaact

SEQ ID NO: 53514 - DNA, 60 bp, Artificial
  Synthetic oligonucleotide
gtattttgtggaacttcaggtacttatggaacaggctcatggcctgatggggcgaatatc

SEQ ID NO: 53515 - DNA, 60 bp, Artificial
  Synthetic oligonucleotide
tttgtggcacttcaggtacatatggaacaggctcatggcctgatggggcgaatatcaatt

SEQ ID NO: 53516 - DNA, 60 bp, Artificial
  Synthetic oligonucleotide
agagtcccacccaggaatctttgaaaactcgtgtcttgaaacgatggaagttgttcaaca

SEQ ID NO: 53517 - DNA, 60 bp, Artificial
  Synthetic oligonucleotide
catggtggaggccatggtgtctagggcccgaattgatgcacgaattgacttcgagtctgg

SEQ ID NO: 53518 - DNA, 60 bp, Artificial
  Synthetic oligonucleotide
catggtggaggccatggtgtctagggcccgaattgatgcacgaattgacttcgaatctgg

SEQ ID NO: 53519 - DNA, 60 bp, Artificial
  Synthetic oligonucleotide
gttcgagtctctgaaaatctacagagattcgcttggagaagcagtaatgaggatgggaga

SEQ ID NO: 53520 - DNA, 60 bp, Artificial
  Synthetic oligonucleotide
gcagaatgaatgcagcaacccctcgaataatcaagtagtgccatgtgaaccaatcataat

SEQ ID NO: 53521 - DNA, 60 bp, Artificial
  Synthetic oligonucleotide
aagcagaatgaatgcagcaacccctcgaataatcaagtagtgccatgtgaaccaatcata

SEQ ID NO: 53522 - DNA, 60 bp, Artificial
  Synthetic oligonucleotide
ggcaggctgatccaaaacagcataacaatagagagaatggtcctctctgcatttgatgag

SEQ ID NO: 53523 - DNA, 60 bp, Artificial
  Synthetic oligonucleotide
ggcaggctgatccaaaacagcataacaatagagagaatggtcctctctgcatttgatgaa

SEQ ID NO: 53524 - DNA, 60 bp, Artificial
  Synthetic oligonucleotide
ggcaggctgatccaaaacagcataacaatagagagaatggtcctctctgcatttggtgag

SEQ ID NO: 53525 - DNA, 60 bp, Artificial
  Synthetic oligonucleotide
attgagcatcaatgaactgagcaatcttgcaaaaggggagaaagctaatgtgctgatagg

SEQ ID NO: 53526 - DNA, 60 bp, Artificial
  Synthetic oligonucleotide
cggaaggagtgcctgagtctatgagggaagaatatcggcaggaacagcagagtgctgtgg

SEQ ID NO: 53527 - DNA, 60 bp, Artificial
  Synthetic oligonucleotide
ccaaggcaccaaacgatcttatgagcaaatggaaactggtggagaacgccagaatgccac

SEQ ID NO: 53528 - DNA, 50 bp, Artificial
  Synthetic oligonucleotide
tcatgtgggcctgccagagaggcaacattaggtgcaacatttgcatttga

SEQ ID NO: 53529 - DNA, 60 bp, Artificial
  Synthetic oligonucleotide
ttcttgttctgggccatgtccaatggatcttgcagatgcaacatttgtatataattggca

SEQ ID NO: 53530 - DNA, 60 bp, Artificial
  Synthetic oligonucleotide
gtttagagcattaataagttgggaaatggggcaagcaccaagtccatacaacgtcagagt

SEQ ID NO: 53531 - DNA, 60 bp, Artificial
  Synthetic oligonucleotide
gcaagccttacaactactgcttggagtggagcaagagataagaactttctcgtttcagct

SEQ ID NO: 53532 - DNA, 50 bp, Artificial
  Synthetic oligonucleotide
ggcgatcatggaaaagaacatcatactgaaagcgaacttcagtgtgatct

SEQ ID NO: 53533 - DNA, 60 bp, Artificial
  Synthetic oligonucleotide
cagcttctggatgtgttctaatgggtctttgcagtgcagaatatgcatctgagaccagaa

SEQ ID NO: 53534 - DNA, 60 bp, Artificial
  Synthetic oligonucleotide
gatctactcaactgtcgccagttcactagtgcttttggtctccctgggggcaatcagctt

SEQ ID NO: 53535 - DNA, 60 bp, Artificial
  Synthetic oligonucleotide
ccattaacgggattacaaacaaggtgaactctataatcgagaaaatgaacactcaattca

SEQ ID NO: 53536 - DNA, 60 bp, Artificial
  Synthetic oligonucleotide
gccattaacgggattacaaacaaggtgaactctgttatcgagaaaatgaacactcaattc

SEQ ID NO: 53537 - DNA, 60 bp, Artificial
  Synthetic oligonucleotide
actactggtcctgttatgtgcactctcagctacagatgcagacacaatatgtataggcta

SEQ ID NO: 53538 - DNA, 60 bp, Artificial
  Synthetic oligonucleotide
gtcctgttatgtgcactctcagctacagatgcagacacaatatgtataggctaccatgcg

SEQ ID NO: 53539 - DNA, 60 bp, Artificial
  Synthetic oligonucleotide
aggctaccatgcgaacaactcaaccgacactgttgacacactactcgagaagaatgtgac

SEQ ID NO: 53540 - DNA, 60 bp, Artificial
  Synthetic oligonucleotide
gtataggctaccatgcgaacaactcaaccgacactgttgacacagtactcgaaaagaacg

SEQ ID NO: 53541 - DNA, 60 bp, Artificial
  Synthetic oligonucleotide
taatagcgccatggtatgctttcgcactgagtagaggctttgggccaggtatcatcacct

SEQ ID NO: 53542 - DNA, 60 bp, Artificial
  Synthetic oligonucleotide
gaaagaagtccttgtactatggggtgttcatcacccgtctaacatagaggaccaaaagac

SEQ ID NO: 53543 - DNA, 60 bp, Artificial
  Synthetic oligonucleotide
ggactggaatgattgatggatggtatggttatcatcatcagaatgaacagggatctggct

SEQ ID NO: 53544 - DNA, 60 bp, Artificial
  Synthetic oligonucleotide
tcattgaagggggatggactggaatgattgatggatggtatggttatcatcatcagaatg

SEQ ID NO: 53545 - DNA, 60 bp, Artificial
  Synthetic oligonucleotide
agcaaaagcagggtagataatcactcaccgagtgacattcacgccatggcgctccaaggc

SEQ ID NO: 53546 - DNA, 60 bp, Artificial
  Synthetic oligonucleotide
gttgcactgcttttagccttcattttgtgggcttgtcagaacggaaacatccggtgccag

SEQ ID NO: 53547 - DNA, 60 bp, Artificial
  Synthetic oligonucleotide
caatctgtacaagaacaaccctggaagagtcactgtgtctaccaaaactagtcaaacaag

SEQ ID NO: 53548 - DNA, 60 bp, Artificial
  Synthetic oligonucleotide
gcaaaccgatctgtacaagaacaaccctggaagagtcactgtgtctactaagaccagtca

SEQ ID NO: 53549 - DNA, 60 bp, Artificial
  Synthetic oligonucleotide
caacagacacagagcaaaccgatctgtacaagaacaaccctggaagagtcactgtgtcta

SEQ ID NO: 53550 - DNA, 60 bp, Artificial
  Synthetic oligonucleotide
cgggactctagcatacttactgacagccagacagcgaccaaaagaattcggatggtcatc

SEQ ID NO: 53551 - DNA, 60 bp, Artificial
  Synthetic oligonucleotide
taaggcctcttctaatagatggtacagcctcattgagtcctggaatgatgatgggcatgt

SEQ ID NO: 53552 - DNA, 60 bp, Artificial
  Synthetic oligonucleotide
ggcacagcacatgatagaactcctcatagaacccttttaatgaatgagttgggtgttccg

SEQ ID NO: 53553 - DNA, 60 bp, Artificial
  Synthetic oligonucleotide
atgaatccaaatcagaagataataacaattggctctgtttctctaactattgcggcaata

SEQ ID NO: 53554 - DNA, 60 bp, Artificial
  Synthetic oligonucleotide
tggaccaggcgattatggataagaacatcatactgaaagcgaacttcagtgtgatcttcg

SEQ ID NO: 53555 - DNA, 60 bp, Artificial
  Synthetic oligonucleotide
gagacctaatgtcacagtcccgcacccgcgagatactaacaaaaaccactgtggaccata

SEQ ID NO: 53556 - DNA, 60 bp, Artificial
  Synthetic oligonucleotide
ccttatctttctggcacggtctgcactcattctgagaggatcagtggcccataagtcctg

SEQ ID NO: 53557 - DNA, 60 bp, Artificial
  Synthetic oligonucleotide
tagaccatatggccataatcaagaaatacacatcaggaagacaagagaagaaccctgctc

SEQ ID NO: 53558 - DNA, 60 bp, Artificial
  Synthetic oligonucleotide
gaccaaacaagtgtgcatagcatggtccagctcaagctgccatgatggaaaagcatggtt

SEQ ID NO: 53559 - DNA, 60 bp, Artificial
  Synthetic oligonucleotide
ccaaacattggcagtagaccatgggtgagaggccaaagcggcaggatcagcttctactgg

SEQ ID NO: 53560 - DNA, 60 bp, Artificial
  Synthetic oligonucleotide
gtagtaccaaacattggcagtagaccatgggtgagaggccaaagcggcaggatcagcttc

SEQ ID NO: 53561 - DNA, 60 bp, Artificial
  Synthetic oligonucleotide
gcagcaacccctcgaataatcaagtagtgccatgtgaaccaatcataatagaaaggaaca

SEQ ID NO: 53562 - DNA, 60 bp, Artificial
  Synthetic oligonucleotide
cggaggacttgaatggaatgataacacagttcgagtctctgaaactctacagagatttgc

SEQ ID NO: 53563 - DNA, 60 bp, Artificial
  Synthetic oligonucleotide
gcaggagtgaaaatgaatccaaatcagaagataatagcaattggctctgtttctctaact

SEQ ID NO: 53564 - DNA, 60 bp, Artificial
  Synthetic oligonucleotide
tggggtcctcatcggaggacttgaatggaatgataacacagttcgagtctctaaaaatct

SEQ ID NO: 53565 - DNA, 56 bp, Artificial
  Synthetic oligonucleotide
tggggtcctcatcggaggacttgaatggaatgataacacagttcgagtctctaaaa

SEQ ID NO: 53566 - DNA, 60 bp, Artificial
  Synthetic oligonucleotide
atagcatcattgtattttgtgggactccaggtacctatggaacaggctcatggcctgatg

SEQ ID NO: 53567 - DNA, 60 bp, Artificial
  Synthetic oligonucleotide
tttgtgggactccaggtacctatggaacaggctcatggcctgatggagcggatatcaact

SEQ ID NO: 53568 - DNA, 60 bp, Artificial
  Synthetic oligonucleotide
gactccaacactgtgtcaagctttcaggtagactgtttcctttggcatatccgcaaacgg

SEQ ID NO: 53569 - DNA, 58 bp, Artificial
  Synthetic oligonucleotide
tcgaatcaaaataaatcctgtcactttgacgatggggtacaaggacataatcctgtgg

SEQ ID NO: 53570 - DNA, 60 bp, Artificial
  Synthetic oligonucleotide
agaaacggaacttatgaccacaacatctacagggatgaagccatcaacaatcgaatcaaa

SEQ ID NO: 53571 - DNA, 53 bp, Artificial
  Synthetic oligonucleotide
ctgaattgctagtcgcactagagaatcagcacacaatagatgtcacagactcc

SEQ ID NO: 53572 - DNA, 60 bp, Artificial
  Synthetic oligonucleotide
gcactggctctgagccaaactgcttattctcagatcacaaatgggacaacaggaaacccc

SEQ ID NO: 53573 - DNA, 60 bp, Artificial
  Synthetic oligonucleotide
gccatcaacaatcgaatcaaaataaatcctgtcactttgacgatggggtacaaggacata

SEQ ID NO: 53574 - DNA, 60 bp, Artificial
  Synthetic oligonucleotide
gaccacaacatctacagggatgaagccatcaacaatcgaatcaaaataaatcctgtcact

SEQ ID NO: 53575 - DNA, 60 bp, Artificial
  Synthetic oligonucleotide
cccatcaagcgataatgagcaaacggatctctacaaggtggcaacagggagagtaacagt

SEQ ID NO: 53576 - DNA, 60 bp, Artificial
  Synthetic oligonucleotide
ttggttgcactggctctgagccaaactgcttattctcagatcacaaatgggacaacagga

SEQ ID NO: 53577 - DNA, 60 bp, Artificial
  Synthetic oligonucleotide
tgctttgtcttcgtggcactgattctgggatttgttctatgggcttgtcaaaacgggaat

SEQ ID NO: 53578 - DNA, 60 bp, Artificial
  Synthetic oligonucleotide
agccacactgcttattctcagatcacaaatgggacaacaggaaaccccattatatgcttg

SEQ ID NO: 53579 - DNA, 60 bp, Artificial
  Synthetic oligonucleotide
tctcagatcacaaatgggacaacaggaaaccccattatatgcttggggcatcatgcagtg

SEQ ID NO: 53580 - DNA, 60 bp, Artificial
  Synthetic oligonucleotide
gacaacaggaaaccccattatatgcttggggcaccatgcagtggaaaacggcacatctgt

SEQ ID NO: 53581 - DNA, 60 bp, Artificial
  Synthetic oligonucleotide
gcttggggcatcatgcagtggaaaacggcacatctgttaaaacactaacagacaatcacg

SEQ ID NO: 53582 - DNA, 60 bp, Artificial
  Synthetic oligonucleotide
gcagtgcttgtttgaggggcggtcgcaacagcttcttctcccggctaaactggctaacca

SEQ ID NO: 53583 - DNA, 60 bp, Artificial
  Synthetic oligonucleotide
cgagagtaaggaatcagagcggcaggataagcatctactggaccctagtaaacccagggg

SEQ ID NO: 53584 - DNA, 60 bp, Artificial
  Synthetic oligonucleotide
aacccaggggactccatcattttcaacagtattgggaatttgattgcaccaagaggccat

SEQ ID NO: 53585 - DNA, 60 bp, Artificial
  Synthetic oligonucleotide
tactggaccctagtaaacccaggggactccatcattttcaacagtattgggaatttgatt

SEQ ID NO: 53586 - DNA, 60 bp, Artificial
  Synthetic oligonucleotide
ctcagaagcatcctagcaagcagtgggagtttggagttcatcgccgaacaattcacctgg

SEQ ID NO: 53587 - DNA, 60 bp, Artificial
  Synthetic oligonucleotide
cccactgcagtagacacatgttatccattcgacgtcccagattaccagagtctcagaagc

SEQ ID NO: 53588 - DNA, 60 bp, Artificial
  Synthetic oligonucleotide
gcacagtgcttaaaagtgacaaaaggattgggtcatgcacaagcccttgcttaactgata

SEQ ID NO: 53589 - DNA, 60 bp, Artificial
  Synthetic oligonucleotide
agcccttgcttaactgataaaggttcgatccaaagtgacaaaccttttcagaatgtatca

SEQ ID NO: 53590 - DNA, 60 bp, Artificial
  Synthetic oligonucleotide
actaaactggctaaccaaagcaacaaatggaaactatggacctattaacgtcactaaaga

SEQ ID NO: 53591 - DNA, 60 bp, Artificial
  Synthetic oligonucleotide
gcaggataagcatctactggaccctagtaaacccaggggactccatcattttcaacagta

SEQ ID NO: 53592 - DNA, 60 bp, Artificial
  Synthetic oligonucleotide
ctactaagagcacagtgcttaaaagtgacaaaaggattgggtcatgcacaagcccttgct

SEQ ID NO: 53593 - DNA, 60 bp, Artificial
  Synthetic oligonucleotide
ggatcaagcagtgcttgtttgaggggcggtcgcaacagcttcttctcccggctaaactgg

SEQ ID NO: 53594 - DNA, 50 bp, Artificial
  Synthetic oligonucleotide
attcattgaaaatggttggcaaggcctgattgatgggtggtatggattca

SEQ ID NO: 53595 - DNA, 60 bp, Artificial
  Synthetic oligonucleotide
ggaactgctgcagacctgaagtcaactcaggcagccattgatcagataaatggcaagctg

SEQ ID NO: 53596 - DNA, 60 bp, Artificial
  Synthetic oligonucleotide
aggtggaaggaagaatacaagaccttgagaagtacgttgaggacactaagattgatttgt

SEQ ID NO: 53597 - DNA, 60 bp, Artificial
  Synthetic oligonucleotide
gataaaggttcgatccaaagtgacaaaccttttcagaatgtatcaaggattgctatagga

SEQ ID NO: 53598 - DNA, 60 bp, Artificial
  Synthetic oligonucleotide
tcgatccaaagtgacaaaccttttcagaatgtatcaaggattgctataggaaactgcccg

SEQ ID NO: 53599 - DNA, 59 bp, Artificial
  Synthetic oligonucleotide
gaatgtatcaaggattgctataggaaactgcccgaaatatgtaaagcaagggtccctga

SEQ ID NO: 53600 - DNA, 60 bp, Artificial
  Synthetic oligonucleotide
cgcaacatccctggcaaacaggcaaagggcttatttggggcaattgctggattcattgaa

SEQ ID NO: 53601 - DNA, 60 bp, Artificial
  Synthetic oligonucleotide
taacagacaatcacgtagaagttgtgtcagctaaagaattagttgagacgaaccacactg

SEQ ID NO: 53602 - DNA, 60 bp, Artificial
  Synthetic oligonucleotide
cgtagaagttgtgtcagctaaagaattagttgagacgaaccacactgatgaactgtgccc

SEQ ID NO: 53603 - DNA, 60 bp, Artificial
  Synthetic oligonucleotide
aaagaattagttgagacgaaacacactgatgaactgtgcccaagccccttgaagcttgtc

SEQ ID NO: 53604 - DNA, 60 bp, Artificial
  Synthetic oligonucleotide
acgaaacacactgatgaactgtgcccaagccccttgaagcttgtcgacgggcaagactgc

SEQ ID NO: 53605 - DNA, 60 bp, Artificial
  Synthetic oligonucleotide
aaccacactgatgaactgtgcccaagccccttgaagcttgtcgacgggcaagactgccac

SEQ ID NO: 53606 - DNA, 60 bp, Artificial
  Synthetic oligonucleotide
cacactgatgaactgtgcccaagccccttgaagcttgtcgacgggcaagactgccacctc

SEQ ID NO: 53607 - DNA, 60 bp, Artificial
  Synthetic oligonucleotide
ccaggctgtgaccgtttgcaggacaccacttgggatgtcttcattgaaaggcccactgca

SEQ ID NO: 53608 - DNA, 60 bp, Artificial
  Synthetic oligonucleotide
cgtggcactgattctgggatttgttctatgggcttgtcaaaacgggaatatccgatgcca

SEQ ID NO: 53609 - DNA, 60 bp, Artificial
  Synthetic oligonucleotide
cgggctcttatgtcaggctctatctctggggagtgcatcacccatcaagcgataatgagc

SEQ ID NO: 53610 - DNA, 60 bp, Artificial
  Synthetic oligonucleotide
catcacccatcaagcgataatgagcaaacggatctctacaaggtggcaacagggagagtg

SEQ ID NO: 53611 - DNA, 60 bp, Artificial
  Synthetic oligonucleotide
ccaaagcaacaaatggaaactatggacctattaacgtcactaaagaaaatacgggctctt

SEQ ID NO: 53612 - DNA, 60 bp, Artificial
  Synthetic oligonucleotide
tcactaaagaaaatacgggctcttatgtcaggctctatctctggggagtgcatcacccat

SEQ ID NO: 53613 - DNA, 60 bp, Artificial
  Synthetic oligonucleotide
gataatgagcaaacggatctctacaaggtggcaacagggagagtgacagtatctacccgc

SEQ ID NO: 53614 - DNA, 60 bp, Artificial
  Synthetic oligonucleotide
cagtattgttcccaatataggaagtagaccgagggtaaggaatcagagcggcaggataag

SEQ ID NO: 53615 - DNA, 60 bp, Artificial
  Synthetic oligonucleotide
gcacatctgttaaaacactaacagacaatcacgtggaagttgtgtcagctaaagaattag

SEQ ID NO: 53616 - DNA, 60 bp, Artificial
  Synthetic oligonucleotide
gtgacaaaaggattgggtcatgcacaagcccttgcttaactgataaaggttcgatccaaa

SEQ ID NO: 53617 - DNA, 60 bp, Artificial
  Synthetic oligonucleotide
tataggaagtagaccgagggtaaggaatcagagcggcaggataagcatctactggaccct

SEQ ID NO: 53618 - DNA, 60 bp, Artificial
  Synthetic oligonucleotide
attgatttgtggtcatacaatgctgaattgctagtcgcactagagaatcagcacacaata

SEQ ID NO: 53619 - DNA, 60 bp, Artificial
  Synthetic oligonucleotide
tttgcagcagcaccaccggagcagagcagaatgcagttttcttctctaactgtgaatgtg

SEQ ID NO: 53620 - DNA, 60 bp, Artificial
  Synthetic oligonucleotide
agcaaaagcagggtagataatcactcactgagtgacatcaaaatcatggcgtcccaaggc

SEQ ID NO: 53621 - DNA, 60 bp, Artificial
  Synthetic oligonucleotide
ggagattacgcaagactttacatatggggagttcaccatccctcaactgacacagagcaa

SEQ ID NO: 53622 - DNA, 60 bp, Artificial
  Synthetic oligonucleotide
ggaaattccaaacagcagcacaacgagcaatgatggaccaagtgcgggaaagcagaaatc

SEQ ID NO: 53623 - DNA, 60 bp, Artificial
  Synthetic oligonucleotide
atgaatccaaatcagaagataatatgcatttcagcaacaggaatgacactatccgtagta

SEQ ID NO: 53624 - DNA, 60 bp, Artificial
  Synthetic oligonucleotide
gaagataatatgcatttcagcaacaggaatgacactatcggtagtaagcctgctgatagg

SEQ ID NO: 53625 - DNA, 60 bp, Artificial
  Synthetic oligonucleotide
ccaacactgtgtcaagctttcaggtagactgctttctttggcacgtccgcaaacgatttg

SEQ ID NO: 53626 - DNA, 60 bp, Artificial
  Synthetic oligonucleotide
tacaggaggccggttggaatttccagcatggtggaggccatggtgtctagggcccggatt

SEQ ID NO: 53627 - DNA, 60 bp, Artificial
  Synthetic oligonucleotide
ggggtttgctgccttcttgttctgggccatgtccaatggatcttgcagatgcaacattcg

SEQ ID NO: 53628 - DNA, 60 bp, Artificial
  Synthetic oligonucleotide
tagtgaatgcaccaaatcatgagggaatacaagcaggagtagatagattctataggacct

SEQ ID NO: 53629 - DNA, 60 bp, Artificial
  Synthetic oligonucleotide
gagttcattgctgaggaattccaatggaacacagtcaaacaaaatgggaaatccggggca

SEQ ID NO: 53630 - DNA, 60 bp, Artificial
  Synthetic oligonucleotide
tttgagttcattgctgaggaattccaatggaacacagtcaaacaaaatgggaaatccggg

SEQ ID NO: 53631 - DNA, 60 bp, Artificial
  Synthetic oligonucleotide
agcctcattgagtcctggaatgatgatgggcatgttcaacatgctgagtacggtcttagg

SEQ ID NO: 53632 - DNA, 56 bp, Artificial
  Synthetic oligonucleotide
ttttagatgggagaaattcctggttgggaaggaccataagcaaagattcaaggtca

SEQ ID NO: 53633 - DNA, 60 bp, Artificial
  Synthetic oligonucleotide
atgggatgcttgttgacagtattggttcatggtccaaaaacatcctcagaactcaagagt

SEQ ID NO: 53634 - DNA, 60 bp, Artificial
  Synthetic oligonucleotide
gaatggtgcagaatgggatgtcttcatagagcgacccaccgctgtggacacttgttatcc

SEQ ID NO: 53635 - DNA, 60 bp, Artificial
  Synthetic oligonucleotide
ggcctcttttaatagatggcacagcctcattgagtcctggaatgatgatgggcatgttca

SEQ ID NO: 53636 - DNA, 60 bp, Artificial
  Synthetic oligonucleotide
ggccccttctaatagatggcacagcctcattgagtcctggaatgatgatgggcatgttca

SEQ ID NO: 53637 - DNA, 60 bp, Artificial
  Synthetic oligonucleotide
tgtgcatagcatggtccagctcaagttgtcatgatggaaaagcatggttacatgtttgtg

SEQ ID NO: 53638 - DNA, 60 bp, Artificial
  Synthetic oligonucleotide
gagaaccttatgtgtcatgcgaccccagtaaatgttatcaatttgcacttgggcagggga

SEQ ID NO: 53639 - DNA, 60 bp, Artificial
  Synthetic oligonucleotide
caagccttacaactactgcttgaagtggagcaagagataagaactttctcgtttcagctc

SEQ ID NO: 53640 - DNA, 60 bp, Artificial
  Synthetic oligonucleotide
caagccttacaactactgcttgaagtggagcaagagataagaactttctcgtttcagctt

SEQ ID NO: 53641 - DNA, 60 bp, Artificial
  Synthetic oligonucleotide
tcaatcctgaatcttgggcaaaagaggtacaccaaaaccacatactggtgggacggactc

SEQ ID NO: 53642 - DNA, 60 bp, Artificial
  Synthetic oligonucleotide
ctaacactgtgtcaagctttcaggtagactgctttctttggcatgtccgcaaacgatttg

SEQ ID NO: 53643 - DNA, 60 bp, Artificial
  Synthetic oligonucleotide
tcctaacactgtgtcaagctttcaggtagactgctttctttggcatgtccgcaaacgatt

SEQ ID NO: 53644 - DNA, 60 bp, Artificial
  Synthetic oligonucleotide
ctagttcttaccaaagaatccagatctttccagacacaatctggaatgtgtcttacagtg

SEQ ID NO: 53645 - DNA, 60 bp, Artificial
  Synthetic oligonucleotide
gttcttaccaaagaatccagatctttccagacacaatctggaatgtgtcttacagtggga

SEQ ID NO: 53646 - DNA, 60 bp, Artificial
  Synthetic oligonucleotide
acccatttgatgatctggcattccaatctgaatgatgccacttaccagagaacaagggct

SEQ ID NO: 53647 - DNA, 60 bp, Artificial
  Synthetic oligonucleotide
atgatctggcattccaatctgaatgatgccacgtaccagagaacaagggcacttgtgcgt

SEQ ID NO: 53648 - DNA, 60 bp, Artificial
  Synthetic oligonucleotide
actcatttgatgatctggcattccaatctgaatgatgccacataccaaagaacaagggca

SEQ ID NO: 53649 - DNA, 60 bp, Artificial
  Synthetic oligonucleotide
acccatttgatgatctggcattccaatctgaatgatgccacatatcagagaacaagggca

SEQ ID NO: 53650 - DNA, 57 bp, Artificial
  Synthetic oligonucleotide
ctctgagactctacagagattcgcttggagaagcagcgatgagggtgggagacctcc

SEQ ID NO: 53651 - DNA, 60 bp, Artificial
  Synthetic oligonucleotide
acattctcaaagggaaattccaaacagcagcacaacgagcaatgatggaccaagtgcggg

SEQ ID NO: 53652 - DNA, 60 bp, Artificial
  Synthetic oligonucleotide
ggagtgcctgattaacgatccctgggttttgcttaatgcatcttggttcaactccttcct

SEQ ID NO: 53653 - DNA, 60 bp, Artificial
  Synthetic oligonucleotide
gcaattgaggagtgcctgattaacgatccctgggttttgcttaatgcatcttggttcaac

SEQ ID NO: 53654 - DNA, 60 bp, Artificial
  Synthetic oligonucleotide
gcctgattaacgatccctgggttttgcttaatgcatcttggttcaactccttcctcacac

SEQ ID NO: 53655 - DNA, 60 bp, Artificial
  Synthetic oligonucleotide
aaattgaagatctcatctttctggcacggtctgcactcatactgagaggatcagtggccc

SEQ ID NO: 53656 - DNA, 60 bp, Artificial
  Synthetic oligonucleotide
tggactccaacactgtgtcaagctttcaggtagactgctttctttggcatgtccgcaaac

SEQ ID NO: 53657 - DNA, 57 bp, Artificial
  Synthetic oligonucleotide
aagccttgcaactattgcttgaagtggagcaagagataagaactttctcgtttcagc

SEQ ID NO: 53658 - DNA, 60 bp, Artificial
  Synthetic oligonucleotide
cggggactacgcaagactttacatatggggagttcatcatccttcaactgacacagaaca

SEQ ID NO: 53659 - DNA, 60 bp, Artificial
  Synthetic oligonucleotide
gagtggctaaagacaagaccaatcctgtcacctctgactaaggggattttaggatttgtg

SEQ ID NO: 53660 - DNA, 60 bp, Artificial
  Synthetic oligonucleotide
gaatggctaaagacaagaccaatcctgtcacctctgactaaggggattttaggattcgtg

SEQ ID NO: 53661 - DNA, 60 bp, Artificial
  Synthetic oligonucleotide
tgataacacagttcgagtctctgaaaatctacagagattcgcttggagaaacagcgatga

SEQ ID NO: 53662 - DNA, 60 bp, Artificial
  Synthetic oligonucleotide
agtctctgaaaatctacagagattcgcttggagaaacagcgatgaggatgggagacctcc

SEQ ID NO: 53663 - DNA, 60 bp, Artificial
  Synthetic oligonucleotide
acatactatagatgtgacagactccgaaatgaacaaactctttgaaagagttaggcgcca

SEQ ID NO: 53664 - DNA, 60 bp, Artificial
  Synthetic oligonucleotide
gggagactgatccaaaacagcataacaatagagagaatggtcctctctgcatttgatgag

SEQ ID NO: 53665 - DNA, 60 bp, Artificial
  Synthetic oligonucleotide
aggcaggctgatccaaaacagcataacaatagagagaatggtcctctctgcatttgatga

SEQ ID NO: 53666 - DNA, 60 bp, Artificial
  Synthetic oligonucleotide
aggcaggctgatccaaaacagcataacaatagagagaatggtcctctctgcatttggtga

SEQ ID NO: 53667 - DNA, 60 bp, Artificial
  Synthetic oligonucleotide
tgaagggagactgatccaaaacagcataacaatagagagaatggtcctctctgcatttga

SEQ ID NO: 53668 - DNA, 60 bp, Artificial
  Synthetic oligonucleotide
acagctgcagatctcaagtcgactcaggcagctattgatcaaattaatggaaaattgaat

SEQ ID NO: 53669 - DNA, 60 bp, Artificial
  Synthetic oligonucleotide
cctcaccggtggacttgaatggaatgataactcaattcgagcgtctgaaaatatacagag

SEQ ID NO: 53670 - DNA, 60 bp, Artificial
  Synthetic oligonucleotide
atcctcattggtggacttgaatggaatgataactcaattcgagcgtctgaaaatatacag

SEQ ID NO: 53671 - DNA, 60 bp, Artificial
  Synthetic oligonucleotide
tggacttgaatggaatgataactcaattcgagcgtctgaaaatatacagagattcgcttg

SEQ ID NO: 53672 - DNA, 60 bp, Artificial
  Synthetic oligonucleotide
cctcatcggtggacttgaatggaatgataactcaattcgagcgtctgaaaatatacagag

SEQ ID NO: 53673 - DNA, 60 bp, Artificial
  Synthetic oligonucleotide
atcctcaccggtggacttgaatggaatgataactcaattcgagcgtctgaaaatatacag

SEQ ID NO: 53674 - DNA, 60 bp, Artificial
  Synthetic oligonucleotide
ctagcaaacaatgggaagtttgagttcattgctgaggaattccaatggaacacagtcaag

SEQ ID NO: 53675 - DNA, 60 bp, Artificial
  Synthetic oligonucleotide
ttagcaaacaatgggaaatttgagttcattgctgaggaattccaatggaacacagtcaag

SEQ ID NO: 53676 - DNA, 60 bp, Artificial
  Synthetic oligonucleotide
caatggaaaatttgagttcattgctgaggaattccaatggaacacagtcaagcaaaacgg

SEQ ID NO: 53677 - DNA, 60 bp, Artificial
  Synthetic oligonucleotide
caatggaaaatttgagttcattgctgaggaattccaatggaacacagtcaagcaaaatgg

SEQ ID NO: 53678 - DNA, 60 bp, Artificial
  Synthetic oligonucleotide
gggaagtttgagttcattgctgaggaattccaatggaacacagtcaagcaaaatgggaaa

SEQ ID NO: 53679 - DNA, 60 bp, Artificial
  Synthetic oligonucleotide
gggaaatttgagttcattgctgaggaattccaatggaacacagtcaagcaaaatgggaaa

SEQ ID NO: 53680 - DNA, 60 bp, Artificial
  Synthetic oligonucleotide
ctctgtggatccaaggagcgattaggatcatggtcctggcatgatggtgctgaaatcatc

SEQ ID NO: 53681 - DNA, 60 bp, Artificial
  Synthetic oligonucleotide
gaagataatatgcatttcagctacaggaatgacactatcggtagtaagcctcctaatagg

SEQ ID NO: 53682 - DNA, 60 bp, Artificial
  Synthetic oligonucleotide
tagttctgctagttcctaccaaagaatccagatctttccagacacaatctggaatgtgtc

SEQ ID NO: 53683 - DNA, 60 bp, Artificial
  Synthetic oligonucleotide
gagaagacgcaacagctggtctcacccatctgatgatctggcattccaatctgaatgatg

SEQ ID NO: 53684 - DNA, 60 bp, Artificial
  Synthetic oligonucleotide
atcggaggacttgaatggaatgataacacagttcgagtctctgaaactctacagagattt

SEQ ID NO: 53685 - DNA, 60 bp, Artificial
  Synthetic oligonucleotide
ggtcctcatcggaggacttgaatggaatgataacacagttcgagtctctgaaactctaca

SEQ ID NO: 53686 - DNA, 60 bp, Artificial
  Synthetic oligonucleotide
ggtcctcatcggaggacttgaatggaatgataacacagttcgagtctctgaaactttaca

SEQ ID NO: 53687 - DNA, 60 bp, Artificial
  Synthetic oligonucleotide
ctgagtcctggaatgatgatgggcatgttcaacatgctaagtacagttttaggagtctca

SEQ ID NO: 53688 - DNA, 60 bp, Artificial
  Synthetic oligonucleotide
cccacccaggaatctttgaaaactcgtgtcttgaaacgatggaagttgtccaacaaacaa

SEQ ID NO: 53689 - DNA, 60 bp, Artificial
  Synthetic oligonucleotide
gtcccacccaggaatctttgaaaactcgtgtcttgaaacgatggaagttgtacaacaaac

SEQ ID NO: 53690 - DNA, 60 bp, Artificial
  Synthetic oligonucleotide
gtcccacccaggaatctttgaaaactcgtgtcttgaaacgatggaagttgtccaacaaac

SEQ ID NO: 53691 - DNA, 53 bp, Artificial
  Synthetic oligonucleotide
cattgttcaggcacttagggacaacctggaacctggaaccttcgatcttgggg

SEQ ID NO: 53692 - DNA, 60 bp, Artificial
  Synthetic oligonucleotide
cattgttcaggcacttagggacaacctggaacctggaaccttcgatcttgggggattata

SEQ ID NO: 53693 - DNA, 60 bp, Artificial
  Synthetic oligonucleotide
attgttcaggcacttagggacaacctggaacctggaaccttcgatcttggggggctatat

SEQ ID NO: 53694 - DNA, 52 bp, Artificial
  Synthetic oligonucleotide
attgttcaggcacttagggacaacctggaacctggaaccttcgatcttgggg

SEQ ID NO: 53695 - DNA, 60 bp, Artificial
  Synthetic oligonucleotide
gattaggaaaaggatacatgttcgaaagtaagagcatgaagctacggacacaaataccag

SEQ ID NO: 53696 - DNA, 60 bp, Artificial
  Synthetic oligonucleotide
ctcaaaattgcaattgcatccagccctgctcctcggtacattaccgatatgagtatagag

SEQ ID NO: 53697 - DNA, 60 bp, Artificial
  Synthetic oligonucleotide
ctgctcctcggtacattaccgatatgagcatagaggaaataagcagggaatggtacatgc

SEQ ID NO: 53698 - DNA, 60 bp, Artificial
  Synthetic oligonucleotide
gcatccagccctgctcctcggtacattaccgatatgagcatagaggaaataagcagggaa

SEQ ID NO: 53699 - DNA, 60 bp, Artificial
  Synthetic oligonucleotide
gctcctcggtacattaccgatatgagcatagaggaaataagcagggaatggtacatgctc

SEQ ID NO: 53700 - DNA, 60 bp, Artificial
  Synthetic oligonucleotide
tgctcctcggtacattaccgatatgagcatagaggaaataagcagggaatggtacatgct

SEQ ID NO: 53701 - DNA, 60 bp, Artificial
  Synthetic oligonucleotide
ggaagttgttttcccaaatgaagtgggagctagaatactaacatcggagtcacagctgac

SEQ ID NO: 53702 - DNA, 60 bp, Artificial
  Synthetic oligonucleotide
tatgcaagccttgcaactactgcttgaagtggagcaagagataagaactttctcgtttca

SEQ ID NO: 53703 - DNA, 60 bp, Artificial
  Synthetic oligonucleotide
gagagtagtgtattgtggacatccaatagtatagtagcgctttgtggatccaaagaacga

SEQ ID NO: 53704 - DNA, 60 bp, Artificial
  Synthetic oligonucleotide
gagagtggtgtattgtggacatccaatagtatagtagcgctttgtggatccaaagaacga

SEQ ID NO: 53705 - DNA, 60 bp, Artificial
  Synthetic oligonucleotide
cctgctagatcaagtagaggactattcggggccatagctggattcatagagggaggttgg

SEQ ID NO: 53706 - DNA, 60 bp, Artificial
  Synthetic oligonucleotide
ctgctagatcaagtagaggactattcggggccatagctggattcatagagggaggttggt

SEQ ID NO: 53707 - DNA, 60 bp, Artificial
  Synthetic oligonucleotide
atctctcatgtggaccacatgagtgcagaatgtttgccctcagccaaggtaccacactaa

SEQ ID NO: 53708 - DNA, 60 bp, Artificial
  Synthetic oligonucleotide
gtggaccacatgagtgcagaatgtttgccctcagccaaggtaccacactaaggggtcggc

SEQ ID NO: 53709 - DNA, 56 bp, Artificial
  Synthetic oligonucleotide
ccgaaatgaacaaactctttgaaagagttaggcgccaactacgagagaatgctgag

SEQ ID NO: 53710 - DNA, 58 bp, Artificial
  Synthetic oligonucleotide
agaatgtgcaacattctcaaagggaaattccaaacagcagcacaacgagcaatgatgg

SEQ ID NO: 53711 - DNA, 60 bp, Artificial
  Synthetic oligonucleotide
gtggaccacatgagtgcagaatgtttgccctcagccaaggcaccacactaagaggtcggc

SEQ ID NO: 53712 - DNA, 60 bp, Artificial
  Synthetic oligonucleotide
gtggaccacatgagtgcagaatgtttgccctcagccaaggcaccacactacgaggtaggc

SEQ ID NO: 53713 - DNA, 60 bp, Artificial
  Synthetic oligonucleotide
gtggaccacatgagtgcagaatgtttgccctcagccaaggcaccacactaagaggtagac

SEQ ID NO: 53714 - DNA, 60 bp, Artificial
  Synthetic oligonucleotide
gtggaccacatgagtgcagaatgtttgccctcagccaaggcaccacactaaggggtcggc

SEQ ID NO: 53715 - DNA, 60 bp, Artificial
  Synthetic oligonucleotide
cccgcgaacaatcaagtagtgccatgtgaaccaatcataatagaaaggaacataacagag

SEQ ID NO: 53716 - DNA, 60 bp, Artificial
  Synthetic oligonucleotide
ccccgcgaacaatcaagtagtgccatgtgaaccaatcataatagaaaggaacataacaga

SEQ ID NO: 53717 - DNA, 60 bp, Artificial
  Synthetic oligonucleotide
ccagcacctcatgtcatgacggcatctcaagaatgtcaatctgcatgtcaggacctaata

SEQ ID NO: 53718 - DNA, 60 bp, Artificial
  Synthetic oligonucleotide
gcgtactgggatggaccccagaatgtgttctctgatgcaaggatcaactctcccgagaag

SEQ ID NO: 53719 - DNA, 60 bp, Artificial
  Synthetic oligonucleotide
gcgtactgggatggaccccagaatgtgttctctgatgcaaggatcaactctcccgaggag

SEQ ID NO: 53720 - DNA, 55 bp, Artificial
  Synthetic oligonucleotide
gaccaggcgattatggataagaacatcatactgaaagcgaacttcagtgtgatct

SEQ ID NO: 53721 - DNA, 57 bp, Artificial
  Synthetic oligonucleotide
tggaccaggcgattatggataagaacatcatactgaaagcgaacttcagtgtgatct

SEQ ID NO: 53722 - DNA, 60 bp, Artificial
  Synthetic oligonucleotide
gaagataatatgcatctctgcaacaggaatgacactatccgtagtaagtctgctaatagg

SEQ ID NO: 53723 - DNA, 60 bp, Artificial
  Synthetic oligonucleotide
ttgctgcctttctgttctgggccatgtccaatggatcttgcagatgcaacatttgtatat

SEQ ID NO: 53724 - DNA, 60 bp, Artificial
  Synthetic oligonucleotide
cacaggagccatgcgtaggcttgccgaccaaagtctcccaccgaacttctccagccttga

SEQ ID NO: 53725 - DNA, 60 bp, Artificial
  Synthetic oligonucleotide
gaaattacaggaaccatgcgcaggctcgccgaccaaagtctcccaccgaacttctccagc

SEQ ID NO: 53726 - DNA, 60 bp, Artificial
  Synthetic oligonucleotide
cacaggaaccatgcgtaggcttgccgaccaaagtctcccaccgaacttctccagccttga

SEQ ID NO: 53727 - DNA, 60 bp, Artificial
  Synthetic oligonucleotide
cacaggaaccatgcgcaggcttaccgaccaaagtctcccaccgaacttctccagccttga

SEQ ID NO: 53728 - DNA, 60 bp, Artificial
  Synthetic oligonucleotide
gaaagctgctcagcatgagagacatgtgtgatgctccctttgatgatagactcaggagag

SEQ ID NO: 53729 - DNA, 60 bp, Artificial
  Synthetic oligonucleotide
tgctatctatggcacatacgaaagctgctcagcatgagagacatgtgtgatgctcccttt

SEQ ID NO: 53730 - DNA, 60 bp, Artificial
  Synthetic oligonucleotide
gctatctatggcacataagaaagctgctcagcatgagagacatgtgtgatgctccctttg

SEQ ID NO: 53731 - DNA, 60 bp, Artificial
  Synthetic oligonucleotide
gctatctatggtacataagaaagctgctcagcatgagagacatgtgtgatgctccctttg

SEQ ID NO: 53732 - DNA, 60 bp, Artificial
  Synthetic oligonucleotide
ctatggcacataagaaagctgctcagcatgagagacatgtgtgatgctccctttgatgat

SEQ ID NO: 53733 - DNA, 60 bp, Artificial
  Synthetic oligonucleotide
ggcacataaggaagctgctcagcatgagagacatgtgtgatgctccctttgatgacaggc

SEQ ID NO: 53734 - DNA, 60 bp, Artificial
  Synthetic oligonucleotide
atggcacataagaaagctgctcagcatgagagacatgtgtgatgctccctttgatgatag

SEQ ID NO: 53735 - DNA, 60 bp, Artificial
  Synthetic oligonucleotide
cataagaaagctgctcagcatgagagacatgtgtgatgctccctttgatgatagactcag

SEQ ID NO: 53736 - DNA, 60 bp, Artificial
  Synthetic oligonucleotide
ggcacatacgaaagctgctcagcatgagagacatgtgtgatgctccctttgatgacagac

SEQ ID NO: 53737 - DNA, 60 bp, Artificial
  Synthetic oligonucleotide
gcatgatcaaggcagttcggggtgatctgaactttgtcaatagggcaaaccagcgactga

SEQ ID NO: 53738 - DNA, 60 bp, Artificial
  Synthetic oligonucleotide
cctttgacatgagtaaagaaggatcttatttcttcggagacaatgcagaggagtatgaca

SEQ ID NO: 53739 - DNA, 60 bp, Artificial
  Synthetic oligonucleotide
tcctttgacatgagtaacgaaggatcttatttcttcggagacaatgcagaggagtatgac

SEQ ID NO: 53740 - DNA, 60 bp, Artificial
  Synthetic oligonucleotide
tgggatcatggtcctggcatgatggtgctgaaatcatctactttaagtaggaatgattta

SEQ ID NO: 53741 - DNA, 60 bp, Artificial
  Synthetic oligonucleotide
actgtggacttcaaatagcattgtagctctctgtggatccaaagagcgattgggatcatg

SEQ ID NO: 53742 - DNA, 60 bp, Artificial
  Synthetic oligonucleotide
tctgtggaacctcaggtacctatggaacaggctcatggcctgatggggcgaatatcaact

SEQ ID NO: 53743 - DNA, 60 bp, Artificial
  Synthetic oligonucleotide
gtggaacctcaggtacctatggaacaggctcatggcctgatggggcgaatatcaatttca

SEQ ID NO: 53744 - DNA, 60 bp, Artificial
  Synthetic oligonucleotide
atgttcaacatgctgagtacagtcttaggagtctcaatcctgaatcttgggcaaaagagg

SEQ ID NO: 53745 - DNA, 60 bp, Artificial
  Synthetic oligonucleotide
catgttcaacatgctgagtacagtcttaggagtctcaatcctgaatcttgggcaaaagag

SEQ ID NO: 53746 - DNA, 60 bp, Artificial
  Synthetic oligonucleotide
ggaagattctacatacagatgtgcactgaactcaaactcagtgactatgaagggagactg

SEQ ID NO: 53747 - DNA, 60 bp, Artificial
  Synthetic oligonucleotide
gggctataagaaccagaagtggaggaaacaccaaccaacagagagcatctgcaggacaaa

SEQ ID NO: 53748 - DNA, 60 bp, Artificial
  Synthetic oligonucleotide
acaggagaccggttgggatttccagcatggtggaggccatggtgtctagggcccgaattg

SEQ ID NO: 53749 - DNA, 60 bp, Artificial
  Synthetic oligonucleotide
tgtggaccatatggccataatcaagaagtacacatcaggaagacaagagaagaaccctgc

SEQ ID NO: 53750 - DNA, 53 bp, Artificial
  Synthetic oligonucleotide
gtcttctaaccgaggtcgaaacgtacgttctctctatcgtcccgtcaggcccc

SEQ ID NO: 53751 - DNA, 57 bp, Artificial
  Synthetic oligonucleotide
atgagccttctaaccgaggtcgaaacgtacgttctctctatcatcccgtcaggcccc

SEQ ID NO: 53752 - DNA, 60 bp, Artificial
  Synthetic oligonucleotide
gaataggagaggatgcccacatccttgtcacaagagaaccatatctctcatgtggaccac

SEQ ID NO: 53753 - DNA, 60 bp, Artificial
  Synthetic oligonucleotide
ggataggagaagatgcccacatccttgtcacaagagaaccatatctctcatgtggaccac

SEQ ID NO: 53754 - DNA, 60 bp, Artificial
  Synthetic oligonucleotide
gtcgcctcatctcttgtgcttgcaatggggtttgctgccttcctattctgggccatgtcc

SEQ ID NO: 53755 - DNA, 60 bp, Artificial
  Synthetic oligonucleotide
cttaccatttattctactgtcgcctcatctcttgtgcttgcaatggggtttgctgccttc

SEQ ID NO: 53756 - DNA, 60 bp, Artificial
  Synthetic oligonucleotide
cgaagatctcatctttctggcacggtctgcactcatattgagagggtcagttgctcacaa

SEQ ID NO: 53757 - DNA, 60 bp, Artificial
  Synthetic oligonucleotide
aacccaggaaatgctgagatcgaagatctcatctttctggcacggtctgcactcatattg

SEQ ID NO: 53758 - DNA, 60 bp, Artificial
  Synthetic oligonucleotide
cctcacgcatgcactgaaatagttgtggcaatgctactatttgctatccatactgtccaa

SEQ ID NO: 53759 - DNA, 57 bp, Artificial
  Synthetic oligonucleotide
atgagccttctaaccgaggtcgaaacgtacgttctctccatcatcccgacaggcccc

SEQ ID NO: 53760 - DNA, 60 bp, Artificial
  Synthetic oligonucleotide
ctcacaagaggattgcatgataaaggcagtccgaggtgatctgaatttcgtaaacagagc

SEQ ID NO: 53761 - DNA, 60 bp, Artificial
  Synthetic oligonucleotide
ggggactatgcaagactttacatatggggagttcaccatccttcaactgacacagaacaa

SEQ ID NO: 53762 - DNA, 60 bp, Artificial
  Synthetic oligonucleotide
cggggactatgcaagactttacatatggggagttcaccatccttcaactgacacagaaca

SEQ ID NO: 53763 - DNA, 60 bp, Artificial
  Synthetic oligonucleotide
gagaaagtaagaggtcaactaaggaacaatgccaaagaaattgggaatggctgctttgaa

SEQ ID NO: 53764 - DNA, 60 bp, Artificial
  Synthetic oligonucleotide
tgagaaagtaagaggtcaattaaggaacaatgccaaagaaattgggaatggctgctttga

SEQ ID NO: 53765 - DNA, 60 bp, Artificial
  Synthetic oligonucleotide
tgagaaagtaagaggtcaactaaggaacaatgccaaagaaattgggaatggctgctttga

SEQ ID NO: 53766 - DNA, 60 bp, Artificial
  Synthetic oligonucleotide
ggatgtttggacgtacaatgccgaactgttggtcctattggaaaatgaaagaactctgga

SEQ ID NO: 53767 - DNA, 60 bp, Artificial
  Synthetic oligonucleotide
ggatgtttggacgtacaatgccgaactgttggttctattggaaaatgaaagaactctgga

SEQ ID NO: 53768 - DNA, 60 bp, Artificial
  Synthetic oligonucleotide
tgccataaacaccagcctcccatttcagaatatacatccggtcacaattggagaatgtcc

SEQ ID NO: 53769 - DNA, 60 bp, Artificial
  Synthetic oligonucleotide
cccaagggtgccatcaacaccagcctcccatttcagaatatacatccggtcacaattgga

SEQ ID NO: 53770 - DNA, 60 bp, Artificial
  Synthetic oligonucleotide
gaggtcaattaaggaacaatgccaaagaaattgggaatggctgctttgaattctatcaca

SEQ ID NO: 53771 - DNA, 60 bp, Artificial
  Synthetic oligonucleotide
tatccaaagtactcagaggaatcaaaactaaacagagaggaaatagatggagtaaagttg

SEQ ID NO: 53772 - DNA, 60 bp, Artificial
  Synthetic oligonucleotide
tcagatgcaccaattcatgattgtaacacgaaatgtcaaacacccaagggtgccataaac

SEQ ID NO: 53773 - DNA, 60 bp, Artificial
  Synthetic oligonucleotide
ttataatttcagatgcaccaattcatgattgtaacacgaaatgtcaaacacccaagggtg

SEQ ID NO: 53774 - DNA, 60 bp, Artificial
  Synthetic oligonucleotide
acgaaatgtcaaacacccaagggtgccatcaacaccagcctcccatttcagaatatacat

SEQ ID NO: 53775 - DNA, 60 bp, Artificial
  Synthetic oligonucleotide
catgattgtaacacgaaatgtcaaacacccaagggtgccataaacaccagcctcccattt

SEQ ID NO: 53776 - DNA, 60 bp, Artificial
  Synthetic oligonucleotide
cccaaagtgagaggtcaagcagggagaatgaactattactggacactaatagaacctgga

SEQ ID NO: 53777 - DNA, 60 bp, Artificial
  Synthetic oligonucleotide
gggcatccaccatccacctaccagtactgaccaacaaagtctctaccagaatgcagatgc

SEQ ID NO: 53778 - DNA, 60 bp, Artificial
  Synthetic oligonucleotide
agcaactggaaatctagtggtgccaagatatcgtttcgcaatgaatagaggttctggatc

SEQ ID NO: 53779 - DNA, 60 bp, Artificial
  Synthetic oligonucleotide
agcaaaagcaggggaaaataaaagcaaccaaaatgaaggcagtactattagtcttgctat

SEQ ID NO: 53780 - DNA, 56 bp, Artificial
  Synthetic oligonucleotide
cccgtcaattcaatctaggggtctgtttggggccattgctgggtttattgaagggg

SEQ ID NO: 53781 - DNA, 60 bp, Artificial
  Synthetic oligonucleotide
cccgtcaattcaatctaggggtctgtttggggccattgctgggtttattgaagggggatg

SEQ ID NO: 53782 - DNA, 60 bp, Artificial
  Synthetic oligonucleotide
gcaaaagcaggggaaaataaaagcaaccaaaatgaaggcagtactattagtcttgctatg

SEQ ID NO: 53783 - DNA, 60 bp, Artificial
  Synthetic oligonucleotide
tccaaagtactcagaggaatcaaaactaaacagagaggaaatagatggagtaaagttgga

SEQ ID NO: 53784 - DNA, 60 bp, Artificial
  Synthetic oligonucleotide
atggttttctggatgtttggacgtacaatgccgaactgttggtcctattggaaaatgaaa

SEQ ID NO: 53785 - DNA, 60 bp, Artificial
  Synthetic oligonucleotide
aatgaacaaggatcaggatatgcagcggaccaaaggagcacacaaaatgccattgacggg

SEQ ID NO: 53786 - DNA, 60 bp, Artificial
  Synthetic oligonucleotide
aatgagcaaggatcaggatatgcagcggaccaaaggagcacacaaaatgccattgacggg

SEQ ID NO: 53787 - DNA, 60 bp, Artificial
  Synthetic oligonucleotide
gcaaggatcaggatatgcagcggaccaaaggagcacacaaaatgccattgacgggatcac

SEQ ID NO: 53788 - DNA, 60 bp, Artificial
  Synthetic oligonucleotide
ggatcaggatatgcagcggaccaaaggagcacacaaaatgccattgacgggatcactaac

SEQ ID NO: 53789 - DNA, 60 bp, Artificial
  Synthetic oligonucleotide
gccataaacaccagcctcccatttcagaatatacatccggtcacaattggagaatgtcca

SEQ ID NO: 53790 - DNA, 60 bp, Artificial
  Synthetic oligonucleotide
gaatatacatccggtcacaattggagaatgtccaaaatatgtcagaagcacaaaattgag

SEQ ID NO: 53791 - DNA, 60 bp, Artificial
  Synthetic oligonucleotide
tttaatatggctggtaaaaaaaggaaattcatacccaaagctcagcaaatcctatgttaa

SEQ ID NO: 53792 - DNA, 60 bp, Artificial
  Synthetic oligonucleotide
ccaaagctcagcaaatcctatgttaacaataaagagaaggaagtccttgtactatggggc

SEQ ID NO: 53793 - DNA, 60 bp, Artificial
  Synthetic oligonucleotide
atattccccaagacaagttcgtggcccaatcatgaaacaaacagaggtgtgacggcagca

SEQ ID NO: 53794 - DNA, 60 bp, Artificial
  Synthetic oligonucleotide
ccccaagacaagttcgtggcccaatcatgaaacaaacagaggtgtgacggcagcatgccc

SEQ ID NO: 53795 - DNA, 60 bp, Artificial
  Synthetic oligonucleotide
tcgagatattccccaagacaagttcgtggcccaatcatgaaacaaacagaggtgtgacgg

SEQ ID NO: 53796 - DNA, 60 bp, Artificial
  Synthetic oligonucleotide
gaaagattcgaaatattccccaagacaagttcgtggcccaatcatgaaacaaacagaggt

SEQ ID NO: 53797 - DNA, 60 bp, Artificial
  Synthetic oligonucleotide
atggttttctggatgtttggacgtacaatgccgaactgttggttctattggaaaatgaaa

SEQ ID NO: 53798 - DNA, 60 bp, Artificial
  Synthetic oligonucleotide
gtaacacactctgttaaccttcttgagaatgtacataacggaaagctatgtaaactaggg

SEQ ID NO: 53799 - DNA, 60 bp, Artificial
  Synthetic oligonucleotide
gtcttgctatgtacatttgcatccacaaatgcagacacattatgcataggttaccatgca

SEQ ID NO: 53800 - DNA, 60 bp, Artificial
  Synthetic oligonucleotide
ttggttcaactccttcctcacacatgcactgaaatagttgtggcaatgctactatttgct

SEQ ID NO: 53801 - DNA, 60 bp, Artificial
  Synthetic oligonucleotide
aacaggagataagaactttctcgtttcagcttatttaatgataaaaaacacccttgtttc

SEQ ID NO: 53802 - DNA, 59 bp, Artificial
  Synthetic oligonucleotide
cagacggcagaaatagtgaatttagcttgtccttcatgaaaaaatgccttgtttctact

SEQ ID NO: 53803 - DNA, 54 bp, Artificial
  Synthetic oligonucleotide
ggcagaaatagtgaatttagcttgtccttcatgaaaaaatgccttgtttctact

SEQ ID NO: 53804 - DNA, 60 bp, Artificial
  Synthetic oligonucleotide
gctttctttggcatgtccgcaaacgatttgcagaccaagaactgggtgatgccccatctc

SEQ ID NO: 53805 - DNA, 60 bp, Artificial
  Synthetic oligonucleotide
agcatcttagcaaacaatgggaaatttgagttcattgctgaggaattccaatggaacaca

SEQ ID NO: 53806 - DNA, 60 bp, Artificial
  Synthetic oligonucleotide
aaaatgcaattggggtcctcatcagaggatttgaatggaatgataacacagttcgagtct

SEQ ID NO: 53807 - DNA, 59 bp, Artificial
  Synthetic oligonucleotide
gctggtctcactcatttgatgatctggcattccaatctgaatgatgccacatatcagag

SEQ ID NO: 53808 - DNA, 60 bp, Artificial
  Synthetic oligonucleotide
gagaccggttgggatttccagcatggtggaggccatggtgtctagggcccgaattgatgc

SEQ ID NO: 53809 - DNA, 60 bp, Artificial
  Synthetic oligonucleotide
agaccggttgggatttccagcatggtggaggccatggtgtctagggcccgaattgatgcg

SEQ ID NO: 53810 - DNA, 60 bp, Artificial
  Synthetic oligonucleotide
ataactcaattcgagcgtctgaaaatatacagagatttgcttggggagtccgtgatgaga

SEQ ID NO: 53811 - DNA, 60 bp, Artificial
  Synthetic oligonucleotide
ggaatgataactcaattcgagcgtctgaaaatatacagagattcgcttggggagtccgtg

SEQ ID NO: 53812 - DNA, 60 bp, Artificial
  Synthetic oligonucleotide
caattcgagcgtctgaaaatatacagagatttgcttggggagtccgtgatgagagtgggg

SEQ ID NO: 53813 - DNA, 60 bp, Artificial
  Synthetic oligonucleotide
ggcacatacgaaagctactcagcatgagagacatgtgtgatgctccctttgatgacagac

SEQ ID NO: 53814 - DNA, 60 bp, Artificial
  Synthetic oligonucleotide
atggaatgataactcaattcgagcgtctgaaaatatacagagatttgcttggggagtccg

SEQ ID NO: 53815 - DNA, 60 bp, Artificial
  Synthetic oligonucleotide
tgctatctatggcacatacgaaagctactcagcatgagagacatgtgtgatgctcccttt

SEQ ID NO: 53816 - DNA, 60 bp, Artificial
  Synthetic oligonucleotide
ctaagcaagtgtgcatagcatggtccagctcaagttgtcacgatggaaaagcatggctgc

SEQ ID NO: 53817 - DNA, 60 bp, Artificial
  Synthetic oligonucleotide
cttttgatgaatgagttgggtgttccatttcacttgggaaccaaacaagtgtgcatagca

SEQ ID NO: 53818 - DNA, 60 bp, Artificial
  Synthetic oligonucleotide
cactccctccaaaacagaaacgctacatggcgagaagagttgagtcagaagtttgaagag

SEQ ID NO: 53819 - DNA, 60 bp, Artificial
  Synthetic oligonucleotide
gcaggcaaaccatttgaatggatgtcaatccgactctacttttcttaaaagtgccagtgc

SEQ ID NO: 53820 - DNA, 60 bp, Artificial
  Synthetic oligonucleotide
ttcgactgtcgcctcatctcttgtgattgcaatggggtttgctgccttcttgttctgggc

SEQ ID NO: 53821 - DNA, 60 bp, Artificial
  Synthetic oligonucleotide
ctcttgtgattgcaatggggtttgctgccttcttgttctgggccatgtccaatggatctt

SEQ ID NO: 53822 - DNA, 60 bp, Artificial
  Synthetic oligonucleotide
aactactgcttgaagtggagcaagagataagaactttctcgtttcagcttatttaatgat

SEQ ID NO: 53823 - DNA, 60 bp, Artificial
  Synthetic oligonucleotide
caactactgcttgaagtggagcaagagataagaactttctcgtttcagcttatttaatga

SEQ ID NO: 53824 - DNA, 60 bp, Artificial
  Synthetic oligonucleotide
gggatcctaataacgagagaggggccccaggagtgaaagggtgggcctttgacgatggaa

SEQ ID NO: 53825 - DNA, 60 bp, Artificial
  Synthetic oligonucleotide
ggggaaattcctggttgggaaggaccataagcaaagatttaagatcagggtatgagatgc

SEQ ID NO: 53826 - DNA, 60 bp, Artificial
  Synthetic oligonucleotide
aaacagaaacgctacatggcgagaagagttgagtcagaagtttgaagagatcagatggct

SEQ ID NO: 53827 - DNA, 60 bp, Artificial
  Synthetic oligonucleotide
gttattgcaatggggtttgctgccttcttgttctgggccatgtccaatggatcttgcaga

SEQ ID NO: 53828 - DNA, 60 bp, Artificial
  Synthetic oligonucleotide
cgcaactgctggtctcactcatttgatgatctggcattccaatctgaatgatgccacata

SEQ ID NO: 53829 - DNA, 60 bp, Artificial
  Synthetic oligonucleotide
actcaggaatcagaatgcgtttgcatcaacggaacttgtacagtagtaatgactgatgga

SEQ ID NO: 53830 - DNA, 60 bp, Artificial
  Synthetic oligonucleotide
tgttacccttatgatgtgccagattatgcctcccttaggtcactagttgcctcgtcaggc

SEQ ID NO: 53831 - DNA, 60 bp, Artificial
  Synthetic oligonucleotide
tgctttcagcaattgttacccttatgatgtgccagattatgcctcccttaggtcactagt

SEQ ID NO: 53832 - DNA, 60 bp, Artificial
  Synthetic oligonucleotide
ttacccttatgatgtgccagattatgcctcccttaggtcactagttgcctcgtcaggcac

SEQ ID NO: 53833 - DNA, 60 bp, Artificial
  Synthetic oligonucleotide
gcatgatgccaatgttaggaacctgcatgaacaaatcaagcgggccctaaaagacaatgc

SEQ ID NO: 53834 - DNA, 60 bp, Artificial
  Synthetic oligonucleotide
ctcgtgctaatcgaaaacgacagaacattagacctgcatgatgccaatgttaggaacctg

SEQ ID NO: 53835 - DNA, 60 bp, Artificial
  Synthetic oligonucleotide
tacaatgctaaacttctcgtgctaatcgaaaacgacagaacattagacctgcatgatgcc

SEQ ID NO: 53836 - DNA, 60 bp, Artificial
  Synthetic oligonucleotide
ccgatcgagtcgatgatgctgtgacagacatctggtcttacaatgctaaacttctcgtgc

SEQ ID NO: 53837 - DNA, 60 bp, Artificial
  Synthetic oligonucleotide
cagagatgttctagtattgtggggaattcaccaccctgacacagaggcaactgccaacaa

SEQ ID NO: 53838 - DNA, 60 bp, Artificial
  Synthetic oligonucleotide
gagatgttctagtattgtggggaattcaccaccctgacacagaggcaactgccaacaaac

SEQ ID NO: 53839 - DNA, 60 bp, Artificial
  Synthetic oligonucleotide
cgggaattatgactccattcggggtgagtttaatcaggtggaaaagagaatcaacatgat

SEQ ID NO: 53840 - DNA, 60 bp, Artificial
  Synthetic oligonucleotide
ggcccgggttaatcaatggatggtatggcttccagcatcaaaatgagcaagggactggca

SEQ ID NO: 53841 - DNA, 60 bp, Artificial
  Synthetic oligonucleotide
agaacagaggagcaaatagcttctacaggaatttaatctggcttgtgaataagctaaata

SEQ ID NO: 53842 - DNA, 60 bp, Artificial
  Synthetic oligonucleotide
gaacagaggagcaaatagcttctacaggaatttaatctggcttgtgaataagctaaataa

SEQ ID NO: 53843 - DNA, 60 bp, Artificial
  Synthetic oligonucleotide
aagctaaataaatatcctgtggtcaagggcgaatataacaatacaacaggcagagatgtt

SEQ ID NO: 53844 - DNA, 60 bp, Artificial
  Synthetic oligonucleotide
cctgtggtcaagggcgaatataacaatacaacaggcagagatgttctagtattgtgggga

SEQ ID NO: 53845 - DNA, 60 bp, Artificial
  Synthetic oligonucleotide
caacatcaacatcagagaatggtcttatctgattgaagaccccaatgccccacataaact

SEQ ID NO: 53846 - DNA, 60 bp, Artificial
  Synthetic oligonucleotide
gagaatggtcttatctgattgaagaccccaatgccccacataaactctgcttcccaggtg

SEQ ID NO: 53847 - DNA, 60 bp, Artificial
  Synthetic oligonucleotide
cacataaactctgcttcccaggtgaagttgacaacaatggagaattaaggcatcttttca

SEQ ID NO: 53848 - DNA, 60 bp, Artificial
  Synthetic oligonucleotide
ctctgcttcccaggtgaagttgacaacaatggagaattaaggcatcttttcagtggagtg

SEQ ID NO: 53849 - DNA, 60 bp, Artificial
  Synthetic oligonucleotide
attgctctttgaatggtgtcagcccaatacatcttggggattgcagttttgaagggtgga

SEQ ID NO: 53850 - DNA, 60 bp, Artificial
  Synthetic oligonucleotide
tcaacatgattgccgatcgagtcgatgatgctgtgacagacatctggtcttacaatgcta

SEQ ID NO: 53851 - DNA, 60 bp, Artificial
  Synthetic oligonucleotide
ccattcggggtgagtttaatcaggtggaaaagagaatcaacatgattgccgatcgagtcg

SEQ ID NO: 53852 - DNA, 60 bp, Artificial
  Synthetic oligonucleotide
gtcagacctccatgggtggaatcaatacaaacaagactttccagaatatcgaaaggaatg

SEQ ID NO: 53853 - DNA, 60 bp, Artificial
  Synthetic oligonucleotide
gggtggaatcaatacaaacaagactttccagaatatcgaaaggaatgctcttggcgactg

SEQ ID NO: 53854 - DNA, 60 bp, Artificial
  Synthetic oligonucleotide
ctgccaacaaactttatgtcaacaagaacccttatacactggtatcaacaaaagagtgga

SEQ ID NO: 53855 - DNA, 60 bp, Artificial
  Synthetic oligonucleotide
atgtcaacaagaacccttatacactggtatcaacaaaagagtggagcagacggtacgaat

SEQ ID NO: 53856 - DNA, 60 bp, Artificial
  Synthetic oligonucleotide
aaagagtggagcagacggtacgaattagaaattggaaccaggataggagacggtcaaaga

SEQ ID NO: 53857 - DNA, 60 bp, Artificial
  Synthetic oligonucleotide
ggagcagacggtacgaattagaaattggaaccaggataggagacggtcaaagaagctgga

SEQ ID NO: 53858 - DNA, 60 bp, Artificial
  Synthetic oligonucleotide
cggtcaaagaagctggatgaaaatttattggcacttgatgcacccaggcgaaagaataac

SEQ ID NO: 53859 - DNA, 60 bp, Artificial
  Synthetic oligonucleotide
aaagaataacatttgagagcagtggagggctcttagcaccaagatatggctacataattg

SEQ ID NO: 53860 - DNA, 60 bp, Artificial
  Synthetic oligonucleotide
agagcagtggagggctcttagcaccaagatatggctacataattgagaagtacggaacag

SEQ ID NO: 53861 - DNA, 56 bp, Artificial
  Synthetic oligonucleotide
tacataattgagaagtacggaacaggcagaatttttcaaagtggagtgagactggc

SEQ ID NO: 53862 - DNA, 60 bp, Artificial
  Synthetic oligonucleotide
catgtatggagaccattcgaaatgggacatataatcatgaggactacaaagaagagtcac

SEQ ID NO: 53863 - DNA, 60 bp, Artificial
  Synthetic oligonucleotide
ggactacaaagaagagtcacaattgaaaagacaagaaatcgaagggatcaagttgaagac

SEQ ID NO: 53864 - DNA, 60 bp, Artificial
  Synthetic oligonucleotide
ggggattgcagttttgaagggtggattgttggcaacccttcctgtgcaagcaacatcaac

SEQ ID NO: 53865 - DNA, 60 bp, Artificial
  Synthetic oligonucleotide
tgtaatgactcatgtatggagaccattcgaaatgggacatataatcatgaggactacaaa

SEQ ID NO: 53866 - DNA, 60 bp, Artificial
  Synthetic oligonucleotide
attgcaagcagtgttgttctggtaggactcatactcgcatttatactgtgggcatgcagc

SEQ ID NO: 53867 - DNA, 60 bp, Artificial
  Synthetic oligonucleotide
gttctggtaggactcatactcgcatttatactgtgggcatgcagcagtggaaattgccgg

SEQ ID NO: 53868 - DNA, 60 bp, Artificial
  Synthetic oligonucleotide
agttgaagactgaagacaatgtatacaaaatattgtcgatttacagctgcattgcaagca

SEQ ID NO: 53869 - DNA, 60 bp, Artificial
  Synthetic oligonucleotide
acaatgtatacaaaatattgtcgatttacagctgcattgcaagcagtgttgttctggtag

SEQ ID NO: 53870 - DNA, 60 bp, Artificial
  Synthetic oligonucleotide
ggcatgcagcagtggaaattgccggttcaatgtttgtatatagtaaggaaaaacaccctt

SEQ ID NO: 53871 - DNA, 52 bp, Artificial
  Synthetic oligonucleotide
ggcatgcagcagtggaaattgccggttcaatgtttgtatatagtaaggaaaa

SEQ ID NO: 53872 - DNA, 60 bp, Artificial
  Synthetic oligonucleotide
atcatactggaacttattgctctttgaatggtgtcagcccaatacatcttggggattgca

SEQ ID NO: 53873 - DNA, 56 bp, Artificial
  Synthetic oligonucleotide
agacaaaatatgcataggatacttaagcaacaactcaacagatacggtagacacac

SEQ ID NO: 53874 - DNA, 60 bp, Artificial
  Synthetic oligonucleotide
aagacaatgccattgatgaaggggatgggtgcttcagcattctccataaatgtaatgact

SEQ ID NO: 53875 - DNA, 60 bp, Artificial
  Synthetic oligonucleotide
taggaacctgcatgaacaaatcaagcgggccctaaaagacaatgccattgatgaagggga

SEQ ID NO: 53876 - DNA, 60 bp, Artificial
  Synthetic oligonucleotide
ccattgatgaaggggatgggtgcttcagcattctccataaatgtaatgactcatgtatgg

SEQ ID NO: 53877 - DNA, 60 bp, Artificial
  Synthetic oligonucleotide
caagtcatagttgacaataataactggtctggttattctggtattttctctgttgaaggc

SEQ ID NO: 53878 - DNA, 60 bp, Artificial
  Synthetic oligonucleotide
cttacaaaatccttaccatttattcgactgccgcctcatctcttgtgcttgcaatggggt

SEQ ID NO: 53879 - DNA, 60 bp, Artificial
  Synthetic oligonucleotide
caatcagcttctggatgtgttctaatgggtctttgcagtgcagaatatgcatctgagacc

SEQ ID NO: 53880 - DNA, 60 bp, Artificial
  Synthetic oligonucleotide
gaggttacttcaaaatgcgcactgggaaaagctcaataatgagatcagatgcacctattg

SEQ ID NO: 53881 - DNA, 60 bp, Artificial
  Synthetic oligonucleotide
ctcgaggttatttcaaaatgcgcactgggaaaagctcaataatgaggtcagatgcaccta

SEQ ID NO: 53882 - DNA, 60 bp, Artificial
  Synthetic oligonucleotide
gggaacctaatcgctcctcggggttacttcaaaatgcgcactgggaaaagctcaataatg

SEQ ID NO: 53883 - DNA, 60 bp, Artificial
  Synthetic oligonucleotide
gggaacctaatcgctcctcgaggttatttcaaaatgcgcactgggaaaagctcaataatg

SEQ ID NO: 53884 - DNA, 60 bp, Artificial
  Synthetic oligonucleotide
ctgggaaaagctcaataatgagatcagatgcacctattgatacctgtatttctgaatgca

SEQ ID NO: 53885 - DNA, 60 bp, Artificial
  Synthetic oligonucleotide
cactgggaaaagctcaataatgagatcagatgcacctattgatacctgtatttctgaatg

SEQ ID NO: 53886 - DNA, 59 bp, Artificial
  Synthetic oligonucleotide
tggggttcatcatgtgggcctgccagagaggcaacattaggtgcaacatttgcatttga

SEQ ID NO: 53887 - DNA, 60 bp, Artificial
  Synthetic oligonucleotide
ctggggttcattatgtgggcctaccagagaggcaacattaggtgcaacatttgcatttga

SEQ ID NO: 53888 - DNA, 60 bp, Artificial
  Synthetic oligonucleotide
tactggggttcattatgtgggcctaccagagaggcaacattaggtgcaacatttgcattt

SEQ ID NO: 53889 - DNA, 60 bp, Artificial
  Synthetic oligonucleotide
ctccaacactgtgtcaagctttcaggtagactgctttctttggcatgtccgcaaacgatt

SEQ ID NO: 53890 - DNA, 59 bp, Artificial
  Synthetic oligonucleotide
ccaacactgtgtcaagctttcaggtagactgctttctttggcatgtccgcaaacgattt

SEQ ID NO: 53891 - DNA, 60 bp, Artificial
  Synthetic oligonucleotide
gggatcctaataacgagagaggggccccaggagtgaaagggtgggcctttgacaatggag

SEQ ID NO: 53892 - DNA, 60 bp, Artificial
  Synthetic oligonucleotide
ggatcctaataacgagagaggggccccaggagtgaaagggtgggcctttgacaatggaaa

SEQ ID NO: 53893 - DNA, 60 bp, Artificial
  Synthetic oligonucleotide
aaatatacagagattcgcttggggagtccgtgatgaggatgggggacctccactccctcc

SEQ ID NO: 53894 - DNA, 53 bp, Artificial
  Synthetic oligonucleotide
ggggcaatcagtttctggatgtgttctaatgggtcattgcaatgcagaatatg

SEQ ID NO: 53895 - DNA, 60 bp, Artificial
  Synthetic oligonucleotide
cggaaaatttgagttcattgctgaggaattccaatggaacacagtcaaacaaaatgggaa

SEQ ID NO: 53896 - DNA, 60 bp, Artificial
  Synthetic oligonucleotide
caaaatcctcactatttattcgactgtcgcctcatctcttgtgattgcaatggggtttgc

SEQ ID NO: 53897 - DNA, 60 bp, Artificial
  Synthetic oligonucleotide
catagcatggtccagctcaagctgccatgatgggtgagcatggttatatgtttgtgtcac

SEQ ID NO: 53898 - DNA, 54 bp, Artificial
  Synthetic oligonucleotide
caggaaggcaagagaagaaccccgcactcaggatgaagtggatgatggcaatga

SEQ ID NO: 53899 - DNA, 60 bp, Artificial
  Synthetic oligonucleotide
tctgaaggaacttacaaaatcctcactatttattcgactgtcgcctcatctcttgtgatt

SEQ ID NO: 53900 - DNA, 60 bp, Artificial
  Synthetic oligonucleotide
ccaacactgtgtcaagctttcaggtagattgctttctttggcatgtccgcaaacgatttg

SEQ ID NO: 53901 - DNA, 60 bp, Artificial
  Synthetic oligonucleotide
gggacaatacatgatagaatccctcatcggacccttttaatgaatgagttgggtgttccg

SEQ ID NO: 53902 - DNA, 60 bp, Artificial
  Synthetic oligonucleotide
ctgtgtcaagcttccaggtagactgctttctttggcatgtccgcaaacggttcgcagacc

SEQ ID NO: 53903 - DNA, 60 bp, Artificial
  Synthetic oligonucleotide
ctttggcacgtccgcaaaagatttgcagaccaagaactgggtgatgccccattcctcgac

SEQ ID NO: 53904 - DNA, 57 bp, Artificial
  Synthetic oligonucleotide
tggatcttgcagatgcaacatttgtatataattggcaaaaacacccttgtttctact

SEQ ID NO: 53905 - DNA, 58 bp, Artificial
  Synthetic oligonucleotide
atggatcttgcagatgcaacatttgtatataattggcaaaaacacccttgtttctact

SEQ ID NO: 53906 - DNA, 60 bp, Artificial
  Synthetic oligonucleotide
gattcgcttggggagtccgtgatgagaatgggggacctccactccctccaaaacagaaac

SEQ ID NO: 53907 - DNA, 60 bp, Artificial
  Synthetic oligonucleotide
ggagccttatgtgtcatgcagctccgataaatgttatcaatttgcacttgggcagggaac

SEQ ID NO: 53908 - DNA, 60 bp, Artificial
  Synthetic oligonucleotide
agagatccttatgtgtcatgcagctccaataaatgttatcaatttgcacttgggcaggga

SEQ ID NO: 53909 - DNA, 60 bp, Artificial
  Synthetic oligonucleotide
gaaccttacgtgtcatgcagctccaataaatgttatcaatttgcacttgggcagggaacc

SEQ ID NO: 53910 - DNA, 60 bp, Artificial
  Synthetic oligonucleotide
gggatgtcttcatagagcgacccactgctgtggacacttgttatccatttgatgtgccag

SEQ ID NO: 53911 - DNA, 60 bp, Artificial
  Synthetic oligonucleotide
catcaggtagagggcttttcggtgccatagctggattcatagaaggaggttggccaggac

SEQ ID NO: 53912 - DNA, 60 bp, Artificial
  Synthetic oligonucleotide
acaagtgtagtaccaaacattggcagtagaccatgggtgagaggccaaagcggaaggatc

SEQ ID NO: 53913 - DNA, 60 bp, Artificial
  Synthetic oligonucleotide
ggactacgcaagactttacatatggggagttcaccatccttcaaccgacacagaacaaac

SEQ ID NO: 53914 - DNA, 60 bp, Artificial
  Synthetic oligonucleotide
ctgaaaatctacagagattcgcttggagaaaccgtaatgaggatgggagaccttcactac

SEQ ID NO: 53915 - DNA, 60 bp, Artificial
  Synthetic oligonucleotide
catggtggaggccatggtgtctagggcccgaatttatgcacgaattgacttcgagtctgg

SEQ ID NO: 53916 - DNA, 60 bp, Artificial
  Synthetic oligonucleotide
ggcttaaacactacattgccattccacaatgtcagtaaatatgcatttggaaactgccca

SEQ ID NO: 53917 - DNA, 60 bp, Artificial
  Synthetic oligonucleotide
cttcctttgacatgagtaaagaaggatcttatttcttcggagacaatgcagaggagtatg

SEQ ID NO: 53918 - DNA, 60 bp, Artificial
  Synthetic oligonucleotide
gctgcctttctgttctgggccatgtccaatggatcttgcagatgcaacatttgtatataa

SEQ ID NO: 53919 - DNA, 60 bp, Artificial
  Synthetic oligonucleotide
gcgacaggaatgaggaacattcctgagaaagcaaccagaggactatttggtgcaattgct

SEQ ID NO: 53920 - DNA, 60 bp, Artificial
  Synthetic oligonucleotide
ggctgatacaacaacaagtgtgacaacagaagatataaatcgaactttcaagccggtgat

SEQ ID NO: 53921 - DNA, 60 bp, Artificial
  Synthetic oligonucleotide
ggctgatacaacaacaagtgtgacaacagaagatataaaccggactttcaagccggtgat

SEQ ID NO: 53922 - DNA, 60 bp, Artificial
  Synthetic oligonucleotide
tgctatcaatcacgattctgtttctgctcatagcagagggctcctctcagaattacacag

SEQ ID NO: 53923 - DNA, 60 bp, Artificial
  Synthetic oligonucleotide
gtcccacccaggaatctttgaaaactcgtgtcttgaaacgatggaaattgttcaacaaac

SEQ ID NO: 53924 - DNA, 60 bp, Artificial
  Synthetic oligonucleotide
caaaagcaggagtgaaaatgaatccaaatcagaagataatagcaattggctctgtttctc

SEQ ID NO: 53925 - DNA, 60 bp, Artificial
  Synthetic oligonucleotide
ggggtttgctgccttcttgttctgggccatgtccaatggttcttgcaggtgcaacatttg

SEQ ID NO: 53926 - DNA, 60 bp, Artificial
  Synthetic oligonucleotide
atggggtttgctgccttcttgttctgggccatgtccaatggttcttgcaggtgcaacatt

SEQ ID NO: 53927 - DNA, 60 bp, Artificial
  Synthetic oligonucleotide
ctcaacatcatggcgtctcaaggcaccaaacgatcttacgaacagatggaaactggtgga

SEQ ID NO: 53928 - DNA, 57 bp, Artificial
  Synthetic oligonucleotide
gaattcggatggtcatcaattagtgtcgaattgtttaaaaacgaccttgtttctact

SEQ ID NO: 53929 - DNA, 57 bp, Artificial
  Synthetic oligonucleotide
ggattcggatggccatcaattaatgtcgaattgtttaaaaacgaccttgtttctact

SEQ ID NO: 53930 - DNA, 60 bp, Artificial
  Synthetic oligonucleotide
ccaagtagaagtcgtcactgcccaagaattagtggaatcgcaacatctaccggagttgtg

SEQ ID NO: 53931 - DNA, 60 bp, Artificial
  Synthetic oligonucleotide
ttttagggtttgtgtttacgctcaccgtgcccagtgagcgaggactgcagcgtagacgct

SEQ ID NO: 53932 - DNA, 60 bp, Artificial
  Synthetic oligonucleotide
ttttaggatttgtgtttacgctcaccgtgcccagtgagcgaggactgcagcgtagacgct

SEQ ID NO: 53933 - DNA, 60 bp, Artificial
  Synthetic oligonucleotide
ggattttagggttcgtgtttacgctcaccgtgcccagtgagcgaggactgcagcgtagac

SEQ ID NO: 53934 - DNA, 51 bp, Artificial
  Synthetic oligonucleotide
ggggaaattcctggttgggaaggaccataagcaaagatttaagatcagggt

SEQ ID NO: 53935 - DNA, 60 bp, Artificial
  Synthetic oligonucleotide
gcaagtgtgcatagcatggtccagctcaagttgtcacgatggaaaagcatggctgcatgt

SEQ ID NO: 53936 - DNA, 56 bp, Artificial
  Synthetic oligonucleotide
tggcctgatggggcgaatatcaacttcatgcctatataagctttcgcaattttaga

SEQ ID NO: 53937 - DNA, 60 bp, Artificial
  Synthetic oligonucleotide
cactgcccaggaattagtggaatcgcaacatctaccggaattgtgtcctagccctctaag

SEQ ID NO: 53938 - DNA, 60 bp, Artificial
  Synthetic oligonucleotide
tgtcaaagatgcaattggggtcctcatcggaggacttgaatggaatgataacacagttcg

SEQ ID NO: 53939 - DNA, 60 bp, Artificial
  Synthetic oligonucleotide
tgcgattagaataggagaggatgcccacatccttgtcacaagagaaccatatctctcatg

SEQ ID NO: 53940 - DNA, 60 bp, Artificial
  Synthetic oligonucleotide
aatgagttgggtgttccgtttcacttgggaaccaaacaagtgtgcatagcatggtccagt

SEQ ID NO: 53941 - DNA, 60 bp, Artificial
  Synthetic oligonucleotide
gctccaaggcaccaaacgatcttatgagcaaatggaaactggtggagaacgccagaatgc

SEQ ID NO: 53942 - DNA, 60 bp, Artificial
  Synthetic oligonucleotide
gactgttttctttggcatgtccgcaaacgatttgcagaccaagaactgggtgatgcccca

SEQ ID NO: 53943 - DNA, 60 bp, Artificial
  Synthetic oligonucleotide
atcggggactgtcccaagtatgtcaaacagggatccttgaaactagctacaggaatgagg

SEQ ID NO: 53944 - DNA, 60 bp, Artificial
  Synthetic oligonucleotide
atatcaatcggggactgtcccaagtatgtcaaacagggatccttgaaactagctacagga

SEQ ID NO: 53945 - DNA, 60 bp, Artificial
  Synthetic oligonucleotide
atagcattgtagctctgtgcggatccagggagcgattgggatcatggtcctggcatgatg

SEQ ID NO: 53946 - DNA, 60 bp, Artificial
  Synthetic oligonucleotide
tgtgcatagcatggtccagctcaagttgtcatgatgggaaagcatggttgcatgtttgtg

SEQ ID NO: 53947 - DNA, 60 bp, Artificial
  Synthetic oligonucleotide
tgtgcatagcatggtccagctcaagttgtcatgatggaaaagcatggttacatgttcgtg

SEQ ID NO: 53948 - DNA, 60 bp, Artificial
  Synthetic oligonucleotide
ggagtcagaatgcgtttgcatcaatggaacttgtacagtagtgatgactgatggaagtgc

SEQ ID NO: 53949 - DNA, 60 bp, Artificial
  Synthetic oligonucleotide
agcgaaagcaggcaaaccatttgaatggatgtcaatccgactttacttttcttaaaagtt

SEQ ID NO: 53950 - DNA, 60 bp, Artificial
  Synthetic oligonucleotide
agcgaaagcaggcaaaccatttgaatggatgtcaatccgactttacttttcttgaaagtt

SEQ ID NO: 53951 - DNA, 60 bp, Artificial
  Synthetic oligonucleotide
agcgaaagcaggcaaaccatttgaatggatgtcaatccgactttacttttcttgaaagtg

SEQ ID NO: 53952 - DNA, 60 bp, Artificial
  Synthetic oligonucleotide
gcaggcaaaccatttgaatggatgtcaatccgactttacttttcttgaaagttccagcgc

SEQ ID NO: 53953 - DNA, 60 bp, Artificial
  Synthetic oligonucleotide
gcaggcaaaccatttgaatggatgtcaatccgactttacttttcttgaaagttccagcac

SEQ ID NO: 53954 - DNA, 60 bp, Artificial
  Synthetic oligonucleotide
cccttgcttttatgtggaattgatcagaggcaggccaaaagagagtagtgtattgtggac

SEQ ID NO: 53955 - DNA, 60 bp, Artificial
  Synthetic oligonucleotide
ccttgcttttatgtggaattgatcagaggcaggccaaaagagagtagtgtattgtggaca

SEQ ID NO: 53956 - DNA, 60 bp, Artificial
  Synthetic oligonucleotide
cctcaccatttattcgactgtcgcctcatctctcgtgcttgcaatggggtttgctgcctt

SEQ ID NO: 53957 - DNA, 60 bp, Artificial
  Synthetic oligonucleotide
ggccataatcaagaaatacacatcaggaagacaagagaagaaccctgctctcaggatgaa

SEQ ID NO: 53958 - DNA, 60 bp, Artificial
  Synthetic oligonucleotide
aagagggccttctacggaaggagtgcctgagtctatgagggaagaatatcggcaggagca

SEQ ID NO: 53959 - DNA, 60 bp, Artificial
  Synthetic oligonucleotide
atacaggaggccagttggaatctccagcatggtggaggccatggtgtctagggcccgaat

SEQ ID NO: 53960 - DNA, 60 bp, Artificial
  Synthetic oligonucleotide
atgcagttttcttctctaactgtgaatgtgagaggctcgggaatgcgaatactcgtaagg

SEQ ID NO: 53961 - DNA, 60 bp, Artificial
  Synthetic oligonucleotide
aaaatcaagtatcgccatgtgaaccaatcataatagaaaggaacataacagagatagtgc

SEQ ID NO: 53962 - DNA, 60 bp, Artificial
  Synthetic oligonucleotide
ttgaatggaatgataacacagttcgagtctctgaaactctacagagatttgcttggagaa

SEQ ID NO: 53963 - DNA, 60 bp, Artificial
  Synthetic oligonucleotide
cttgaatggaatgataacacagttcgagtctctgaaactctacagagatttgcttgggga

SEQ ID NO: 53964 - DNA, 60 bp, Artificial
  Synthetic oligonucleotide
cctgccagattaagtagaggactatttggggccatagctggattcatagagggaggttgg

SEQ ID NO: 53965 - DNA, 60 bp, Artificial
  Synthetic oligonucleotide
gttttgctgggattcatcatgtgggcctgccagagaggcaacattaggtgcaacatttgc

SEQ ID NO: 53966 - DNA, 60 bp, Artificial
  Synthetic oligonucleotide
ctgtggacacttgttatccatttgatgtgccagattaccagagcctacggagtatcttag

SEQ ID NO: 53967 - DNA, 60 bp, Artificial
  Synthetic oligonucleotide
ataacaatgcttcggcagtggtctggtacaatgggagaccagtcaccgaaattgcttcat

SEQ ID NO: 53968 - DNA, 60 bp, Artificial
  Synthetic oligonucleotide
atctgcatgtcaggccctaataacaatgcttcggcagtggtctggtacaatgggagacca

SEQ ID NO: 53969 - DNA, 60 bp, Artificial
  Synthetic oligonucleotide
cacttcaggtacttatggaacaggctcatggcctgatggggcgaatatcaatttcatgcc

SEQ ID NO: 53970 - DNA, 60 bp, Artificial
  Synthetic oligonucleotide
tgttatcatggaggtcgttttcccaaatgaagttggagccagggtactgacatcagaatc

SEQ ID NO: 53971 - DNA, 60 bp, Artificial
  Synthetic oligonucleotide
tgttatcatggaggtcgttttcccaaatgaagttggagctagaatattgacatcagaatc

SEQ ID NO: 53972 - DNA, 60 bp, Artificial
  Synthetic oligonucleotide
gattctacatacagatgtgcactgaactcaaactcagtgactacgaaggcaggctgatcc

SEQ ID NO: 53973 - DNA, 60 bp, Artificial
  Synthetic oligonucleotide
gggagattctacatacagatgtgcactgaactcaaactcagtgactacgaagggagactg

SEQ ID NO: 53974 - DNA, 60 bp, Artificial
  Synthetic oligonucleotide
gggagattctacatacagatgtgcactgaactcaaactcagtgactacgaaggaagactg

SEQ ID NO: 53975 - DNA, 60 bp, Artificial
  Synthetic oligonucleotide
ggatttggcgccaagcgaacaatggagaagacgcaactgctggtctcactcacttgatga

SEQ ID NO: 53976 - DNA, 60 bp, Artificial
  Synthetic oligonucleotide
ggcgccaagcgaacaatggagaagacgcaactgctggtctcactcacttgatgatctggc

SEQ ID NO: 53977 - DNA, 60 bp, Artificial
  Synthetic oligonucleotide
gtggaccatatggccataatcaagaaatacacatcaggaagacaggagaagaatcctgcc

SEQ ID NO: 53978 - DNA, 60 bp, Artificial
  Synthetic oligonucleotide
gacgagcagtcaattgctgaagcaataattgtggccatggtattttcacaagaggattgc

SEQ ID NO: 53979 - DNA, 60 bp, Artificial
  Synthetic oligonucleotide
gacgaacagtcaattgctgaagcaataattgtggccatggtattttcacaagaggattgc

SEQ ID NO: 53980 - DNA, 60 bp, Artificial
  Synthetic oligonucleotide
catgtcgggaccgaacaacaatgcatcagcagtggtgtggtacggggggaggccagtaac

SEQ ID NO: 53981 - DNA, 60 bp, Artificial
  Synthetic oligonucleotide
ggggcaaatagaccggtaataactatagatcccgaaatgatgacccacacaagcaagtac

SEQ ID NO: 53982 - DNA, 60 bp, Artificial
  Synthetic oligonucleotide
gggtcaggcacccagtccatataatgttagggtcgagtgcataggatggtcaagcacgtc

SEQ ID NO: 53983 - DNA, 60 bp, Artificial
  Synthetic oligonucleotide
agtcccaaatgcagaaaccgacacccaatcggggccaatctcacaccaggtgattgtcaa

SEQ ID NO: 53984 - DNA, 60 bp, Artificial
  Synthetic oligonucleotide
cgccccaatgatcccaccaatgggaactgtgatgcgccaataacaggggggagcccagat

SEQ ID NO: 53985 - DNA, 60 bp, Artificial
  Synthetic oligonucleotide
ggctgcaggatgtttgctctgagccaaggcacaacactcagagggcgacatgcgaatggg

SEQ ID NO: 53986 - DNA, 60 bp, Artificial
  Synthetic oligonucleotide
ccagatcctggggtgaaggggtttgcattcctcgacagggagaactcatggctcggaagg

SEQ ID NO: 53987 - DNA, 60 bp, Artificial
  Synthetic oligonucleotide
ccttgtttttatgtggaattaatcagagggagacccaaagagagtagtgtactgtggact

SEQ ID NO: 53988 - DNA, 60 bp, Artificial
  Synthetic oligonucleotide
gaacgaggagggaacatttctaaacctgaccaagcctctatgtgaagtaaactcatggca

SEQ ID NO: 53989 - DNA, 60 bp, Artificial
  Synthetic oligonucleotide
tgacccacacaagcaagtacttgtgctcaaagatcctaaccgatacaagccgccccaatg

SEQ ID NO: 53990 - DNA, 60 bp, Artificial
  Synthetic oligonucleotide
ggctcggaaggacaattagcaaagactccagatcaggctatgaaatgttaaaagtcccaa

SEQ ID NO: 53991 - DNA, 60 bp, Artificial
  Synthetic oligonucleotide
atcggtagtaagcctgctgataggaattgccaatttgggcctaaatatcggactccacta

SEQ ID NO: 53992 - DNA, 60 bp, Artificial
  Synthetic oligonucleotide
gaatcagaatgtgtgtgccataaggggatctgcccagtagtcatgacagatggcccagca

SEQ ID NO: 53993 - DNA, 60 bp, Artificial
  Synthetic oligonucleotide
gaaagatacagaaaatcgaagaactggcagggaatgctcagcacatcgaagaatgttcat

SEQ ID NO: 53994 - DNA, 60 bp, Artificial
  Synthetic oligonucleotide
tgttcatgctatggagcagtaggggtgatcaaatgcatatgcagggacaattggaagggg

SEQ ID NO: 53995 - DNA, 60 bp, Artificial
  Synthetic oligonucleotide
atgctcatatactagtcacaagggagccctacttgtcctgcgacccacaaggctgcagga

SEQ ID NO: 53996 - DNA, 58 bp, Artificial
  Synthetic oligonucleotide
tgcttgaagtggagcaagagataagaactttctcgtttcagcttatttaataataaaa

SEQ ID NO: 53997 - DNA, 60 bp, Artificial
  Synthetic oligonucleotide
caaacagcagcacaacgagcaatgatggaccaggtgagggaaagccggaatcctgggaat

SEQ ID NO: 53998 - DNA, 60 bp, Artificial
  Synthetic oligonucleotide
aacaaaatggattccaacactgtgtcaagctttcaggtagactgctttctttggcatgtc

SEQ ID NO: 53999 - DNA, 60 bp, Artificial
  Synthetic oligonucleotide
agcgaaagcaggagtgaaaatgaatccaaatcagaagataatagcaattggctctgtttc

SEQ ID NO: 54000 - DNA, 60 bp, Artificial
  Synthetic oligonucleotide
agcaaaagcaggagtgaaaatgaatccaaatcagaagataatagcaattggctctgtttc

SEQ ID NO: 54001 - DNA, 60 bp, Artificial
  Synthetic oligonucleotide
gggagactcttatcctaagctcagcaagtcatacacaaacaacaaaggaaaagaagtgct

SEQ ID NO: 54002 - DNA, 60 bp, Artificial
  Synthetic oligonucleotide
ctaagctcagcaagtcatacacaaacaacaaaggaaaagaagtgcttgtaatctggggag

SEQ ID NO: 54003 - DNA, 60 bp, Artificial
  Synthetic oligonucleotide
ctaaagtcagaggacaagcaggcagaatgaattattattggacactgttagatcaaggag

SEQ ID NO: 54004 - DNA, 60 bp, Artificial
  Synthetic oligonucleotide
atggtacgcattcgcattggataaggggtctggttctggaattatgatgtcggatgctca

SEQ ID NO: 54005 - DNA, 60 bp, Artificial
  Synthetic oligonucleotide
ggtacgcattcgcattggataaggggtctggttctggaattatgatgtcggatgctcagg

SEQ ID NO: 54006 - DNA, 60 bp, Artificial
  Synthetic oligonucleotide
tggcacatataattatcccaaatattcagaagaatccaaattgaatagagaggaaataga

SEQ ID NO: 54007 - DNA, 60 bp, Artificial
  Synthetic oligonucleotide
tcccaaatattcagaagaatccaaattgaatagagaggaaatagacggtgtgaaactaga

SEQ ID NO: 54008 - DNA, 60 bp, Artificial
  Synthetic oligonucleotide
gcaattgaggaacaatgccaaagaagtcgggaatggttgttttgaattctaccacaaatg

SEQ ID NO: 54009 - DNA, 60 bp, Artificial
  Synthetic oligonucleotide
cacaaatgtgataacgaatgcatggagagcgtaaagaatggcacatataattatcccaaa

SEQ ID NO: 54010 - DNA, 60 bp, Artificial
  Synthetic oligonucleotide
ccacaaatgtgataacgaatgcatggagagcgtgaagaatggcacatataattatcccaa

SEQ ID NO: 54011 - DNA, 57 bp, Artificial
  Synthetic oligonucleotide
ggaaatagacggtgtgaaactagaatcaatgggagttcaacagattttggcgatcta

SEQ ID NO: 54012 - DNA, 58 bp, Artificial
  Synthetic oligonucleotide
aggaaatagacggtgtgaaactagaatcaatgggagttcaccagattttggcgatcta

SEQ ID NO: 54013 - DNA, 60 bp, Artificial
  Synthetic oligonucleotide
gctgagttcagtttcttcatttgaaaggtttgaaattttcccaaaagcaacctcatggcc

SEQ ID NO: 54014 - DNA, 60 bp, Artificial
  Synthetic oligonucleotide
ctcacagcgaattcgtggtcttacataatagagacttcaaattcaggaaatggaacatgc

SEQ ID NO: 54015 - DNA, 65 bp, Artificial
  Synthetic oligonucleotide
ggggaaaataaaatcaaccaaaatggaagcaaaactgtttgtattattctgtacattcactgtgc

SEQ ID NO: 54016 - DNA, 60 bp, Artificial
  Synthetic oligonucleotide
gcaaaagcaggggaaaataaaatcaaccaagatggaagcaaaactgtttgtattattctg

SEQ ID NO: 54017 - DNA, 60 bp, Artificial
  Synthetic oligonucleotide
agcaaaagcaggggaaaataaaatcaaccaagatggaagcaaaactgtttgtattattct

SEQ ID NO: 54018 - DNA, 60 bp, Artificial
  Synthetic oligonucleotide
cctcatggccaaatcatgagacaaccaaaggtgtcacagctgcatgcccccactctggag

SEQ ID NO: 54019 - DNA, 60 bp, Artificial
  Synthetic oligonucleotide
gatggatggtatgggtatcaccatcaaaatgagcagggatctggttacgcagctgatcag

SEQ ID NO: 54020 - DNA, 60 bp, Artificial
  Synthetic oligonucleotide
tgatagatggatggtatgggtatcaccatcaaaatgagcagggatctggttacgcagctg

SEQ ID NO: 54021 - DNA, 60 bp, Artificial
  Synthetic oligonucleotide
ggatgctcaggttcacaattgtactacaaagtgccaaactcctcatggggccttgaacag

SEQ ID NO: 54022 - DNA, 60 bp, Artificial
  Synthetic oligonucleotide
cggatgctcaggttcacaattgtactacaaagtgccaaactcctcatggggccttgaaca

SEQ ID NO: 54023 - DNA, 60 bp, Artificial
  Synthetic oligonucleotide
tttggatgtttggacatataatgctgaattgctcattttgctcgagaacgaaaggactct

SEQ ID NO: 54024 - DNA, 60 bp, Artificial
  Synthetic oligonucleotide
gggtcaaatcgcaattgaggaacaatgccaaagaagtcgggaatggttgttttgagttct

SEQ ID NO: 54025 - DNA, 60 bp, Artificial
  Synthetic oligonucleotide
ctgtgtcgagcttccaggtagactgctttctttggcatgtccgcaaacgatttgcagacc

SEQ ID NO: 54026 - DNA, 60 bp, Artificial
  Synthetic oligonucleotide
ggcctctactaatagatggcacagcctcattgagccctggaatgatgatgggcatgttca

SEQ ID NO: 54027 - DNA, 60 bp, Artificial
  Synthetic oligonucleotide
atctgttccaccattgaagagctcagacggcaaaaatagtgaatttagcttgtccttcat

SEQ ID NO: 54028 - DNA, 60 bp, Artificial
  Synthetic oligonucleotide
atctgttccaccattgaagagctcagacggcaaaaacagtgaatttagcttgtccttcat

SEQ ID NO: 54029 - DNA, 60 bp, Artificial
  Synthetic oligonucleotide
gatctgttccaccattgaagagctcagacggcaaaagtagtgaatttggcttgtccttca

SEQ ID NO: 54030 - DNA, 60 bp, Artificial
  Synthetic oligonucleotide
atctgttccaccattgaagagctcagacggcaaaaatagtgaatttggcttgtccttcat

SEQ ID NO: 54031 - DNA, 60 bp, Artificial
  Synthetic oligonucleotide
atctgttccaccattgaagagctcagacggcaaaattagtgaatttagcttgtccttcgt

SEQ ID NO: 54032 - DNA, 60 bp, Artificial
  Synthetic oligonucleotide
atctgttccaccattgaagagctcagacggcaaaaatagtgaatttagcttgtccttcgt

SEQ ID NO: 54033 - DNA, 57 bp, Artificial
  Synthetic oligonucleotide
cacatgcactgaaatagttgtggcaatgctactatttgctatccatactgtccaaaa

SEQ ID NO: 54034 - DNA, 60 bp, Artificial
  Synthetic oligonucleotide
cacacatgcactgaaatagttgtggcaatgctactatttgctatccatactgtccaaaaa

SEQ ID NO: 54035 - DNA, 60 bp, Artificial
  Synthetic oligonucleotide
cacatgcactgaaatagttgtggcaatgctactatttgctatccatactgtccaaaaaag

SEQ ID NO: 54036 - DNA, 59 bp, Artificial
  Synthetic oligonucleotide
cacacatgcactgaaatagttgtggcaatgctactatttgctatccatactgtccaaaa

SEQ ID NO: 54037 - DNA, 60 bp, Artificial
  Synthetic oligonucleotide
gtattgaccgtttcttaagggttcgagatcagcgggggaacgtactcttatctcccgaag

SEQ ID NO: 54038 - DNA, 60 bp, Artificial
  Synthetic oligonucleotide
gtatcgatcgtttcttaagggttcgagatcagcgggggaacgtactcttatctcccgaag

SEQ ID NO: 54039 - DNA, 60 bp, Artificial
  Synthetic oligonucleotide
atccgtagtaagtctgctaataggattggccaacttggggctgaacatcgggcttcattt

SEQ ID NO: 54040 - DNA, 60 bp, Artificial
  Synthetic oligonucleotide
aagggggatggacaggaatgatagatggatggtatggttatcaccatcagaatgaacaag

SEQ ID NO: 54041 - DNA, 60 bp, Artificial
  Synthetic oligonucleotide
ggagcaattgctggattcattgaaggaggatggacaggaatgatagatggatggtatggg

SEQ ID NO: 54042 - DNA, 54 bp, Artificial
  Synthetic oligonucleotide
gctggtctcactcatttgatgatctggcattccaatctgaatgatgccacatat

SEQ ID NO: 54043 - DNA, 60 bp, Artificial
  Synthetic oligonucleotide
tggtctaaaaacatcctcagaactcaggagtcagaatgcgtttgcatcaatggaacttgt

SEQ ID NO: 54044 - DNA, 58 bp, Artificial
  Synthetic oligonucleotide
tgcttgaggtggagcaagagataagaactttctcgtttcagcttatttgatgataaaa

SEQ ID NO: 54045 - DNA, 60 bp, Artificial
  Synthetic oligonucleotide
ctcattgttcaggcacttagggacaacctggaacctgggaccttcgatcttgaagggcta

SEQ ID NO: 54046 - DNA, 60 bp, Artificial
  Synthetic oligonucleotide
ggaagattctacatacagatgtgcactgaactcaaactcagcgaccacgaaggcaggctg

SEQ ID NO: 54047 - DNA, 60 bp, Artificial
  Synthetic oligonucleotide
gggagattctacatacagatgtgcactgaactcaaactcagcgactatgaagggagactg

SEQ ID NO: 54048 - DNA, 60 bp, Artificial
  Synthetic oligonucleotide
tcaggaggatttggcgtcaagcgaacaatggagaagacgcaactgctggtcttacccacc

SEQ ID NO: 54049 - DNA, 60 bp, Artificial
  Synthetic oligonucleotide
gcaagccttgcaactattgcttgaagtagagcaagagataagaactttctcgtttcagct

SEQ ID NO: 54050 - DNA, 59 bp, Artificial
  Synthetic oligonucleotide
gcaagccttacaactattgcttgaagtggagcaagagataagaactttctcgtttcagc

SEQ ID NO: 54051 - DNA, 60 bp, Artificial
  Synthetic oligonucleotide
gaccaggcgattatggataagaacatcatactgaaagcgaacttcagtgtgatcttcgat

SEQ ID NO: 54052 - DNA, 60 bp, Artificial
  Synthetic oligonucleotide
tgggaaactgaatagggtaatcgagaagacgaacgagaaattccatcaaatcgaaaagga

SEQ ID NO: 54053 - DNA, 60 bp, Artificial
  Synthetic oligonucleotide
tatcaaccaaatcaatgggaaactgaatagggtaatcgagaagacgaacgagaaattcca

SEQ ID NO: 54054 - DNA, 60 bp, Artificial
  Synthetic oligonucleotide
tcgaaaaggagttctcagaagtagaagggagaatccaagacctcgagaaatacgttgaag

SEQ ID NO: 54055 - DNA, 60 bp, Artificial
  Synthetic oligonucleotide
cacggatgatcaaatcgaggtaactaatgctactgaactggtccagaatttctcaatggg

SEQ ID NO: 54056 - DNA, 60 bp, Artificial
  Synthetic oligonucleotide
tacgttgaagatactaaaatagatctctggtcttacaacgcggaacttcttgtcgctctg

SEQ ID NO: 54057 - DNA, 60 bp, Artificial
  Synthetic oligonucleotide
cgctgtgcctgggacatcatgcggtgccaaacggaacgctagtgaaaacaatcacggatg

SEQ ID NO: 54058 - DNA, 60 bp, Artificial
  Synthetic oligonucleotide
gggaccttttcattgaacgcagcaaggctttcagcaactgttacccttatgatgtgccgg

SEQ ID NO: 54059 - DNA, 60 bp, Artificial
  Synthetic oligonucleotide
aattctgagggcataggacaagcagcagatcttaaaagtacccaagcagctatcaaccaa

SEQ ID NO: 54060 - DNA, 56 bp, Artificial
  Synthetic oligonucleotide
tcttgatggagcaaattgcacactgatagacgctctattgggggaccctcattgtg

SEQ ID NO: 54061 - DNA, 60 bp, Artificial
  Synthetic oligonucleotide
ggtccagaatttctcaatgggtaaaatatgcaacaatcctcatcgaattcttgatggagc

SEQ ID NO: 54062 - DNA, 60 bp, Artificial
  Synthetic oligonucleotide
gtgccggagtatacctcccttaggtcactaattgcctcgtcaggcaccttggagtttacc

SEQ ID NO: 54063 - DNA, 60 bp, Artificial
  Synthetic oligonucleotide
ttatgatgtgccggagtatacctcccttaggtcactaattgcctcgtcaggcaccttgga

SEQ ID NO: 54064 - DNA, 57 bp, Artificial
  Synthetic oligonucleotide
aacgaatacagagacgaagcagtaaacaaccgatttcagatcaaaagtgttgagctg

SEQ ID NO: 54065 - DNA, 60 bp, Artificial
  Synthetic oligonucleotide
caacgcggaacttcttgtcgctctggagaatcaacatacaattgatctgactgactcgga

SEQ ID NO: 54066 - DNA, 60 bp, Artificial
  Synthetic oligonucleotide
ggggataattctatcaaccatgaaaactgtcattgctttgagctacatcctctgtctggt

SEQ ID NO: 54067 - DNA, 60 bp, Artificial
  Synthetic oligonucleotide
agctacatcctctgtctggttcttggccaagaccttccaggaaagggcaacaatacagca

SEQ ID NO: 54068 - DNA, 60 bp, Artificial
  Synthetic oligonucleotide
agcaaaagcaggggataattctatcaaccatgaaaactgtcattgctttgagctacatcc

SEQ ID NO: 54069 - DNA, 60 bp, Artificial
  Synthetic oligonucleotide
tgctttgtgttgtttggctgggattcatcatgtgggcctgccagaaaggcaacattaggt

SEQ ID NO: 54070 - DNA, 60 bp, Artificial
  Synthetic oligonucleotide
ctggttcttggccaagaccttccaggaaagggcaacaatacagcaacgctgtgcctggga

SEQ ID NO: 54071 - DNA, 60 bp, Artificial
  Synthetic oligonucleotide
caatacagcaacgctgtgcctgggacatcatgcggtgccaaacggaacgctagtgaaaac

SEQ ID NO: 54072 - DNA, 50 bp, Artificial
  Synthetic oligonucleotide
ctggggtcacccagaatggaggaagcagtgcttgcaagagggggcccaat

SEQ ID NO: 54073 - DNA, 60 bp, Artificial
  Synthetic oligonucleotide
caagagaggtcaacaaaccataatcccgaatgtcgggtctagaccctgggtaagaggtct

SEQ ID NO: 54074 - DNA, 60 bp, Artificial
  Synthetic oligonucleotide
taagaggtctgtctagtagaataagcatctactggacaatagttaaaccaggggacatcc

SEQ ID NO: 54075 - DNA, 60 bp, Artificial
  Synthetic oligonucleotide
attgctcctcgaggttacttcaaagtgcacactgggaaaagctcagtaatgaggtcagat

SEQ ID NO: 54076 - DNA, 60 bp, Artificial
  Synthetic oligonucleotide
atatattaagcaaaacactctgaaattggcaacagggatgcggaatataccagaaagaca

SEQ ID NO: 54077 - DNA, 60 bp, Artificial
  Synthetic oligonucleotide
caaaacactctgaaattggcaacagggatgcggaatataccagaaagacaaactagaggc

SEQ ID NO: 54078 - DNA, 60 bp, Artificial
  Synthetic oligonucleotide
agaatggttgggaagggatggtaaacggctggtacggtttcagacaccaaaattctgagg

SEQ ID NO: 54079 - DNA, 60 bp, Artificial
  Synthetic oligonucleotide
gggaagggatggtaaacggctggtacggtttcagacaccaaaattctgagggcataggac

SEQ ID NO: 54080 - DNA, 60 bp, Artificial
  Synthetic oligonucleotide
agaaattccatcaaatcgaaaaggagttctcagaagtagaagggagaatccaagacctcg

SEQ ID NO: 54081 - DNA, 60 bp, Artificial
  Synthetic oligonucleotide
tagtgaaaacaatcacggatgatcaaatcgaggtaactaatgctactgaactggtccaga

SEQ ID NO: 54082 - DNA, 60 bp, Artificial
  Synthetic oligonucleotide
caagacctcgagaaatacgttgaagatactaaaatagatctctggtcttacaacgcggaa

SEQ ID NO: 54083 - DNA, 60 bp, Artificial
  Synthetic oligonucleotide
ggcataggacaagcagcagatcttaaaagtacccaagcagctatcaaccaaatcaatggg

SEQ ID NO: 54084 - DNA, 60 bp, Artificial
  Synthetic oligonucleotide
aaatgggaccttttcattgaacgcagcaaggctttcagcaactgttacccttatgatgtg

SEQ ID NO: 54085 - DNA, 60 bp, Artificial
  Synthetic oligonucleotide
ccaacactgtgtcaagctttcaggtagactgctttctttggcatgtccgcaaacgaattg

SEQ ID NO: 54086 - DNA, 60 bp, Artificial
  Synthetic oligonucleotide
ggggggaactcctggttgggaaggaccataagcaaagattcaaggtcagggtatgagatg

SEQ ID NO: 54087 - DNA, 60 bp, Artificial
  Synthetic oligonucleotide
agcgaaagcagggtagataatcactcactgagtgacattcacgtcatggcgcttcaaggc

SEQ ID NO: 54088 - DNA, 60 bp, Artificial
  Synthetic oligonucleotide
tgtgcatagcatggtccagctcaagctgccatgatgggtgagcatggttatatgtttgtg

SEQ ID NO: 54089 - DNA, 55 bp, Artificial
  Synthetic oligonucleotide
gtatagcatggtccagctcaagctgccatgatgggaaagcatggttgcatatttg

SEQ ID NO: 54090 - DNA, 60 bp, Artificial
  Synthetic oligonucleotide
gtatagcatggtccagctcaagctgccatgatgggaaagcatggttgcatatttgtgtca

SEQ ID NO: 54091 - DNA, 60 bp, Artificial
  Synthetic oligonucleotide
acgcaactgctggtctcactcatttgatgatctggcattccaatctgaatgatgccacat

SEQ ID NO: 54092 - DNA, 60 bp, Artificial
  Synthetic oligonucleotide
ccaaatattggcagtagaccatgggtgagaggccaaagcggcagaatcagtttctattgg

SEQ ID NO: 54093 - DNA, 60 bp, Artificial
  Synthetic oligonucleotide
attgggaatggctgctttgaattctaccacagatgtgataatgcatgtatggagagtgtc

SEQ ID NO: 54094 - DNA, 60 bp, Artificial
  Synthetic oligonucleotide
ttgggaatggctgctttgaattctaccacagatgtgataatgcatgtatggagagtgtca

SEQ ID NO: 54095 - DNA, 50 bp, Artificial
  Synthetic oligonucleotide
atggttttctggatgtttggacttacaatgccgaactgttggtcctattg

SEQ ID NO: 54096 - DNA, 55 bp, Artificial
  Synthetic oligonucleotide
gatttccatgactctaatgttaagaacctatatgaaaaagtaagaagccagctaa

SEQ ID NO: 54097 - DNA, 60 bp, Artificial
  Synthetic oligonucleotide
gattcaacaaggatttaccagattttggcgatctattcaactgtcgccagttcattggta

SEQ ID NO: 54098 - DNA, 60 bp, Artificial
  Synthetic oligonucleotide
taccagattttggcgatctattcaactgtcgccagttcattggtactgttggtctccctg

SEQ ID NO: 54099 - DNA, 60 bp, Artificial
  Synthetic oligonucleotide
gtgggatcatcaaagtataacaagaaattcaagccagaaatagcaacaagacccaaagtg

SEQ ID NO: 54100 - DNA, 60 bp, Artificial
  Synthetic oligonucleotide
ccagtaatgagcaacaaagtctctaccagaatgcagatacctatgtttttgtgggatcat

SEQ ID NO: 54101 - DNA, 60 bp, Artificial
  Synthetic oligonucleotide
acccaaagtgagagatcaagcagggagaatgaactattactggacattaatagaacctgg

SEQ ID NO: 54102 - DNA, 60 bp, Artificial
  Synthetic oligonucleotide
tataacaagaaattcaagccagaaatagcaacaagacccaaagtgagagatcaagcaggg

SEQ ID NO: 54103 - DNA, 60 bp, Artificial
  Synthetic oligonucleotide
gttcacgattgtaatactacttgtcaaacacccaaaggtgctataaacaccagcctccca

SEQ ID NO: 54104 - DNA, 60 bp, Artificial
  Synthetic oligonucleotide
ttcagatacaccagttcacgattgtaatactacttgtcaaacacccaaaggtgctataaa

SEQ ID NO: 54105 - DNA, 60 bp, Artificial
  Synthetic oligonucleotide
gctataaacaccagcctcccatttcagaatgtacatccagtcacaattggagaatgtcca

SEQ ID NO: 54106 - DNA, 60 bp, Artificial
  Synthetic oligonucleotide
gtgctataaacaccagcctcccatttcagaatgtacatccagtcacaattggagaatgtc

SEQ ID NO: 54107 - DNA, 56 bp, Artificial
  Synthetic oligonucleotide
cccgtctattcaatctagaggtctgtttggagctattgctggttttattgaagggg

SEQ ID NO: 54108 - DNA, 60 bp, Artificial
  Synthetic oligonucleotide
cccgtctattcaatctagaggtctgtttggagctattgctggttttattgaagggggatg

SEQ ID NO: 54109 - DNA, 60 bp, Artificial
  Synthetic oligonucleotide
gaaaactatgcaaactaaggggaatagccccattgcacttgggtaaatgtaacattgctg

SEQ ID NO: 54110 - DNA, 60 bp, Artificial
  Synthetic oligonucleotide
aactaaggggaatagccccattgcacttgggtaaatgtaacattgctggatggcttttgg

SEQ ID NO: 54111 - DNA, 60 bp, Artificial
  Synthetic oligonucleotide
ttgagatattccccaaggcaagttcatggcccaatcatgaaacaaacagaggtacgacgg

SEQ ID NO: 54112 - DNA, 60 bp, Artificial
  Synthetic oligonucleotide
ccccaaggcaagttcatggcccaatcatgaaacaaacagaggtacgacggcagcatgccc

SEQ ID NO: 54113 - DNA, 60 bp, Artificial
  Synthetic oligonucleotide
atgaaagcaatactattagtcttgctatatacatttacagccgcaaatgcagacacacta

SEQ ID NO: 54114 - DNA, 60 bp, Artificial
  Synthetic oligonucleotide
ttagtcttgctatatacatttacagccgcaaatgcagacacactatgtataggttatcat

SEQ ID NO: 54115 - DNA, 60 bp, Artificial
  Synthetic oligonucleotide
cacactctgttaaccttctagaagacagacataacggaaaactatgcaaactaaggggaa

SEQ ID NO: 54116 - DNA, 60 bp, Artificial
  Synthetic oligonucleotide
caataaggggaaggaagtccttgtgctatggggcattcaccatccatcaaccagtaatga

SEQ ID NO: 54117 - DNA, 60 bp, Artificial
  Synthetic oligonucleotide
ggggaaggaagtccttgtgctatggggcattcaccatccatcaaccagtaatgagcaaca

SEQ ID NO: 54118 - DNA, 60 bp, Artificial
  Synthetic oligonucleotide
ggaaggacaattagtaaagactccagatcaggctacgaaatgttaaaggtcccaaatgca

SEQ ID NO: 54119 - DNA, 60 bp, Artificial
  Synthetic oligonucleotide
caataaggataggagaggacgctcatgtactagtcacaagggagccctatttgtcctgcg

SEQ ID NO: 54120 - DNA, 60 bp, Artificial
  Synthetic oligonucleotide
cccaaatgcagagaccgacacccaatcgggaccaacctcacatcaggtgattgtcaacaa

SEQ ID NO: 54121 - DNA, 60 bp, Artificial
  Synthetic oligonucleotide
gtcatgccatgacggcatatcaaggatgtcaatatgcatgtcagggccgaacaacaatgc

SEQ ID NO: 54122 - DNA, 60 bp, Artificial
  Synthetic oligonucleotide
gcatgtcagggccgaacaacaatgcatcagcggtggtgtggtacggaggtaggccagtaa

SEQ ID NO: 54123 - DNA, 60 bp, Artificial
  Synthetic oligonucleotide
tgggagatgggtcaagcacccagcccatataatactagggttgagtgcatagggtggtca

SEQ ID NO: 54124 - DNA, 60 bp, Artificial
  Synthetic oligonucleotide
attggtcgggatactcaggagcattcatagattactgggcaaataaagagtgcttcaatc

SEQ ID NO: 54125 - DNA, 60 bp, Artificial
  Synthetic oligonucleotide
cccaaggctgcaggatgtttgctctaagccaaggcacaacactcagaggacgacacgcga

SEQ ID NO: 54126 - DNA, 50 bp, Artificial
  Synthetic oligonucleotide
aacactcagaggacgacacgcgaatgggactatacatgatcggagcccgt

SEQ ID NO: 54127 - DNA, 60 bp, Artificial
  Synthetic oligonucleotide
caagagtcggagtgcgtgtgccacaaagggatctgtccagtagtcatgacagatggacca

SEQ ID NO: 54128 - DNA, 60 bp, Artificial
  Synthetic oligonucleotide
gaggacgctcatgtactagtcacaagggagccctatttgtcctgcgattcccaaggctgc

SEQ ID NO: 54129 - DNA, 60 bp, Artificial
  Synthetic oligonucleotide
atcggtagtaagcctgctgataggagttgccaatttaggcctaaacatcggacttcatta

SEQ ID NO: 54130 - DNA, 60 bp, Artificial
  Synthetic oligonucleotide
agatggaccagcaaacaatagggcagcaactaggataatctatttcaaagagggaaagat

SEQ ID NO: 54131 - DNA, 60 bp, Artificial
  Synthetic oligonucleotide
ggatttgcattcctagatggagagaactcatggctcggaaggacaattagtaaagactcc

SEQ ID NO: 54132 - DNA, 60 bp, Artificial
  Synthetic oligonucleotide
cgacacccaatcgggaccaacctcacatcaggtgattgtcaacaaccaaaattggtcggg

SEQ ID NO: 54133 - DNA, 60 bp, Artificial
  Synthetic oligonucleotide
gctgaaatcatctactttaagtaggaatgacttaggaaaaacacccttgtttctactaat

SEQ ID NO: 54134 - DNA, 59 bp, Artificial
  Synthetic oligonucleotide
cacccagcccatataatactagggttgagtgcatagggtggtcaagcacgtcatgccat

SEQ ID NO: 54135 - DNA, 60 bp, Artificial
  Synthetic oligonucleotide
atcctggagtaaaaggatttgcattcctagatggagagaactcatggctcggaaggacaa

SEQ ID NO: 54136 - DNA, 60 bp, Artificial
  Synthetic oligonucleotide
gtaaagactccagatcaggctacgaaatgttaaaggtcccaaatgcagagaccgacaccc

SEQ ID NO: 54137 - DNA, 60 bp, Artificial
  Synthetic oligonucleotide
aataactggtctggttattctggcattttctctgttgaaggcaaaagctgcatcaatagg

SEQ ID NO: 54138 - DNA, 60 bp, Artificial
  Synthetic oligonucleotide
gcctcccttaggtcactagttgcctcgtcaggcactctggagtttatcactgagggtttc

SEQ ID NO: 54139 - DNA, 60 bp, Artificial
  Synthetic oligonucleotide
tgtgccagattatgcctcccttaggtcactagttgcctcatcaggcactctggagtttat

SEQ ID NO: 54140 - DNA, 60 bp, Artificial
  Synthetic oligonucleotide
tgtaccagattatgcctcccttaggtcactagttgcctcgtcaggcactctggagtttat

SEQ ID NO: 54141 - DNA, 60 bp, Artificial
  Synthetic oligonucleotide
ttgtttgaaaagacaaggaggcaactgagggaaaatgctgaagacatgggcaacggttgc

SEQ ID NO: 54142 - DNA, 60 bp, Artificial
  Synthetic oligonucleotide
ggagtttatcactgagggtttcacttggacaggagtcactcagaatggagggagcaatgc

SEQ ID NO: 54143 - DNA, 60 bp, Artificial
  Synthetic oligonucleotide
ggtcactagttgcctcgtcaggcactctgaagtttatcactgagggtttcacttggacag

SEQ ID NO: 54144 - DNA, 60 bp, Artificial
  Synthetic oligonucleotide
taggtcactagttgcctcgtcaggcactctggagtttatcactgagggtttcacttggac

SEQ ID NO: 54145 - DNA, 60 bp, Artificial
  Synthetic oligonucleotide
tttgaaaagacaaggaggcaactgagggaaaatgctgaagacatgggcaacggttgcttc

SEQ ID NO: 54146 - DNA, 60 bp, Artificial
  Synthetic oligonucleotide
acatgttcgaaagtaagagcatgaagctgcggacacaaataccagcagaaatgcttgcaa

SEQ ID NO: 54147 - DNA, 60 bp, Artificial
  Synthetic oligonucleotide
tcatcctgagaggatcagtggcccataagtcctgcctgcctgcttgtgtgtacggacttg

SEQ ID NO: 54148 - DNA, 60 bp, Artificial
  Synthetic oligonucleotide
actcaagagtcagaatgtgtttgcatcaatggaacttgtacagtagtaatgactgatgga

SEQ ID NO: 54149 - DNA, 60 bp, Artificial
  Synthetic oligonucleotide
actcaggagtctgagtgcgtttgcatcaatggaacttgtacagtagtaatgactgatgga

SEQ ID NO: 54150 - DNA, 60 bp, Artificial
  Synthetic oligonucleotide
cgacaagggttcaatctctacaactaaaccctttcagaacatctcgagaatatcaatcgg

SEQ ID NO: 54151 - DNA, 60 bp, Artificial
  Synthetic oligonucleotide
ccgacaagggttcaatctctacaactaaaccctttcagaacatctcgagaatatcaatcg

SEQ ID NO: 54152 - DNA, 60 bp, Artificial
  Synthetic oligonucleotide
aacgggactctagcatacttactgacagccagacagcgaccaaaagaattcggatggcca

SEQ ID NO: 54153 - DNA, 60 bp, Artificial
  Synthetic oligonucleotide
tcattgctgaggaattccaatggaacacagtcaaacaaaatgggaaatccggggcttgca

SEQ ID NO: 54154 - DNA, 60 bp, Artificial
  Synthetic oligonucleotide
ccctcgaacaaccaagtagttccatgtgaaccaatcataatagaaaggaacataacagaa

SEQ ID NO: 54155 - DNA, 60 bp, Artificial
  Synthetic oligonucleotide
ttccctcgaacaaccaagtagttccatgtgaaccaatcataatagaaaggaacataacag

SEQ ID NO: 54156 - DNA, 60 bp, Artificial
  Synthetic oligonucleotide
cttcctttgacatgagtaatgaagggtcttatttcttcggagacaatgcagaggagtatg

SEQ ID NO: 54157 - DNA, 60 bp, Artificial
  Synthetic oligonucleotide
catggagtggctaaagacaagaccaatcctgtcacctctgactaaggggattttaggatt

SEQ ID NO: 54158 - DNA, 60 bp, Artificial
  Synthetic oligonucleotide
acttcaggtacctatggaacaggctcatggcctgatggggcgaatatcaattttatgcct

SEQ ID NO: 54159 - DNA, 60 bp, Artificial
  Synthetic oligonucleotide
cctcaggtacctatggaacaggctcatggcctgatggggcgaatatcaatttcatgccta

SEQ ID NO: 54160 - DNA, 60 bp, Artificial
  Synthetic oligonucleotide
cttcaggtacctatggaacaggctcatggcctgatggggcgaatatcaattttatgccta

SEQ ID NO: 54161 - DNA, 53 bp, Artificial
  Synthetic oligonucleotide
aaaatgagtcttctaaccgaggtcgaaacgtacgttctctctattgtcccgtc

SEQ ID NO: 54162 - DNA, 60 bp, Artificial
  Synthetic oligonucleotide
gttcgactctctgaaactctacagagattcgcttggagaagcagtaatgaggatgggaga

SEQ ID NO: 54163 - DNA, 57 bp, Artificial
  Synthetic oligonucleotide
cattaaagggaagaggcagcacacttggactcgacctgcgagtggccacaatggaag

SEQ ID NO: 54164 - DNA, 57 bp, Artificial
  Synthetic oligonucleotide
cattaaagggaagaggcagcacacttggactcgacctgcgggtggccacaatggaag

SEQ ID NO: 54165 - DNA, 60 bp, Artificial
  Synthetic oligonucleotide
ttatcggaccctattgatgaatgagttgggtgttccatttcatctggggactaagcaagt

SEQ ID NO: 54166 - DNA, 60 bp, Artificial
  Synthetic oligonucleotide
ggattatagcattgtttccagttatgtgtgctcaggacttgttggagacacacccagaaa

SEQ ID NO: 54167 - DNA, 60 bp, Artificial
  Synthetic oligonucleotide
cggaccctattgatgaatgagttgggtgttccatttcatctggggactaagcaagtgtgc

SEQ ID NO: 54168 - DNA, 60 bp, Artificial
  Synthetic oligonucleotide
cgagatactaacaaaaaccactgtggaccatatggccataatcaagaagtacacatcagg

SEQ ID NO: 54169 - DNA, 60 bp, Artificial
  Synthetic oligonucleotide
ggggaaacaatgctatcaatcacgattctgtttctgctcatagcagagggctcctctcag

SEQ ID NO: 54170 - DNA, 60 bp, Artificial
  Synthetic oligonucleotide
gacccctgggttttgcttaatgcatcttggttcaactccttcctcacacatgcactgaaa

SEQ ID NO: 54171 - DNA, 60 bp, Artificial
  Synthetic oligonucleotide
tgatccctgggttttgcttaatgcatcttggttcaactccttcctcacacatgcactgaa

SEQ ID NO: 54172 - DNA, 60 bp, Artificial
  Synthetic oligonucleotide
ccctgggttttgcttaatgcatcttggttcaactccttcctcacacatgcactgaaatag

SEQ ID NO: 54173 - DNA, 60 bp, Artificial
  Synthetic oligonucleotide
cgatccctgggttttgcttaatgcatcttggttcaactccttcctcacacatgcactgaa

SEQ ID NO: 54174 - DNA, 60 bp, Artificial
  Synthetic oligonucleotide
tgtctagggcccgaattgatgcacgaattgacttcgagtctggaaggattaagaaagaag

SEQ ID NO: 54175 - DNA, 60 bp, Artificial
  Synthetic oligonucleotide
gtctagggcccgaattgatgcacgaattgacttcgagtctggaaggattaagaaagaaga

SEQ ID NO: 54176 - DNA, 60 bp, Artificial
  Synthetic oligonucleotide
acaagtgtgcatagcatggtccagctcaagctgccatgatgggaaagcatggttacatgt

SEQ ID NO: 54177 - DNA, 60 bp, Artificial
  Synthetic oligonucleotide
aatcccgcacccgcgagatactaacaaaaaccactgtggaccatatggccataatcaaga

SEQ ID NO: 54178 - DNA, 60 bp, Artificial
  Synthetic oligonucleotide
gtgccataaggggatctgcccagtagtcatgacagatggcccagcaaacaatagggcagc

SEQ ID NO: 54179 - DNA, 60 bp, Artificial
  Synthetic oligonucleotide
gggtaggccagtaacagaaattccatcatgggcgggaaacattctcagaactcaagaatc

SEQ ID NO: 54180 - DNA, 60 bp, Artificial
  Synthetic oligonucleotide
gggggtaggccagtaacagaaattccatcatgggcgggaaacattctcagaactcaagaa

SEQ ID NO: 54181 - DNA, 60 bp, Artificial
  Synthetic oligonucleotide
gacaggggttcaatctctacaactaaaccctttcagaacatctcgagaatatcaatcggg

SEQ ID NO: 54182 - DNA, 60 bp, Artificial
  Synthetic oligonucleotide
ctgacagaggttcaatctctacaactaaaccctttcagaacatctcgagaatatcaatcg

SEQ ID NO: 54183 - DNA, 60 bp, Artificial
  Synthetic oligonucleotide
atgaaggatcttatttcttcggagacaatgcagaggagtacgacaattaaggaaaaatac

SEQ ID NO: 54184 - DNA, 60 bp, Artificial
  Synthetic oligonucleotide
tacagagacgaagcaatcaataatagattccagatacaaggagttaaattgactcaagga

SEQ ID NO: 54185 - DNA, 60 bp, Artificial
  Synthetic oligonucleotide
cattcttcggcaaaatccaacagaggaacaagctgtggacatatgcaaggcagcaatggg

SEQ ID NO: 54186 - DNA, 60 bp, Artificial
  Synthetic oligonucleotide
atagcataattgtattctgtggaacctcaggtacctatggaacaggctcatggcctgatg

SEQ ID NO: 54187 - DNA, 60 bp, Artificial
  Synthetic oligonucleotide
ggtcttatttcttcggagacaatgcagaggagtatgacaattaaagaaaaatacccttgt

SEQ ID NO: 54188 - DNA, 51 bp, Artificial
  Synthetic oligonucleotide
gagtctctgaaactctacagagattcgcttggagaagcagtaatgaggatg

SEQ ID NO: 54189 - DNA, 57 bp, Artificial
  Synthetic oligonucleotide
gactctctgaaactctacagagattcgcttggagaagcagtaatgaggatgggagac

SEQ ID NO: 54190 - DNA, 60 bp, Artificial
  Synthetic oligonucleotide
agtctctgaaactctacagagattcgcttggagaagcagtaatgaggatgggagacctcc

SEQ ID NO: 54191 - DNA, 60 bp, Artificial
  Synthetic oligonucleotide
gcgcaggcttgccgaccaaagtctcccaccgaacttctccagccttgaaaactttagagc

SEQ ID NO: 54192 - DNA, 60 bp, Artificial
  Synthetic oligonucleotide
cgctacatggcgagaagagttgagtcagaagtttgaagagatcagatggctaattgcaga

SEQ ID NO: 54193 - DNA, 60 bp, Artificial
  Synthetic oligonucleotide
agataaggcctcttctaatagatggtacagcctcattgagtcctggaatgatgatgggca

SEQ ID NO: 54194 - DNA, 60 bp, Artificial
  Synthetic oligonucleotide
ggtcttacaatgcggacgttcttgtcgctctggagaatcaacatacaattgacctgactg

SEQ ID NO: 54195 - DNA, 60 bp, Artificial
  Synthetic oligonucleotide
cctgctagatcaagcagaggactatttggggccatagctggattcatagaaggaggttgg

SEQ ID NO: 54196 - DNA, 60 bp, Artificial
  Synthetic oligonucleotide
tcaatctctacaactaagccctttcagaacatctcgagaatatcaatcggggactgtccc

SEQ ID NO: 54197 - DNA, 60 bp, Artificial
  Synthetic oligonucleotide
ctggcattccaatctgaatgatgccacatatcaaagaacaagggcacttgtgcgtactgg

SEQ ID NO: 54198 - DNA, 60 bp, Artificial
  Synthetic oligonucleotide
gcaatcaataacagattccagatacaaggagttaaattgactcaaggatacaaggacatc

SEQ ID NO: 54199 - DNA, 60 bp, Artificial
  Synthetic oligonucleotide
cggttgggatttccagcatggtggaggccatggtgtctagggcccgaattgatgcgcgaa

SEQ ID NO: 54200 - DNA, 60 bp, Artificial
  Synthetic oligonucleotide
actcatggaatggctaaagacaagaccaatcctgtcacctctgactaaggggattttagg

SEQ ID NO: 54201 - DNA, 60 bp, Artificial
  Synthetic oligonucleotide
actcatggagtggctaaagacaagaccaatcctgtcacctctgactaaggggattttagg

SEQ ID NO: 54202 - DNA, 60 bp, Artificial
  Synthetic oligonucleotide
ctcatggaatggctaaagacaagaccaatcctgtcacctctgactaaggggattttagga

SEQ ID NO: 54203 - DNA, 60 bp, Artificial
  Synthetic oligonucleotide
ctcatactgagaggatcagtggcccataagtcctgcttgcctgcttgtgtgtacggactt

SEQ ID NO: 54204 - DNA, 60 bp, Artificial
  Synthetic oligonucleotide
tcaggccccaataacaatgcttcggcagtggtctggtacaatgggaggccagtcaccgaa

SEQ ID NO: 54205 - DNA, 60 bp, Artificial
  Synthetic oligonucleotide
atctcaagaatgtcaatctgcatgtcaggccctaataacaatgcttcggcagtggtctgg

SEQ ID NO: 54206 - DNA, 60 bp, Artificial
  Synthetic oligonucleotide
ggaagaacaccgatcttgaggcactcatggaatggctaaagacaagaccaatcctgtcac

SEQ ID NO: 54207 - DNA, 60 bp, Artificial
  Synthetic oligonucleotide
ggcgatcatggaaaagaacatcatactgaaagcgaacttcagtgtgatctttaaccgatt

SEQ ID NO: 54208 - DNA, 60 bp, Artificial
  Synthetic oligonucleotide
cttgaggcactcatggaatggctaaagacaagaccaatcctgtcacctctgattaagggg

SEQ ID NO: 54209 - DNA, 60 bp, Artificial
  Synthetic oligonucleotide
cttgaggcactcatggaatggctaaagacaagaccaatcctgtcacctctgaccaagggg

SEQ ID NO: 54210 - DNA, 57 bp, Artificial
  Synthetic oligonucleotide
tgatgggatgcttgttgacagtattggttcatggtctcaaaatatcctcagaactca

SEQ ID NO: 54211 - DNA, 60 bp, Artificial
  Synthetic oligonucleotide
ggcaggccgaaagagagtagtgtattgtggacatccaatagtatagtagcgctttgtgga

SEQ ID NO: 54212 - DNA, 60 bp, Artificial
  Synthetic oligonucleotide
gcaatggggtttgctgccttcttgttctgggccatgtccaatgggtcttgcaggtgcaac

SEQ ID NO: 54213 - DNA, 60 bp, Artificial
  Synthetic oligonucleotide
aattgaagatctcatctttctggcacggtctgcactcatcttgagaggatcagtggccca

SEQ ID NO: 54214 - DNA, 60 bp, Artificial
  Synthetic oligonucleotide
gagatcgaagatctcatctttctggcacggtctgcactcatattgagagggtcagttgct

SEQ ID NO: 54215 - DNA, 60 bp, Artificial
  Synthetic oligonucleotide
atgctgagatcgaagatctcatctttctggcacggtctgcactcatattgagagggtcag

SEQ ID NO: 54216 - DNA, 59 bp, Artificial
  Synthetic oligonucleotide
aaaatgcaattggggtcctcatcggaggacttgaatggaatgataacacagttcgagtc

SEQ ID NO: 54217 - DNA, 60 bp, Artificial
  Synthetic oligonucleotide
aaaatgcaattggggtcctcatcggaggacttgaatggaatgataacacagttcgagtct

SEQ ID NO: 54218 - DNA, 60 bp, Artificial
  Synthetic oligonucleotide
aaaaatgcaattggggtcctcatcggaggacttgaatggaatgataacacagttcgagtc

SEQ ID NO: 54219 - DNA, 60 bp, Artificial
  Synthetic oligonucleotide
aagatgcaattggggtcctcatcggaggacttgaatggaatgataacacagttcgagtct

SEQ ID NO: 54220 - DNA, 60 bp, Artificial
  Synthetic oligonucleotide
gagagacagaaaatagaaggggtcaagctggaatctgaaggaacctacaaaatcctcacc

SEQ ID NO: 54221 - DNA, 60 bp, Artificial
  Synthetic oligonucleotide
ctccaacactgtgtcaagcttccaggtagactgctttctttggcatgtccgcaaacgatt

SEQ ID NO: 54222 - DNA, 60 bp, Artificial
  Synthetic oligonucleotide
cttcctttgacatgagtaacgagggatcttatttcttcggagacaatgcagaggagtatg

SEQ ID NO: 54223 - DNA, 60 bp, Artificial
  Synthetic oligonucleotide
cttcctttgacatgagcaatgagggatcttatttcttcggagacaatgcagaggagtatg

SEQ ID NO: 54224 - DNA, 60 bp, Artificial
  Synthetic oligonucleotide
cttcctttgacatgagtaatgagggatcttatttcttcggagacaatgcagaggagtatg

SEQ ID NO: 54225 - DNA, 60 bp, Artificial
  Synthetic oligonucleotide
tccaatgggacaatggtgaaaaccttgactgatgaccaagtagaagttgtcactgcccag

SEQ ID NO: 54226 - DNA, 60 bp, Artificial
  Synthetic oligonucleotide
atgggacaatggtgaaaaccttgactgatgaccaagtagaagttgtcactgcccaagaat

SEQ ID NO: 54227 - DNA, 60 bp, Artificial
  Synthetic oligonucleotide
agtgggtatgcacaaacagattgtgtattggaagcaatggctttccttgaagaatcccac

SEQ ID NO: 54228 - DNA, 57 bp, Artificial
  Synthetic oligonucleotide
gatactcaggggcattcatagactactgggcaaacaaagagtgcttcaatccttgtt

SEQ ID NO: 54229 - DNA, 60 bp, Artificial
  Synthetic oligonucleotide
gatactcaggggcattcatagactactgggcaaacaaagagtgcttcaatccttgttttt

SEQ ID NO: 54230 - DNA, 60 bp, Artificial
  Synthetic oligonucleotide
ttgggaactgccccaaatatgttggagtgaagagtctcaaactggcagttggtctaagaa

SEQ ID NO: 54231 - DNA, 60 bp, Artificial
  Synthetic oligonucleotide
gtaaagagtctcaaactggcagttggtctaagaaatgtgcctgctagatcaagtagagga

SEQ ID NO: 54232 - DNA, 60 bp, Artificial
  Synthetic oligonucleotide
tatgcaagccttgcaactactgcttgaagtagagcaagagataagaactttctcgtttca

SEQ ID NO: 54233 - DNA, 60 bp, Artificial
  Synthetic oligonucleotide
agcagagcagaatgcagttttcttctctaactgtgaatgtgagaggctcaggaatgagga

SEQ ID NO: 54234 - DNA, 60 bp, Artificial
  Synthetic oligonucleotide
gaagataatatgcatttcagccacaggaatgacactatcggtagtaagcctgctgatagg

SEQ ID NO: 54235 - DNA, 60 bp, Artificial
  Synthetic oligonucleotide
agggaggcccaaagagagtagtgtactgtggacttcaaatagcattgtagctctctgtgg

SEQ ID NO: 54236 - DNA, 60 bp, Artificial
  Synthetic oligonucleotide
agggtggtcaagcacgtcatgccatgacggcatatcaaggatgtcaatatgcatgtcagg

SEQ ID NO: 54237 - DNA, 60 bp, Artificial
  Synthetic oligonucleotide
ggatggtcaagcacgtcatgccacgatggcatatcaaggatgtcaatatgcatgtcggga

SEQ ID NO: 54238 - DNA, 60 bp, Artificial
  Synthetic oligonucleotide
tgggcaaataaagagtgcttcaatccttgtttttatgtagagctaattagagggaggccc

SEQ ID NO: 54239 - DNA, 60 bp, Artificial
  Synthetic oligonucleotide
ggaattaatcagagggagacccaaagagagtagtgtactgtggacttcaaatagcattgt

SEQ ID NO: 54240 - DNA, 60 bp, Artificial
  Synthetic oligonucleotide
gggaggcccaaagagagtagtgtactgtggacttcaaatagcattgtagctctctgtgga

SEQ ID NO: 54241 - DNA, 60 bp, Artificial
  Synthetic oligonucleotide
gatccctgggttttgcttaatgcttcttggttcaactccttcctcacacatgcactgaaa

SEQ ID NO: 54242 - DNA, 60 bp, Artificial
  Synthetic oligonucleotide
gtgcgtactggaatggatcccaggatgtgctctctgatgcaaggatcaactctcccgagg

SEQ ID NO: 54243 - DNA, 50 bp, Artificial
  Synthetic oligonucleotide
tccagctcaagctgtcatgatgggaaagcatggttacatgtttgtgtcac

SEQ ID NO: 54244 - DNA, 60 bp, Artificial
  Synthetic oligonucleotide
catagcatggtccagctcaagctgtcatgatgggaaagcatggttacatgtttgtgtcac

SEQ ID NO: 54245 - DNA, 60 bp, Artificial
  Synthetic oligonucleotide
atcgtaaagaaaatgcttatgtctctgtagtgtcttcacattacaacaggagattcaccc

SEQ ID NO: 54246 - DNA, 60 bp, Artificial
  Synthetic oligonucleotide
tcacattacaacaggagattcaccccagaaatagcaaaaagacccaaagtaagaggtcaa

SEQ ID NO: 54247 - DNA, 60 bp, Artificial
  Synthetic oligonucleotide
ccttgtactatggggtgttcatcacccgtctaacatagaggaccaaaagaccatctatcg

SEQ ID NO: 54248 - DNA, 60 bp, Artificial
  Synthetic oligonucleotide
accaaaagaccatctatcgtaaagaaaatgcttatgtctctgtagtgtcttcacattaca

SEQ ID NO: 54249 - DNA, 60 bp, Artificial
  Synthetic oligonucleotide
gcgaacaactcaaccgacactgttgacacagtactcgaaaagaacgtgacagtgacacac

SEQ ID NO: 54250 - DNA, 60 bp, Artificial
  Synthetic oligonucleotide
ccataaggggaaaagcagtttttacagaaacttgctatggctgacggagaaaaatggctc

SEQ ID NO: 54251 - DNA, 60 bp, Artificial
  Synthetic oligonucleotide
gctcagtatcatcattcgagagattcgaaatattccccaaggaaagttcatggcccaacc

SEQ ID NO: 54252 - DNA, 60 bp, Artificial
  Synthetic oligonucleotide
agttcatggcccaaccacaacgtaaccaaaggagtaacggcatcatgttcccataagggg

SEQ ID NO: 54253 - DNA, 60 bp, Artificial
  Synthetic oligonucleotide
caaacaaggtgaactctataatcgagaaaatgaacactcaattcacagctgtgggtaaag

SEQ ID NO: 54254 - DNA, 60 bp, Artificial
  Synthetic oligonucleotide
cgtgacagtgacacactctgtcaacctacttgaggacaatcacaacgggaaactatgcaa

SEQ ID NO: 54255 - DNA, 60 bp, Artificial
  Synthetic oligonucleotide
gcccaaccacaacgtaaccaaaggagtaacggcatcatgttcccataaggggaaaagcag

SEQ ID NO: 54256 - DNA, 60 bp, Artificial
  Synthetic oligonucleotide
tggtcctacattgcagaaacaccaaactccgagaatggaacatgttacccagggtatttc

SEQ ID NO: 54257 - DNA, 60 bp, Artificial
  Synthetic oligonucleotide
ttttctaagaaatcatggtcctacattgcagaaacaccaaactccgagaatggaacatgt

SEQ ID NO: 54258 - DNA, 60 bp, Artificial
  Synthetic oligonucleotide
catcacctcaaacgcatcgatggatgaatgtgacgcgaagtgtcaaccaccccagggagc

SEQ ID NO: 54259 - DNA, 60 bp, Artificial
  Synthetic oligonucleotide
gcaaactaaaaggaatagcgccactacaattggggaaatgcaacattgccggatggatct

SEQ ID NO: 54260 - DNA, 60 bp, Artificial
  Synthetic oligonucleotide
caacgggaaactatgcaaactaaaaggaatagcgccactacaattggggaaatgcaacat

SEQ ID NO: 54261 - DNA, 60 bp, Artificial
  Synthetic oligonucleotide
tggaacatgttacccagggtatttcgccgactatgaagaactgagggaacaattgagctc

SEQ ID NO: 54262 - DNA, 60 bp, Artificial
  Synthetic oligonucleotide
gccatggtatgctttcgcactgagtagaggctttgggccaggtatcatcacctcaaacgc

SEQ ID NO: 54263 - DNA, 60 bp, Artificial
  Synthetic oligonucleotide
tgcccaaagtacgtcaggagtacaaaattaaggatggttacaggactaaggaacatccca

SEQ ID NO: 54264 - DNA, 59 bp, Artificial
  Synthetic oligonucleotide
aatgcaacattgccggatggatcttaggaaacccagaatgcgaatcactgttttctaag

SEQ ID NO: 54265 - DNA, 60 bp, Artificial
  Synthetic oligonucleotide
aaaatgaaaggactttggatttccatgactcaaatgtgaagaacctgtatgagaaggtaa

SEQ ID NO: 54266 - DNA, 58 bp, Artificial
  Synthetic oligonucleotide
actcaattcacagctgtgggtaaagaattcaacaaactagaaaaaaggatggaaaact

SEQ ID NO: 54267 - DNA, 60 bp, Artificial
  Synthetic oligonucleotide
gagaaggtaaaaagccaattaaagaataatgccaaagaaataggaaacgggtgttttgaa

SEQ ID NO: 54268 - DNA, 60 bp, Artificial
  Synthetic oligonucleotide
ccaattaaagaataatgccaaagaaataggaaacgggtgttttgaattctaccacaagtg

SEQ ID NO: 54269 - DNA, 60 bp, Artificial
  Synthetic oligonucleotide
gtgttttgaattctaccacaagtgtaacaatgaatgcatggaaagtgtaaaaaatggaac

SEQ ID NO: 54270 - DNA, 60 bp, Artificial
  Synthetic oligonucleotide
aaaatggaacttatgactatccaaaatattccgaggaatcaaaattaaacagggaaaaaa

SEQ ID NO: 54271 - DNA, 60 bp, Artificial
  Synthetic oligonucleotide
gaacaccgatcttgaggcactcatggaatggctaaagacaagaccaatcctgtcacctct

SEQ ID NO: 54272 - DNA, 60 bp, Artificial
  Synthetic oligonucleotide
aaacaccgatcttgaggcactcatggaatggctaaagacaagaccaatcctgtcacctct

SEQ ID NO: 54273 - DNA, 60 bp, Artificial
  Synthetic oligonucleotide
caccgaccttgaggcactcatggaatggctaaagacaagaccaatcctgtcacctctgac

SEQ ID NO: 54274 - DNA, 60 bp, Artificial
  Synthetic oligonucleotide
cgggcggagaagtgagaaatgatgatgttgaccagagtttgatcattgctgctagaaacc

SEQ ID NO: 54275 - DNA, 60 bp, Artificial
  Synthetic oligonucleotide
gatctttccagacacaatttggaatgtgacttacagtggaacaagcaaagcatgttcaaa

SEQ ID NO: 54276 - DNA, 60 bp, Artificial
  Synthetic oligonucleotide
tttggcaaccaaacaagtgtgcatagcatggtccagctcaagctgccatgatgggaaagc

SEQ ID NO: 54277 - DNA, 56 bp, Artificial
  Synthetic oligonucleotide
atggaccaggcaatcatggataagaaaatcatactgaaagcgaacttcagtgtgat

SEQ ID NO: 54278 - DNA, 60 bp, Artificial
  Synthetic oligonucleotide
ggataagaacatcatactgaaagcgaacttcagtgtgatctttgatcggctggagacact

SEQ ID NO: 54279 - DNA, 60 bp, Artificial
  Synthetic oligonucleotide
atggaccaggcaatcatggataagaaaatcatactgaaagcgaacttcagtgtgattttc

SEQ ID NO: 54280 - DNA, 60 bp, Artificial
  Synthetic oligonucleotide
agatctaatgtcacagtcccgcacccgcgagatactcactaagaccactgtggaccatat

SEQ ID NO: 54281 - DNA, 60 bp, Artificial
  Synthetic oligonucleotide
ctaatgtcacagtcccgcacccgcgagatactcactaagaccactgtggaccatatggcc

SEQ ID NO: 54282 - DNA, 60 bp, Artificial
  Synthetic oligonucleotide
gagatctaatgtcacagtcccgcacccgcgagatactcactaagaccactgtggaccata

SEQ ID NO: 54283 - DNA, 60 bp, Artificial
  Synthetic oligonucleotide
gagatttaatgtcacagtcccgcacccgcgagatactcactaagaccactgtggaccata

SEQ ID NO: 54284 - DNA, 60 bp, Artificial
  Synthetic oligonucleotide
ctcaaactcagtgactatgaagggaggctgatccaaaacagcataacaatagagagaatg

SEQ ID NO: 54285 - DNA, 60 bp, Artificial
  Synthetic oligonucleotide
ccaagtagaagttgtcactgcccaggaattagtggaatcgcaacatctaccggaattgtg

SEQ ID NO: 54286 - DNA, 60 bp, Artificial
  Synthetic oligonucleotide
agaagttgtcactgcccaggaattagtggaatcgcaacatctaccggaattgtgtcctag

SEQ ID NO: 54287 - DNA, 60 bp, Artificial
  Synthetic oligonucleotide
tgcaagccttacaactactgcttgaagtggagcaagagataagaactttctcgtttcagc

SEQ ID NO: 54288 - DNA, 60 bp, Artificial
  Synthetic oligonucleotide
gaatggtgcggaatgggatgtcttcatagagcgacccaccgctgtggacacttgttatcc

SEQ ID NO: 54289 - DNA, 60 bp, Artificial
  Synthetic oligonucleotide
ctggagtttatcactgagggtttcacttggactggggtcactcagaatgggggaagcaat

SEQ ID NO: 54290 - DNA, 52 bp, Artificial
  Synthetic oligonucleotide
ctggagtttatcactgagggtttcacttggactggggtcactcagaatgggg

SEQ ID NO: 54291 - DNA, 60 bp, Artificial
  Synthetic oligonucleotide
cgcaggcttgccgaccaaagtctcccaccgaatttctccagccctgaaaactttagagcc

SEQ ID NO: 54292 - DNA, 60 bp, Artificial
  Synthetic oligonucleotide
aatgtcaatctgcatgtcaggacctaataacaatgcttcggcagtggtctggtacaatgg

SEQ ID NO: 54293 - DNA, 60 bp, Artificial
  Synthetic oligonucleotide
atctgcatgtcaggacctaataacaatgcttcggcagtggtctggtacaatggaaggcca

SEQ ID NO: 54294 - DNA, 60 bp, Artificial
  Synthetic oligonucleotide
atgacggcatctcaagaatgtcaatctgcatgtcaggacctaataacaatgcgtcggcag

SEQ ID NO: 54295 - DNA, 60 bp, Artificial
  Synthetic oligonucleotide
gaatgtcaatctgcatgtcaggacctaataacaatgcttcggcagtggtctggtacaatg

SEQ ID NO: 54296 - DNA, 60 bp, Artificial
  Synthetic oligonucleotide
actgtcgcctcatctcttgtgcttgcaatggggtttgctgccttcatgttctgggccatg

SEQ ID NO: 54297 - DNA, 60 bp, Artificial
  Synthetic oligonucleotide
ttttggggtttgtgttcacgctcaccgtgcccagtgagcgaggactgcagcgtagacgct

SEQ ID NO: 54298 - DNA, 60 bp, Artificial
  Synthetic oligonucleotide
acataatggactccaacactgtgtcaagctttcaggtagactgtttcctttggcatatcc

SEQ ID NO: 54299 - DNA, 60 bp, Artificial
  Synthetic oligonucleotide
aggattgtaaaattgcccccttgatggtagcatacatgctagaaagagagttggtccgca

SEQ ID NO: 54300 - DNA, 60 bp, Artificial
  Synthetic oligonucleotide
attgaagagctcagacggcaaaaatagtgaatttagcttgtccttcatgaaaaaatgcct

SEQ ID NO: 54301 - DNA, 60 bp, Artificial
  Synthetic oligonucleotide
ggaacaggctcatggcctgatggggcgaatatcaattttatgcctatatgagctttcgca

SEQ ID NO: 54302 - DNA, 60 bp, Artificial
  Synthetic oligonucleotide
gcggtttcttcagtagactaaactggttaaccaaatcaggaagcacatatccagtgctga

SEQ ID NO: 54303 - DNA, 60 bp, Artificial
  Synthetic oligonucleotide
aggcatcaaaattctgagggtacaggacaagcagcagatcttaaaagcactcaagcagcc

SEQ ID NO: 54304 - DNA, 60 bp, Artificial
  Synthetic oligonucleotide
gacaaactatacatttggggagttcaccacccgagcacgaaccaagaacaaaccaacctg

SEQ ID NO: 54305 - DNA, 60 bp, Artificial
  Synthetic oligonucleotide
aattttgacaaactatacatttggggagttcaccacccgagcacgaaccaagaacaaacc

SEQ ID NO: 54306 - DNA, 60 bp, Artificial
  Synthetic oligonucleotide
aagctatacatttggggggttcaccacccgagcacgaaccaagaacaaaccaacctgtat

SEQ ID NO: 54307 - DNA, 60 bp, Artificial
  Synthetic oligonucleotide
acaagctatacatttggggggttcaccacccgagcacgaaccaagaacaaaccaacctgt

SEQ ID NO: 54308 - DNA, 60 bp, Artificial
  Synthetic oligonucleotide
ggcttaaatactactttgccattccacaatgtcagtaaatatgcatttggaaactgccca

SEQ ID NO: 54309 - DNA, 60 bp, Artificial
  Synthetic oligonucleotide
caccgatcttgaggctctcatggaatggctaaagacaagaccaatcctgtcacctctgac

SEQ ID NO: 54310 - DNA, 60 bp, Artificial
  Synthetic oligonucleotide
tgataacacagttcgagtctctgaaactctacagagattcgcttggagaagcagcgatga

SEQ ID NO: 54311 - DNA, 60 bp, Artificial
  Synthetic oligonucleotide
ccgcaaacgatttgcagaccaagaactgggtgatgccccattccttgaccggcttcgcag

SEQ ID NO: 54312 - DNA, 60 bp, Artificial
  Synthetic oligonucleotide
ggacatcatgccgtatccaatgggacaatggtgaaaaccttgactgatgaccaagtagaa

SEQ ID NO: 54313 - DNA, 60 bp, Artificial
  Synthetic oligonucleotide
aaaatgcaattggggtcctcatcgggggacttgaatggaatgataacacagttcgagtct

SEQ ID NO: 54314 - DNA, 60 bp, Artificial
  Synthetic oligonucleotide
atgtatcgtgcggtcttggtaaatgttatcaatttgcacttgggcaggggaccaccttgg

SEQ ID NO: 54315 - DNA, 60 bp, Artificial
  Synthetic oligonucleotide
gggatggacaggaatgatagatggatggtatggttatcaccatcagaatgaacaaggatc

SEQ ID NO: 54316 - DNA, 60 bp, Artificial
  Synthetic oligonucleotide
atagaaggggtcaagctggaatctgaaggaacctacaaaatcctcaccatttattcgact

SEQ ID NO: 54317 - DNA, 60 bp, Artificial
  Synthetic oligonucleotide
gataatcactcaccgagtgacatcaacaccatggcgtctcaaggcaccaaacgatcttat

SEQ ID NO: 54318 - DNA, 60 bp, Artificial
  Synthetic oligonucleotide
gggatggactggaatgatagatggatggtatggttatcatcaccagaatgagcaaggatc

SEQ ID NO: 54319 - DNA, 60 bp, Artificial
  Synthetic oligonucleotide
gcaattgaggagtgcctgattaatgatccctgggttttgcttaatgcatcttggttcaac

SEQ ID NO: 54320 - DNA, 60 bp, Artificial
  Synthetic oligonucleotide
ggagtgcctgattaatgatccctgggttttgcttaatgcatcttggttcaactccttcct

SEQ ID NO: 54321 - DNA, 60 bp, Artificial
  Synthetic oligonucleotide
gagtgcctgattaatgatccctgggttttgcttaatgcatcttggttcaactccttcctc

SEQ ID NO: 54322 - DNA, 60 bp, Artificial
  Synthetic oligonucleotide
attgaggagtgcctgattaatgatccctgggttttgcttaatgcatcttggttcaactcc

SEQ ID NO: 54323 - DNA, 60 bp, Artificial
  Synthetic oligonucleotide
aggagtgcctgattaatgatccctgggttttgcttaatgcatcttggttcaactccttcc

SEQ ID NO: 54324 - DNA, 60 bp, Artificial
  Synthetic oligonucleotide
gcctgattaatgatccctgggttttgcttaatgcatcttggttcaactccttcctcacac

SEQ ID NO: 54325 - DNA, 60 bp, Artificial
  Synthetic oligonucleotide
atggatcattgcagtgcagaatttgcatctagggttgtgagttcagattttaattaaaaa

SEQ ID NO: 54326 - DNA, 53 bp, Artificial
  Synthetic oligonucleotide
cagcatgcccatacaatggtaggtcttcctttttcaggaatgtagtgtggttg

SEQ ID NO: 54327 - DNA, 60 bp, Artificial
  Synthetic oligonucleotide
taatattgtggggaatccaccaccctaatgatgcagcagaacaaacaaaactctaccaga

SEQ ID NO: 54328 - DNA, 60 bp, Artificial
  Synthetic oligonucleotide
ccaatatggaggaccttctgatattgtggggaatccaccaccctaatgatgcagcagaac

SEQ ID NO: 54329 - DNA, 60 bp, Artificial
  Synthetic oligonucleotide
ggatggcttcttggaaacccaatgtgtgatgaattcttgaatgtaccggaatggtcatac

SEQ ID NO: 54330 - DNA, 60 bp, Artificial
  Synthetic oligonucleotide
accaccctaatgatgcagcagaacaaacaaaactctaccagaactcaaacacttatgtgt

SEQ ID NO: 54331 - DNA, 60 bp, Artificial
  Synthetic oligonucleotide
acttatgtgtctgtaggaacatcaacactgaatcagaggtcaatcccagaaatagctacc

SEQ ID NO: 54332 - DNA, 60 bp, Artificial
  Synthetic oligonucleotide
gtgtctgtaggaacatcaacactgaatcagaggtcaatcccagaaatagctaccaggccc

SEQ ID NO: 54333 - DNA, 60 bp, Artificial
  Synthetic oligonucleotide
ggacaatactaaggccgaacagtgcgatcagctttgaaagtaacgggaactttatagctc

SEQ ID NO: 54334 - DNA, 60 bp, Artificial
  Synthetic oligonucleotide
ggccgaacagtgcgatcagctttgaaagtaacgggaactttatagctcctgaatatgcat

SEQ ID NO: 54335 - DNA, 60 bp, Artificial
  Synthetic oligonucleotide
gcgttgtcaaaagtgaccaaatctgcattggttatcatgcaaacaattcaacagaacagg

SEQ ID NO: 54336 - DNA, 60 bp, Artificial
  Synthetic oligonucleotide
ggggtctaatctatcaaaatggaaagaatagtgattgcccttgcaataatcagcgttgtc

SEQ ID NO: 54337 - DNA, 60 bp, Artificial
  Synthetic oligonucleotide
gcccttgcaataatcagcattgtcaaaggtgaccaaatctgcattggttatcatgcaaac

SEQ ID NO: 54338 - DNA, 60 bp, Artificial
  Synthetic oligonucleotide
ggtcacacatgctcaagacatactggaaaaagagcacaacgggaaactctgcagtctcag

SEQ ID NO: 54339 - DNA, 60 bp, Artificial
  Synthetic oligonucleotide
gcagtctcagaggagtgaggcccctcattctgaaggattgcagtgtggctggatggcttc

SEQ ID NO: 54340 - DNA, 60 bp, Artificial
  Synthetic oligonucleotide
gcaaacaattcaacagaacaggttgacacaatcatggagaagaacgtgacggtcacacat

SEQ ID NO: 54341 - DNA, 60 bp, Artificial
  Synthetic oligonucleotide
gaacaggttgacacaatcatggagaagaacgtgacggtcacacatgctcaagacatactg

SEQ ID NO: 54342 - DNA, 60 bp, Artificial
  Synthetic oligonucleotide
tcaatgggcacttatcagatactatcaatctactcaacagtggcgagttccctagcactg

SEQ ID NO: 54343 - DNA, 60 bp, Artificial
  Synthetic oligonucleotide
cctagcactggcaatcatggtagctggtctgtctttttggatgtgctacaatggatcatt

SEQ ID NO: 54344 - DNA, 60 bp, Artificial
  Synthetic oligonucleotide
cacaagtgtgacaatgaatgcatggaaagtgtgagaaatggaacgtatgactatccacaa

SEQ ID NO: 54345 - DNA, 58 bp, Artificial
  Synthetic oligonucleotide
atggaacgtatgactatccacaatactcagaagaatcaaggctaaacagggaggaaat

SEQ ID NO: 54346 - DNA, 60 bp, Artificial
  Synthetic oligonucleotide
ttttgagttctatcacaagtgtgacaatgaatgcatggaaagtgtgagaaatggaacgta

SEQ ID NO: 54347 - DNA, 60 bp, Artificial
  Synthetic oligonucleotide
acgaaagaactctggatttccatgattcaaatgtcaggaacttatacgataaggtccgac

SEQ ID NO: 54348 - DNA, 60 bp, Artificial
  Synthetic oligonucleotide
aaggtccgactccagctgagagacaatgcaaaagaattaggcaatgggtgttttgagttc

SEQ ID NO: 54349 - DNA, 60 bp, Artificial
  Synthetic oligonucleotide
atggacttacaatgcagaacttctggtgctcatggaaaacgaaagaactctggatttcca

SEQ ID NO: 54350 - DNA, 60 bp, Artificial
  Synthetic oligonucleotide
atggtcatacattgtagaaaaagacaatccggtcaatggcttgtgctatccaggagactt

SEQ ID NO: 54351 - DNA, 56 bp, Artificial
  Synthetic oligonucleotide
aaaaggataatgcgtacccaacaataaagaggacctacaacaacaccaatatggag

SEQ ID NO: 54352 - DNA, 60 bp, Artificial
  Synthetic oligonucleotide
gctataaattccagtatgcctttccataatgtccatccccttaccattggagagtgcccc

SEQ ID NO: 54353 - DNA, 60 bp, Artificial
  Synthetic oligonucleotide
ccccagtaggtgctataaattccagtatgcctttccataatgtccatccccttaccattg

SEQ ID NO: 54354 - DNA, 60 bp, Artificial
  Synthetic oligonucleotide
catgaaaagtgaactggagtatggtaactgtaataccaaatgtcagaccccagtaggtgc

SEQ ID NO: 54355 - DNA, 60 bp, Artificial
  Synthetic oligonucleotide
gacctacaacaacaccaatatggaggaccttctgatattgtggggaatccaccaccctaa

SEQ ID NO: 54356 - DNA, 60 bp, Artificial
  Synthetic oligonucleotide
aatcgacgggatcaccaataaagtaaattcaatcattgacaaaatgaacactcaattcaa

SEQ ID NO: 54357 - DNA, 60 bp, Artificial
  Synthetic oligonucleotide
tgccccaagtatgtcaaatccgacaaactggtccttgcaacaggactgaggaacgtgccc

SEQ ID NO: 54358 - DNA, 60 bp, Artificial
  Synthetic oligonucleotide
cttaccattggagagtgccccaagtatgtcaaatccgacaaactggtccttgcaacagga

SEQ ID NO: 54359 - DNA, 60 bp, Artificial
  Synthetic oligonucleotide
caggagtgagctcagcatgcccatacaacggtagatcttcctttttcaggaatgtagtgt

SEQ ID NO: 54360 - DNA, 60 bp, Artificial
  Synthetic oligonucleotide
aatgtagtgtggttgatcaaaaaggataatgcgtacccaacaataaagaggacctacaac

SEQ ID NO: 54361 - DNA, 60 bp, Artificial
  Synthetic oligonucleotide
gtaaactcaatcattgacaaaatgaacactcaattcgaagccgttgggaaggaattcaac

SEQ ID NO: 54362 - DNA, 60 bp, Artificial
  Synthetic oligonucleotide
gaaaattcagataatccctaggagctcttggtccaatcatgatgcctcatcaggagtgag

SEQ ID NO: 54363 - DNA, 56 bp, Artificial
  Synthetic oligonucleotide
aaaagacaatccggtcaatggcttgtgctatccaggagacttcaacgattatgaag

SEQ ID NO: 54364 - DNA, 60 bp, Artificial
  Synthetic oligonucleotide
ccctaggagctcttggtccaatcatgatgcctcatcaggagtgagctcagcatgcccata

SEQ ID NO: 54365 - DNA, 60 bp, Artificial
  Synthetic oligonucleotide
aattcctaggagctcttggtccaatcatgatgcctcatcaggagtgagctcagcatgccc

SEQ ID NO: 54366 - DNA, 60 bp, Artificial
  Synthetic oligonucleotide
agcaaaagcaggggtctaatctatcaaaatggaaagaatagtgattgcccttgcaataat

SEQ ID NO: 54367 - DNA, 60 bp, Artificial
  Synthetic oligonucleotide
tttatagctcctgaatatgcatacaagatagttaaaaaaggagattcagcaatcatgaaa

SEQ ID NO: 54368 - DNA, 60 bp, Artificial
  Synthetic oligonucleotide
gtttctagatgtatggacttacaatgcagaacttctggtgctcatggaaaacgaaagaac

SEQ ID NO: 54369 - DNA, 60 bp, Artificial
  Synthetic oligonucleotide
gcgtactgggatggatcccaggatgtgctctctgatgcaaggctcaactcttccgaggag

SEQ ID NO: 54370 - DNA, 60 bp, Artificial
  Synthetic oligonucleotide
aaccacatactggtgggacggactccaatcctctgatgatttcgccctcatagtgaatgc

SEQ ID NO: 54371 - DNA, 60 bp, Artificial
  Synthetic oligonucleotide
gctttttgctcgttgcactacttttagccttcatgttgtgggcttgtcaaaacggaaaca

SEQ ID NO: 54372 - DNA, 60 bp, Artificial
  Synthetic oligonucleotide
gctttttgctcgttgcactacttttagccttcattttgtgggcttgtcaaaacgggaaca

SEQ ID NO: 54373 - DNA, 60 bp, Artificial
  Synthetic oligonucleotide
gttcttgcaggcattgcaactcttacttgaagttgagagtgagataaggacattttcttt

SEQ ID NO: 54374 - DNA, 60 bp, Artificial
  Synthetic oligonucleotide
gcaggcattgcaactcttacttgaagttgagagtgagataaggacattttcttttcagct

SEQ ID NO: 54375 - DNA, 60 bp, Artificial
  Synthetic oligonucleotide
cctagtattgttagtctccctgggggcaatcagtttctggatgtgttctaatgggtcatt

SEQ ID NO: 54376 - DNA, 60 bp, Artificial
  Synthetic oligonucleotide
cactcaatgagtgacatcaacatcatggcgtctcaaggcaccaaacgatcttatgaacag

SEQ ID NO: 54377 - DNA, 60 bp, Artificial
  Synthetic oligonucleotide
cactcactgagtgacatcaacatcatggcgtctcaaggcaccaaacgatcttatgaacag

SEQ ID NO: 54378 - DNA, 60 bp, Artificial
  Synthetic oligonucleotide
gcaggcaaaccatttgaatggatgtcaatccgactttacttttcttaaaagttccagcgc

SEQ ID NO: 54379 - DNA, 60 bp, Artificial
  Synthetic oligonucleotide
tgtatagcatggtccagctcaagctgccatgatgggaaagcatggttacatgtttgtgtt

SEQ ID NO: 54380 - DNA, 60 bp, Artificial
  Synthetic oligonucleotide
tatgcatagcatggtccagctcaagctgccatgatgggaaagcatggttacatgtttgtg

SEQ ID NO: 54381 - DNA, 60 bp, Artificial
  Synthetic oligonucleotide
tgtgcatagcatggtccagctcaagctgccatgatgggaaagcatggttacatgtttgta

SEQ ID NO: 54382 - DNA, 60 bp, Artificial
  Synthetic oligonucleotide
ggctaatgtgttaattgggcaaggagacgtagtgttggtaatgaaacggaaacgggactc

SEQ ID NO: 54383 - DNA, 60 bp, Artificial
  Synthetic oligonucleotide
aaggctaatgtgttaattgggcaaggagacgtagtgttggtaatgaaacggaaacgggac

SEQ ID NO: 54384 - DNA, 60 bp, Artificial
  Synthetic oligonucleotide
catacttactgacagccagacagcgaccaaaaggattcggatggccatcaattagtgtcg

SEQ ID NO: 54385 - DNA, 60 bp, Artificial
  Synthetic oligonucleotide
gtacggtttcaggcatcaaaattctgagggcacaggacaagcagcagatcttaaaagcac

SEQ ID NO: 54386 - DNA, 60 bp, Artificial
  Synthetic oligonucleotide
gtacggcttcaggcatcaaaattctgagggcacaggacaagcagcagatcttaaaagcac

SEQ ID NO: 54387 - DNA, 60 bp, Artificial
  Synthetic oligonucleotide
aggcatcaaaattctgagggcacaggacaagcagcagatcttaaaagcactcaagcagcc

SEQ ID NO: 54388 - DNA, 60 bp, Artificial
  Synthetic oligonucleotide
ggcatcaaaattctgagggcacaggacaagcagcagatcttaaaagcactcaagcagcca

SEQ ID NO: 54389 - DNA, 60 bp, Artificial
  Synthetic oligonucleotide
tgatagacggttggtacggtttcaggcatcaaaattctgagggcacaggacaagcagcag

SEQ ID NO: 54390 - DNA, 60 bp, Artificial
  Synthetic oligonucleotide
acatttggggggttcaccaccctagcacggaccaagaacaaaccaacctgtatgttcaag

SEQ ID NO: 54391 - DNA, 60 bp, Artificial
  Synthetic oligonucleotide
acatttggggggttcaccacccgagcacgaaccaagaacaaaccaacctgtatgttcaag

SEQ ID NO: 54392 - DNA, 60 bp, Artificial
  Synthetic oligonucleotide
ggttggtacggtttcaggcatcaaaattctgagggcacaggacaagcagcagatcttaaa

SEQ ID NO: 54393 - DNA, 58 bp, Artificial
  Synthetic oligonucleotide
ggggttcaccacccgagcacgaaccaagaacaaaccaacctgtatgttcaagcatcag

SEQ ID NO: 54394 - DNA, 60 bp, Artificial
  Synthetic oligonucleotide
gttttgctggggttcatcatgtgggcctgccagagaggcaacattaggtgcaacatttgc

SEQ ID NO: 54395 - DNA, 60 bp, Artificial
  Synthetic oligonucleotide
gacggttggtacggtttcaggcatcaaaattctgagggcacaggacaagcagcagatctt

SEQ ID NO: 54396 - DNA, 60 bp, Artificial
  Synthetic oligonucleotide
ggggttcaccacccgagcacgaaccaagaacaaaccaacctgtatgttcaagcatcaggg

SEQ ID NO: 54397 - DNA, 60 bp, Artificial
  Synthetic oligonucleotide
gacggttggtacggtttcaggcatcaaaattctgagggcacaggacaagcggcagatctt

SEQ ID NO: 54398 - DNA, 60 bp, Artificial
  Synthetic oligonucleotide
accaccatagagaaggaaatatgccccaaactagcagaatacagaaattggtcaaagccg

SEQ ID NO: 54399 - DNA, 60 bp, Artificial
  Synthetic oligonucleotide
agcaaaagcaggggaaacaatgctatcaatcacgattctgtttctgctcatagcagagag

SEQ ID NO: 54400 - DNA, 60 bp, Artificial
  Synthetic oligonucleotide
agcaaaagcaggggaaacaatgctatcaatcacgattctatttctgctcatagcagaggt

SEQ ID NO: 54401 - DNA, 60 bp, Artificial
  Synthetic oligonucleotide
agcaaaagcaggggaaacaatgctatcaatcacgattctgtttctgctcatagcagaggt

SEQ ID NO: 54402 - DNA, 60 bp, Artificial
  Synthetic oligonucleotide
agcaaaagcaggggaaacaatgctatcaatcacgattctgtttctgctcatagcagaggg

SEQ ID NO: 54403 - DNA, 60 bp, Artificial
  Synthetic oligonucleotide
gatgtcaaaaatgcaattggggtcctcatcggaggacttgaatggaatgataacacagtt

SEQ ID NO: 54404 - DNA, 60 bp, Artificial
  Synthetic oligonucleotide
cgggagattctacatacagatgtgcactgaactcaaactcagtgaccatgaagggagact

SEQ ID NO: 54405 - DNA, 60 bp, Artificial
  Synthetic oligonucleotide
gtgttggtaatgaaacgaaaacgggactctagcatacttactgacagccagacagcgacc

SEQ ID NO: 54406 - DNA, 60 bp, Artificial
  Synthetic oligonucleotide
gtcaggacctaataacaatgcttcggcagtggtctggtacaatggaagaccagtcaccga

SEQ ID NO: 54407 - DNA, 60 bp, Artificial
  Synthetic oligonucleotide
atggattccaacacgataacctcgtttcaggtagattgctatctatggcacataagaaag

SEQ ID NO: 54408 - DNA, 60 bp, Artificial
  Synthetic oligonucleotide
atggactccaacacgataacctcgtttcaggtagattgctatctatggcacataagaaag

SEQ ID NO: 54409 - DNA, 60 bp, Artificial
  Synthetic oligonucleotide
ggaggtagttttcccaaatgaagtgggagctagaatattgacatcagaatcgcaattagc

SEQ ID NO: 54410 - DNA, 60 bp, Artificial
  Synthetic oligonucleotide
ggccataattaagaaatacacatcaggaagacaagagaagaaccctgctctcagaatgaa

SEQ ID NO: 54411 - DNA, 60 bp, Artificial
  Synthetic oligonucleotide
ggaatgatgatgggcatgttcaacatgctgagtacagtcttaggagtctcaatcctgaat

SEQ ID NO: 54412 - DNA, 60 bp, Artificial
  Synthetic oligonucleotide
cctttgacatgagcaatgagggatcttatttcttcggagacaatgcagaggagtatgaca

SEQ ID NO: 54413 - DNA, 60 bp, Artificial
  Synthetic oligonucleotide
cctttgacatgagtaatgagggatcttatttcttcggagacaatgcagaggagtatgaca

SEQ ID NO: 54414 - DNA, 60 bp, Artificial
  Synthetic oligonucleotide
cctttgacatgagtaacgagggatcttatttcttcggagacaatgcagaggagtatgaca

SEQ ID NO: 54415 - DNA, 60 bp, Artificial
  Synthetic oligonucleotide
accaaatagaagtcgtcactgcccaggaattagtggaatcgcaacatctaccggagttgt

SEQ ID NO: 54416 - DNA, 60 bp, Artificial
  Synthetic oligonucleotide
ccatatggccataatcaagaaatacacatcaggaagacaggagaagaatcctgccctcag

SEQ ID NO: 54417 - DNA, 60 bp, Artificial
  Synthetic oligonucleotide
ctatggaacaggctcatggcctgatggggcgaatatcaacttcatgcctatataagctct

SEQ ID NO: 54418 - DNA, 60 bp, Artificial
  Synthetic oligonucleotide
ttgagtcctggaatgatgatgggcatgttcaacatgctaagtacagttttgggagtctca

SEQ ID NO: 54419 - DNA, 60 bp, Artificial
  Synthetic oligonucleotide
ttgagccctggaatgatgatgggcatgttcaacatgctaagtacagttttgggagtttcg

SEQ ID NO: 54420 - DNA, 60 bp, Artificial
  Synthetic oligonucleotide
ttgagtcctggaatgatgatgggcatgttcaacatgctaagtacagttttgggagtttcg

SEQ ID NO: 54421 - DNA, 60 bp, Artificial
  Synthetic oligonucleotide
gaggaaataagtggagtaaaattggaatcaatgggaacttaccaaatactgtcaatttat

SEQ ID NO: 54422 - DNA, 60 bp, Artificial
  Synthetic oligonucleotide
tgggggcgataaactctagtatgccattccacaacatacaccccctcaccatcggggaat

SEQ ID NO: 54423 - DNA, 60 bp, Artificial
  Synthetic oligonucleotide
ctatttggagctatagcaggttttatagagggaggatggcaaggaatggtagatggttgg

SEQ ID NO: 54424 - DNA, 60 bp, Artificial
  Synthetic oligonucleotide
gactatttggagctatagcaggttttatagagggaggatggcaaggaatggtagatggtt

SEQ ID NO: 54425 - DNA, 60 bp, Artificial
  Synthetic oligonucleotide
gactatttggagctatagcaggttttatagagggaggatggcagggcatggtagatggtt

SEQ ID NO: 54426 - DNA, 60 bp, Artificial
  Synthetic oligonucleotide
ctatttggagctatagcaggttttatagagggaggatggcagggcatggtagatggttgg

SEQ ID NO: 54427 - DNA, 60 bp, Artificial
  Synthetic oligonucleotide
ggagtaaaattggaatcaatgggaacttaccaaatactgtcaatttattcaacagtggcg

SEQ ID NO: 54428 - DNA, 60 bp, Artificial
  Synthetic oligonucleotide
actaaacagagaggaaataagtggagtaaaattggaatcaatgggaacttaccaaatact

SEQ ID NO: 54429 - DNA, 60 bp, Artificial
  Synthetic oligonucleotide
cagagaggaaataagtggagtaaaattggaatcaatgggaacttaccaaatactgtcaat

SEQ ID NO: 54430 - DNA, 60 bp, Artificial
  Synthetic oligonucleotide
cggaacgtatgactacccgcagtattcagaagaagcaagactaaacagagaggaaataag

SEQ ID NO: 54431 - DNA, 60 bp, Artificial
  Synthetic oligonucleotide
acgggacgtatgactacccgcagtattcagaagaagcaagactaaacagagaggaaataa

SEQ ID NO: 54432 - DNA, 60 bp, Artificial
  Synthetic oligonucleotide
gtaatggttgtttcgaattctatcacaaatgtgataatgaatgtatggaaagtgtaaaaa

SEQ ID NO: 54433 - DNA, 60 bp, Artificial
  Synthetic oligonucleotide
tttcgagttctatcacaaatgtgataatgaatgtatggaaagtgtaaaaaacgggacgta

SEQ ID NO: 54434 - DNA, 60 bp, Artificial
  Synthetic oligonucleotide
aagaacgttactgttacacatgcccaagacatactggaaaagacacacaacgggaaactc

SEQ ID NO: 54435 - DNA, 60 bp, Artificial
  Synthetic oligonucleotide
aagaatgttactgttacacatgcccaagacatactggaaaggacacacaacgggaagctc

SEQ ID NO: 54436 - DNA, 60 bp, Artificial
  Synthetic oligonucleotide
gagattggttccagaaatagctactagacccaaagtaaacgggcaaagtggaagaatgga

SEQ ID NO: 54437 - DNA, 60 bp, Artificial
  Synthetic oligonucleotide
ccagaaatagctactagacccaaagtaaacgggcaaagtggaagaatggagttcttctgg

SEQ ID NO: 54438 - DNA, 60 bp, Artificial
  Synthetic oligonucleotide
tggtatggcttatcaaaaagaacagtgcatacccaacaataaagaggagctacaataata

SEQ ID NO: 54439 - DNA, 60 bp, Artificial
  Synthetic oligonucleotide
ggcttatcaaaaagaacagtgcatacccaacaataaagaggagctacaataataccaacc

SEQ ID NO: 54440 - DNA, 60 bp, Artificial
  Synthetic oligonucleotide
caaagtaaacgggcaaagtggaagaatggagttcttctggacaattttaaagccgaatga

SEQ ID NO: 54441 - DNA, 60 bp, Artificial
  Synthetic oligonucleotide
gtaaacgggcaaagtggaagaatggagttcttctggacaattttaaagccgaatgatgcc

SEQ ID NO: 54442 - DNA, 60 bp, Artificial
  Synthetic oligonucleotide
ttcgagagtaatggaaatttcattgccccagaatatgcatacaaaattgtcaagaaaggg

SEQ ID NO: 54443 - DNA, 60 bp, Artificial
  Synthetic oligonucleotide
ggagttcttctggacaattttaaagccgaatgatgccatcaatttcgagagtaatggaaa

SEQ ID NO: 54444 - DNA, 60 bp, Artificial
  Synthetic oligonucleotide
gaagaatggagttcttctggacaattttaaagccgaatgatgccatcaatttcgagagta

SEQ ID NO: 54445 - DNA, 60 bp, Artificial
  Synthetic oligonucleotide
atgctgaacttctggttctcatggaaaatgagagaactctagactttcatgattcaaatg

SEQ ID NO: 54446 - DNA, 56 bp, Artificial
  Synthetic oligonucleotide
caagaaaggggactcaacaattatgaaaagtgaattggaatatggtaactgcaaca

SEQ ID NO: 54447 - DNA, 60 bp, Artificial
  Synthetic oligonucleotide
gaaaatggaagacggattcctagatgtctggacttacaatgctgaacttctggttctcat

SEQ ID NO: 54448 - DNA, 60 bp, Artificial
  Synthetic oligonucleotide
gcgataaactctagtatgccattccacaacatacaccctctcacaatcggggaatgcccc

SEQ ID NO: 54449 - DNA, 60 bp, Artificial
  Synthetic oligonucleotide
acaatgctgaacttctggttctcatggaaaatgagagaactctcgactttcatgactcaa

SEQ ID NO: 54450 - DNA, 60 bp, Artificial
  Synthetic oligonucleotide
actcagtttgaggccgttggaagggaatttaataacttagaaaggaggatagaaaattta

SEQ ID NO: 54451 - DNA, 60 bp, Artificial
  Synthetic oligonucleotide
gaggccgttggaagggaatttaataacttagaaaggaggatagaaaatttaaacaagaag

SEQ ID NO: 54452 - DNA, 60 bp, Artificial
  Synthetic oligonucleotide
cagtttgaggccgttggaagggaatttaataacttagaaaggagaatagagaatttaaac

SEQ ID NO: 54453 - DNA, 60 bp, Artificial
  Synthetic oligonucleotide
tgggggcgataaactctagtatgccattccacaacatacaccctctcacaatcggggaat

SEQ ID NO: 54454 - DNA, 60 bp, Artificial
  Synthetic oligonucleotide
actaacgaaaaccactgtggaccatatggccataatcaagaagtacacatcaggaagaca

SEQ ID NO: 54455 - DNA, 60 bp, Artificial
  Synthetic oligonucleotide
actaacaaaaaccactgtggaccatatggccataatcaagaagtacacatcaggaagaca

SEQ ID NO: 54456 - DNA, 60 bp, Artificial
  Synthetic oligonucleotide
atgtgacttgttgctcacagcgaattcgtggtcttacataatagagacttcaaattcaga

SEQ ID NO: 54457 - DNA, 60 bp, Artificial
  Synthetic oligonucleotide
atgtgacttgttgctcacagcgaattcgtggtcttacataatagagacttcaaattcagg

SEQ ID NO: 54458 - DNA, 60 bp, Artificial
  Synthetic oligonucleotide
gccttgaacagtaatcttccttttcagaacgtacatcccatcactattggagagtgcccc

SEQ ID NO: 54459 - DNA, 60 bp, Artificial
  Synthetic oligonucleotide
ccaaaccccacatggggctttgaatagtagtcttccttttcagaacgtacatcccatcac

SEQ ID NO: 54460 - DNA, 60 bp, Artificial
  Synthetic oligonucleotide
ggacaagcaggcagactgaattactattggacactgttagatcaaggagacaccataacg

SEQ ID NO: 54461 - DNA, 60 bp, Artificial
  Synthetic oligonucleotide
gtcagaggacaagcaggcagaatgaattattattggacactgttagatcaaggagacacc

SEQ ID NO: 54462 - DNA, 60 bp, Artificial
  Synthetic oligonucleotide
ctaagctcagcaagtcatacacaaacaacaaagggaaagaagtgcttgtaatctggggag

SEQ ID NO: 54463 - DNA, 60 bp, Artificial
  Synthetic oligonucleotide
gggaaactcctatcctaagctcagcaagtcatacacaaacaacaaagggaaagaagtgct

SEQ ID NO: 54464 - DNA, 60 bp, Artificial
  Synthetic oligonucleotide
gtgtgatctattgctcacagcgaattcatggtcttacataatagagacttcaaattcaga

SEQ ID NO: 54465 - DNA, 60 bp, Artificial
  Synthetic oligonucleotide
ttgaattctaccacaaatgtgataacgaatgcatggagagcgtgaagaatggcacatata

SEQ ID NO: 54466 - DNA, 60 bp, Artificial
  Synthetic oligonucleotide
ggcttttcggagcaattgctggattcattgaagggggatggtcaggaatgatagatgggt

SEQ ID NO: 54467 - DNA, 60 bp, Artificial
  Synthetic oligonucleotide
ggacagaagaggtacaccaaaaccacatactggtgggacgggctccaatcctctgatgat

SEQ ID NO: 54468 - DNA, 60 bp, Artificial
  Synthetic oligonucleotide
atgaaggatcttatttcttcggagacaatgcagaggagtatgacaattgaagaaaaatac

SEQ ID NO: 54469 - DNA, 60 bp, Artificial
  Synthetic oligonucleotide
ggactgttggtttcagatggagggccaaacctatacaatatccggaatctccacattcca

SEQ ID NO: 54470 - DNA, 60 bp, Artificial
  Synthetic oligonucleotide
aactattgcttgaagtagaacaagagataagaactttctcgtttcagcttatttaatgat

SEQ ID NO: 54471 - DNA, 60 bp, Artificial
  Synthetic oligonucleotide
gtggagttaataagaggaaggccacaagagactagagtatggtggacctcaaacagtatt

SEQ ID NO: 54472 - DNA, 60 bp, Artificial
  Synthetic oligonucleotide
ggctttccttgaagaatctcacccagggatctttgaaaactcgtgtcttgaaacgatgga

SEQ ID NO: 54473 - DNA, 53 bp, Artificial
  Synthetic oligonucleotide
tgaaagcaggctgatccaaaacagcataacaatagagagaatggtcctctctg

SEQ ID NO: 54474 - DNA, 51 bp, Artificial
  Synthetic oligonucleotide
ttagaccaaatgagaatccagcacataagagtcaattggtgtggatggcat

SEQ ID NO: 54475 - DNA, 60 bp, Artificial
  Synthetic oligonucleotide
ctcagaactcaggagtcagaatgcgtttgcatcaatggaacttgtacagtagtaatgacc

SEQ ID NO: 54476 - DNA, 60 bp, Artificial
  Synthetic oligonucleotide
cccaaagtatgttggagtaaagagtctcaaactggcagttggtctaaggaatgtgcctgc

SEQ ID NO: 54477 - DNA, 60 bp, Artificial
  Synthetic oligonucleotide
caccgatcttgaagcactcatggaatggctaaagacaagaccaatcctgtcacctctgac

SEQ ID NO: 54478 - DNA, 60 bp, Artificial
  Synthetic oligonucleotide
tggtgctatagctggattcatagaaggaggttggccagggctagttgctggctggtatgg

SEQ ID NO: 54479 - DNA, 60 bp, Artificial
  Synthetic oligonucleotide
tctctacaactaaaccctttcagaacatctcgagaatatcaatcggggactgtcccaagt

SEQ ID NO: 54480 - DNA, 60 bp, Artificial
  Synthetic oligonucleotide
tgcttgcaatggggtttgctgccttcttgttctgggccatgtccaatggatcttgcagat

SEQ ID NO: 54481 - DNA, 60 bp, Artificial
  Synthetic oligonucleotide
aaacgatttgcagaccaagaactgggtgatgccccattccttgatcggcttcgccgagat

SEQ ID NO: 54482 - DNA, 60 bp, Artificial
  Synthetic oligonucleotide
ggggttcaatctctacaactaaaccctttcagaacatctcgagaatatcaatcggggact

SEQ ID NO: 54483 - DNA, 60 bp, Artificial
  Synthetic oligonucleotide
tgcatagcatggtccagctcaagctgccatgatgggaaagcatggttacatatttgtgtc

SEQ ID NO: 54484 - DNA, 60 bp, Artificial
  Synthetic oligonucleotide
catagcatggtccagctcaagctgccatgatgggaaagcatggttacatgtttgtatcac

SEQ ID NO: 54485 - DNA, 60 bp, Artificial
  Synthetic oligonucleotide
tgtgcatagcatggtccagctcaagctgccatgatgggaaagcatggttacatatttgtg

SEQ ID NO: 54486 - DNA, 60 bp, Artificial
  Synthetic oligonucleotide
catagcatggtccagctcaagctgccatgatgggaaagcatggttacatatttgtgtcac

SEQ ID NO: 54487 - DNA, 60 bp, Artificial
  Synthetic oligonucleotide
gtatagcatggtccagctcaagctgccatgatgggaaagcatggttacatgtttgtgtta

SEQ ID NO: 54488 - DNA, 60 bp, Artificial
  Synthetic oligonucleotide
ccatatggccataatcaagaagtacacatcaggaagacaagagaagaaccctgctctccg

SEQ ID NO: 54489 - DNA, 60 bp, Artificial
  Synthetic oligonucleotide
catggtctagctcaagctgccatgatgggaaagcatggttacatgtttgtgttactgggg

SEQ ID NO: 54490 - DNA, 60 bp, Artificial
  Synthetic oligonucleotide
agagtcccacccaggaatctttgaaaactcgtgtcttgaaacgatggaagttgtccaaca

SEQ ID NO: 54491 - DNA, 59 bp, Artificial
  Synthetic oligonucleotide
cacagtcaagcaaaatgggaaatccggagcatgcaaaagagcaaatgtgaatgactttt

SEQ ID NO: 54492 - DNA, 60 bp, Artificial
  Synthetic oligonucleotide
cacagtcaagcaaaatgggaaatccggagcatgcaaaagagcaaatgtgaatgacttttt

SEQ ID NO: 54493 - DNA, 60 bp, Artificial
  Synthetic oligonucleotide
gcttttatgtggaattgatcagaggcaggccaaaagagagtagtgtattgtggacatcca

SEQ ID NO: 54494 - DNA, 60 bp, Artificial
  Synthetic oligonucleotide
cgagaagacgaacgagaaattccatcaaatcgaaaaggaattctcagaagtagaagggag

SEQ ID NO: 54495 - DNA, 60 bp, Artificial
  Synthetic oligonucleotide
acatttgggtgacaagagaaccttatgtgtcgtgcggtcccagtaaatgttaccaatttg

SEQ ID NO: 54496 - DNA, 60 bp, Artificial
  Synthetic oligonucleotide
acatagattaaagattacagagaatagctttgaacaaataacatttatgcaagccttaca

SEQ ID NO: 54497 - DNA, 60 bp, Artificial
  Synthetic oligonucleotide
caagcttccaggtagactgctttctttggcatgtccgcaaacgatttgcagaccaggaac

SEQ ID NO: 54498 - DNA, 60 bp, Artificial
  Synthetic oligonucleotide
gagaggggccccaggagtgaaagggtgggcctttgacaatggaaatgatatttggatggg

SEQ ID NO: 54499 - DNA, 60 bp, Artificial
  Synthetic oligonucleotide
ctccttcctcacacatgcactgaaatagttgtggcaatgctactatttgctatccatact

SEQ ID NO: 54500 - DNA, 60 bp, Artificial
  Synthetic oligonucleotide
cctcacacatgcactgaaatagttgtggcaatgctactatttgctatccatactgtccaa

SEQ ID NO: 54501 - DNA, 60 bp, Artificial
  Synthetic oligonucleotide
actccttcctcacacatgcactgaaatagttgtggcaatgctactatttgctatccatac

SEQ ID NO: 54502 - DNA, 56 bp, Artificial
  Synthetic oligonucleotide
gaccaaaagaattcggatggccatcaattagtgttgaatagtttaaaaacgacctt

SEQ ID NO: 54503 - DNA, 60 bp, Artificial
  Synthetic oligonucleotide
tggactccaacacgataacctcgtttcaggtagattgctatctatggcacatacgaaagc

SEQ ID NO: 54504 - DNA, 60 bp, Artificial
  Synthetic oligonucleotide
agtctctgaaactctacagagattcgcttggagaagcagcgatgaggatgggagacctcc

SEQ ID NO: 54505 - DNA, 60 bp, Artificial
  Synthetic oligonucleotide
ggagacgtagtgttggtaatgaaacggaaacgggactctagcatacttactgacagccag

SEQ ID NO: 54506 - DNA, 60 bp, Artificial
  Synthetic oligonucleotide
gggcaaggagacgtagtgttggtaatgaaacggaaacgggactctagcatacttactgac

SEQ ID NO: 54507 - DNA, 60 bp, Artificial
  Synthetic oligonucleotide
ggagacgtagtgttggtgatgaaacggaaacgggactctagcatacttactgacagccag

SEQ ID NO: 54508 - DNA, 60 bp, Artificial
  Synthetic oligonucleotide
gttcgtacaggagaccggttgggatttccagcatggtggaggccatggtgtctagggccc

SEQ ID NO: 54509 - DNA, 60 bp, Artificial
  Synthetic oligonucleotide
ggggtaaaactggaatctgaaggaacttacaaaatcctcaccatttattcgactgtcgcc

SEQ ID NO: 54510 - DNA, 60 bp, Artificial
  Synthetic oligonucleotide
gctgccttcatgttctgggccatgtccaacggatcttgcagatgcaacatttgtatataa

SEQ ID NO: 54511 - DNA, 60 bp, Artificial
  Synthetic oligonucleotide
tgctgccttcatgttctgggccatgtccaacggatcttgcagatgcaacatttgtatata

SEQ ID NO: 54512 - DNA, 60 bp, Artificial
  Synthetic oligonucleotide
gaaacaatgctatcaatcgcgattctagttctgctcatagcagagagctcctctcaaaat

SEQ ID NO: 54513 - DNA, 60 bp, Artificial
  Synthetic oligonucleotide
cccctcgaataaccaagtagtgccatgtgaaccaatcataatagaaaggaacatagtgca

SEQ ID NO: 54514 - DNA, 60 bp, Artificial
  Synthetic oligonucleotide
cttgaggctctcatggagtggctaaagacaagaccaatcctgtcacctctgactaagggg

SEQ ID NO: 54515 - DNA, 60 bp, Artificial
  Synthetic oligonucleotide
cctttgggcatacaatgcagaactgctagtactgcttgaaaatcagaaaacactcgatga

SEQ ID NO: 54516 - DNA, 60 bp, Artificial
  Synthetic oligonucleotide
catttgggcatacaatgcagaactgctagtactgcttgaaaatcagaaaacactcgatga

SEQ ID NO: 54517 - DNA, 60 bp, Artificial
  Synthetic oligonucleotide
gcttaatgcatcttggttcaactccttcctcacacatgcactgaaatagttgtggcaatg

SEQ ID NO: 54518 - DNA, 60 bp, Artificial
  Synthetic oligonucleotide
cttggttcaactccttcctcacacatgcactaaaatagttgtggcaatgctactatttgc

SEQ ID NO: 54519 - DNA, 60 bp, Artificial
  Synthetic oligonucleotide
tgattccagttatgtgtgctcaggacttgttggtgacacgccaagaaatgatgatagatc

SEQ ID NO: 54520 - DNA, 60 bp, Artificial
  Synthetic oligonucleotide
ggagtcagaatgcgtttgcatcaatggaacttgtacagtagtaatgactgatggaagtgc

SEQ ID NO: 54521 - DNA, 60 bp, Artificial
  Synthetic oligonucleotide
tattcgactgtcgcctcatctcttgtgattgcaatggggtttgctgccttcttgttctgg

SEQ ID NO: 54522 - DNA, 60 bp, Artificial
  Synthetic oligonucleotide
tgattccagttatgtgtgctcaggacttgttggcgacacaccaagaaatgatgatagatc

SEQ ID NO: 54523 - DNA, 60 bp, Artificial
  Synthetic oligonucleotide
cctcctttgacatgagtaacgaaggatcttatttcttcggagacaatgcagaggaatatg

SEQ ID NO: 54524 - DNA, 60 bp, Artificial
  Synthetic oligonucleotide
cggttgggatttccagtatggtggaggccatggtgtctagggcccgaattgatgcgcgga

SEQ ID NO: 54525 - DNA, 58 bp, Artificial
  Synthetic oligonucleotide
cgtacgttctctctatcgtcccgtcaggccccctcaaagccgagatcgcgcagagact

SEQ ID NO: 54526 - DNA, 60 bp, Artificial
  Synthetic oligonucleotide
gcaattggggtcctcatcggaggacttgaatggaatgataacacagttcgagtctctgag

SEQ ID NO: 54527 - DNA, 60 bp, Artificial
  Synthetic oligonucleotide
atctcgagaatatcaatcggggactgtcccaagtatgtcaaacagggatccttaaaacta

SEQ ID NO: 54528 - DNA, 60 bp, Artificial
  Synthetic oligonucleotide
acatctcgagaatatcaatcggggactgtcccaagtatgtcaaacagggatctttgaaac

SEQ ID NO: 54529 - DNA, 60 bp, Artificial
  Synthetic oligonucleotide
acatctcgagaatatcaatcggggactgtcccaagtatatcaaacagggatctttgaaac

SEQ ID NO: 54530 - DNA, 60 bp, Artificial
  Synthetic oligonucleotide
tctcgagaatatcaatcggggactgtcccaagtatgtcaaacaggggtctttgaaactgg

SEQ ID NO: 54531 - DNA, 60 bp, Artificial
  Synthetic oligonucleotide
tttcgagaatatcaatcggggactgtcccaagtatgtcaaacaggggtctttgaaactgg

SEQ ID NO: 54532 - DNA, 60 bp, Artificial
  Synthetic oligonucleotide
gagaatatcaatcggggactgtcccaagtatatcaaacagggatccttgaaactagctac

SEQ ID NO: 54533 - DNA, 60 bp, Artificial
  Synthetic oligonucleotide
agcagagcagaatgcagttttcttctctaactgtgaatgtgagaggctcgggaatgagga

SEQ ID NO: 54534 - DNA, 60 bp, Artificial
  Synthetic oligonucleotide
agcagagcagaatgcagttttcttctctaactgtgaatgtgagaggctcgggaatgagaa

SEQ ID NO: 54535 - DNA, 60 bp, Artificial
  Synthetic oligonucleotide
agagtaggatgcagttttcttctctaactgtgaatgtgaggggttcaggaatgagaatac

SEQ ID NO: 54536 - DNA, 60 bp, Artificial
  Synthetic oligonucleotide
gggaacttacaaaatcctcaccatttattcgactgtcgcctcatctctcgtgcttgcaat

SEQ ID NO: 54537 - DNA, 60 bp, Artificial
  Synthetic oligonucleotide
tcctcaccatttattcgactgtcgcctcatcccttgttattgcaatggggtttgctgcct

SEQ ID NO: 54538 - DNA, 60 bp, Artificial
  Synthetic oligonucleotide
tgatcacttgaatggtgcagaatgggatgtcttcatagagcgacccactgctgtggacac

SEQ ID NO: 54539 - DNA, 60 bp, Artificial
  Synthetic oligonucleotide
cttgaatggtgcagaatgggatgtcttcatagagcgacccactgctgtggacacttgtta

SEQ ID NO: 54540 - DNA, 60 bp, Artificial
  Synthetic oligonucleotide
cagaatgggatgtcttcatagagcgacccactgctgtggacacttgttatccatttgatg

SEQ ID NO: 54541 - DNA, 60 bp, Artificial
  Synthetic oligonucleotide
cagaatgggatgtcttcatagagcgacccactgctgtggacacttgttatccattcgatg

SEQ ID NO: 54542 - DNA, 60 bp, Artificial
  Synthetic oligonucleotide
aagcgatttgcagaccaagaactgggtgatgccccattcctcgaccggcttcgccgagat

SEQ ID NO: 54543 - DNA, 60 bp, Artificial
  Synthetic oligonucleotide
catggtccagctcaagctgccatgatgggaaagcatggttacatgtttgtgtcactgggg

SEQ ID NO: 54544 - DNA, 60 bp, Artificial
  Synthetic oligonucleotide
gctacgggaatgaggaacatccctgagaaggcaaccagaggactatttggtgcaattgct

SEQ ID NO: 54545 - DNA, 60 bp, Artificial
  Synthetic oligonucleotide
tctcttcatgtggggcatacaccatccacctactgataccgaacagacaaatttatacaa

SEQ ID NO: 54546 - DNA, 60 bp, Artificial
  Synthetic oligonucleotide
ccaagtagaagttgtcactgcccaggaattagtggaatcgcaacatctaccggagttgtg

SEQ ID NO: 54547 - DNA, 60 bp, Artificial
  Synthetic oligonucleotide
agagtaatcgagaagacgaacgagaaattccatcaaatcgaaaaggaattctcagaagta

SEQ ID NO: 54548 - DNA, 60 bp, Artificial
  Synthetic oligonucleotide
agagtaattaagaagacgaacgagaaattccatcaaatcgaaaaggaattttcagaagtg

SEQ ID NO: 54549 - DNA, 60 bp, Artificial
  Synthetic oligonucleotide
ggaacaggctcatggcctgatggggcgaatatcaacttcatgcctatataagctctcgca

SEQ ID NO: 54550 - DNA, 60 bp, Artificial
  Synthetic oligonucleotide
aaatcaacatactatagatgtgacagactccgaaatgaacaaactctttgaaagagttag

SEQ ID NO: 54551 - DNA, 64 bp, Artificial
  Synthetic oligonucleotide
gcattagaaaatcaacatactatagatgtgacagactccgaaatgaacaaactctttgaaagag

SEQ ID NO: 54552 - DNA, 60 bp, Artificial
  Synthetic oligonucleotide
gcattagaaaatcaacatactatagatgtgacagactccgaaatgaacaaactctttgaa

SEQ ID NO: 54553 - DNA, 60 bp, Artificial
  Synthetic oligonucleotide
gcgtacagggatggaccccaggatgtgttctctgatgcaaggatcaactctcccgagaag

SEQ ID NO: 54554 - DNA, 60 bp, Artificial
  Synthetic oligonucleotide
ccaacactgtgtcaagctttcaggtagactgctttctttggcatgtccgcaagcgatttg

SEQ ID NO: 54555 - DNA, 60 bp, Artificial
  Synthetic oligonucleotide
gggttcaccacccgagcacgaaccaagaacaaaccaacctgtatgttcaagcatcagggg

SEQ ID NO: 54556 - DNA, 60 bp, Artificial
  Synthetic oligonucleotide
aaccaagaacaaaccaacctgtatgttcaagcatcagggagagtcacagtctctaccagg

SEQ ID NO: 54557 - DNA, 60 bp, Artificial
  Synthetic oligonucleotide
agaacaaaccaacctgtatgttcaagcatcagggggagtcaccgtctctaccaggagaag

SEQ ID NO: 54558 - DNA, 60 bp, Artificial
  Synthetic oligonucleotide
ccaagaacaaaccaacctgtatgttcaagcatcagggagagtcacagtctctaccaggag

SEQ ID NO: 54559 - DNA, 60 bp, Artificial
  Synthetic oligonucleotide
ggggttcaccaccctagcacggaccaagaacaaaccaacctgtatgttcaagcatcaggg

SEQ ID NO: 54560 - DNA, 51 bp, Artificial
  Synthetic oligonucleotide
gtttgaagagatcagatggctcattgctgaatgcaggaatatactgacaaa

SEQ ID NO: 54561 - DNA, 60 bp, Artificial
  Synthetic oligonucleotide
tgcctccagtcctgatcctcggtatattactgatatgagcatagaggagataagccgaga

SEQ ID NO: 54562 - DNA, 60 bp, Artificial
  Synthetic oligonucleotide
gcaggcattgcaactcttacttgaagttgagagtgagataaggactttctcttttcagct

SEQ ID NO: 54563 - DNA, 60 bp, Artificial
  Synthetic oligonucleotide
agttgttcagcaaacaagagtggataaactaacccaaggtcgccagacctatgactggac

SEQ ID NO: 54564 - DNA, 60 bp, Artificial
  Synthetic oligonucleotide
gttgttcagcaaacaagagtggataaactaacccaaggtcgccagacctatgactggacg

SEQ ID NO: 54565 - DNA, 60 bp, Artificial
  Synthetic oligonucleotide
tttgttcagcaaacaagagtggataaactaacccaaggtcgccagacctatgactggaca

SEQ ID NO: 54566 - DNA, 60 bp, Artificial
  Synthetic oligonucleotide
cgactgtcgcctcatctcttgtgcttgcaatagggcttgctgccttcatgttctgggcca

SEQ ID NO: 54567 - DNA, 60 bp, Artificial
  Synthetic oligonucleotide
cgactgtcgcctcatctcttgtgcttgcaatagggtttgctgccttcatgttctgggcca

SEQ ID NO: 54568 - DNA, 60 bp, Artificial
  Synthetic oligonucleotide
ctcccttgatggtagcatacatgctagaaagagagttggtccgcaaaacgaggttcctcc

SEQ ID NO: 54569 - DNA, 56 bp, Artificial
  Synthetic oligonucleotide
ccccttgatggtagcatacatgctagaaagagagttggtccgcaaaacgaggttcc

SEQ ID NO: 54570 - DNA, 59 bp, Artificial
  Synthetic oligonucleotide
ccccttgatggtagcatacatgctagaaagagagttggtccgcaaaacgaggttcctcc

SEQ ID NO: 54571 - DNA, 52 bp, Artificial
  Synthetic oligonucleotide
ccccttgatggtagcatacatgctagaaagagagttggtccgcaaaacgagg

SEQ ID NO: 54572 - DNA, 60 bp, Artificial
  Synthetic oligonucleotide
tgacaacgcatgtatagagtcaatcaggaacgggacctatgatcatgacatatacagaga

SEQ ID NO: 54573 - DNA, 53 bp, Artificial
  Synthetic oligonucleotide
acaatgcagagctcctggtggccttggaaaaccaacatacaattgacctgact

SEQ ID NO: 54574 - DNA, 60 bp, Artificial
  Synthetic oligonucleotide
gggaaggaatgatagacggctggtatggcttcagacaccagaactctgagggtacaggac

SEQ ID NO: 54575 - DNA, 60 bp, Artificial
  Synthetic oligonucleotide
aaaatgggtgggaaggaatgatagacggctggtatggcttcagacaccagaactctgagg

SEQ ID NO: 54576 - DNA, 60 bp, Artificial
  Synthetic oligonucleotide
atatgttgaggacactaagatagatctatggtcttacaatgcagagctcctggtggcctt

SEQ ID NO: 54577 - DNA, 60 bp, Artificial
  Synthetic oligonucleotide
ccaggaccttgagaaatatgttgaggacactaagatagatctatggtcttacaatgcaga

SEQ ID NO: 54578 - DNA, 60 bp, Artificial
  Synthetic oligonucleotide
gcacctattgacacatgcatctctgaatgtgtcactccaaatggaagcatccccaatgac

SEQ ID NO: 54579 - DNA, 60 bp, Artificial
  Synthetic oligonucleotide
agtaattaatagtaatggtaacctgatcgctcctcgaggttacttcaaaatgcgcactgg

SEQ ID NO: 54580 - DNA, 56 bp, Artificial
  Synthetic oligonucleotide
tcacttacggagcatgtctcaagtatgtcaaacagagcactttgaaactggcaaca

SEQ ID NO: 54581 - DNA, 57 bp, Artificial
  Synthetic oligonucleotide
gacacatgcatctctgaatgtgtcactccaaatggaagcatccccaatgacaagccc

SEQ ID NO: 54582 - DNA, 60 bp, Artificial
  Synthetic oligonucleotide
gcttcctcaggaaccctggagtttctcacagaaggattcacatggacaggagtcactcaa

SEQ ID NO: 54583 - DNA, 60 bp, Artificial
  Synthetic oligonucleotide
cacatggacaggagtcactcaaaatggaggaagcaatgcctgcaaaagagggcctgctag

SEQ ID NO: 54584 - DNA, 60 bp, Artificial
  Synthetic oligonucleotide
tccttgatggaagggactgtacactgatagatgccctcttgggagacccccactgtgatg

SEQ ID NO: 54585 - DNA, 60 bp, Artificial
  Synthetic oligonucleotide
cactgtgatgtgttccaagatgaaacctgggacctttatgtggaacgtagcagcgccttc

SEQ ID NO: 54586 - DNA, 60 bp, Artificial
  Synthetic oligonucleotide
ccaagatgaaacctgggacctttatgtggaacgtagcagcgccttcagcaactgctatcc

SEQ ID NO: 54587 - DNA, 60 bp, Artificial
  Synthetic oligonucleotide
aggtctctagttgcttcctcaggaaccctggagtttctcacagaaggattcacatggaca

SEQ ID NO: 54588 - DNA, 60 bp, Artificial
  Synthetic oligonucleotide
gaaaacaacaacagcactgcaacactgtgcttggggcatcatgcggtaccaaatgggaca

SEQ ID NO: 54589 - DNA, 55 bp, Artificial
  Synthetic oligonucleotide
tcatgcggtaccaaatgggacaatagtgaagacaattacggatgaccaaattgag

SEQ ID NO: 54590 - DNA, 60 bp, Artificial
  Synthetic oligonucleotide
gctggtccagagctcctcaacagggaaaatatgcaacaaccctcatagaatccttgatgg

SEQ ID NO: 54591 - DNA, 50 bp, Artificial
  Synthetic oligonucleotide
tccttgatggaagggactgtacactgatagatgccctcttgggagacccc

SEQ ID NO: 54592 - DNA, 60 bp, Artificial
  Synthetic oligonucleotide
gcatgtatagagtcaatcaggaacgggacctatgatcatgacatatacagagatgaagcg

SEQ ID NO: 54593 - DNA, 53 bp, Artificial
  Synthetic oligonucleotide
tatacagagatgaagcgttgaacaaccgatttcaaatcaagggtgtagagcta

SEQ ID NO: 54594 - DNA, 60 bp, Artificial
  Synthetic oligonucleotide
gccgggggatgtactagtaattaatagtaatggtaacctgatcgctcctcgaggttactt

SEQ ID NO: 54595 - DNA, 60 bp, Artificial
  Synthetic oligonucleotide
tgggtcaggggccaatcaggaaggataagcatctattggacaatagtgaagccgggggat

SEQ ID NO: 54596 - DNA, 60 bp, Artificial
  Synthetic oligonucleotide
ccaagagcaaaccgacctatacgttcaggcatcaggaagggtcacagtttcaaccaggag

SEQ ID NO: 54597 - DNA, 60 bp, Artificial
  Synthetic oligonucleotide
ttgtatgtctggggagttcaccacccgagcacaaaccaagagcaaaccgacctatacgtt

SEQ ID NO: 54598 - DNA, 60 bp, Artificial
  Synthetic oligonucleotide
gacaactttgacaaattgtatgtctggggagttcaccacccgagcacaaaccaagagcaa

SEQ ID NO: 54599 - DNA, 60 bp, Artificial
  Synthetic oligonucleotide
catggacaggagtcactcaaaatggaggaagcaatgcctgcaaaagagggcctgctagtg

SEQ ID NO: 54600 - DNA, 57 bp, Artificial
  Synthetic oligonucleotide
tgggtcaggggccaatcaggaaggataagcatctattggacaatagtgaagccgggg

SEQ ID NO: 54601 - DNA, 60 bp, Artificial
  Synthetic oligonucleotide
ccaggaggagtcaacaaaccataatcccgaatattggatccaggccttgggtcaggggcc

SEQ ID NO: 54602 - DNA, 60 bp, Artificial
  Synthetic oligonucleotide
caaccaggaggagtcaacaaaccataatcccgaatattggatccaggccttgggtcaggg

SEQ ID NO: 54603 - DNA, 60 bp, Artificial
  Synthetic oligonucleotide
gcaaaccgacctatacgttcaggcatcaggaagggtcacagtttcaaccaggaggagtca

SEQ ID NO: 54604 - DNA, 60 bp, Artificial
  Synthetic oligonucleotide
caagactactcagaaaacaacaacagcactgcaacactgtgcttggggcatcatgcggta

SEQ ID NO: 54605 - DNA, 60 bp, Artificial
  Synthetic oligonucleotide
cttggttcaactccttcctcacacatgcactgaaatagttgtggcaatgctactatttgc

SEQ ID NO: 54606 - DNA, 60 bp, Artificial
  Synthetic oligonucleotide
cggcaggaacagcagagtgctgtggatgttgacgatggtcattttgtcaacatagagctg

SEQ ID NO: 54607 - DNA, 57 bp, Artificial
  Synthetic oligonucleotide
ggcaggaacagcagagtgctgtggatgttgacgatggtcattttgtcaacatagagc

SEQ ID NO: 54608 - DNA, 60 bp, Artificial
  Synthetic oligonucleotide
ggcaggaacagcagagtgctgtggatgttgacgatggtcattttgtcaacatagagctgg

SEQ ID NO: 54609 - DNA, 60 bp, Artificial
  Synthetic oligonucleotide
tgataacacagttcgagtctctgaaactctacagagattcgcttggagaagcagtaatga

SEQ ID NO: 54610 - DNA, 60 bp, Artificial
  Synthetic oligonucleotide
ctcacaagaagattgcatgataaaggcagtccgaggtgatttgaatttcgtaaacagagc

SEQ ID NO: 54611 - DNA, 60 bp, Artificial
  Synthetic oligonucleotide
taaagggaagaggcagcacacttggactcgatctaagagtggctacaatggaagggaaaa

SEQ ID NO: 54612 - DNA, 60 bp, Artificial
  Synthetic oligonucleotide
ggaagaacaccgaccttgaggcactcatggaatggctaaagacaagaccaatcctgtcac

SEQ ID NO: 54613 - DNA, 60 bp, Artificial
  Synthetic oligonucleotide
ccaatgggacaatggtgaaaaccttgactgatgaccaggtagaagttgtcactgcccaag

SEQ ID NO: 54614 - DNA, 60 bp, Artificial
  Synthetic oligonucleotide
tccaatgggacaatggtgaaaaccttgactgatgaccaggtagaagttgtcactgcccaa

SEQ ID NO: 54615 - DNA, 60 bp, Artificial
  Synthetic oligonucleotide
tccaatgggacaatggtgaaaaccttgactgatgaccaagtagaagtcgtcactgcccag

SEQ ID NO: 54616 - DNA, 60 bp, Artificial
  Synthetic oligonucleotide
gtatccaatgggacaatggtgaaaaccttgactgatgaccaggtagaagttgtcactgcc

SEQ ID NO: 54617 - DNA, 60 bp, Artificial
  Synthetic oligonucleotide
gtgatgaaacggaaacgggactctagcatacttactgacagccagacagcgaccaaaaga

SEQ ID NO: 54618 - DNA, 60 bp, Artificial
  Synthetic oligonucleotide
acggaaacgggactctagcatacttactgacagccagacagcgaccaaaagaattcgggt

SEQ ID NO: 54619 - DNA, 60 bp, Artificial
  Synthetic oligonucleotide
gtaatgaaacggaaacgggactctagcatacttactgacagccagacagcgaccaaaaga

SEQ ID NO: 54620 - DNA, 60 bp, Artificial
  Synthetic oligonucleotide
acggaaacgggactctagcatacttactgacagccagacagcgaccaaaaggattcgaga

SEQ ID NO: 54621 - DNA, 60 bp, Artificial
  Synthetic oligonucleotide
ccttcttgttctgggccatgtccaatggatcttgcagatgcaacatttgtatataattgg

SEQ ID NO: 54622 - DNA, 60 bp, Artificial
  Synthetic oligonucleotide
atataccaacgattggggaaagaatattctcttcatgtggggcatacaccatccacctac

SEQ ID NO: 54623 - DNA, 60 bp, Artificial
  Synthetic oligonucleotide
acgattggggaaagaatattctcttcatgtggggcatacaccatccacctactgatactg

SEQ ID NO: 54624 - DNA, 60 bp, Artificial
  Synthetic oligonucleotide
caatacaccaacaatgaggggaaaaatattctcttcatgtggggcatacaccatccacct

SEQ ID NO: 54625 - DNA, 60 bp, Artificial
  Synthetic oligonucleotide
ggggaaagaatattctcttcatgtggggcatacaccatccacctactaatactgagcaaa

SEQ ID NO: 54626 - DNA, 60 bp, Artificial
  Synthetic oligonucleotide
ggggaaagaatattctcttcatgtggggcatacaccatccacctactgatactgagcaaa

SEQ ID NO: 54627 - DNA, 60 bp, Artificial
  Synthetic oligonucleotide
atggaacaggctcatggcctgatggggcgaatatcaattttatgcctatatgagctttcg

SEQ ID NO: 54628 - DNA, 51 bp, Artificial
  Synthetic oligonucleotide
ggggcaatcagcttctggatgtgttctaatgggtcattgcaatgcagaata

SEQ ID NO: 54629 - DNA, 60 bp, Artificial
  Synthetic oligonucleotide
agcgaaagcagggtagataatcactcactgagtgacattcacgccatggcgcttcaaggc

SEQ ID NO: 54630 - DNA, 60 bp, Artificial
  Synthetic oligonucleotide
agcaaaagcagggtagataatcactcactgagtgacattcacgccatggcgcttcaaggc

SEQ ID NO: 54631 - DNA, 60 bp, Artificial
  Synthetic oligonucleotide
gagccatgcgcaggctcgccgaccaaagtctcccaccgaacttctccagccttgaaaact

SEQ ID NO: 54632 - DNA, 60 bp, Artificial
  Synthetic oligonucleotide
ggaaccatgcgcaggctcgccgaccaaagtctcccaccgaacttctccagccttgaaaac

SEQ ID NO: 54633 - DNA, 60 bp, Artificial
  Synthetic oligonucleotide
aaaagcaggcaaaccatttgaatggatgtcaatccgactctacttttcttaaaagtgcca

SEQ ID NO: 54634 - DNA, 60 bp, Artificial
  Synthetic oligonucleotide
agcgaaagcaggcaaaccatttgaatggatgtcaacccgactttacttttcttgaaagtt

SEQ ID NO: 54635 - DNA, 60 bp, Artificial
  Synthetic oligonucleotide
cctgaccaaagggctctgtactataaattcatggcacatatatgggaaggacaatgcggt

SEQ ID NO: 54636 - DNA, 60 bp, Artificial
  Synthetic oligonucleotide
aattcaataacctgaccaaagggctctgtactataaattcatggcacatatatgggaagg

SEQ ID NO: 54637 - DNA, 60 bp, Artificial
  Synthetic oligonucleotide
gggaaggacaatgcggtaagaattggagaggactcagatgttctagtaacaagagaaccc

SEQ ID NO: 54638 - DNA, 60 bp, Artificial
  Synthetic oligonucleotide
tatgggaaggacaatgcggtaagaattggagaggactcagatgttctagtaacaagagaa

SEQ ID NO: 54639 - DNA, 60 bp, Artificial
  Synthetic oligonucleotide
taggactacacctgaaaccgagctgcaattgctcacgctcacaacctgaagcaaccaatg

SEQ ID NO: 54640 - DNA, 60 bp, Artificial
  Synthetic oligonucleotide
acttaggattgaacataggactacacctgaaaccgagctgcaattgctcacgctcacaac

SEQ ID NO: 54641 - DNA, 60 bp, Artificial
  Synthetic oligonucleotide
taccaacatccaagtagaggagagagcaagtagagaattcaataacctgaccaaagggct

SEQ ID NO: 54642 - DNA, 60 bp, Artificial
  Synthetic oligonucleotide
cacccagataagtaataccaacatccaagtagaggagagagcaagtagagaattcaataa

SEQ ID NO: 54643 - DNA, 60 bp, Artificial
  Synthetic oligonucleotide
ccctatgtctcctgtgacccagatgagtgcaggttctatgctctcagccaagggacaacg

SEQ ID NO: 54644 - DNA, 60 bp, Artificial
  Synthetic oligonucleotide
aacaagagaaccctatgtctcctgtgacccagatgagtgcaggttctatgctctcagcca

SEQ ID NO: 54645 - DNA, 61 bp, Artificial
  Synthetic oligonucleotide
caagaatatactattttaaggaagggaaaatattaaaatgggaacctctgactggaactgc

SEQ ID NO: 54646 - DNA, 60 bp, Artificial
  Synthetic oligonucleotide
cgtgtttttatgtggagttaatacgtggaagacccaaggaggacagagtatggtggacca

SEQ ID NO: 54647 - DNA, 60 bp, Artificial
  Synthetic oligonucleotide
ctacagtgggtcattcatggactattgggccgagggggaatgctaccgagcgtgttttta

SEQ ID NO: 54648 - DNA, 60 bp, Artificial
  Synthetic oligonucleotide
ggaacctctgactggaactgctaagcacatcgaagaatgctcatgctacggggagcaggc

SEQ ID NO: 54649 - DNA, 60 bp, Artificial
  Synthetic oligonucleotide
acgatccttacccaggaaataataacaatggagtcaaaggattttcatacctagatggag

SEQ ID NO: 54650 - DNA, 60 bp, Artificial
  Synthetic oligonucleotide
ctgtaggtaagtgtaacgatccttacccaggaaataataacaatggagtcaaaggatttt

SEQ ID NO: 54651 - DNA, 60 bp, Artificial
  Synthetic oligonucleotide
ccctgttctcacagataaccccagaccgaatgacccaactgtaggtaagtgtaacgatcc

SEQ ID NO: 54652 - DNA, 60 bp, Artificial
  Synthetic oligonucleotide
gtatatatgtagccctgttctcacagataaccccagaccgaatgacccaactgtaggtaa

SEQ ID NO: 54653 - DNA, 60 bp, Artificial
  Synthetic oligonucleotide
cccactcaaggtcagacaatcgtattaaacactgactggagtggctacagtgggtcattc

SEQ ID NO: 54654 - DNA, 60 bp, Artificial
  Synthetic oligonucleotide
tcaaagcccactcaaggtcagacaatcgtattaaacactgactggagtggctacagtggg

SEQ ID NO: 54655 - DNA, 60 bp, Artificial
  Synthetic oligonucleotide
ccggatacgagatgctaaaggtgccaaatgcattgaccgacgataggtcaaagcccactc

SEQ ID NO: 54656 - DNA, 60 bp, Artificial
  Synthetic oligonucleotide
gatccggatacgagatgctaaaggtgccaaatgcattgaccgacgataggtcaaagccca

SEQ ID NO: 54657 - DNA, 60 bp, Artificial
  Synthetic oligonucleotide
atcaaaagcagggtcaagatgaatccaaatcagaagattctattcgcttctgccactgct

SEQ ID NO: 54658 - DNA, 60 bp, Artificial
  Synthetic oligonucleotide
gcagggtcaagatgaatccaaatcagaagattctattcgcttctgccactgctatcgtaa

SEQ ID NO: 54659 - DNA, 60 bp, Artificial
  Synthetic oligonucleotide
tgccactgctatcgtaataggcacaattgcagtactcataggaatagtgaacttaggatt

SEQ ID NO: 54660 - DNA, 60 bp, Artificial
  Synthetic oligonucleotide
gccactgctatcgtaataggcacaattgcagtactcataggaatagtgaacttaggattg

SEQ ID NO: 54661 - DNA, 60 bp, Artificial
  Synthetic oligonucleotide
ggcagagccaggatgtcaatatgtatatcgggcccgaacaacaatgcgtcagcagtgatc

SEQ ID NO: 54662 - DNA, 60 bp, Artificial
  Synthetic oligonucleotide
aacaatgcgtcagcagtgatctggtacaatagaaggcctgttacagaaatcaacacatgg

SEQ ID NO: 54663 - DNA, 60 bp, Artificial
  Synthetic oligonucleotide
cagcagagtggaatgcattggatggtcaagtactagttgccatgatggcagagccaggat

SEQ ID NO: 54664 - DNA, 60 bp, Artificial
  Synthetic oligonucleotide
gttgccatgatggcagagccaggatgtcaatatgtatatcgggcccgaacaacaatgcgt

SEQ ID NO: 54665 - DNA, 60 bp, Artificial
  Synthetic oligonucleotide
cacgatagatcccagtatcgcgccctgataagctggccactatcatcaccacccacagta

SEQ ID NO: 54666 - DNA, 60 bp, Artificial
  Synthetic oligonucleotide
acccacagtatataacagcagagtggaatgcattggatggtcaagtactagttgccatga

SEQ ID NO: 54667 - DNA, 60 bp, Artificial
  Synthetic oligonucleotide
ctctcagccaagggacaacgatcagagggaaacactcaaatggaacaatacacgatagat

SEQ ID NO: 54668 - DNA, 60 bp, Artificial
  Synthetic oligonucleotide
caacgatcagagggaaacactcaaatggaacaatacacgatagatcccagtatcgcgccc

SEQ ID NO: 54669 - DNA, 60 bp, Artificial
  Synthetic oligonucleotide
gcgtcagcagtgatctggtacaatagaaggcctgttacagaaatcaacacatgggcccga

SEQ ID NO: 54670 - DNA, 60 bp, Artificial
  Synthetic oligonucleotide
caacacatgggcccgaaacatactaaggacacaagaatctgaatgtgtatgccataacgg

SEQ ID NO: 54671 - DNA, 60 bp, Artificial
  Synthetic oligonucleotide
gggagcaggcaagggtcacttgcacatgcagggataattggcagggctcaaatagaccag

SEQ ID NO: 54672 - DNA, 60 bp, Artificial
  Synthetic oligonucleotide
ggaactgctaagcacatcgaagaatgctcatgctacggggagcaggcaagggtcacttgc

SEQ ID NO: 54673 - DNA, 60 bp, Artificial
  Synthetic oligonucleotide
agtatagtatcgatgtgttccagcacagaattccttggacaatggaactggcctgatggg

SEQ ID NO: 54674 - DNA, 60 bp, Artificial
  Synthetic oligonucleotide
tggacaatggaactggcctgatggggctaaaatagagtacttcctctaagatacagaaaa

SEQ ID NO: 54675 - DNA, 60 bp, Artificial
  Synthetic oligonucleotide
ggagttaatacgtggaagacccaaggaggacagagtatggtggaccagtaatagtatagt

SEQ ID NO: 54676 - DNA, 60 bp, Artificial
  Synthetic oligonucleotide
tggtggaccagtaatagtatagtatcgatgtgttccagcacagaattccttggacaatgg

SEQ ID NO: 54677 - DNA, 60 bp, Artificial
  Synthetic oligonucleotide
cccgaaacatactaaggacacaagaatctgaatgtgtatgccataacggtgtctgcccgg

SEQ ID NO: 54678 - DNA, 60 bp, Artificial
  Synthetic oligonucleotide
gccataacggtgtctgcccggtagtgttcacagatgggtctgccactggacctgcagaaa

SEQ ID NO: 54679 - DNA, 60 bp, Artificial
  Synthetic oligonucleotide
ccataacggtgtctgcccggtagtgttcacagatgggtctgccactggacctgcagaaac

SEQ ID NO: 54680 - DNA, 60 bp, Artificial
  Synthetic oligonucleotide
cctgcagaaacaagaatatactattttaaggaagggaaaatattaaaatgggaacctctg

SEQ ID NO: 54681 - DNA, 60 bp, Artificial
  Synthetic oligonucleotide
aatagaccagtaattcaaatagatccagtggcgatgacacatactagtcagtatatatgt

SEQ ID NO: 54682 - DNA, 60 bp, Artificial
  Synthetic oligonucleotide
caaatagatccagtggcgatgacacatactagtcagtatatatgtagccctgttctcaca

SEQ ID NO: 54683 - DNA, 60 bp, Artificial
  Synthetic oligonucleotide
ggagcaagagataagaactttctcgtttcagcttatttaatgataaaaaacacccttgtt

SEQ ID NO: 54684 - DNA, 60 bp, Artificial
  Synthetic oligonucleotide
gaacagacagacttgtacaagaaggccgatacaacaacaagtgtgacaacagaagatata

SEQ ID NO: 54685 - DNA, 60 bp, Artificial
  Synthetic oligonucleotide
tgacggaatgcttgttgacagtattggttcatggtctcaaaatatcctcagaacccagga

SEQ ID NO: 54686 - DNA, 60 bp, Artificial
  Synthetic oligonucleotide
aagagctcagacggcagaaatagtgaatttagcttgtccttcatgaaaaaatgccttgtt

SEQ ID NO: 54687 - DNA, 60 bp, Artificial
  Synthetic oligonucleotide
ggacttgaatggaatgataacacagttcgagtctctaaaactctacagagattcgcttgg

SEQ ID NO: 54688 - DNA, 60 bp, Artificial
  Synthetic oligonucleotide
ctaaaatagatctctggtcttacaatgcggacgttcttgtcgctctggagaaccagcaca

SEQ ID NO: 54689 - DNA, 60 bp, Artificial
  Synthetic oligonucleotide
ctaaaatagatctctggtcttacaatgcggacgttcttgtcgctctggagaaccaacata

SEQ ID NO: 54690 - DNA, 60 bp, Artificial
  Synthetic oligonucleotide
gaagacaccaaaatagatctctggtcttacaatgcggacgttcttgtcgctctggagaac

SEQ ID NO: 54691 - DNA, 60 bp, Artificial
  Synthetic oligonucleotide
tacgttgaagacactaaaatagatctctggtcttacaatgcggacgttcttgtcgctctg

SEQ ID NO: 54692 - DNA, 60 bp, Artificial
  Synthetic oligonucleotide
cgttgaagacaccaaaatagatctctggtcttacaatgcggacgttcttgtcgctctaga

SEQ ID NO: 54693 - DNA, 60 bp, Artificial
  Synthetic oligonucleotide
tgaagacaccaaaatagatctctggtcttacaatgcggacgttcttgtcgctctggagaa

SEQ ID NO: 54694 - DNA, 60 bp, Artificial
  Synthetic oligonucleotide
cagtggaacaagcaaagcatgttcagattcattctacaggagcatgagatggttgactca

SEQ ID NO: 54695 - DNA, 60 bp, Artificial
  Synthetic oligonucleotide
agtgactatgaagggagattgatccaaaacagcataacaatagagagaatggttctctcg

SEQ ID NO: 54696 - DNA, 60 bp, Artificial
  Synthetic oligonucleotide
caggctcatggcctgatggggcgaatatcaacttcatgcctatataagctttcgcaattt

SEQ ID NO: 54697 - DNA, 60 bp, Artificial
  Synthetic oligonucleotide
caataattgtggccatggtattttcacaagaggattgcatgatcaaggcagttcggggcg

SEQ ID NO: 54698 - DNA, 60 bp, Artificial
  Synthetic oligonucleotide
acatgttcgaaagtaagagcatgaagttacggacacaaataccagcagaaatgcttgcaa

SEQ ID NO: 54699 - DNA, 60 bp, Artificial
  Synthetic oligonucleotide
cgatttgcagaccaagaactgggtgatgccccattccttgaccggcttcgccgagaccag

SEQ ID NO: 54700 - DNA, 60 bp, Artificial
  Synthetic oligonucleotide
ttacaactactgcttgaagtggagcaagagataagaactttctcgtttcagcttatttaa

SEQ ID NO: 54701 - DNA, 60 bp, Artificial
  Synthetic oligonucleotide
gcaagagactagagtatggtggacctcaaacagtattgtcgtattttgtggcacttcagg

SEQ ID NO: 54702 - DNA, 60 bp, Artificial
  Synthetic oligonucleotide
gaaggccgcaagagactagagtatggtggacctcaaacagtattgtcgtattttgtggca

SEQ ID NO: 54703 - DNA, 60 bp, Artificial
  Synthetic oligonucleotide
aaggccacaagagactagagtatggtggacctcaaacagtattgtcgtgttttgtggcac

SEQ ID NO: 54704 - DNA, 60 bp, Artificial
  Synthetic oligonucleotide
gaaggccacaagaaaatagagtatggtggacctcaaacagtattgtcgtgttttgtggca

SEQ ID NO: 54705 - DNA, 60 bp, Artificial
  Synthetic oligonucleotide
gaaggccacaagaaactagagtatggtggacctcaaacagtattgtcgtgttttgtggca

SEQ ID NO: 54706 - DNA, 60 bp, Artificial
  Synthetic oligonucleotide
gagttgataagaggaaggccgcaggagactagagtatggtggacctcaaacagtattgtc

SEQ ID NO: 54707 - DNA, 60 bp, Artificial
  Synthetic oligonucleotide
gagttaataagaggaaggccacaagaggctagagtatggtggacctcaaacagtattgtc

SEQ ID NO: 54708 - DNA, 60 bp, Artificial
  Synthetic oligonucleotide
ggaaggccgcaggagactagagtatggtggacctcaaacagtattgtcgtattttgtggc

SEQ ID NO: 54709 - DNA, 60 bp, Artificial
  Synthetic oligonucleotide
gaattgataagaggaaggccgcaggagactagagtatggtggacctcaaacagtattgtc

SEQ ID NO: 54710 - DNA, 60 bp, Artificial
  Synthetic oligonucleotide
ggagttgataagaggaaggccgcaggagactagagtatggtggacctcaaacagtattgt

SEQ ID NO: 54711 - DNA, 60 bp, Artificial
  Synthetic oligonucleotide
ggagttaataagaggaaggccgcaggagactagagtatggtggacctcaaacagtattgt

SEQ ID NO: 54712 - DNA, 60 bp, Artificial
  Synthetic oligonucleotide
gggaaaggatacatgttcgaaagcaagagcatgaagctacggacacaaataccagcagaa

SEQ ID NO: 54713 - DNA, 60 bp, Artificial
  Synthetic oligonucleotide
gattagggaaaggatacatgttcgaaagcaagagcatgaagctacggacacaaataccag

SEQ ID NO: 54714 - DNA, 60 bp, Artificial
  Synthetic oligonucleotide
gaggatctcatctttctggcacggtctgcactcatactgagaggatcagtggcccacaag

SEQ ID NO: 54715 - DNA, 59 bp, Artificial
  Synthetic oligonucleotide
tcgccgagatcagaagtccctaagaggaagaggcagcactcttggtctggacatcgaaa

SEQ ID NO: 54716 - DNA, 60 bp, Artificial
  Synthetic oligonucleotide
ggagtcagaatgcgtatgcatcaatggaacttgtacagtagtaatgactgatggaagtgc

SEQ ID NO: 54717 - DNA, 60 bp, Artificial
  Synthetic oligonucleotide
actcaggagtcagaatgcgtatgcatcaatggaacttgtacagtagtaatgactgatgga

SEQ ID NO: 54718 - DNA, 60 bp, Artificial
  Synthetic oligonucleotide
tcaggagtcagaatgcgtctgcatcaatggaacttgtacagtagtaatgactgatggaag

SEQ ID NO: 54719 - DNA, 60 bp, Artificial
  Synthetic oligonucleotide
tgtgcatagcatggtccagctcaagttgtcatgatgggaaagcatggttgcacgtttgtg

SEQ ID NO: 54720 - DNA, 60 bp, Artificial
  Synthetic oligonucleotide
agcgcaagcacggcaaccatttgaatggatgtcaatccgactttacttttcttgaaagtg

SEQ ID NO: 54721 - DNA, 60 bp, Artificial
  Synthetic oligonucleotide
gcacggcaaccatttgaatggatgtcaatccgactttacttttcttgaaagtgccagcgc

SEQ ID NO: 54722 - DNA, 60 bp, Artificial
  Synthetic oligonucleotide
tatgcaagccttacaactactgcttgaagtggagcaagagataagaactttctcgtttca

SEQ ID NO: 54723 - DNA, 60 bp, Artificial
  Synthetic oligonucleotide
agtctctgaaaatctacagagattcgcttggagaagcagcgatgaggatgggagacctcc

SEQ ID NO: 54724 - DNA, 60 bp, Artificial
  Synthetic oligonucleotide
cacacatgcactgagatagttgtggcaatgctactatttgctatccatactgtccaaaaa

SEQ ID NO: 54725 - DNA, 59 bp, Artificial
  Synthetic oligonucleotide
cacacatgcactgagatagttgtggcaatgctactatttgctatccatactgtccaaaa

SEQ ID NO: 54726 - DNA, 60 bp, Artificial
  Synthetic oligonucleotide
gcaggagtgaaaatgaatccaaatcagaagataataacaattggctctgtctctctaacc

SEQ ID NO: 54727 - DNA, 60 bp, Artificial
  Synthetic oligonucleotide
gcaggagtgaaaatgaatccaaatcagaagataataacaattggctccgtctctctaacc

SEQ ID NO: 54728 - DNA, 60 bp, Artificial
  Synthetic oligonucleotide
agcaaaagcaggagtgaaaatgaatccaaatcagaagataataacaattggctctgtctc

SEQ ID NO: 54729 - DNA, 60 bp, Artificial
  Synthetic oligonucleotide
agcaaaagcaggagtgaaaatgaatccaaatcagaagataataacaattggctccgtctc

SEQ ID NO: 54730 - DNA, 60 bp, Artificial
  Synthetic oligonucleotide
gggaacttcataccctaaactcagcaaatcatacacaaacaacaaagggaaagaagtgct

SEQ ID NO: 54731 - DNA, 60 bp, Artificial
  Synthetic oligonucleotide
ggggtcaaactggaatctgaaggaacctacaaaatcctcaccatttattcgactgtcgcc

SEQ ID NO: 54732 - DNA, 60 bp, Artificial
  Synthetic oligonucleotide
ggggtcaagctggaatctgaaggaacctacaaaatcctcaccatttattcgactgtcgcc

SEQ ID NO: 54733 - DNA, 60 bp, Artificial
  Synthetic oligonucleotide
gggatcctaataatgagaggggaaacccaggagtgaaagggtgggcctttgacaatggaa

SEQ ID NO: 54734 - DNA, 60 bp, Artificial
  Synthetic oligonucleotide
ggagctatttaataagagcactgacactgaacacaatgacaaaagatgcagaaagaggca

SEQ ID NO: 54735 - DNA, 51 bp, Artificial
  Synthetic oligonucleotide
cttactgacagccagacagcgaccaaaaggattcggatggccatcaattag

SEQ ID NO: 54736 - DNA, 60 bp, Artificial
  Synthetic oligonucleotide
catggtggaggccatggtgtctagggcccgaattgatgcgcgaattgacttcgagtctgg

SEQ ID NO: 54737 - DNA, 60 bp, Artificial
  Synthetic oligonucleotide
ctagggaaaggatacatgttcgaaagcaagagcatgaagcttcgaacacagataccagca

SEQ ID NO: 54738 - DNA, 60 bp, Artificial
  Synthetic oligonucleotide
tctctgttgaaggcaaaagctgcatcaatcggtgcttttatgtggagttgataaggggaa

SEQ ID NO: 54739 - DNA, 60 bp, Artificial
  Synthetic oligonucleotide
ctctgttgaaggcaaaagctgcatcaatcggtgcttttatgtggagttgataaggggaag

SEQ ID NO: 54740 - DNA, 60 bp, Artificial
  Synthetic oligonucleotide
cttcctttgacatgagtaacgaagggtcttatttcttcggagacaatgcagaggaatatg

SEQ ID NO: 54741 - DNA, 60 bp, Artificial
  Synthetic oligonucleotide
cagacaccagaatgcagaaggaacaggaacagcagcagacctcaaatccacccaggcagc

SEQ ID NO: 54742 - DNA, 60 bp, Artificial
  Synthetic oligonucleotide
cccattgtcaggaagtgctcagcatgtggaggaatgctcctgttacccccggtatccaga

SEQ ID NO: 54743 - DNA, 60 bp, Artificial
  Synthetic oligonucleotide
cccattatcaggaagtgctcagcatgtggaggaatgctcctgttacccccggtatccaga

SEQ ID NO: 54744 - DNA, 60 bp, Artificial
  Synthetic oligonucleotide
tagcagctcatacaggagaccggttgggatttccagcatggtggaggccatggtgtctag

SEQ ID NO: 54745 - DNA, 60 bp, Artificial
  Synthetic oligonucleotide
agcaaaagcagggtagataatcactcactgagtgacatcaacatcatggcgtctcaaggc

SEQ ID NO: 54746 - DNA, 60 bp, Artificial
  Synthetic oligonucleotide
ggccagttggaatttccagcatgatggaggccatggtgtctagggcccgaattgatgcac

SEQ ID NO: 54747 - DNA, 60 bp, Artificial
  Synthetic oligonucleotide
cactccctccaaaacagaaacgctacatggcgagaagggttgagtcagaagtttgaagag

SEQ ID NO: 54748 - DNA, 60 bp, Artificial
  Synthetic oligonucleotide
ttcattggtactgttggtctccctgggggcaatcagtttctggatgtgctccaatgggtc

SEQ ID NO: 54749 - DNA, 60 bp, Artificial
  Synthetic oligonucleotide
atcggtagtaagcctgctaataggaatcaccaatttaggtctgaatattgggcttcatta

SEQ ID NO: 54750 - DNA, 60 bp, Artificial
  Synthetic oligonucleotide
gaagataatatgcatttcagctacaggtatgacactatcggtagtaagcctgctaatagg

SEQ ID NO: 54751 - DNA, 60 bp, Artificial
  Synthetic oligonucleotide
tctgacaaaacccctatgtgaggtgaattcatggcacatcctatcaaaggacaacgcaat

SEQ ID NO: 54752 - DNA, 60 bp, Artificial
  Synthetic oligonucleotide
acaataattaacaacaacacccagaataatttcacaaacataaccaatattatacagacc

SEQ ID NO: 54753 - DNA, 54 bp, Artificial
  Synthetic oligonucleotide
ggcttcattataaggtgggtggtacaccaagtgtgaatgttccaaatgaaaacg

SEQ ID NO: 54754 - DNA, 60 bp, Artificial
  Synthetic oligonucleotide
cctgctaataggaatcaccaatttaggtctgaatattgggcttcattataaggtgggtgg

SEQ ID NO: 54755 - DNA, 60 bp, Artificial
  Synthetic oligonucleotide
acaacgcaataaggataggagaggacgcccatatactagtcacaagagagccctacctgt

SEQ ID NO: 54756 - DNA, 60 bp, Artificial
  Synthetic oligonucleotide
aagaatgctcatgttacggtgcaaagagtgtgatcaagtgcatatgcagggacaattgga

SEQ ID NO: 54757 - DNA, 60 bp, Artificial
  Synthetic oligonucleotide
tgctcatgttacggtgcaaagagtgtgatcaagtgcatatgcagggacaattggaagggg

SEQ ID NO: 54758 - DNA, 60 bp, Artificial
  Synthetic oligonucleotide
agggaaaatacaaaagattgaagaactaacaggaagcgctcagcacattgaagaatgctc

SEQ ID NO: 54759 - DNA, 60 bp, Artificial
  Synthetic oligonucleotide
gattgaagaactaacaggaagcgctcagcacattgaagaatgctcatgttacggtgcaaa

SEQ ID NO: 54760 - DNA, 57 bp, Artificial
  Synthetic oligonucleotide
tcaagggatttgcattcctagacggagataattcatggcttgggagaacaattagta

SEQ ID NO: 54761 - DNA, 60 bp, Artificial
  Synthetic oligonucleotide
gtcccagatgcagaaaccagtacccaatcggggccagtctcgcatcaagtgattgtcaac

SEQ ID NO: 54762 - DNA, 52 bp, Artificial
  Synthetic oligonucleotide
gatgacccacacaagcaggtatttgtgctcaaagatactaaccgatacaagt

SEQ ID NO: 54763 - DNA, 60 bp, Artificial
  Synthetic oligonucleotide
aaatggggactgtgatgctccaataactggcggaagtccagatccgggggtcaagggatt

SEQ ID NO: 54764 - DNA, 60 bp, Artificial
  Synthetic oligonucleotide
caaaactggtcaggatactctggatcattcattgactactggtcaaataaagagtgcttc

SEQ ID NO: 54765 - DNA, 60 bp, Artificial
  Synthetic oligonucleotide
tataatgctagagttgaatgcataggatggtcaagcacatcatgccatgatggcaaatct

SEQ ID NO: 54766 - DNA, 50 bp, Artificial
  Synthetic oligonucleotide
tggcaaatctagaatgtcaatatgcatgtcagggccaaacaacaatgcat

SEQ ID NO: 54767 - DNA, 60 bp, Artificial
  Synthetic oligonucleotide
taggagaggacgcccatatactagtcacaagagagccctacctgtcctgtgatccacagg

SEQ ID NO: 54768 - DNA, 60 bp, Artificial
  Synthetic oligonucleotide
ccctacctgtcctgtgatccacagggatgcaggatgtttgctctaagtcaaggcacaaca

SEQ ID NO: 54769 - DNA, 60 bp, Artificial
  Synthetic oligonucleotide
gtgatccacagggatgcaggatgtttgctctaagtcaaggcacaacactcagagggcggc

SEQ ID NO: 54770 - DNA, 60 bp, Artificial
  Synthetic oligonucleotide
aggcacaacactcagagggcggcatgcaaatgggactatacatgataggagcccatacag

SEQ ID NO: 54771 - DNA, 60 bp, Artificial
  Synthetic oligonucleotide
aactcaagaatcagagtgtgtgtgccataatggggtttgcccagtagtaatgacagatgg

SEQ ID NO: 54772 - DNA, 60 bp, Artificial
  Synthetic oligonucleotide
cagagtgtgtgtgccataatggggtttgcccagtagtaatgacagatggcccagcaaaca

SEQ ID NO: 54773 - DNA, 60 bp, Artificial
  Synthetic oligonucleotide
actggtcaaataaagagtgcttcaacccttgtttttatgtggaactaatcagagggaggc

SEQ ID NO: 54774 - DNA, 59 bp, Artificial
  Synthetic oligonucleotide
gtgctgagatcatctactttaagtaggaatgatttaagaaaaacacccttgtttctact

SEQ ID NO: 54775 - DNA, 60 bp, Artificial
  Synthetic oligonucleotide
gggaggcccaaagagagtagtgtactatggacttcaaatagcattgtagctctatgtgga

SEQ ID NO: 54776 - DNA, 60 bp, Artificial
  Synthetic oligonucleotide
aatcatggataagaacatcatactgaaagcgaacttcagtgtgatttttgaccgactgga

SEQ ID NO: 54777 - DNA, 60 bp, Artificial
  Synthetic oligonucleotide
gctaggaaagggatacatgttcgaaagtaagagcatgaagcttcgaacacagataccagc

SEQ ID NO: 54778 - DNA, 60 bp, Artificial
  Synthetic oligonucleotide
ccacttgaatggtgcagaatgggatgtcttcatagagcgacccaccgctgtggatacttg

SEQ ID NO: 54779 - DNA, 60 bp, Artificial
  Synthetic oligonucleotide
tgaccacttgaatggtgcagaatgggatgtcttcatagagcgacccaccgctgtggatac

SEQ ID NO: 54780 - DNA, 60 bp, Artificial
  Synthetic oligonucleotide
ctgtgatcatttgaatggtgcagaatgggatgtcttcatagagcgacccaccgctgtgga

SEQ ID NO: 54781 - DNA, 52 bp, Artificial
  Synthetic oligonucleotide
cattaataagttgggaaatggggcaagcaccgagtccatacaatgtcagagt

SEQ ID NO: 54782 - DNA, 60 bp, Artificial
  Synthetic oligonucleotide
ctgtgccaccattgaagagctcagacggcagaaatagtgaatttagcttgtccttcatga

SEQ ID NO: 54783 - DNA, 60 bp, Artificial
  Synthetic oligonucleotide
ctgctccaccattgaagagctcagacggcagaaatagtgaatttagcttgtccttcatga

SEQ ID NO: 54784 - DNA, 60 bp, Artificial
  Synthetic oligonucleotide
ctgttccaccattgaagagctcagacggcagaaatagtgaatttagcttgtccttcatga

SEQ ID NO: 54785 - DNA, 60 bp, Artificial
  Synthetic oligonucleotide
ctgttccaccatttaagagctcagacggcagaaatagtgaatttagcttgtccttcatga

SEQ ID NO: 54786 - DNA, 60 bp, Artificial
  Synthetic oligonucleotide
ccccaggatgtgctctctgatgcaaggatcaactctcccgagaagatcaggagctgctgg

SEQ ID NO: 54787 - DNA, 60 bp, Artificial
  Synthetic oligonucleotide
gtgttccgtttcatttggcaactaaacaagtgtgcatagcatggtccagctcaagctgcc

SEQ ID NO: 54788 - DNA, 51 bp, Artificial
  Synthetic oligonucleotide
gaaggatcttatttcttcggagacaatgcagaggagtatgacaattgaaga

SEQ ID NO: 54789 - DNA, 59 bp, Artificial
  Synthetic oligonucleotide
ggtctggttattctggcattttctctgttgaaggcaaaagctgcatcaataggtgtttt

SEQ ID NO: 54790 - DNA, 60 bp, Artificial
  Synthetic oligonucleotide
ggtctggttattctggcattttctctgttgaaggcaaaagctgcatcaataggtgttttt

SEQ ID NO: 54791 - DNA, 58 bp, Artificial
  Synthetic oligonucleotide
tgcttgaagtggagcaagagataagaactttctcgtttcagcttatttaatgataaaa

SEQ ID NO: 54792 - DNA, 60 bp, Artificial
  Synthetic oligonucleotide
aatgggaaatttgagttcattgctgaggaattccaatggaacacagtcaagcagaatggg

SEQ ID NO: 54793 - DNA, 60 bp, Artificial
  Synthetic oligonucleotide
cattgctgaggaattccaatggaacacagtcaagcaaaatgggaaatccggggcatgcaa

SEQ ID NO: 54794 - DNA, 60 bp, Artificial
  Synthetic oligonucleotide
ggctaggaaagggatacatgttcgaaagtaagagcatgaagcttcgaacacagataccag

SEQ ID NO: 54795 - DNA, 60 bp, Artificial
  Synthetic oligonucleotide
atggaatgagaatcagaaccctcggatgtttctagcaatgataacatacatcacaagaaa

SEQ ID NO: 54796 - DNA, 60 bp, Artificial
  Synthetic oligonucleotide
attttctctgttgaaggcaaaagctgcatcaataggtgtttttatgtggagttgataaga

SEQ ID NO: 54797 - DNA, 60 bp, Artificial
  Synthetic oligonucleotide
ggacctaataacaatgcttcggcagtggtctggtacaatggaaggccagtcaccgaaatt

SEQ ID NO: 54798 - DNA, 60 bp, Artificial
  Synthetic oligonucleotide
tgtatcagatagagggctgtttggtgctatagctggattcatagaaggaggttggccagg

SEQ ID NO: 54799 - DNA, 60 bp, Artificial
  Synthetic oligonucleotide
gagaaccttatgtgtcatgtgatcccggtaaatgttatcaatttgcacttgggcagggga

SEQ ID NO: 54800 - DNA, 60 bp, Artificial
  Synthetic oligonucleotide
ccgtagtaagtctgctaataggattggccaacttgggtctgaacattgggcttcatttca

SEQ ID NO: 54801 - DNA, 60 bp, Artificial
  Synthetic oligonucleotide
atccgtagtaagtctgctaataggattggccaacttgggtctgaacattgggcttcattt

SEQ ID NO: 54802 - DNA, 60 bp, Artificial
  Synthetic oligonucleotide
ggaccccaggatgtgctctctgatgcaaggatcaactctcccgagaagatcaggagctgc

SEQ ID NO: 54803 - DNA, 60 bp, Artificial
  Synthetic oligonucleotide
cttgaggcgctcatggaatggctaaagacaagaccaatcctgtcacctctgactaagggg

SEQ ID NO: 54804 - DNA, 60 bp, Artificial
  Synthetic oligonucleotide
cgggagattctacatacagatgtgcactgaactcaaactcagtgactatgaagggagact

SEQ ID NO: 54805 - DNA, 60 bp, Artificial
  Synthetic oligonucleotide
gcaagccttgcaactactgcttgaagtagagcaagagataagaactttctcgtttcagct

SEQ ID NO: 54806 - DNA, 60 bp, Artificial
  Synthetic oligonucleotide
atttgaaatcacaggaaccatgcgcaggctcgccgaccaaagtctcccaccgaacttctc

SEQ ID NO: 54807 - DNA, 60 bp, Artificial
  Synthetic oligonucleotide
atttgaaatcacaggagccatgcgtaggcttgccgaccaaagtctcccaccgaacttctc

SEQ ID NO: 54808 - DNA, 60 bp, Artificial
  Synthetic oligonucleotide
atttgaaattacaggagccatgcgcaggctcgccgaccaaagtctcccaccgaacttctc

SEQ ID NO: 54809 - DNA, 60 bp, Artificial
  Synthetic oligonucleotide
atttgaaatcacaggaaccatgcgtaggcttgccgaccaaagtctcccaccgaacttctc

SEQ ID NO: 54810 - DNA, 60 bp, Artificial
  Synthetic oligonucleotide
gcccagcattgagcatcaatgaactgagcaatcttgcaaaaggagagaaggctaatgtgc

SEQ ID NO: 54811 - DNA, 60 bp, Artificial
  Synthetic oligonucleotide
ggaagactctacatacagatgtgcactgaactcaaactcagcgactacgaaggcaggctg

SEQ ID NO: 54812 - DNA, 60 bp, Artificial
  Synthetic oligonucleotide
tgacacaagtcggcctaatgaccccggaagcggaaactgtgatgcaccgataaccggagg

SEQ ID NO: 54813 - DNA, 60 bp, Artificial
  Synthetic oligonucleotide
ggggcaaatagaccagtgatcactatagatcctgagatgatgacccacacaagcaggtat

SEQ ID NO: 54814 - DNA, 60 bp, Artificial
  Synthetic oligonucleotide
gacaattggaagggggcaaatagaccagtgatcactatagatcctgagatgatgacccac

SEQ ID NO: 54815 - DNA, 60 bp, Artificial
  Synthetic oligonucleotide
gggctatacgaagcaattgaggagtgcctgattaatgatccctgggttttgcttaatgca

SEQ ID NO: 54816 - DNA, 60 bp, Artificial
  Synthetic oligonucleotide
aaatctaggacaaaagaggtacaccaaaacaacatactggtgggacggactccaatcctc

SEQ ID NO: 54817 - DNA, 53 bp, Artificial
  Synthetic oligonucleotide
tggcctgatggggcgaatatcaacttcatgcctatataagctttcgcaatttt

SEQ ID NO: 54818 - DNA, 60 bp, Artificial
  Synthetic oligonucleotide
ggagcaaatagaccagtaatcactatagatcctgagatgatgacccacacaagcaagtac

SEQ ID NO: 54819 - DNA, 60 bp, Artificial
  Synthetic oligonucleotide
ctggaaaggagcaaatagaccagtaatcactatagatcctgagatgatgacccacacaag

SEQ ID NO: 54820 - DNA, 60 bp, Artificial
  Synthetic oligonucleotide
gtttggctgggattcatcatgtgggcctgccagaaaggcaacattaggtgcaacatttgc

SEQ ID NO: 54821 - DNA, 57 bp, Artificial
  Synthetic oligonucleotide
gaagtcggatggccatcaattagtgtcgaattgtttaaaaacgaccttgtttctact

SEQ ID NO: 54822 - DNA, 60 bp, Artificial
  Synthetic oligonucleotide
tttcaggtagactgctttctttggcatgtccgcaaacgatttgcagaccaagaattgggt

SEQ ID NO: 54823 - DNA, 60 bp, Artificial
  Synthetic oligonucleotide
agcaaaagcaggggaaacaatgctatcaattacgattctgttcctgctcatagcagaggg

SEQ ID NO: 54824 - DNA, 60 bp, Artificial
  Synthetic oligonucleotide
agcaaaagcaggggaaacaatgctatcaattgtagttctgcttctgctcatagcagagag

SEQ ID NO: 54825 - DNA, 60 bp, Artificial
  Synthetic oligonucleotide
cttcctttgacatgagtaatgaaggatcctatttcttcggagacaatgcagaggagtatg

SEQ ID NO: 54826 - DNA, 60 bp, Artificial
  Synthetic oligonucleotide
aaacgaattgcagaccaagaactgggtgatgccccattccttgaccggcttcgccgagat

SEQ ID NO: 54827 - DNA, 60 bp, Artificial
  Synthetic oligonucleotide
cttgtgattgcaatggggtttgctgccttcttgttctgggccatgtccaatggatcttgc

SEQ ID NO: 54828 - DNA, 60 bp, Artificial
  Synthetic oligonucleotide
ccatttattcgactgccgcctcatctcttgtgcttgcaatggggtttgctgccttcttgt

SEQ ID NO: 54829 - DNA, 60 bp, Artificial
  Synthetic oligonucleotide
actcaggagtcagaatgcgtttgcatcaatggaacttgtacagtagtaatgactgacgga

SEQ ID NO: 54830 - DNA, 60 bp, Artificial
  Synthetic oligonucleotide
acaagtgtgcatagcatggtctagctcaagctgccatgatgggaaagcatggttacatgt

SEQ ID NO: 54831 - DNA, 60 bp, Artificial
  Synthetic oligonucleotide
catagcatggtctagctcaagctgccatgatgggaaagcatggttacatatttgtgtcac

SEQ ID NO: 54832 - DNA, 60 bp, Artificial
  Synthetic oligonucleotide
agtctctgaaaatctacagagattcgcttggagaagcagcgatgagaatgggagacctcc

SEQ ID NO: 54833 - DNA, 60 bp, Artificial
  Synthetic oligonucleotide
acatgttcgaaagtaagagcatgaagctacggacacaaataccagcagaaatgcttgcaa

SEQ ID NO: 54834 - DNA, 60 bp, Artificial
  Synthetic oligonucleotide
tgttcgaaagtaagagcatgaagctacggacacaaataccagcagaaatgcttgcaagca

SEQ ID NO: 54835 - DNA, 60 bp, Artificial
  Synthetic oligonucleotide
ggatttggcgtcaagcgaacaatggagaagacgcaactgctggtctcactcacctgatga

SEQ ID NO: 54836 - DNA, 60 bp, Artificial
  Synthetic oligonucleotide
aaacgatttgcagaccaagaactgggtgatgccccatttctagaccggctacgccgagat

SEQ ID NO: 54837 - DNA, 60 bp, Artificial
  Synthetic oligonucleotide
atgctagaaagagagttggtccgcaaaacgaggttcctcccagtggctggtgggacaagc

SEQ ID NO: 54838 - DNA, 60 bp, Artificial
  Synthetic oligonucleotide
atgctagaaagagagttggtccgcaaaacgaggttcctcccagtggctggtggaacaagc

SEQ ID NO: 54839 - DNA, 60 bp, Artificial
  Synthetic oligonucleotide
gtggccatggtattttcacaagaggattgcatgatcaaggcagttcggggcgatctgaac

SEQ ID NO: 54840 - DNA, 60 bp, Artificial
  Synthetic oligonucleotide
gtagccatggtattttcacaagaggattgcatgatcaaggcagttcggggcgatctgaac

SEQ ID NO: 54841 - DNA, 60 bp, Artificial
  Synthetic oligonucleotide
caataattgtagccatggtattttcacaagaggattgcatgatcaaggcagttcggggcg

SEQ ID NO: 54842 - DNA, 60 bp, Artificial
  Synthetic oligonucleotide
gaggggaaacccaggagtgaaagggtgggcctttgacgatggggatgatgtctggatggg

SEQ ID NO: 54843 - DNA, 60 bp, Artificial
  Synthetic oligonucleotide
aaaaacataatggattccaacactgtgtcaagctttcaggtagactgctttctttggcat

SEQ ID NO: 54844 - DNA, 60 bp, Artificial
  Synthetic oligonucleotide
tagctccatggtatggacacattctttcaggagagagccacggaagaatcctgaagactg

SEQ ID NO: 54845 - DNA, 60 bp, Artificial
  Synthetic oligonucleotide
cgctccatggtatggacacattctttcaggagagagccacggaagaatcctgaagactga

SEQ ID NO: 54846 - DNA, 60 bp, Artificial
  Synthetic oligonucleotide
gctccatggtatggacacattctttcaggagagagccacggaagaatcctgaagactgat

SEQ ID NO: 54847 - DNA, 60 bp, Artificial
  Synthetic oligonucleotide
ttgctccatggtatggacacattctttcaggagagagccacggaagaatcctgaagactg

SEQ ID NO: 54848 - DNA, 54 bp, Artificial
  Synthetic oligonucleotide
tacggacacaaataccagcagaaatgcttgcaaacattgacttgaagtacttca

SEQ ID NO: 54849 - DNA, 60 bp, Artificial
  Synthetic oligonucleotide
tacggacacaaataccagcagaaatgcttgcaaacattgacttgaagtacttcaacgaat

SEQ ID NO: 54850 - DNA, 60 bp, Artificial
  Synthetic oligonucleotide
caacacatttccagagaaagagaagagtgagggacaacatgaccaagaaaatggtcacac

SEQ ID NO: 54851 - DNA, 60 bp, Artificial
  Synthetic oligonucleotide
tgtcgcagtctcgcactcgcgagatactaacaaaaaccactgtggaccatatggccataa

SEQ ID NO: 54852 - DNA, 60 bp, Artificial
  Synthetic oligonucleotide
agctttcaggtagactgttttctttggcatgtccgcaaacgatttgcagaccaagaactg

SEQ ID NO: 54853 - DNA, 60 bp, Artificial
  Synthetic oligonucleotide
cctcaccatttattcgactgtcgcctcatctcttgtgcttgcaatggggtttgctgcctt

SEQ ID NO: 54854 - DNA, 60 bp, Artificial
  Synthetic oligonucleotide
gatctttccagacacgatctggaatgtgtcttacagtggaacaagcaaagcatgttcaga

SEQ ID NO: 54855 - DNA, 60 bp, Artificial
  Synthetic oligonucleotide
cggaatgcttgttgacagtattggttcatggtctcaaaatatcctcagaacccaggagtc

SEQ ID NO: 54856 - DNA, 60 bp, Artificial
  Synthetic oligonucleotide
gtggtcttacaatgctgaattattggtggcattagaaaatcaacatactatagatgtgac

SEQ ID NO: 54857 - DNA, 60 bp, Artificial
  Synthetic oligonucleotide
gaaaatgaacccaaatcagaagataataacaattggctctgtttctctaactattgcggc

SEQ ID NO: 54858 - DNA, 60 bp, Artificial
  Synthetic oligonucleotide
acagagacgaggcaatcaataacagattccagatacaaggagttaagttgactcaaggat

SEQ ID NO: 54859 - DNA, 60 bp, Artificial
  Synthetic oligonucleotide
tacagagacgaggcaatcaataacagattccagatacaaggagttaagttgactcaagga

SEQ ID NO: 54860 - DNA, 60 bp, Artificial
  Synthetic oligonucleotide
cacttcaggtacatatggaacaggctcatggcctgatggggcgaatatcaattttgtgcc

SEQ ID NO: 54861 - DNA, 60 bp, Artificial
  Synthetic oligonucleotide
gacgaacgagaaattccatcaaatcgaaaaggaattttcagaagtggaagggagaattca

SEQ ID NO: 54862 - DNA, 60 bp, Artificial
  Synthetic oligonucleotide
gacgaacgagaaattccatcaaatcgaaaaggaattttcagaagtggaagggagaatcca

SEQ ID NO: 54863 - DNA, 60 bp, Artificial
  Synthetic oligonucleotide
tgagaagacgaacgagaaattccatcaaatcgaaaaggaattttcagaagtggaagggag

SEQ ID NO: 54864 - DNA, 60 bp, Artificial
  Synthetic oligonucleotide
gaagacgaacgagaaattccatcaaatcgaaaaggaattttcagaagtggaagggagaat

SEQ ID NO: 54865 - DNA, 60 bp, Artificial
  Synthetic oligonucleotide
gagaagacgaacgagaaattccatcaaatcgaaaaggaattttcagaagtggaagggaga

SEQ ID NO: 54866 - DNA, 60 bp, Artificial
  Synthetic oligonucleotide
ggcaccaaacgatcttatgaacagatggaaactggtggagaacgccagaatgccactgaa

SEQ ID NO: 54867 - DNA, 53 bp, Artificial
  Synthetic oligonucleotide
gacttgaatggaatgataacacagttcgagtctctgaaactctacagagattc

SEQ ID NO: 54868 - DNA, 60 bp, Artificial
  Synthetic oligonucleotide
agttatgtgtgctcaggacttgttggagacacaccaaggaacgatgatagctctagcagc

SEQ ID NO: 54869 - DNA, 57 bp, Artificial
  Synthetic oligonucleotide
atgagtcttctaaccgaggtcgaaacgtacgttctctctatcgtcccatcaggcccc

SEQ ID NO: 54870 - DNA, 53 bp, Artificial
  Synthetic oligonucleotide
atgagtcttctaaccgaggtcgaaacgtacgttctctctatcgtcccgtcagg

SEQ ID NO: 54871 - DNA, 57 bp, Artificial
  Synthetic oligonucleotide
atgagtcttctaaccgaggtcgaaacgtacgttctctctatcgttccgtcaggcccc

SEQ ID NO: 54872 - DNA, 60 bp, Artificial
  Synthetic oligonucleotide
aaacggtttgcagaccaagaactgggtgatgccccatttctagaccggcttcgccgggac

SEQ ID NO: 54873 - DNA, 60 bp, Artificial
  Synthetic oligonucleotide
gagtatcctagcaaacaatggaaaatttgagttcattgctgaggaattccaatggaacac

SEQ ID NO: 54874 - DNA, 60 bp, Artificial
  Synthetic oligonucleotide
ctacggagcatcttggcaaacaacgggaaatttgagttcattgctgaggaattccaatgg

SEQ ID NO: 54875 - DNA, 60 bp, Artificial
  Synthetic oligonucleotide
agtatcctagcaaacaatggaaaatttgagttcattgctgaggaattccaatggaacaca

SEQ ID NO: 54876 - DNA, 60 bp, Artificial
  Synthetic oligonucleotide
tttgtggaacctcaggtacctatggaacaggctcatggcctgatggagcgaatatcaact

SEQ ID NO: 54877 - DNA, 60 bp, Artificial
  Synthetic oligonucleotide
cctcatcggaggacttgaatggaatgataacacagttcgagtctctgaaactttacagag

SEQ ID NO: 54878 - DNA, 60 bp, Artificial
  Synthetic oligonucleotide
atcctcatcgggggacttgaatggaatgataacacagttcgagtctctgaaactctacag

SEQ ID NO: 54879 - DNA, 60 bp, Artificial
  Synthetic oligonucleotide
atgagtcttctaaccgaggtcgaaacgtacgttctctctatcgttccgtcaggccccctc

SEQ ID NO: 54880 - DNA, 58 bp, Artificial
  Synthetic oligonucleotide
tgcttgaagtggaacaagagataagaactttctcgtttcagcttatttaatgataaaa

SEQ ID NO: 54881 - DNA, 59 bp, Artificial
  Synthetic oligonucleotide
ctgcttgaagttgagcaagagataagaactttctcgtttcagcttatttaatgataaaa

SEQ ID NO: 54882 - DNA, 60 bp, Artificial
  Synthetic oligonucleotide
gaatggtgcagaatgggatgtcttcatagagcgacccactgctgtggacacttgttatcc

SEQ ID NO: 54883 - DNA, 60 bp, Artificial
  Synthetic oligonucleotide
aagccttgcaactattgcttgaagtggagcaagagataagaactttctcgtttcagctta

SEQ ID NO: 54884 - DNA, 60 bp, Artificial
  Synthetic oligonucleotide
gtctcaaggcaccaaacgatcttacgaacaaatggaaactggtggagaacgccagaatgc

SEQ ID NO: 54885 - DNA, 60 bp, Artificial
  Synthetic oligonucleotide
caaactggcagtcggtctgaggaatgtgcctgctagatcaagtagaggactatttggagc

SEQ ID NO: 54886 - DNA, 60 bp, Artificial
  Synthetic oligonucleotide
ctccatggtatggacacattctttcaggagaaagccatggaagaatcctgaagaccgatt

SEQ ID NO: 54887 - DNA, 60 bp, Artificial
  Synthetic oligonucleotide
ttgatgatagactcagaagagatcaaaaggcattaaagggaagaggcagcacacttgggc

SEQ ID NO: 54888 - DNA, 60 bp, Artificial
  Synthetic oligonucleotide
gagagatcaaaaggcattaaagggaagaggcagcacacttgggctcgacctgcgagtggc

SEQ ID NO: 54889 - DNA, 60 bp, Artificial
  Synthetic oligonucleotide
ccttttctgggccatgtccaatggatcttgcagatgcaacatttgtatataattggcaaa

SEQ ID NO: 54890 - DNA, 60 bp, Artificial
  Synthetic oligonucleotide
tactgaggggattcctaattctaggcaaggaggacaaaagatatggaccagcattgagca

SEQ ID NO: 54891 - DNA, 54 bp, Artificial
  Synthetic oligonucleotide
acatctgggtgacaagagaaccttatgtgtcatgcgatcctgacaaatgttatc

SEQ ID NO: 54892 - DNA, 60 bp, Artificial
  Synthetic oligonucleotide
catggagtggctaaagacaagaccaatcctgtcacctctgactaaggggattttagggtt

SEQ ID NO: 54893 - DNA, 60 bp, Artificial
  Synthetic oligonucleotide
atctgtagtaagtctgctaataggattggccaacttggggctgaacatcggacttcattt

SEQ ID NO: 54894 - DNA, 60 bp, Artificial
  Synthetic oligonucleotide
atccgtagtaagtctgctaataggattggccaacttggggctgaacattgggattcattt

SEQ ID NO: 54895 - DNA, 60 bp, Artificial
  Synthetic oligonucleotide
atccgtagtaagtctgctaataggattggccaacttgggtctgaacattgggctccactt

SEQ ID NO: 54896 - DNA, 60 bp, Artificial
  Synthetic oligonucleotide
atccgtagtaagtctgctaataggattggccaacttggggctgaacattgggcttcattt

SEQ ID NO: 54897 - DNA, 60 bp, Artificial
  Synthetic oligonucleotide
gacttgaatggaatgataacacagttcgagtctctgaaactctacagagattcgcttgga

SEQ ID NO: 54898 - DNA, 60 bp, Artificial
  Synthetic oligonucleotide
cagggtagataatcactcaccgagtgacatcaacaccatggcgtctcaaggcaccaaacg

SEQ ID NO: 54899 - DNA, 60 bp, Artificial
  Synthetic oligonucleotide
cagggtagataatcactcaccgagtgacatcaacaccatggcgtcccaaggcaccaaacg

SEQ ID NO: 54900 - DNA, 60 bp, Artificial
  Synthetic oligonucleotide
agctctatgtggatccaaagagcgattgggatcatggtcctggcatgatggtgctgagat

SEQ ID NO: 54901 - DNA, 60 bp, Artificial
  Synthetic oligonucleotide
tgtagctctgtgcggatccagggagcgattgggatcatggtcctggcatgatggtgctga

SEQ ID NO: 54902 - DNA, 53 bp, Artificial
  Synthetic oligonucleotide
ttgggatcatggtcctggcatgatggtgctgaaatcatctactttaagtagaa

SEQ ID NO: 54903 - DNA, 56 bp, Artificial
  Synthetic oligonucleotide
tgggatcatggtcctggcatgatggtgctgaaatcatctactttaagtaggaatga

SEQ ID NO: 54904 - DNA, 60 bp, Artificial
  Synthetic oligonucleotide
gctctgtgcggatccagggagcgattgggatcatggtcctggcatgatggtgctgaaatc

SEQ ID NO: 54905 - DNA, 60 bp, Artificial
  Synthetic oligonucleotide
gctctatgtggatccaaagagcgattgggatcatggtcctggcatgatggtgctgagatc

SEQ ID NO: 54906 - DNA, 60 bp, Artificial
  Synthetic oligonucleotide
ctctctgtggatccaaggagcgattaggatcatggtcctggcatgatggtgctgaaatca

SEQ ID NO: 54907 - DNA, 51 bp, Artificial
  Synthetic oligonucleotide
ttgggatcatggtcctggcatgatggtgctgaaatcatctactttaagtag

SEQ ID NO: 54908 - DNA, 60 bp, Artificial
  Synthetic oligonucleotide
gaatgcagaacctcctcgagcaaccaagcagtgccatgtgaaccaatcataatagaaagg

SEQ ID NO: 54909 - DNA, 60 bp, Artificial
  Synthetic oligonucleotide
cgaagaatccagatctttccagacacaatctggaatgtgacttacagtgggacaagcaaa

SEQ ID NO: 54910 - DNA, 60 bp, Artificial
  Synthetic oligonucleotide
cgacaagggttcaatctctacaactaaaccctttcaaaacatctcgagaatatcaattgg

SEQ ID NO: 54911 - DNA, 60 bp, Artificial
  Synthetic oligonucleotide
agcaaaagcagggtagataatcactcaccgagtgacatcaacaccatggcgtcccaaggc

SEQ ID NO: 54912 - DNA, 60 bp, Artificial
  Synthetic oligonucleotide
agcaaaagcagggtagataatcactcaccgagtgacatcaacaccatggcgtctcaaggc

SEQ ID NO: 54913 - DNA, 60 bp, Artificial
  Synthetic oligonucleotide
agcgaaagcagggtagataatcactcaccgagtgacatcaacaccatggcgtctcaaggc

SEQ ID NO: 54914 - DNA, 60 bp, Artificial
  Synthetic oligonucleotide
ttgggaactgtcccaaatatgttggagtgaagagtctcaaactggcagttggtctaagga

SEQ ID NO: 54915 - DNA, 60 bp, Artificial
  Synthetic oligonucleotide
tcctggaaatgctgaaattgaagatctcatctttctggcacggtctgcactcatcttgag

SEQ ID NO: 54916 - DNA, 60 bp, Artificial
  Synthetic oligonucleotide
tggggtcctcatcggaggacttgaatggaatggtaacacggttcgagtctctgaaaatct

SEQ ID NO: 54917 - DNA, 60 bp, Artificial
  Synthetic oligonucleotide
ggaacaggctcatggcctgatggggcgaatatcaatttcatgcctatataagctttcgca

SEQ ID NO: 54918 - DNA, 60 bp, Artificial
  Synthetic oligonucleotide
ggcatcaagagggctttttggagcaatagctggattcatagagaatggctggcaaggcct

SEQ ID NO: 54919 - DNA, 60 bp, Artificial
  Synthetic oligonucleotide
gaatcctgccctcagaatgaaatggatgatggcaatgaaatatccgatcaccgcagacaa

SEQ ID NO: 54920 - DNA, 60 bp, Artificial
  Synthetic oligonucleotide
cctgccctcagaatgaaatggatgatggcaatgaaatatccgatcaccgcagacaaaaga

SEQ ID NO: 54921 - DNA, 60 bp, Artificial
  Synthetic oligonucleotide
gcacaattctgaacactgaaattcccataggctcatgtgtcagcaaatgtcacacagaca

SEQ ID NO: 54922 - DNA, 60 bp, Artificial
  Synthetic oligonucleotide
ctgaaattcccataggctcatgtgtcagcaaatgtcacacagacaaaggctctctatcca

SEQ ID NO: 54923 - DNA, 60 bp, Artificial
  Synthetic oligonucleotide
cacacagacaaaggctctctatccacaactaagcctttccagaatatctcgagaatagca

SEQ ID NO: 54924 - DNA, 60 bp, Artificial
  Synthetic oligonucleotide
tctctatccacaactaagcctttccagaatatctcgagaatagcaattggggattgcccc

SEQ ID NO: 54925 - DNA, 60 bp, Artificial
  Synthetic oligonucleotide
gagaatagcaattggggattgccccaaatatgttaaacagggctctttaaaacttgcaac

SEQ ID NO: 54926 - DNA, 60 bp, Artificial
  Synthetic oligonucleotide
ggggattgccccaaatatgttaaacagggctctttaaaacttgcaacaggaatgaggaac

SEQ ID NO: 54927 - DNA, 60 bp, Artificial
  Synthetic oligonucleotide
ggaatgaggaacattcctgagaaagcatcgagagggctctttggagcaatagctggattc

SEQ ID NO: 54928 - DNA, 60 bp, Artificial
  Synthetic oligonucleotide
gacaccagaatgcagaaggaacaggaacagcagcagacctcaaatccacccaggcagcca

SEQ ID NO: 54929 - DNA, 60 bp, Artificial
  Synthetic oligonucleotide
ttgatcagatcaatgggaagttaaatcgtcttattgagaagacaaatgagaagtaccatc

SEQ ID NO: 54930 - DNA, 53 bp, Artificial
  Synthetic oligonucleotide
ttcaacaggctaaattggctgataaaatcagacggaaatgcataccctcttca

SEQ ID NO: 54931 - DNA, 60 bp, Artificial
  Synthetic oligonucleotide
cgccaacaatgggaaatttgaattcattgccgaagaatttcagtggactacagtgaagca

SEQ ID NO: 54932 - DNA, 60 bp, Artificial
  Synthetic oligonucleotide
gctcgtagcagagaattcttctcaaaactacacaggaaaccctgtgatatgcatgggaca

SEQ ID NO: 54933 - DNA, 58 bp, Artificial
  Synthetic oligonucleotide
atggtgcagaatgggatgtattcatagaaagacccaatgcaatagacacttgctaccc

SEQ ID NO: 54934 - DNA, 60 bp, Artificial
  Synthetic oligonucleotide
ggaaggaagaattcaagacctggagaagtatgttgaggatacaaagattgatttatggtc

SEQ ID NO: 54935 - DNA, 60 bp, Artificial
  Synthetic oligonucleotide
agagagtaaggcgccaactcagagagaatgctgaagacaaaggaaacggatgtttcgaga

SEQ ID NO: 54936 - DNA, 60 bp, Artificial
  Synthetic oligonucleotide
ggtcatataatgcagagctattagtcgcactggagaaccagcacactatagatgtgactg

SEQ ID NO: 54937 - DNA, 60 bp, Artificial
  Synthetic oligonucleotide
atagggatgaagcaatcaataaccgattccaaattcaaggagtcaaattgacccaggggt

SEQ ID NO: 54938 - DNA, 60 bp, Artificial
  Synthetic oligonucleotide
gttgcactacttttagccttcatgttgtgggcttgtcaaaacggaaacatccggtgccag

SEQ ID NO: 54939 - DNA, 60 bp, Artificial
  Synthetic oligonucleotide
gcaatcaataaccgattccaaattcaaggagtcaaattgacccaggggtacaaggacatc

SEQ ID NO: 54940 - DNA, 60 bp, Artificial
  Synthetic oligonucleotide
aacctcccggaattatgtccgagccccctgagactagttgacggtcagacttgcgatatc

SEQ ID NO: 54941 - DNA, 51 bp, Artificial
  Synthetic oligonucleotide
cccctgagactagttgacggtcagacttgcgatatcatcaatggagcactg

SEQ ID NO: 54942 - DNA, 60 bp, Artificial
  Synthetic oligonucleotide
tactcgccaacaatgggaaatttgaattcattgccgaagaatttcagtggactacagtga

SEQ ID NO: 54943 - DNA, 60 bp, Artificial
  Synthetic oligonucleotide
aagtggtcactgcacaagaactggtagaatcgcaaaacctcccggaattatgtccgagcc

SEQ ID NO: 54944 - DNA, 60 bp, Artificial
  Synthetic oligonucleotide
ttggtagtagaccctgggtgagaggacagagcggcaggataagtttctactggactatcg

SEQ ID NO: 54945 - DNA, 60 bp, Artificial
  Synthetic oligonucleotide
gtgtagtccctaacattggtagtagaccctgggtgagaggacagagcggcaggataagtt

SEQ ID NO: 54946 - DNA, 59 bp, Artificial
  Synthetic oligonucleotide
acagacacggagcaaactaacctatacaaaaacaaccctggaagagtcaccgtctctac

SEQ ID NO: 54947 - DNA, 60 bp, Artificial
  Synthetic oligonucleotide
acaacggtgattatgcaagactttacatatggggggttcaccacccttcaacagacacgg

SEQ ID NO: 54948 - DNA, 60 bp, Artificial
  Synthetic oligonucleotide
tggactatcgtagagcctggagacctgatagtcttcaacacaatagggaatctaattgcc

SEQ ID NO: 54949 - DNA, 60 bp, Artificial
  Synthetic oligonucleotide
aggataagtttctactggactatcgtagagcctggagacctgatagtcttcaacacaata

SEQ ID NO: 54950 - DNA, 60 bp, Artificial
  Synthetic oligonucleotide
ttgcgatatcatcaatggagcactgggaagcccaggatgtgaccacctgaatggtgcaga

SEQ ID NO: 54951 - DNA, 60 bp, Artificial
  Synthetic oligonucleotide
catcaatggagcactgggaagcccaggatgtgaccacctgaatggtgcagaatgggatgt

SEQ ID NO: 54952 - DNA, 60 bp, Artificial
  Synthetic oligonucleotide
ctaatcgctccatggtatggacacattctttcaggagagagccacggaagaatcctgaag

SEQ ID NO: 54953 - DNA, 60 bp, Artificial
  Synthetic oligonucleotide
cttgaaagtgccagcgcaaaatgccataagtaccacattcccttatactggagaccctcc

SEQ ID NO: 54954 - DNA, 60 bp, Artificial
  Synthetic oligonucleotide
tgccagcgcaaaatgccataagtaccacattcccttatactggagaccctccatacagcc

SEQ ID NO: 54955 - DNA, 60 bp, Artificial
  Synthetic oligonucleotide
gctacctaataagagcactgacactgaacacaatgacaaaagatgctgaaaggggaaaat

SEQ ID NO: 54956 - DNA, 57 bp, Artificial
  Synthetic oligonucleotide
aaaagagctacctgataagagcactgacactgaacacaatgacaaaagatgcagaaa

SEQ ID NO: 54957 - DNA, 60 bp, Artificial
  Synthetic oligonucleotide
cattgttcaggcacttagggacaacctggaacctggaaccttcgatcttggagggctata

SEQ ID NO: 54958 - DNA, 60 bp, Artificial
  Synthetic oligonucleotide
actcattgttcaggcacttagggacaacctggaacctggaaccttcgatcttggagggct

SEQ ID NO: 54959 - DNA, 60 bp, Artificial
  Synthetic oligonucleotide
ctcattgttcaggcacttagggacaacctggaacctggaaccttcgatcttggagggcta

SEQ ID NO: 54960 - DNA, 60 bp, Artificial
  Synthetic oligonucleotide
caaagaatacagatctttccagacacaatctggaatgtgtcttacagtggaacaagcaaa

SEQ ID NO: 54961 - DNA, 60 bp, Artificial
  Synthetic oligonucleotide
gctttcaggtagactgctttctttggcatgtccgcaaacgaattgcagaccaagaactgg

SEQ ID NO: 54962 - DNA, 60 bp, Artificial
  Synthetic oligonucleotide
aacttgcaacaggaatgaggaacattcctgagaaagcatcgagagggctctttggagcaa

SEQ ID NO: 54963 - DNA, 60 bp, Artificial
  Synthetic oligonucleotide
acccatttgatgatctggcattccaatctgaatgatgccacatatcaaagaacaagggca

SEQ ID NO: 54964 - DNA, 60 bp, Artificial
  Synthetic oligonucleotide
ctccatggtatggacacattctttcaggagaaagtcatggaagaatcctgaagaccgatt

SEQ ID NO: 54965 - DNA, 60 bp, Artificial
  Synthetic oligonucleotide
accggactctagcatacttactgacagccagacagcgaccaaaaggattcggatggccat

SEQ ID NO: 54966 - DNA, 60 bp, Artificial
  Synthetic oligonucleotide
cgggactctagcatacttactgacagccagacagcgaccaaaagaagtcggatggccatc

SEQ ID NO: 54967 - DNA, 60 bp, Artificial
  Synthetic oligonucleotide
cgggactctagcatacttactgacagccagacagcgaccaaaagaattcgggtggccatc

SEQ ID NO: 54968 - DNA, 60 bp, Artificial
  Synthetic oligonucleotide
cgggactctagcatacttactgacagccagacagcgaccaaaaggattcgagatgccatc

SEQ ID NO: 54969 - DNA, 60 bp, Artificial
  Synthetic oligonucleotide
gggactctagcatacttactgacagccagacagcgaccaaaaggattcggatggccatca

SEQ ID NO: 54970 - DNA, 60 bp, Artificial
  Synthetic oligonucleotide
ccggactctagcatacttactgacagccagacagcgaccaaaaggattcggatggccatc

SEQ ID NO: 54971 - DNA, 60 bp, Artificial
  Synthetic oligonucleotide
ctctagcatacttactgacagccagacagcgaccaaaaggattcggatggccatcaatta

SEQ ID NO: 54972 - DNA, 60 bp, Artificial
  Synthetic oligonucleotide
ggggggaattcctggttgggaaggaccataagcaaagattcaaggtcagggtatgagatg

SEQ ID NO: 54973 - DNA, 60 bp, Artificial
  Synthetic oligonucleotide
gggggaaattcctggttgggaaggaccataagcaaagattcaaggtcagggtatgagatg

SEQ ID NO: 54974 - DNA, 60 bp, Artificial
  Synthetic oligonucleotide
ggggaaattcctggttgggaaggaccataagcaaagattcaaggtcagggtatgagatgc

SEQ ID NO: 54975 - DNA, 60 bp, Artificial
  Synthetic oligonucleotide
ggggaattcctggttgggaaggaccataagcaaagattcaaggtcagggtatgagatgct

SEQ ID NO: 54976 - DNA, 60 bp, Artificial
  Synthetic oligonucleotide
ggagtcagaatgcgtttgtatcaatggaacttgtacagtagtaatgactgatgggagtgc

SEQ ID NO: 54977 - DNA, 59 bp, Artificial
  Synthetic oligonucleotide
gaatgcagcatcccctcgaacaatcaagtagtgccatgtgaaccaatcataatagaaag

SEQ ID NO: 54978 - DNA, 60 bp, Artificial
  Synthetic oligonucleotide
cctttgacctgaataatgaaggatcctatatcttcggagacaatgcagaggagtatgaca

SEQ ID NO: 54979 - DNA, 60 bp, Artificial
  Synthetic oligonucleotide
cctttgacatgagtaatgaaggatcctatttcttcggagacaatgcagaggagtatgaca

SEQ ID NO: 54980 - DNA, 60 bp, Artificial
  Synthetic oligonucleotide
aatcctcagaacccaggagtcagaatgcgtttgtatcaatggaacttgtacagtagtaat

SEQ ID NO: 54981 - DNA, 60 bp, Artificial
  Synthetic oligonucleotide
gctgcgatcacctgaatggtgcggagtgggatgtcttcatagagcgacccactgctgtgg

SEQ ID NO: 54982 - DNA, 60 bp, Artificial
  Synthetic oligonucleotide
gactgctttctttggcatgtccgcaaacgatttgcagaccgagaactgggtgatgcccca

SEQ ID NO: 54983 - DNA, 60 bp, Artificial
  Synthetic oligonucleotide
aaccctgactgatgaccaagtagaagttgtcactgcccaagaattagtggaatcgcaaca

SEQ ID NO: 54984 - DNA, 60 bp, Artificial
  Synthetic oligonucleotide
aaaccttgactgatgaccaagtagaagttgtcactgcccaagaattagtggaatcgcaac

SEQ ID NO: 54985 - DNA, 60 bp, Artificial
  Synthetic oligonucleotide
gtactgggatggatcccaggatgtgctctctgatgcaaggatcaactctcccgagaaggt

SEQ ID NO: 54986 - DNA, 58 bp, Artificial
  Synthetic oligonucleotide
ttgtggcaatgctactatttgctatccatactgtccaaaaaagtaccttgtttctact

SEQ ID NO: 54987 - DNA, 59 bp, Artificial
  Synthetic oligonucleotide
gttgtggcaatgctactatttgctatccatactgtccaaaaaagtaccttgtttctact

SEQ ID NO: 54988 - DNA, 60 bp, Artificial
  Synthetic oligonucleotide
tagttgtagcaatgctactatttgctatccatactgtccaaaaaagtaccttgtttctac

SEQ ID NO: 54989 - DNA, 60 bp, Artificial
  Synthetic oligonucleotide
tagttgtggcaatgctactatttgctatccatactgtccaaaaaagtaccttgtttctac

SEQ ID NO: 54990 - DNA, 52 bp, Artificial
  Synthetic oligonucleotide
caatgctactatttgctatccatactgtccaaaaaagtaccttgtttctact

SEQ ID NO: 54991 - DNA, 53 bp, Artificial
  Synthetic oligonucleotide
gcaatgctactatttgctatccatactgtccaaaaaagtaccttgtttctact

SEQ ID NO: 54992 - DNA, 57 bp, Artificial
  Synthetic oligonucleotide
tgtggcaatgctactatttgctatccgtactgtccaaaaaagtaccttgtttctact

SEQ ID NO: 54993 - DNA, 57 bp, Artificial
  Synthetic oligonucleotide
tgtggcaatgctactatttgctatccatactgtccaaaaaagtaccttgtttctact

SEQ ID NO: 54994 - DNA, 60 bp, Artificial
  Synthetic oligonucleotide
gctttcaggtagactgctttctctggcatgtccgcaaacgatttgcagaccaagaactgg

SEQ ID NO: 54995 - DNA, 60 bp, Artificial
  Synthetic oligonucleotide
ggggaactcctggttgggaaggaccataagcaaagattcaaggtcagggtatgagatgct

SEQ ID NO: 54996 - DNA, 60 bp, Artificial
  Synthetic oligonucleotide
aacaagtgtagtaccaaatattggcagtagaccatgggtgagaggccaaagcggcagaat

SEQ ID NO: 54997 - DNA, 60 bp, Artificial
  Synthetic oligonucleotide
ctggagacaacaccaaatggaatgagaatcagaaccctcggatgtttctagcaatgataa

SEQ ID NO: 54998 - DNA, 60 bp, Artificial
  Synthetic oligonucleotide
gaccaaaaggcattaaagggaagaggcagcacacttggactcgacctgcgagtggctaca

SEQ ID NO: 54999 - DNA, 60 bp, Artificial
  Synthetic oligonucleotide
gatcaaaaggcattaaagggaagaggcagcacacttggactcgacctgcgagtggccaca

SEQ ID NO: 55000 - DNA, 60 bp, Artificial
  Synthetic oligonucleotide
aacacgataacctcgtttcaggtagattgctatctatggcacataagaaagctgctcagc

SEQ ID NO: 55001 - DNA, 60 bp, Artificial
  Synthetic oligonucleotide
ccaacactgtaacctcgtttcaggtagattgctatctatggcacataagaaagctgctca

SEQ ID NO: 55002 - DNA, 60 bp, Artificial
  Synthetic oligonucleotide
tgctccctttgatgacagactcagaagagaccaaaaggcattaaagggaagaggcagcac

SEQ ID NO: 55003 - DNA, 60 bp, Artificial
  Synthetic oligonucleotide
atagactcagaagagatcaaaaggcattaaagggaagaggcagcacacttggactcgacc

SEQ ID NO: 55004 - DNA, 60 bp, Artificial
  Synthetic oligonucleotide
gataacctcgtttcaggtagattgctatctatggcacataagaaagctgctcagcatgag

SEQ ID NO: 55005 - DNA, 60 bp, Artificial
  Synthetic oligonucleotide
cagactcagaagagatcaaaaggcattaaagggaagaggcagcacacttggactcgacct

SEQ ID NO: 55006 - DNA, 60 bp, Artificial
  Synthetic oligonucleotide
cagactcagaagagaccaaaaggcattaaagggaagaggcagcacacttggactcgacct

SEQ ID NO: 55007 - DNA, 60 bp, Artificial
  Synthetic oligonucleotide
atagactcagaagagaccaaaaggcattaaagggaagaggcagcacacttggactcgacc

SEQ ID NO: 55008 - DNA, 60 bp, Artificial
  Synthetic oligonucleotide
cagactcagaagagatcaaaaggcattaaagggaagaggcagcacacttggactcgaact

SEQ ID NO: 55009 - DNA, 60 bp, Artificial
  Synthetic oligonucleotide
gatcaaaaggcattaaagggaagaggcagcacacttggactcgacctgcgggtggccaca

SEQ ID NO: 55010 - DNA, 60 bp, Artificial
  Synthetic oligonucleotide
atgaatccaaatcagaagataataacaattggctctgtctctctaaccattgcaacagta

SEQ ID NO: 55011 - DNA, 60 bp, Artificial
  Synthetic oligonucleotide
gtagactgctttctttggcatgtccgcaaacgatttgcagaccaagaactgggtgatgcc

SEQ ID NO: 55012 - DNA, 60 bp, Artificial
  Synthetic oligonucleotide
gcattgagcatcaatgaactgagcaatcttgcgaaaggggagaaagctaatgtgctgata

SEQ ID NO: 55013 - DNA, 60 bp, Artificial
  Synthetic oligonucleotide
accagcattgagcatcaatgaactgagcaatcttgcgaaaggggagaaagctaatgtgct

SEQ ID NO: 55014 - DNA, 60 bp, Artificial
  Synthetic oligonucleotide
gatcttatttcttcggagacaatgcagaggagtatgacaattgaaagaaaaatacccttg

SEQ ID NO: 55015 - DNA, 60 bp, Artificial
  Synthetic oligonucleotide
gagtacagtcttaggagtctcaatcctgaatcttgggcaaaagaggtataccaaaacgac

SEQ ID NO: 55016 - DNA, 60 bp, Artificial
  Synthetic oligonucleotide
ggcatctcaagaatgtcaatctgcatgtcaggccccaataacaatgcttcggcagtggtc

SEQ ID NO: 55017 - DNA, 60 bp, Artificial
  Synthetic oligonucleotide
tgccttcctattctgggccatgtccaatggctcttgcagatgcaacatttgtatataatt

SEQ ID NO: 55018 - DNA, 60 bp, Artificial
  Synthetic oligonucleotide
cttcctattctgggccatgtccaatggctcttgcagatgcaacatttgtatataattagc

SEQ ID NO: 55019 - DNA, 60 bp, Artificial
  Synthetic oligonucleotide
gggagattctacatacagatgtgcactgaactcaaactcagtgactatgaagggaggctg

SEQ ID NO: 55020 - DNA, 60 bp, Artificial
  Synthetic oligonucleotide
atgagagaatgtgcaacattctcaaagggaaattccaaacagcagcacaacgagcaatga

SEQ ID NO: 55021 - DNA, 60 bp, Artificial
  Synthetic oligonucleotide
cactctttagttctgctagttcctaccaaagaatccagatctttccagacacaatctgga

SEQ ID NO: 55022 - DNA, 60 bp, Artificial
  Synthetic oligonucleotide
caggaacaatgcgcaggcttgccgaccaaagtctcccaccgaatttctccagccctgaaa

SEQ ID NO: 55023 - DNA, 60 bp, Artificial
  Synthetic oligonucleotide
tcaagtagaggactatttggagccatagctggattcatagagggaggttggtcagggcta

SEQ ID NO: 55024 - DNA, 60 bp, Artificial
  Synthetic oligonucleotide
atgatctggcattccaatctgaatgatgccacatatcaaagaacgagagctctagtgcgt

SEQ ID NO: 55025 - DNA, 60 bp, Artificial
  Synthetic oligonucleotide
atgatctggcattccaatctgaatgatgccacatatcaaagaacaagagctctagtgcgt

SEQ ID NO: 55026 - DNA, 60 bp, Artificial
  Synthetic oligonucleotide
cgaagcaatcaataacagattccagatacaaggagttaaattgactcaaggatacaagga

SEQ ID NO: 55027 - DNA, 60 bp, Artificial
  Synthetic oligonucleotide
gaggcaatcaataacagattccagatacaaggagttaaattgactcaaggatacaaggac

SEQ ID NO: 55028 - DNA, 60 bp, Artificial
  Synthetic oligonucleotide
tacagagacgaggcaatcaataacagattccagatacaaggagttaaattgactcaagga

SEQ ID NO: 55029 - DNA, 60 bp, Artificial
  Synthetic oligonucleotide
acagagacgaagcaatcaataacagattccagatacaaggagttaaattgactcaaggat

SEQ ID NO: 55030 - DNA, 60 bp, Artificial
  Synthetic oligonucleotide
actcaggagtcagaatgcgtttgtatcaatggaacctgtacggtagtaatgacggatgga

SEQ ID NO: 55031 - DNA, 60 bp, Artificial
  Synthetic oligonucleotide
atctgttccaccattgaagagctcagacggcagaaatagtgaatttagcttgtccttcat

SEQ ID NO: 55032 - DNA, 60 bp, Artificial
  Synthetic oligonucleotide
tcaaatccactcaagcagccattgatcagatcaatggaaagctaaaccgccttattgaga

SEQ ID NO: 55033 - DNA, 60 bp, Artificial
  Synthetic oligonucleotide
gagtatccgaaatggaacttatgatcatgacatttatagagatgaagcaatcaacaaccg

SEQ ID NO: 55034 - DNA, 60 bp, Artificial
  Synthetic oligonucleotide
aacaatcagaagaagagcacaattctaaacactccaattccaataggctcatgtgtaagc

SEQ ID NO: 55035 - DNA, 60 bp, Artificial
  Synthetic oligonucleotide
actgcattgagagtatccgaaatggaacttatgatcatgacatttatagagatgaagcaa

SEQ ID NO: 55036 - DNA, 60 bp, Artificial
  Synthetic oligonucleotide
cctttcaaaacatctcgagaatagcaattggagactgccccaagtatgtcaaacagggct

SEQ ID NO: 55037 - DNA, 60 bp, Artificial
  Synthetic oligonucleotide
caaccctggaagagtcactgtgtctaccaaaactagtcaaacaagtgtagttcccaacat

SEQ ID NO: 55038 - DNA, 60 bp, Artificial
  Synthetic oligonucleotide
gggagttcatcacccttcaacagacacagagcagaccaatctgtacaagaacaaccctgg

SEQ ID NO: 55039 - DNA, 60 bp, Artificial
  Synthetic oligonucleotide
cggagcattgggaagcccaggatgcgatcatctgaatggagcagaatgggatgtcttcat

SEQ ID NO: 55040 - DNA, 60 bp, Artificial
  Synthetic oligonucleotide
ttgcgatatcatcaacggagcattgggaagcccaggatgcgatcatctgaatggagcaga

SEQ ID NO: 55041 - DNA, 60 bp, Artificial
  Synthetic oligonucleotide
gggatgtcttcatagagaggcccactgcggtagatacttgctacccattcgatgtgccag

SEQ ID NO: 55042 - DNA, 60 bp, Artificial
  Synthetic oligonucleotide
atggagcagaatgggatgtcttcatagagaggcccactgcggtagatacttgctacccat

SEQ ID NO: 55043 - DNA, 60 bp, Artificial
  Synthetic oligonucleotide
tgctacccattcgatgtgccagattaccagagtttgagaagcatacttgccaataatggg

SEQ ID NO: 55044 - DNA, 60 bp, Artificial
  Synthetic oligonucleotide
agactttacatctggggagttcatcacccttcaacagacacagagcagaccaatctgtac

SEQ ID NO: 55045 - DNA, 60 bp, Artificial
  Synthetic oligonucleotide
gctaaattggctggtgaaatcagacggaaatgcatatccccttcaaaacttgacaaaggt

SEQ ID NO: 55046 - DNA, 60 bp, Artificial
  Synthetic oligonucleotide
ctgctcgtagcagaaaactcttctcagaactacacaggaaacccagtgatatgcatggga

SEQ ID NO: 55047 - DNA, 60 bp, Artificial
  Synthetic oligonucleotide
aagtggtcactgcacaagaactggtagagtcacaaaacttcccagaactctgtccgagcc

SEQ ID NO: 55048 - DNA, 60 bp, Artificial
  Synthetic oligonucleotide
aacttcccagaactctgtccgagccctcttagactagttgacggccagacttgcgatatc

SEQ ID NO: 55049 - DNA, 60 bp, Artificial
  Synthetic oligonucleotide
ctctgtccgagccctcttagactagttgacggccagacttgcgatatcatcaacggagca

SEQ ID NO: 55050 - DNA, 60 bp, Artificial
  Synthetic oligonucleotide
ctcgagaatagcaattggagactgccccaagtatgtcaaacagggctctctgaaacttgc

SEQ ID NO: 55051 - DNA, 60 bp, Artificial
  Synthetic oligonucleotide
gatgaagcaatcaacaaccgatttcagatccagggagtcaaattgacccagggatacaag

SEQ ID NO: 55052 - DNA, 60 bp, Artificial
  Synthetic oligonucleotide
gctttttgctcgttgcactgcttttagccttcattttgtgggcttgtcagaacggaaaca

SEQ ID NO: 55053 - DNA, 60 bp, Artificial
  Synthetic oligonucleotide
tcgaaggaaggattcaggatctagagaagtatgttgaggatacaaaaattgatttatggt

SEQ ID NO: 55054 - DNA, 60 bp, Artificial
  Synthetic oligonucleotide
ggaatctaattgccccaagaggacattacaaactaaacaatcagaagaagagcacaattc

SEQ ID NO: 55055 - DNA, 60 bp, Artificial
  Synthetic oligonucleotide
aaacagggctctctgaaacttgcaacaggaatgaggaacattcctgaaaaggcatcaaga

SEQ ID NO: 55056 - DNA, 60 bp, Artificial
  Synthetic oligonucleotide
caaacaagtgtagttcccaacattgatagcagaccctgggtgagaggacaaagcggcaga

SEQ ID NO: 55057 - DNA, 60 bp, Artificial
  Synthetic oligonucleotide
atgtgtaagcaaatgtcacacagacaaaggctctatctccacaagtaagccctttcaaaa

SEQ ID NO: 55058 - DNA, 60 bp, Artificial
  Synthetic oligonucleotide
tcacacagacaaaggctctatctccacaagtaagccctttcaaaacatctcgagaatagc

SEQ ID NO: 55059 - DNA, 57 bp, Artificial
  Synthetic oligonucleotide
tcagagatgaacaaactctttgaaagagtaaggcgtcaactcagagaaaatgctgaa

SEQ ID NO: 55060 - DNA, 60 bp, Artificial
  Synthetic oligonucleotide
agcacaattctaaacactccaattccaataggctcatgtgtaagcaaatgtcacacagac

SEQ ID NO: 55061 - DNA, 60 bp, Artificial
  Synthetic oligonucleotide
tcttcaacacaatagggaatctaattgccccaagaggacattacaaactaaacaatcaga

SEQ ID NO: 55062 - DNA, 52 bp, Artificial
  Synthetic oligonucleotide
gatttatggtcatataatgcagagctgctagtcgcactcgaaaaccaacaca

SEQ ID NO: 55063 - DNA, 60 bp, Artificial
  Synthetic oligonucleotide
gtcaaacaagtgtagttcccaacattgatagcagaccctgggtgagaggacaaagcggca

SEQ ID NO: 55064 - DNA, 60 bp, Artificial
  Synthetic oligonucleotide
tgataacacagttcgagtctctgaaaatctacagagattcgcttggagaagcagcgatga

SEQ ID NO: 55065 - DNA, 60 bp, Artificial
  Synthetic oligonucleotide
ggactacgcaagactttacatatggggggttcaccatccttcaaccgacacagaacaaac

SEQ ID NO: 55066 - DNA, 60 bp, Artificial
  Synthetic oligonucleotide
cttgaatttccagcatggtggaggccatggtgtctagggcccgaattgatgcacgaattg

SEQ ID NO: 55067 - DNA, 60 bp, Artificial
  Synthetic oligonucleotide
gaatggaccaggcgattatggataagaacatcatactgaaagcgaacttcagtgtgatct

SEQ ID NO: 55068 - DNA, 60 bp, Artificial
  Synthetic oligonucleotide
cagaatggaccaggcgattatggataagaacatcatactgaaagcgaacttcagtgtgat

SEQ ID NO: 55069 - DNA, 57 bp, Artificial
  Synthetic oligonucleotide
ggattcgagatgccatcaattagtgtcgaattgtttaaaaacgaccttgtttctact

SEQ ID NO: 55070 - DNA, 60 bp, Artificial
  Synthetic oligonucleotide
atcgggagattctacatacagatgtgcactgaactcaaactcagtgactatgaagggaga

SEQ ID NO: 55071 - DNA, 60 bp, Artificial
  Synthetic oligonucleotide
attgggagattctacatacagatgtgcactgaactcaaactcagtgactatgaagggagg

SEQ ID NO: 55072 - DNA, 60 bp, Artificial
  Synthetic oligonucleotide
ctatttggagccatagctggattcatagagggaggttggtcagggctagtcgctggttgg

SEQ ID NO: 55073 - DNA, 60 bp, Artificial
  Synthetic oligonucleotide
aaacgatttgcagaccaagaactgggtgatgccccattccttgaccggcttcgcagggat

SEQ ID NO: 55074 - DNA, 60 bp, Artificial
  Synthetic oligonucleotide
cgatttgcagaccaagaactgggtgatgccccattccttgataggcttcgccgagatcaa

SEQ ID NO: 55075 - DNA, 60 bp, Artificial
  Synthetic oligonucleotide
gggcttttcggtgccatagctggattcatagaaggaggttggccaggactagttgcaggc

SEQ ID NO: 55076 - DNA, 60 bp, Artificial
  Synthetic oligonucleotide
ctgtggacacttgttatccatttgatgtgccggattaccagagcctacggagtatcctag

SEQ ID NO: 55077 - DNA, 60 bp, Artificial
  Synthetic oligonucleotide
aagagggccttctacggaaggagtgcctgagtctatgagggaagaatatcggcaggaaca

SEQ ID NO: 55078 - DNA, 60 bp, Artificial
  Synthetic oligonucleotide
gaagcaattgaggagtgcctggttaatgatccctgggttttgcttaatgcatcttggttc

SEQ ID NO: 55079 - DNA, 58 bp, Artificial
  Synthetic oligonucleotide
tacttgaagtggagcaagagataagaactttctcgtttcagcttatttaatgataaaa

SEQ ID NO: 55080 - DNA, 60 bp, Artificial
  Synthetic oligonucleotide
ggcacaatacatgatagaatccctcatcgaacccttttaatgaatgagttgggtgttcca

SEQ ID NO: 55081 - DNA, 60 bp, Artificial
  Synthetic oligonucleotide
cttgaagagtcccacccaggaatctttgaaaactcgtgtcttgaaacgatggaaattgtt

SEQ ID NO: 55082 - DNA, 60 bp, Artificial
  Synthetic oligonucleotide
tccttttctgggccatgtccaatggatcttgcagatgcaacatttgtatataattggcaa

SEQ ID NO: 55083 - DNA, 60 bp, Artificial
  Synthetic oligonucleotide
cttcttgttctgggccatgtccaatggatcttgcagatgcaacatttgtatataattggc

SEQ ID NO: 55084 - DNA, 60 bp, Artificial
  Synthetic oligonucleotide
tttgaaagtaagagcatgaagctacggacacaaataccagcagaaatgctcgcaaatatt

SEQ ID NO: 55085 - DNA, 60 bp, Artificial
  Synthetic oligonucleotide
ggatgtcaaaaatgcaattggggtcctcatcggaggacttgagtggaatgataacacagt

SEQ ID NO: 55086 - DNA, 60 bp, Artificial
  Synthetic oligonucleotide
tccaaacactgtgtcaagcttccaggtagactgctttctttggcatgtccgcaaacgatt

SEQ ID NO: 55087 - DNA, 60 bp, Artificial
  Synthetic oligonucleotide
tttgcagggaagaacaccgatcttgaagcactcatggaatggctaaagacaagaccaatc

SEQ ID NO: 55088 - DNA, 60 bp, Artificial
  Synthetic oligonucleotide
gtgttggtaatgaaacggaaacgggactctagcatacttactgacagtcagacagcgacc

SEQ ID NO: 55089 - DNA, 60 bp, Artificial
  Synthetic oligonucleotide
taatgacccctgggttttgcttaatgcatcttggttcaactccttcctcacacatgcact

SEQ ID NO: 55090 - DNA, 60 bp, Artificial
  Synthetic oligonucleotide
attaacgatccctgggttttgcttaatgcatcttggttcaactccttcctcacacatgca

SEQ ID NO: 55091 - DNA, 60 bp, Artificial
  Synthetic oligonucleotide
ttttgcttaatgcatcttggttcaactccttcctcacacatgcactgaaatagttgtagc

SEQ ID NO: 55092 - DNA, 60 bp, Artificial
  Synthetic oligonucleotide
ttttgcttaatgcatcttggttcaactccttcctcacacatgcactgaaatagttgtggc

SEQ ID NO: 55093 - DNA, 60 bp, Artificial
  Synthetic oligonucleotide
agtagaaaacaatgtccctgtgacacataccaaagaattgctccacacagagcacaatgg

SEQ ID NO: 55094 - DNA, 60 bp, Artificial
  Synthetic oligonucleotide
cagttcgagtctctgaaactctacagagattcgcttggagaagcagtaatgagaatggga

SEQ ID NO: 55095 - DNA, 60 bp, Artificial
  Synthetic oligonucleotide
cagttcgagtctctgaaactctacagagattcgcttggagaagcagtaatgaggatggga

SEQ ID NO: 55096 - DNA, 60 bp, Artificial
  Synthetic oligonucleotide
cagtattgtcgtattttgtggcacttcaggcacctatggaacaggctcatggcctgatgg

SEQ ID NO: 55097 - DNA, 60 bp, Artificial
  Synthetic oligonucleotide
ttcatgccatgacggcatctcaagaatgtcaatctgcatgtcaggccccaataacaatgc

SEQ ID NO: 55098 - DNA, 60 bp, Artificial
  Synthetic oligonucleotide
caccaataaccggagggagcccagatcctggcgtaaaaggatttgcattcttagatgggg

SEQ ID NO: 55099 - DNA, 60 bp, Artificial
  Synthetic oligonucleotide
gcaccaataaccggagggagcccagatcctggcgtaaaaggatttgcattcttagatggg

SEQ ID NO: 55100 - DNA, 60 bp, Artificial
  Synthetic oligonucleotide
actctacagagattcgcttggagaagcagtaatgaggatgggagacctccactctctcca

SEQ ID NO: 55101 - DNA, 60 bp, Artificial
  Synthetic oligonucleotide
agcaaagcaggatgcagttttcttctctaactgtgaatgtgagaggatcaggaatgagaa

SEQ ID NO: 55102 - DNA, 60 bp, Artificial
  Synthetic oligonucleotide
gactgttggtttcagatggagggccaaacctatacaatatccggaatctccacattccgg

SEQ ID NO: 55103 - DNA, 60 bp, Artificial
  Synthetic oligonucleotide
tcggggttatttcaagatgcgcactgggaagagctcagtaatgaggtcagatgcacctat

SEQ ID NO: 55104 - DNA, 60 bp, Artificial
  Synthetic oligonucleotide
agcgaaagcagggtagataatcactcaccgagtgacattcacgccatggcgcttcaaggc

SEQ ID NO: 55105 - DNA, 60 bp, Artificial
  Synthetic oligonucleotide
ctgacagccagacagcgaccaaaagaattcggatggccatcaattagtgtagaattgttt

SEQ ID NO: 55106 - DNA, 60 bp, Artificial
  Synthetic oligonucleotide
aaaacataatggattccaacacgataacctcgtttcaggtagattgttatctatggcaca

SEQ ID NO: 55107 - DNA, 57 bp, Artificial
  Synthetic oligonucleotide
atgagccttctaaccgaggtcgaaacgtacgttctctctatcgtcccgtcaggcccc

SEQ ID NO: 55108 - DNA, 60 bp, Artificial
  Synthetic oligonucleotide
atgagccttctaaccgaggtcgaaacgtacgttctctctatcgtcccgtcaggccccctc

SEQ ID NO: 55109 - DNA, 60 bp, Artificial
  Synthetic oligonucleotide
cctgtgatctactgttgggaggaagagaatggtcctacatcgtcgaaagaccatcggctg

SEQ ID NO: 55110 - DNA, 60 bp, Artificial
  Synthetic oligonucleotide
atagatggacaaacttgtgacatcgtcaatggtgctctggggagtccaggctgtgaccat

SEQ ID NO: 55111 - DNA, 60 bp, Artificial
  Synthetic oligonucleotide
ggaagaacgcagatcttgaggctctcatggaatggctaaagacaagaccaatcctgtcac

SEQ ID NO: 55112 - DNA, 60 bp, Artificial
  Synthetic oligonucleotide
tgataacacagttcgagtctctgaaaatctacagagattcgcttggagaaacagtgatga

SEQ ID NO: 55113 - DNA, 60 bp, Artificial
  Synthetic oligonucleotide
agtctctgaaaatctacagagattcgcttggagaaacagtgatgaggatgggagacctcc

SEQ ID NO: 55114 - DNA, 60 bp, Artificial
  Synthetic oligonucleotide
tgataacacagttcgagtctctgaaaatctacagagattcgcttggagaaagagcgatga

SEQ ID NO: 55115 - DNA, 60 bp, Artificial
  Synthetic oligonucleotide
agtctctgaaaatctacagagattcgcttggagaaagagcgatgaggatgggagacctcc

SEQ ID NO: 55116 - DNA, 54 bp, Artificial
  Synthetic oligonucleotide
tcagattcagggagtcaaattgacccagggatataaagacatcattctctggat

SEQ ID NO: 55117 - DNA, 60 bp, Artificial
  Synthetic oligonucleotide
gatatttatagagatgaagcaatcaacaatcgatttcagattcagggagtcaaattgacc

SEQ ID NO: 55118 - DNA, 60 bp, Artificial
  Synthetic oligonucleotide
ttgaaatattccacaaatgcgacaacaactgcattgaaagtatccggaatggaacctatg

SEQ ID NO: 55119 - DNA, 60 bp, Artificial
  Synthetic oligonucleotide
ggcgccaactcagggagaatgctgaagacaagggaaatggatgttttgaaatattccaca

SEQ ID NO: 55120 - DNA, 60 bp, Artificial
  Synthetic oligonucleotide
ggaacctatgatcatgatatttatagagatgaagcaatcaacaatcgatttcagattcag

SEQ ID NO: 55121 - DNA, 60 bp, Artificial
  Synthetic oligonucleotide
ccacaaatgcgacaacaactgcattgaaagtatccggaatggaacctatgatcatgatat

SEQ ID NO: 55122 - DNA, 60 bp, Artificial
  Synthetic oligonucleotide
cccaagcagccattgatcaaataaatgggaaactaaaccgtctcattgagaagacaaacg

SEQ ID NO: 55123 - DNA, 60 bp, Artificial
  Synthetic oligonucleotide
tcaaatctacccaagcagccattgatcaaataaatgggaaactaaaccgtctcattgaga

SEQ ID NO: 55124 - DNA, 60 bp, Artificial
  Synthetic oligonucleotide
agtaaggcgccaactcagggagaatgctgaagacaagggaaatggatgttttgaaatatt

SEQ ID NO: 55125 - DNA, 60 bp, Artificial
  Synthetic oligonucleotide
caagtcgaaggaagaatccaagatctggaaaagtatgttgaagatacaaaaattgattta

SEQ ID NO: 55126 - DNA, 60 bp, Artificial
  Synthetic oligonucleotide
actgtgtctactaagaccagtcaaacaagtgtggttcctaacatcggtagcaggccctgg

SEQ ID NO: 55127 - DNA, 60 bp, Artificial
  Synthetic oligonucleotide
tgcaagactttacatctggggagttcatcatccttcaacagacacagagcaaaccgatct

SEQ ID NO: 55128 - DNA, 60 bp, Artificial
  Synthetic oligonucleotide
aaacaatggtgattatgcaagactttacatctggggagttcatcatccttcaacagacac

SEQ ID NO: 55129 - DNA, 56 bp, Artificial
  Synthetic oligonucleotide
gatttctttaataggctaaattggctggtaaaatcaaatgggaatgcgtatcccct

SEQ ID NO: 55130 - DNA, 60 bp, Artificial
  Synthetic oligonucleotide
ccgtgaagcagaacggaaaatccggggcctgcaagagagcaaatgtaaatgatttcttta

SEQ ID NO: 55131 - DNA, 54 bp, Artificial
  Synthetic oligonucleotide
cgttttcatagagaggcccagtgcggtagacacttgctacccttttgatgtgcc

SEQ ID NO: 55132 - DNA, 60 bp, Artificial
  Synthetic oligonucleotide
ccaggatgcgaccacttaaatggcgcagaatgggacgttttcatagagaggcccagtgcg

SEQ ID NO: 55133 - DNA, 60 bp, Artificial
  Synthetic oligonucleotide
ggagcactaggaagtccaggatgcgaccacttaaatggcgcagaatgggacgttttcata

SEQ ID NO: 55134 - DNA, 60 bp, Artificial
  Synthetic oligonucleotide
caggccctgggtgagagggcaaagtggcagaataagtttctactggactattgtagagcc

SEQ ID NO: 55135 - DNA, 60 bp, Artificial
  Synthetic oligonucleotide
gaccagtcaaacaagtgtggttcctaacatcggtagcaggccctgggtgagagggcaaag

SEQ ID NO: 55136 - DNA, 60 bp, Artificial
  Synthetic oligonucleotide
aaggatccctctccacaactaagcccttccaaaacatatcgaggatagcaattggagatt

SEQ ID NO: 55137 - DNA, 60 bp, Artificial
  Synthetic oligonucleotide
ccatagctggattcatagagaatggctggcaaggtctaatagatggatggtatggattca

SEQ ID NO: 55138 - DNA, 60 bp, Artificial
  Synthetic oligonucleotide
tagagaatggctggcaaggtctaatagatggatggtatggattcagacatcaaaacgcag

SEQ ID NO: 55139 - DNA, 60 bp, Artificial
  Synthetic oligonucleotide
gccctgggtgagagggcaaagtggcagaataagtttctactggactattgtagagcctgg

SEQ ID NO: 55140 - DNA, 60 bp, Artificial
  Synthetic oligonucleotide
ttgtagagcctggagatttgatagtcttcaatacaatagggaatctaatagccccaagag

SEQ ID NO: 55141 - DNA, 60 bp, Artificial
  Synthetic oligonucleotide
gagcctggagatttgatagtcttcaatacaatagggaatctaatagccccaagaggacac

SEQ ID NO: 55142 - DNA, 60 bp, Artificial
  Synthetic oligonucleotide
gccccaagaggacactacaagctaaacagccagaaaaagagcacaattctgaacactgca

SEQ ID NO: 55143 - DNA, 60 bp, Artificial
  Synthetic oligonucleotide
gaacactgcagttcccataggatcatgtgtcagcagatgccacacagacaaaggatccct

SEQ ID NO: 55144 - DNA, 60 bp, Artificial
  Synthetic oligonucleotide
gcagttcccataggatcatgtgtcagcagatgccacacagacaaaggatccctctccaca

SEQ ID NO: 55145 - DNA, 60 bp, Artificial
  Synthetic oligonucleotide
gctcgttgcactacttttagccttcattttgtgggcttgtcaaaacgggaacatccggtg

SEQ ID NO: 55146 - DNA, 60 bp, Artificial
  Synthetic oligonucleotide
ccctctccacaactaagcccttccaaaacatatcgaggatagcaattggagattgcccaa

SEQ ID NO: 55147 - DNA, 60 bp, Artificial
  Synthetic oligonucleotide
tagcagagagctcctctcaaaactacacagggaaccctgtgatatgtatgggacaccatg

SEQ ID NO: 55148 - DNA, 60 bp, Artificial
  Synthetic oligonucleotide
ctcaaaactacacagggaaccctgtgatatgtatgggacaccatgctgttgccaatggaa

SEQ ID NO: 55149 - DNA, 60 bp, Artificial
  Synthetic oligonucleotide
caggggaaacaatgctatcaattgtagttctgcttctgctcatagcagagagctcctctc

SEQ ID NO: 55150 - DNA, 60 bp, Artificial
  Synthetic oligonucleotide
actgatgatcaagtggaagtggtcaccgcacaagaactggtggaatcacagaatctcccg

SEQ ID NO: 55151 - DNA, 60 bp, Artificial
  Synthetic oligonucleotide
gaagtggtcaccgcacaagaactggtggaatcacagaatctcccggaattatgcccgagc

SEQ ID NO: 55152 - DNA, 60 bp, Artificial
  Synthetic oligonucleotide
agcaaaagcagggtagataatcactcactgagtgacatccacatcatggcgtctcaaggc

SEQ ID NO: 55153 - DNA, 60 bp, Artificial
  Synthetic oligonucleotide
cgcagcaatgctttcagcaactgttacccttatgatgtgccagattatgcctcccttagg

SEQ ID NO: 55154 - DNA, 60 bp, Artificial
  Synthetic oligonucleotide
cacatgcactgaaatagttgtggcaacgctactatttgctatccatactgtccaaaaaag

SEQ ID NO: 55155 - DNA, 60 bp, Artificial
  Synthetic oligonucleotide
cacatgcactgaagtagttgtggcaatgctactatttgctatccatactgtccaaaaaag

SEQ ID NO: 55156 - DNA, 60 bp, Artificial
  Synthetic oligonucleotide
gtcctcatcgggggacttgaatggaatgataacacagttcgagtctctaaaactctacag

SEQ ID NO: 55157 - DNA, 60 bp, Artificial
  Synthetic oligonucleotide
ggatcctaataatgagagaggggccccaggagtgaaagggtgggcctttgacaatggaaa

SEQ ID NO: 55158 - DNA, 60 bp, Artificial
  Synthetic oligonucleotide
ggggtggtccagcacttcatgccatgacggcatctcaagaatgtcaatctgcatgtcagg

SEQ ID NO: 55159 - DNA, 60 bp, Artificial
  Synthetic oligonucleotide
gggatggtccagcacttcatgccatgacggcatctcaagaatgtcaatctgcatgtcagg

SEQ ID NO: 55160 - DNA, 60 bp, Artificial
  Synthetic oligonucleotide
aacaccgatctcgaggctctcatggaatggctaaagacaagaccaatcctgtcacctctg

SEQ ID NO: 55161 - DNA, 60 bp, Artificial
  Synthetic oligonucleotide
ttgtttgaaaagacaaggaggcaactgagggaaaatgctgaggacatgggcaatggttgc

SEQ ID NO: 55162 - DNA, 60 bp, Artificial
  Synthetic oligonucleotide
gaaaggcagaaaatagaaggggtcaagctggaatctgagggaacttacaaaatccttacc

SEQ ID NO: 55163 - DNA, 60 bp, Artificial
  Synthetic oligonucleotide
gggcgtacaatgcagaattactagtactgcttgaaaatcagaaaacactcgatgagcatg

SEQ ID NO: 55164 - DNA, 60 bp, Artificial
  Synthetic oligonucleotide
ctacggaaggagtgcctgagtctatgagggaagaatatcggcaggaacagcagagtgctg

SEQ ID NO: 55165 - DNA, 56 bp, Artificial
  Synthetic oligonucleotide
atgaaggatcttatttcttcggagacaatgcagaggagtacgacaattaaggaaaa

SEQ ID NO: 55166 - DNA, 60 bp, Artificial
  Synthetic oligonucleotide
aatggtttcttcagtagactgaactggttgaccaaatcaggaagcacatatccagtgttg

SEQ ID NO: 55167 - DNA, 60 bp, Artificial
  Synthetic oligonucleotide
agcggtttcttcagtagactgaactggttgaccaaatcaggaagcacatatccagtgttg

SEQ ID NO: 55168 - DNA, 60 bp, Artificial
  Synthetic oligonucleotide
ttgaagacacaaagattgatctgtggtcttacaatgctgaattattggtggcattagaaa

SEQ ID NO: 55169 - DNA, 60 bp, Artificial
  Synthetic oligonucleotide
cttggttcaactccttcctcacacatgcactgaaatagttgtagcaatgctactatttgc

SEQ ID NO: 55170 - DNA, 60 bp, Artificial
  Synthetic oligonucleotide
aatgcatcttggttcaactccttcctcacacatgcactgaaatagttgtggcaatgctac

SEQ ID NO: 55171 - DNA, 60 bp, Artificial
  Synthetic oligonucleotide
atgcatcttggttcaactccttcctcacacatgcactgaaatagttgtggcaatgctact

SEQ ID NO: 55172 - DNA, 60 bp, Artificial
  Synthetic oligonucleotide
ggactccaacactgtgtcaagctttcaggtagactgctttctctggcatgtccgcaaacg

SEQ ID NO: 55173 - DNA, 60 bp, Artificial
  Synthetic oligonucleotide
tggagtttatcactgagggtttcacttggacaggagtcactcagaatggagggagcaatg

SEQ ID NO: 55174 - DNA, 51 bp, Artificial
  Synthetic oligonucleotide
tggagtttatcactgagggtttcacttggacaggagtcactcagaatgggg

SEQ ID NO: 55175 - DNA, 60 bp, Artificial
  Synthetic oligonucleotide
tggagtttatcactgagggtttcacttggacaggagtcactcagaatgggggaagcaatg

SEQ ID NO: 55176 - DNA, 60 bp, Artificial
  Synthetic oligonucleotide
ttttagggcattaataagttgggaaatggggcaagcaccgagtccatacaatatcagagt

SEQ ID NO: 55177 - DNA, 60 bp, Artificial
  Synthetic oligonucleotide
gtttagggcattaataagttgggaaatggggcaagcaccgagtccatacaatatcagagt

SEQ ID NO: 55178 - DNA, 60 bp, Artificial
  Synthetic oligonucleotide
agatctaatgtcgcagtcccgcacccgcgagatactaacaaaaaccactgtggaccatat

SEQ ID NO: 55179 - DNA, 60 bp, Artificial
  Synthetic oligonucleotide
gggtcctcatcggaggacttgaatggaatgataacacagttcgagtctctaaaactctac

SEQ ID NO: 55180 - DNA, 60 bp, Artificial
  Synthetic oligonucleotide
agaggggaaacccaggagtgaaagggtgggcctttgacaatggaaatgatgtttggatgg

SEQ ID NO: 55181 - DNA, 60 bp, Artificial
  Synthetic oligonucleotide
gagagggaacccaggagtgaaagggtgggcctttgacaatggagatgatgtatggatggg

SEQ ID NO: 55182 - DNA, 57 bp, Artificial
  Synthetic oligonucleotide
acggaaacgggactctagcatacttactgacagccagacagcgaccaaaaggattcg

SEQ ID NO: 55183 - DNA, 60 bp, Artificial
  Synthetic oligonucleotide
acggaaacgggactctagcatacttactgacagccagacagcgaccaaaagaagtcggat

SEQ ID NO: 55184 - DNA, 60 bp, Artificial
  Synthetic oligonucleotide
tcagagtgtgtatgccataaaggaatttgtccagtagtcatgacagatggaccagcaagc

SEQ ID NO: 55185 - DNA, 60 bp, Artificial
  Synthetic oligonucleotide
gagtcggagtgcgtgtgccacaaagggatctgtccagtagtcatgacagatggaccagca

SEQ ID NO: 55186 - DNA, 60 bp, Artificial
  Synthetic oligonucleotide
tcagagtgtgtatgccataaaggaatttgtccagtagtcatgacagatggaccagcaaac

SEQ ID NO: 55187 - DNA, 60 bp, Artificial
  Synthetic oligonucleotide
ttgtcctgcgattcccaaggctgcaggatgtttgctctaagccaaggcacaacactcaga

SEQ ID NO: 55188 - DNA, 60 bp, Artificial
  Synthetic oligonucleotide
ccataaaggaatttgtccagtagtcatgacagatggaccagcaaacaataaagcggcaac

SEQ ID NO: 55189 - DNA, 60 bp, Artificial
  Synthetic oligonucleotide
atgaatccaaatcagaagataatatgcatttcagcaacaggaatgacactatcggtagta

SEQ ID NO: 55190 - DNA, 60 bp, Artificial
  Synthetic oligonucleotide
atgaatccaaatcagaagataatatgcatttcagctacaggaatgacactatcggtagta

SEQ ID NO: 55191 - DNA, 60 bp, Artificial
  Synthetic oligonucleotide
atgaatccaaatcagaagataatatgcatttcagctacaggtatgacactatcggtagta

SEQ ID NO: 55192 - DNA, 60 bp, Artificial
  Synthetic oligonucleotide
atgaatccaaatcagaagataatatgcatttcagccacaggaatgacactatcggtagta

SEQ ID NO: 55193 - DNA, 60 bp, Artificial
  Synthetic oligonucleotide
ccagatcctggagtcaagggatttgcattcctagatggggaaaattcatggcttgggagg

SEQ ID NO: 55194 - DNA, 60 bp, Artificial
  Synthetic oligonucleotide
ggcttgggaggacaattagcaaagactctagatcaggttacgaaatgttgaaagtcccaa

SEQ ID NO: 55195 - DNA, 60 bp, Artificial
  Synthetic oligonucleotide
aaagtcccaaatgcagaaacaaacacccaatcgggcccaatcgcacatcaggtgattgtc

SEQ ID NO: 55196 - DNA, 60 bp, Artificial
  Synthetic oligonucleotide
ggtgattgtcaacaaccaaaactggtcgggatactcaggagcattcatagactactgggc

SEQ ID NO: 55197 - DNA, 60 bp, Artificial
  Synthetic oligonucleotide
actactgggcaaacaaagaatgctttaatccttgtttctatgtggagctaattagaggga

SEQ ID NO: 55198 - DNA, 60 bp, Artificial
  Synthetic oligonucleotide
tgctgtggacttcaaatagcattgtagctctgtgcggatccagggagcgattgggatcat

SEQ ID NO: 55199 - DNA, 60 bp, Artificial
  Synthetic oligonucleotide
aaacaataacgcatcagttgtggtgtggtatgggggtagaccaataacagaaattccatc

SEQ ID NO: 55200 - DNA, 60 bp, Artificial
  Synthetic oligonucleotide
atcggtagtaagcctcctaataggaatagccaacttaggtttgaacatcggactccatta

SEQ ID NO: 55201 - DNA, 60 bp, Artificial
  Synthetic oligonucleotide
gccacgatggcatatcaagaatgtcaatatgcatatcaggaccaaacaataacgcatcag

SEQ ID NO: 55202 - DNA, 60 bp, Artificial
  Synthetic oligonucleotide
agatacaaaaaattgaagagctgacgggaaatgcccaacacattgaagagtgctcatgct

SEQ ID NO: 55203 - DNA, 60 bp, Artificial
  Synthetic oligonucleotide
cagagtgtgtatgccataaaggaatttgtccagtagtcatgacagatggaccagcaagca

SEQ ID NO: 55204 - DNA, 60 bp, Artificial
  Synthetic oligonucleotide
accagcaaacaataaagcggcaactaagataatctatttcaaagaagggaagatacaaaa

SEQ ID NO: 55205 - DNA, 60 bp, Artificial
  Synthetic oligonucleotide
gaagagctgacgggaaatgcccaacacattgaagagtgctcatgctatggggcaaaagaa

SEQ ID NO: 55206 - DNA, 60 bp, Artificial
  Synthetic oligonucleotide
tgctcatgctatggggcaaaagaattgatcaaatgcatatgcagggacaactggaaagga

SEQ ID NO: 55207 - DNA, 60 bp, Artificial
  Synthetic oligonucleotide
gactccattataaggtaggtgatacaccagatgcgaatactccgaatgtgaatggcacaa

SEQ ID NO: 55208 - DNA, 60 bp, Artificial
  Synthetic oligonucleotide
cccaatgatcccactaatgggaactgtgatgcaccaataacaggaggaagcccagatcct

SEQ ID NO: 55209 - DNA, 60 bp, Artificial
  Synthetic oligonucleotide
cccacacaagcaagtacttatgttcaaaggtcctaaccgatacgagtcgccccaatgatc

SEQ ID NO: 55210 - DNA, 60 bp, Artificial
  Synthetic oligonucleotide
ggagcaaatagaccagtaatcactatagatcctgaaatgatgacccacacaagcaagtac

SEQ ID NO: 55211 - DNA, 60 bp, Artificial
  Synthetic oligonucleotide
cactaatgggaactgtgatgcaccaataacaggaggaagcccagatcctggagtcaaggg

SEQ ID NO: 55212 - DNA, 60 bp, Artificial
  Synthetic oligonucleotide
gccctacttatcctgtgatccacaaggatgcagaatgtttgctctaagccaaggcacaac

SEQ ID NO: 55213 - DNA, 60 bp, Artificial
  Synthetic oligonucleotide
tagtcacaagagagccctacttatcctgtgatccacaaggatgcagaatgtttgctctaa

SEQ ID NO: 55214 - DNA, 60 bp, Artificial
  Synthetic oligonucleotide
tttgctctaagccaaggcacaacactcagggggcgacatgcaaatgggactatacatgat

SEQ ID NO: 55215 - DNA, 60 bp, Artificial
  Synthetic oligonucleotide
catgataggagtccattcagagccctcataagttgggaaatgggtcaagcacccagccca

SEQ ID NO: 55216 - DNA, 60 bp, Artificial
  Synthetic oligonucleotide
cacccagcccatataacactaaaatcgaatgtattggatggtcaagcacatcatgccacg

SEQ ID NO: 55217 - DNA, 60 bp, Artificial
  Synthetic oligonucleotide
acagcttctacagaaatttaatatggctggtaaaaaaaggaaattcatacccaaagctca

SEQ ID NO: 55218 - DNA, 52 bp, Artificial
  Synthetic oligonucleotide
cattgacgggatcactaacaaagtaaattctgttattgaaaagatgaacaca

SEQ ID NO: 55219 - DNA, 60 bp, Artificial
  Synthetic oligonucleotide
agagcacacagaatgccattgacgggatcactaacaaagtaaattctgttattgaaaaga

SEQ ID NO: 55220 - DNA, 54 bp, Artificial
  Synthetic oligonucleotide
agagcacacagaatgccattgacgggatcactaacaaagtaaattctgttattg

SEQ ID NO: 55221 - DNA, 60 bp, Artificial
  Synthetic oligonucleotide
acatccggtcacaattggagaatgtccaaaatatgtcagaagcacaaaattgagaatggc

SEQ ID NO: 55222 - DNA, 60 bp, Artificial
  Synthetic oligonucleotide
gtaagaggtcaagcagggagaatgaactattactggacactaatagaacctggagacaca

SEQ ID NO: 55223 - DNA, 60 bp, Artificial
  Synthetic oligonucleotide
gtgagagatcaagcagggagaatgaactattactggacattaatagaacctggggacaca

SEQ ID NO: 55224 - DNA, 60 bp, Artificial
  Synthetic oligonucleotide
caggacctaataacaatgcttcggcagtggtctggtacaatggaaggccagtcaccgaaa

SEQ ID NO: 55225 - DNA, 60 bp, Artificial
  Synthetic oligonucleotide
atgacggtatctcaagaatgtcaatctgcatgtcaggacctaataacaatgcttcggcag

SEQ ID NO: 55226 - DNA, 60 bp, Artificial
  Synthetic oligonucleotide
cctgctgcatcaggtagagggctatttggtgccatagctggattcatagaaggaggttgg

SEQ ID NO: 55227 - DNA, 60 bp, Artificial
  Synthetic oligonucleotide
ccggctgcatcagatagagggctatttggtgccatagctggattcatagaaggaggttgg

SEQ ID NO: 55228 - DNA, 60 bp, Artificial
  Synthetic oligonucleotide
gtggaccaaacgagtgcagaatgtttgccctcagccaaggtaccacactaaggggtcgac

SEQ ID NO: 55229 - DNA, 60 bp, Artificial
  Synthetic oligonucleotide
gtggaccgcatgagtgcagaatgtttgccctcagccaaggtaccacactaaggggtcggc

SEQ ID NO: 55230 - DNA, 60 bp, Artificial
  Synthetic oligonucleotide
ttaagtcctggaatgatgatgggcatgttcaacatgttaagtacagttttaggagtctca

SEQ ID NO: 55231 - DNA, 60 bp, Artificial
  Synthetic oligonucleotide
cctcttctaatagatggtacagcctcattgagtcctggaatgatgatgggcatgttcaac

SEQ ID NO: 55232 - DNA, 60 bp, Artificial
  Synthetic oligonucleotide
aagggggatggactggaatgatagatggatggtatggttatcatcaccagaatgagcaag

SEQ ID NO: 55233 - DNA, 60 bp, Artificial
  Synthetic oligonucleotide
gatgggcaaacttgtgacatcgtcaatggtgctctggggagcccaggctgtgatcacttg

SEQ ID NO: 55234 - DNA, 60 bp, Artificial
  Synthetic oligonucleotide
gatgggcaaacttgtgacatcgtcaatggtgctctggggagtccaggctgtgaccacttg

SEQ ID NO: 55235 - DNA, 60 bp, Artificial
  Synthetic oligonucleotide
gcaaacgatttgcagaccaagaactgggtgatgccccattcctcgaccggcttcgccgag

SEQ ID NO: 55236 - DNA, 60 bp, Artificial
  Synthetic oligonucleotide
aaacgatttgcagaccaagaactgggtgatgccccattcctcgaccggcttcgccgagat

SEQ ID NO: 55237 - DNA, 60 bp, Artificial
  Synthetic oligonucleotide
cgatttgcagaccaagaactgggtgatgccccattcctcgaccggcttcgccgagatcag

SEQ ID NO: 55238 - DNA, 60 bp, Artificial
  Synthetic oligonucleotide
atggactccaacactgtgtcaagctttcaggtagactgctttctctggcatgtccgcaaa

SEQ ID NO: 55239 - DNA, 60 bp, Artificial
  Synthetic oligonucleotide
gcgcactgggaaaagctcaataatgaggtcagatgcacctattgatacctgtatttctga

SEQ ID NO: 55240 - DNA, 60 bp, Artificial
  Synthetic oligonucleotide
gggaaaagctcaataatgaggtcagatgcacctattgatacctgtatttctgaatgcatc

SEQ ID NO: 55241 - DNA, 60 bp, Artificial
  Synthetic oligonucleotide
cactgggaaaagctcaataatgaggtcagatgcacctattgatacctgtatttctgaatg

SEQ ID NO: 55242 - DNA, 60 bp, Artificial
  Synthetic oligonucleotide
tagtgaatgcaccgaatcatgagggaatacaagcaggagtagatagattctataggactt

SEQ ID NO: 55243 - DNA, 60 bp, Artificial
  Synthetic oligonucleotide
tagtgaatgcaccgaatcatgagggaatacaagcaggagtagatagattctataggacct

SEQ ID NO: 55244 - DNA, 60 bp, Artificial
  Synthetic oligonucleotide
gcagaatgtttgccctcagccaaggtaccacactaaggggtcggcatgcaaatgggacca

SEQ ID NO: 55245 - DNA, 60 bp, Artificial
  Synthetic oligonucleotide
tggtaatgaaacggaaacgggactctagcatacttactgacagccagacagcgaccaaaa

SEQ ID NO: 55246 - DNA, 60 bp, Artificial
  Synthetic oligonucleotide
ttttaggatttgtgttcacgctcaccgtgcccagtgagcgaggactgcagcgtagacgat

SEQ ID NO: 55247 - DNA, 60 bp, Artificial
  Synthetic oligonucleotide
ggattttaggatttgtgttcacgctcaccgtgcccagtgagcgaggactgcagcgtagac

SEQ ID NO: 55248 - DNA, 60 bp, Artificial
  Synthetic oligonucleotide
gttgacagaggtaataggtccggttattctggtattttctctgttgaaggcaaaagctgc

SEQ ID NO: 55249 - DNA, 60 bp, Artificial
  Synthetic oligonucleotide
tgtgcatagcatggtccagctcaagctgtcatgatgggaaagcatggttacatgtttgtg

SEQ ID NO: 55250 - DNA, 60 bp, Artificial
  Synthetic oligonucleotide
ggatttggcgtcaagcgaacaatggagaagacgcaactgctggtcttacccatatgatga

SEQ ID NO: 55251 - DNA, 52 bp, Artificial
  Synthetic oligonucleotide
ggatttggcgtcaagcgaacaatggagaagacgcaactgctggtcttaccca

SEQ ID NO: 55252 - DNA, 60 bp, Artificial
  Synthetic oligonucleotide
gcaagccttacaactattgcttgaagtggaacaagagataagaactttctcgtttcagct

SEQ ID NO: 55253 - DNA, 60 bp, Artificial
  Synthetic oligonucleotide
gagccttacaactattgcttgaagtggagcaagagataagaactttctcgtttcagctta

SEQ ID NO: 55254 - DNA, 60 bp, Artificial
  Synthetic oligonucleotide
gcagggtagataatcactcactgagtgacattcacgccatggcgctccaaggcaccaaac

SEQ ID NO: 55255 - DNA, 60 bp, Artificial
  Synthetic oligonucleotide
gacgcaacagctggtctcacccatctgatgatctggcattccaatctgaatgatgccaca

SEQ ID NO: 55256 - DNA, 60 bp, Artificial
  Synthetic oligonucleotide
gacgcaaccgctggtctaacccatatgatgatctggcattccaatctgaatgatgccaca

SEQ ID NO: 55257 - DNA, 56 bp, Artificial
  Synthetic oligonucleotide
cttcctttgacatgagtaatgaaggatcttatttcttcggagacaatgcagaggaa

SEQ ID NO: 55258 - DNA, 60 bp, Artificial
  Synthetic oligonucleotide
agatctaatgtcgcagtcccgcactcgcgagatactaacaaaaaccactgtggaccatat

SEQ ID NO: 55259 - DNA, 60 bp, Artificial
  Synthetic oligonucleotide
gtacataaagtctggacagctgaagcttgcaactgggctgagaaatgtcccatccgttgg

SEQ ID NO: 55260 - DNA, 60 bp, Artificial
  Synthetic oligonucleotide
tacgcaagcaaaaacccctacacattagtatcaacaaaggaatggagcaaaagatatgaa

SEQ ID NO: 55261 - DNA, 60 bp, Artificial
  Synthetic oligonucleotide
ccctacacattagtatcaacaaaggaatggagcaaaagatatgaactagaaattggcacc

SEQ ID NO: 55262 - DNA, 60 bp, Artificial
  Synthetic oligonucleotide
ccctgtcataaagggggattacaataacacaacaggcagagatgttctagtactctgggg

SEQ ID NO: 55263 - DNA, 60 bp, Artificial
  Synthetic oligonucleotide
gggattacaataacacaacaggcagagatgttctagtactctggggcattcaccatccgg

SEQ ID NO: 55264 - DNA, 60 bp, Artificial
  Synthetic oligonucleotide
tactctggggcattcaccatccggatacagaaacaacagccataaacttgtacgcaagca

SEQ ID NO: 55265 - DNA, 60 bp, Artificial
  Synthetic oligonucleotide
ctctggggcattcaccatccggatacagaaacaacagccataaacttgtacgcaagcaaa

SEQ ID NO: 55266 - DNA, 60 bp, Artificial
  Synthetic oligonucleotide
tcccaggagagttagataataatggagaattacgacatctcttcagcggagtgaactctt

SEQ ID NO: 55267 - DNA, 60 bp, Artificial
  Synthetic oligonucleotide
cccaggagagttagataataatggagaattacgacatctcttcagcggagtgaactcttt

SEQ ID NO: 55268 - DNA, 60 bp, Artificial
  Synthetic oligonucleotide
gtcccaacaaatggggagacattctggatggagtcaccgcttcttgccgcgataatgggg

SEQ ID NO: 55269 - DNA, 60 bp, Artificial
  Synthetic oligonucleotide
cccaacaaatggggagacattctggatggagtcaccgcttcttgccgcgataatggggca

SEQ ID NO: 55270 - DNA, 60 bp, Artificial
  Synthetic oligonucleotide
atggaaactattagaaatgggacctacaatcatgaagattacagggaagaatcacaactg

SEQ ID NO: 55271 - DNA, 60 bp, Artificial
  Synthetic oligonucleotide
gaaatgggacctacaatcatgaagattacagggaagaatcacaactgaaaaggcaggaaa

SEQ ID NO: 55272 - DNA, 60 bp, Artificial
  Synthetic oligonucleotide
atgaaggagatggttgcttcaatcttcttcacaaatgtaatgactcatgcatggaaacta

SEQ ID NO: 55273 - DNA, 60 bp, Artificial
  Synthetic oligonucleotide
gcttcaatcttcttcacaaatgtaatgactcatgcatggaaactattagaaatgggacct

SEQ ID NO: 55274 - DNA, 60 bp, Artificial
  Synthetic oligonucleotide
caggaacttacacgatcaggtcaagagaatattgaaaagtaatgctattgatgaaggaga

SEQ ID NO: 55275 - DNA, 60 bp, Artificial
  Synthetic oligonucleotide
cacgatcaggtcaagagaatattgaaaagtaatgctattgatgaaggagatggttgcttc

SEQ ID NO: 55276 - DNA, 60 bp, Artificial
  Synthetic oligonucleotide
cgagttgatgatgcagtaactgacatatggtcgtacaatgctaaacttcttgtactgctt

SEQ ID NO: 55277 - DNA, 60 bp, Artificial
  Synthetic oligonucleotide
gcagtaactgacatatggtcgtacaatgctaaacttcttgtactgcttgaaaatgggaga

SEQ ID NO: 55278 - DNA, 60 bp, Artificial
  Synthetic oligonucleotide
gtagacacactgacagagaacggagttccagtgaccagctcagttgatctcgttgaaaca

SEQ ID NO: 55279 - DNA, 56 bp, Artificial
  Synthetic oligonucleotide
acggagttccagtgaccagctcagttgatctcgttgaaacaaaccacacaggaaca

SEQ ID NO: 55280 - DNA, 60 bp, Artificial
  Synthetic oligonucleotide
cgttgaaacaaaccacacaggaacatactgctcactgaatggaatcagcccaattcatct

SEQ ID NO: 55281 - DNA, 60 bp, Artificial
  Synthetic oligonucleotide
agagtggtcgtatctaattgaggaccccaatgcccccaacaaactctgcttcccaggaga

SEQ ID NO: 55282 - DNA, 60 bp, Artificial
  Synthetic oligonucleotide
cacacaggaacatactgctcactgaatggaatcagcccaattcatcttggtgactgcagc

SEQ ID NO: 55283 - DNA, 60 bp, Artificial
  Synthetic oligonucleotide
aagcagacaaaatatgcataggatatctaagcaacaacgccacagacacagtagacacac

SEQ ID NO: 55284 - DNA, 60 bp, Artificial
  Synthetic oligonucleotide
ggggccttatagcgcccagatacggatacatcattgagaagtacggtacaggacgaattt

SEQ ID NO: 55285 - DNA, 60 bp, Artificial
  Synthetic oligonucleotide
cgggggccttatagcgcccagatacggatacatcattgagaagtacggtacaggacgaat

SEQ ID NO: 55286 - DNA, 55 bp, Artificial
  Synthetic oligonucleotide
ctatattggcacctcatgcgccctggagagaggataatgtttgaaagcaacgggg

SEQ ID NO: 55287 - DNA, 60 bp, Artificial
  Synthetic oligonucleotide
ctatattggcacctcatgcgccctggagagaggataatgtttgaaagcaacgggggcctt

SEQ ID NO: 55288 - DNA, 60 bp, Artificial
  Synthetic oligonucleotide
ggagggtggcctgggctaattaatggatggtatggtttccagcatcagaatgaacagggg

SEQ ID NO: 55289 - DNA, 60 bp, Artificial
  Synthetic oligonucleotide
atcacaactgaaaaggcaggaaattgagggaataaaattgaagtctgaagacaatgtgta

SEQ ID NO: 55290 - DNA, 60 bp, Artificial
  Synthetic oligonucleotide
gtctggacagctgaagcttgcaactgggctgagaaatgtcccatccgttggtgaaagagg

SEQ ID NO: 55291 - DNA, 60 bp, Artificial
  Synthetic oligonucleotide
gcataggatatctaagcaacaacgccacagacacagtagacacactgacagagaacggag

SEQ ID NO: 55292 - DNA, 60 bp, Artificial
  Synthetic oligonucleotide
gggaattcaatcaagtagaaaagaggatcaacatgctcgctgatcgagttgatgatgcag

SEQ ID NO: 55293 - DNA, 60 bp, Artificial
  Synthetic oligonucleotide
taagaggggaattcaatcaagtagaaaagaggatcaacatgctcgctgatcgagttgatg

SEQ ID NO: 55294 - DNA, 55 bp, Artificial
  Synthetic oligonucleotide
caattcatcttggtgactgcagctttgagggatggatcgtaggaaacccttcctg

SEQ ID NO: 55295 - DNA, 58 bp, Artificial
  Synthetic oligonucleotide
gtattgtgctggtaggtctcatacttgcgttcataatgtgggcatgcagcaatggaaa

SEQ ID NO: 55296 - DNA, 60 bp, Artificial
  Synthetic oligonucleotide
ggcaggaaattgagggaataaaattgaagtctgaagacaatgtgtataaagtactgtcga

SEQ ID NO: 55297 - DNA, 60 bp, Artificial
  Synthetic oligonucleotide
ttcaggtacctatggaacaggctcatggcctgatggggcaaacatcaatttcatgcctat

SEQ ID NO: 55298 - DNA, 60 bp, Artificial
  Synthetic oligonucleotide
tggcattccaatctgaatgatgccacatatcagagaacaagggcacttgtgcgtactggg

SEQ ID NO: 55299 - DNA, 60 bp, Artificial
  Synthetic oligonucleotide
ctcaaaatatcctcagaactcaggagtcagaatgcgtttgcatcaatggaacttgcacag

SEQ ID NO: 55300 - DNA, 60 bp, Artificial
  Synthetic oligonucleotide
cgatcttatgaacagatggaaactggtggagaacgccagaatgccactgagatcagggcg

SEQ ID NO: 55301 - DNA, 60 bp, Artificial
  Synthetic oligonucleotide
gctttctttggcatgtccgcaaacgatttgcagaccaagaattgggtgatgctccattcc

SEQ ID NO: 55302 - DNA, 60 bp, Artificial
  Synthetic oligonucleotide
gcggtttcttcagtagactgaactggttgaccaaatcaggaagcacatatccagtgctga

SEQ ID NO: 55303 - DNA, 60 bp, Artificial
  Synthetic oligonucleotide
ccaaatattgggtccagaccctgggtaaggggtcagtctggtagaataagcatctattgg

SEQ ID NO: 55304 - DNA, 60 bp, Artificial
  Synthetic oligonucleotide
ccgaatattgggtccagaccctgggtaaggggtcagtctggtagaataagcatctattgg

SEQ ID NO: 55305 - DNA, 60 bp, Artificial
  Synthetic oligonucleotide
ccaacaaactataatcccgaatatcgggtctagaccctgggtaaggggtcagtctggtag

SEQ ID NO: 55306 - DNA, 60 bp, Artificial
  Synthetic oligonucleotide
agcggtttcttcagtagactgaactggttgaccaaatcaggaagcacatatccagtgctg

SEQ ID NO: 55307 - DNA, 60 bp, Artificial
  Synthetic oligonucleotide
agaatgggatgtcttcatagagcggcccactgctgtggacacttgttatccatttgatgt

SEQ ID NO: 55308 - DNA, 60 bp, Artificial
  Synthetic oligonucleotide
gggatgtcttcatagagcggcccactgctgtggacacttgttatccatttgatgtaccag

SEQ ID NO: 55309 - DNA, 60 bp, Artificial
  Synthetic oligonucleotide
cttaccatttattcgactgtcgcctcatctcttgtgcttgcaatagggtttgctgccttc

SEQ ID NO: 55310 - DNA, 60 bp, Artificial
  Synthetic oligonucleotide
cttaccatttattcgactgtcgcctcatctcttgtgcttgcaatagggcttgctgccttc

SEQ ID NO: 55311 - DNA, 60 bp, Artificial
  Synthetic oligonucleotide
cggactccaatcctctgatgatttcgccctcatagtgaatgcaccgaatcatgagggaat

SEQ ID NO: 55312 - DNA, 60 bp, Artificial
  Synthetic oligonucleotide
cagcctcattgagtcctggaatgatgatgggcatgtttaacatgctgagtacagtcttag

SEQ ID NO: 55313 - DNA, 60 bp, Artificial
  Synthetic oligonucleotide
ggtccagcacttcatgccatgacggcatctcaagaatgtcaatctgcatgtcaggcccca

SEQ ID NO: 55314 - DNA, 60 bp, Artificial
  Synthetic oligonucleotide
gtccagcacttcatgccatgacggcatctcaagaatgtcaatctgcatgtcaggacctaa

SEQ ID NO: 55315 - DNA, 60 bp, Artificial
  Synthetic oligonucleotide
ccagcacttcatgccatgacggcatctcaagaatgtcaatctgcatgtcaggacctaata

SEQ ID NO: 55316 - DNA, 60 bp, Artificial
  Synthetic oligonucleotide
ccatgacggcatctcaagaatgtcaatctgcatgtcaggacctaataacaatgcttcggc

SEQ ID NO: 55317 - DNA, 60 bp, Artificial
  Synthetic oligonucleotide
tgcgcactgggaaaagctcaataatgagatcagatgcacctattgacacatgcatctctg

SEQ ID NO: 55318 - DNA, 60 bp, Artificial
  Synthetic oligonucleotide
ggcagtcggtctgaggaatgtgcctgctagatcaagtagaggactatttggagccatagc

SEQ ID NO: 55319 - DNA, 60 bp, Artificial
  Synthetic oligonucleotide
ctgacagtcagacagcgaccaaaagaattcggatggccatcaattaatgtcgaattgttt

SEQ ID NO: 55320 - DNA, 60 bp, Artificial
  Synthetic oligonucleotide
cttactgacagtcagacagcgaccaaaagaattcggatggccatcaattaatgtcgaatt

SEQ ID NO: 55321 - DNA, 60 bp, Artificial
  Synthetic oligonucleotide
ggagtcagaatgcgtttgcatcaatggaacttgtacagtagtaatgactgacggaagtgc

SEQ ID NO: 55322 - DNA, 60 bp, Artificial
  Synthetic oligonucleotide
aattgtattttgtggaacctcaggtacctatggaacaggctcatggcctgatggggcgaa

SEQ ID NO: 55323 - DNA, 60 bp, Artificial
  Synthetic oligonucleotide
aaaatgcaattggggtcctcatcggaggacttgaatggaatgataacacagttcgaatct

SEQ ID NO: 55324 - DNA, 60 bp, Artificial
  Synthetic oligonucleotide
aaaatgcaattggggtcctcatcggaggacttgaatggaatgataacacagttcgactct

SEQ ID NO: 55325 - DNA, 55 bp, Artificial
  Synthetic oligonucleotide
aaaatgcaattggggtcctcatcggaggacttgaatggaatgataacacagttcg

SEQ ID NO: 55326 - DNA, 60 bp, Artificial
  Synthetic oligonucleotide
aggacttttcggagcaattgctggattcattgaagggggatggacaggaatgatagatgg

SEQ ID NO: 55327 - DNA, 60 bp, Artificial
  Synthetic oligonucleotide
gccagttggaatctccagcatggtggaggccatggtgtctagggcccgaattgatgcacg

SEQ ID NO: 55328 - DNA, 60 bp, Artificial
  Synthetic oligonucleotide
gggctctctgaaacttgcaacaggaatgaggaacattcctgaaaaggcatcaagagggct

SEQ ID NO: 55329 - DNA, 60 bp, Artificial
  Synthetic oligonucleotide
aagattgatttatggtcatataatgcagagctattagtcgcactggagaaccagcacact

SEQ ID NO: 55330 - DNA, 60 bp, Artificial
  Synthetic oligonucleotide
gcatgggacatcatgctgttgccaatgggaccatggtgaagaccctaaccgatgatcagg

SEQ ID NO: 55331 - DNA, 60 bp, Artificial
  Synthetic oligonucleotide
ccgatgatcaagtagaagtggtcactgcacaagaactggtagaatcgcaaaacctcccgg

SEQ ID NO: 55332 - DNA, 60 bp, Artificial
  Synthetic oligonucleotide
ccgatgatcaggtagaagtggtcactgcacaagaactggtagagtcacaaaacttcccag

SEQ ID NO: 55333 - DNA, 54 bp, Artificial
  Synthetic oligonucleotide
aattccaatgggccacagtgaaacaaaatgggaaatctggagcctgcaagagag

SEQ ID NO: 55334 - DNA, 60 bp, Artificial
  Synthetic oligonucleotide
aactcttctcagaactacacaggaaacccagtgatatgcatgggacatcatgctgttgcc

SEQ ID NO: 55335 - DNA, 60 bp, Artificial
  Synthetic oligonucleotide
atgcatgggacatcatgctgttgccaatgggaccatggtgaagaccctaaccgatgatca

SEQ ID NO: 55336 - DNA, 60 bp, Artificial
  Synthetic oligonucleotide
atgcatgggacatcatgctgttgccaatgggaccatggtaaagaccctgaccgatgatca

SEQ ID NO: 55337 - DNA, 60 bp, Artificial
  Synthetic oligonucleotide
gcatgggacatcatgctgttgccaatgggaccatggtaaagaccctgaccgatgatcaag

SEQ ID NO: 55338 - DNA, 57 bp, Artificial
  Synthetic oligonucleotide
aacggaaacatccggtgccagatttgtatttagagaaaaaacacccttgtttctact

SEQ ID NO: 55339 - DNA, 57 bp, Artificial
  Synthetic oligonucleotide
aacggaaacatccggtgccagatttgcatttagagaaaaaacacccttgtttctact

SEQ ID NO: 55340 - DNA, 60 bp, Artificial
  Synthetic oligonucleotide
tgcccaaaatatgtcaggagtaccaaattgaggatggttacaggactaagaaacatccca

SEQ ID NO: 55341 - DNA, 60 bp, Artificial
  Synthetic oligonucleotide
tataacgggagattcaccccggaaatagctgcaagacccaaagtaagaaatcaacctggg

SEQ ID NO: 55342 - DNA, 60 bp, Artificial
  Synthetic oligonucleotide
gtaagaaatcaacctgggaggatgaactattactggaccttgctagaacccggagacaca

SEQ ID NO: 55343 - DNA, 60 bp, Artificial
  Synthetic oligonucleotide
tagaacccggagacacaataatatttgaggcaactggtaatctaatagcaccatggtatg

SEQ ID NO: 55344 - DNA, 60 bp, Artificial
  Synthetic oligonucleotide
ccatggtatgctttcgcactgagtagagggtttgggtccggcatcatcacctcaaacgcg

SEQ ID NO: 55345 - DNA, 60 bp, Artificial
  Synthetic oligonucleotide
cgcactgagtagagggtttgggtccggcatcatcacctcaaacgcgtcaatgcatgagtg

SEQ ID NO: 55346 - DNA, 60 bp, Artificial
  Synthetic oligonucleotide
atgaaggcaaaactactggtcctgttatgtgcacttgcagctacagatgcagacacaata

SEQ ID NO: 55347 - DNA, 57 bp, Artificial
  Synthetic oligonucleotide
atgtgacagtgacacattctgttaacctgctcgaagacagccacaacgggaaactat

SEQ ID NO: 55348 - DNA, 60 bp, Artificial
  Synthetic oligonucleotide
catcgactatgaggaactgaaggagcaattgagctcagtatcatcattagaaagattcga

SEQ ID NO: 55349 - DNA, 60 bp, Artificial
  Synthetic oligonucleotide
gaggactcatacccaaagctgagcaattcctatgtgaacaataaagggaaagaagtcctt

SEQ ID NO: 55350 - DNA, 58 bp, Artificial
  Synthetic oligonucleotide
ttttacagaaatttgctatggctgacgaaaacggaggactcatacccaaagctgagca

SEQ ID NO: 55351 - DNA, 60 bp, Artificial
  Synthetic oligonucleotide
gaaagattcgaaatatttcccaaggaaagttcatggcccaaccacaacacactcaaagga

SEQ ID NO: 55352 - DNA, 60 bp, Artificial
  Synthetic oligonucleotide
ggaaaatgaaaggactttggatttccatgatttaaatgtgaagaatctgtacgagaaagt

SEQ ID NO: 55353 - DNA, 60 bp, Artificial
  Synthetic oligonucleotide
atgggggaaaaagcagtttttacagaaatttgctatggctgacgaaaacggaggactcat

SEQ ID NO: 55354 - DNA, 60 bp, Artificial
  Synthetic oligonucleotide
aacatcccatccattcaattcagaggtctatttggagccattgctggttttattgagggg

SEQ ID NO: 55355 - DNA, 60 bp, Artificial
  Synthetic oligonucleotide
agaagtccttgtactatggggtgttcatcacccgtctagcagtgatgagcaacagagtct

SEQ ID NO: 55356 - DNA, 60 bp, Artificial
  Synthetic oligonucleotide
aagttgaacagggaaaagatagatggagtgaaattggaatcaatgggggtgtatcagatt

SEQ ID NO: 55357 - DNA, 60 bp, Artificial
  Synthetic oligonucleotide
gggtgttttgagttctaccacaagtgtgacaataaatgcatggaaagtgtaagaaatggg

SEQ ID NO: 55358 - DNA, 53 bp, Artificial
  Synthetic oligonucleotide
aaaatattctcttcatgtggggcatacaccatccacctacagataccgaacag

SEQ ID NO: 55359 - DNA, 60 bp, Artificial
  Synthetic oligonucleotide
ttggaatttccagcatggtggaggccatggtgtctagggcccgaatttatgcacgaattg

SEQ ID NO: 55360 - DNA, 60 bp, Artificial
  Synthetic oligonucleotide
agtctctgaaactctacagagattcgcttggagaagcagcaatgaggatgggagacctcc

SEQ ID NO: 55361 - DNA, 60 bp, Artificial
  Synthetic oligonucleotide
cctctactaatagatggcacagcctcattgagtcctggaatgatgatgggcatgttcaac

SEQ ID NO: 55362 - DNA, 60 bp, Artificial
  Synthetic oligonucleotide
gagtggctaaagacaagaccaatcctgtcacctctgactaaggggattttagggttcgtg

SEQ ID NO: 55363 - DNA, 60 bp, Artificial
  Synthetic oligonucleotide
cttcttgttctgggccatgtccaatgggtcttgcagatgcaacatttgtatataattggc

SEQ ID NO: 55364 - DNA, 60 bp, Artificial
  Synthetic oligonucleotide
ccttcttgttctgggccatgtccaatgggtcttgcagatgcaacatttgtatataattgg

SEQ ID NO: 55365 - DNA, 60 bp, Artificial
  Synthetic oligonucleotide
gacctcttctaatagagggcacagcctcattgagtcctggaatgatgatgggcatgttta

SEQ ID NO: 55366 - DNA, 60 bp, Artificial
  Synthetic oligonucleotide
aaaacaatgttcctgtgacacatgccaaagaattgctccacacagagcacaatgggatgc

SEQ ID NO: 55367 - DNA, 60 bp, Artificial
  Synthetic oligonucleotide
tggtccaaaaacatcctcagaactcaggagtcagaatgcgtttgcatcaatggaacttgt

SEQ ID NO: 55368 - DNA, 60 bp, Artificial
  Synthetic oligonucleotide
gcagggatcccaataatgaaagagggtccccaggagtgaaagggtgggcctttgacgttg

SEQ ID NO: 55369 - DNA, 60 bp, Artificial
  Synthetic oligonucleotide
gaccaggcgattatggataaaaacatcatactgaaagcgaacttcagtgtgatctttgat

SEQ ID NO: 55370 - DNA, 60 bp, Artificial
  Synthetic oligonucleotide
gaccaggcgattatggataaaaacatcatactgaaagcgaacttcagtgtgatcttcgat

SEQ ID NO: 55371 - DNA, 60 bp, Artificial
  Synthetic oligonucleotide
tgggatggatcccaggatgtgctctctgatgcaaggatcaactctcccgagaaggtctgg

SEQ ID NO: 55372 - DNA, 60 bp, Artificial
  Synthetic oligonucleotide
ggagtctgaatgcgtttgcatcaatggaacttgtacagtagtaatgactgatggaagtgc

SEQ ID NO: 55373 - DNA, 60 bp, Artificial
  Synthetic oligonucleotide
attagagggaggcccaaagaaagtagtgtgctgtggacttcaaatagcattgtagctctg

SEQ ID NO: 55374 - DNA, 57 bp, Artificial
  Synthetic oligonucleotide
tgactatgaaggaaggctgatccagaacagcataacaatagagagaatggttctctc

SEQ ID NO: 55375 - DNA, 60 bp, Artificial
  Synthetic oligonucleotide
ctactgcttgaagtggagcaagagataagaactttctcgtttcagcttatttaatgataa

SEQ ID NO: 55376 - DNA, 60 bp, Artificial
  Synthetic oligonucleotide
aaggaacctacaaaatcctcaccatttattcgactgtcgcctcatcccttgttattgcaa

SEQ ID NO: 55377 - DNA, 60 bp, Artificial
  Synthetic oligonucleotide
atcctgggaatgctgaaattgaagatctcatctttctggcacggtctgcactcatactga

SEQ ID NO: 55378 - DNA, 60 bp, Artificial
  Synthetic oligonucleotide
aaatctagggcaaaagaggtacaccaaaacaacatactggtgggacggactccaatcctc

SEQ ID NO: 55379 - DNA, 60 bp, Artificial
  Synthetic oligonucleotide
gatgggtggtatgggtaccatcatcagaatgaacagggatctggttacgcagccgatcag

SEQ ID NO: 55380 - DNA, 60 bp, Artificial
  Synthetic oligonucleotide
gagcgtgaagaatggcacatatgactatcccaaatattcagaagagtccagcttgaacag

SEQ ID NO: 55381 - DNA, 60 bp, Artificial
  Synthetic oligonucleotide
ctgtcgacacagtgctggagaagaatgtgactgtgactcattcagttaatttactagaaa

SEQ ID NO: 55382 - DNA, 60 bp, Artificial
  Synthetic oligonucleotide
cacagtgctggagaagaatgtgactgtgactcattcagttaatttactagaaaacagcca

SEQ ID NO: 55383 - DNA, 60 bp, Artificial
  Synthetic oligonucleotide
atcaaggagacaccataacgtttgaagccactggaaatttgatagcaccatggtacgctt

SEQ ID NO: 55384 - DNA, 60 bp, Artificial
  Synthetic oligonucleotide
gacaccataacgtttgaagccactggaaatttgatagcaccatggtacgctttcgcggtg

SEQ ID NO: 55385 - DNA, 60 bp, Artificial
  Synthetic oligonucleotide
tggtacgctttcgcggtgaataaaaactgtgattctggaattataacttcggatgcccca

SEQ ID NO: 55386 - DNA, 60 bp, Artificial
  Synthetic oligonucleotide
agtgccaaaccccacatggggctttgaatagtagtcttccttttcagaacgtacatccca

SEQ ID NO: 55387 - DNA, 60 bp, Artificial
  Synthetic oligonucleotide
gtacatcccatcactattggagaatgccccaaatacgttaaaagcaccaaactgagaata

SEQ ID NO: 55388 - DNA, 60 bp, Artificial
  Synthetic oligonucleotide
cactattggagaatgccccaaatacgttaaaagcaccaaactgagaatagcaacaggact

SEQ ID NO: 55389 - DNA, 60 bp, Artificial
  Synthetic oligonucleotide
actgagaatagcaacaggactaagaaacgtcccctctattcaatccagagggcttttcgg

SEQ ID NO: 55390 - DNA, 60 bp, Artificial
  Synthetic oligonucleotide
ttgagaaaatgaacactcaattcactgcagtgggcaaggaattcagcaatcctagaaagg

SEQ ID NO: 55391 - DNA, 60 bp, Artificial
  Synthetic oligonucleotide
gtgcttgtaatctggggagtgcaccaccctccaactgctactgaacaacaaagtctctac

SEQ ID NO: 55392 - DNA, 60 bp, Artificial
  Synthetic oligonucleotide
aacaaagggaaagaagtgcttgtaatctggggagtgcaccaccctccaactgctactgaa

SEQ ID NO: 55393 - DNA, 60 bp, Artificial
  Synthetic oligonucleotide
taacaaagaagggaacttcataccctaaactcagcaaatcatacacaaacaacaaaggga

SEQ ID NO: 55394 - DNA, 60 bp, Artificial
  Synthetic oligonucleotide
tgcatgtccttactctggagccagcagtttttatcggaatttgctatggataacaaagaa

SEQ ID NO: 55395 - DNA, 60 bp, Artificial
  Synthetic oligonucleotide
tggccaaatcatgagacaactaaaggtattacagctgcatgtccttactctggagccagc

SEQ ID NO: 55396 - DNA, 60 bp, Artificial
  Synthetic oligonucleotide
ccaaaggctagctcatggccaaatcatgagacaactaaaggtattacagctgcatgtcct

SEQ ID NO: 55397 - DNA, 60 bp, Artificial
  Synthetic oligonucleotide
ctcacagcgaattcatggtcttacataatagagacttcaaattcagagaatggaacatgc

SEQ ID NO: 55398 - DNA, 60 bp, Artificial
  Synthetic oligonucleotide
taaagtaagaggacaagcaggcagactgaattactattggacactgttagatcaaggaga

SEQ ID NO: 55399 - DNA, 60 bp, Artificial
  Synthetic oligonucleotide
caaccgaaggttcacacctgaaatagcagctagacctaaagtaagaggacaagcaggcag

SEQ ID NO: 55400 - DNA, 60 bp, Artificial
  Synthetic oligonucleotide
ggatcatcaaaatacaaccgaaggttcacacctgaaatagcagctagacctaaagtaaga

SEQ ID NO: 55401 - DNA, 60 bp, Artificial
  Synthetic oligonucleotide
aggtgaactcagtaattgagaaaatgaacactcaattcactgcagtgggcaaggaattca

SEQ ID NO: 55402 - DNA, 60 bp, Artificial
  Synthetic oligonucleotide
tttggatatttggacatacaatgctgaattgctcgttttgctcgagaacgaaaggactct

SEQ ID NO: 55403 - DNA, 60 bp, Artificial
  Synthetic oligonucleotide
ggtcgatgatgggtttttggatatttggacatacaatgctgaattgctcgttttgctcga

SEQ ID NO: 55404 - DNA, 60 bp, Artificial
  Synthetic oligonucleotide
ggctgttttgagttctaccacaaatgtgatgatgagtgcatggagagcgtgaagaatggc

SEQ ID NO: 55405 - DNA, 60 bp, Artificial
  Synthetic oligonucleotide
gggaatggctgttttgagttctaccacaaatgtgatgatgagtgcatggagagcgtgaag

SEQ ID NO: 55406 - DNA, 60 bp, Artificial
  Synthetic oligonucleotide
ttttgctcgagaacgaaaggactctagatttccatgactctaatgtgaaaaatctgtacg

SEQ ID NO: 55407 - DNA, 60 bp, Artificial
  Synthetic oligonucleotide
gcagcaacccctcgaataaccaagtagtgccatgtgaaccaatcataatagaaaggaaca

SEQ ID NO: 55408 - DNA, 60 bp, Artificial
  Synthetic oligonucleotide
cgaaagcaggagtgaaaatgaatccaaatcagaagataatagcaattggctctgtttctc

SEQ ID NO: 55409 - DNA, 60 bp, Artificial
  Synthetic oligonucleotide
aaaagcagggtagataatcactcaccgagtgacatccacatcatggcgtctcaaggcacc

SEQ ID NO: 55410 - DNA, 60 bp, Artificial
  Synthetic oligonucleotide
ggttttacatacagatgtgcactgaactcaaactcggtgactatgaaggaaggctgatcc

SEQ ID NO: 55411 - DNA, 60 bp, Artificial
  Synthetic oligonucleotide
aggagggccttctacggaaggagtgcctgagtctatgagggaagaatatcggcaggagca

SEQ ID NO: 55412 - DNA, 60 bp, Artificial
  Synthetic oligonucleotide
tgacaagggttcaatctctacaactaaaccctttcagaacatctcgagaatatcaattgg

SEQ ID NO: 55413 - DNA, 60 bp, Artificial
  Synthetic oligonucleotide
ggggaattcctggttgggaaggaccataagcaaagattcaaggtcggggtatgagatgct

SEQ ID NO: 55414 - DNA, 60 bp, Artificial
  Synthetic oligonucleotide
ggggaaattcctggttgggaaggaccataagcaaagattcaagatcagggtatgagatgc

SEQ ID NO: 55415 - DNA, 60 bp, Artificial
  Synthetic oligonucleotide
ggggaaattcctggttgggaaggaccataagcaaagactcaaggtcaggatatgagatgc

SEQ ID NO: 55416 - DNA, 60 bp, Artificial
  Synthetic oligonucleotide
ggggggaattcctggttgggaaggaccataagcaaagattcaaggtcggggtatgagatg

SEQ ID NO: 55417 - DNA, 60 bp, Artificial
  Synthetic oligonucleotide
cggaccagcattgagcatcaacgaattgagcaatcttgcgaaaggggagaaagctaatgt

SEQ ID NO: 55418 - DNA, 60 bp, Artificial
  Synthetic oligonucleotide
acggaccagcattgagcatcaacgaattgagcaatcttgcgaaaggggagaaagctaatg

SEQ ID NO: 55419 - DNA, 54 bp, Artificial
  Synthetic oligonucleotide
ttcggatggccatcaattagtgtcgaattgtttaaaaacgaccttgtttctact

SEQ ID NO: 55420 - DNA, 59 bp, Artificial
  Synthetic oligonucleotide
ttacttgaagttgagagtgagataaggacattctcttttcagcttatttagtactaaaa

SEQ ID NO: 55421 - DNA, 59 bp, Artificial
  Synthetic oligonucleotide
ttacttgaagttgagagtgagataaggacattttcttttcagcttatttagtactaaaa

SEQ ID NO: 55422 - DNA, 60 bp, Artificial
  Synthetic oligonucleotide
ttacttgaagttgagagtgagataaggacattttctttccagcttatttagtactaaaaa

SEQ ID NO: 55423 - DNA, 60 bp, Artificial
  Synthetic oligonucleotide
ctacttgaagttgagagtgagataaggacattttcttttcagcttatttagtactaaaaa

SEQ ID NO: 55424 - DNA, 60 bp, Artificial
  Synthetic oligonucleotide
cttacttgaagttgagagtgagataaggacattttcttttcagcttatttagtactaaaa

SEQ ID NO: 55425 - DNA, 60 bp, Artificial
  Synthetic oligonucleotide
ccgataaccggagggagcccagatcctggcgtaaaaggatttgcattcttagatggagga

SEQ ID NO: 55426 - DNA, 60 bp, Artificial
  Synthetic oligonucleotide
tgtccgcaaacgatttgcagaccaagaactgggtgatgccccattccttgatcggcttcg

SEQ ID NO: 55427 - DNA, 50 bp, Artificial
  Synthetic oligonucleotide
acggaacgggactctagcatacttactgacagccagacagcgacccaaag

SEQ ID NO: 55428 - DNA, 56 bp, Artificial
  Synthetic oligonucleotide
tggtctccctgggggcaatcagtttctggatgtgctctaatgggtctttacagtgc

SEQ ID NO: 55429 - DNA, 60 bp, Artificial
  Synthetic oligonucleotide
accgatcttgaagcactcatggagtggctaaagacaagaccaatcctgtcacctctgact

SEQ ID NO: 55430 - DNA, 60 bp, Artificial
  Synthetic oligonucleotide
agagcatgaagttacggacacaaataccagcagaaatgcttgcaaccattgacctgaagt

SEQ ID NO: 55431 - DNA, 60 bp, Artificial
  Synthetic oligonucleotide
cctttgacatgagtaatgaagggtcttatttcttcggagacaatgcagaggagtatgaca

SEQ ID NO: 55432 - DNA, 60 bp, Artificial
  Synthetic oligonucleotide
gtcttctaaccgaggtcgaaacgtacgttctctctatcgtcccgtcaggccccctcaaag

SEQ ID NO: 55433 - DNA, 60 bp, Artificial
  Synthetic oligonucleotide
atttgaaatcactggaaccatgcgcaggcttgccgaccaaagtctcccaccgaacttctc

SEQ ID NO: 55434 - DNA, 60 bp, Artificial
  Synthetic oligonucleotide
gggagactgtgaagattcaatggtctcaagaccccacaatgctatacaataagatggagt

SEQ ID NO: 55435 - DNA, 60 bp, Artificial
  Synthetic oligonucleotide
ttgggagactgtgaagattcaatggtctcaagaccccacaatgctatacaataagatgga

SEQ ID NO: 55436 - DNA, 60 bp, Artificial
  Synthetic oligonucleotide
gatcttatttcttcggagacaatgcagaggagtatgacaattgaagaaaaatacccttgt

SEQ ID NO: 55437 - DNA, 60 bp, Artificial
  Synthetic oligonucleotide
gatcttatttcttcggagacaatgcagaggagtatgacaattgaagaaaaataccctgtt

SEQ ID NO: 55438 - DNA, 60 bp, Artificial
  Synthetic oligonucleotide
tgcttgcaatggggtttgctgccttcttattctgggccatgtccaatggatcttgcagat

SEQ ID NO: 55439 - DNA, 60 bp, Artificial
  Synthetic oligonucleotide
tgataacacagttcgagtctctgaaactctacagagattcgcttggagaagcagcaatga

SEQ ID NO: 55440 - DNA, 60 bp, Artificial
  Synthetic oligonucleotide
atggatgtcaatccgactttacttttcttgaaagtaccagcgcaaaatgccataagtacc

SEQ ID NO: 55441 - DNA, 60 bp, Artificial
  Synthetic oligonucleotide
cctgtgatatgcctaggacaccatgctgtatccaatgggacaatggtgaaaaccttgact

SEQ ID NO: 55442 - DNA, 60 bp, Artificial
  Synthetic oligonucleotide
ggacatcatgctgtatccaatgggacaatggtgaaaaccttgactgatgaccaggtagaa

SEQ ID NO: 55443 - DNA, 60 bp, Artificial
  Synthetic oligonucleotide
gcctaggacaccatgctgtatccaatgggacaatggtgaaaaccttgactgatgaccaag

SEQ ID NO: 55444 - DNA, 60 bp, Artificial
  Synthetic oligonucleotide
gttatttcaaaatgcgcactgggaaaagctcaataatgaggtcagatgcacctattgata

SEQ ID NO: 55445 - DNA, 60 bp, Artificial
  Synthetic oligonucleotide
aatatgcatttgggaactgccccaaatacgttggagtaaagagtctcaaactggcagtcg

SEQ ID NO: 55446 - DNA, 60 bp, Artificial
  Synthetic oligonucleotide
acaggagaccagttgggatttccagcatggtggaggccatggtgtctagggcccgaattg

SEQ ID NO: 55447 - DNA, 60 bp, Artificial
  Synthetic oligonucleotide
gcagcaacccctcgaataatcaagtagtgccatgtgaaccaatcataatagaaaggagca

SEQ ID NO: 55448 - DNA, 60 bp, Artificial
  Synthetic oligonucleotide
atagatgtgacagactccgaaatgaacaaactctttgaaagagttagacgccaactacga

SEQ ID NO: 55449 - DNA, 60 bp, Artificial
  Synthetic oligonucleotide
gcagggtagataatcactcactgagtgacatcaacatcatggcgtctcaaggcaccaaac

SEQ ID NO: 55450 - DNA, 60 bp, Artificial
  Synthetic oligonucleotide
gagaaccttatgtgtcatgcggcactggtaaatgttatcaatttgcacttgggcagggga

SEQ ID NO: 55451 - DNA, 52 bp, Artificial
  Synthetic oligonucleotide
tagcagagggctcctctcagaattacacagggaatcctgtgatatgcctggg

SEQ ID NO: 55452 - DNA, 51 bp, Artificial
  Synthetic oligonucleotide
ttgcttaatgcatcttggttcaactccttcctaacacatgcactgaaatag

SEQ ID NO: 55453 - DNA, 60 bp, Artificial
  Synthetic oligonucleotide
attgaggagtgcctgattaatgatccttgggttttgcttaatgcatcttggttcaactcc

SEQ ID NO: 55454 - DNA, 53 bp, Artificial
  Synthetic oligonucleotide
ttttgcttaatgcatcttggttcaactccttcctaacacatgcactgaaatag

SEQ ID NO: 55455 - DNA, 60 bp, Artificial
  Synthetic oligonucleotide
gggctatatgaagcaattgaggagtgcctgattaatgatccctgggttttgcttaatgca

SEQ ID NO: 55456 - DNA, 60 bp, Artificial
  Synthetic oligonucleotide
tatatgaagcaattgaggagtgcctgattaatgatccctgggttttgcttaatgcatctt

SEQ ID NO: 55457 - DNA, 60 bp, Artificial
  Synthetic oligonucleotide
ggctttccttgaagagtcccacccaggaatctttgaaaactcgtgtcttgaaacgatgga

SEQ ID NO: 55458 - DNA, 60 bp, Artificial
  Synthetic oligonucleotide
cttgaagaatcccacccaggaatctttgaaaactcgtgtcttgaaacgatggaagttgtt

SEQ ID NO: 55459 - DNA, 60 bp, Artificial
  Synthetic oligonucleotide
aagataatatgcatttcagcaacaggaatgacactatccgtagtaagtctgctaataggg

SEQ ID NO: 55460 - DNA, 60 bp, Artificial
  Synthetic oligonucleotide
gaagataatatgcatttcagcaacaggaatgacactatccgtagtaagtctgctaatagg

SEQ ID NO: 55461 - DNA, 60 bp, Artificial
  Synthetic oligonucleotide
gcattgagcatcaatgaactgagcaatcttgcgaaaggggagaaagccaatgtgctgata

SEQ ID NO: 55462 - DNA, 60 bp, Artificial
  Synthetic oligonucleotide
catgctaagcacagtcttaggagtctcaatcctgaatctaggacaaaagaggtacaccaa

SEQ ID NO: 55463 - DNA, 60 bp, Artificial
  Synthetic oligonucleotide
ctatttggagccatagctggattcatagagggaggttggtcagggctagttgctggttgg

SEQ ID NO: 55464 - DNA, 53 bp, Artificial
  Synthetic oligonucleotide
ttccagagaaagagaagagtgagggacaacatgaccaagaaaatggtcacaca

SEQ ID NO: 55465 - DNA, 60 bp, Artificial
  Synthetic oligonucleotide
tcgctccatggtatggacacattctttcaggagagagccacggaagaatcctgaagactg

SEQ ID NO: 55466 - DNA, 60 bp, Artificial
  Synthetic oligonucleotide
atctcgagaatatcaatcggggactgtcccaagtatgtcaaacagggatccttgaaacta

SEQ ID NO: 55467 - DNA, 60 bp, Artificial
  Synthetic oligonucleotide
ctaaaatagatctctggtcttacaatgcggacgttcttgtcgctctggagaatcaacata

SEQ ID NO: 55468 - DNA, 60 bp, Artificial
  Synthetic oligonucleotide
ccttgagaaatacgttgaagacaccaaaatagatctctggtcttacaatgcggacgttct

SEQ ID NO: 55469 - DNA, 60 bp, Artificial
  Synthetic oligonucleotide
ggtcttacaatgcggacgttcttgtcgctctggagaaccagcacacaattgacctgactg

SEQ ID NO: 55470 - DNA, 60 bp, Artificial
  Synthetic oligonucleotide
gatctctggtcttacaatgcggacgttcttgtcgctctggagaaccagcacacaattgac

SEQ ID NO: 55471 - DNA, 60 bp, Artificial
  Synthetic oligonucleotide
agaaattccatcaaatcgaaaaggaattctcagaagtggaagggagaattcaagacctcg

SEQ ID NO: 55472 - DNA, 60 bp, Artificial
  Synthetic oligonucleotide
aagacctcgagaagtacgttgaagacactaaaatagatctctggtcttacaatgcggacg

SEQ ID NO: 55473 - DNA, 60 bp, Artificial
  Synthetic oligonucleotide
caagacctcgagaaatacgttgaagacactaaaatagatctctggtcttacaatgcggac

SEQ ID NO: 55474 - DNA, 60 bp, Artificial
  Synthetic oligonucleotide
tgggcttataacgcagaattgctagtgctgcttgaaaatcagaaaacactcgatgaacat

SEQ ID NO: 55475 - DNA, 60 bp, Artificial
  Synthetic oligonucleotide
atcggaagattctacatacagatgtgcactgaactcaaactcagcgaccacgaaggcagg

SEQ ID NO: 55476 - DNA, 60 bp, Artificial
  Synthetic oligonucleotide
atcggaagattctacatacagatgtgcactgaactcaaactcagcgactatgaaagcagg

SEQ ID NO: 55477 - DNA, 60 bp, Artificial
  Synthetic oligonucleotide
agctttcaggtagactgctttctttggaatgtccgcaaacgatttgcagaccaagaattg

SEQ ID NO: 55478 - DNA, 60 bp, Artificial
  Synthetic oligonucleotide
gcgaccaaaagaattcggatggccatcaattagtgtcgaattgtttaaaaacgaccttgt

SEQ ID NO: 55479 - DNA, 60 bp, Artificial
  Synthetic oligonucleotide
cgtagcaatgctttcagcaactgttacccttatgatgtgccagattatgcttcccttagg

SEQ ID NO: 55480 - DNA, 60 bp, Artificial
  Synthetic oligonucleotide
gacttatacaagaaggccgatacaacaacaagtgtgacaacagaagatataaatcgcact

SEQ ID NO: 55481 - DNA, 60 bp, Artificial
  Synthetic oligonucleotide
atttatacaaaaaggctgatacaacaacaagtgtgacaacagaagatataaatcgaactt

SEQ ID NO: 55482 - DNA, 60 bp, Artificial
  Synthetic oligonucleotide
gaacagacagacttatacaagaaggccgatacaacaacaagtgtgacaacagaagatata

SEQ ID NO: 55483 - DNA, 60 bp, Artificial
  Synthetic oligonucleotide
ggatcctaataatgagagagggaacccaggagtgaaagggtgggcctttgacaatggaga

SEQ ID NO: 55484 - DNA, 60 bp, Artificial
  Synthetic oligonucleotide
gctttctttggcacgtccgcaaacgatttgcagaccaagaactgggtgatgccccattcc

SEQ ID NO: 55485 - DNA, 60 bp, Artificial
  Synthetic oligonucleotide
atgtaacagtaacacactctgttaaccttcttgagaatgtacataacggaaagctatgta

SEQ ID NO: 55486 - DNA, 60 bp, Artificial
  Synthetic oligonucleotide
gaatgtaacagtaacacactctgttaaccttctagaagacagacataacggaaaactatg

SEQ ID NO: 55487 - DNA, 60 bp, Artificial
  Synthetic oligonucleotide
tagaacctggggacacaataacattcgaagcaactggaaacctagtggtaccaaggtatg

SEQ ID NO: 55488 - DNA, 53 bp, Artificial
  Synthetic oligonucleotide
tcactatccacagtaagctcatggtcttacattgtggaaacatctaactcaga

SEQ ID NO: 55489 - DNA, 60 bp, Artificial
  Synthetic oligonucleotide
agaacctggagacacaataacattcgaagcaactggaaatctagtggtgccaagatatgc

SEQ ID NO: 55490 - DNA, 60 bp, Artificial
  Synthetic oligonucleotide
gaacctggggacacaataacattcgaagcaactggaaacctagtggtaccaaggtatgcc

SEQ ID NO: 55491 - DNA, 60 bp, Artificial
  Synthetic oligonucleotide
ggagacacaataacattcgaagcaactggaaatctagtggtgccaagatatgctttcgca

SEQ ID NO: 55492 - DNA, 60 bp, Artificial
  Synthetic oligonucleotide
acaggagaccggttggaatttccagcatggtggaggccatggtgtctagggcccggattg

SEQ ID NO: 55493 - DNA, 60 bp, Artificial
  Synthetic oligonucleotide
atgagccttctaaccgaggtcgaaacgtacgttctctccatcatcccgacaggccccctc

SEQ ID NO: 55494 - DNA, 60 bp, Artificial
  Synthetic oligonucleotide
ggagtctgagtgcgtttgcatcaatggaacttgtacagtagtaatgactgatggaagtgc

SEQ ID NO: 55495 - DNA, 60 bp, Artificial
  Synthetic oligonucleotide
ggagctacttaataagagcactgacactgaacacaatgacaaaagacgcagaaagaggca

SEQ ID NO: 55496 - DNA, 60 bp, Artificial
  Synthetic oligonucleotide
tgaacagaaggagctatttaataagagcactgacactgaacacaatgacaaaagatgcag

SEQ ID NO: 55497 - DNA, 60 bp, Artificial
  Synthetic oligonucleotide
catagcatggtccagttcaagctgccatgatgggaaagcatggttacatgtttgtgtcac

SEQ ID NO: 55498 - DNA, 60 bp, Artificial
  Synthetic oligonucleotide
tgtgcatagcatggtccagttcaagctgccatgatgggaaagcatggttacatgtttgtg

SEQ ID NO: 55499 - DNA, 60 bp, Artificial
  Synthetic oligonucleotide
aagataatatgcatctcagcaacaggaatgacactatccgtagtaagtctgctaataggg

SEQ ID NO: 55500 - DNA, 60 bp, Artificial
  Synthetic oligonucleotide
atgaatccaaatcagaagataatatgcatctcagcaacaggaatgacactatccgtagta

SEQ ID NO: 55501 - DNA, 60 bp, Artificial
  Synthetic oligonucleotide
gaagataatatgcatctcagcaacaggaatgacactatccgtagtaagtctgctaatagg

SEQ ID NO: 55502 - DNA, 60 bp, Artificial
  Synthetic oligonucleotide
atatgaagcaattgaggagtgcctgattaacgatccctgggttttgcttaatgcatcttg

SEQ ID NO: 55503 - DNA, 60 bp, Artificial
  Synthetic oligonucleotide
acaaagattgacctgtggtcttacaatgctgaattattggtggcattagaaaatcaacat

SEQ ID NO: 55504 - DNA, 60 bp, Artificial
  Synthetic oligonucleotide
tcctgggaatgctgaaattgaagatctcatctttctggcacggtctgcactcatcctgag

SEQ ID NO: 55505 - DNA, 60 bp, Artificial
  Synthetic oligonucleotide
gaaacgggactctagcatacttactgacagccagacagcgaccaaaagaattcgaatggc

SEQ ID NO: 55506 - DNA, 60 bp, Artificial
  Synthetic oligonucleotide
acgggactctagcatacttactgacagccagacagcgaccaaaaggattcggatggccat

SEQ ID NO: 55507 - DNA, 60 bp, Artificial
  Synthetic oligonucleotide
gggcaaacttgtgacatcgtcaatggtgctctggggagcccaggctgtgatcacttgaat

SEQ ID NO: 55508 - DNA, 60 bp, Artificial
  Synthetic oligonucleotide
caaacttgtgacatcgtcaatggtgctctggggagcccaggctgtgatcatttgaatggc

SEQ ID NO: 55509 - DNA, 56 bp, Artificial
  Synthetic oligonucleotide
catatggaacaggctcatggcctgatggggcgaatatcaattttatgcctatataa

SEQ ID NO: 55510 - DNA, 60 bp, Artificial
  Synthetic oligonucleotide
atggaacaggctcatggcctgatggggcgaatatcaatttcatgcctatataagctttcg

SEQ ID NO: 55511 - DNA, 60 bp, Artificial
  Synthetic oligonucleotide
ctcaggtacatatggaacaggctcatggcctgatgtggcggacatcaatctcatgcctat

SEQ ID NO: 55512 - DNA, 60 bp, Artificial
  Synthetic oligonucleotide
cgcaagactttacatatggggagttcaccatccttcaaccgacacagaacaaaccaacct

SEQ ID NO: 55513 - DNA, 55 bp, Artificial
  Synthetic oligonucleotide
ccccttgatggtagcatacatgctagaaagagagttggtccgcaaaacgaggttc

SEQ ID NO: 55514 - DNA, 60 bp, Artificial
  Synthetic oligonucleotide
actcaggagtctgaatgcgtttgcatcaatggaacttgtacagtagtaatgactgatgga

SEQ ID NO: 55515 - DNA, 60 bp, Artificial
  Synthetic oligonucleotide
agccttacaactattgcttgaagtggagcaagagataagaactttctcgtttcagcttat

SEQ ID NO: 55516 - DNA, 60 bp, Artificial
  Synthetic oligonucleotide
gccttgcaactattgcttgaagtggagcaagagataagaactttctcgtttcagcttatt

SEQ ID NO: 55517 - DNA, 60 bp, Artificial
  Synthetic oligonucleotide
gccttacaactattgcttgaagtggagcaagagataagaactttctcgtttcagcttatt

SEQ ID NO: 55518 - DNA, 60 bp, Artificial
  Synthetic oligonucleotide
cacaacaacaagtgtgacaacagaagatataaacagaactttcaaaccagagatagggcc

SEQ ID NO: 55519 - DNA, 60 bp, Artificial
  Synthetic oligonucleotide
atgaatccaaatcagaagataatatgcatctcagcaacaggaatgacactatctgtagta

SEQ ID NO: 55520 - DNA, 60 bp, Artificial
  Synthetic oligonucleotide
atgaatccaaatcagaagataatatgcatctctgcaacaggaatgacactatccgtagta

SEQ ID NO: 55521 - DNA, 60 bp, Artificial
  Synthetic oligonucleotide
agaataggggaagatgcccacatccttgtcacaagagaaccatatctctcatgtggacca

SEQ ID NO: 55522 - DNA, 60 bp, Artificial
  Synthetic oligonucleotide
gaatggtgctgaatgggatgtcttcatagagcgacccactgctgtggacacttgttatcc

SEQ ID NO: 55523 - DNA, 60 bp, Artificial
  Synthetic oligonucleotide
aaagctaatgtattgatagggcaaggagacgtagtgttggtaatgaaacggaaacgggac

SEQ ID NO: 55524 - DNA, 60 bp, Artificial
  Synthetic oligonucleotide
tgcaaaaggagagaaggctaatgtgctaattgggcaaggagacgtagtgttggtaatgaa

SEQ ID NO: 55525 - DNA, 60 bp, Artificial
  Synthetic oligonucleotide
tgctgatagggcaaggagacgtagtgttggtaatgaaacggaaacgggactctagcatac

SEQ ID NO: 55526 - DNA, 60 bp, Artificial
  Synthetic oligonucleotide
taatgtgctgatagggcaaggagacgtagtgttggtaatgaaacggaaacgggactctag

SEQ ID NO: 55527 - DNA, 60 bp, Artificial
  Synthetic oligonucleotide
atagagtatggtggacctcaaacagtattgtcgtgttttgtggcacttcaggtacctatg

SEQ ID NO: 55528 - DNA, 60 bp, Artificial
  Synthetic oligonucleotide
ctagagtatggtggacctcaaacagtattgtcgtgttttgtggcacttcaggtacctatg

SEQ ID NO: 55529 - DNA, 60 bp, Artificial
  Synthetic oligonucleotide
gagactagagtatggtggacctcaaacagtattgtcgtgttttgtggcacttcaggtaca

SEQ ID NO: 55530 - DNA, 60 bp, Artificial
  Synthetic oligonucleotide
agcaaaagcaggggaaacaatgctatcaatcgcgattctgtttctgctcatagcagaagg

SEQ ID NO: 55531 - DNA, 60 bp, Artificial
  Synthetic oligonucleotide
aggtagactgctttctttggcatgtccgcaaacgatttgcagaccaagaactgggtgatg

SEQ ID NO: 55532 - DNA, 60 bp, Artificial
  Synthetic oligonucleotide
ggaagtggaaacaagttgataacagtaggaagctcaaaataccagcaatcattcacccca

SEQ ID NO: 55533 - DNA, 60 bp, Artificial
  Synthetic oligonucleotide
aataccagcaatcattcaccccaagtccgggagcacggccacaagtgaatggacaatcag

SEQ ID NO: 55534 - DNA, 60 bp, Artificial
  Synthetic oligonucleotide
cactgaggcagatccttcgagggtcaggaggaattgataaggagtcaatgggtttcacct

SEQ ID NO: 55535 - DNA, 60 bp, Artificial
  Synthetic oligonucleotide
ataaggagtcaatgggtttcacctatagtggaataagaaccaatggagcgacaagtgcct

SEQ ID NO: 55536 - DNA, 60 bp, Artificial
  Synthetic oligonucleotide
gggtttcacctatagtggaataagaaccaatggagcgacaagtgcctgcaaaagatcagg

SEQ ID NO: 55537 - DNA, 60 bp, Artificial
  Synthetic oligonucleotide
acaagtgcctgcaaaagatcaggttcttctttctatgcagagatgaagtggttgctgtcg

SEQ ID NO: 55538 - DNA, 60 bp, Artificial
  Synthetic oligonucleotide
caagtgcctgcaaaagatcaggttcttctttctatgcagagatgaagtggttgctgtcga

SEQ ID NO: 55539 - DNA, 53 bp, Artificial
  Synthetic oligonucleotide
gttgctgtcgaattcagacaatgcggcattccctcaaatgacaaagtcgtata

SEQ ID NO: 55540 - DNA, 60 bp, Artificial
  Synthetic oligonucleotide
ccagctctgataatttggggagttcatcactctggatcggttagcgagcagaccaaactc

SEQ ID NO: 55541 - DNA, 60 bp, Artificial
  Synthetic oligonucleotide
tggggagttcatcactctggatcggttagcgagcagaccaaactctatggaagtggaaac

SEQ ID NO: 55542 - DNA, 60 bp, Artificial
  Synthetic oligonucleotide
gaccaaactctatggaagtggaaacaagttgataacagtaggaagctcaaaataccagca

SEQ ID NO: 55543 - DNA, 60 bp, Artificial
  Synthetic oligonucleotide
cacaaatgaagaatcactgaggcagatccttcgagggtcaggaggaattgataaggagtc

SEQ ID NO: 55544 - DNA, 60 bp, Artificial
  Synthetic oligonucleotide
gatcttgcggactcagaaatgaacaaactttatgagcgtgtcagaaaacaactaagggag

SEQ ID NO: 55545 - DNA, 60 bp, Artificial
  Synthetic oligonucleotide
tcagcatacaatagatcttgcggactcagaaatgaacaaactttatgagcgtgtcagaaa

SEQ ID NO: 55546 - DNA, 60 bp, Artificial
  Synthetic oligonucleotide
taagggagaatgctgaagaagatggaactggatgttttgagatattccataagtgtgatg

SEQ ID NO: 55547 - DNA, 60 bp, Artificial
  Synthetic oligonucleotide
gtgtcagaaaacaactaagggagaatgctgaagaagatggaactggatgttttgagatat

SEQ ID NO: 55548 - DNA, 60 bp, Artificial
  Synthetic oligonucleotide
agtttgagctgatagacaatgagttcaatgagatagaacaacaaataggaaatgtcatta

SEQ ID NO: 55549 - DNA, 52 bp, Artificial
  Synthetic oligonucleotide
ggatggtatggtttcagacatcaaaatgcacaaggggaaggaactgcagctg

SEQ ID NO: 55550 - DNA, 59 bp, Artificial
  Synthetic oligonucleotide
aatgtcattaattggacacgagacgcaatgactgaggtatggtcgtataatgctgagct

SEQ ID NO: 55551 - DNA, 60 bp, Artificial
  Synthetic oligonucleotide
acaatgagttcaatgagatagaacaacaaataggaaatgtcattaattggacacgagacg

SEQ ID NO: 55552 - DNA, 60 bp, Artificial
  Synthetic oligonucleotide
ccataagtgtgatgatcagtgcatggagagcataaggaacaacacttatgaccatactca

SEQ ID NO: 55553 - DNA, 60 bp, Artificial
  Synthetic oligonucleotide
tttgagatattccataagtgtgatgatcagtgcatggagagcataaggaacaacacttat

SEQ ID NO: 55554 - DNA, 60 bp, Artificial
  Synthetic oligonucleotide
agagaaggaaccgatgtgtgctatcccggtaaattcacaaatgaagaatcactgaggcag

SEQ ID NO: 55555 - DNA, 60 bp, Artificial
  Synthetic oligonucleotide
ttgataattgagcgaagagaaggaaccgatgtgtgctatcccggtaaattcacaaatgaa

SEQ ID NO: 55556 - DNA, 60 bp, Artificial
  Synthetic oligonucleotide
gacctccccaatgtgatcaattcctggagttttactctgatttgataattgagcgaagag

SEQ ID NO: 55557 - DNA, 60 bp, Artificial
  Synthetic oligonucleotide
ccctaataggacctccccaatgtgatcaattcctggagttttactctgatttgataattg

SEQ ID NO: 55558 - DNA, 59 bp, Artificial
  Synthetic oligonucleotide
ggggattgaagtagtgaacgccacagagacggtggaaactgcgaatatcaagaaaatat

SEQ ID NO: 55559 - DNA, 60 bp, Artificial
  Synthetic oligonucleotide
acacattaacagagagggggattgaagtagtgaacgccacagagacggtggaaactgcga

SEQ ID NO: 55560 - DNA, 59 bp, Artificial
  Synthetic oligonucleotide
tgggattggttttcatttgcataaagaatggaaacatgcggtgcaccatttgtatataa

SEQ ID NO: 55561 - DNA, 60 bp, Artificial
  Synthetic oligonucleotide
caacacttatgaccatactcaatacagaacagagtcattgcagaatagaatacagataga

SEQ ID NO: 55562 - DNA, 60 bp, Artificial
  Synthetic oligonucleotide
gaccatactcaatacagaacagagtcattgcagaatagaatacagatagacccagtgaaa

SEQ ID NO: 55563 - DNA, 60 bp, Artificial
  Synthetic oligonucleotide
cttatggtttagcttcggggcatcatgttttcttcttctagccgttgtaatgggattggt

SEQ ID NO: 55564 - DNA, 60 bp, Artificial
  Synthetic oligonucleotide
gcttcggggcatcatgttttcttcttctagccgttgtaatgggattggttttcatttgca

SEQ ID NO: 55565 - DNA, 50 bp, Artificial
  Synthetic oligonucleotide
agtccagagtgatgttcctctggattctagttgtggaggggattgctttc

SEQ ID NO: 55566 - DNA, 59 bp, Artificial
  Synthetic oligonucleotide
tctagttgtggaggggattgctttcacagtgggggtacgatagtcagttccctgccatt

SEQ ID NO: 55567 - DNA, 60 bp, Artificial
  Synthetic oligonucleotide
gaccttcactttcaatggggcattcatagcccctgacagggcaagtttctttagaggaga

SEQ ID NO: 55568 - DNA, 60 bp, Artificial
  Synthetic oligonucleotide
gtttctttagaggagaatcactaggagtccagagtgatgttcctctggattctagttgtg

SEQ ID NO: 55569 - DNA, 60 bp, Artificial
  Synthetic oligonucleotide
gggagaatcgattttcactggctactccttgatcccaatgacacagtgaccttcactttc

SEQ ID NO: 55570 - DNA, 60 bp, Artificial
  Synthetic oligonucleotide
cacagtgaccttcactttcaatggggcattcatagcccctgacagggcaagtttctttag

SEQ ID NO: 55571 - DNA, 60 bp, Artificial
  Synthetic oligonucleotide
ccagcaatcattcaccccaagtccgggagcacggccacaagtgaatggacaatcagggag

SEQ ID NO: 55572 - DNA, 60 bp, Artificial
  Synthetic oligonucleotide
ggacaatcagggagaatcgattttcactggctactccttgatcccaatgacacagtgacc

SEQ ID NO: 55573 - DNA, 60 bp, Artificial
  Synthetic oligonucleotide
gaactgtggggagatgccctcggtatgtcaaacagacaagcctccttttggctacaggaa

SEQ ID NO: 55574 - DNA, 60 bp, Artificial
  Synthetic oligonucleotide
gtggggagatgccctcggtatgtcaaacagacaagcctccttttggctacaggaatgaga

SEQ ID NO: 55575 - DNA, 60 bp, Artificial
  Synthetic oligonucleotide
atagcataattgtattttgtggaacctcaggtacctatggaacaggctcatggcctgatg

SEQ ID NO: 55576 - DNA, 60 bp, Artificial
  Synthetic oligonucleotide
gcttccaggtagactgctttctttggcatgtccgcaaacgatttgcagaccaaggacggg

SEQ ID NO: 55577 - DNA, 60 bp, Artificial
  Synthetic oligonucleotide
gcttccaggtagactgctttctttggcatgtccgcaaacgatttgcagaccgagaactgg

SEQ ID NO: 55578 - DNA, 60 bp, Artificial
  Synthetic oligonucleotide
ttacagtggaacaagcaaagcatgttcagattcattctacaggagcatgagatggttgac

SEQ ID NO: 55579 - DNA, 60 bp, Artificial
  Synthetic oligonucleotide
gcaattggggtcctcatcggaggacttgaatggaatgataacacagttcgagtctctaaa

SEQ ID NO: 55580 - DNA, 60 bp, Artificial
  Synthetic oligonucleotide
gtcgtcactgcccaggaattagtggaatcgcaacatctaccggagttgtgtcctagccct

SEQ ID NO: 55581 - DNA, 60 bp, Artificial
  Synthetic oligonucleotide
gggtgttccgtttcatttggcaaccaaacaagtgtgcatagcatggtccagctcaagctg

SEQ ID NO: 55582 - DNA, 60 bp, Artificial
  Synthetic oligonucleotide
taggtgtcccgtttcatttggggaccaaacaagtgtgcatagcatggtccagctcaagct

SEQ ID NO: 55583 - DNA, 60 bp, Artificial
  Synthetic oligonucleotide
atggaggtcgttttcccaaatgaagtgggagctagaatattgacatcagaatcgcaattg

SEQ ID NO: 55584 - DNA, 60 bp, Artificial
  Synthetic oligonucleotide
ggataggagaagatgcccacatccttgtcacaagagaaccatacctctcatgtggaccac

SEQ ID NO: 55585 - DNA, 60 bp, Artificial
  Synthetic oligonucleotide
ggggaggatgcccacatccttgtcacaagagaaccatacctctcatgtggaccaaacgag

SEQ ID NO: 55586 - DNA, 60 bp, Artificial
  Synthetic oligonucleotide
caagtagaggactatttggagccatagctggattcatagagggaggttggtcaggactag

SEQ ID NO: 55587 - DNA, 60 bp, Artificial
  Synthetic oligonucleotide
agaaccccgctctcagaatgaaatggatgatggcaatgaaatacccgattacagctgaca

SEQ ID NO: 55588 - DNA, 60 bp, Artificial
  Synthetic oligonucleotide
gaacccttctctcagaatgaaatggatgatggcaatgaaatacccaatcaccgcagacaa

SEQ ID NO: 55589 - DNA, 60 bp, Artificial
  Synthetic oligonucleotide
ccccgctctcagaatgaaatggatgatggcaatgaaatacccgattacagctgacaaaag

SEQ ID NO: 55590 - DNA, 60 bp, Artificial
  Synthetic oligonucleotide
ttgaatggatgtcaatccgactttacttttcttgaaagttccagcgcaaaatgccataag

SEQ ID NO: 55591 - DNA, 60 bp, Artificial
  Synthetic oligonucleotide
ccaacactgtgtcaagcttccaggtagactgctttctttggcatgtccgcaaacggtttg

SEQ ID NO: 55592 - DNA, 51 bp, Artificial
  Synthetic oligonucleotide
catggaatggctaaagacaagaccaatcctgtcacctctgactaaggggat

SEQ ID NO: 55593 - DNA, 52 bp, Artificial
  Synthetic oligonucleotide
catggaatggctaaagacaagaccaatcctgtcacctctgactaaggggatt

SEQ ID NO: 55594 - DNA, 60 bp, Artificial
  Synthetic oligonucleotide
gtcccaaggcaccaaacgatcttatgaacagatggaaactggtggagaacgccagaatgc

SEQ ID NO: 55595 - DNA, 60 bp, Artificial
  Synthetic oligonucleotide
acgggatgcttgttgacagtattggttcatggtctaaaaacatcctcagaactcaggagt

SEQ ID NO: 55596 - DNA, 60 bp, Artificial
  Synthetic oligonucleotide
aaaatgcaattggggtcatcatcggaggacttgaatggaatgataacacagttcgagtct

SEQ ID NO: 55597 - DNA, 60 bp, Artificial
  Synthetic oligonucleotide
aaaatgcaattgggatcctcatcggaggacttgaatggaatgataacacagttcgagtct

SEQ ID NO: 55598 - DNA, 60 bp, Artificial
  Synthetic oligonucleotide
ggctccgccgagatcaaaagtccctaaaaggaagaggcaacacccttggtctcgacatcg

SEQ ID NO: 55599 - DNA, 60 bp, Artificial
  Synthetic oligonucleotide
tacaaccgcaaatgcagacacattatgtataggttaccatgcaaataattcaactgacac

SEQ ID NO: 55600 - DNA, 60 bp, Artificial
  Synthetic oligonucleotide
tttgcagccacaaatgcagatacactatgtataggttaccatgcaaataattcaactgac

SEQ ID NO: 55601 - DNA, 60 bp, Artificial
  Synthetic oligonucleotide
ccatggtatgctttcgcactgagtagaggctttgggtcaggaatcatcacctcaaacgca

SEQ ID NO: 55602 - DNA, 60 bp, Artificial
  Synthetic oligonucleotide
gacacaataatatttgaggcaaatggaaatctaatagcgccatggtatgctttcgcactg

SEQ ID NO: 55603 - DNA, 60 bp, Artificial
  Synthetic oligonucleotide
gggacacaataatatttgaggcaaatggaaatctaatagcgccatggtatgctttcgcac

SEQ ID NO: 55604 - DNA, 60 bp, Artificial
  Synthetic oligonucleotide
ggaacccggggacacaataatatttgaggcaaatggaaatctaatagcgccatggtacgc

SEQ ID NO: 55605 - DNA, 60 bp, Artificial
  Synthetic oligonucleotide
ggaacccggggacacaataatatttgaggcaaatggaaatctaatagcaccatggtatgc

SEQ ID NO: 55606 - DNA, 60 bp, Artificial
  Synthetic oligonucleotide
ggaacccggggacacaataatatttgaggcaaatggaaatctaatagcgccgtggtacgc

SEQ ID NO: 55607 - DNA, 60 bp, Artificial
  Synthetic oligonucleotide
ggaacccggggacacaataatatttgaggcaaatggaaatctaatagcgccatggcatgc

SEQ ID NO: 55608 - DNA, 60 bp, Artificial
  Synthetic oligonucleotide
gactatgctggaacccggggacacaataatatttgaggcaaatggaaatctaatagcacc

SEQ ID NO: 55609 - DNA, 60 bp, Artificial
  Synthetic oligonucleotide
gactctgctggaacccggggatacaataatatttgaggcaaatggaaatctaatagcgcc

SEQ ID NO: 55610 - DNA, 56 bp, Artificial
  Synthetic oligonucleotide
ggggacttgaatggaatgataacacagttcgagtctctgaaattctacagagattc

SEQ ID NO: 55611 - DNA, 60 bp, Artificial
  Synthetic oligonucleotide
gaaatgtcccatccattcaatccagaggactatttggagcaattgccggattcattgagg

SEQ ID NO: 55612 - DNA, 60 bp, Artificial
  Synthetic oligonucleotide
tcgagaagaaatagacggagtgaaactagaatcgatgggagtttaccaaattttggcgat

SEQ ID NO: 55613 - DNA, 60 bp, Artificial
  Synthetic oligonucleotide
ctacagatgcagacacaatatgtataggctaccatgcgaacaactcaaccgacactgttg

SEQ ID NO: 55614 - DNA, 60 bp, Artificial
  Synthetic oligonucleotide
tacagatgcagacacaatatgtataggctaccatgcgaacaactcaaccgacactgttga

SEQ ID NO: 55615 - DNA, 60 bp, Artificial
  Synthetic oligonucleotide
gattatcagagcctacggagcatcttagcaaacaatgggaaatttgagttcattgctgag

SEQ ID NO: 55616 - DNA, 60 bp, Artificial
  Synthetic oligonucleotide
cttaatagaggggactgcatcattgagccctggaatgatgatgggcatgttcaatatgtt

SEQ ID NO: 55617 - DNA, 60 bp, Artificial
  Synthetic oligonucleotide
catttgcatctacaaatgcagacacactatgtataggttaccatgcaaataactcaaccg

SEQ ID NO: 55618 - DNA, 60 bp, Artificial
  Synthetic oligonucleotide
atttgcagctacaaatgcagacacactatgtataggttaccatgcaaataactcaaccga

SEQ ID NO: 55619 - DNA, 60 bp, Artificial
  Synthetic oligonucleotide
tttgcagctacaaatgcagacacactatgtataggttaccatgcaaataactcaaccgac

SEQ ID NO: 55620 - DNA, 60 bp, Artificial
  Synthetic oligonucleotide
ttagtcttgctatgtacatttgcagacacaaatgcagacacactatgtataggttaccat

SEQ ID NO: 55621 - DNA, 60 bp, Artificial
  Synthetic oligonucleotide
ggaatgatgatgggcatgttcaacatgctaagtacagttttgggagtctcaattctaaat

SEQ ID NO: 55622 - DNA, 60 bp, Artificial
  Synthetic oligonucleotide
caagaccaatcctgtcacctctgactaaggggattttaggatttgtgtttacgctcaccg

SEQ ID NO: 55623 - DNA, 60 bp, Artificial
  Synthetic oligonucleotide
gacaagaccaatcctgtcacctctgactaaggggattttagggtttgtgttcacgctcac

SEQ ID NO: 55624 - DNA, 60 bp, Artificial
  Synthetic oligonucleotide
tcagacggcaaaaatagggaatttggcttgtccttcatgaaaaaatgccttgtttctact

SEQ ID NO: 55625 - DNA, 60 bp, Artificial
  Synthetic oligonucleotide
ggcactcatggagtggctaaagacaagaccaatcctgtcacctctgactaaggggatttt

SEQ ID NO: 55626 - DNA, 60 bp, Artificial
  Synthetic oligonucleotide
attctaaatactgcagttcccataggatcttgcgttagcaaatgccacaccgacaagggt

SEQ ID NO: 55627 - DNA, 60 bp, Artificial
  Synthetic oligonucleotide
gtacaattctaaatactgcagttcccataggatcttgcgttagcaaatgccacaccgaca

SEQ ID NO: 55628 - DNA, 60 bp, Artificial
  Synthetic oligonucleotide
gtacaattctaaatactgcagttcccataggatcttgcgttagtaaatgccacactgaca

SEQ ID NO: 55629 - DNA, 60 bp, Artificial
  Synthetic oligonucleotide
cctttgacatgagcaacgaaggatcttatttcttcggagacaatgcagaggaatatgaca

SEQ ID NO: 55630 - DNA, 60 bp, Artificial
  Synthetic oligonucleotide
gggagttcaccatccctcaactgacacagaacaaaccaacctgtataagaacaaccccgg

SEQ ID NO: 55631 - DNA, 60 bp, Artificial
  Synthetic oligonucleotide
acatatggggagttcaccatccctcaactgacacagaacaaaccaacctgtataagaaca

SEQ ID NO: 55632 - DNA, 60 bp, Artificial
  Synthetic oligonucleotide
acagcagcacaacgagcaatgatggaccaggtgagagaaagccggaatcctgggaatgct

SEQ ID NO: 55633 - DNA, 60 bp, Artificial
  Synthetic oligonucleotide
cagcagcacaacgagcaatgatggaccaggtgagagaaagccggaatcctgggaatgctg

SEQ ID NO: 55634 - DNA, 60 bp, Artificial
  Synthetic oligonucleotide
agcagcacaacgagcaatgatggaccaggtgagagaaagccggaatcctgggaatgctga

SEQ ID NO: 55635 - DNA, 60 bp, Artificial
  Synthetic oligonucleotide
gggaccatgcgcaggcttgccgaccaaagtctcccaccgaacttctccagccttgaaaac

SEQ ID NO: 55636 - DNA, 60 bp, Artificial
  Synthetic oligonucleotide
caaaattatctagtgctgaacaaaagtttatgcaaagttgaaggatgggtagtggtggcc

SEQ ID NO: 55637 - DNA, 60 bp, Artificial
  Synthetic oligonucleotide
ggagtggttttgagatgttgaagatacctaatgctgagacagatccgagttctagaatca

SEQ ID NO: 55638 - DNA, 60 bp, Artificial
  Synthetic oligonucleotide
ggtggagaacgccagaatgccactgaaatcagagcatctgttgggagaatggttggtgga

SEQ ID NO: 55639 - DNA, 60 bp, Artificial
  Synthetic oligonucleotide
tgatagagaatgctttaacccttgcttttatgtggaattgatcagaggcaggccaaaaga

SEQ ID NO: 55640 - DNA, 60 bp, Artificial
  Synthetic oligonucleotide
tcccagcgcaaaatgccataagcaccacattcccatatactggagatcctccatacagcc

SEQ ID NO: 55641 - DNA, 60 bp, Artificial
  Synthetic oligonucleotide
ggagacaccataacttttgaagccactgggaatttgatagcaccatggcacgcatttgca

SEQ ID NO: 55642 - DNA, 60 bp, Artificial
  Synthetic oligonucleotide
gcggggaaggatcctaagaaaactggaggacctatatacaggagagtaaacggaaagtgg

SEQ ID NO: 55643 - DNA, 60 bp, Artificial
  Synthetic oligonucleotide
aacatcccatctatccagtctagaggtctgtttggagccattgccggttttattgagggg

SEQ ID NO: 55644 - DNA, 60 bp, Artificial
  Synthetic oligonucleotide
cccaagacaagctcgtggcccaatcatgaaacaaccaaaggtgtaacggcagcatgcccc

SEQ ID NO: 55645 - DNA, 60 bp, Artificial
  Synthetic oligonucleotide
aaatttagtggcaccaagatatgctttcgcactgaatagaggttctggatccggtatcat

SEQ ID NO: 55646 - DNA, 60 bp, Artificial
  Synthetic oligonucleotide
tcgagatatttcccaagacaagctcgtggcccaatcatgaaacaaccagaggtgtaacgg

SEQ ID NO: 55647 - DNA, 60 bp, Artificial
  Synthetic oligonucleotide
tcccaagacaagctcgtggcccaatcatgaaacaaccaaaggtgtaacggcagcatgctc

SEQ ID NO: 55648 - DNA, 52 bp, Artificial
  Synthetic oligonucleotide
caaacacctcatggtgccataaacagcagtctccctttccagaatatacatc

SEQ ID NO: 55649 - DNA, 60 bp, Artificial
  Synthetic oligonucleotide
gtggcaccaagatatgctttcgcactgaatagaggttctggatccggtatcatcacttca

SEQ ID NO: 55650 - DNA, 60 bp, Artificial
  Synthetic oligonucleotide
ccggtatcatcacttcagacgcaccagtgcatgattgtgacacgaagtgtcaaacacctc

SEQ ID NO: 55651 - DNA, 60 bp, Artificial
  Synthetic oligonucleotide
aaattcgagatatttcccaagacaagctcgtggcccaatcatgaaacaaccaaaggtgta

SEQ ID NO: 55652 - DNA, 60 bp, Artificial
  Synthetic oligonucleotide
ctgtgaggcaagatgttgtggcaatgactgattggtcagggtatagcggaagtttcgttc

SEQ ID NO: 55653 - DNA, 60 bp, Artificial
  Synthetic oligonucleotide
ctgtgaggcaagatgttgtggcaatgactgattggtcagggtatagcgggagtttcgttc

SEQ ID NO: 55654 - DNA, 60 bp, Artificial
  Synthetic oligonucleotide
gactgatagtaagttctctgtgaggcaagatgttgtggcaatgactgattggtcagggta

SEQ ID NO: 55655 - DNA, 60 bp, Artificial
  Synthetic oligonucleotide
actcactgagtgacattcacatcatggcgtctcaaggcaccaaacgatcttatgagcaga

SEQ ID NO: 55656 - DNA, 60 bp, Artificial
  Synthetic oligonucleotide
caatcagcttctggatgtgttctaatgggtctttgcagtgtagaatatgcatctgagacc

SEQ ID NO: 55657 - DNA, 60 bp, Artificial
  Synthetic oligonucleotide
ggtcagggtatagcggaagtttcgttcaacatcctgagctaacagggctagactgtatga

SEQ ID NO: 55658 - DNA, 60 bp, Artificial
  Synthetic oligonucleotide
tcagggtatagcggaagtttcgttcaacatcctgagctaacagggctagactgtataagg

SEQ ID NO: 55659 - DNA, 60 bp, Artificial
  Synthetic oligonucleotide
gaagtttcgttcaacatcctgagctaacagggctagactgtatgaggccgtgcttctggg

SEQ ID NO: 55660 - DNA, 60 bp, Artificial
  Synthetic oligonucleotide
ttcacaaaggactagtaataaaagaggaagccctcaaaggatcagccagacacatagagg

SEQ ID NO: 55661 - DNA, 60 bp, Artificial
  Synthetic oligonucleotide
ctgtattttcacaaaggactagtaataaaagaggaagccctcaaaggatcagccagacac

SEQ ID NO: 55662 - DNA, 60 bp, Artificial
  Synthetic oligonucleotide
ccttcgatcttggaggactatatgaagcaattgaggagtgcctgattaatgatccctggg

SEQ ID NO: 55663 - DNA, 60 bp, Artificial
  Synthetic oligonucleotide
cataaacaggacaggaacatttgaattcacaagttttttctatcgctatgggtttgtagc

SEQ ID NO: 55664 - DNA, 60 bp, Artificial
  Synthetic oligonucleotide
ttgtgaaacaagatatagtggctatgactgattggtcagggtacagcggaagtttcgttc

SEQ ID NO: 55665 - DNA, 60 bp, Artificial
  Synthetic oligonucleotide
acaggatgttgtggcaataactgattggtcagggtacagcggaagtttcgttcaacatcc

SEQ ID NO: 55666 - DNA, 60 bp, Artificial
  Synthetic oligonucleotide
ctgtgaaacaggatgtcgtggcaatgactgattggtcagggtacagcggaagtttcgttc

SEQ ID NO: 55667 - DNA, 57 bp, Artificial
  Synthetic oligonucleotide
cagtcaagcaaaatgggaaatccggggcatgcaaaagggcaaatgtaaatgactttt

SEQ ID NO: 55668 - DNA, 60 bp, Artificial
  Synthetic oligonucleotide
cagtcaagcaaaatgggaaatccggggcatgcaaaagggcaaatgtaaatgactttttca

SEQ ID NO: 55669 - DNA, 60 bp, Artificial
  Synthetic oligonucleotide
gctcagttattctgctggtgcacttgccagttgcatgggcctcatatacaacagaatggg

SEQ ID NO: 55670 - DNA, 60 bp, Artificial
  Synthetic oligonucleotide
tgaacaaataacatttatgcaagccttacaactactgcttgaagtggagcaagatataag

SEQ ID NO: 55671 - DNA, 60 bp, Artificial
  Synthetic oligonucleotide
tgaacaaataacatttatgcaagccttacaactactgcttgaagtggagcaagagataag

SEQ ID NO: 55672 - DNA, 60 bp, Artificial
  Synthetic oligonucleotide
gagcatctgttgggagaatggttggtggaattggaagattctacatacagatgtgcactg

SEQ ID NO: 55673 - DNA, 60 bp, Artificial
  Synthetic oligonucleotide
ttcgatcttggagggctatatgaagcaattgaggagtgcctgattaacgatccctgggtt

SEQ ID NO: 55674 - DNA, 60 bp, Artificial
  Synthetic oligonucleotide
ggtcctgagtcagtgttggtcaatacttatcagtggatcatcagaaactgggagactgtg

SEQ ID NO: 55675 - DNA, 60 bp, Artificial
  Synthetic oligonucleotide
cactattggagaatgtcccaaatacatcaagagcaccaagctaagaatggcaacaggact

SEQ ID NO: 55676 - DNA, 60 bp, Artificial
  Synthetic oligonucleotide
cactattggagaatgtcccaaatacgtcaagagcaccaagctaagaatggcaacaggact

SEQ ID NO: 55677 - DNA, 60 bp, Artificial
  Synthetic oligonucleotide
cccaaatacgtcaaaagcaccaagctaagaatggcaacaggactaagaaatgttccatcc

SEQ ID NO: 55678 - DNA, 60 bp, Artificial
  Synthetic oligonucleotide
agaatgtcccaaatacgtcaaaagcaccaagctaagaatggcaacaggactaagaaatgt

SEQ ID NO: 55679 - DNA, 60 bp, Artificial
  Synthetic oligonucleotide
cacaatatgtataggctaccatgcgaacaactcaaccgacactgttgacacagtactcga

SEQ ID NO: 55680 - DNA, 60 bp, Artificial
  Synthetic oligonucleotide
cactgagtgacatccacatcatggcgtctcaaggcaccaaacgatcttatgagcagatgg

SEQ ID NO: 55681 - DNA, 60 bp, Artificial
  Synthetic oligonucleotide
cactgagtgacattcacatcatggcgtctcaaggcaccaaacgatcttatgagcagatgg

SEQ ID NO: 55682 - DNA, 60 bp, Artificial
  Synthetic oligonucleotide
tcaccgagtgacatccacatcatggcgtctcaaggcaccaaacgatcttatgagcagatg

SEQ ID NO: 55683 - DNA, 60 bp, Artificial
  Synthetic oligonucleotide
ggggattatgcaaggctttacatatggggagttcatcacccttcgacagacacagagcaa

SEQ ID NO: 55684 - DNA, 60 bp, Artificial
  Synthetic oligonucleotide
acaatggtgattatgcaaggctttacatatggggagttcatcatccttcaactgacacag

SEQ ID NO: 55685 - DNA, 60 bp, Artificial
  Synthetic oligonucleotide
caatggggattatgcaaggctttacatatggggagttcatcacccttcgacagacacaga

SEQ ID NO: 55686 - DNA, 60 bp, Artificial
  Synthetic oligonucleotide
caaaggttttgtattttcacaaaggactaataataaaagaggaagccctcaaaggatcag

SEQ ID NO: 55687 - DNA, 60 bp, Artificial
  Synthetic oligonucleotide
caaagattttgtattttcacaaaggactaataataaaagaggaagccctcaaaggatcag

SEQ ID NO: 55688 - DNA, 60 bp, Artificial
  Synthetic oligonucleotide
ttcacaaaggactaataataaaagaggaagccctcaaaggatcagccaggcacatagagg

SEQ ID NO: 55689 - DNA, 60 bp, Artificial
  Synthetic oligonucleotide
ttcataaaggactaataataaaagaggaagccctcaaaggatcagccaggcacatagagg

SEQ ID NO: 55690 - DNA, 60 bp, Artificial
  Synthetic oligonucleotide
gacagacctatgactggactctaaatagaaaccagcctgctgccacagcattggccaaca

SEQ ID NO: 55691 - DNA, 60 bp, Artificial
  Synthetic oligonucleotide
cagacctatgactggactctaaatagaaaccagcctgctgccacagcattggccaacact

SEQ ID NO: 55692 - DNA, 60 bp, Artificial
  Synthetic oligonucleotide
ggccgacagacctatgactggactctaaatagaaaccagcctgccgcaacagcattggcc

SEQ ID NO: 55693 - DNA, 60 bp, Artificial
  Synthetic oligonucleotide
gtccctaagaggaagaggcagcactcttggtctggacatcgaaacagccactcgtgtggg

SEQ ID NO: 55694 - DNA, 60 bp, Artificial
  Synthetic oligonucleotide
aatgtcacacagacaggggttcaatctctacaactaaaccctttcagaacatctcgagaa

SEQ ID NO: 55695 - DNA, 60 bp, Artificial
  Synthetic oligonucleotide
acgatccctgggttttgcttaatgcatcttggttcaactccttcctcacacatgcactga

SEQ ID NO: 55696 - DNA, 60 bp, Artificial
  Synthetic oligonucleotide
tccctgggttttgcttaatgcatcttggttcaactccttcctcacacatgcactgaaata

SEQ ID NO: 55697 - DNA, 60 bp, Artificial
  Synthetic oligonucleotide
cctgggttttgcttaatgcatcttggttcaactccttcctcacacatgcactgaaatagt

SEQ ID NO: 55698 - DNA, 60 bp, Artificial
  Synthetic oligonucleotide
tgggttttgcttaatgcatcttggttcaactccttcctcacacatgcactgaaatagttg

SEQ ID NO: 55699 - DNA, 60 bp, Artificial
  Synthetic oligonucleotide
taatgattcctgggttttgcttaatgcatcttggttcaactccttcctcacacatgcact

SEQ ID NO: 55700 - DNA, 60 bp, Artificial
  Synthetic oligonucleotide
ggttttgcttaatgcatcttggttcaactccttcctcacacatgcactgaaatagttgtg

SEQ ID NO: 55701 - DNA, 60 bp, Artificial
  Synthetic oligonucleotide
ttgcttaatgcatcttggttcaactccttcctcacacatgcactgaaatagttgtggcaa

SEQ ID NO: 55702 - DNA, 60 bp, Artificial
  Synthetic oligonucleotide
tgcatcttggttcaactccttcctcacacatgcactgaaatagttgtggcaatgctgcta

SEQ ID NO: 55703 - DNA, 60 bp, Artificial
  Synthetic oligonucleotide
gcatcttggttcaactccttcctcacacatgcactgaaatagttgtggcaatgctactat

SEQ ID NO: 55704 - DNA, 60 bp, Artificial
  Synthetic oligonucleotide
ctgggttttgcttaatgcatcttggttcaactccttcctcacacatgcactgaaatagtt

SEQ ID NO: 55705 - DNA, 60 bp, Artificial
  Synthetic oligonucleotide
taacgatccctgggttttgcttaatgcatcttggttcaactccttcctcacacatgcagt

SEQ ID NO: 55706 - DNA, 60 bp, Artificial
  Synthetic oligonucleotide
ggtgaaatcacatgtgtgtgcagggataattggcatggatcgaatcggccgtgggtgtct

SEQ ID NO: 55707 - DNA, 60 bp, Artificial
  Synthetic oligonucleotide
ccaaaatcagcctgaaacatgcaatcagagcgtcattacttacgaaaacaacacttgggt

SEQ ID NO: 55708 - DNA, 60 bp, Artificial
  Synthetic oligonucleotide
caagggagatgtgtttgtcataagagagccattcatttcgtgctcccacttggaatgcag

SEQ ID NO: 55709 - DNA, 60 bp, Artificial
  Synthetic oligonucleotide
cacaagagtccgaatgtgcatgcgtgaatggttcgtgctttactgtaatgaccgatggac

SEQ ID NO: 55710 - DNA, 60 bp, Artificial
  Synthetic oligonucleotide
aaatacggcaatggtgtttggatagggaggactaaaagcaccagttcaaggagcggcttt

SEQ ID NO: 55711 - DNA, 60 bp, Artificial
  Synthetic oligonucleotide
ggagctgcatatccttttgtggtgtaaatagtgacactgtaggttggtcttggccagacg

SEQ ID NO: 55712 - DNA, 60 bp, Artificial
  Synthetic oligonucleotide
ttgagatattccccaaggcaagttcatggcccaatcatgaaacgaacagaggtgtgacat

SEQ ID NO: 55713 - DNA, 60 bp, Artificial
  Synthetic oligonucleotide
cattggagtgacagtgataaagaacaacatgataaacaatgaccttggaccagcaacggc

SEQ ID NO: 55714 - DNA, 60 bp, Artificial
  Synthetic oligonucleotide
ccactgaaatcagagcatctgttgggagaatggttggtggaattgggagattctacatac

SEQ ID NO: 55715 - DNA, 60 bp, Artificial
  Synthetic oligonucleotide
gcagggtgacaaatacataatggactccaacacgataacctcgtttcaggtagattgcta

SEQ ID NO: 55716 - DNA, 60 bp, Artificial
  Synthetic oligonucleotide
cctggtcttgttagtctccctgggggcaatcagtttctggatgtgttccaatgggtcctt

SEQ ID NO: 55717 - DNA, 58 bp, Artificial
  Synthetic oligonucleotide
gagggacgactgatccagaacagcttaacaatagagagaatggtgctctctgcttttg

SEQ ID NO: 55718 - DNA, 60 bp, Artificial
  Synthetic oligonucleotide
gtggaccatatggccataatcaagaaatacacatcaggaagacaggagaagaaccctgct

SEQ ID NO: 55719 - DNA, 60 bp, Artificial
  Synthetic oligonucleotide
gcgactaattcaaaatagcataacaatagagagaatggtgctctctgcttttgatgagag

SEQ ID NO: 55720 - DNA, 60 bp, Artificial
  Synthetic oligonucleotide
ggcgactaattcaaaatagcataacaatagagagaatggtgctctctgcttttgatgaga

SEQ ID NO: 55721 - DNA, 60 bp, Artificial
  Synthetic oligonucleotide
ctccctttgatgatagactcagaagagatcaaaaggcattaaagggaagaggcagcacac

SEQ ID NO: 55722 - DNA, 60 bp, Artificial
  Synthetic oligonucleotide
tccctttgatgatagactcagaagagatcaaaaggcattaaagggaagaggcagcacact

SEQ ID NO: 55723 - DNA, 60 bp, Artificial
  Synthetic oligonucleotide
cgaaagtggtcccaagaggacaactgtccaccagaggggttcaaattgcttcaaatgaaa

SEQ ID NO: 55724 - DNA, 60 bp, Artificial
  Synthetic oligonucleotide
caaaaacaacctcatggccaaatcatgagacaaccaaaggttccacagctgcatgctccc

SEQ ID NO: 55725 - DNA, 58 bp, Artificial
  Synthetic oligonucleotide
aaaacaacctcatggccaaatcatgagacaaccaaaggttccacagctgcatgctccc

SEQ ID NO: 55726 - DNA, 60 bp, Artificial
  Synthetic oligonucleotide
taaagacaagaccaatcctgtcacctctgactaaggggattttaggatttgtgttcacgc

SEQ ID NO: 55727 - DNA, 60 bp, Artificial
  Synthetic oligonucleotide
tctagtcttgttagtctccctgggggcaatcagcttctggatgtgttctaatgggtcatt

SEQ ID NO: 55728 - DNA, 60 bp, Artificial
  Synthetic oligonucleotide
ctcatggtccagccaagagcatggaatatgatgctgttgctaccacgcattcctggatcc

SEQ ID NO: 55729 - DNA, 60 bp, Artificial
  Synthetic oligonucleotide
ctttgtcccatccgtgggtgggctatatacagcaaagacaatagcataagaattggttcc

SEQ ID NO: 55730 - DNA, 60 bp, Artificial
  Synthetic oligonucleotide
gatttgtgttcacactcaccgtgcccagtgagcgaggactgcagcgtagacgctttgtcc

SEQ ID NO: 55731 - DNA, 60 bp, Artificial
  Synthetic oligonucleotide
gatggaaactggtggagaacgccagaatgccactgaaatcagagcatctgttgggagaat

SEQ ID NO: 55732 - DNA, 60 bp, Artificial
  Synthetic oligonucleotide
ataacgttcatgcaagccttacaactattgcttgaagtggagcaagagataagaactttc

SEQ ID NO: 55733 - DNA, 60 bp, Artificial
  Synthetic oligonucleotide
agaatgccactgaaatcagagcatctgttggaaggatggttggtggaattgggagattct

SEQ ID NO: 55734 - DNA, 60 bp, Artificial
  Synthetic oligonucleotide
caaacactgtgtcaagctttcaggtagactgctttctttggaatgtccgcaaacgatttg

SEQ ID NO: 55735 - DNA, 60 bp, Artificial
  Synthetic oligonucleotide
acactgtgtcaagctttcaggtagactgctttctctggcatgtccgcaaacggtttgcag

SEQ ID NO: 55736 - DNA, 60 bp, Artificial
  Synthetic oligonucleotide
agggaggctgattcagaacagcataacaatagagagaatggttctctcagcatttgatga

SEQ ID NO: 55737 - DNA, 54 bp, Artificial
  Synthetic oligonucleotide
aagaactttctcgtttcagcttatttaatgataaaaaacacccttgtttctact

SEQ ID NO: 55738 - DNA, 60 bp, Artificial
  Synthetic oligonucleotide
tcaaacaagtgtagtaccaaacattggcagtagaccatgggtgagaggccaaagcggcag

SEQ ID NO: 55739 - DNA, 60 bp, Artificial
  Synthetic oligonucleotide
caaacaagtgtagtaccaaacattggcagtagaccatgggtgagaggccaaagcggcagg

SEQ ID NO: 55740 - DNA, 60 bp, Artificial
  Synthetic oligonucleotide
caaacaagtgtagtaccaaacattggcagtagaccatgggtgagaggccaaagcagcagg

SEQ ID NO: 55741 - DNA, 60 bp, Artificial
  Synthetic oligonucleotide
gcaggcaaaccatttgaatggatgtcaatccgactttacttttcttaaaagtgccagcac

SEQ ID NO: 55742 - DNA, 51 bp, Artificial
  Synthetic oligonucleotide
ggggctatatgaagcaattgaggagtgcctgattaatgatccctgggtttt

SEQ ID NO: 55743 - DNA, 60 bp, Artificial
  Synthetic oligonucleotide
ttagagaagtatgttgaagacacaaagattgacctgtggtcttacaatgctgaattgttg

SEQ ID NO: 55744 - DNA, 60 bp, Artificial
  Synthetic oligonucleotide
gggaatcctgtgatatgcctgggacatcatgctgtatccaatgggacaatggtgaaaacc

SEQ ID NO: 55745 - DNA, 60 bp, Artificial
  Synthetic oligonucleotide
cagagggctcctctcagaattacacagggaatcctgtgatatgcctgggacatcatgccg

SEQ ID NO: 55746 - DNA, 60 bp, Artificial
  Synthetic oligonucleotide
tagcagagggctcctctcagaattacacagggaatcctgtgatatgcctgggacatcatg

SEQ ID NO: 55747 - DNA, 60 bp, Artificial
  Synthetic oligonucleotide
ttagagaagtatgttgaagacacaaagattgacctctggtcttacaatgctgaattattg

SEQ ID NO: 55748 - DNA, 60 bp, Artificial
  Synthetic oligonucleotide
aaagatgttatactgtggtttagcttcggggcgtcatgctttgtacttttggctgtcatc

SEQ ID NO: 55749 - DNA, 60 bp, Artificial
  Synthetic oligonucleotide
gctttccatttcagtggggagttctacttatcaaaacaactttgtgcctgtggtgggagc

SEQ ID NO: 55750 - DNA, 60 bp, Artificial
  Synthetic oligonucleotide
atcactttccatttcagtggggagttctacttatcaaaacaactttgtgcctgtggtggg

SEQ ID NO: 55751 - DNA, 60 bp, Artificial
  Synthetic oligonucleotide
gaagaagcattaaggcagaaaattatggagagtggagggattgacaagataagcaccggg

SEQ ID NO: 55752 - DNA, 60 bp, Artificial
  Synthetic oligonucleotide
ggcgatcttggaaaaaaacatcatactgaaagcgaacttcagtgtgatctttaaccgatt

SEQ ID NO: 55753 - DNA, 60 bp, Artificial
  Synthetic oligonucleotide
tgatcacttgaatggtgcagaatgggatgtcttcatagagcgacccaccgctgtggacac

SEQ ID NO: 55754 - DNA, 60 bp, Artificial
  Synthetic oligonucleotide
gggatggacaggaatgatagatggatggtatggttatcatcatcagaatgaacagggatc

SEQ ID NO: 55755 - DNA, 56 bp, Artificial
  Synthetic oligonucleotide
ggggatggacaggaatgatagatggatggtatggttatcatcatcagaatgaacag

SEQ ID NO: 55756 - DNA, 60 bp, Artificial
  Synthetic oligonucleotide
caaaagcagggtgacaaagacataatggattcccacactgtgtcaagctttcaggtagat

SEQ ID NO: 55757 - DNA, 60 bp, Artificial
  Synthetic oligonucleotide
ggggacgtagtgttggtaatgaaacgaaaacgggactctagcatacttactgacagccag

SEQ ID NO: 55758 - DNA, 60 bp, Artificial
  Synthetic oligonucleotide
ggggacgtagtgttggtgatgaaacgaaaacgggactctagcatacttactgacagccag

SEQ ID NO: 55759 - DNA, 60 bp, Artificial
  Synthetic oligonucleotide
ggggacatagtgttggtaatgaaacgaaaacgggactctagcatacttactgacagccag

SEQ ID NO: 55760 - DNA, 60 bp, Artificial
  Synthetic oligonucleotide
gcttctcattgttcaggcacttagggacaacctggaacctggaaccttcgatcttggagg

SEQ ID NO: 55761 - DNA, 60 bp, Artificial
  Synthetic oligonucleotide
cactgactgtgaatgtgagaggatcaggaatgaggatactggtaagaggcaattctccag

SEQ ID NO: 55762 - DNA, 60 bp, Artificial
  Synthetic oligonucleotide
ttgttagtctccctgggggcaatcagcttctggatgtgttctaatgggtcattgcaatgc

SEQ ID NO: 55763 - DNA, 60 bp, Artificial
  Synthetic oligonucleotide
catggaatggctaaagacaagaccaatcctgtcacctctgactaaggggattttgggatt

SEQ ID NO: 55764 - DNA, 60 bp, Artificial
  Synthetic oligonucleotide
gcagctatagatcaaataaccgggaaattgaacaggctgatagagaagacaaacacagag

SEQ ID NO: 55765 - DNA, 60 bp, Artificial
  Synthetic oligonucleotide
tactcaggcagctatagatcaaataaccgggaaattgaacaggctgatagagaagacaaa

SEQ ID NO: 55766 - DNA, 60 bp, Artificial
  Synthetic oligonucleotide
gcagctatagatcaaataaccgggaaattgaacaggctgatagagaagacaaacacggag

SEQ ID NO: 55767 - DNA, 60 bp, Artificial
  Synthetic oligonucleotide
gaatgtgcaacattctcaaggggaaattccaaacagcagcacaacgagcaatgatggacc

SEQ ID NO: 55768 - DNA, 60 bp, Artificial
  Synthetic oligonucleotide
gaatgtgcaacattctcaaggggaaattccaaacagcagcacaacgagcaatgatggatc

SEQ ID NO: 55769 - DNA, 60 bp, Artificial
  Synthetic oligonucleotide
aggggggatggacaggaatgatagatggatggtatggttaccatcaccaaaatgagcagg

SEQ ID NO: 55770 - DNA, 60 bp, Artificial
  Synthetic oligonucleotide
aaggaggatggacaggaatgatagatggatggtatggatatcaccatcaaaatgagcagg

SEQ ID NO: 55771 - DNA, 60 bp, Artificial
  Synthetic oligonucleotide
ggaggatggacaggaatgatagatggatggtatggatatcaccatcaaaatgagcaggga

SEQ ID NO: 55772 - DNA, 60 bp, Artificial
  Synthetic oligonucleotide
gaaagaacacagatcttgaggcactcatggaatggctaaagacaagaccaatcctgtcac

SEQ ID NO: 55773 - DNA, 60 bp, Artificial
  Synthetic oligonucleotide
tttgcagggaaaaacaccgatcttgaggcgctcatggaatggctaaagacaagaccaatc

SEQ ID NO: 55774 - DNA, 60 bp, Artificial
  Synthetic oligonucleotide
caggaaggcaagagaagaaccccgcactcaggatgaagtggatgatggcaatgaaatatc

SEQ ID NO: 55775 - DNA, 60 bp, Artificial
  Synthetic oligonucleotide
gtgttcacgctcaccgtgcccagtgagcgaggactgcagcgtagacgctttgtccaaaat

SEQ ID NO: 55776 - DNA, 60 bp, Artificial
  Synthetic oligonucleotide
attgggagattctacatacagatgtgcactgaacttaaactcagcgactatgaagggagg

SEQ ID NO: 55777 - DNA, 60 bp, Artificial
  Synthetic oligonucleotide
gggagattctacatacagatgtgcactgaacttaaactcagcgactatgaagggaggctg

SEQ ID NO: 55778 - DNA, 60 bp, Artificial
  Synthetic oligonucleotide
gatggcatgggctggctaacaatcggaatttcaggtccagataatggagcagtggctgta

SEQ ID NO: 55779 - DNA, 60 bp, Artificial
  Synthetic oligonucleotide
tgcatgtcatgatggcatgggctggctaacaatcggaatttcaggtccagataatggagc

SEQ ID NO: 55780 - DNA, 60 bp, Artificial
  Synthetic oligonucleotide
ataatggagcagtggctgtattaaaatacaacggcataataactgaaaccataaaaagtt

SEQ ID NO: 55781 - DNA, 60 bp, Artificial
  Synthetic oligonucleotide
ataatggagcagtggctgtactaaaatacaacggcataataactgaaaccataaaaagtt

SEQ ID NO: 55782 - DNA, 60 bp, Artificial
  Synthetic oligonucleotide
ttcggagcaattgctggattcattgaagggggatggacaggaatgatagatggatggtat

SEQ ID NO: 55783 - DNA, 60 bp, Artificial
  Synthetic oligonucleotide
attcaagccagaaatagcatcaagacccaaggtgagaggtcaagcagggaggatggacta

SEQ ID NO: 55784 - DNA, 60 bp, Artificial
  Synthetic oligonucleotide
ccagaaatagcagaaagacccaaggtgagaggtcaagcagggaggatgaactattattgg

SEQ ID NO: 55785 - DNA, 60 bp, Artificial
  Synthetic oligonucleotide
caagccagaaatagcagcgagacccaaggtgagaggtcaagcagggaggatgaactatta

SEQ ID NO: 55786 - DNA, 60 bp, Artificial
  Synthetic oligonucleotide
ggggactgcatcattgagccctggaatgatgatgggcatgttcaatatgttaagcactgt

SEQ ID NO: 55787 - DNA, 60 bp, Artificial
  Synthetic oligonucleotide
atgctgtggtgatgccagctcatggcccagccaagagcatggaatatgatgctgttgcta

SEQ ID NO: 55788 - DNA, 60 bp, Artificial
  Synthetic oligonucleotide
aatgctgtggtgatgccagctcatggcccagccaagagcatggaatatgatgctgttgct

SEQ ID NO: 55789 - DNA, 60 bp, Artificial
  Synthetic oligonucleotide
gaaggctaattcaaaatagcataacaatagagagaatggtgctctctgcttttgatgaga

SEQ ID NO: 55790 - DNA, 56 bp, Artificial
  Synthetic oligonucleotide
agcaaaagcaggggaaaataaaagcaaccaaaatgaaggcaatactagtagtcttg

SEQ ID NO: 55791 - DNA, 60 bp, Artificial
  Synthetic oligonucleotide
ttagcaaaagcaggggaaaataaaagcaaccaaaatgaaggcaatactagtagtcttgct

SEQ ID NO: 55792 - DNA, 60 bp, Artificial
  Synthetic oligonucleotide
agcaaaagcaggggaaaataaaagcaaccaaaatgaaggcaatactagtagtcttgctat

SEQ ID NO: 55793 - DNA, 58 bp, Artificial
  Synthetic oligonucleotide
ttagcaaaagcaggggaaaataaaagcaaccaaaatgaaggcaatactagtagtcttg

SEQ ID NO: 55794 - DNA, 54 bp, Artificial
  Synthetic oligonucleotide
atgtcccctccattcaatctagaggacttttcggagcaattgctggattcattg

SEQ ID NO: 55795 - DNA, 60 bp, Artificial
  Synthetic oligonucleotide
ggactgaggaacgtcccctctatccaatccagaggacttttcggagcaattgctggattc

SEQ ID NO: 55796 - DNA, 60 bp, Artificial
  Synthetic oligonucleotide
agatgagtcttctaaccgaggtcgaaacgtacgttctctctatcgtcccgtcaggccccc

SEQ ID NO: 55797 - DNA, 59 bp, Artificial
  Synthetic oligonucleotide
agatgagtcttctaaccgaggtcgaaacgtacgttctctctatcgtcccgtcaggcccc

SEQ ID NO: 55798 - DNA, 60 bp, Artificial
  Synthetic oligonucleotide
ggatgtcaatccgactttacttttcttaaaagtgccagcacaaaatgctataagcacaac

SEQ ID NO: 55799 - DNA, 60 bp, Artificial
  Synthetic oligonucleotide
tatgtttggtggacgagcaacagtttagttgcactatgtggaagcccagtcccagttggg

SEQ ID NO: 55800 - DNA, 60 bp, Artificial
  Synthetic oligonucleotide
aaacaatgctatcaatcacgattctgtttctgctcatagcagagggctcctctcagaatt

SEQ ID NO: 55801 - DNA, 58 bp, Artificial
  Synthetic oligonucleotide
ggtccagacaatggggctgtggctgtgctgaaatacaatggcataataaccgacacta

SEQ ID NO: 55802 - DNA, 60 bp, Artificial
  Synthetic oligonucleotide
ccacaccgacaggggttcaatctctacaactaaaccctttcagaacatctcgagaatatc

SEQ ID NO: 55803 - DNA, 60 bp, Artificial
  Synthetic oligonucleotide
ggggttcaatctctacaactaaaccctttcagaacatctcgagaatatcgatcggggact

SEQ ID NO: 55804 - DNA, 60 bp, Artificial
  Synthetic oligonucleotide
taaatgccacaccgacaggggttcaatctctacaactaaaccctttcagaacatctcgag

SEQ ID NO: 55805 - DNA, 60 bp, Artificial
  Synthetic oligonucleotide
aagattctacatccaaatgtgcactgaactcaaacttagtgattatgagggaaggctaat

SEQ ID NO: 55806 - DNA, 60 bp, Artificial
  Synthetic oligonucleotide
aagattttacatccaaatgtgcactgaactcaaacttagtgattatgaggggcggctaat

SEQ ID NO: 55807 - DNA, 60 bp, Artificial
  Synthetic oligonucleotide
aagattctacatccaaatgtgcactgaactcaaactcagtgactatgagggacgactgat

SEQ ID NO: 55808 - DNA, 60 bp, Artificial
  Synthetic oligonucleotide
aagattctacatccaaatgtgcactgaactcaaacttagtgattatgagggacgactaat

SEQ ID NO: 55809 - DNA, 60 bp, Artificial
  Synthetic oligonucleotide
gattctacatccaaatgtgcactgaactcaaacttagtgattatgagggacgactgattc

SEQ ID NO: 55810 - DNA, 60 bp, Artificial
  Synthetic oligonucleotide
gagattctacatccaaatgtgcactgaactcaaactcagtgactatgagggacgactaat

SEQ ID NO: 55811 - DNA, 60 bp, Artificial
  Synthetic oligonucleotide
gaagattctacatccaaatgtgcactgaactcaaacttagtgattatgagggacgactga

SEQ ID NO: 55812 - DNA, 60 bp, Artificial
  Synthetic oligonucleotide
aaggttctacatccaaatgtgcactgaactcaaactcagtgactatgaggggcgactaat

SEQ ID NO: 55813 - DNA, 60 bp, Artificial
  Synthetic oligonucleotide
gaccaaatgaaaacccagcccacaaaagtcaattggtgtggatggcatgccactctgctg

SEQ ID NO: 55814 - DNA, 60 bp, Artificial
  Synthetic oligonucleotide
agatctcattttcctggcacggtcagcacttattctaagggggtcagttgcacataagtc

SEQ ID NO: 55815 - DNA, 60 bp, Artificial
  Synthetic oligonucleotide
gattctacatccaaatgtgcactgaactcaaacttagtgattatgagggacgactaattc

SEQ ID NO: 55816 - DNA, 60 bp, Artificial
  Synthetic oligonucleotide
gattctacatccaaatgtgcactgaactcaaacttagtgattatgagggaaggctaattc

SEQ ID NO: 55817 - DNA, 60 bp, Artificial
  Synthetic oligonucleotide
aacaatctggactagtgggagcagcatttctttttgtggcgtaaatagcgatactgcaaa

SEQ ID NO: 55818 - DNA, 60 bp, Artificial
  Synthetic oligonucleotide
aatgtcaatctgcatgtcaggacctaataacaatgcttcagcagtggtctggtacaatgg

SEQ ID NO: 55819 - DNA, 60 bp, Artificial
  Synthetic oligonucleotide
cgaaaggaatgaacaaggacaaaccctctggagcaaaacaaacgatgccggctcagaccg

SEQ ID NO: 55820 - DNA, 60 bp, Artificial
  Synthetic oligonucleotide
tgaaaggaatgaacaaggacaaaccctctggagcaaaacaaacgatgccggctcagaccg

SEQ ID NO: 55821 - DNA, 60 bp, Artificial
  Synthetic oligonucleotide
caggactaagaaacatcccatctatccagtctagaggtctgtttggagccattgctggtt

SEQ ID NO: 55822 - DNA, 60 bp, Artificial
  Synthetic oligonucleotide
tttgcagccacaaatgcagacacactatgtataggttatcatgcaaataactcaactgac

SEQ ID NO: 55823 - DNA, 60 bp, Artificial
  Synthetic oligonucleotide
gtgtgacttgttgctcacagcgaattcgtggtcttacataatagagacttcaaattcaga

SEQ ID NO: 55824 - DNA, 60 bp, Artificial
  Synthetic oligonucleotide
ctcacagcgaattcgtggtcttacataatagagacttcaaattcagaaaatggaacatgc

SEQ ID NO: 55825 - DNA, 60 bp, Artificial
  Synthetic oligonucleotide
atgtgacttgctgctcacagcgaattcgtggtcttacataatagagacttcaaattcaaa

SEQ ID NO: 55826 - DNA, 60 bp, Artificial
  Synthetic oligonucleotide
atgtgacttgttactcacagcgaattcgtggtcttacataatagagacttcaaattcaga

SEQ ID NO: 55827 - DNA, 60 bp, Artificial
  Synthetic oligonucleotide
tgtgacttgctgctcacagcgaattcgtggtcttacataatagagacttcaaattcaaaa

SEQ ID NO: 55828 - DNA, 60 bp, Artificial
  Synthetic oligonucleotide
gtgtgacttgttgctcacagcgaactcgtggtcttacataatagagacttcaaattcaga

SEQ ID NO: 55829 - DNA, 60 bp, Artificial
  Synthetic oligonucleotide
gcaaagttgaaggatgggtagtggtggctaaggacaatgccataagattcggtgaaagtg

SEQ ID NO: 55830 - DNA, 60 bp, Artificial
  Synthetic oligonucleotide
gttgaaggatgggtagtggtggctaaggacaatgccataagattcggtgaaagtgaacaa

SEQ ID NO: 55831 - DNA, 60 bp, Artificial
  Synthetic oligonucleotide
ataagcactggatttacatacgggtcatccatcaattcagctggaactactaaagcatgt

SEQ ID NO: 55832 - DNA, 60 bp, Artificial
  Synthetic oligonucleotide
acataacggtggactaatagcacctagtagagtaagcaaattaaggggacggggcctagg

SEQ ID NO: 55833 - DNA, 58 bp, Artificial
  Synthetic oligonucleotide
tatgaccatacacaatatagagaagaggcactcctgaacagactcagcattaatccgg

SEQ ID NO: 55834 - DNA, 60 bp, Artificial
  Synthetic oligonucleotide
ggagagcattagaaacaacacctatgatcatacacaatatagagaagaggcactcctgaa

SEQ ID NO: 55835 - DNA, 60 bp, Artificial
  Synthetic oligonucleotide
acatacgggtcatccatcaattcagctggaactactaaagcatgtatgaggaacggaggg

SEQ ID NO: 55836 - DNA, 60 bp, Artificial
  Synthetic oligonucleotide
aatttttccctagcagttcatacaggagaccggttggaatttccagcatggtagaggcca

SEQ ID NO: 55837 - DNA, 60 bp, Artificial
  Synthetic oligonucleotide
atttggcattccaatctgaatgatgccacgtatcagagaacaagagctcttgtgcgtact

SEQ ID NO: 55838 - DNA, 52 bp, Artificial
  Synthetic oligonucleotide
atttggcattccaatctgaatgatgccacgtatcagagaacaagagctcttg

SEQ ID NO: 55839 - DNA, 50 bp, Artificial
  Synthetic oligonucleotide
ctatcatcccgtcaggccccctcaaagccgagatcgctcagagactggaa

SEQ ID NO: 55840 - DNA, 60 bp, Artificial
  Synthetic oligonucleotide
catggaatggctaaagacaagaccgatcctgtcacctctgactaaggggattttaggatt

SEQ ID NO: 55841 - DNA, 60 bp, Artificial
  Synthetic oligonucleotide
catggagtggctaaagacaagaccgatcctgtcacctctgactaaggggattttaggatt

SEQ ID NO: 55842 - DNA, 60 bp, Artificial
  Synthetic oligonucleotide
caagaccaatcctgtcacctctgactaaggggattttaggatttgtgttcacgctcaccg

SEQ ID NO: 55843 - DNA, 60 bp, Artificial
  Synthetic oligonucleotide
aggggattttaggatttgtgttcacgctcaccgtgcccagtgagcgaggactgcagcgta

SEQ ID NO: 55844 - DNA, 60 bp, Artificial
  Synthetic oligonucleotide
tgcagggtagataatcactcactgagtgacatcgaagccatggcgactcaaggcaccaaa

SEQ ID NO: 55845 - DNA, 60 bp, Artificial
  Synthetic oligonucleotide
aaaccctctggagcaaaacaaatgatgccggctcagaccgagtgatggtatcacctctgg

SEQ ID NO: 55846 - DNA, 60 bp, Artificial
  Synthetic oligonucleotide
atcactttccatttcagtagggagttctacttatcaaaacaactttgtgcctgtggtggg

SEQ ID NO: 55847 - DNA, 60 bp, Artificial
  Synthetic oligonucleotide
gtatgggacccaatcgctttccatttcagtggggagttctacttatcaaaacaactttgt

SEQ ID NO: 55848 - DNA, 55 bp, Artificial
  Synthetic oligonucleotide
tttcagtagggagttctacttatcaaaacaactttgtgcctgtggtgggagcaag

SEQ ID NO: 55849 - DNA, 60 bp, Artificial
  Synthetic oligonucleotide
ctatttcggtagggagttctacttatcaaaacaactttgtgccagtagtgggagcaagac

SEQ ID NO: 55850 - DNA, 60 bp, Artificial
  Synthetic oligonucleotide
ccaacactgtgtcaagctttcaggtagactgctttctttggcatatccgcaaacgatttg

SEQ ID NO: 55851 - DNA, 60 bp, Artificial
  Synthetic oligonucleotide
ccaacactgtgtcaagctttcaggtagactgctttctttggcacgtccgcaaaagatttg

SEQ ID NO: 55852 - DNA, 60 bp, Artificial
  Synthetic oligonucleotide
tgaaagatgagtcttctaaccgaggtcgaaacgtacgttctctctatcatcccgtcaggc

SEQ ID NO: 55853 - DNA, 60 bp, Artificial
  Synthetic oligonucleotide
atgtagataatcactcaccgagtgacatccacatcatggcgtctcaaggcaccaaacgat

SEQ ID NO: 55854 - DNA, 60 bp, Artificial
  Synthetic oligonucleotide
ggagcccagggtgtgaccatttgaatggtgcagaatgggacgttttcatagagaggccca

SEQ ID NO: 55855 - DNA, 60 bp, Artificial
  Synthetic oligonucleotide
atcatcaatggagcattggggagcccagggtgtgaccatttgaatggtgcagaatgggac

SEQ ID NO: 55856 - DNA, 60 bp, Artificial
  Synthetic oligonucleotide
catcaatggagcattggggagcccagggtgtgaccatttgaatggtgcagaatgggacgt

SEQ ID NO: 55857 - DNA, 60 bp, Artificial
  Synthetic oligonucleotide
cccaccgctgtggacacttgttatccatttgatgtaccagattatcagagcctacggagc

SEQ ID NO: 55858 - DNA, 60 bp, Artificial
  Synthetic oligonucleotide
gatctgttccaccattgaagagctcagacggcaaaaatagtgaatttagcttgtccttca

SEQ ID NO: 55859 - DNA, 56 bp, Artificial
  Synthetic oligonucleotide
gaggacttgaatggaatgataacacagttcgagtctctgaaactctacagagattc

SEQ ID NO: 55860 - DNA, 60 bp, Artificial
  Synthetic oligonucleotide
atcgggggacttgaatggaatgataacacagttcgagtctctgaaactctacagagattc

SEQ ID NO: 55861 - DNA, 60 bp, Artificial
  Synthetic oligonucleotide
gacaccataacatttgaagccactgggaatttgatagcaccatggtatgctttcgcactg

SEQ ID NO: 55862 - DNA, 60 bp, Artificial
  Synthetic oligonucleotide
gataccataacatttgaagccactgggaatttgatagcaccatggtatgctttcgcactg

SEQ ID NO: 55863 - DNA, 60 bp, Artificial
  Synthetic oligonucleotide
ccatatggccataatcaagaaatacacatcaggaagacaagagaagaaccccgcacttag

SEQ ID NO: 55864 - DNA, 60 bp, Artificial
  Synthetic oligonucleotide
accatatggccataatcaagaaatacacatcaggaagacaagagaagaaccccgcactta

SEQ ID NO: 55865 - DNA, 60 bp, Artificial
  Synthetic oligonucleotide
agtctctgaaactctacagagattcgcttggagaagcagtaatgagaatgggagacctcc

SEQ ID NO: 55866 - DNA, 60 bp, Artificial
  Synthetic oligonucleotide
caatgaactgagcaaccttgcgaaaggagagaaggctaatgtgctaattgggcaaggaga

SEQ ID NO: 55867 - DNA, 60 bp, Artificial
  Synthetic oligonucleotide
aacataatggattccaacactgtgtcaagctttcaggtagactgctttctttggcatgtc

SEQ ID NO: 55868 - DNA, 60 bp, Artificial
  Synthetic oligonucleotide
aaacataatggattccaacactgtgtcaagctttcaggtagactgctttctttggcatgt

SEQ ID NO: 55869 - DNA, 57 bp, Artificial
  Synthetic oligonucleotide
agaatgccactgaaatcagagcatctgttgggagaatggttggtggaatcggaagat

SEQ ID NO: 55870 - DNA, 60 bp, Artificial
  Synthetic oligonucleotide
agaatgccactgaaatcagagcatctgttgggagaatggttggtggaatcggaagattct

SEQ ID NO: 55871 - DNA, 60 bp, Artificial
  Synthetic oligonucleotide
tatcccgtctattcaatctagaggtctgtttggagccattgctggttttattgaaggggg

SEQ ID NO: 55872 - DNA, 59 bp, Artificial
  Synthetic oligonucleotide
tatcccgtctattcaatctagaggtctgtttggagccattgctggttttattgaagggg

SEQ ID NO: 55873 - DNA, 60 bp, Artificial
  Synthetic oligonucleotide
ttcctgttaccctgataccggcaaagtgatgtgtgtgtgcagagacaactggcatggttc

SEQ ID NO: 55874 - DNA, 60 bp, Artificial
  Synthetic oligonucleotide
gcacctgggtaaaggacacaacttcagtgatattaaccggcaattcatctctttgtccca

SEQ ID NO: 55875 - DNA, 60 bp, Artificial
  Synthetic oligonucleotide
agttcattggtactgttagtctccctgggggcaatcagtttctggatgtgctccaatggg

SEQ ID NO: 55876 - DNA, 60 bp, Artificial
  Synthetic oligonucleotide
cacactgacaagggttcaatttctacaactaaaccctttcagaacatctcgagaatatca

SEQ ID NO: 55877 - DNA, 60 bp, Artificial
  Synthetic oligonucleotide
caaatcagaagataatatgcatatcagcaacaggaatgacactatccgtagtaagtctgc

SEQ ID NO: 55878 - DNA, 60 bp, Artificial
  Synthetic oligonucleotide
cgtcaagagtaccaaattaaggatggttacaggactaagaaacatcccatctatccagtc

SEQ ID NO: 55879 - DNA, 60 bp, Artificial
  Synthetic oligonucleotide
cgtcaagagcaccaaattaaggatggttacaggactaagaaacatcccatctatccagtc

SEQ ID NO: 55880 - DNA, 60 bp, Artificial
  Synthetic oligonucleotide
ttttaggatttgtgttcacactcaccgtgcccagtgagcgaggactgcagcgtagacgct

SEQ ID NO: 55881 - DNA, 60 bp, Artificial
  Synthetic oligonucleotide
cacaccgacaagggttcaatctctacaactaaaccctttcaaaacatctcgagaatatca

SEQ ID NO: 55882 - DNA, 60 bp, Artificial
  Synthetic oligonucleotide
cgaggaggcattaagacagaaaatcatggaaagtggagggattgacaagataagcactgg

SEQ ID NO: 55883 - DNA, 61 bp, Artificial
  Synthetic oligonucleotide
gacacactatgtataggttaccatgcaaataattcaactgacactgttgatacaatactag

SEQ ID NO: 55884 - DNA, 60 bp, Artificial
  Synthetic oligonucleotide
agacacactatgtataggttaccatgcaaataattcaactgacactgttgatacaatact

SEQ ID NO: 55885 - DNA, 60 bp, Artificial
  Synthetic oligonucleotide
cagacacactatgtataggttaccatgcaaataattcaactgacactgttgacacagtac

SEQ ID NO: 55886 - DNA, 60 bp, Artificial
  Synthetic oligonucleotide
gtgcatgcgtgaatggttcgtgctttactgtaatgaccgatggaccaagtaatgggcagg

SEQ ID NO: 55887 - DNA, 60 bp, Artificial
  Synthetic oligonucleotide
cctctaatggagcaaatggggtaaaagggttttcgtttaaatacggcaatggtgtttgga

SEQ ID NO: 55888 - DNA, 60 bp, Artificial
  Synthetic oligonucleotide
agagccattcatctcatgctcccacttggaatgcagaaccttcttcttgactcaaggggc

SEQ ID NO: 55889 - DNA, 60 bp, Artificial
  Synthetic oligonucleotide
agagtctgaatgtgcatgcgtgaatggttcttgctttactgtaatgaccgatggaccaag

SEQ ID NO: 55890 - DNA, 60 bp, Artificial
  Synthetic oligonucleotide
ctagttcaaggagcggttttgagatgatttgggatccaaacggatggaccaaaacagacg

SEQ ID NO: 55891 - DNA, 60 bp, Artificial
  Synthetic oligonucleotide
attttgttgctgaccaggcagtagtttcagtgaaattagcgggcaattcctctctctgcc

SEQ ID NO: 55892 - DNA, 60 bp, Artificial
  Synthetic oligonucleotide
aaggattttcgtttaaatacggcaatggtgtttggatagggagaactaaaagcactagtt

SEQ ID NO: 55893 - DNA, 60 bp, Artificial
  Synthetic oligonucleotide
attttgttgctgaacaggcagtagtttcagtgaaattagcgggcaattcctctctctgcc

SEQ ID NO: 55894 - DNA, 60 bp, Artificial
  Synthetic oligonucleotide
ttgttgctgaacaggcagtagtttcagtgaaattagcgggcaattcctctctctgccctg

SEQ ID NO: 55895 - DNA, 60 bp, Artificial
  Synthetic oligonucleotide
aattttgttgctgaccaggcagtagtttcagtgaaattagcgggcaattcctctctctgc

SEQ ID NO: 55896 - DNA, 60 bp, Artificial
  Synthetic oligonucleotide
agcggttttgagatgatttgggatccaaacggatggaccggaacagacaataatttctca

SEQ ID NO: 55897 - DNA, 60 bp, Artificial
  Synthetic oligonucleotide
agcactagttcaaggagcggttttgagatgatttgggatccaaacggatggaccaaaaca

SEQ ID NO: 55898 - DNA, 60 bp, Artificial
  Synthetic oligonucleotide
gagcggctttgagatgatttgggatccaaacggatggaccggaacagactataactactc

SEQ ID NO: 55899 - DNA, 60 bp, Artificial
  Synthetic oligonucleotide
cggttttgagatgatttgggatccaaacggatggaccggaacagacaataatttctcagc

SEQ ID NO: 55900 - DNA, 60 bp, Artificial
  Synthetic oligonucleotide
gcggctttgagatgatttgggatccaaacggatggaccggaacagactataactactcag

SEQ ID NO: 55901 - DNA, 60 bp, Artificial
  Synthetic oligonucleotide
tatagcgggagttttgttcagcatccagaactgaccggactggattgtatgagaccttgc

SEQ ID NO: 55902 - DNA, 60 bp, Artificial
  Synthetic oligonucleotide
gcaagatatcgtaggaataactgattggtcaggatatagtgggagttttgttcagcatcc

SEQ ID NO: 55903 - DNA, 60 bp, Artificial
  Synthetic oligonucleotide
atggttcttctaaccgaggtcgaaacgtacgttctctctatcatcccatcaggccccctc

SEQ ID NO: 55904 - DNA, 53 bp, Artificial
  Synthetic oligonucleotide
atctgttccaccattgaagagctcagacggcagaaatagtgaatttagcttgt

SEQ ID NO: 55905 - DNA, 60 bp, Artificial
  Synthetic oligonucleotide
caatcagcttctggatgtgttctaatgggtctttgcagtgcagaatatgcatctgagatt

SEQ ID NO: 55906 - DNA, 60 bp, Artificial
  Synthetic oligonucleotide
caatcagcttctggatgtgttctaatgggtctttgcagtgcagaatatgcatctgagatc

SEQ ID NO: 55907 - DNA, 54 bp, Artificial
  Synthetic oligonucleotide
gccaaagaggcacaggatgtaatcatggaagttgttttcccaaatgaagtgggg

SEQ ID NO: 55908 - DNA, 60 bp, Artificial
  Synthetic oligonucleotide
caatgattatgagggacgactgatccagaacagcttaacaatagagagaatggtgctctc

SEQ ID NO: 55909 - DNA, 60 bp, Artificial
  Synthetic oligonucleotide
ctatatgaagcaattgaggagtgcctgattaatgatccctgggttttgcttaatgcatct

SEQ ID NO: 55910 - DNA, 60 bp, Artificial
  Synthetic oligonucleotide
cagtgaaacaggatgttgtggcaatgactgattggtcagggtacagcggaagtttcgttc

SEQ ID NO: 55911 - DNA, 55 bp, Artificial
  Synthetic oligonucleotide
cgtggccatggtattttcacaagaggattgcatgatcaaggcagttcggggtgat

SEQ ID NO: 55912 - DNA, 60 bp, Artificial
  Synthetic oligonucleotide
ctattgcctctgtgcctgcttcacgctacctaactgacatgactcttgaagagatgtcaa

SEQ ID NO: 55913 - DNA, 60 bp, Artificial
  Synthetic oligonucleotide
tggtaatgaaacgaaaacgggactctagcatacttactgacagccagacagcgaccaaaa

SEQ ID NO: 55914 - DNA, 60 bp, Artificial
  Synthetic oligonucleotide
gtagtgttggtaatgaaacgaaaacgggactctagcatacttactgacagccagacagcg

SEQ ID NO: 55915 - DNA, 60 bp, Artificial
  Synthetic oligonucleotide
gacgactaattcaaaatagcataacaatagagagaatggtgctctctgcttttgatgaga

SEQ ID NO: 55916 - DNA, 52 bp, Artificial
  Synthetic oligonucleotide
acgctcaccgtgcccagtgagcgaggactgcagcgtagacgttttgtccaaa

SEQ ID NO: 55917 - DNA, 60 bp, Artificial
  Synthetic oligonucleotide
ccagccaagagcatggaatatgatgctgttgctaccacgcattcctggatccctaagagg

SEQ ID NO: 55918 - DNA, 60 bp, Artificial
  Synthetic oligonucleotide
ccaacactgtgtcaagctttcaggtagactgctttctttggcatgtccgcaagcgaattg

SEQ ID NO: 55919 - DNA, 60 bp, Artificial
  Synthetic oligonucleotide
cagttgcacataagtcttgcctgcctgcttgtgtgtatgggcttgcagtggcaagtgggc

SEQ ID NO: 55920 - DNA, 60 bp, Artificial
  Synthetic oligonucleotide
cccgaattgatgcacggattgatttcgaatctggaaggataaagaaagaggaattcgctg

SEQ ID NO: 55921 - DNA, 60 bp, Artificial
  Synthetic oligonucleotide
tcaagagcccgaattgatgcacggattgatttcgaatctggaaggataaagaaagaggaa

SEQ ID NO: 55922 - DNA, 60 bp, Artificial
  Synthetic oligonucleotide
caactattgcttgaagtggaacaagagataagaactttctcgtttcagcttatctgataa

SEQ ID NO: 55923 - DNA, 60 bp, Artificial
  Synthetic oligonucleotide
cggtagggagttctacttatcaaaacaactttgtgccagtagtgggagcaagaccacaag

SEQ ID NO: 55924 - DNA, 60 bp, Artificial
  Synthetic oligonucleotide
tcaaagggaaattccaaacagcagcacaacgagcaatgatggaccaggtgagagaaagcc

SEQ ID NO: 55925 - DNA, 60 bp, Artificial
  Synthetic oligonucleotide
tccaaacagcagcacaacgagcaatgatggaccaagtgagagaaggccggaatcctggga

SEQ ID NO: 55926 - DNA, 60 bp, Artificial
  Synthetic oligonucleotide
ccctaagaggaagaggcagcactcttggtctggacatcgaaacagccacccgtgctggaa

SEQ ID NO: 55927 - DNA, 60 bp, Artificial
  Synthetic oligonucleotide
gtctctaagaggaagaggcagcactcttggtctggacatcgaaacgtccactcgtgctgg

SEQ ID NO: 55928 - DNA, 60 bp, Artificial
  Synthetic oligonucleotide
aagaagatggaaaagggtgctttgaaatatatcacaaatgcgacgacaactgcatggaaa

SEQ ID NO: 55929 - DNA, 60 bp, Artificial
  Synthetic oligonucleotide
aaatgcagaagaagatggaaaagggtgctttgaaatatatcacaaatgcgacgacagctg

SEQ ID NO: 55930 - DNA, 60 bp, Artificial
  Synthetic oligonucleotide
gaagcaactaaggcaaaatgcagaagaagatggaaaagggtgctttgaaatatatcacaa

SEQ ID NO: 55931 - DNA, 60 bp, Artificial
  Synthetic oligonucleotide
aatgctgaatctatatgagagggtgaggaagcaactaaggcaaaatgcagaagaagatgg

SEQ ID NO: 55932 - DNA, 60 bp, Artificial
  Synthetic oligonucleotide
gcatcagaaacaacacctatgaccatacacaatatagagaagaggcactcctgaacagac

SEQ ID NO: 55933 - DNA, 60 bp, Artificial
  Synthetic oligonucleotide
ggaaagcatcagaaacaacacctatgaccatacacaatatagagaagaggcactcctgaa

SEQ ID NO: 55934 - DNA, 60 bp, Artificial
  Synthetic oligonucleotide
ggagttgatcagaggcaggccaaaagagagtagtgtattgtggacatccaatagtatggt

SEQ ID NO: 55935 - DNA, 60 bp, Artificial
  Synthetic oligonucleotide
ttgagccctgggatgatgatgggcatgttcaacatgctaagtacagttttaggtgtctca

SEQ ID NO: 55936 - DNA, 60 bp, Artificial
  Synthetic oligonucleotide
gaaccctgccctcagaatgaaatggatgatggcaatgaaatacccaattacggcagacaa

SEQ ID NO: 55937 - DNA, 60 bp, Artificial
  Synthetic oligonucleotide
ccctgccctcagaatgaaatggatgatggcaatgaaatacccaattacggcagacaagag

SEQ ID NO: 55938 - DNA, 60 bp, Artificial
  Synthetic oligonucleotide
cccagcgcagggaaagatcctaagaaaactggaggacccatctacaggagagtagatgga

SEQ ID NO: 55939 - DNA, 60 bp, Artificial
  Synthetic oligonucleotide
ttctgagaggatcagtggctcataagtcctgcctgcctgcttgtgtgtatggacttgctg

SEQ ID NO: 55940 - DNA, 60 bp, Artificial
  Synthetic oligonucleotide
ttgagtcctggaatgatgatgggcatgttcaacatgttaagtacagttttaggagtctca

SEQ ID NO: 55941 - DNA, 60 bp, Artificial
  Synthetic oligonucleotide
gccatgggacaggaacaggatacaccatggacacagtcaacagaacacaccaatattcag

SEQ ID NO: 55942 - DNA, 60 bp, Artificial
  Synthetic oligonucleotide
gttcgagtctctgaaactctacagagattcgcttggagaagctgtaatgaggatgggaga

SEQ ID NO: 55943 - DNA, 60 bp, Artificial
  Synthetic oligonucleotide
cagttcgagtctctgaaactctacagagattcgcttggagaagcattaatgaggacagga

SEQ ID NO: 55944 - DNA, 60 bp, Artificial
  Synthetic oligonucleotide
ggggtcggcatgcaaatgggactatacatgacagaagcccatttagggcattaataagtt

SEQ ID NO: 55945 - DNA, 60 bp, Artificial
  Synthetic oligonucleotide
agtgactatgaaggaagactgatccaaaacagcataacaatagagagaatggttctctcg

SEQ ID NO: 55946 - DNA, 60 bp, Artificial
  Synthetic oligonucleotide
gaatatacatccagtcacaattggagaatgtccaaaatatgtcaaaagcacaaaattgag

SEQ ID NO: 55947 - DNA, 60 bp, Artificial
  Synthetic oligonucleotide
atacatccagtcacaattggagaatgtccaaaatatgtcaaaagcacaaaattgagaatg

SEQ ID NO: 55948 - DNA, 60 bp, Artificial
  Synthetic oligonucleotide
aaaggactctggatttccatgactcaaatgtaaagaacctgtatgagaaagcaagaagcc

SEQ ID NO: 55949 - DNA, 60 bp, Artificial
  Synthetic oligonucleotide
ctactgcttgaggtggagcaagagataagaactttctcgtttcagcttatttaatgataa

SEQ ID NO: 55950 - DNA, 56 bp, Artificial
  Synthetic oligonucleotide
tacttgaagtggagcaagagataagaactttctcgtttcagcttatttaatgataa

SEQ ID NO: 55951 - DNA, 60 bp, Artificial
  Synthetic oligonucleotide
gggagaatggttggaggaattggaagattctacatacagatgtgcactgaactccaactc

SEQ ID NO: 55952 - DNA, 60 bp, Artificial
  Synthetic oligonucleotide
attggaagattctacatacagatgtgcactgaaatcaaactcagtgactatgaagggagg

SEQ ID NO: 55953 - DNA, 60 bp, Artificial
  Synthetic oligonucleotide
atcaattcagctggaactactaaagcatgcatgaggaacggagggaacagcttctatgca

SEQ ID NO: 55954 - DNA, 57 bp, Artificial
  Synthetic oligonucleotide
cttcctttgacatgagtaatgaaggatcttatttcttcggagacaatgcagaggaat

SEQ ID NO: 55955 - DNA, 60 bp, Artificial
  Synthetic oligonucleotide
acatccagtcacaattggagaatgtccaaaatatgtcaaaagcaccaaattgagaatggc

SEQ ID NO: 55956 - DNA, 60 bp, Artificial
  Synthetic oligonucleotide
caccagtctacgattgtaatacggcttgtcaaacacccaaaggtgctataaacaccagtc

SEQ ID NO: 55957 - DNA, 60 bp, Artificial
  Synthetic oligonucleotide
gacttgtcaaacacccaaaggtgctataaacactagcctcccatttcagaatgtacatcc

SEQ ID NO: 55958 - DNA, 60 bp, Artificial
  Synthetic oligonucleotide
aaagaatgtgcaatattctcaaaggaaagtttcagacagctgcccagagggcaatgatgg

SEQ ID NO: 55959 - DNA, 60 bp, Artificial
  Synthetic oligonucleotide
cgcgggccagatcagtgtgcaacctacattctcagtgcaacggaatctcccttttgaaag

SEQ ID NO: 55960 - DNA, 60 bp, Artificial
  Synthetic oligonucleotide
tcaaaggaaagtttcagacagcttcccagagggcaatgatggatcaagtgagagaaagtc

SEQ ID NO: 55961 - DNA, 60 bp, Artificial
  Synthetic oligonucleotide
gaatgtgcaatattctcaaaggaaagtttcagacagctgcccagagggcaatgatggatc

SEQ ID NO: 55962 - DNA, 60 bp, Artificial
  Synthetic oligonucleotide
ccggccattattaatagatggaactgcatcattgagtcctggaatgatgatgggcatgtt

SEQ ID NO: 55963 - DNA, 60 bp, Artificial
  Synthetic oligonucleotide
gagggctatatgaagcaattgaggagtgcctgattaatgatccctgggttttgcttaatg

SEQ ID NO: 55964 - DNA, 60 bp, Artificial
  Synthetic oligonucleotide
cttggaggactatatgaagcaattgaggagtgcctgattaatgatccctgggttttgctt

SEQ ID NO: 55965 - DNA, 60 bp, Artificial
  Synthetic oligonucleotide
ggcacagattgaaaatgacagagaatagttttgagcaaataacatttatgcaagccttac

SEQ ID NO: 55966 - DNA, 60 bp, Artificial
  Synthetic oligonucleotide
ataggctaccatgcgaacaactcaaccgacactgttgacacagtacttgagaagaacgtg

SEQ ID NO: 55967 - DNA, 60 bp, Artificial
  Synthetic oligonucleotide
ttgagtcctggaatgatgatgggcatgttcaatatgctaagtacagttttgggagtctca

SEQ ID NO: 55968 - DNA, 56 bp, Artificial
  Synthetic oligonucleotide
gtgccaaagaggcacaggatgtaatcatggaagttgttttcccaaatgaagtgggg

SEQ ID NO: 55969 - DNA, 60 bp, Artificial
  Synthetic oligonucleotide
gtgccaaagaggcacaggatgtaatcatggaagttgttttcccaaatgaagtgggggcca

SEQ ID NO: 55970 - DNA, 60 bp, Artificial
  Synthetic oligonucleotide
cagataggatacatatgcagtggggttttcggtgataacccgcgttctaatgatgggaaa

SEQ ID NO: 55971 - DNA, 60 bp, Artificial
  Synthetic oligonucleotide
ctatgaagcagggtattatagcattaactgattggtcaggatacagtggaagttttgttc

SEQ ID NO: 55972 - DNA, 60 bp, Artificial
  Synthetic oligonucleotide
gccttgtttctgggtagaattaatcagaggacaacccaaagagagcacaatctggactag

SEQ ID NO: 55973 - DNA, 60 bp, Artificial
  Synthetic oligonucleotide
aagctccatctccgtataattcaaggttcgaatcagttgcttggtcagcgagtgcatgcc

SEQ ID NO: 55974 - DNA, 60 bp, Artificial
  Synthetic oligonucleotide
gcaatatcaacattgctgctggacaggatgtgacttcaataatactagccggcaattcct

SEQ ID NO: 55975 - DNA, 60 bp, Artificial
  Synthetic oligonucleotide
ttgtcataagagaaccattcatttcatgctctcatttggaatgcagaactttttttctga

SEQ ID NO: 55976 - DNA, 60 bp, Artificial
  Synthetic oligonucleotide
ggacaggagtccttatagaaccttaatgagctgccccatcggtgaagctccatctccgta

SEQ ID NO: 55977 - DNA, 60 bp, Artificial
  Synthetic oligonucleotide
caattcagaccggggaaaaaaaccactctgagaaatgcaaccaaaatgtcattacatatg

SEQ ID NO: 55978 - DNA, 60 bp, Artificial
  Synthetic oligonucleotide
ctgatggcccaagcaatgagcaagcctcatacaaaatattcaaaatggagaaagggaaga

SEQ ID NO: 55979 - DNA, 60 bp, Artificial
  Synthetic oligonucleotide
gggtcctcatcggaggacttgaatggaatgataacacagttcgaatctctgaaactctac

SEQ ID NO: 55980 - DNA, 60 bp, Artificial
  Synthetic oligonucleotide
gatgcagacacaatatgtataggctaccatgcgaacaactcaaccgacactgttgacaca

SEQ ID NO: 55981 - DNA, 60 bp, Artificial
  Synthetic oligonucleotide
ttcgatcttggagggctatatgaagcaatcgaggagtgcctgattaatgatccctgggtt

SEQ ID NO: 55982 - DNA, 60 bp, Artificial
  Synthetic oligonucleotide
cttgcaacagggatgaggaacattcctgaaaaggcatcaagagggctttttggagcaata

SEQ ID NO: 55983 - DNA, 60 bp, Artificial
  Synthetic oligonucleotide
cagagtaccagagtctgagaagcatactcgccaacaatgggaaattcgaattcattgccg

SEQ ID NO: 55984 - DNA, 60 bp, Artificial
  Synthetic oligonucleotide
ggaaaagtatgttgaggacacaaagattgatttatggtcatataatgcagagctattagt

SEQ ID NO: 55985 - DNA, 60 bp, Artificial
  Synthetic oligonucleotide
ggaatctaattgccccgagaggccattacaagttaaacaatcagaagaagagcacaattc

SEQ ID NO: 55986 - DNA, 60 bp, Artificial
  Synthetic oligonucleotide
cactgcacaggaactggtagaatcacaaaatctcccggaactatgtcctagccctctgag

SEQ ID NO: 55987 - DNA, 60 bp, Artificial
  Synthetic oligonucleotide
cgctctagaaaaccaacacactatagacgtgactgattcagaaatgaacaaactctttga

SEQ ID NO: 55988 - DNA, 60 bp, Artificial
  Synthetic oligonucleotide
attgccgaagaattccaatggaacacggtgaagcaaaatgggaaatccggagcctgcaag

SEQ ID NO: 55989 - DNA, 60 bp, Artificial
  Synthetic oligonucleotide
tgcaattcccataggctcatgtgtcagcaaatgtcacacagacaaaggttctctctctac

SEQ ID NO: 55990 - DNA, 60 bp, Artificial
  Synthetic oligonucleotide
gccctctgagactagttgacggccagacctgtgatatcatcaatggagcattggggagcc

SEQ ID NO: 55991 - DNA, 60 bp, Artificial
  Synthetic oligonucleotide
gtctaccaaaactagtcaaacaagtgtagtgcctaacattggcagcagacccttggtgag

SEQ ID NO: 55992 - DNA, 50 bp, Artificial
  Synthetic oligonucleotide
acaggctaaactggctggtgaagtcagatgggaatgcgtacccccttcag

SEQ ID NO: 55993 - DNA, 60 bp, Artificial
  Synthetic oligonucleotide
gagaggcccaatgcagtagacacttgctatccatttgatgtgccagagtaccagagtctg

SEQ ID NO: 55994 - DNA, 60 bp, Artificial
  Synthetic oligonucleotide
atgctatcaattgtgattttgtttctgctcatagcagagaactcttcccaaaactacaca

SEQ ID NO: 55995 - DNA, 60 bp, Artificial
  Synthetic oligonucleotide
gatgaagcaatcaacaatcgattccaaatccagggagtcaaattgacccagggatataag

SEQ ID NO: 55996 - DNA, 60 bp, Artificial
  Synthetic oligonucleotide
ggacatcatgctgtggccaatgggactatggtaaagaccctagccgatgatcaagtggaa

SEQ ID NO: 55997 - DNA, 60 bp, Artificial
  Synthetic oligonucleotide
actgcattgaaagtattcggaatgggacttatgatcatgatatttatagagatgaagcaa

SEQ ID NO: 55998 - DNA, 60 bp, Artificial
  Synthetic oligonucleotide
gctttttgctcgtagcactacttttagccttcattttgtgggcttgtcagaacggaaaca

SEQ ID NO: 55999 - DNA, 60 bp, Artificial
  Synthetic oligonucleotide
taacccttgcttttatgtggaattgatcagaggcaggccaaaagagagtagtgtattgtg

SEQ ID NO: 56000 - DNA, 60 bp, Artificial
  Synthetic oligonucleotide
ctggactagtgggagcagcatttctttttgtggcgtgaatagtgatactgtagactggtc

SEQ ID NO: 56001 - DNA, 60 bp, Artificial
  Synthetic oligonucleotide
atctctaagaggaagaggcagcactcttggtctggacatcgaaacggccactcgtgctgg

SEQ ID NO: 56002 - DNA, 60 bp, Artificial
  Synthetic oligonucleotide
tggccaaatcatgagacaactaaaggtgttacagctgcatgctcttactctggagccagc

SEQ ID NO: 56003 - DNA, 60 bp, Artificial
  Synthetic oligonucleotide
gagatcagagcatctgttgggagaatggttggtggaatcggaaggttctacatacagatg

SEQ ID NO: 56004 - DNA, 60 bp, Artificial
  Synthetic oligonucleotide
gatgcaattctcctcactgactgtgaatgtgagaggatcaggaatgaggatactggtaag

SEQ ID NO: 56005 - DNA, 60 bp, Artificial
  Synthetic oligonucleotide
atactcagggagtttcattgactactgggatgaaagcagtgagtgctacaacccctgttt

SEQ ID NO: 56006 - DNA, 60 bp, Artificial
  Synthetic oligonucleotide
atactcaggaagtttcattgactactgggatgaaagcagtgagtgctacaacccctgttt

SEQ ID NO: 56007 - DNA, 60 bp, Artificial
  Synthetic oligonucleotide
acccctgtttctatgttgaattaataagaggaaggccagaagaagccaaatatgtttggt

SEQ ID NO: 56008 - DNA, 60 bp, Artificial
  Synthetic oligonucleotide
cagggagtttcattgactactgggatgaaagcagtgagtgctacaacccctgtttctacg

SEQ ID NO: 56009 - DNA, 60 bp, Artificial
  Synthetic oligonucleotide
caggaagtttcattgactactgggatgaaagcagtgagtgctacaacccctgtttctatg

SEQ ID NO: 56010 - DNA, 60 bp, Artificial
  Synthetic oligonucleotide
caggaagtttcattgactactgggatgaaagcagtgcgtgctacaacccctgtttctatg

SEQ ID NO: 56011 - DNA, 60 bp, Artificial
  Synthetic oligonucleotide
cagggagtttcattgactactgggatgaaagcagtgagtgctacaacccctgtttctatg

SEQ ID NO: 56012 - DNA, 60 bp, Artificial
  Synthetic oligonucleotide
cagggagtttcattgactactgggatgaaagcagtgagtgctacaacccctgcttctatg

SEQ ID NO: 56013 - DNA, 60 bp, Artificial
  Synthetic oligonucleotide
atactcagggagtttcattgactactgggatgaaagcagtgagtgctacaacccctgctt

SEQ ID NO: 56014 - DNA, 60 bp, Artificial
  Synthetic oligonucleotide
atactcaggaagtttcattgactactgggatgaaagcagtgcgtgctacaacccctgttt

SEQ ID NO: 56015 - DNA, 60 bp, Artificial
  Synthetic oligonucleotide
cttgttcgcaccggaatggatcccaggatgtgctctctgatgcaaggttcaactctccct

SEQ ID NO: 56016 - DNA, 60 bp, Artificial
  Synthetic oligonucleotide
aagatgagtcttctaaccgaggtcgaaacgtacgttctctctattgtcccgtcaggcccc

SEQ ID NO: 56017 - DNA, 60 bp, Artificial
  Synthetic oligonucleotide
aagatgagtcttctaaccgaggtcgaaacgtacgttctctctatcgttccgtcaggcccc

SEQ ID NO: 56018 - DNA, 60 bp, Artificial
  Synthetic oligonucleotide
ctgaagcaataattgtggccatggtattttcacaagaggattgcatgatcaaggcagttc

SEQ ID NO: 56019 - DNA, 60 bp, Artificial
  Synthetic oligonucleotide
aagcaataattgtggccatggtattttcacaagaggattgcatgatcaaggcagttcgag

SEQ ID NO: 56020 - DNA, 60 bp, Artificial
  Synthetic oligonucleotide
ggaccaaggagacaccataacgtttgaagccactgggaacttaatagcaccatggtacgc

SEQ ID NO: 56021 - DNA, 60 bp, Artificial
  Synthetic oligonucleotide
gatcaaggagacaccataacgtttgaagccactgggaacttaatagcaccatggtacgcc

SEQ ID NO: 56022 - DNA, 60 bp, Artificial
  Synthetic oligonucleotide
gatcaaggagacaccataacgtttgaagccactgggaacttaatagcaccatggtacgca

SEQ ID NO: 56023 - DNA, 60 bp, Artificial
  Synthetic oligonucleotide
caggcaatcttcaaacattgaaaataagagtacatgaagggtatgaagagttcacaatgg

SEQ ID NO: 56024 - DNA, 60 bp, Artificial
  Synthetic oligonucleotide
cgggcaaccttcaaacattgaaaataagagtacatgaagggtatgaagagttcacaatgg

SEQ ID NO: 56025 - DNA, 60 bp, Artificial
  Synthetic oligonucleotide
actaagcatcaatgaactgagcaaccttgcgaaaggagagaaggctaatgtgctaattgg

SEQ ID NO: 56026 - DNA, 60 bp, Artificial
  Synthetic oligonucleotide
ccatagctggattcatagagaatggctggcaaggcctaattgatgggtggtatgggttca

SEQ ID NO: 56027 - DNA, 60 bp, Artificial
  Synthetic oligonucleotide
gctggattcatagagaatggctggcaaggcctaattgatgggtggtatgggttcagacac

SEQ ID NO: 56028 - DNA, 60 bp, Artificial
  Synthetic oligonucleotide
ggaacacagtcaagcaaaatgggaaatccggggcatgcaaaagagcaaatgtgaatgact

SEQ ID NO: 56029 - DNA, 60 bp, Artificial
  Synthetic oligonucleotide
acgagggatcttatttcttcggagacaatgcagaggaatatgacaattaaagaaaaatac

SEQ ID NO: 56030 - DNA, 60 bp, Artificial
  Synthetic oligonucleotide
ccttcgatctcggaggactatatgaagcaattgaggagtgcctgattaatgatccctggg

SEQ ID NO: 56031 - DNA, 60 bp, Artificial
  Synthetic oligonucleotide
gtaccttcgatcttggaggactatatgaagcaattgaggagtgcctgattaatgatccct

SEQ ID NO: 56032 - DNA, 60 bp, Artificial
  Synthetic oligonucleotide
gtaccttcgatctcggaggactatatgaagcaattgaggagtgcctgattaatgatccct

SEQ ID NO: 56033 - DNA, 53 bp, Artificial
  Synthetic oligonucleotide
caaacagcagcacaacgagcaatgatggaccaagtgagagagagccggaatcc

SEQ ID NO: 56034 - DNA, 55 bp, Artificial
  Synthetic oligonucleotide
tgatgccggatcagaccgagtgatggtatcacctctggctgtgacatggtggaat

SEQ ID NO: 56035 - DNA, 60 bp, Artificial
  Synthetic oligonucleotide
ctgttagtctccctgggggcaatcagtttctggatgtgctccaatgggtctttacagtgc

SEQ ID NO: 56036 - DNA, 60 bp, Artificial
  Synthetic oligonucleotide
tggtgctgttagtctccctgggggcaatcagtttctggatgtgctccaatgggtctttac

SEQ ID NO: 56037 - DNA, 60 bp, Artificial
  Synthetic oligonucleotide
gccaacaactcaaccgacactgttgacacagtacttgagaagaatgtgacagtgacacac

SEQ ID NO: 56038 - DNA, 56 bp, Artificial
  Synthetic oligonucleotide
atgaggggtcttatttcttcggagacaatgcagaggagtatgacaattaaagaaaa

SEQ ID NO: 56039 - DNA, 60 bp, Artificial
  Synthetic oligonucleotide
tgaaatagttgtggcaatgctactatttgctatccatactgtccaaaaaagtaccttgtt

SEQ ID NO: 56040 - DNA, 60 bp, Artificial
  Synthetic oligonucleotide
aatagttgtggcaatgctactatttgctatccatactgtccaaaaaagtaccttgtttct

SEQ ID NO: 56041 - DNA, 60 bp, Artificial
  Synthetic oligonucleotide
ttgaagaagtgagacacaaactgaaggtaacagagaatagttttgagcaaataacattta

SEQ ID NO: 56042 - DNA, 60 bp, Artificial
  Synthetic oligonucleotide
aattgcttctcattgttcaggcacttagggacaacctggaacctggaaccttcgatcttg

SEQ ID NO: 56043 - DNA, 60 bp, Artificial
  Synthetic oligonucleotide
cactgatcttgaggctctcatggaatggctaaagacaagaccaatcctgtcacctctgac

SEQ ID NO: 56044 - DNA, 60 bp, Artificial
  Synthetic oligonucleotide
gatgaatccaaatcagaagataatatgcatctcagcaacaggaatgacactatccgtagt

SEQ ID NO: 56045 - DNA, 60 bp, Artificial
  Synthetic oligonucleotide
caaatcagaagataatatgcatctcagcaacaggaatgacactatccgtagtaagtctac

SEQ ID NO: 56046 - DNA, 60 bp, Artificial
  Synthetic oligonucleotide
caaatcagaagataatatgcatctcagcaacaggaatgacactatccgtagtaagtctgc

SEQ ID NO: 56047 - DNA, 60 bp, Artificial
  Synthetic oligonucleotide
gagcatctgttgggagaatggttggaggaattggaagattctacatacagatgtgcactg

SEQ ID NO: 56048 - DNA, 60 bp, Artificial
  Synthetic oligonucleotide
ggtcagggtatagcggaagtttcgttcaacatcctgagctgacagggctagactgtatga

SEQ ID NO: 56049 - DNA, 60 bp, Artificial
  Synthetic oligonucleotide
cattggagtgacagtgataaagaacaacatgataaacaatgatcttggaccagcaactgc

SEQ ID NO: 56050 - DNA, 60 bp, Artificial
  Synthetic oligonucleotide
gtcttgctatatacatttacagccgcaaatgcagacacactatgtataggttaccatgca

SEQ ID NO: 56051 - DNA, 60 bp, Artificial
  Synthetic oligonucleotide
agtcttgttatgtgcatttgcatctacaaatgcagacacactatgtataggttaccatgc

SEQ ID NO: 56052 - DNA, 60 bp, Artificial
  Synthetic oligonucleotide
aaccatttgaatggatgtcaatccgactttacttttcctgaaagttccagcgcagaatgc

SEQ ID NO: 56053 - DNA, 60 bp, Artificial
  Synthetic oligonucleotide
aaccatttgaatggatgtcaatccgactttacttttcttgaaagttccagcgcaaaatgc

SEQ ID NO: 56054 - DNA, 60 bp, Artificial
  Synthetic oligonucleotide
gccagattatcagagcctacggagtatcttagcaaacaatggaaaatttgagttcattgc

SEQ ID NO: 56055 - DNA, 60 bp, Artificial
  Synthetic oligonucleotide
gttgaattaataagaggaaggccagaagaagccaaatatgtttggtggacgagcaacagc

SEQ ID NO: 56056 - DNA, 60 bp, Artificial
  Synthetic oligonucleotide
agcaacagcttagttgcactgtgtggaagcccagtcccagttgggtccggttccttcccc

SEQ ID NO: 56057 - DNA, 60 bp, Artificial
  Synthetic oligonucleotide
ggcgtctcaaggcaccaaacgatcttatgaacaaatggaaactggtggagaacgccaaaa

SEQ ID NO: 56058 - DNA, 55 bp, Artificial
  Synthetic oligonucleotide
gaatgatcggaatattgcctgacatgaccccaagtactgagatgtcgctgagggg

SEQ ID NO: 56059 - DNA, 60 bp, Artificial
  Synthetic oligonucleotide
gatcagaggcaggccaaaagagagtagtgtattgtggacatccaatagtatagtagcgct

SEQ ID NO: 56060 - DNA, 60 bp, Artificial
  Synthetic oligonucleotide
ggcaggccaaaagagagtagtgtattgtggacatccaatagtatagtagcgctttgtgga

SEQ ID NO: 56061 - DNA, 60 bp, Artificial
  Synthetic oligonucleotide
ccaaaacagcataacaatagagagaatggttctctcagcatttgatgagaggagaaacaa

SEQ ID NO: 56062 - DNA, 60 bp, Artificial
  Synthetic oligonucleotide
ttgagtcctggaatgatgatgggcatgttcaacatgctaagtaccgttttgggagtttcg

SEQ ID NO: 56063 - DNA, 60 bp, Artificial
  Synthetic oligonucleotide
tgtttttgtcataagagaacctttcatatcatgttctcacttggaatgcagaaccttttt

SEQ ID NO: 56064 - DNA, 60 bp, Artificial
  Synthetic oligonucleotide
tctctttgttctatcagtggatgggctatatacacaaaagacaacagcataagaattggt

SEQ ID NO: 56065 - DNA, 56 bp, Artificial
  Synthetic oligonucleotide
tgggctatatacacaaaagacaacagcataagaattggctccaaaggagatgtttt

SEQ ID NO: 56066 - DNA, 60 bp, Artificial
  Synthetic oligonucleotide
cagtggatgggctatatacacaaaagacaacagcataagaattggttccaaaggagatgt

SEQ ID NO: 56067 - DNA, 51 bp, Artificial
  Synthetic oligonucleotide
gtcataagagagcctttcatatcatgttctcacttggaatgcagaaccttt

SEQ ID NO: 56068 - DNA, 60 bp, Artificial
  Synthetic oligonucleotide
taagagagccttttatatcatgttctcacttggaatgcagaaccttttttctgacccaag

SEQ ID NO: 56069 - DNA, 60 bp, Artificial
  Synthetic oligonucleotide
ccgtggatgggcaatatacacaaaagacaacagcataagaattggttccaaaggagatgt

SEQ ID NO: 56070 - DNA, 60 bp, Artificial
  Synthetic oligonucleotide
tgtttttgtcataagagagcctttcatatcatgttctcacttggaatgcagaaccttttt

SEQ ID NO: 56071 - DNA, 60 bp, Artificial
  Synthetic oligonucleotide
tgggctatatacacaaaagacaacagcataagaattggctccaaaggagatgtttttgtc

SEQ ID NO: 56072 - DNA, 51 bp, Artificial
  Synthetic oligonucleotide
gggctatatacacaaaagacaacagcataagaattggttccaaaggagatg

SEQ ID NO: 56073 - DNA, 60 bp, Artificial
  Synthetic oligonucleotide
tgagatgatttgggatcctaatggatggacagataccgacagtgatttctcaatgaaaca

SEQ ID NO: 56074 - DNA, 60 bp, Artificial
  Synthetic oligonucleotide
tttctgacccaaggtgctctattaaatgacaagcattcaaatgggaccattaaggacaga

SEQ ID NO: 56075 - DNA, 60 bp, Artificial
  Synthetic oligonucleotide
gaaccttttttctgacccaaggtgctctattaaatgacaaacattcaaatgggaccgtca

SEQ ID NO: 56076 - DNA, 60 bp, Artificial
  Synthetic oligonucleotide
gaaccttttttctgacccaaggtgctctattaaatgacaaacattcaaatggaaccgtta

SEQ ID NO: 56077 - DNA, 60 bp, Artificial
  Synthetic oligonucleotide
gaatgcagaaccttttttctgacccaaggtgctctattaaatgacaagcattcaaatggg

SEQ ID NO: 56078 - DNA, 60 bp, Artificial
  Synthetic oligonucleotide
catgttctcacttggaatgcagaaccttttttctgacccaaggtgctctattaaatgaca

SEQ ID NO: 56079 - DNA, 60 bp, Artificial
  Synthetic oligonucleotide
gaccggcttcgccgagatcagaagtctctaagaggaagaggcagcactcttggtctggac

SEQ ID NO: 56080 - DNA, 60 bp, Artificial
  Synthetic oligonucleotide
gcagtggggttttcggtgacaatccgcgtcccaaagatggaaaaggcagctgtggtccgg

SEQ ID NO: 56081 - DNA, 60 bp, Artificial
  Synthetic oligonucleotide
gttaccatgcaaataactcaaccgacactgttgacacagtactcgagaagaatgtaaccg

SEQ ID NO: 56082 - DNA, 60 bp, Artificial
  Synthetic oligonucleotide
cccaggggacatgctgggagcagatgtacactccaggaggagaagtgagaaatgatgata

SEQ ID NO: 56083 - DNA, 60 bp, Artificial
  Synthetic oligonucleotide
gacactattggaccaaggagacaccataacgtttgaagccactgggaacttaatagcacc

SEQ ID NO: 56084 - DNA, 60 bp, Artificial
  Synthetic oligonucleotide
ttgggatcctcatcgggggacttgaatggaatgataacacagttcgagtctctgaaattc

SEQ ID NO: 56085 - DNA, 60 bp, Artificial
  Synthetic oligonucleotide
acgctatctaactgacatgactcttgaagagatgtcaagggactggttcatgctcatgcc

SEQ ID NO: 56086 - DNA, 60 bp, Artificial
  Synthetic oligonucleotide
cgctacctaactgacatgactcttgaagagatgtcaagggactggttcatgctcatgccc

SEQ ID NO: 56087 - DNA, 60 bp, Artificial
  Synthetic oligonucleotide
acctaactgacatgactcttgaagagatgtcaagggactggttcatgctcatgcccaagc

SEQ ID NO: 56088 - DNA, 60 bp, Artificial
  Synthetic oligonucleotide
gtctgcctaaaatgggaattgatggatgaggattaccaggggcgtttatgcaacccactg

SEQ ID NO: 56089 - DNA, 60 bp, Artificial
  Synthetic oligonucleotide
gtctgtttaaaatgggaattgatggatgaggattaccaggggcgtttatgcaacccactg

SEQ ID NO: 56090 - DNA, 60 bp, Artificial
  Synthetic oligonucleotide
gggagttgatggatgaggattaccaggggcgtttatgcaacccattgaacccgtttgtca

SEQ ID NO: 56091 - DNA, 60 bp, Artificial
  Synthetic oligonucleotide
ggagttgatggatgaggattaccaggggcgtttatgcaatccattgaacccgtttgtcag

SEQ ID NO: 56092 - DNA, 60 bp, Artificial
  Synthetic oligonucleotide
ggaattgatggatgaggattaccaggggcgtttatgcaacccactgaacccatttgtcag

SEQ ID NO: 56093 - DNA, 60 bp, Artificial
  Synthetic oligonucleotide
ggagttgatggatgaggattaccaggggcgtttatgcaacccattgaacccgtttgtcag

SEQ ID NO: 56094 - DNA, 60 bp, Artificial
  Synthetic oligonucleotide
gaattgatggatgaggattaccaggggcgtttatgcaacccactgaacccatttgtcagc

SEQ ID NO: 56095 - DNA, 60 bp, Artificial
  Synthetic oligonucleotide
cacagagaatagttttgaacaaataacatttatgcaagccttacaactactacttgaagt

SEQ ID NO: 56096 - DNA, 60 bp, Artificial
  Synthetic oligonucleotide
cacggagaatagttttgaacaaataacatttatgcaagccttacaactactacttgaagt

SEQ ID NO: 56097 - DNA, 60 bp, Artificial
  Synthetic oligonucleotide
caacggggactacgcaagactttacatatggggagttcaccatccttcaactgacacaga

SEQ ID NO: 56098 - DNA, 60 bp, Artificial
  Synthetic oligonucleotide
ctcataagtcttgcctgcctgcttgtgtgtatgggcttgctgtggccagtggatacgact

SEQ ID NO: 56099 - DNA, 60 bp, Artificial
  Synthetic oligonucleotide
ctcataagtcttgcctgcctgcttgtgtgtatgggcttgctgtggccagtggatatgact

SEQ ID NO: 56100 - DNA, 60 bp, Artificial
  Synthetic oligonucleotide
agcaaaagcagggtgacaaagacataatggattccaccactgtgtcaagctttcaggtag

SEQ ID NO: 56101 - DNA, 60 bp, Artificial
  Synthetic oligonucleotide
ctactgaaatcagagcatctgttgggagaatggttggaggaattggaagattctacatac

SEQ ID NO: 56102 - DNA, 60 bp, Artificial
  Synthetic oligonucleotide
agaggtctgtttggagccattgctggttttattgaggggggatggacaggaatgatagat

SEQ ID NO: 56103 - DNA, 60 bp, Artificial
  Synthetic oligonucleotide
ccaacacgataacctcgtttcaggtagattgttatctatggcacataagaaagctgctca

SEQ ID NO: 56104 - DNA, 60 bp, Artificial
  Synthetic oligonucleotide
atggattccaacacgataacctcgtttcaggtagattgttatctatggcacataagaaag

SEQ ID NO: 56105 - DNA, 60 bp, Artificial
  Synthetic oligonucleotide
agacacaatatgtataggctaccatgcgaataactcaaccgacactgttgacacagtact

SEQ ID NO: 56106 - DNA, 60 bp, Artificial
  Synthetic oligonucleotide
cgtttatgcaagccttacaactactgcttgaagtggagcaagagataagaactttctcgt

SEQ ID NO: 56107 - DNA, 60 bp, Artificial
  Synthetic oligonucleotide
gaatgtgcaacatcctcaaagggaagttccaaacagcagcacaacgagcaatgatggacc

SEQ ID NO: 56108 - DNA, 60 bp, Artificial
  Synthetic oligonucleotide
ctgtagattggtcttggccagacggtgctgagttgccattcaccattgacaagtagtctg

SEQ ID NO: 56109 - DNA, 60 bp, Artificial
  Synthetic oligonucleotide
agaatgtaacagtaacacactctgttaaccttctagaagacagacataacgggaaactat

SEQ ID NO: 56110 - DNA, 60 bp, Artificial
  Synthetic oligonucleotide
gaatgtaacagtaacacactctgttaaccttctagaagacagacataacggaaaactgtg

SEQ ID NO: 56111 - DNA, 60 bp, Artificial
  Synthetic oligonucleotide
gaatgtaacagtaacacactctgttaaccttctagaagacagacataacgggaaactatg

SEQ ID NO: 56112 - DNA, 60 bp, Artificial
  Synthetic oligonucleotide
gaatgtaacagtaacacactctgttaaccttttagaagacagacataacgggaaactatg

SEQ ID NO: 56113 - DNA, 60 bp, Artificial
  Synthetic oligonucleotide
aaaatgccataagcaccacattcccatatactggagatcctccatacagccatgggacgg

SEQ ID NO: 56114 - DNA, 60 bp, Artificial
  Synthetic oligonucleotide
cgcagaatgccataagcaccacattcccatatactggagatcctccatacagccatggaa

SEQ ID NO: 56115 - DNA, 60 bp, Artificial
  Synthetic oligonucleotide
cttgaaagttccagcacaaaatgccataagcaccacattcccatatactggagatcctcc

SEQ ID NO: 56116 - DNA, 60 bp, Artificial
  Synthetic oligonucleotide
tactcaagcagctatagatcaaataaccgggaaattgaacagactgatagagaagacaaa

SEQ ID NO: 56117 - DNA, 60 bp, Artificial
  Synthetic oligonucleotide
tactcaagcagctatagatcaaataaccgggaaattgaacaggctaatagagaagacaaa

SEQ ID NO: 56118 - DNA, 60 bp, Artificial
  Synthetic oligonucleotide
gcagctatagatcaaataaccgggaaattgaacagactgatagagaagacaaacacggag

SEQ ID NO: 56119 - DNA, 60 bp, Artificial
  Synthetic oligonucleotide
gcagctatagatcaaataaccgggaaattgaacaggctaatagagaagacaaacacggag

SEQ ID NO: 56120 - DNA, 60 bp, Artificial
  Synthetic oligonucleotide
aaaatgcaattgggatcctcatcaaaggacttgaatggaatgataacacagttcgagtct

SEQ ID NO: 56121 - DNA, 56 bp, Artificial
  Synthetic oligonucleotide
atgggcatgttcaacatgctaagtacagttttaggagtttcaatcctaaatctggg

SEQ ID NO: 56122 - DNA, 60 bp, Artificial
  Synthetic oligonucleotide
tgatgggcatgttcaacatgctaagtacagttttgggagtctcgattctaaatctagggc

SEQ ID NO: 56123 - DNA, 60 bp, Artificial
  Synthetic oligonucleotide
tgatgggcatgttcaacatgctaagtacagttttaggagtttcaatcctaaatctgggac

SEQ ID NO: 56124 - DNA, 60 bp, Artificial
  Synthetic oligonucleotide
atgggcatgttcaacatgctaagtacagttttaggagtttcaatcctaaatctgggacaa

SEQ ID NO: 56125 - DNA, 60 bp, Artificial
  Synthetic oligonucleotide
cttaaaagtgccagcacaaaatgctataagcacaactttcccttataccggagaccctcc

SEQ ID NO: 56126 - DNA, 60 bp, Artificial
  Synthetic oligonucleotide
cttaaaagtgccagcacaaaatgctataagcacaacttttccttatactggtgaccctcc

SEQ ID NO: 56127 - DNA, 60 bp, Artificial
  Synthetic oligonucleotide
cttaaaagtgccagcacaaaatgctataagcacaactttcccctatactggagacccccc

SEQ ID NO: 56128 - DNA, 60 bp, Artificial
  Synthetic oligonucleotide
gtctgcttgaaatgggagttgatggatgaggattaccaggggcgtttatgcaatccattg

SEQ ID NO: 56129 - DNA, 60 bp, Artificial
  Synthetic oligonucleotide
aaaagtgccagcacaaaatgctataagcacaacttttccttatactggtgaccctcctta

SEQ ID NO: 56130 - DNA, 60 bp, Artificial
  Synthetic oligonucleotide
caaacaccgaaactggagcaccgcaactcaacccgattgatgggccactgccagaagaca

SEQ ID NO: 56131 - DNA, 60 bp, Artificial
  Synthetic oligonucleotide
ttgtgtattggaagcaatggctttccttgaggaatcccatcctggtatttttgaaaactc

SEQ ID NO: 56132 - DNA, 60 bp, Artificial
  Synthetic oligonucleotide
agttacctaattagggcattaaccctgaacacaatgaccaaagatgctgagagagggaaa

SEQ ID NO: 56133 - DNA, 60 bp, Artificial
  Synthetic oligonucleotide
ccctgaacacaatgaccaaagatgctgagagggggaaactaaaacgtagagcaattgcaa

SEQ ID NO: 56134 - DNA, 60 bp, Artificial
  Synthetic oligonucleotide
gaagtctgcttgaaatgggagttgatggatgaggattaccaggggcgtttatgcaaccca

SEQ ID NO: 56135 - DNA, 60 bp, Artificial
  Synthetic oligonucleotide
gtcgtggcaatgactgattggtcagggtacagcggaagtttcgttcaacatcctgagcta

SEQ ID NO: 56136 - DNA, 60 bp, Artificial
  Synthetic oligonucleotide
ccttcgaccttggagggctatatgaagcaattgaggagtgcctgattaatgatccctggg

SEQ ID NO: 56137 - DNA, 60 bp, Artificial
  Synthetic oligonucleotide
actccaacacgataacctcgttccaggtagattgctatctatggcacataagaaagctgc

SEQ ID NO: 56138 - DNA, 60 bp, Artificial
  Synthetic oligonucleotide
atggactccaacacgataacctcgttccaggtagattgctatctatggcacataagaaag

SEQ ID NO: 56139 - DNA, 60 bp, Artificial
  Synthetic oligonucleotide
ttccaggtagattgctatctatggcacataagaaagctgctcagcatgagagacatgtgt

SEQ ID NO: 56140 - DNA, 60 bp, Artificial
  Synthetic oligonucleotide
gataacctcgttccaggtagattgctatctatggcacataagaaagctgctcagcatgag

SEQ ID NO: 56141 - DNA, 60 bp, Artificial
  Synthetic oligonucleotide
caatgattatgaaggacgactgatccagaacagcttaacaatagagagaatggtgctctc

SEQ ID NO: 56142 - DNA, 60 bp, Artificial
  Synthetic oligonucleotide
caatgattatgagggaagactgatccagaacagcttaacaatagagagaatggtgctctc

SEQ ID NO: 56143 - DNA, 60 bp, Artificial
  Synthetic oligonucleotide
atgtgccagattatcagagcctacggagcatcttagcaaacaatgggaaatttgagttca

SEQ ID NO: 56144 - DNA, 60 bp, Artificial
  Synthetic oligonucleotide
cactatgtggaagcccaatctcagttgggtccggttccttccccgatggggcacaaatcc

SEQ ID NO: 56145 - DNA, 60 bp, Artificial
  Synthetic oligonucleotide
aataagcttctactggactattgtagagcctggagacttgattgtcttcaacacaatagg

SEQ ID NO: 56146 - DNA, 60 bp, Artificial
  Synthetic oligonucleotide
agtgagtttctactggactattgtagagcctggagacttgatagtcttcaacacaatagg

SEQ ID NO: 56147 - DNA, 60 bp, Artificial
  Synthetic oligonucleotide
aataagtttctactggactattgtagagcctggagatttgatagtcttcaatacaatagg

SEQ ID NO: 56148 - DNA, 60 bp, Artificial
  Synthetic oligonucleotide
ggatcctaatggatggacagataccgacagtgatttctcaatgaaacaggatgtcgtggc

SEQ ID NO: 56149 - DNA, 60 bp, Artificial
  Synthetic oligonucleotide
tcaaaaaataataaccattggatcaatcagtatagcaatcggaataattagcctaatgtt

SEQ ID NO: 56150 - DNA, 60 bp, Artificial
  Synthetic oligonucleotide
tgagatgatttgggatcctaatggatggacagataccgacagtgatttctctgtgaaaca

SEQ ID NO: 56151 - DNA, 60 bp, Artificial
  Synthetic oligonucleotide
gccagaatgccactgaaatcagagcatctgttgggagaatggttggtggaatcgggagat

SEQ ID NO: 56152 - DNA, 60 bp, Artificial
  Synthetic oligonucleotide
attcaaaacagcttaacaatagagagaatggtgctctctgcttttgacgagaggaggaat

SEQ ID NO: 56153 - DNA, 60 bp, Artificial
  Synthetic oligonucleotide
tttgacatgagtaatgaaggatcttatttcttcggagacaatgcagaggagtacgacaat

SEQ ID NO: 56154 - DNA, 60 bp, Artificial
  Synthetic oligonucleotide
tacaagctttttctatcgttatgggtttgttgccaattttagcatggaacttcctagttt

SEQ ID NO: 56155 - DNA, 60 bp, Artificial
  Synthetic oligonucleotide
cacgagctttttctatcgttatgggtttgttgccaatttcagcatggaacttcctagttt

SEQ ID NO: 56156 - DNA, 60 bp, Artificial
  Synthetic oligonucleotide
aacaggtacctttgaattcacgagctttttctatcgttatgggtttgttgccaatttcag

SEQ ID NO: 56157 - DNA, 57 bp, Artificial
  Synthetic oligonucleotide
atggttcttctaaccgaggtcgaaacgtacgttctctctatcatcccatcaggcccc

SEQ ID NO: 56158 - DNA, 60 bp, Artificial
  Synthetic oligonucleotide
agcatctgttgggagaatggttggtggaattggaagattctacatacagatgtgcactga

SEQ ID NO: 56159 - DNA, 50 bp, Artificial
  Synthetic oligonucleotide
atctgttccaccattgaagagctcagacggcagaaatagtgaatttagct

SEQ ID NO: 56160 - DNA, 60 bp, Artificial
  Synthetic oligonucleotide
caggaaggcaagagaagaaccccgcactcagaatgaagtggatgatggcaatgaaatatc

SEQ ID NO: 56161 - DNA, 60 bp, Artificial
  Synthetic oligonucleotide
atttgatggatgtcaatccgactttacttttcttgaaagttccagcgcaaaatgccataa

SEQ ID NO: 56162 - DNA, 60 bp, Artificial
  Synthetic oligonucleotide
ggactctggatttccatgactcaaatgtaaagaacctgtatgagaaagtaagaagccaac

SEQ ID NO: 56163 - DNA, 60 bp, Artificial
  Synthetic oligonucleotide
agaggactctggatttccatgactcaaatgtaaagaacctgtatgagaaagtaagaagcc

SEQ ID NO: 56164 - DNA, 60 bp, Artificial
  Synthetic oligonucleotide
gataagcaccgggtttacatatggatcatccatcaattcagctggaaccactaaagcatg

SEQ ID NO: 56165 - DNA, 60 bp, Artificial
  Synthetic oligonucleotide
caccgggtttacatatggatcatccatcaattcagctggaaccactagagcatgcatgag

SEQ ID NO: 56166 - DNA, 60 bp, Artificial
  Synthetic oligonucleotide
gataagcaccgggtttacatatggatcatccatcaattcagctggaaccactagatcatg

SEQ ID NO: 56167 - DNA, 60 bp, Artificial
  Synthetic oligonucleotide
gataagcaccgggtttacatatggatcatccatcaattcagctggaaccactagagcatg

SEQ ID NO: 56168 - DNA, 60 bp, Artificial
  Synthetic oligonucleotide
caccgggtttacatatggatcatccatcaattcagctggaaccactaaagcatgcatgag

SEQ ID NO: 56169 - DNA, 60 bp, Artificial
  Synthetic oligonucleotide
acatatggatcatccatcaattcagctggaaccactaaagcatgcatgagaaatggagga

SEQ ID NO: 56170 - DNA, 60 bp, Artificial
  Synthetic oligonucleotide
cctttgacatgagcaacgaaggatcttatttcttcggagacaatgcagaggagtatgaca

SEQ ID NO: 56171 - DNA, 60 bp, Artificial
  Synthetic oligonucleotide
taaatagcgacactgtgggttggtcttggccagacggtgctgagttgccattcaccattg

SEQ ID NO: 56172 - DNA, 60 bp, Artificial
  Synthetic oligonucleotide
gcatacttactgacagccagacagcgaccaaaagaattcgaatggccatcaattaatttc

SEQ ID NO: 56173 - DNA, 58 bp, Artificial
  Synthetic oligonucleotide
atacttactgacagccagacagcgaccaaaagaattcggatggccatcaattaatttc

SEQ ID NO: 56174 - DNA, 60 bp, Artificial
  Synthetic oligonucleotide
atggggaacgccagaatgcaactgaaatcagagcatccgtcggaaaaatgattggtggaa

SEQ ID NO: 56175 - DNA, 60 bp, Artificial
  Synthetic oligonucleotide
aattcaactgacactgttgacacagtactagaaaagaatgtaacagtaacacactctgtt

SEQ ID NO: 56176 - DNA, 60 bp, Artificial
  Synthetic oligonucleotide
ttcaactgacactgttgacacagtactagaaaagaatgtaacagtaacacactctgttaa

SEQ ID NO: 56177 - DNA, 60 bp, Artificial
  Synthetic oligonucleotide
tagataatcactcactgagtgacatccacatcatggcgtctcaaggcaccaaacgatctt

SEQ ID NO: 56178 - DNA, 60 bp, Artificial
  Synthetic oligonucleotide
gtggaatcggaagattctacatacagatgtgcactgaactcaaactcagtgactatgaag

SEQ ID NO: 56179 - DNA, 60 bp, Artificial
  Synthetic oligonucleotide
cttggagggctatatgaagcaatcgaggagtgcctgattaatgatccctgggttttgctt

SEQ ID NO: 56180 - DNA, 60 bp, Artificial
  Synthetic oligonucleotide
caccgatcttgaggcgctcatggaatggctaaagacaagaccaatcctgtcacctctgac

SEQ ID NO: 56181 - DNA, 60 bp, Artificial
  Synthetic oligonucleotide
caccgatcttgaggcactcatggaatggctaaagacaagaccaatcctgtcacctctgac

SEQ ID NO: 56182 - DNA, 60 bp, Artificial
  Synthetic oligonucleotide
cacagatcttgaggcactcatggaatggctaaagacaagaccaatcctgtcacctctgac

SEQ ID NO: 56183 - DNA, 60 bp, Artificial
  Synthetic oligonucleotide
aacaccgatcttgaggcactcatggaatggctaaagacaagaccaatcctgtcacctctg

SEQ ID NO: 56184 - DNA, 60 bp, Artificial
  Synthetic oligonucleotide
caccgatctagaggcactcatggaatggctaaagacaagaccaatcctgtcacctctgac

SEQ ID NO: 56185 - DNA, 53 bp, Artificial
  Synthetic oligonucleotide
ggggcagtcagcttctggatgtgttctaatgggtcattgcaatgcagaatatg

SEQ ID NO: 56186 - DNA, 60 bp, Artificial
  Synthetic oligonucleotide
ctacatatgcagacacaatatgtataggctaccatgcgaacaactcaaccgacactgttg

SEQ ID NO: 56187 - DNA, 60 bp, Artificial
  Synthetic oligonucleotide
gcacaattctaaatactgcagttcccataggatcttgcgttagtaagtgccacaccgaca

SEQ ID NO: 56188 - DNA, 60 bp, Artificial
  Synthetic oligonucleotide
aaacatcccatccattcaatccagaggtctatttggagccattgctggttttattgaggg

SEQ ID NO: 56189 - DNA, 60 bp, Artificial
  Synthetic oligonucleotide
ttgtgttcacgctcaccgtgcccagtgagcgaggactgcagcgtagacgctttgtccaaa

SEQ ID NO: 56190 - DNA, 60 bp, Artificial
  Synthetic oligonucleotide
ttgaagagctcagacggcagaaatagtgaatttagcttgtccttcatgaaaaaatgcctt

SEQ ID NO: 56191 - DNA, 60 bp, Artificial
  Synthetic oligonucleotide
ctgcaaactggtcttggccagacggtgctgagttgccgttcaccattgacaagtagttcg

SEQ ID NO: 56192 - DNA, 60 bp, Artificial
  Synthetic oligonucleotide
gcaaaattacctaatgctgaacaaaagcttatgcaaagttgaaggatgggtagtggtggc

SEQ ID NO: 56193 - DNA, 60 bp, Artificial
  Synthetic oligonucleotide
caaaggttttgtattttcataaaggactaataataaaagaggaagccctcaaaggatcag

SEQ ID NO: 56194 - DNA, 60 bp, Artificial
  Synthetic oligonucleotide
agcgaaagcaggtactgattcaaaatggaagattttgtgcgacaatgcttcaatccaatg

SEQ ID NO: 56195 - DNA, 60 bp, Artificial
  Synthetic oligonucleotide
tcattgagccctggaatgatgatgggcatgttcaacatgttgagtacagtcttgggagtc

SEQ ID NO: 56196 - DNA, 60 bp, Artificial
  Synthetic oligonucleotide
aggctaccatgcgaacaactcaaccgacactgttgacacagtacttgagaagaacgtgac

SEQ ID NO: 56197 - DNA, 60 bp, Artificial
  Synthetic oligonucleotide
ctgcagttcccataggatcttgcgttagtaaatgccacactgacaagggttcaatttcta

SEQ ID NO: 56198 - DNA, 60 bp, Artificial
  Synthetic oligonucleotide
ctgcagttcccataggatcttgcgttagtaaatgccacactgacaagggttcaatctcta

SEQ ID NO: 56199 - DNA, 60 bp, Artificial
  Synthetic oligonucleotide
aactccttcctcacacatgcactgaaatagttgtggcaatgctactatttgctatccata

SEQ ID NO: 56200 - DNA, 60 bp, Artificial
  Synthetic oligonucleotide
ccatgacggtgtctcaagaatgtcaatctgcatgtcaggacctaatgacaatgcttcggc

SEQ ID NO: 56201 - DNA, 60 bp, Artificial
  Synthetic oligonucleotide
ccatgatggcatctcaagaatgtcaatctgcatgtcaggacctaataacaatgcctcggc

SEQ ID NO: 56202 - DNA, 60 bp, Artificial
  Synthetic oligonucleotide
ttgagccctggaatgatgatgggcatgttcaacatgctaagtacagttttgggagtctcg

SEQ ID NO: 56203 - DNA, 60 bp, Artificial
  Synthetic oligonucleotide
tcattgagccctggaatgatgatgggcatgttcaacatgctaagtacagttttgggagtc

SEQ ID NO: 56204 - DNA, 60 bp, Artificial
  Synthetic oligonucleotide
cctggtcctgttagtctccctgggggcaatcagcttctggatgtgttctaatggttcatt

SEQ ID NO: 56205 - DNA, 60 bp, Artificial
  Synthetic oligonucleotide
gattctacatccaaatgtgcactgaactcaaactcagtgactatgagggacgactgattc

SEQ ID NO: 56206 - DNA, 60 bp, Artificial
  Synthetic oligonucleotide
gattctacatccaaatgtgcactgaactcaaactcagtgactatgagggacgactaatcc

SEQ ID NO: 56207 - DNA, 60 bp, Artificial
  Synthetic oligonucleotide
ggttctacatccaaatgtgcactgaactcaaactcagtgactatgaggggcgactaattc

SEQ ID NO: 56208 - DNA, 60 bp, Artificial
  Synthetic oligonucleotide
gggaaaggatacatgttcgaaagtaagagcatgaagctccgaacacaaataccagcagaa

SEQ ID NO: 56209 - DNA, 60 bp, Artificial
  Synthetic oligonucleotide
agcaaaagcaggggaaacaatgctatcaattgtagttctgcttctgctcatggcagaggg

SEQ ID NO: 56210 - DNA, 60 bp, Artificial
  Synthetic oligonucleotide
agcaaaagcaggggaaacaatgctatcaattgtgattttgtttctgctcatagcagagaa

SEQ ID NO: 56211 - DNA, 60 bp, Artificial
  Synthetic oligonucleotide
tactgagaatagctttgaacaaataacatttatgcaagccttacaactattgcttgaagt

SEQ ID NO: 56212 - DNA, 60 bp, Artificial
  Synthetic oligonucleotide
ctttaactgaagacccagatgaaggcacagctggagtggagtccgctgttctgaggggat

SEQ ID NO: 56213 - DNA, 60 bp, Artificial
  Synthetic oligonucleotide
ctttaactgaagacccagatgaaggcacagctggagtggaatctgctgttttaaggggat

SEQ ID NO: 56214 - DNA, 60 bp, Artificial
  Synthetic oligonucleotide
ctttaaccgaagacccagatgaaggcacagctggagtggagtccgctgttctgaggggat

SEQ ID NO: 56215 - DNA, 60 bp, Artificial
  Synthetic oligonucleotide
gagttcacaatggttgggagaagagcaacagctattctcagaaaggcaaccagaagattg

SEQ ID NO: 56216 - DNA, 60 bp, Artificial
  Synthetic oligonucleotide
gccaaagaggcacaggatgtaatcatggaagttgttttcccaaatgaagtgggagctaga

SEQ ID NO: 56217 - DNA, 60 bp, Artificial
  Synthetic oligonucleotide
cccagccctttaaggttggtagacgggcaaacttgtgacatcgtcaatggtgctctggga

SEQ ID NO: 56218 - DNA, 60 bp, Artificial
  Synthetic oligonucleotide
gggatgtcttcatagagcgacccaccgctgtagacacttgttacccatttgatgtgccag

SEQ ID NO: 56219 - DNA, 60 bp, Artificial
  Synthetic oligonucleotide
cggagtgggatgtcttcatagagcgacccaccgctgtagacacttgttacccatttgatg

SEQ ID NO: 56220 - DNA, 60 bp, Artificial
  Synthetic oligonucleotide
cggtctgctctcattctgagaggatcagtggctcataagtcctgcctgcctgcttgtgtg

SEQ ID NO: 56221 - DNA, 60 bp, Artificial
  Synthetic oligonucleotide
ccagaggacttttcggagcgattgctggattcattgaaggaggatggacaggaatgatag

SEQ ID NO: 56222 - DNA, 60 bp, Artificial
  Synthetic oligonucleotide
acacatcaggaaggcaagagaagaaccccgcactcaggatgaagtggatgatggcaatga

SEQ ID NO: 56223 - DNA, 60 bp, Artificial
  Synthetic oligonucleotide
gggaccttcgaccttggagggctatatgaagcaattgaggagtgcctgattaatgattcc

SEQ ID NO: 56224 - DNA, 60 bp, Artificial
  Synthetic oligonucleotide
gggaccttcgaccttggagggctatatgaagcaattgaggagtgcctgattaatgatccc

SEQ ID NO: 56225 - DNA, 60 bp, Artificial
  Synthetic oligonucleotide
agcaaaagcagggtagataatcactcactgagtgacatcgaaatcatggcgtctcaaggc

SEQ ID NO: 56226 - DNA, 60 bp, Artificial
  Synthetic oligonucleotide
gtgaagatgaatccaaatcagaagataatatgcatctcagcaacaggaatgacactatcc

SEQ ID NO: 56227 - DNA, 60 bp, Artificial
  Synthetic oligonucleotide
gtgaagatgaatccaaatcagaagataatatgcatctcagcaacaggaatgacactatct

SEQ ID NO: 56228 - DNA, 60 bp, Artificial
  Synthetic oligonucleotide
agatgaatccaaatcagaagataatatgcatctcagcaacaggaatgacactatccgtag

SEQ ID NO: 56229 - DNA, 60 bp, Artificial
  Synthetic oligonucleotide
gtgaaaatgaatccaaatcagaagataatatgcatctcagcaacaggaatgacactatct

SEQ ID NO: 56230 - DNA, 60 bp, Artificial
  Synthetic oligonucleotide
tgagatgatttgggatcctaatggatggacagagactgatagtaagttctctgtgaggca

SEQ ID NO: 56231 - DNA, 60 bp, Artificial
  Synthetic oligonucleotide
gacagaagcccttatagggccttaatgagctgccctgtcggtgaagctccgtccccgtac

SEQ ID NO: 56232 - DNA, 60 bp, Artificial
  Synthetic oligonucleotide
acaagagtggtcccaagaggacaactgtccaccagaggagttcagattgcttcaaatgag

SEQ ID NO: 56233 - DNA, 60 bp, Artificial
  Synthetic oligonucleotide
attgaaagatgagtcttctaaccgaggtcgaaacgtacgttctctctatcgtcccgtcag

SEQ ID NO: 56234 - DNA, 60 bp, Artificial
  Synthetic oligonucleotide
ttgaaagatgagtcttctaaccgaggtcgaaacgtacgttctctctatcgtcccgtcagg

SEQ ID NO: 56235 - DNA, 60 bp, Artificial
  Synthetic oligonucleotide
agatagttggggcaatgctactatttactatccatactgtccaaaaaagtaccttgtttc

SEQ ID NO: 56236 - DNA, 60 bp, Artificial
  Synthetic oligonucleotide
taaacaatgctgtggtgatgccagctcatggcccggccaagagcatggaatatgatgctg

SEQ ID NO: 56237 - DNA, 60 bp, Artificial
  Synthetic oligonucleotide
atgaggggtcttatttcttcggagacaatgcagaggagtatgacaattaaagaaaaatac

SEQ ID NO: 56238 - DNA, 60 bp, Artificial
  Synthetic oligonucleotide
gcgtacaggaatggatcccaggatgtgctctctgatgcaaggatcaactctcccgagaag

SEQ ID NO: 56239 - DNA, 60 bp, Artificial
  Synthetic oligonucleotide
gcgtacagggatggatcccaggatgtgttctctgatgcaaggttcaactcttccgaggag

SEQ ID NO: 56240 - DNA, 60 bp, Artificial
  Synthetic oligonucleotide
tgaagaaaacaagccaattgaagtgggcacttggtgagaacatggcaccagaaaaggtag

SEQ ID NO: 56241 - DNA, 60 bp, Artificial
  Synthetic oligonucleotide
tgaagaaaacaagccaattgaagtgggcacttggtgagaacatggcaccagaaaaagtag

SEQ ID NO: 56242 - DNA, 52 bp, Artificial
  Synthetic oligonucleotide
ggggatggactggaatgatagatggatggtatggttatcatcatcagaatga

SEQ ID NO: 56243 - DNA, 60 bp, Artificial
  Synthetic oligonucleotide
ggactggaatgatagatggatggtatggttatcagcatcagaatgagcagggatcaggct

SEQ ID NO: 56244 - DNA, 60 bp, Artificial
  Synthetic oligonucleotide
cagaatggaccaggcgatcatggataagaacatcatactgaaagcgaacttcagtgtgat

SEQ ID NO: 56245 - DNA, 60 bp, Artificial
  Synthetic oligonucleotide
gtcacacccaggaatctttgaaaactcgtgtcttgaaacgatggaagttgttcaacaaac

SEQ ID NO: 56246 - DNA, 60 bp, Artificial
  Synthetic oligonucleotide
tctggaacctgggacctttgatcttggggggctatatgaagcaattgaggagtgcctgat

SEQ ID NO: 56247 - DNA, 60 bp, Artificial
  Synthetic oligonucleotide
ccttgaacctgggacctttgatcttggggggctatatgaagcaattgaggagtgcctgat

SEQ ID NO: 56248 - DNA, 60 bp, Artificial
  Synthetic oligonucleotide
ggaacctgggacctttgatcttggggggctatatgaagcaattgaggagtgcctgattaa

SEQ ID NO: 56249 - DNA, 60 bp, Artificial
  Synthetic oligonucleotide
agtatcttagcaaacaatgggaaatttgagttcattgctgaggaattccaatggaacaca

SEQ ID NO: 56250 - DNA, 55 bp, Artificial
  Synthetic oligonucleotide
agcatcttagcaaacaatgggaaatttgagttcattgctgaggaattccaatgga

SEQ ID NO: 56251 - DNA, 60 bp, Artificial
  Synthetic oligonucleotide
gtgtaatgtagcgggatggctcctgggcaacccagaatgtgaccttctactcactgcaaa

SEQ ID NO: 56252 - DNA, 60 bp, Artificial
  Synthetic oligonucleotide
ggcaacaggactaagaaatgtcccatccattcaatccagaggactatttggggcaattgc

SEQ ID NO: 56253 - DNA, 60 bp, Artificial
  Synthetic oligonucleotide
tggcaacaggactaagaaatgtcccatccattcaatccagaggactgtttggagcaattg

SEQ ID NO: 56254 - DNA, 60 bp, Artificial
  Synthetic oligonucleotide
ggcaacaggactaagaaatgtcccatccattcagtccagaggactatttggagcaattgc

SEQ ID NO: 56255 - DNA, 60 bp, Artificial
  Synthetic oligonucleotide
caaccgaagattcactccagagatagcagctagacctaaagttagaggacaggcaggcag

SEQ ID NO: 56256 - DNA, 60 bp, Artificial
  Synthetic oligonucleotide
tcactgcaaactcatggtcctatataatagagacgtccaattcagagaacgggacatgct

SEQ ID NO: 56257 - DNA, 60 bp, Artificial
  Synthetic oligonucleotide
gctaagaatggcaacaggactaagaaatgtcccatccattcagtccagaggactatttgg

SEQ ID NO: 56258 - DNA, 60 bp, Artificial
  Synthetic oligonucleotide
tatcaccattggagaatgtcccaaatatgtcaagagcaccaagctaagaatggcaacagg

SEQ ID NO: 56259 - DNA, 60 bp, Artificial
  Synthetic oligonucleotide
atgatgggtcttatttcttcggagacaatgcagaggagtatgacaattaaagaaaaatac

SEQ ID NO: 56260 - DNA, 60 bp, Artificial
  Synthetic oligonucleotide
tttgcagggaaaaacaccgatcttgaggctctcatggaatggctaaagacaagaccaatc

SEQ ID NO: 56261 - DNA, 60 bp, Artificial
  Synthetic oligonucleotide
tttgcagggaagaacactgatcttgaggctctcatggaatggctaaagacaagaccaatc

SEQ ID NO: 56262 - DNA, 60 bp, Artificial
  Synthetic oligonucleotide
tttgcagggaaaaacactgatcttgaggctctcatggaatggctaaagacaagaccaatc

SEQ ID NO: 56263 - DNA, 60 bp, Artificial
  Synthetic oligonucleotide
ggaagaacaccgatcttgaggctctcatggaatggctaaagacaagaccaatcctgtcac

SEQ ID NO: 56264 - DNA, 60 bp, Artificial
  Synthetic oligonucleotide
ccaacactgtgtcaagctttcaggtagactgctttctttggcatgtccgcaaacggtttg

SEQ ID NO: 56265 - DNA, 60 bp, Artificial
  Synthetic oligonucleotide
atggaacctatgatcatgacatttatagagatgaagcaatcaacaaccgatttcagattc

SEQ ID NO: 56266 - DNA, 60 bp, Artificial
  Synthetic oligonucleotide
cctatgatcatgacatttatagagatgaagcaatcaacaaccgatttcagattcagggag

SEQ ID NO: 56267 - DNA, 60 bp, Artificial
  Synthetic oligonucleotide
atcagagtttgagaagcatacttgccaacaatgggaaatttgaattcattgccgaggaat

SEQ ID NO: 56268 - DNA, 60 bp, Artificial
  Synthetic oligonucleotide
gagtttgagaagcatacttgccaacaatgggaaatttgaattcattgccgaggaattcca

SEQ ID NO: 56269 - DNA, 60 bp, Artificial
  Synthetic oligonucleotide
accagagtttgagaagcatacttgccaacaatgggaaatttgaattcattgccgaagaat

SEQ ID NO: 56270 - DNA, 60 bp, Artificial
  Synthetic oligonucleotide
cacagagcaaaccaatctgtacaagaacaaccctggaagagtcactgtgtccactaagac

SEQ ID NO: 56271 - DNA, 60 bp, Artificial
  Synthetic oligonucleotide
gagtatccgaaatggaacttatgaccatgacatttatagagatgaagcaatcaacaaccg

SEQ ID NO: 56272 - DNA, 60 bp, Artificial
  Synthetic oligonucleotide
gagtttgagaagcatacttgccaacaatgggaaatttgaattcattgccgaagaattcca

SEQ ID NO: 56273 - DNA, 60 bp, Artificial
  Synthetic oligonucleotide
actgacacagagcaaaccaatctgtacaagaacaaccctggaagagtcactgtgtccact

SEQ ID NO: 56274 - DNA, 60 bp, Artificial
  Synthetic oligonucleotide
aatctacagagattcgcttggagaaaccgtaatgaggatgggagacctccactaccttca

SEQ ID NO: 56275 - DNA, 60 bp, Artificial
  Synthetic oligonucleotide
ctgaaaatctacagagattcgcttggagaaaccgtaatgaggatgggagacctccactac

SEQ ID NO: 56276 - DNA, 60 bp, Artificial
  Synthetic oligonucleotide
cctagctggcatgaccctcgaggaaatgtcacgagactggttcatgctcatgcctaggca

SEQ ID NO: 56277 - DNA, 60 bp, Artificial
  Synthetic oligonucleotide
gctacctagctggcatgaccctcgaggaaatgtcacgagactggttcatgctcatgccta

SEQ ID NO: 56278 - DNA, 60 bp, Artificial
  Synthetic oligonucleotide
gcttttatgtggaattgatcagaggcaggccaaaagagagcagtgtattgtggacatcca

SEQ ID NO: 56279 - DNA, 60 bp, Artificial
  Synthetic oligonucleotide
gcttttatgtggaattgatcagaggcaggccaaaagagagtagtgtgttgtggacatcca

SEQ ID NO: 56280 - DNA, 60 bp, Artificial
  Synthetic oligonucleotide
gcttttatgttgaattgatcagaggcaggccaaaagagagtagcgtattgtggacatcca

SEQ ID NO: 56281 - DNA, 60 bp, Artificial
  Synthetic oligonucleotide
gggaaagggtgctttgaaatatatcacaaatgcgacgataactgcatggaaagcatcaga

SEQ ID NO: 56282 - DNA, 60 bp, Artificial
  Synthetic oligonucleotide
gggaaagggtgctttgaaatatatcacaaatgcgacgacaactgcatggaaagcatcaga

SEQ ID NO: 56283 - DNA, 60 bp, Artificial
  Synthetic oligonucleotide
aaaagggtgctttgaaatatatcacaaatgcgacaacaattgcatggaaagcatcagaaa

SEQ ID NO: 56284 - DNA, 60 bp, Artificial
  Synthetic oligonucleotide
aaaagggtgctttgaaatatatcacaaatgcgatgacaactgcatggaaagcatcagaaa

SEQ ID NO: 56285 - DNA, 60 bp, Artificial
  Synthetic oligonucleotide
ggagggattgacaagataagcaccgggtttacatatggatcatccatcaattcagctgga

SEQ ID NO: 56286 - DNA, 60 bp, Artificial
  Synthetic oligonucleotide
aagaagatgggaaagggtgctttgaaatatatcacaaatgcgacgacaactgcatggaaa

SEQ ID NO: 56287 - DNA, 60 bp, Artificial
  Synthetic oligonucleotide
tgcatggaaagcatcagaaacaacacctatgaccatacacaatacagagaagaagcactc

SEQ ID NO: 56288 - DNA, 60 bp, Artificial
  Synthetic oligonucleotide
aaagtggagggattgacaagataagcaccgggtttacatatggatcatccatcaattcag

SEQ ID NO: 56289 - DNA, 60 bp, Artificial
  Synthetic oligonucleotide
gcatcagaaacaacacctatgaccatacacaatacagagaagaagcactcttgaacagac

SEQ ID NO: 56290 - DNA, 60 bp, Artificial
  Synthetic oligonucleotide
gcatcagaaacaacacctatgaccatacacaatacagagaagaggcactcttgaacagac

SEQ ID NO: 56291 - DNA, 60 bp, Artificial
  Synthetic oligonucleotide
gatgggaaagggtgctttgaaatatatcacaaatgcgacgacaactgcatggaaagcatc

SEQ ID NO: 56292 - DNA, 60 bp, Artificial
  Synthetic oligonucleotide
gatgggaaagggtgctttgaaatatatcacaaatgcgacgataactgcatggaaagcatc

SEQ ID NO: 56293 - DNA, 60 bp, Artificial
  Synthetic oligonucleotide
tgttatactgtggtttagcttcggggcgtcatgctttgtacttttggctgtcatcatggg

SEQ ID NO: 56294 - DNA, 60 bp, Artificial
  Synthetic oligonucleotide
gcgacgacagctgcatggaaagcatcagaaacaacacctatgaccatacacaatatagag

SEQ ID NO: 56295 - DNA, 60 bp, Artificial
  Synthetic oligonucleotide
tatatcacaaatgcgacgacagctgcatggaaagcatcagaaacaacacctatgaccata

SEQ ID NO: 56296 - DNA, 60 bp, Artificial
  Synthetic oligonucleotide
tgcatggaaagcatcagaaacaacacctatgaccatacacaatacagagaagaggcactc

SEQ ID NO: 56297 - DNA, 60 bp, Artificial
  Synthetic oligonucleotide
gcgaatattaagaacacaagagtctgaatgtgtctgtgtgaacgggtcatgttttaccat

SEQ ID NO: 56298 - DNA, 60 bp, Artificial
  Synthetic oligonucleotide
gcaaatcctaagaacacaagagtctgaatgtgtctgtgtgaacggttcatgttttaccat

SEQ ID NO: 56299 - DNA, 60 bp, Artificial
  Synthetic oligonucleotide
gcaaatattaagaacacaagagtctgaatgtgtctgtgtgaacgggtcatgtttcaccat

SEQ ID NO: 56300 - DNA, 60 bp, Artificial
  Synthetic oligonucleotide
ggccaatacagtgggtttgttagaactctattccaacaaatgagggatgtgcttgggacc

SEQ ID NO: 56301 - DNA, 60 bp, Artificial
  Synthetic oligonucleotide
gagactgtaataatccgatcactgggagtccgggagctcctggggtcaaaggattcggtt

SEQ ID NO: 56302 - DNA, 60 bp, Artificial
  Synthetic oligonucleotide
agtgacatccacatcatggcgtctcaaggcaccaaacgaacttatgagcagatggaaact

SEQ ID NO: 56303 - DNA, 60 bp, Artificial
  Synthetic oligonucleotide
cccgaaggcaagctcatggccaaatcatgagacaactaaaggtgttacagccgcatgctc

SEQ ID NO: 56304 - DNA, 60 bp, Artificial
  Synthetic oligonucleotide
ccgaaagcaagctcatggccaaatcatgagacaactaaaggtgtcacagccgcatgctct

SEQ ID NO: 56305 - DNA, 60 bp, Artificial
  Synthetic oligonucleotide
ccgaaggcaagctcatggccaaatcatgagacaactaaaggtgttacagctgcatgctct

SEQ ID NO: 56306 - DNA, 60 bp, Artificial
  Synthetic oligonucleotide
gataatcactcactgagtgacatccacatcatggcgtctcaaggcaccaaacgatcttat

SEQ ID NO: 56307 - DNA, 60 bp, Artificial
  Synthetic oligonucleotide
gtccagcacttcatgccatgacggcatctcaagaatgtcgatctgcatgtcaggacctaa

SEQ ID NO: 56308 - DNA, 60 bp, Artificial
  Synthetic oligonucleotide
gaagaatggcacatatgactatcccaaatattcagaagaatccaaattgaatagagagga

SEQ ID NO: 56309 - DNA, 60 bp, Artificial
  Synthetic oligonucleotide
aaatcaacatactatagatgtgacagactctgaaatgaacaaactctttgaaagagttag

SEQ ID NO: 56310 - DNA, 60 bp, Artificial
  Synthetic oligonucleotide
actcactgagtgacatccacatcatggcgtctcaaggcaccaaacgatcttatgagcaga

SEQ ID NO: 56311 - DNA, 60 bp, Artificial
  Synthetic oligonucleotide
gtcttgttatgtgcatttgcagctacaaatgcagacacactatgtataggttaccatgca

SEQ ID NO: 56312 - DNA, 60 bp, Artificial
  Synthetic oligonucleotide
agtcttgttatgtgcatttgcagctacaaatgcagacacactatgtataggttaccatgc

SEQ ID NO: 56313 - DNA, 60 bp, Artificial
  Synthetic oligonucleotide
atacctagaagagcatcccagtgctgggaaagatcctaagaaaactggaggacccatata

SEQ ID NO: 56314 - DNA, 60 bp, Artificial
  Synthetic oligonucleotide
tacctagaagagcatcccagtgctgggaaggatcctaagaaaactggaggacccatatat

SEQ ID NO: 56315 - DNA, 53 bp, Artificial
  Synthetic oligonucleotide
cttcctttgacatgagtaatgagggatcttatttcttcggagacaatgcagag

SEQ ID NO: 56316 - DNA, 54 bp, Artificial
  Synthetic oligonucleotide
tcagacggcaaaaatagggaatttggcttgtccttcatgaaaaaatgccttgtt

SEQ ID NO: 56317 - DNA, 60 bp, Artificial
  Synthetic oligonucleotide
tcattggtactgttggtctccctgggggcaatcagtttctggatgtgctccaatgggtct

SEQ ID NO: 56318 - DNA, 60 bp, Artificial
  Synthetic oligonucleotide
ctgaaaataagagtacatgaggggtatgaagaattcacaatggttgggagaagagcaaca

SEQ ID NO: 56319 - DNA, 60 bp, Artificial
  Synthetic oligonucleotide
cacagagctctctttcacaatcactggagacaacaccaaatggaacgaaaatcagaaccc

SEQ ID NO: 56320 - DNA, 60 bp, Artificial
  Synthetic oligonucleotide
aatgaagaagcattaaggcagaaaattatggaaagtggagggattgacaagataagcacc

SEQ ID NO: 56321 - DNA, 60 bp, Artificial
  Synthetic oligonucleotide
ccgggtttacatatggatcatccatcaattcagctggaactactaaagcatgcatgagga

SEQ ID NO: 56322 - DNA, 60 bp, Artificial
  Synthetic oligonucleotide
aaataagcaccgggtttacatatggatcatccatcaattcagctggaactactaaagcat

SEQ ID NO: 56323 - DNA, 60 bp, Artificial
  Synthetic oligonucleotide
tcagaggaacaagagtggtcccaagaggacaactgtccaccagaggagttcagattgctt

SEQ ID NO: 56324 - DNA, 60 bp, Artificial
  Synthetic oligonucleotide
cagaggaacaagagtggtcccaagaggacaactgtccaccagaggagttcagattgcttc

SEQ ID NO: 56325 - DNA, 60 bp, Artificial
  Synthetic oligonucleotide
cgaggaaattgcttctcattgttcaggcacttagggacaacctggaacctggaaccttcg

SEQ ID NO: 56326 - DNA, 60 bp, Artificial
  Synthetic oligonucleotide
caaggaaattgcttctcattgttcaggcacttagggacaacctggaacctggaaccttcg

SEQ ID NO: 56327 - DNA, 50 bp, Artificial
  Synthetic oligonucleotide
ataatggagcagtggctgtactaaaatacaacggcataataactgaaacc

SEQ ID NO: 56328 - DNA, 60 bp, Artificial
  Synthetic oligonucleotide
ctggtccagatgatgaagcagtggctgtgttaaaatacaacggcataataactgaaacca

SEQ ID NO: 56329 - DNA, 60 bp, Artificial
  Synthetic oligonucleotide
cggcagcatgcccttatgctggagcaaacagcttctacagaaatttaatatggctggtga

SEQ ID NO: 56330 - DNA, 60 bp, Artificial
  Synthetic oligonucleotide
aaactctacagagattcgcttggagaagcagtaatgagaatgggagacctccactcactc

SEQ ID NO: 56331 - DNA, 60 bp, Artificial
  Synthetic oligonucleotide
gacgagcagtcaattgctgaagcaataattgtggccatggtattctcacaagaagactgc

SEQ ID NO: 56332 - DNA, 60 bp, Artificial
  Synthetic oligonucleotide
aagagacgagcagtcaattgctgaagcaataattgtggccatggtattctcacaagaaga

SEQ ID NO: 56333 - DNA, 60 bp, Artificial
  Synthetic oligonucleotide
gaaagcaaacttcagtgtgatttttgatcgactggaaactctgatactccttagagcttt

SEQ ID NO: 56334 - DNA, 60 bp, Artificial
  Synthetic oligonucleotide
aaacttcagtgtgatttttgatcgactggaaactctgatacttcttagagctttcacgga

SEQ ID NO: 56335 - DNA, 60 bp, Artificial
  Synthetic oligonucleotide
tcagtgtgatttttgatcgactggaaactctgatacttcttagagctttcacggaagaag

SEQ ID NO: 56336 - DNA, 60 bp, Artificial
  Synthetic oligonucleotide
ttccctttgcatcagaatggaccaggcaataatggataaaaacatcacattgaaagcaaa

SEQ ID NO: 56337 - DNA, 56 bp, Artificial
  Synthetic oligonucleotide
gcagaaagtggcaggttccctttgcatcagaatggaccaggcaataatggataaaa

SEQ ID NO: 56338 - DNA, 56 bp, Artificial
  Synthetic oligonucleotide
tgcttgaagtagagcaagagataagaactttctcgtttcagcttatttaatgataa

SEQ ID NO: 56339 - DNA, 56 bp, Artificial
  Synthetic oligonucleotide
tgcttgaagtggagcaagagataagaactttctcgtttcagcttatttaatgataa

SEQ ID NO: 56340 - DNA, 60 bp, Artificial
  Synthetic oligonucleotide
cctgctcgaagacagccacaacggaaaactatgtagattaaaaggaatagccccactaca

SEQ ID NO: 56341 - DNA, 60 bp, Artificial
  Synthetic oligonucleotide
attccaacacgataacctcgtttcaggtagattgctatctatggcacataagaaagctgc

SEQ ID NO: 56342 - DNA, 60 bp, Artificial
  Synthetic oligonucleotide
caacacgataacctcgtttcaggtagattgttatctatggcacataagaaagctgctcag

SEQ ID NO: 56343 - DNA, 60 bp, Artificial
  Synthetic oligonucleotide
ctgaagacccagatgaaggcacagctggagtggaatctgctgttctgagaggattcctca

SEQ ID NO: 56344 - DNA, 60 bp, Artificial
  Synthetic oligonucleotide
ctttaactgaagacccagatgaaggcacagctggagtggaatctgctgttctaaggggat

SEQ ID NO: 56345 - DNA, 60 bp, Artificial
  Synthetic oligonucleotide
tttaactgaagacccagatgaaggcacagctggagtggaatctgctgttctaaggggatt

SEQ ID NO: 56346 - DNA, 60 bp, Artificial
  Synthetic oligonucleotide
tagataatcactcactgagtgacatcaaaatcatggcgtctcaaggcaccaaacgatctt

SEQ ID NO: 56347 - DNA, 60 bp, Artificial
  Synthetic oligonucleotide
caatccgactttacttttcttgaaagttccagcacaaaatgccataagcaccacattccc

SEQ ID NO: 56348 - DNA, 60 bp, Artificial
  Synthetic oligonucleotide
tatctggaagaacatcccagcgcggggaaagatcctaagaaaactggaggacccatatac

SEQ ID NO: 56349 - DNA, 60 bp, Artificial
  Synthetic oligonucleotide
aacatattcatcatcaatgatgtgggagatcaacggtcctgagtcagtgctagttaacac

SEQ ID NO: 56350 - DNA, 60 bp, Artificial
  Synthetic oligonucleotide
tcagagggacaagagtggtcccaagaggacaactgtccaccagaggagttcaaattgctt

SEQ ID NO: 56351 - DNA, 60 bp, Artificial
  Synthetic oligonucleotide
gaccggcttcgccgagatcagaaatctctaagaggaagaggcagcactcttggtctggac

SEQ ID NO: 56352 - DNA, 60 bp, Artificial
  Synthetic oligonucleotide
aacaagagattagaacgttctcgtttcagcttatttaatgataaaaaacacccttgtttc

SEQ ID NO: 56353 - DNA, 60 bp, Artificial
  Synthetic oligonucleotide
aacaagagatcagaactttttcgtttcagcttatttaatgataaaaaacacccttgtttc

SEQ ID NO: 56354 - DNA, 60 bp, Artificial
  Synthetic oligonucleotide
aagtgaacaaataatagtgacaagggagccgtatgtgtcatgtgatccattaggatgtaa

SEQ ID NO: 56355 - DNA, 60 bp, Artificial
  Synthetic oligonucleotide
ggaatatccaatgtggggctgaatgtctcattacacttaaagaacaacaatgaccaagac

SEQ ID NO: 56356 - DNA, 60 bp, Artificial
  Synthetic oligonucleotide
aagcaaaattatctaatgctgaacaaaagcttatgcaaagttgaaggatgggtagtggta

SEQ ID NO: 56357 - DNA, 60 bp, Artificial
  Synthetic oligonucleotide
agcaaaagcaggggtcacaatgtacaaaatagcactagtactcgcgctccttggagcggt

SEQ ID NO: 56358 - DNA, 60 bp, Artificial
  Synthetic oligonucleotide
agcaaaagcaggggtcacaatgtacaaaatagtactagtactcgcgctccttggagcggt

SEQ ID NO: 56359 - DNA, 60 bp, Artificial
  Synthetic oligonucleotide
agcaaaagcaggggtcacaatgtacaaaatagcactggtactcgcgctccttagagcagt

SEQ ID NO: 56360 - DNA, 60 bp, Artificial
  Synthetic oligonucleotide
agcaaaagcaggggtcacaatgtacaaaatagtgcttgtactcgcgctccttggagcagt

SEQ ID NO: 56361 - DNA, 59 bp, Artificial
  Synthetic oligonucleotide
cctcctttgacatgagtaatgaaggatcttatttcttcggagacaatgcagaggagtac

SEQ ID NO: 56362 - DNA, 60 bp, Artificial
  Synthetic oligonucleotide
cctcctttgacatgagtaatgaaggatcttatttcttcggagacaatgcagaggagtacg

SEQ ID NO: 56363 - DNA, 60 bp, Artificial
  Synthetic oligonucleotide
cttcctaggagatctggagcagcaggcgctgcagtcaaaggagttggaacaatggtgctg

SEQ ID NO: 56364 - DNA, 60 bp, Artificial
  Synthetic oligonucleotide
ctccctaggagatctggagcagcaggcgctgcagtcaaaggagttggaacaatggtgctg

SEQ ID NO: 56365 - DNA, 58 bp, Artificial
  Synthetic oligonucleotide
cttcctaggagatctggagcagcaggcgctgcagtcaaaggagttggaacaatggtgc

SEQ ID NO: 56366 - DNA, 60 bp, Artificial
  Synthetic oligonucleotide
ttcccaaaagcaagctcatggccaaatcatgagacaaccaaaggtgttacagctgcatgc

SEQ ID NO: 56367 - DNA, 60 bp, Artificial
  Synthetic oligonucleotide
agaaattcttccctagcagttcatacaggagaccggttggaatttccagcatggtggagg

SEQ ID NO: 56368 - DNA, 60 bp, Artificial
  Synthetic oligonucleotide
atgccacaccgacaggggttcaatctctacaactaaaccctttcaaaacatctcaagaat

SEQ ID NO: 56369 - DNA, 60 bp, Artificial
  Synthetic oligonucleotide
ctgccgccagttctttggtactgttggtctccctgggggcaatcagtttctggatgtgct

SEQ ID NO: 56370 - DNA, 60 bp, Artificial
  Synthetic oligonucleotide
caatgagctgagcaatcttgcaaaaggagagaaggctaatgtgctaattgggcaaggaga

SEQ ID NO: 56371 - DNA, 60 bp, Artificial
  Synthetic oligonucleotide
cttcctttgacatgagcaacgaaggatcttatttcttcggagacaatgcagaggaatatg

SEQ ID NO: 56372 - DNA, 60 bp, Artificial
  Synthetic oligonucleotide
tgcccaaaatacgtcaagagcaccaaattaaggatggttacaggactaagaaacatccca

SEQ ID NO: 56373 - DNA, 60 bp, Artificial
  Synthetic oligonucleotide
tgcccaaaatacgtcaagagtaccaaattaaggatggttacaggactaagaaacatccca

SEQ ID NO: 56374 - DNA, 60 bp, Artificial
  Synthetic oligonucleotide
ggatggttacaggactaagaaacatcccatctatccagtctagaggtctgtttggagcca

SEQ ID NO: 56375 - DNA, 60 bp, Artificial
  Synthetic oligonucleotide
cgtggaccatatggccataatcaagaagtacacatcaggaagacaggagaagaacccagc

SEQ ID NO: 56376 - DNA, 60 bp, Artificial
  Synthetic oligonucleotide
caccgtggaccatatggccataatcaagaagtacacatcaggaagacaggagaagaaccc

SEQ ID NO: 56377 - DNA, 60 bp, Artificial
  Synthetic oligonucleotide
gtggaccatatggccataatcaagaagtacacatcaggaagacaggagaagaaccctgcc

SEQ ID NO: 56378 - DNA, 60 bp, Artificial
  Synthetic oligonucleotide
caggggaaacaatgctatcaattgtagttctgcttctgctcatggcagagggttcttctc

SEQ ID NO: 56379 - DNA, 60 bp, Artificial
  Synthetic oligonucleotide
tggtcactgcacaagaactggtggaatcacaaaatctcccggaattatgcccgagccctc

SEQ ID NO: 56380 - DNA, 60 bp, Artificial
  Synthetic oligonucleotide
ggcagagggttcttctcaaaactacacaggaaaccctgtgatatgtatgggacaccatgc

SEQ ID NO: 56381 - DNA, 60 bp, Artificial
  Synthetic oligonucleotide
aaaaattgatttatggtcatataatgcagaatttttagttgcactggaaaaccaacacac

SEQ ID NO: 56382 - DNA, 60 bp, Artificial
  Synthetic oligonucleotide
gagcaggtcgagggaaggatccaagatctagagaaatatgttgaagatacaaaaattgat

SEQ ID NO: 56383 - DNA, 60 bp, Artificial
  Synthetic oligonucleotide
caagcagccattgatcaaattaatgggaaactaaatcgtcttattgagaagacaaacgag

SEQ ID NO: 56384 - DNA, 60 bp, Artificial
  Synthetic oligonucleotide
tcaaatctactcaagcagccattgatcaaattaatgggaaactaaatcgtcttattgaga

SEQ ID NO: 56385 - DNA, 60 bp, Artificial
  Synthetic oligonucleotide
tagcaattggagattgtccgaagtatgtcaaacagggctctcttaaacttgcaacaggga

SEQ ID NO: 56386 - DNA, 60 bp, Artificial
  Synthetic oligonucleotide
aaaacatctcgagaatagcaattggagattgtccgaagtatgtcaaacagggctctctta

SEQ ID NO: 56387 - DNA, 60 bp, Artificial
  Synthetic oligonucleotide
cagatgccacacagacaaaggctccctctccagaactaagcccttccaaaacatctcgag

SEQ ID NO: 56388 - DNA, 60 bp, Artificial
  Synthetic oligonucleotide
ccacaaatgcgacaacaactgcattgagagtatccggaatggaacctatgatcatgacat

SEQ ID NO: 56389 - DNA, 60 bp, Artificial
  Synthetic oligonucleotide
ttttgaaatattccacaaatgcgacaacaactgcattgagagtatccggaatggaaccta

SEQ ID NO: 56390 - DNA, 60 bp, Artificial
  Synthetic oligonucleotide
attctaaatactgcagttcccatagggtcatgtgtcagcagatgccacacagacaaaggc

SEQ ID NO: 56391 - DNA, 60 bp, Artificial
  Synthetic oligonucleotide
tcgttgcactactcttggccttcattttgtgggcttgtcaaaatggaaacatccggtgcc

SEQ ID NO: 56392 - DNA, 60 bp, Artificial
  Synthetic oligonucleotide
gactattgtagagcctggagatttgatagtcttcaatacaataggaaatctaatcgctcc

SEQ ID NO: 56393 - DNA, 60 bp, Artificial
  Synthetic oligonucleotide
atacaataggaaatctaatcgctccaagaggacactacaagctgaacaatcagaaaaaga

SEQ ID NO: 56394 - DNA, 60 bp, Artificial
  Synthetic oligonucleotide
ggtcactgcacaagaactggtggaatcacaaaatctcccggaattatgcccgagccctct

SEQ ID NO: 56395 - DNA, 60 bp, Artificial
  Synthetic oligonucleotide
gccgaggaattccaatggagcactgtgaagcagaacgggaaatccggggcctgcaagaga

SEQ ID NO: 56396 - DNA, 60 bp, Artificial
  Synthetic oligonucleotide
cgaggaattccaatggagcactgtgaagcagaacgggaaatccggggcctgcaagagagc

SEQ ID NO: 56397 - DNA, 60 bp, Artificial
  Synthetic oligonucleotide
tgtgtccactaagactagtcaaacaagtgtggttcctaacatcggtagcaggcccttggt

SEQ ID NO: 56398 - DNA, 60 bp, Artificial
  Synthetic oligonucleotide
gctttttgctcgttgcactactcttggccttcattttgtgggcttgtcaaaatggaaaca

SEQ ID NO: 56399 - DNA, 60 bp, Artificial
  Synthetic oligonucleotide
cagcagatgccacacagacaaaggctccctctccagaactaagcccttccaaaacatctc

SEQ ID NO: 56400 - DNA, 56 bp, Artificial
  Synthetic oligonucleotide
tttcagattcagggagtcaaattgacccagggatacaaagacatcattctttggat

SEQ ID NO: 56401 - DNA, 60 bp, Artificial
  Synthetic oligonucleotide
actcatggccaaatcatgagacaaccaaaggtattacagctgcatgctcttactctggaa

SEQ ID NO: 56402 - DNA, 60 bp, Artificial
  Synthetic oligonucleotide
ccaaaagcaaactcatggccaaatcatgagacaaccaaaggtgttacagctgcatgctct

SEQ ID NO: 56403 - DNA, 60 bp, Artificial
  Synthetic oligonucleotide
cctcatggccaaatcatgagacaaccaaaggtgtcacagcttcatgcccccacgctggag

SEQ ID NO: 56404 - DNA, 50 bp, Artificial
  Synthetic oligonucleotide
cctcatggccaaatcatgagacaaccaaaggtgtcacagcttcatgcccc

SEQ ID NO: 56405 - DNA, 56 bp, Artificial
  Synthetic oligonucleotide
gttttggggtgtctgggatcaacgagtctgcagacatgagtattggagtcactgtc

SEQ ID NO: 56406 - DNA, 60 bp, Artificial
  Synthetic oligonucleotide
cacccaactatgcaggaattcaagctggagttgacaggttttatcgaacctgtaagctgc

SEQ ID NO: 56407 - DNA, 60 bp, Artificial
  Synthetic oligonucleotide
cctagttttggggtgtctggggtcaatgagtctgcagacatgagtattggagtcactgtc

SEQ ID NO: 56408 - DNA, 60 bp, Artificial
  Synthetic oligonucleotide
cctagttttggggtgtctggggttaatgagtctgcagacatgagtattggagtcactgtc

SEQ ID NO: 56409 - DNA, 60 bp, Artificial
  Synthetic oligonucleotide
ttcctagttttggggtgtctggggtcaatgagtctgcagacatgagtattggagtcactg

SEQ ID NO: 56410 - DNA, 60 bp, Artificial
  Synthetic oligonucleotide
agctggagttgacaggttttatcgaacctgtaagctgctcggaattaatatgagcaaaaa

SEQ ID NO: 56411 - DNA, 57 bp, Artificial
  Synthetic oligonucleotide
cacccaactatgcaggaattcaagctggagttgacaggttttatcgaacctgtaagc

SEQ ID NO: 56412 - DNA, 60 bp, Artificial
  Synthetic oligonucleotide
ttcaagctggagttgacaggttttatcgaacctgtaagctgctcggaattaatatgagca

SEQ ID NO: 56413 - DNA, 58 bp, Artificial
  Synthetic oligonucleotide
tagttttggggtgtctggggtcaatgagtctgcagacatgagtattggagtcactgtc

SEQ ID NO: 56414 - DNA, 59 bp, Artificial
  Synthetic oligonucleotide
tgcttgaagtggagcaagagataagaactttctcgtttcagcttatttaatgataaaaa

SEQ ID NO: 56415 - DNA, 60 bp, Artificial
  Synthetic oligonucleotide
cgttcatgcaagccttacaactattgcttgaagtggagcaagagataagaactttctcgt

SEQ ID NO: 56416 - DNA, 60 bp, Artificial
  Synthetic oligonucleotide
aaggggtttgagatgatttgggatcctaatggatggacagataccgacagtgatttctca

SEQ ID NO: 56417 - DNA, 60 bp, Artificial
  Synthetic oligonucleotide
cacagggaacatgctgggaacagatgtacactccaggtggggaggtgaggaatgatgatg

SEQ ID NO: 56418 - DNA, 50 bp, Artificial
  Synthetic oligonucleotide
ggggttcaccatccttcaaccgacacagaacaaaccaacctgtataagaa

SEQ ID NO: 56419 - DNA, 56 bp, Artificial
  Synthetic oligonucleotide
acatgcactgaaatagttgtggcaatgctactatttgctatccatactgtccaaaa

SEQ ID NO: 56420 - DNA, 60 bp, Artificial
  Synthetic oligonucleotide
aatgatccctgggttttgcttaatgcgtcttggttcaactccttcctcacacatgcactg

SEQ ID NO: 56421 - DNA, 60 bp, Artificial
  Synthetic oligonucleotide
cttgaaagttccagcgcaaaatgccataagcaccacattcccatatactggagatcctcc

SEQ ID NO: 56422 - DNA, 60 bp, Artificial
  Synthetic oligonucleotide
ctgtgactcattcagttaatttactagaaaacagccataatggaaaactctgcagcctga

SEQ ID NO: 56423 - DNA, 60 bp, Artificial
  Synthetic oligonucleotide
acatcccatcaattcaatccagaggtctatttggagccattgccggtttcattgaagggg

SEQ ID NO: 56424 - DNA, 60 bp, Artificial
  Synthetic oligonucleotide
gaacagagaagctgacaataacttattcgtcatcaatgatgtgggagatcaatggtcctg

SEQ ID NO: 56425 - DNA, 60 bp, Artificial
  Synthetic oligonucleotide
aggaacggagaagctgacaataacttattcgtcatcaatgatgtgggagatcaatggtcc

SEQ ID NO: 56426 - DNA, 60 bp, Artificial
  Synthetic oligonucleotide
aggaacagagaagctgacaataacttattcgtcatcaatgatgtgggagatcaatggtcc

SEQ ID NO: 56427 - DNA, 60 bp, Artificial
  Synthetic oligonucleotide
agggacagagaagctgacaataacttattcgtcatcaatgatgtgggagatcaatggtcc

SEQ ID NO: 56428 - DNA, 60 bp, Artificial
  Synthetic oligonucleotide
tgaagatgaacagatgtatcaaaagtgctgcaatctattcgagaaattcttccctagcag

SEQ ID NO: 56429 - DNA, 60 bp, Artificial
  Synthetic oligonucleotide
gaacagatgtatcaaaagtgctgcaatctattcgagaaattcttccctagcagttcatac

SEQ ID NO: 56430 - DNA, 60 bp, Artificial
  Synthetic oligonucleotide
tgactatcccaaatattcagaagaatccaaattgaatagagaggaaatagacggtgtgaa

SEQ ID NO: 56431 - DNA, 60 bp, Artificial
  Synthetic oligonucleotide
cctgttgctcactgcgaattcatggtcttacataatagagacttcaaattcagaaaatgg

SEQ ID NO: 56432 - DNA, 60 bp, Artificial
  Synthetic oligonucleotide
atagcataacaatagagagaatggtgctctctgcttttgatgagagaaggaataaatacc

SEQ ID NO: 56433 - DNA, 60 bp, Artificial
  Synthetic oligonucleotide
ctaattcaaaatagcataacaatagagagaatggtgctctctgcttttgatgagagaagg

SEQ ID NO: 56434 - DNA, 60 bp, Artificial
  Synthetic oligonucleotide
caaatcagaagataatatgcatctcagcaacaggaatgacactatctgtagtaagtctgc

SEQ ID NO: 56435 - DNA, 60 bp, Artificial
  Synthetic oligonucleotide
caatttgtacaagaacaaccctggaagagtcactgtgtctaccaaaactagtcaaacaag

SEQ ID NO: 56436 - DNA, 60 bp, Artificial
  Synthetic oligonucleotide
aacgggactctagcatacttactgacagccagacagcgaccaaaagacttcggatggcca

SEQ ID NO: 56437 - DNA, 60 bp, Artificial
  Synthetic oligonucleotide
aaacgggactctagcatacttactgacagccagacagcgaccaaaaggattcggatggcc

SEQ ID NO: 56438 - DNA, 60 bp, Artificial
  Synthetic oligonucleotide
aacgggactctagcatacttactgacagccagacagcgaccaaaagaattcgaatggcca

SEQ ID NO: 56439 - DNA, 60 bp, Artificial
  Synthetic oligonucleotide
cggaactctagcatacttactgacagccagacagcgaccaaaagaattcggatggccatc

SEQ ID NO: 56440 - DNA, 60 bp, Artificial
  Synthetic oligonucleotide
ctagcatacttactgacagccagacagcgaccaaaagaattcgaatggccatcaattaat

SEQ ID NO: 56441 - DNA, 60 bp, Artificial
  Synthetic oligonucleotide
cacaggggacatgctgggaacagatgtacactccaggtggagaggtgaggaatgatgatg

SEQ ID NO: 56442 - DNA, 60 bp, Artificial
  Synthetic oligonucleotide
cacaggggacatgctgggaacagatgtacactccaggtggagaagtgaggaatgatgatg

SEQ ID NO: 56443 - DNA, 60 bp, Artificial
  Synthetic oligonucleotide
gagtgcaataggccaagtgtcaaggcccatgttcttgtatgtaagaacaaatggaacctc

SEQ ID NO: 56444 - DNA, 60 bp, Artificial
  Synthetic oligonucleotide
gagtgcaataggccaagtgtcaaggcccatgttcttgtatgtaaggacaaatggaacctc

SEQ ID NO: 56445 - DNA, 60 bp, Artificial
  Synthetic oligonucleotide
gtgtgaagaacggcacatatgactatcccaaatattcagaagagtctaaattgaatcggg

SEQ ID NO: 56446 - DNA, 60 bp, Artificial
  Synthetic oligonucleotide
gtgtgaagaacggcacatatgactatcccaaatattcagaagagtctaaattgaatcgag

SEQ ID NO: 56447 - DNA, 60 bp, Artificial
  Synthetic oligonucleotide
gaacggcacatatgactatcccaaatattcagaagagtccaaattgaatcgagaagaaat

SEQ ID NO: 56448 - DNA, 60 bp, Artificial
  Synthetic oligonucleotide
gaacggcacatatgactatcccaaatattcagaagagtccaaattgaaccgagaagaaat

SEQ ID NO: 56449 - DNA, 60 bp, Artificial
  Synthetic oligonucleotide
gaacggcacatatgactatcccaaatattcagaagagtccaaattgaatcgagaggaaat

SEQ ID NO: 56450 - DNA, 60 bp, Artificial
  Synthetic oligonucleotide
aagagataagaactttctcgtttcagcttatttaatgataaaaaacacccttgtttctac

SEQ ID NO: 56451 - DNA, 60 bp, Artificial
  Synthetic oligonucleotide
cggggactacgcaagactttacatatggggagttcaccacccttcaactgacacagaaca

SEQ ID NO: 56452 - DNA, 60 bp, Artificial
  Synthetic oligonucleotide
cttggttcaactccttcctcatacatgcactgaaatagttgtggcaatgctactatttgc

SEQ ID NO: 56453 - DNA, 60 bp, Artificial
  Synthetic oligonucleotide
gagaaggggaaggttactaaatcaatagagttgaatgcacccaattctcattatgaggaa

SEQ ID NO: 56454 - DNA, 60 bp, Artificial
  Synthetic oligonucleotide
cctagaagagcatcccagtgctgggaaagatcctaagaaaactggaggacccatatatag

SEQ ID NO: 56455 - DNA, 60 bp, Artificial
  Synthetic oligonucleotide
gcgaccaaaagacttcggatggccatcaattagtgtcgaattgtttaaaaacgaccttgt

SEQ ID NO: 56456 - DNA, 60 bp, Artificial
  Synthetic oligonucleotide
gtgaggcataaattgaagacgacagagaatagttttgagcaaataacatttatgcaagca

SEQ ID NO: 56457 - DNA, 60 bp, Artificial
  Synthetic oligonucleotide
gaagtgagacataaattgaagacgacagagaatagttttgagcaaataacatttatgcaa

SEQ ID NO: 56458 - DNA, 53 bp, Artificial
  Synthetic oligonucleotide
agcccgggagctcctggggtcaaaggattcggtttcctagatagtggcaatac

SEQ ID NO: 56459 - DNA, 60 bp, Artificial
  Synthetic oligonucleotide
ctgtaacaacccgattactgggagcccaggagctcctggggtcaaaggattcggtttcct

SEQ ID NO: 56460 - DNA, 60 bp, Artificial
  Synthetic oligonucleotide
ggactgcacagcaaaattacctaatgctgaacaaaagcttatgcaaagttgaaggatggg

SEQ ID NO: 56461 - DNA, 60 bp, Artificial
  Synthetic oligonucleotide
ttgagtcccggaatgatgatgggcatgttcaacatgctaagtacagttttgggagtctca

SEQ ID NO: 56462 - DNA, 60 bp, Artificial
  Synthetic oligonucleotide
ctccctttgatgatagactcaggagagatcaaaaggcattaaagggaagaggcagcacac

SEQ ID NO: 56463 - DNA, 60 bp, Artificial
  Synthetic oligonucleotide
gggacaaaccctctggagcaaaacaaacgatgccggctcagaccgagtgatggtatcacc

SEQ ID NO: 56464 - DNA, 60 bp, Artificial
  Synthetic oligonucleotide
aggacaaaccctctggagcaaaacaaacgatgccggctcagaccgagtgatggtatcacc

SEQ ID NO: 56465 - DNA, 60 bp, Artificial
  Synthetic oligonucleotide
aaatcagagcatctgttgggagaatggttggtggaatcgggagattctacatacaaatgt

SEQ ID NO: 56466 - DNA, 60 bp, Artificial
  Synthetic oligonucleotide
acttttgaagccactgggaacttaatagcaccatggtacgcattcgcattgaacaagggg

SEQ ID NO: 56467 - DNA, 60 bp, Artificial
  Synthetic oligonucleotide
acttttgaagccactgggaacttaatagcaccgtggtacgcattcgcattgaataagggc

SEQ ID NO: 56468 - DNA, 60 bp, Artificial
  Synthetic oligonucleotide
acttttgaagccactgggaacttaatagcaccgtggtacgctttcgcactgaataagggc

SEQ ID NO: 56469 - DNA, 60 bp, Artificial
  Synthetic oligonucleotide
tcatggccaaatcatgagacaaccaaaggtgttacagctgcatgctcttactctggagcc

SEQ ID NO: 56470 - DNA, 60 bp, Artificial
  Synthetic oligonucleotide
tgaccatttgtgtgcagggaaataatgataacgcaacagctacagtatactatgaccgaa

SEQ ID NO: 56471 - DNA, 60 bp, Artificial
  Synthetic oligonucleotide
cacggtctgctctcattctgagaggatcagtggctcataagtcctgcctgcctgcttgtg

SEQ ID NO: 56472 - DNA, 60 bp, Artificial
  Synthetic oligonucleotide
gcggggaaagatcctaagaaaactggaggacctatatacaggagagtaaacggaaagtgg

SEQ ID NO: 56473 - DNA, 60 bp, Artificial
  Synthetic oligonucleotide
cctcttttgacatgagtaatgaaggatcttatttcttcggagacaatgcagaagagtacg

SEQ ID NO: 56474 - DNA, 56 bp, Artificial
  Synthetic oligonucleotide
cctcctttgacatgagtaatgaaggatcttatttcttcggagacaatgcagaagag

SEQ ID NO: 56475 - DNA, 60 bp, Artificial
  Synthetic oligonucleotide
ggtctccctgggggcaatcagtttctggatgtgttctaatgggtctttgcagtgcagaat

SEQ ID NO: 56476 - DNA, 55 bp, Artificial
  Synthetic oligonucleotide
acagagattcgcttggagaagcagtaatgagactgggggacctccattcactcca

SEQ ID NO: 56477 - DNA, 55 bp, Artificial
  Synthetic oligonucleotide
acagagattcgcttggagaagcagtaatgagaatgggggacctccactcactcca

SEQ ID NO: 56478 - DNA, 60 bp, Artificial
  Synthetic oligonucleotide
tctgaaattctacagagattcgcttggagaagcagtaatgagaatgggggacctccactc

SEQ ID NO: 56479 - DNA, 60 bp, Artificial
  Synthetic oligonucleotide
gttcgagtctctgagactctacagagattcgcttggagaagcagtaatgaggatgggaga

SEQ ID NO: 56480 - DNA, 60 bp, Artificial
  Synthetic oligonucleotide
catctgcagtggggttttcggtgacaacccgcgtcccaaagatggaacaggcagctgtgg

SEQ ID NO: 56481 - DNA, 60 bp, Artificial
  Synthetic oligonucleotide
catctgcagtggggttttcggtgacaacccgcgtcccaaagatggaacaggcagctgcgg

SEQ ID NO: 56482 - DNA, 60 bp, Artificial
  Synthetic oligonucleotide
ggacgactgattcaaaatagcataacaatagagagaatggtgctctctgcttttgatgag

SEQ ID NO: 56483 - DNA, 60 bp, Artificial
  Synthetic oligonucleotide
acaagtgtagtaccaaacattggcagtagaccatgggtgagaggccaaagcggcagaatc

SEQ ID NO: 56484 - DNA, 60 bp, Artificial
  Synthetic oligonucleotide
gggtttgagatgatttgggatcctaatggatggacagataccgacagtgatttctcagtg

SEQ ID NO: 56485 - DNA, 60 bp, Artificial
  Synthetic oligonucleotide
ggatttgagatgatttgggatcctaatggatggacagataccgacagtgatttctcagtg

SEQ ID NO: 56486 - DNA, 60 bp, Artificial
  Synthetic oligonucleotide
gtgagacatagactgaagataacagagaatagttttgagcaaataacatttatgcaagcc

SEQ ID NO: 56487 - DNA, 60 bp, Artificial
  Synthetic oligonucleotide
gtgagacacaaactgaagataacagagaatagttttgagcaaataacatttatgcaagcc

SEQ ID NO: 56488 - DNA, 60 bp, Artificial
  Synthetic oligonucleotide
actcagaaagggatttgagatgatttgggatcctaatggatggacagataccgacagtga

SEQ ID NO: 56489 - DNA, 60 bp, Artificial
  Synthetic oligonucleotide
tgggtttgttgccaatttcagcatggagcttcccagttttggggtgtctgggatcaacga

SEQ ID NO: 56490 - DNA, 60 bp, Artificial
  Synthetic oligonucleotide
gggtttgttgccaatttcagcatggagcttcccagttttggggtgtctgggatcaacgag

SEQ ID NO: 56491 - DNA, 58 bp, Artificial
  Synthetic oligonucleotide
gtgttcacgctcaccgtgcccagtgagcgaggactgcagcgtagacgcttcgtccaaa

SEQ ID NO: 56492 - DNA, 60 bp, Artificial
  Synthetic oligonucleotide
gagactgtaacaacccgatcactgggagcccgggagctcctggggtcaaaggattcggtt

SEQ ID NO: 56493 - DNA, 60 bp, Artificial
  Synthetic oligonucleotide
gttgaattaataagaggaaggccagaagaagccaagtatgtttggtggacgagcaacagt

SEQ ID NO: 56494 - DNA, 60 bp, Artificial
  Synthetic oligonucleotide
gagactgcagtaatccaatcactgggagtccgggagctcctggggtcaaaggattcggtt

SEQ ID NO: 56495 - DNA, 60 bp, Artificial
  Synthetic oligonucleotide
actaaggggattttaggatttgtgtttacactcaccgtgcccagtgagcgaggactgcag

SEQ ID NO: 56496 - DNA, 60 bp, Artificial
  Synthetic oligonucleotide
atgcatctcagcaacaggaatgacactatccgtagtaagtctgctagtaggattggccaa

SEQ ID NO: 56497 - DNA, 51 bp, Artificial
  Synthetic oligonucleotide
gatgggtcttatttcttcggagacaatgcagaggagtatgacaattaaaga

SEQ ID NO: 56498 - DNA, 60 bp, Artificial
  Synthetic oligonucleotide
gttgtcactgcccaggaattagtggaatcgcaacatctaccggaattgtgtcctagccct

SEQ ID NO: 56499 - DNA, 60 bp, Artificial
  Synthetic oligonucleotide
tacgagtgcatgaggggtatgaagagttcacaatggttgggagaagagcaacagctattc

SEQ ID NO: 56500 - DNA, 60 bp, Artificial
  Synthetic oligonucleotide
gactgcatcattgagccctggaatgatgatgggcatgttcaatatgttaagcactgtatt

SEQ ID NO: 56501 - DNA, 60 bp, Artificial
  Synthetic oligonucleotide
cgaccattagaaacaagcactcaaacggaacaatacacgacaggactgctttcagagggc

SEQ ID NO: 56502 - DNA, 51 bp, Artificial
  Synthetic oligonucleotide
gaaggatcttatttcttcggagacaatgcagaggagtacgacaattaaaga

SEQ ID NO: 56503 - DNA, 60 bp, Artificial
  Synthetic oligonucleotide
tgatgggcatgttcaacatgctaagtacagttttgggagtctcaattctaaatctagggc

SEQ ID NO: 56504 - DNA, 60 bp, Artificial
  Synthetic oligonucleotide
ccgaagatccagatgaaggcacagctggagtggagtctgctgttctaagaggattcctca

SEQ ID NO: 56505 - DNA, 60 bp, Artificial
  Synthetic oligonucleotide
aggaacatagtgagaagagctgcagtatcagcagatccactagcatctttattggagatg

SEQ ID NO: 56506 - DNA, 60 bp, Artificial
  Synthetic oligonucleotide
caaagcttgattattgctgctaggaacatagtgagaagagctgcagtatcagcagaccca

SEQ ID NO: 56507 - DNA, 60 bp, Artificial
  Synthetic oligonucleotide
ttcaggcacttagggacaacctggaacctggaaccttcgatcttggagggctatatgaag

SEQ ID NO: 56508 - DNA, 60 bp, Artificial
  Synthetic oligonucleotide
atctttaagaggaagaggcagcactcttggtctggacatcgaaacggccactcgtgctgg

SEQ ID NO: 56509 - DNA, 60 bp, Artificial
  Synthetic oligonucleotide
gcaggcaaaccatttgaatggatgtcaatccgactttacttttcttgaaagtcccagcgc

SEQ ID NO: 56510 - DNA, 60 bp, Artificial
  Synthetic oligonucleotide
caataattgtggccatggtattttcacaagaggattgcatgatcaaagcagttcgaggtg

SEQ ID NO: 56511 - DNA, 60 bp, Artificial
  Synthetic oligonucleotide
gtcggcatgcaaatgggactatacatgacagaagcccatttagggcattaataagttggg

SEQ ID NO: 56512 - DNA, 60 bp, Artificial
  Synthetic oligonucleotide
cagccagggtaccacactaaggggtagacatgcaaatgggactatacatgacagaagccc

SEQ ID NO: 56513 - DNA, 60 bp, Artificial
  Synthetic oligonucleotide
gccaaggtaccacactacggggtcggcatgcaaatgggactatacatgacagaagcccgt

SEQ ID NO: 56514 - DNA, 60 bp, Artificial
  Synthetic oligonucleotide
tcccataatgggaaaagcagtttttacagaaatttgctatggctgacggggaagaatggc

SEQ ID NO: 56515 - DNA, 60 bp, Artificial
  Synthetic oligonucleotide
tcccataatgggaaaagcagtttttacagaaatttgctatggctgacgaagaagaatggc

SEQ ID NO: 56516 - DNA, 60 bp, Artificial
  Synthetic oligonucleotide
ggaccaagccataatgggcaagagaatcatcctcaaagcaaatttctcagtcctgtttga

SEQ ID NO: 56517 - DNA, 60 bp, Artificial
  Synthetic oligonucleotide
ggcatttacagaagatggtgctatcgtggctgtaatatctcctattccctccatgccagg

SEQ ID NO: 56518 - DNA, 60 bp, Artificial
  Synthetic oligonucleotide
gcaaatttctcagtcctgtttgatcaattagagacactagtctctctgagggcatttaca

SEQ ID NO: 56519 - DNA, 55 bp, Artificial
  Synthetic oligonucleotide
gaagtttgaagaaatcagatggctcattgctgaatgcagaaatatactgacaaag

SEQ ID NO: 56520 - DNA, 60 bp, Artificial
  Synthetic oligonucleotide
gccattgcctccagtcctgctcctcgatacattatggacatgagcatagaggagataagc

SEQ ID NO: 56521 - DNA, 60 bp, Artificial
  Synthetic oligonucleotide
gcaaataacattcttgcaggcattgcaactcttactcgaggttgagagtgaaataaggac

SEQ ID NO: 56522 - DNA, 60 bp, Artificial
  Synthetic oligonucleotide
cctcgtttcaggtagattgttatctatggcacataagaaagctgctcagtatgagagaca

SEQ ID NO: 56523 - DNA, 60 bp, Artificial
  Synthetic oligonucleotide
acctaagagtggccacaatggaagggaaaaagattgttgaggacattctagaaagcgaga

SEQ ID NO: 56524 - DNA, 60 bp, Artificial
  Synthetic oligonucleotide
tggtgctatcgtggctgtaatatctcctattccctccatgccaggacattctacagagga

SEQ ID NO: 56525 - DNA, 60 bp, Artificial
  Synthetic oligonucleotide
cctttgacatgaataatgaggggtcttatttcttcggagacaatgcagaggagtatgaca

SEQ ID NO: 56526 - DNA, 57 bp, Artificial
  Synthetic oligonucleotide
ccctaaaaggaagaggcaacacccttggcctcgacatcgaaacagccactcttgttg

SEQ ID NO: 56527 - DNA, 60 bp, Artificial
  Synthetic oligonucleotide
aagtggcgagagcaattgggacagaaatttgaggaaataaggtggttaattgaagaagtg

SEQ ID NO: 56528 - DNA, 60 bp, Artificial
  Synthetic oligonucleotide
gggtgacaaagacataatggattccaccactgtgtcaagctttcaggtagactgtttcct

SEQ ID NO: 56529 - DNA, 60 bp, Artificial
  Synthetic oligonucleotide
cttgaagtggagcaagagataagaactttctcgtttcagcttatttaatgataaaaaaca

SEQ ID NO: 56530 - DNA, 60 bp, Artificial
  Synthetic oligonucleotide
aatggatcaggccattatggacaagaggataatactcaaggcgaacttctctgtcctgtt

SEQ ID NO: 56531 - DNA, 60 bp, Artificial
  Synthetic oligonucleotide
ccaggaatctttgaaaactcgtgtcttgaaacgatggaagttgttcaacaaacaagggtg

SEQ ID NO: 56532 - DNA, 60 bp, Artificial
  Synthetic oligonucleotide
cgataaccggagggagcccagatcctggcgtaaaaggatttgcattcttagatgggggaa

SEQ ID NO: 56533 - DNA, 60 bp, Artificial
  Synthetic oligonucleotide
ggagcaaatggagtgaaggggttttcatttagatatggcaatggtgtttggataggaaga

SEQ ID NO: 56534 - DNA, 60 bp, Artificial
  Synthetic oligonucleotide
atggagcaaatggagtgaaggggttttcatttagatatggcaatggtgtttggataggaa

SEQ ID NO: 56535 - DNA, 59 bp, Artificial
  Synthetic oligonucleotide
tggataggaagaactaaaagtatcagctctagaagtggatttgagatgatttgggatcc

SEQ ID NO: 56536 - DNA, 60 bp, Artificial
  Synthetic oligonucleotide
ggagcaaatggagtgaaaggattctcatttagatatggcaatggtgtttggataggaaga

SEQ ID NO: 56537 - DNA, 60 bp, Artificial
  Synthetic oligonucleotide
caacccgcgttctaatgatgggaaaggcaattgtggcccagtactttctaatggagcaaa

SEQ ID NO: 56538 - DNA, 60 bp, Artificial
  Synthetic oligonucleotide
taacccgcgttctaatgatgggaaaggcaattgtggcccagtactttctaatggagcaaa

SEQ ID NO: 56539 - DNA, 60 bp, Artificial
  Synthetic oligonucleotide
atggagcaaatggagtgaaaggattctcatttagatatggcaatggtgtttggataggaa

SEQ ID NO: 56540 - DNA, 60 bp, Artificial
  Synthetic oligonucleotide
cccgcgttctaatgatgggaaaggcaattgtggcccagtactttctaatggagcaaatgg

SEQ ID NO: 56541 - DNA, 60 bp, Artificial
  Synthetic oligonucleotide
caggatacagtggaagttttgttcaacatcctgaattaacaggaatgaactgcataaggc

SEQ ID NO: 56542 - DNA, 60 bp, Artificial
  Synthetic oligonucleotide
tggataggaagaactaaaagtatcagctctagaagtggatttgagatgatttgggatcct

SEQ ID NO: 56543 - DNA, 60 bp, Artificial
  Synthetic oligonucleotide
tgtggtgtggacagtgaaaccacaagctggtcatggccagacggagctgatctgccattc

SEQ ID NO: 56544 - DNA, 60 bp, Artificial
  Synthetic oligonucleotide
ggcgtgaacagtgaaactgcaagctggtcatggccagacggagctgatctgccattcacc

SEQ ID NO: 56545 - DNA, 60 bp, Artificial
  Synthetic oligonucleotide
ggtgtggacagtgaaaccacaagctggtcatggccagacggagctgatctgccattcacc

SEQ ID NO: 56546 - DNA, 60 bp, Artificial
  Synthetic oligonucleotide
gttttgttcaacatcctgaattaacaggaatgaactgcataaggccttgtttctgggtag

SEQ ID NO: 56547 - DNA, 60 bp, Artificial
  Synthetic oligonucleotide
caacaccctgaattaacaggaatgaactgcataaggccttgtttctgggtagagttaatc

SEQ ID NO: 56548 - DNA, 60 bp, Artificial
  Synthetic oligonucleotide
acaggaatgaactgcataaggccttgtttctgggtagagttaatcagagggcaacccaag

SEQ ID NO: 56549 - DNA, 60 bp, Artificial
  Synthetic oligonucleotide
tgtggcgtgaacagtgaaactgcaagctggtcatggccagacggagctgatctgccattc

SEQ ID NO: 56550 - DNA, 60 bp, Artificial
  Synthetic oligonucleotide
ctaatggaaccgtcaaggacaggagtccttatagaaccttaatgagttgccccatcggag

SEQ ID NO: 56551 - DNA, 60 bp, Artificial
  Synthetic oligonucleotide
cgtcaaggacaggagtccttatagaaccttaatgagctgccccatcggtgaagctccatc

SEQ ID NO: 56552 - DNA, 60 bp, Artificial
  Synthetic oligonucleotide
gacccaaggcgctttgctgaatgacaggcattctaatggaaccgtcaaggacaggagtcc

SEQ ID NO: 56553 - DNA, 60 bp, Artificial
  Synthetic oligonucleotide
aatgacaggcattctaatggaaccgtcaaggacaggagtccttatagaaccttaatgagt

SEQ ID NO: 56554 - DNA, 60 bp, Artificial
  Synthetic oligonucleotide
ttttttctgacccaaggcgctttgctgaatgacaggcattctaatggaaccgtcaaggac

SEQ ID NO: 56555 - DNA, 50 bp, Artificial
  Synthetic oligonucleotide
ttttctgacccaaggcgctttgctgaatgacaggcattctaatggaaccg

SEQ ID NO: 56556 - DNA, 60 bp, Artificial
  Synthetic oligonucleotide
tatatacagcaaagacaatagcataaggattggttccaaaggggacatttttgtcataag

SEQ ID NO: 56557 - DNA, 60 bp, Artificial
  Synthetic oligonucleotide
gctctcactttgagtgcagaaccttttttctgacccaaggcgctttgctgaatgacaggc

SEQ ID NO: 56558 - DNA, 60 bp, Artificial
  Synthetic oligonucleotide
tcgtacaaaatattcaaaatggagaaagggaagattattaaatcgattgaactggatgca

SEQ ID NO: 56559 - DNA, 61 bp, Artificial
  Synthetic oligonucleotide
cgtacaaaatattcaaaatggagaaagggaagattattaaatcgattgaactggatgcacc

SEQ ID NO: 56560 - DNA, 57 bp, Artificial
  Synthetic oligonucleotide
gcagataggaaatatagtctcgttatggataagccattcaattcagactggagaaaa

SEQ ID NO: 56561 - DNA, 60 bp, Artificial
  Synthetic oligonucleotide
tcaataatactagccggcaattcctctctttgcccaataagtgggtgggctatatacagc

SEQ ID NO: 56562 - DNA, 60 bp, Artificial
  Synthetic oligonucleotide
tagtctattattgcagataggaaatatagtctcgttatggataagccactcaattcagac

SEQ ID NO: 56563 - DNA, 60 bp, Artificial
  Synthetic oligonucleotide
attgcagataggaaatatagtctcgttatggataagccactcaattcagaccggggaaaa

SEQ ID NO: 56564 - DNA, 60 bp, Artificial
  Synthetic oligonucleotide
gcagataggaaatatagtctcgttatggataagccattcaattcagactggagaaaaaag

SEQ ID NO: 56565 - DNA, 60 bp, Artificial
  Synthetic oligonucleotide
cgacatgagcattggagtaacagtgataaagaacaacatgataaacaatgatcttggacc

SEQ ID NO: 56566 - DNA, 60 bp, Artificial
  Synthetic oligonucleotide
ctgaaactctacagagattcgcttggagaagcagtaatgagaatgggagacctccactcc

SEQ ID NO: 56567 - DNA, 60 bp, Artificial
  Synthetic oligonucleotide
agaacgccagaatgccactgaaatcagagcatctgttgggagaatggttggtggaatcgg

SEQ ID NO: 56568 - DNA, 60 bp, Artificial
  Synthetic oligonucleotide
gatcttggagggctatatgaagcaattgaggagtgcctgattaatgatccctgggttttg

SEQ ID NO: 56569 - DNA, 60 bp, Artificial
  Synthetic oligonucleotide
gcaaaccatttgaatggatgtcaatccgactttacttttcttaaaagtgccagcacaaaa

SEQ ID NO: 56570 - DNA, 60 bp, Artificial
  Synthetic oligonucleotide
ccgagtgatggtatcacctctggctgtgacatggtggaataggaatggaccaacaacaag

SEQ ID NO: 56571 - DNA, 60 bp, Artificial
  Synthetic oligonucleotide
ttcacgctacctaactgacatgactcttgaagagatgtcaagggactggttcatgctcat

SEQ ID NO: 56572 - DNA, 60 bp, Artificial
  Synthetic oligonucleotide
tttgaggcaaatggaaatctaatagcgccatggtatgctttcgcactgagtagaggcttt

SEQ ID NO: 56573 - DNA, 60 bp, Artificial
  Synthetic oligonucleotide
ttgaggcaaatggaaatctaatagcgccatggtatgctttcgcactgagtagaggctttg

SEQ ID NO: 56574 - DNA, 50 bp, Artificial
  Synthetic oligonucleotide
gaggatcaggaatgaggatactggtaagaggcaattctccagtgttcaat

SEQ ID NO: 56575 - DNA, 60 bp, Artificial
  Synthetic oligonucleotide
atcagaggcaggccaaaagagagtagtgtattgtggacgtccaatagtatagtagcactc

SEQ ID NO: 56576 - DNA, 60 bp, Artificial
  Synthetic oligonucleotide
ggataatccacgccctaatgataggacaggcagttgtggtccagtatcttctaatggagc

SEQ ID NO: 56577 - DNA, 60 bp, Artificial
  Synthetic oligonucleotide
cagtgggatttttggggataatccacgccctaatgataggacaggcagttgtggtccagt

SEQ ID NO: 56578 - DNA, 60 bp, Artificial
  Synthetic oligonucleotide
attctaatggaaccattaaagacaggagcccatatcgaaccttgatgagctgtcctgttg

SEQ ID NO: 56579 - DNA, 58 bp, Artificial
  Synthetic oligonucleotide
ggcccagataatggggcagtggctgtgctgaaatacaatggcataataacagacacta

SEQ ID NO: 56580 - DNA, 60 bp, Artificial
  Synthetic oligonucleotide
gacagaagcccatatcgaaccttgatgagctgtcctattggtgaagttccttctccatac

SEQ ID NO: 56581 - DNA, 60 bp, Artificial
  Synthetic oligonucleotide
gcagtgggattttcggagacaatccgcgccctaatgataggacaggcagttgtggtccag

SEQ ID NO: 56582 - DNA, 53 bp, Artificial
  Synthetic oligonucleotide
agacaatggggcagtggctgtgctgaaatacaatggcataataacagacacta

SEQ ID NO: 56583 - DNA, 60 bp, Artificial
  Synthetic oligonucleotide
atagtgggagttttgttcagcatccagaattgaccggactggattgtatgagaccttgct

SEQ ID NO: 56584 - DNA, 60 bp, Artificial
  Synthetic oligonucleotide
tctctctatcgtcccgtcaggccccctcaaagccgagatcgcgcagagacttgaagatgt

SEQ ID NO: 56585 - DNA, 60 bp, Artificial
  Synthetic oligonucleotide
ctctatcgtcccgtcaggccccctcaaagccgagatcgcgcagagactggaagatgtctt

SEQ ID NO: 56586 - DNA, 60 bp, Artificial
  Synthetic oligonucleotide
gatcttggggggctatacgaagcaattgaggagtgcctgattaatgatccctgggttttg

SEQ ID NO: 56587 - DNA, 60 bp, Artificial
  Synthetic oligonucleotide
ccgatcctgtcacctctgactaaggggattttaggatttgtgttcacgctcaccgtgccc

SEQ ID NO: 56588 - DNA, 60 bp, Artificial
  Synthetic oligonucleotide
tcctgtcacctctgactaaggggattttaggatttgtgttcacgctcaccgtgcccagtg

SEQ ID NO: 56589 - DNA, 60 bp, Artificial
  Synthetic oligonucleotide
gacaagaccgatcctgtcacctctgactaaggggattttaggatttgtgttcacgctcac

SEQ ID NO: 56590 - DNA, 60 bp, Artificial
  Synthetic oligonucleotide
gcatttacagctacatatgcagacacaatatgtataggctaccatgcgaacaactcaacc

SEQ ID NO: 56591 - DNA, 59 bp, Artificial
  Synthetic oligonucleotide
gtgtgcatttacagctacatatgcagacacaatatgtataggctaccatgcgaacaact

SEQ ID NO: 56592 - DNA, 60 bp, Artificial
  Synthetic oligonucleotide
gtgtgcatttacagctacatatgcagacacaatatgtataggctaccatgcgaacaactc

SEQ ID NO: 56593 - DNA, 60 bp, Artificial
  Synthetic oligonucleotide
gtggcaggttccctttgcatcagaatggaccaggcaataatggacaaaaccatcacattg

SEQ ID NO: 56594 - DNA, 60 bp, Artificial
  Synthetic oligonucleotide
gcagaaagtggcaggttccctttgcatcagaatggaccaggcaataatggtaaaaaacat

SEQ ID NO: 56595 - DNA, 60 bp, Artificial
  Synthetic oligonucleotide
gcagaaagtggcaggttccctttgcatcagaatggaccaggcaataatggacaaaaccat

SEQ ID NO: 56596 - DNA, 55 bp, Artificial
  Synthetic oligonucleotide
gcagaaagtggcaggttccctttgcatcagaatggaccaggcaataatggtaaaa

SEQ ID NO: 56597 - DNA, 60 bp, Artificial
  Synthetic oligonucleotide
gcagaaagtggcaggttccctttgcatcagaatggaccaggcaataatggataaaaacat

SEQ ID NO: 56598 - DNA, 60 bp, Artificial
  Synthetic oligonucleotide
ataaaaacatcacattgaaagcaaacttcagtgtgatttttgatcgactggaaactctaa

SEQ ID NO: 56599 - DNA, 60 bp, Artificial
  Synthetic oligonucleotide
cagaatggaccaggcaataatggataaaaacatcacattgaaagcaaacttcagtgtgat

SEQ ID NO: 56600 - DNA, 60 bp, Artificial
  Synthetic oligonucleotide
taaaaaacatcacattgaaagcaaacttcagtgtgatttttgatcgactggaaactctaa

SEQ ID NO: 56601 - DNA, 60 bp, Artificial
  Synthetic oligonucleotide
cagaatggaccaggcaattatggataagaacatcatactgaaagcgaacttcagtgtgat

SEQ ID NO: 56602 - DNA, 60 bp, Artificial
  Synthetic oligonucleotide
gaatggaccaggcaattatggataagaacatcatactgaaagcgaacttcagtgtgatct

SEQ ID NO: 56603 - DNA, 60 bp, Artificial
  Synthetic oligonucleotide
gcaggcaaaccatttgaatggatgtcaatccgacattacttttcttaaaagtgccagcac

SEQ ID NO: 56604 - DNA, 60 bp, Artificial
  Synthetic oligonucleotide
gaaagcaggcaaaccatttgaatggatgtcaatccgacattacttttcttaaaagtgcca

SEQ ID NO: 56605 - DNA, 60 bp, Artificial
  Synthetic oligonucleotide
taacacactctgttaaccttctagaagacagacataacggaaaactgtgtaaactagggg

SEQ ID NO: 56606 - DNA, 60 bp, Artificial
  Synthetic oligonucleotide
aacacactctgttaaccttctagaagacagacataacggaaaactatgtaagctaagggg

SEQ ID NO: 56607 - DNA, 60 bp, Artificial
  Synthetic oligonucleotide
caaaccatttgaatggatgtcaatccgactttacttttcttaaaagtgccagcacaaaat

SEQ ID NO: 56608 - DNA, 60 bp, Artificial
  Synthetic oligonucleotide
tagcgccatggtatgctttcgcactgagtagaggctttgggtcaggaatcatcacctcaa

SEQ ID NO: 56609 - DNA, 60 bp, Artificial
  Synthetic oligonucleotide
tgctggctttatagagaatggctggcaaggcctaattgatgggtggtatgggttcaggca

SEQ ID NO: 56610 - DNA, 60 bp, Artificial
  Synthetic oligonucleotide
gtgacagtgacacactctgttaacctgctcgaagacagccacaacggaaaactatgtaga

SEQ ID NO: 56611 - DNA, 60 bp, Artificial
  Synthetic oligonucleotide
acagtgacacactctgttaacctgctcgaagacagccacaacggaaaactatgtagatta

SEQ ID NO: 56612 - DNA, 60 bp, Artificial
  Synthetic oligonucleotide
ctgtgtcaagctttcaggtagactgctttctttggcatatccgcaaacgatttgcagacc

SEQ ID NO: 56613 - DNA, 60 bp, Artificial
  Synthetic oligonucleotide
gctgctcagcatgagagacatgtgtgatgctccctttgatgatagactcagaagagatca

SEQ ID NO: 56614 - DNA, 60 bp, Artificial
  Synthetic oligonucleotide
ggcacataagagagctgctcagcatgagagacatgtgtgatgctccctttgatgatagac

SEQ ID NO: 56615 - DNA, 60 bp, Artificial
  Synthetic oligonucleotide
tatctatggcacataagaaagctgctcagcatgagagacatgtgtgatgctccctttgat

SEQ ID NO: 56616 - DNA, 60 bp, Artificial
  Synthetic oligonucleotide
tatctatggcacataagagagctgctcagcatgagagacatgtgtgatgctccctttgat

SEQ ID NO: 56617 - DNA, 60 bp, Artificial
  Synthetic oligonucleotide
ggcacataagaaagctgctcagcatgagagacatgtgtgatgctccctttgatgatagac

SEQ ID NO: 56618 - DNA, 60 bp, Artificial
  Synthetic oligonucleotide
gctgctcagtatgagagacatgtgtgatgctccctttgatgatagactccgaagagacca

SEQ ID NO: 56619 - DNA, 60 bp, Artificial
  Synthetic oligonucleotide
agacatgtgtgatgctccctttgatgatagactcagaagagatcaaaaggcattaaaggg

SEQ ID NO: 56620 - DNA, 60 bp, Artificial
  Synthetic oligonucleotide
agaaagctgctcagcatgagagacatgtgtgatgctccctttgatgatagactcaggaga

SEQ ID NO: 56621 - DNA, 60 bp, Artificial
  Synthetic oligonucleotide
gaccaaaaggcattaaagggaagaggcagcacacttggactcgacctaagagtggccaca

SEQ ID NO: 56622 - DNA, 60 bp, Artificial
  Synthetic oligonucleotide
ccctctggagcaaaacaaatgatgccggctcagaccgagtgatggtatcacctctggctg

SEQ ID NO: 56623 - DNA, 60 bp, Artificial
  Synthetic oligonucleotide
gggaaagggtacatgttcgaaagtaagagcatgaagctccgaacacaaataccagcagag

SEQ ID NO: 56624 - DNA, 60 bp, Artificial
  Synthetic oligonucleotide
gcagacacaatatgtataggctaccatgcgaacaactcaaccgacactgttgacacagta

SEQ ID NO: 56625 - DNA, 60 bp, Artificial
  Synthetic oligonucleotide
cagacacaatatgtataggctaccatgcgaacaactcaaccgacactgttgacacagtac

SEQ ID NO: 56626 - DNA, 60 bp, Artificial
  Synthetic oligonucleotide
tagcagcaagacccaaggtgagaggtcaagcagggaggatgagctattactggacactaa

SEQ ID NO: 56627 - DNA, 60 bp, Artificial
  Synthetic oligonucleotide
cttcctttgacatgagtaacgaagggtcttatttcttcggagacaatgcagaggagtatg

SEQ ID NO: 56628 - DNA, 56 bp, Artificial
  Synthetic oligonucleotide
gctcaccgtgcccagtgagcgaggactgcagcgtagacgctttgtccaaaatgccc

SEQ ID NO: 56629 - DNA, 60 bp, Artificial
  Synthetic oligonucleotide
cggccattattaatagatggaactgcatcattgagtcctggaatgatgatgggcatgttc

SEQ ID NO: 56630 - DNA, 60 bp, Artificial
  Synthetic oligonucleotide
gctacatacgcagacacaatatgtataggctaccatgccaacaactcaaccgacactgtt

SEQ ID NO: 56631 - DNA, 60 bp, Artificial
  Synthetic oligonucleotide
gctacatacgcagacacaatatgtataggctaccatgccaacaactcaacagacactgtt

SEQ ID NO: 56632 - DNA, 60 bp, Artificial
  Synthetic oligonucleotide
ctaatagagcctggagacacaataacattcgaagcaactggaaatctagtggtaccaaga

SEQ ID NO: 56633 - DNA, 60 bp, Artificial
  Synthetic oligonucleotide
ggcattcaccatccacccaccagtactgatcaacaaagtctctaccagaatgcagatgcc

SEQ ID NO: 56634 - DNA, 60 bp, Artificial
  Synthetic oligonucleotide
ggcattcaccatccacctaccagtactgaccaacaaagtctctaccagaatgcagatgcc

SEQ ID NO: 56635 - DNA, 60 bp, Artificial
  Synthetic oligonucleotide
ggaatgatgatgggcatgttcaacatgctaagtacagttttaggagtctcaatcttaaat

SEQ ID NO: 56636 - DNA, 60 bp, Artificial
  Synthetic oligonucleotide
tgactttctttgcgtgggatggtccagcactagttgccatgacggcatcggacggatgac

SEQ ID NO: 56637 - DNA, 60 bp, Artificial
  Synthetic oligonucleotide
ttgtgtattagaagcaatggctttccttgaagaatcccatcctggtatttttgaaaactc

SEQ ID NO: 56638 - DNA, 60 bp, Artificial
  Synthetic oligonucleotide
atggactccaacactgtgtcaagctttcaggtagactgtttcctttggcatatccgcaaa

SEQ ID NO: 56639 - DNA, 60 bp, Artificial
  Synthetic oligonucleotide
gtagataatcactcaccgagtgacatccacatcatggcgtctcaaggcaccaaacgatct

SEQ ID NO: 56640 - DNA, 60 bp, Artificial
  Synthetic oligonucleotide
atactgcaaactggtcttggccagacggtgctgagttgccgttcaccattgacaagtagt

SEQ ID NO: 56641 - DNA, 60 bp, Artificial
  Synthetic oligonucleotide
ttttagggtttgtgttcacgctcaccgtgcccagtgagcgaggactgcagcgtaaacgct

SEQ ID NO: 56642 - DNA, 60 bp, Artificial
  Synthetic oligonucleotide
ttttaggattcgtgttcacgctcaccgtgcccagtgagcgaggactgcagcgtagacgct

SEQ ID NO: 56643 - DNA, 60 bp, Artificial
  Synthetic oligonucleotide
cagtacttgagaagaatgtgacagtgacacactctgtcaacctacttgaggacagtcaca

SEQ ID NO: 56644 - DNA, 60 bp, Artificial
  Synthetic oligonucleotide
acttgagaagaatgtgacagtgacacactctgtcaacctacttgaggacagtcacaatgg

SEQ ID NO: 56645 - DNA, 60 bp, Artificial
  Synthetic oligonucleotide
ctggaccttgctaaaacccggagacacaataatatttgaggcaaatggaaatctaatagc

SEQ ID NO: 56646 - DNA, 59 bp, Artificial
  Synthetic oligonucleotide
ccgagtgacatccacatcatggcgtctcaaggcaccaaacgatcttatgaacaaatgga

SEQ ID NO: 56647 - DNA, 60 bp, Artificial
  Synthetic oligonucleotide
caccgagtgacatccacatcatggcgtctcaaggcaccaaacgatcttatgaacaaatgg

SEQ ID NO: 56648 - DNA, 60 bp, Artificial
  Synthetic oligonucleotide
cactgagtgacatccacatcatggcgtctcaaggcaccaaacgatcttatgagcaaatgg

SEQ ID NO: 56649 - DNA, 60 bp, Artificial
  Synthetic oligonucleotide
cactgagtgacatccacatcatggcgtctcaaggcaccaaacgatcttatgaacagatgg

SEQ ID NO: 56650 - DNA, 60 bp, Artificial
  Synthetic oligonucleotide
cactgagtgacatccacatcatggcgtctcaaggcaccaaacgatcttatgaacaaatgg

SEQ ID NO: 56651 - DNA, 60 bp, Artificial
  Synthetic oligonucleotide
gaagtgagacataaattgaagataacagagaatagttttgagcaaataacatttatgcaa

SEQ ID NO: 56652 - DNA, 60 bp, Artificial
  Synthetic oligonucleotide
ttgaagaagtgagacacaaactgaagataacagagaatagttttgagcaaataacattta

SEQ ID NO: 56653 - DNA, 60 bp, Artificial
  Synthetic oligonucleotide
ttgaagaagtgagacatagactgaagataacagagaatagttttgagcaaataacattta

SEQ ID NO: 56654 - DNA, 60 bp, Artificial
  Synthetic oligonucleotide
aacggaaaatttgagttcattgctgaggaattccaatggaacacagtcaaacaaaatggg

SEQ ID NO: 56655 - DNA, 60 bp, Artificial
  Synthetic oligonucleotide
ctagcaaacaatgggaaatttgagttcattgctgaggaattccaatggaacacagtcaag

SEQ ID NO: 56656 - DNA, 60 bp, Artificial
  Synthetic oligonucleotide
cattgctgaggaattccaatggaacacagtcaaacaaaatgggaaatccggggcatgcaa

SEQ ID NO: 56657 - DNA, 60 bp, Artificial
  Synthetic oligonucleotide
aatgggaaatttgagttcattgctgaggaattccaatggaacacagtcaagcaaaatggg

SEQ ID NO: 56658 - DNA, 60 bp, Artificial
  Synthetic oligonucleotide
acgattctgtttctgctcatagcagagggctcctctcagaattacacggggaatcctgtg

SEQ ID NO: 56659 - DNA, 60 bp, Artificial
  Synthetic oligonucleotide
tggaaaatttgagttcattgctgaggaattccaatggaacacagtcaaacaaaatgggaa

SEQ ID NO: 56660 - DNA, 60 bp, Artificial
  Synthetic oligonucleotide
ttagcaaacaacggaaaatttgagttcattgctgaggaattccaatggaacacagtcaaa

SEQ ID NO: 56661 - DNA, 60 bp, Artificial
  Synthetic oligonucleotide
acaatgctgtcaattacgattctgtttctgctcatagcagagggctcctctcagaattac

SEQ ID NO: 56662 - DNA, 60 bp, Artificial
  Synthetic oligonucleotide
ctggcaaacaatgggaaatttgagttcattgctgaggaattccaatggaacacagtcaag

SEQ ID NO: 56663 - DNA, 60 bp, Artificial
  Synthetic oligonucleotide
tcacgattctgtttctgctcatagcagagggctcctctcagaattacacggggaatcctg

SEQ ID NO: 56664 - DNA, 60 bp, Artificial
  Synthetic oligonucleotide
ggattccaacactgtgtcaagctttcaggtagattgcttcctttggcatgtccgcaaaca

SEQ ID NO: 56665 - DNA, 60 bp, Artificial
  Synthetic oligonucleotide
gtccgcaccggaatggatcccaggatgtgctctctgatgcagggttcaactctccctagg

SEQ ID NO: 56666 - DNA, 60 bp, Artificial
  Synthetic oligonucleotide
cagttctcctccttgactgtgaatgtgagaggatcaggaatgaggatactggtaagaggc

SEQ ID NO: 56667 - DNA, 60 bp, Artificial
  Synthetic oligonucleotide
agctctacagagattcgcttggagaagcattaatgaggacaggagacctccattccctcc

SEQ ID NO: 56668 - DNA, 60 bp, Artificial
  Synthetic oligonucleotide
atgaaaagaggttctggatctggtattatcatttcagatacaccagtccacgattgcaac

SEQ ID NO: 56669 - DNA, 60 bp, Artificial
  Synthetic oligonucleotide
gaccaggcgattatggataagaacatcatactgaaagcgaacttcagtgtgatctttgat

SEQ ID NO: 56670 - DNA, 60 bp, Artificial
  Synthetic oligonucleotide
tacagaaatacagactcagcagaacatcttatagtctggggaattcaccatccctctagc

SEQ ID NO: 56671 - DNA, 60 bp, Artificial
  Synthetic oligonucleotide
gactcagcagaacatcttatagtctggggaattcaccatccctctagcacacaagaaaag

SEQ ID NO: 56672 - DNA, 60 bp, Artificial
  Synthetic oligonucleotide
cttgaggctctcatggagtggctaaagacaagaccaatcctgtcacctctgactaaggga

SEQ ID NO: 56673 - DNA, 54 bp, Artificial
  Synthetic oligonucleotide
taaccggagggagcccagatcctggcgtaaaaggatttgcattcttagatgggg

SEQ ID NO: 56674 - DNA, 60 bp, Artificial
  Synthetic oligonucleotide
ccagaaatagcagcgagacccaaggtgagaggtcaagcagggaggatgaactattactgg

SEQ ID NO: 56675 - DNA, 60 bp, Artificial
  Synthetic oligonucleotide
caagccagaaatagcagaaagacccaaggtgagaggtcaagcagggaggatgaactatta

SEQ ID NO: 56676 - DNA, 60 bp, Artificial
  Synthetic oligonucleotide
agagcctacggagcatcttagcaaacaatgggaaatttgagttcattgctgaggaattcc

SEQ ID NO: 56677 - DNA, 60 bp, Artificial
  Synthetic oligonucleotide
cacaatatgtataggctaccatgccaacaactcaaccgacactgttgacacagtacttga

SEQ ID NO: 56678 - DNA, 51 bp, Artificial
  Synthetic oligonucleotide
cagaaacgaggcaatcaataacagattccagatacaaggagtcaaattgac

SEQ ID NO: 56679 - DNA, 51 bp, Artificial
  Synthetic oligonucleotide
cagagatgaggcaatcaataacagattccagatacaaggagtcaaattgac

SEQ ID NO: 56680 - DNA, 60 bp, Artificial
  Synthetic oligonucleotide
gtgcaacatcctgaaagggaaattccaaacagcagcacaacgagcaatgatggaccaagt

SEQ ID NO: 56681 - DNA, 60 bp, Artificial
  Synthetic oligonucleotide
acaactgtccaccagaggagttcagattgcttcaaatgagaacatggagacaatggactc

SEQ ID NO: 56682 - DNA, 60 bp, Artificial
  Synthetic oligonucleotide
agaatgccactgaaatcagagcatctgttgggagaatggttggtggaatcgggagattct

SEQ ID NO: 56683 - DNA, 60 bp, Artificial
  Synthetic oligonucleotide
tgatgcaggatcagaccgagtgatggtatcacctctggctgtgacatggtggaataggaa

SEQ ID NO: 56684 - DNA, 56 bp, Artificial
  Synthetic oligonucleotide
tgcttgaagtggagcaagagataagaactttctcgtttcagcttatttaataataa

SEQ ID NO: 56685 - DNA, 60 bp, Artificial
  Synthetic oligonucleotide
atcttggagggctatacgaagcaattgaggagtgcctgattaatgatccctgggttttgc

SEQ ID NO: 56686 - DNA, 60 bp, Artificial
  Synthetic oligonucleotide
gtcaattgctgaagcaataattgtggccatggtattttcacaagaggattgcatgatcaa

SEQ ID NO: 56687 - DNA, 50 bp, Artificial
  Synthetic oligonucleotide
gcgaccaaaagacttcggatggccatcaattagtgtcgaattgtttaaaa

SEQ ID NO: 56688 - DNA, 60 bp, Artificial
  Synthetic oligonucleotide
atatttaaagatgagtcttctaaccgaggtcgaaacgtacgttctctctatcgtcccgtc

SEQ ID NO: 56689 - DNA, 60 bp, Artificial
  Synthetic oligonucleotide
atattgaaagatgagtcttctaaccgaggtcgaaacgtacgttctctctatcgtcccgtc

SEQ ID NO: 56690 - DNA, 60 bp, Artificial
  Synthetic oligonucleotide
acagtcagaagaagagcacaattctaaatactgcagttcccataggatcttgcgttagta

SEQ ID NO: 56691 - DNA, 60 bp, Artificial
  Synthetic oligonucleotide
cggccattattaatagatggaactgcatcactgagtcctggaatgatgatgggcatgttc

SEQ ID NO: 56692 - DNA, 60 bp, Artificial
  Synthetic oligonucleotide
atggggaccgccagaatgcaactgaaatcagagcatccgtcggaaaaatgattggtggaa

SEQ ID NO: 56693 - DNA, 60 bp, Artificial
  Synthetic oligonucleotide
gggagaatggttggtggaattggaagattctacatacagatgtgcactgaactcaaactc

SEQ ID NO: 56694 - DNA, 60 bp, Artificial
  Synthetic oligonucleotide
tctttgaaagagttagacgccagctacgagagaatgctgaggacaaagggaatggatgtt

SEQ ID NO: 56695 - DNA, 60 bp, Artificial
  Synthetic oligonucleotide
ggatcctcatcaaaggacttgaatggaatgataacacagttcgagtctctgaaactctac

SEQ ID NO: 56696 - DNA, 60 bp, Artificial
  Synthetic oligonucleotide
tgggatcctcatcgggggacttgaatggaatgataacacagttcgagtctctgaaactct

SEQ ID NO: 56697 - DNA, 60 bp, Artificial
  Synthetic oligonucleotide
ctatgttgaattgatcagaggcaggccaaaagagagtagtgtattgtggacgtccaatag

SEQ ID NO: 56698 - DNA, 60 bp, Artificial
  Synthetic oligonucleotide
gcttttatgtggaattgatcagaggcaggccaaaagagagtagtgtattgtggacgtcca

SEQ ID NO: 56699 - DNA, 60 bp, Artificial
  Synthetic oligonucleotide
ctatgtggaattgatcagaggcaggccaaaagagagtagtgtattgtggacgtccaatag

SEQ ID NO: 56700 - DNA, 53 bp, Artificial
  Synthetic oligonucleotide
caccgcaactcaacccgattgatgggccactgccagaagacaatgaaccaagt

SEQ ID NO: 56701 - DNA, 60 bp, Artificial
  Synthetic oligonucleotide
tcttggggggctatatgaagcaattgaggagtgcctggttaatgatccctgggttttgct

SEQ ID NO: 56702 - DNA, 60 bp, Artificial
  Synthetic oligonucleotide
gcgaacaactcaaccgacactgttgacacagtacttgagaagaacgtgacagtgacacac

SEQ ID NO: 56703 - DNA, 60 bp, Artificial
  Synthetic oligonucleotide
gtacatcctatcactattggagaatgtcccaaatacatcaagagcaccaagctaagaatg

SEQ ID NO: 56704 - DNA, 60 bp, Artificial
  Synthetic oligonucleotide
taagaaatgttccatccattcaatccagaggactatttggagcaattgctggattcattg

SEQ ID NO: 56705 - DNA, 60 bp, Artificial
  Synthetic oligonucleotide
gtacatcctatcactattggagaatgtcccaaatacgtcaagagcaccaagctaagaatg

SEQ ID NO: 56706 - DNA, 60 bp, Artificial
  Synthetic oligonucleotide
agtaaagttggagtcaacaaggatttaccagattttggcgatctattcaactgccgccag

SEQ ID NO: 56707 - DNA, 60 bp, Artificial
  Synthetic oligonucleotide
gatttaccagattttggcgatctattcaactgccgccagttcattggtactgttggtctc

SEQ ID NO: 56708 - DNA, 60 bp, Artificial
  Synthetic oligonucleotide
attcaacaaggatttaccagattttggcgatctattcaactgtcgccagttcattggtac

SEQ ID NO: 56709 - DNA, 60 bp, Artificial
  Synthetic oligonucleotide
gtcaggacctaataacaatgcttcggcagtggtctggtacaatggaaggccagtcaccga

SEQ ID NO: 56710 - DNA, 60 bp, Artificial
  Synthetic oligonucleotide
ctctttgaaagagtaaggcgtcaactcagagagaatgctgaagacaaagggaatgggtgt

SEQ ID NO: 56711 - DNA, 60 bp, Artificial
  Synthetic oligonucleotide
caagaacaaccctggaagagtcactgtgtctaccaaaactagtcaaacaagtgtagttcc

SEQ ID NO: 56712 - DNA, 60 bp, Artificial
  Synthetic oligonucleotide
ctctttgaaagagtaaggcgtcaactcagagaaaatgctgaagaccaaggaaatggctgc

SEQ ID NO: 56713 - DNA, 60 bp, Artificial
  Synthetic oligonucleotide
agactttacatctggggagttcatcacccttcaacagacacggagcagaccaatttgtac

SEQ ID NO: 56714 - DNA, 60 bp, Artificial
  Synthetic oligonucleotide
tgcacgagaactggtagagtcacaaaccctcccggaactatgtccgagccctctgagact

SEQ ID NO: 56715 - DNA, 60 bp, Artificial
  Synthetic oligonucleotide
gcccagcattgagcatcaatgagctgagcaatcttgcaaaaggagagaaggctaatgtgc

SEQ ID NO: 56716 - DNA, 60 bp, Artificial
  Synthetic oligonucleotide
gcccagcattgagtatcaatgagctgagcaatcttgcaaaaggagagaaggctaatgtgc

SEQ ID NO: 56717 - DNA, 60 bp, Artificial
  Synthetic oligonucleotide
gttgaactaataagaggaaggccagaagaagccaaatatgtttggtggacgagcaacagc

SEQ ID NO: 56718 - DNA, 60 bp, Artificial
  Synthetic oligonucleotide
agaacaacaatgaccaagacaaaaattggacgtgcacaagcataacacagaacaacacga

SEQ ID NO: 56719 - DNA, 60 bp, Artificial
  Synthetic oligonucleotide
tatgtttggtggacgagcaacagcttagttgcactgtgtggaagcccagtcccagttggg

SEQ ID NO: 56720 - DNA, 60 bp, Artificial
  Synthetic oligonucleotide
agaggaaggccagaagaagccaaatatgtttggtggacgagcaacagcttagttgcacta

SEQ ID NO: 56721 - DNA, 60 bp, Artificial
  Synthetic oligonucleotide
cattacacttaaagaacaacaatgaccaagacaaaaattggacgtgcacaagtataacac

SEQ ID NO: 56722 - DNA, 60 bp, Artificial
  Synthetic oligonucleotide
gggtctggttacgcagctgatcagaaaagcacacaaagtgcaattgacgggatcagcaac

SEQ ID NO: 56723 - DNA, 60 bp, Artificial
  Synthetic oligonucleotide
ggggtctggttacgcagctgatcagaaaagcacacaaagtgcaattgacgggatcagcaa

SEQ ID NO: 56724 - DNA, 60 bp, Artificial
  Synthetic oligonucleotide
aaatctaatagcaccatggtatgctttcgcactgaatagaggttctggatccggtatcat

SEQ ID NO: 56725 - DNA, 60 bp, Artificial
  Synthetic oligonucleotide
catgagtaatgaaggatcttatttcttcggagacaatgcagaggagtacgacaattaagg

SEQ ID NO: 56726 - DNA, 60 bp, Artificial
  Synthetic oligonucleotide
gatgcagttctcctccttgactgtgaatgtgagaggatcaggaatgaggatactggtaag

SEQ ID NO: 56727 - DNA, 60 bp, Artificial
  Synthetic oligonucleotide
caaactggtcttggccagacggtgctgagttgccattcaccattgacaagtagtccgttg

SEQ ID NO: 56728 - DNA, 60 bp, Artificial
  Synthetic oligonucleotide
gggctatacgaagcaattgaggaatgcctgattaatgatccctgggttttgcttaatgca

SEQ ID NO: 56729 - DNA, 60 bp, Artificial
  Synthetic oligonucleotide
cataaacaggacaggaacatttgaattcacaagctttttctatcgctatggatttgtagc

SEQ ID NO: 56730 - DNA, 60 bp, Artificial
  Synthetic oligonucleotide
tgagatgatttgggatcctaatggatggacagagactgatagtgagttctctgtgaggca

SEQ ID NO: 56731 - DNA, 60 bp, Artificial
  Synthetic oligonucleotide
gggtttgagatgatttgggatcctaatggatggacagagactgatagtaagttctctgtg

SEQ ID NO: 56732 - DNA, 60 bp, Artificial
  Synthetic oligonucleotide
tattcgagaaattcttccctagcagttcatacaggagaccggttggaatttccagcatgg

SEQ ID NO: 56733 - DNA, 60 bp, Artificial
  Synthetic oligonucleotide
tcttctaaccgaggtcgaaacgtacgttctctctatcgtcccgtcaggccccctcaaagc

SEQ ID NO: 56734 - DNA, 60 bp, Artificial
  Synthetic oligonucleotide
gcaaggctttacatatggggagttcatcatccttcaactgacacagagcaaaccaatctg

SEQ ID NO: 56735 - DNA, 60 bp, Artificial
  Synthetic oligonucleotide
ctgtttggagccattgctggttttattgaggggggatggacaggaatgatagatggatgg

SEQ ID NO: 56736 - DNA, 60 bp, Artificial
  Synthetic oligonucleotide
tacagagaatagttttgaacaaataacatttatgcaagccttacaactactgcttgaagt

SEQ ID NO: 56737 - DNA, 60 bp, Artificial
  Synthetic oligonucleotide
cacagaaaatagttttgaacaaataacatttatgcaagccttacaactactgcttgaagt

SEQ ID NO: 56738 - DNA, 60 bp, Artificial
  Synthetic oligonucleotide
tacagaaaatagttttgaacaaataacatttatgcaagccttacaactactgcttgaagt

SEQ ID NO: 56739 - DNA, 60 bp, Artificial
  Synthetic oligonucleotide
ctgattggtcaggatatagtgggagttttgttcagcatccagaattgaccggactggatt

SEQ ID NO: 56740 - DNA, 60 bp, Artificial
  Synthetic oligonucleotide
ggcaatggtgtttggatagggagaactaaaagcactagttcaaggagcggttttgagatg

SEQ ID NO: 56741 - DNA, 60 bp, Artificial
  Synthetic oligonucleotide
gaatctggagtatcaactaggatacatatgcagtgggattttcggagacaatcctcgccc

SEQ ID NO: 56742 - DNA, 60 bp, Artificial
  Synthetic oligonucleotide
aatacggcaatggtgtttggatagggagaactaaaagcactagttcaaggagcggttttg

SEQ ID NO: 56743 - DNA, 60 bp, Artificial
  Synthetic oligonucleotide
catattaagaacacaagagtctgaatgtgcatgcgtgaatggttcttgctttacagtaat

SEQ ID NO: 56744 - DNA, 60 bp, Artificial
  Synthetic oligonucleotide
cataatgagaacacaagagtctgaatgtgcatgcgtgaatggttcttgctttactgtaat

SEQ ID NO: 56745 - DNA, 60 bp, Artificial
  Synthetic oligonucleotide
agagtctgaatgtgcatgcgtgaatggttcttgctttacagtaatgaccgatggaccaag

SEQ ID NO: 56746 - DNA, 60 bp, Artificial
  Synthetic oligonucleotide
tgtctttcaatcagaatctggagtatcaactaggatacatatgcagtgggattttcggag

SEQ ID NO: 56747 - DNA, 60 bp, Artificial
  Synthetic oligonucleotide
aagagagccattcatctcatgctcccacttggaatgcagaactttcttcttgactcaagg

SEQ ID NO: 56748 - DNA, 60 bp, Artificial
  Synthetic oligonucleotide
ctcatgctcccacttggaatgcagaactttcttcttgactcaaggggccctgctgaatga

SEQ ID NO: 56749 - DNA, 57 bp, Artificial
  Synthetic oligonucleotide
gaaccttcttcttgactcaaggggccctgctgaatgacaaacattccaatggaacca

SEQ ID NO: 56750 - DNA, 60 bp, Artificial
  Synthetic oligonucleotide
ctggatttccacgactcgaatgtaaagaacctgtatgagaaagtaagaagccagctaagg

SEQ ID NO: 56751 - DNA, 60 bp, Artificial
  Synthetic oligonucleotide
gaactctggatttccacgactcaaatgtaaagaacctgtatgagaaagtaagaagccagc

SEQ ID NO: 56752 - DNA, 60 bp, Artificial
  Synthetic oligonucleotide
cggaactatgtccgagccctctgagactagttgacggccagacctgtgatatcatcaatg

SEQ ID NO: 56753 - DNA, 60 bp, Artificial
  Synthetic oligonucleotide
gaatcacaaaatctcccggaactatgtccgagccctctgagactagttgacggccagacc

SEQ ID NO: 56754 - DNA, 60 bp, Artificial
  Synthetic oligonucleotide
agagtcacaaaccctcccggaactatgtccgagccctctgagactagttgacggccagac

SEQ ID NO: 56755 - DNA, 60 bp, Artificial
  Synthetic oligonucleotide
gtagcactacttttagccttcattttgtgggcttgtcaaaacggaaacatccggtgccag

SEQ ID NO: 56756 - DNA, 55 bp, Artificial
  Synthetic oligonucleotide
ttttgctcgttgcactacttttagccttcattttgtgggcctgtcaaaacggaaa

SEQ ID NO: 56757 - DNA, 56 bp, Artificial
  Synthetic oligonucleotide
ttttgtgggcctgtcaaaacggaaacatccggtgccagatttgtatttagagaaaa

SEQ ID NO: 56758 - DNA, 60 bp, Artificial
  Synthetic oligonucleotide
gcacaggaactggtagaatcacaaaatctcccggaactatgtccgagccctctgagacta

SEQ ID NO: 56759 - DNA, 60 bp, Artificial
  Synthetic oligonucleotide
cactgcacaggaactggtagaatcacaaaatctcccggaactatgtccgagccctctgag

SEQ ID NO: 56760 - DNA, 51 bp, Artificial
  Synthetic oligonucleotide
tagcagagaactcttctcagagctacacaggaaaccctgtgatatgcatgg

SEQ ID NO: 56761 - DNA, 60 bp, Artificial
  Synthetic oligonucleotide
gtagcactacttttagccttcattttgtgggcttgtcagaacggaaacatccggtgccag

SEQ ID NO: 56762 - DNA, 60 bp, Artificial
  Synthetic oligonucleotide
catagagaggcccaatgcagtagacacttgctatccatttgatgtgccagagtaccagag

SEQ ID NO: 56763 - DNA, 60 bp, Artificial
  Synthetic oligonucleotide
agaatgggacgttttcatagagaggcccaatgcagtagacacttgctatccatttgatgt

SEQ ID NO: 56764 - DNA, 60 bp, Artificial
  Synthetic oligonucleotide
actggactattgtagagcctggagacttgatagtcttcaacacaatagggaatctaattg

SEQ ID NO: 56765 - DNA, 60 bp, Artificial
  Synthetic oligonucleotide
gactattgtagagcctggagacttgatagtcttcaacacaatagggaatctaattgcccc

SEQ ID NO: 56766 - DNA, 60 bp, Artificial
  Synthetic oligonucleotide
ggaagtgtcactgtgtctaccaaaactagtcaaacaagtgtagtgcctaacattggcagc

SEQ ID NO: 56767 - DNA, 60 bp, Artificial
  Synthetic oligonucleotide
gtgtctaccaaaactagtcaaacaagtgtagtgcctgacattggcagcagacccttggtg

SEQ ID NO: 56768 - DNA, 58 bp, Artificial
  Synthetic oligonucleotide
aagattgatttatggtcatataatgcagagctgttagttgcacttgaaaaccaacaca

SEQ ID NO: 56769 - DNA, 60 bp, Artificial
  Synthetic oligonucleotide
tcagagatgaacaaactctttgaaagagtaaggcgtcaactcagagaaaatgctgaagac

SEQ ID NO: 56770 - DNA, 60 bp, Artificial
  Synthetic oligonucleotide
gactattgtagagcctggagacttgattgtcttcaacacaatagggaatctaattgcccc

SEQ ID NO: 56771 - DNA, 60 bp, Artificial
  Synthetic oligonucleotide
acgttcctgaaaaggcatcaagaggtctttttggagcaatagctgggttcatagagaatg

SEQ ID NO: 56772 - DNA, 60 bp, Artificial
  Synthetic oligonucleotide
gaaatgaacaaactctttgaaagagtaaggcgtcaactcagagagaatgctgaagacaaa

SEQ ID NO: 56773 - DNA, 54 bp, Artificial
  Synthetic oligonucleotide
gaaatgaacaaactctttgaaagagtaaggcgtcaactcagagagaatgctgaa

SEQ ID NO: 56774 - DNA, 60 bp, Artificial
  Synthetic oligonucleotide
atggaatgataacacagttcgagtctctgaaactctacagagattcgcttggagaagcag

SEQ ID NO: 56775 - DNA, 60 bp, Artificial
  Synthetic oligonucleotide
tgctaattggacaaggagacgtagtgttggtaatgaaacggaaacgggactctagcatac

SEQ ID NO: 56776 - DNA, 60 bp, Artificial
  Synthetic oligonucleotide
tgtccaaagtatgtcaggagtacaaaattaaggatggttacaggactaaggaacattcca

SEQ ID NO: 56777 - DNA, 60 bp, Artificial
  Synthetic oligonucleotide
caattccacagacactgtcgacacaatactggagaagaatgtgactgttacccattcagt

SEQ ID NO: 56778 - DNA, 57 bp, Artificial
  Synthetic oligonucleotide
cacatgcagtgaaatagttgtggcaatgctactatttgctatccatactgtccaaaa

SEQ ID NO: 56779 - DNA, 60 bp, Artificial
  Synthetic oligonucleotide
agagctgcagtatcagcagatccactagcatctttattggaaatgtgccacagcacacag

SEQ ID NO: 56780 - DNA, 60 bp, Artificial
  Synthetic oligonucleotide
agagctgcagtatcagcagatccactagcatctttattagaaatgtgccatagcacacag

SEQ ID NO: 56781 - DNA, 60 bp, Artificial
  Synthetic oligonucleotide
gggctgcggtatcagcagatccactagcatctttattagaaatgtgccacagcacacaga

SEQ ID NO: 56782 - DNA, 60 bp, Artificial
  Synthetic oligonucleotide
atggcgtctcaaggcaccaaacgatcttatgagcagatggaaactggtggagaacgccag

SEQ ID NO: 56783 - DNA, 60 bp, Artificial
  Synthetic oligonucleotide
ggcattaaagggaagaggcagcacacttggactcgacctaagagtggccacaatggaagg

SEQ ID NO: 56784 - DNA, 60 bp, Artificial
  Synthetic oligonucleotide
ggcattaaagggaagaggcagcacacttggactcgacctaagagtggcaacaatggaagg

SEQ ID NO: 56785 - DNA, 60 bp, Artificial
  Synthetic oligonucleotide
tcaatctctacaactaaaccctttcagaacatctcgagaatatcaattggggattgtccc

SEQ ID NO: 56786 - DNA, 60 bp, Artificial
  Synthetic oligonucleotide
gggttcaatctctacaactaaaccctttcagaacatctcgagaatatcaattggggattg

SEQ ID NO: 56787 - DNA, 60 bp, Artificial
  Synthetic oligonucleotide
tcaatttctacaactaaaccctttcagaacatctcgagaatatcaattggggattgtccc

SEQ ID NO: 56788 - DNA, 60 bp, Artificial
  Synthetic oligonucleotide
ccttgcttttatgtggaattgatcagaggcaggccaaaagagagtagtgtgttgtggaca

SEQ ID NO: 56789 - DNA, 60 bp, Artificial
  Synthetic oligonucleotide
agccatgggacaggaacaggatacaccatggacacagtcaacagaacacaccaatattca

SEQ ID NO: 56790 - DNA, 60 bp, Artificial
  Synthetic oligonucleotide
cggctgatccagaacagcttaacaatagagagaatggtgctctctgcttttgacgagagg

SEQ ID NO: 56791 - DNA, 60 bp, Artificial
  Synthetic oligonucleotide
ggacgactgatccagaacagcttaacaatagagagaatggtgctctctgcttttgatgag

SEQ ID NO: 56792 - DNA, 60 bp, Artificial
  Synthetic oligonucleotide
ggacgactgatccagaacagcttaacaatagagagaatggtgctctctgcttttgacgag

SEQ ID NO: 56793 - DNA, 60 bp, Artificial
  Synthetic oligonucleotide
caggaagacaggagaaaaacccatcacttagaatgaaatggatgatggcaatgaaatacc

SEQ ID NO: 56794 - DNA, 56 bp, Artificial
  Synthetic oligonucleotide
gactatgaaggaaggctgattcagaacagcataacaatagagagaatggttctctc

SEQ ID NO: 56795 - DNA, 60 bp, Artificial
  Synthetic oligonucleotide
aacacagatcttgaggctctcatggagtggctaaagacaagaccaatcctgtcacctctg

SEQ ID NO: 56796 - DNA, 60 bp, Artificial
  Synthetic oligonucleotide
cgacgttaatcgaaaacacatatgtcaacaatactactgtcatcaataaagaaacagaga

SEQ ID NO: 56797 - DNA, 60 bp, Artificial
  Synthetic oligonucleotide
acgactttaatcgaaaacacatatgtcaacaatactactgtcatcaataaggaaacaggg

SEQ ID NO: 56798 - DNA, 61 bp, Artificial
  Synthetic oligonucleotide
cgttaatcgaaaacacatatgtcaacaatactactgtcatcaataaagaaacagagactgc

SEQ ID NO: 56799 - DNA, 60 bp, Artificial
  Synthetic oligonucleotide
cacagaacaacacgacgttaatcgaaaacacatatgtcaacaatactactgtcatcaata

SEQ ID NO: 56800 - DNA, 60 bp, Artificial
  Synthetic oligonucleotide
agtataacacagaacaacacgacgttaatcgaaaacacatatgtcaacaatactactgtc

SEQ ID NO: 56801 - DNA, 60 bp, Artificial
  Synthetic oligonucleotide
aacaacacgacgttaatcgaaaacacatatgtcaacaatactactgtcatcaataaagaa

SEQ ID NO: 56802 - DNA, 60 bp, Artificial
  Synthetic oligonucleotide
aacaacacgacgttaatcgaaaacacatatgtcaacaatactactgtcatcaataaggaa

SEQ ID NO: 56803 - DNA, 60 bp, Artificial
  Synthetic oligonucleotide
gacaatctggactagtgggagcagcatttctttttgtggcgtaaatagtgatactgcaaa

SEQ ID NO: 56804 - DNA, 60 bp, Artificial
  Synthetic oligonucleotide
ctggactagtgggagcagcatttctttttgtggcgtaaatagtgatactgcaaactggtc

SEQ ID NO: 56805 - DNA, 60 bp, Artificial
  Synthetic oligonucleotide
ctggactagtgggagcagcatttctttttgtggcgttgatagtgatactgcaaactggtc

SEQ ID NO: 56806 - DNA, 60 bp, Artificial
  Synthetic oligonucleotide
ctggactagtgggagcagcatttctttttgtggcattgatagtgatactgcaaactggtc

SEQ ID NO: 56807 - DNA, 60 bp, Artificial
  Synthetic oligonucleotide
ctggactagtgggagcagcatttctttttgtggcgtaaatagcgatactgcaaactggtc

SEQ ID NO: 56808 - DNA, 60 bp, Artificial
  Synthetic oligonucleotide
ctggactagtgggagcagcatttctttttgtggcgtgaatagcgagactgcaaactggtc

SEQ ID NO: 56809 - DNA, 60 bp, Artificial
  Synthetic oligonucleotide
acggagagttgacataaatcctggtcatgcagacctcagtgccaaagaggcacaggatgt

SEQ ID NO: 56810 - DNA, 60 bp, Artificial
  Synthetic oligonucleotide
cggagagttgacataaatcctggtcatgcagacctcagtgccaaagaggcacaggatgta

SEQ ID NO: 56811 - DNA, 60 bp, Artificial
  Synthetic oligonucleotide
ggaaggcaagagaagaaccccgcactcaggatgaagtggatgatggcaatgaaatatcca

SEQ ID NO: 56812 - DNA, 60 bp, Artificial
  Synthetic oligonucleotide
attgctggttttattgaggggggatggacaggaatgatagatggatggtatggttatcat

SEQ ID NO: 56813 - DNA, 60 bp, Artificial
  Synthetic oligonucleotide
aatgattatgagggacggctgatccagaacagcttaacaatagagagaatggtgctctct

SEQ ID NO: 56814 - DNA, 60 bp, Artificial
  Synthetic oligonucleotide
atgaaggatcttatttcttcggagacaatgcagaggagtacgacaattaaagaaaaatac

SEQ ID NO: 56815 - DNA, 60 bp, Artificial
  Synthetic oligonucleotide
cccagtgcggggaaagatcctaagaaaactggaggacctatatacagaagagtaaacgga

SEQ ID NO: 56816 - DNA, 60 bp, Artificial
  Synthetic oligonucleotide
cttcctttgacatgaataatgaggggtcttatttcttcggagacaatgcagaggagtatg

SEQ ID NO: 56817 - DNA, 60 bp, Artificial
  Synthetic oligonucleotide
ggtggaatcgggagattctacatacagatgtgcactgaactcaaactcagtgactacgaa

SEQ ID NO: 56818 - DNA, 60 bp, Artificial
  Synthetic oligonucleotide
tgggagcaagaccacaagtgaatggccaaagtggacggattgatttccattggacagtgg

SEQ ID NO: 56819 - DNA, 60 bp, Artificial
  Synthetic oligonucleotide
ctcagaattacacaggaaatcctgtgatatgcctgggacatcatgctgtatccaatggga

SEQ ID NO: 56820 - DNA, 60 bp, Artificial
  Synthetic oligonucleotide
ctactgcttgaagtggaacaagagataagaactttctcgtttcagcttatttaatgataa

SEQ ID NO: 56821 - DNA, 60 bp, Artificial
  Synthetic oligonucleotide
cccgaaggcaagctcatggccaaatcatgagacaaccaaaggtgtcacagctgcatgctc

SEQ ID NO: 56822 - DNA, 60 bp, Artificial
  Synthetic oligonucleotide
atggattcaaacactgtgtcaagctttcaggtagactgctttctctggcatgtccgcaaa

SEQ ID NO: 56823 - DNA, 60 bp, Artificial
  Synthetic oligonucleotide
tctatcgtcccgtcaggccccctcaaagccgagatcgcacagagacttgaagatgtcttt

SEQ ID NO: 56824 - DNA, 60 bp, Artificial
  Synthetic oligonucleotide
gggcgattgatccagaacagcttaacaatagagagaatggtgctctctgcttttgatgag

SEQ ID NO: 56825 - DNA, 60 bp, Artificial
  Synthetic oligonucleotide
gggtacagcggaagtttcgttcaacatcctgagctaacaggattggactgtataagacct

SEQ ID NO: 56826 - DNA, 60 bp, Artificial
  Synthetic oligonucleotide
tcagggtacagcggaagtttcgttcaacatcctgagctaacaggattggactgtataaga

SEQ ID NO: 56827 - DNA, 60 bp, Artificial
  Synthetic oligonucleotide
gggggctatatgaagcaattgaggagtgcctgattaatgatccctgggttttgcttaatg

SEQ ID NO: 56828 - DNA, 60 bp, Artificial
  Synthetic oligonucleotide
taatagcgccatggtatgctttcgcactgagtagaggctttgggtcaggaatcatcacct

SEQ ID NO: 56829 - DNA, 60 bp, Artificial
  Synthetic oligonucleotide
taatagcaccatggtatgctttcgcactgagtagaggctttgggtcaggaatcatcacct

SEQ ID NO: 56830 - DNA, 60 bp, Artificial
  Synthetic oligonucleotide
caggactaaggaatatcccatctattcaatctagaggtctgtttggagccattgctggtt

SEQ ID NO: 56831 - DNA, 60 bp, Artificial
  Synthetic oligonucleotide
ccttgactgtgaatgtgagaggatcaggaatgaggatactggtaagaggcaattccccag

SEQ ID NO: 56832 - DNA, 60 bp, Artificial
  Synthetic oligonucleotide
ggcagtagaccatgggtgagaggccaaagcggcaggatcagcttctactggacaattgta

SEQ ID NO: 56833 - DNA, 60 bp, Artificial
  Synthetic oligonucleotide
gcagtagaccatgggtgagaggccaaagcggcaggatcagcttctactggacaattgtag

SEQ ID NO: 56834 - DNA, 60 bp, Artificial
  Synthetic oligonucleotide
tgaactattactggacactaatagaacctggagacacaataacattcgaagcaactggaa

SEQ ID NO: 56835 - DNA, 55 bp, Artificial
  Synthetic oligonucleotide
gatttccatgactcaaatgtgaagaacctatatgagaaagtaagaagccagctaa

SEQ ID NO: 56836 - DNA, 55 bp, Artificial
  Synthetic oligonucleotide
gtactgatccgaaatggaagattttgtgcgacaatgcttcaatccgatgattgtc

SEQ ID NO: 56837 - DNA, 60 bp, Artificial
  Synthetic oligonucleotide
agcaggtactgattcgaaatggaagattttgtgcgacaatgcttcaatccgatgattgtc

SEQ ID NO: 56838 - DNA, 55 bp, Artificial
  Synthetic oligonucleotide
gtactgattcgaaatggaagattttgtgcgacaatgcttcaatccgatgattgtc

SEQ ID NO: 56839 - DNA, 60 bp, Artificial
  Synthetic oligonucleotide
aaagcaggtactgattcgaaatggaagattttgtgcgacaatgcttcaatccgatgattg

SEQ ID NO: 56840 - DNA, 52 bp, Artificial
  Synthetic oligonucleotide
ggggactatatgaagcaattgaggagtgcctgattaatgatccctgggtttt

SEQ ID NO: 56841 - DNA, 60 bp, Artificial
  Synthetic oligonucleotide
agttttgcatttaacacaggggacatgctgggaacagatgtacactccaggtggagaagt

SEQ ID NO: 56842 - DNA, 60 bp, Artificial
  Synthetic oligonucleotide
aaaaaacaatctggaccagtgcgagcagcatttctttttgtggcgtgaatagtgatactg

SEQ ID NO: 56843 - DNA, 60 bp, Artificial
  Synthetic oligonucleotide
ttcctgttaccctgataccggcaaagtgatgtgtgtgtgcagagacaattggcatggttc

SEQ ID NO: 56844 - DNA, 60 bp, Artificial
  Synthetic oligonucleotide
cagcatgtgcatgtcatgatggcatgggctggctaacaatcggaatttctggtccagatg

SEQ ID NO: 56845 - DNA, 60 bp, Artificial
  Synthetic oligonucleotide
gcagctgtggtccggtgtatgttgatggagcaaacggagtaaagggattttcatacaggt

SEQ ID NO: 56846 - DNA, 60 bp, Artificial
  Synthetic oligonucleotide
ggattagccattcaattcaaactggaagtcaaaaccatactggaatatgcaaccaaaaca

SEQ ID NO: 56847 - DNA, 60 bp, Artificial
  Synthetic oligonucleotide
gggagattctacatacagatgtgcactgaactcaaactcagtgactacgaagggaggctg

SEQ ID NO: 56848 - DNA, 60 bp, Artificial
  Synthetic oligonucleotide
ggcaaacaatgggaaatttgagttcattgctgaggaattccaatggaacacagtcaagca

SEQ ID NO: 56849 - DNA, 60 bp, Artificial
  Synthetic oligonucleotide
gagcagtcaattgctgaggcaataatcgtggccatggtattttcacaagaggattgcatg

SEQ ID NO: 56850 - DNA, 60 bp, Artificial
  Synthetic oligonucleotide
gacgagcagtcaattgctgaggcaataatcgtggccatggtattttcacaagaggattgc

SEQ ID NO: 56851 - DNA, 59 bp, Artificial
  Synthetic oligonucleotide
agacacagactgaagataacagagaatagttttgagcaaataacatttatgcaagccat

SEQ ID NO: 56852 - DNA, 60 bp, Artificial
  Synthetic oligonucleotide
ttctgtaattgagaaaatgaacactcaattcacagctgtgggcaaagaattcaacaaatt

SEQ ID NO: 56853 - DNA, 60 bp, Artificial
  Synthetic oligonucleotide
tgaaagatgagtcttctaaccgaggtcgaaacgtacgttctatctatcgtcccgtcaggc

SEQ ID NO: 56854 - DNA, 57 bp, Artificial
  Synthetic oligonucleotide
cgataaccggagggagcccagatcctggcgtaaaaggatttgcattcttagatgggg

SEQ ID NO: 56855 - DNA, 60 bp, Artificial
  Synthetic oligonucleotide
tctggaagaacatcccagcgcggggaaagatcctaagaaaactggaggacccatatacaa

SEQ ID NO: 56856 - DNA, 60 bp, Artificial
  Synthetic oligonucleotide
accatttgaatggatgtcaatccgactttacttttcttgaaagttccagcgcaaaatgcc

SEQ ID NO: 56857 - DNA, 60 bp, Artificial
  Synthetic oligonucleotide
tcaaagggaagttccaaacagcagcacaacgagcaatgatggaccaggtgagggaaagcc

SEQ ID NO: 56858 - DNA, 60 bp, Artificial
  Synthetic oligonucleotide
ccagtacataagagtcagctgatatggatggcatgtcattctgcagcatttgaagatctg

SEQ ID NO: 56859 - DNA, 58 bp, Artificial
  Synthetic oligonucleotide
gtcgagttagcaaattaactggaaggggattgggaatccaatcagaagcgttgataga

SEQ ID NO: 56860 - DNA, 60 bp, Artificial
  Synthetic oligonucleotide
gccgggtgacaacataaccttctcacacaatggaggtctaatagcaccaagtcgagttag

SEQ ID NO: 56861 - DNA, 60 bp, Artificial
  Synthetic oligonucleotide
ggcttcgccgagatcagaagtctctaagaggaagaggcagcactcttggtctggacatcg

SEQ ID NO: 56862 - DNA, 60 bp, Artificial
  Synthetic oligonucleotide
aaaatgaaaggactttggatttccatgactcaaatgtgaagaatctgtatgagaaagtaa

SEQ ID NO: 56863 - DNA, 60 bp, Artificial
  Synthetic oligonucleotide
cttgaaagtcccagcgcaaaatgccataagcaccacattcccatatactggagatcctcc

SEQ ID NO: 56864 - DNA, 60 bp, Artificial
  Synthetic oligonucleotide
tcaaagggaaattccaaacagcagcacaacgagcaatgatggaccaggtgagggaaagcc

SEQ ID NO: 56865 - DNA, 60 bp, Artificial
  Synthetic oligonucleotide
ctgggctataagaaccagaagtggagggaacactaaccagcagagagcatctgcagggca

SEQ ID NO: 56866 - DNA, 60 bp, Artificial
  Synthetic oligonucleotide
ccttcactgaagaaggagcaattgtcggcgaaatttcaccattgccttctcttccaggac

SEQ ID NO: 56867 - DNA, 60 bp, Artificial
  Synthetic oligonucleotide
ctttcactgaagaaggagcaattgtcggcgaaatttcaccattgccttctcttccaggac

SEQ ID NO: 56868 - DNA, 60 bp, Artificial
  Synthetic oligonucleotide
cgaaaagggaaaggttactaaatcaatagagttgaatgcacccaattttcattatgagga

SEQ ID NO: 56869 - DNA, 60 bp, Artificial
  Synthetic oligonucleotide
atgctgtggtaatgccagctcatggcccagccaagagcatggaatatgatgctgttgcta

SEQ ID NO: 56870 - DNA, 54 bp, Artificial
  Synthetic oligonucleotide
cagctcatggcccagccaagagcatggaatatgatgctgttgctactacgcact

SEQ ID NO: 56871 - DNA, 59 bp, Artificial
  Synthetic oligonucleotide
cagctcatggcccagccaagagcatggaatatgatgctgttgctactacacactcctgg

SEQ ID NO: 56872 - DNA, 60 bp, Artificial
  Synthetic oligonucleotide
cagctcatggcccagccaagagcatggaatatgatgctgttgctactacacactcttgga

SEQ ID NO: 56873 - DNA, 60 bp, Artificial
  Synthetic oligonucleotide
cagctcatggcccagccaagagcatggaatatgatgctgttgctactacgcactcctgga

SEQ ID NO: 56874 - DNA, 60 bp, Artificial
  Synthetic oligonucleotide
cagctcatggcccagccaagagcatggaatatgatgctgttgctactacacactcctgga

SEQ ID NO: 56875 - DNA, 56 bp, Artificial
  Synthetic oligonucleotide
caatcagcttctggatgtgttctaatgggtctttgcagtgcagaatatgcatttga

SEQ ID NO: 56876 - DNA, 55 bp, Artificial
  Synthetic oligonucleotide
caatcagcttctggatgtgttctaatgggtctttgcagtgcagaatatgcatttg

SEQ ID NO: 56877 - DNA, 60 bp, Artificial
  Synthetic oligonucleotide
ccgcatgctcttactctggagccagcagtttttatcggaatttgctgtggataacaaaga

SEQ ID NO: 56878 - DNA, 50 bp, Artificial
  Synthetic oligonucleotide
gctcaccgtgcccagtgagcgaggactgcagcgtagacgctttgtccaga

SEQ ID NO: 56879 - DNA, 50 bp, Artificial
  Synthetic oligonucleotide
gctcaccgtgcccagtgagcgaggactgcagcgtagacgctttgtccaaa

SEQ ID NO: 56880 - DNA, 50 bp, Artificial
  Synthetic oligonucleotide
gctcaccgtgcccagtgagcgaggactgcagcgtagacgatttgtccaaa

SEQ ID NO: 56881 - DNA, 50 bp, Artificial
  Synthetic oligonucleotide
gctcaccgtgcccagtgagcgaggactgcagcgtagacgttttgtccaaa

SEQ ID NO: 56882 - DNA, 55 bp, Artificial
  Synthetic oligonucleotide
gagtctctgaaactctacagagattcgcttggagaagcagtaatgaggatgggag

SEQ ID NO: 56883 - DNA, 51 bp, Artificial
  Synthetic oligonucleotide
ttgaaaagatgaacactcaattcactgcagtgggcaaggaattcaacaatt

SEQ ID NO: 56884 - DNA, 60 bp, Artificial
  Synthetic oligonucleotide
gcaacaaagtgaactcagtaattgagaaaatgaacactcaattcactgcagtgggcaagg

SEQ ID NO: 56885 - DNA, 60 bp, Artificial
  Synthetic oligonucleotide
atctctaaggggaagaggcagcactcttggtctggacatcgaaacagccactcgtgctgg

SEQ ID NO: 56886 - DNA, 54 bp, Artificial
  Synthetic oligonucleotide
cactcactgagtgacatccatatcatggcgtctcaaggcaccaaacgatcttat

SEQ ID NO: 56887 - DNA, 60 bp, Artificial
  Synthetic oligonucleotide
ttttgtgggcctgtcaaaacggaaacatccggtgccagatttgtatttagagaaaaaaca

SEQ ID NO: 56888 - DNA, 55 bp, Artificial
  Synthetic oligonucleotide
ggggtggacaggaatgatagatggatggtatggttatcatcaccaaaatgagcag

SEQ ID NO: 56889 - DNA, 60 bp, Artificial
  Synthetic oligonucleotide
ttccagcgcaaaatgccataagcaccacgttcccatatactggagatcctccatacagcc

SEQ ID NO: 56890 - DNA, 60 bp, Artificial
  Synthetic oligonucleotide
tacagagatgaggcaatcaataacagattccagatacaaggagtcaaattgactcaagga

SEQ ID NO: 56891 - DNA, 60 bp, Artificial
  Synthetic oligonucleotide
tacagaaacgaggcaatcaataacagattccagatacaaggagtcaaattgactcaagga

SEQ ID NO: 56892 - DNA, 60 bp, Artificial
  Synthetic oligonucleotide
tacagagacgaggcaatcaataacagattccagatacaaggagtcaaattgactcaagga

SEQ ID NO: 56893 - DNA, 54 bp, Artificial
  Synthetic oligonucleotide
tacagagacgaggcaatcaataacagattccagatacaaggagtcaaattgact

SEQ ID NO: 56894 - DNA, 54 bp, Artificial
  Synthetic oligonucleotide
tacagggacgaggcaatcaataacagattccagatacaaggagtcaaattgact

SEQ ID NO: 56895 - DNA, 60 bp, Artificial
  Synthetic oligonucleotide
tacagggacgaggcaatcaataacagattccagatacaaggagtcaaattgactcaagga

SEQ ID NO: 56896 - DNA, 60 bp, Artificial
  Synthetic oligonucleotide
ttaatttactagaaaacagccataatggaaaactctgcagcctgaatggaacagccccct

SEQ ID NO: 56897 - DNA, 60 bp, Artificial
  Synthetic oligonucleotide
atttactagaaaacagccataatggaaaactctgcagcctgaatggaaaggtccccttac

SEQ ID NO: 56898 - DNA, 60 bp, Artificial
  Synthetic oligonucleotide
tcagttaatttactagaaaacagccataatggaaaactctgcagcctgaatggaaaggtc

SEQ ID NO: 56899 - DNA, 58 bp, Artificial
  Synthetic oligonucleotide
ttaatttactagaaaacagccataatggaaaactctgcagcctgaatggaacagcccc

SEQ ID NO: 56900 - DNA, 53 bp, Artificial
  Synthetic oligonucleotide
ttgctagaaaacagccataatggaaaactctgcagcctgaatggaatagcccc

SEQ ID NO: 56901 - DNA, 60 bp, Artificial
  Synthetic oligonucleotide
ttgctagaaaacagccataatggaaaactctgcagcctgaatggaatagcccccttacag

SEQ ID NO: 56902 - DNA, 60 bp, Artificial
  Synthetic oligonucleotide
agagaggcccaatgcagtagacacttgctacccattcgatgtgccagattaccagagttt

SEQ ID NO: 56903 - DNA, 60 bp, Artificial
  Synthetic oligonucleotide
attctaaacactccaattccaataggctcatgtgtaagcaaatgtcacacagacaaaggc

SEQ ID NO: 56904 - DNA, 60 bp, Artificial
  Synthetic oligonucleotide
gacggccagacttgcgatatcatcaacggagcattggggagcccaggatgtgaccatctg

SEQ ID NO: 56905 - DNA, 60 bp, Artificial
  Synthetic oligonucleotide
gacaccagaatgcagaggggacaggaacggcagcagacctcaaatccactcaggcagcca

SEQ ID NO: 56906 - DNA, 60 bp, Artificial
  Synthetic oligonucleotide
gggagttcatcacccttcaacagacacggagcagaccaatttgtacaagaacaaccctgg

SEQ ID NO: 56907 - DNA, 60 bp, Artificial
  Synthetic oligonucleotide
tgctgaagaccaaggaaatggctgcttcgaaatattccacaaatgtgataacaactgcat

SEQ ID NO: 56908 - DNA, 60 bp, Artificial
  Synthetic oligonucleotide
ggaccatggtaaagaccctaaccgatgatcaggtagaagtggtcactgcacgagaactgg

SEQ ID NO: 56909 - DNA, 60 bp, Artificial
  Synthetic oligonucleotide
ttacatatggggagttcatcatccttcaactgacacagaacaaaccaacttgtataagaa

SEQ ID NO: 56910 - DNA, 60 bp, Artificial
  Synthetic oligonucleotide
tgggctatatacacaaaagacaacagcataagaattggttccaaaggagatgtttttgtc

SEQ ID NO: 56911 - DNA, 60 bp, Artificial
  Synthetic oligonucleotide
aagaattggttccaaaggagatgtttttgtcataagagagcctttcatatcatgttctca

SEQ ID NO: 56912 - DNA, 60 bp, Artificial
  Synthetic oligonucleotide
cacaaaagacaacagcataagaattggttccaaaggagatgtttttgtcataagagagcc

SEQ ID NO: 56913 - DNA, 60 bp, Artificial
  Synthetic oligonucleotide
gcgaatattgagaacacaagagtctgaatgtgtctgtgtgaacgggtcatgtttcaccat

SEQ ID NO: 56914 - DNA, 60 bp, Artificial
  Synthetic oligonucleotide
aatgatgatgggcatgttcaacatgctaagtacagttttgggagtctcgattctaaatct

SEQ ID NO: 56915 - DNA, 60 bp, Artificial
  Synthetic oligonucleotide
gagggaattcctggttgggaaggaccataagcaaagattcaagatcagggtatgagatgc

SEQ ID NO: 56916 - DNA, 60 bp, Artificial
  Synthetic oligonucleotide
gatgggggaaattcctggttgggaaggaccataagcaaagattcaagatcagggtatgag

SEQ ID NO: 56917 - DNA, 60 bp, Artificial
  Synthetic oligonucleotide
ggggggaattcctggttgggaaggaccataagcaaggattcaaggtcagggtatgagatg

SEQ ID NO: 56918 - DNA, 60 bp, Artificial
  Synthetic oligonucleotide
ataggggaggatgcccacatccttgtcacaagagaaccatatctctcatgtggaccacat

SEQ ID NO: 56919 - DNA, 60 bp, Artificial
  Synthetic oligonucleotide
cagaataggggaggatgcccacatccttgtcacaagagaaccatatctctcatgtggacc

SEQ ID NO: 56920 - DNA, 60 bp, Artificial
  Synthetic oligonucleotide
gaacatcccatcaattcaatccagaggtctatttggagccattgccggtttcattgaagg

SEQ ID NO: 56921 - DNA, 60 bp, Artificial
  Synthetic oligonucleotide
gaggacttgaatggaatgataacacagttcgagtctctgaaactctacagagattcgctt

SEQ ID NO: 56922 - DNA, 60 bp, Artificial
  Synthetic oligonucleotide
ccagcacttcatgccatgacggtgtctcaagaatgtcaatctgcatgtcaggacctaatg

SEQ ID NO: 56923 - DNA, 60 bp, Artificial
  Synthetic oligonucleotide
gagttcacaatggttgggagaagagcaacagctattctcaggaaggcaaccagaagattg

SEQ ID NO: 56924 - DNA, 60 bp, Artificial
  Synthetic oligonucleotide
gagttcacaatggttgggagaagagcaacagctattctcaggaaggcaaccagaagactg

SEQ ID NO: 56925 - DNA, 60 bp, Artificial
  Synthetic oligonucleotide
cccaataagtgggtgggctatatacagcaaagacaatagcataaggattggttccaaagg

SEQ ID NO: 56926 - DNA, 60 bp, Artificial
  Synthetic oligonucleotide
ctttgcccaataagtgggtgggctatatacagcaaagacaatagcataaggattggttcc

SEQ ID NO: 56927 - DNA, 56 bp, Artificial
  Synthetic oligonucleotide
tgggctatatacagcaaagacaatagcataagaattggttccaaaggagacgtttt

SEQ ID NO: 56928 - DNA, 60 bp, Artificial
  Synthetic oligonucleotide
tgggctatatacagcaaagacaatagcataagaattggttccaaaggagacgtttttgtc

SEQ ID NO: 56929 - DNA, 60 bp, Artificial
  Synthetic oligonucleotide
tccgtgggtgggctatatacagcaaagacaatagcataagaattggttccaaaggagacg

SEQ ID NO: 56930 - DNA, 60 bp, Artificial
  Synthetic oligonucleotide
ccgtgggtgggctatatacagcaaagacaatagcataagaattggttccaaaggagacgt

SEQ ID NO: 56931 - DNA, 60 bp, Artificial
  Synthetic oligonucleotide
catctctttgtcccatccgtgggtgggctatatacagcaaagacaatagcataagaattg

SEQ ID NO: 56932 - DNA, 60 bp, Artificial
  Synthetic oligonucleotide
gccggcaattcctctctttgcccaataagtgggtgggctatatacagcaaagacaatagc

SEQ ID NO: 56933 - DNA, 60 bp, Artificial
  Synthetic oligonucleotide
gtccctgagaggaagaggcagcactcttggtctggacatcgaaacagctactcgtgcagg

SEQ ID NO: 56934 - DNA, 60 bp, Artificial
  Synthetic oligonucleotide
cttcctttgacatgaataacgagggatcttatttcttcggagacaatgcagaggagtatg

SEQ ID NO: 56935 - DNA, 59 bp, Artificial
  Synthetic oligonucleotide
gaatgatcgggatattacccgacatgaccccaagtactgagatgtcgctgagggggata

SEQ ID NO: 56936 - DNA, 60 bp, Artificial
  Synthetic oligonucleotide
gcaatcaataacagattccagatacaaggagttaagttgactcaaggatacaaggacatc

SEQ ID NO: 56937 - DNA, 60 bp, Artificial
  Synthetic oligonucleotide
cttctaatagatggtacagcctcattgagccctggaatgatgatgggcatgttcaacatg

SEQ ID NO: 56938 - DNA, 60 bp, Artificial
  Synthetic oligonucleotide
atggcgtctcaaggcaccaaacgatcttatgaacaaatggaaactggtggagaacgccaa

SEQ ID NO: 56939 - DNA, 60 bp, Artificial
  Synthetic oligonucleotide
tttaatcgaaaacacatatgtcaacaatactactgtcatcaataagggaacagggactgc

SEQ ID NO: 56940 - DNA, 60 bp, Artificial
  Synthetic oligonucleotide
atcgaaaacacatatgtcaacaatactactgtcatcaataaggaagcagggactgcacag

SEQ ID NO: 56941 - DNA, 60 bp, Artificial
  Synthetic oligonucleotide
gtaacacagaacaacacgactttaatcgaaaacacatatgtcaacaatactactgtcatc

SEQ ID NO: 56942 - DNA, 60 bp, Artificial
  Synthetic oligonucleotide
tttaatcgaaaacacatatgtcaacaatactactgtcatcaataaggaaacagggactgc

SEQ ID NO: 56943 - DNA, 60 bp, Artificial
  Synthetic oligonucleotide
cgaaaacacatatgtcaacaatactactgtcatcaataagggaacagggactgcaaagca

SEQ ID NO: 56944 - DNA, 60 bp, Artificial
  Synthetic oligonucleotide
cgaaaacacatatgtcaacaatactactgtcatcaataaggaaacagggactgcaaagca

SEQ ID NO: 56945 - DNA, 60 bp, Artificial
  Synthetic oligonucleotide
cgaaaacacatatgtcaacaatactactgtcatcaataaggaaacagggactgcaaggca

SEQ ID NO: 56946 - DNA, 60 bp, Artificial
  Synthetic oligonucleotide
ggtggactggaatgatagatggatggtatggttatcatcatcaaaatgaacaaggatctg

SEQ ID NO: 56947 - DNA, 60 bp, Artificial
  Synthetic oligonucleotide
ctacatttaacccaggggacatgctgggagcagatgtacactccaggaggggaagtgaga

SEQ ID NO: 56948 - DNA, 60 bp, Artificial
  Synthetic oligonucleotide
gctgcatttaacccaggggacatgctgggagcagatgtacactccaggaggggaagtgag

SEQ ID NO: 56949 - DNA, 60 bp, Artificial
  Synthetic oligonucleotide
gttcgaatctctgaaactctacagagattcgcttggagaagcagtaatgaggatgggaga

SEQ ID NO: 56950 - DNA, 60 bp, Artificial
  Synthetic oligonucleotide
ctgaaactctacagagattcgcttggagaagcagtaatgagaatgggggacctccactca

SEQ ID NO: 56951 - DNA, 60 bp, Artificial
  Synthetic oligonucleotide
ctttgcagggaagaacaccgatcttgaggcactcatggaatggctaaagacaagaccaat

SEQ ID NO: 56952 - DNA, 60 bp, Artificial
  Synthetic oligonucleotide
ttgcagggaagaacaccgatcttgaggcactcatggaatggctaaagacaagaccaatcc

SEQ ID NO: 56953 - DNA, 60 bp, Artificial
  Synthetic oligonucleotide
gcagggaagaacaccgatcttgaggcactcatggaatggctaaagacaagaccaatcctg

SEQ ID NO: 56954 - DNA, 60 bp, Artificial
  Synthetic oligonucleotide
taaacaatgctgtggtgatgccagctcatggcccagccaaaagcatggaatatgatgctg

SEQ ID NO: 56955 - DNA, 60 bp, Artificial
  Synthetic oligonucleotide
gcttatgcaaagttgaaggatgggtagtggtggctaaggacaatgccataagattcggtg

SEQ ID NO: 56956 - DNA, 60 bp, Artificial
  Synthetic oligonucleotide
gaaaacacatatgtcaacaatactactgtcatcaataaagaaacagagactgcgaagcag

SEQ ID NO: 56957 - DNA, 60 bp, Artificial
  Synthetic oligonucleotide
tgaacaaaagcttatgcaaagttgaaggatgggtagtggtggctaaggacaatgccataa

SEQ ID NO: 56958 - DNA, 60 bp, Artificial
  Synthetic oligonucleotide
gcacaaaatgccataagcaccacattcccatatactggagatcctccatacagccatgga

SEQ ID NO: 56959 - DNA, 60 bp, Artificial
  Synthetic oligonucleotide
gcgcaaaatgccataagcaccacattcccatatactggagatcctccatacagccatggg

SEQ ID NO: 56960 - DNA, 60 bp, Artificial
  Synthetic oligonucleotide
gcgcaaaatgccataagcaccacattcccatatactggagatcctccatacagccatgga

SEQ ID NO: 56961 - DNA, 60 bp, Artificial
  Synthetic oligonucleotide
gcaaaatgccataagcaccacattcccatatactggagatcctccatacagccatggaac

SEQ ID NO: 56962 - DNA, 60 bp, Artificial
  Synthetic oligonucleotide
cgcaaaatgccataagcaccacattcccatatactggagatcctccatacagccatggaa

SEQ ID NO: 56963 - DNA, 60 bp, Artificial
  Synthetic oligonucleotide
cgcaaaatgccataagcaccacattcccatatactggagatcctccatacagccatggga

SEQ ID NO: 56964 - DNA, 60 bp, Artificial
  Synthetic oligonucleotide
ggacggctgatccagaacagcataacaatagagagaatggtgctctctgcttttgacgag

SEQ ID NO: 56965 - DNA, 60 bp, Artificial
  Synthetic oligonucleotide
agagtcacacccaggaatctttgaaaactcgtgtcttgaaacgatggaagttgttcaaca

SEQ ID NO: 56966 - DNA, 63 bp, Artificial
  Synthetic oligonucleotide
gggacaatctgtctaatagttggaatagttagtctattattgcagataggaaatatagtctcg

SEQ ID NO: 56967 - DNA, 60 bp, Artificial
  Synthetic oligonucleotide
ttgctgctggacagggtgtgactccaataatactagccggcaattcccctctttgcccaa

SEQ ID NO: 56968 - DNA, 55 bp, Artificial
  Synthetic oligonucleotide
gagaaaaaagccaccctgaggtatgcaaccaaagtgtcgttacatatgaaaacaa

SEQ ID NO: 56969 - DNA, 58 bp, Artificial
  Synthetic oligonucleotide
cttaatgagttgccccatcggagaagctccatctccgtacaattcaaggttcgaatca

SEQ ID NO: 56970 - DNA, 60 bp, Artificial
  Synthetic oligonucleotide
cacaagagtctgaatgtgtttgtataaacggttcgtgttttactataatgactgacggcc

SEQ ID NO: 56971 - DNA, 60 bp, Artificial
  Synthetic oligonucleotide
caaatagggtacatatgcagtggggttttcggtgacaacccgcgttctaatgatgggaaa

SEQ ID NO: 56972 - DNA, 60 bp, Artificial
  Synthetic oligonucleotide
aagatattatagcattaactgattggtcgggatacagtggaagttttgtccaacaccctg

SEQ ID NO: 56973 - DNA, 53 bp, Artificial
  Synthetic oligonucleotide
gctcaccgtgcccagtgagcgaggactgcagcgtagacgatttgtccagaatg

SEQ ID NO: 56974 - DNA, 53 bp, Artificial
  Synthetic oligonucleotide
gctcaccgtgcccagtgagcgaggactgcagcgtagacgctttgtccaaaatg

SEQ ID NO: 56975 - DNA, 50 bp, Artificial
  Synthetic oligonucleotide
gctcaccgtgcccagtgagcgaggactgcagcgtagacgcttcgtccaaa

SEQ ID NO: 56976 - DNA, 56 bp, Artificial
  Synthetic oligonucleotide
gctcaccgtgcccagtgagcgaggactgcagcgtagacgctttgtccaaactgccc

SEQ ID NO: 56977 - DNA, 51 bp, Artificial
  Synthetic oligonucleotide
cgagggatcttatttcttcggagacaatgcagaggaatatgacaattaaag

SEQ ID NO: 56978 - DNA, 60 bp, Artificial
  Synthetic oligonucleotide
cgaaatagatatgaatgccatggagcatacaagtcaatatctgtgcacaggggtcctcac

SEQ ID NO: 56979 - DNA, 60 bp, Artificial
  Synthetic oligonucleotide
agatttggtgaaagtgaacaagtaatagtgacaagggagccgtatgtgtcatgtgaccca

SEQ ID NO: 56980 - DNA, 60 bp, Artificial
  Synthetic oligonucleotide
gtgagacacaaactgaaggtaacagagaatagttttgagcaaataacatttatgcaagcc

SEQ ID NO: 56981 - DNA, 60 bp, Artificial
  Synthetic oligonucleotide
tcacgattctgtttctgctcatagcagagggctcctctcaaaattacacaggaaatcctg

SEQ ID NO: 56982 - DNA, 60 bp, Artificial
  Synthetic oligonucleotide
aaacaatgctatcaatcgcgattctgtttctgctcatagcagagggctcctctcaaaatt

SEQ ID NO: 56983 - DNA, 60 bp, Artificial
  Synthetic oligonucleotide
tcgcgattctgtttctgctcatagcagagggctcctctcaaaattacacaggaaaccctg

SEQ ID NO: 56984 - DNA, 60 bp, Artificial
  Synthetic oligonucleotide
tcgcgattctgtttctgctcatagcagagggctcctctcaaaattacacaggaaatcctg

SEQ ID NO: 56985 - DNA, 60 bp, Artificial
  Synthetic oligonucleotide
tggctaaagacaagaccaatcctgtcacctctgactaaggggattttaggatttgtgttt

SEQ ID NO: 56986 - DNA, 60 bp, Artificial
  Synthetic oligonucleotide
gaatggttaaagacaagaccaatcctgtcacctctgactaaggggattttaggatttgtg

SEQ ID NO: 56987 - DNA, 60 bp, Artificial
  Synthetic oligonucleotide
ggaatggctaaagacaagaccaatcctgtcacctctgactaaggggattttaggatttgt

SEQ ID NO: 56988 - DNA, 53 bp, Artificial
  Synthetic oligonucleotide
ctgaatgatgccacgtatcagagaacaagagctctcgtgcgtactgggatgga

SEQ ID NO: 56989 - DNA, 60 bp, Artificial
  Synthetic oligonucleotide
gtggaccacatgagtgcagaatgtttgccctcagccaaggtaccacactacggggtcggc

SEQ ID NO: 56990 - DNA, 60 bp, Artificial
  Synthetic oligonucleotide
agaatgccactgaaatcagagcatctgttgggagaatggttggcggaattgggagattct

SEQ ID NO: 56991 - DNA, 60 bp, Artificial
  Synthetic oligonucleotide
agaatgccactgaaatcagagcatctgttgggagaatggttggtgggatcggaagattct

SEQ ID NO: 56992 - DNA, 58 bp, Artificial
  Synthetic oligonucleotide
atgaaggatcttatttcttcggagacaatgcagaggagtacgacaattaaagaaaaat

SEQ ID NO: 56993 - DNA, 60 bp, Artificial
  Synthetic oligonucleotide
cgatcactgggagtccgggagctcctggggtcaaaggattcggttttctagatggtggca

SEQ ID NO: 56994 - DNA, 60 bp, Artificial
  Synthetic oligonucleotide
taggagactgtaacaacccgatcactgggagtccgggagctcctggggtcaaaggattcg

SEQ ID NO: 56995 - DNA, 60 bp, Artificial
  Synthetic oligonucleotide
cgatcactgggagtccgggagctcctggggtcaaaggattcggttttctagatagtggaa

SEQ ID NO: 56996 - DNA, 60 bp, Artificial
  Synthetic oligonucleotide
taataatccgatcactgggagtccgggagctcctggggtcaaaggattcggttttctaga

SEQ ID NO: 56997 - DNA, 60 bp, Artificial
  Synthetic oligonucleotide
actttacagagattcgcttggagaagcagtaatgaggatgggagacctccactccctcca

SEQ ID NO: 56998 - DNA, 60 bp, Artificial
  Synthetic oligonucleotide
aactctacagagattcgcttggagaagcagtaatgaggatgggagacctccactccctcc

SEQ ID NO: 56999 - DNA, 60 bp, Artificial
  Synthetic oligonucleotide
gactctacagagattcgcttggagaagcagtaatgaggatgggagacctccactccctcc

SEQ ID NO: 57000 - DNA, 60 bp, Artificial
  Synthetic oligonucleotide
cccagcgcggggaaagatcctaagaaaactggaggacccatatacaagagagtagatgga

SEQ ID NO: 57001 - DNA, 60 bp, Artificial
  Synthetic oligonucleotide
ccagcgcggggaaagatcctaagaaaactggaggacccatatacaagagagtagatggaa

SEQ ID NO: 57002 - DNA, 60 bp, Artificial
  Synthetic oligonucleotide
gtctctaagaggaagaggcagcactcttggtctggacatcgaaacagccactcgtgctgg

SEQ ID NO: 57003 - DNA, 56 bp, Artificial
  Synthetic oligonucleotide
aaaatctctaagaggaagaggcagcactcttggtctggacatcgaaacagccactt

SEQ ID NO: 57004 - DNA, 60 bp, Artificial
  Synthetic oligonucleotide
aatctctaagaggaagaggcagcactcttggtctggacatcgaaacagccactcgtgctg

SEQ ID NO: 57005 - DNA, 60 bp, Artificial
  Synthetic oligonucleotide
atctctaagaggaagaggcagcactcttggtctggacatcgaaacagccactcatgctgg

SEQ ID NO: 57006 - DNA, 60 bp, Artificial
  Synthetic oligonucleotide
atctctaagaggaagaggcagcactcttggtctggacatcgaaacagccactcgtgctgg

SEQ ID NO: 57007 - DNA, 60 bp, Artificial
  Synthetic oligonucleotide
gtccctaagaggaagaggcagcactcttggtctggacatcgaaacagccactcgtgctgg

SEQ ID NO: 57008 - DNA, 60 bp, Artificial
  Synthetic oligonucleotide
tctctaagaggaagaggcagcactcttggtctggacatcgaaacagccactcgtgctgga

SEQ ID NO: 57009 - DNA, 60 bp, Artificial
  Synthetic oligonucleotide
tgtgtgcagggaaataatgataacgcaacagctacagtatactatgaccgaaggctcact

SEQ ID NO: 57010 - DNA, 60 bp, Artificial
  Synthetic oligonucleotide
atttgtgtttacgctcaccgtgcccagtgagcgaggactgcagcgtagacgctttgtcca

SEQ ID NO: 57011 - DNA, 60 bp, Artificial
  Synthetic oligonucleotide
agaatgccactgaaatcagagcatctgttgggagaatggttggtggaattgggagattct

SEQ ID NO: 57012 - DNA, 60 bp, Artificial
  Synthetic oligonucleotide
gctgggagcaaatgtacactccaggaggggaagtgagaaatgatgatgttgaccagagct

SEQ ID NO: 57013 - DNA, 60 bp, Artificial
  Synthetic oligonucleotide
ggcagaaaattatggaaagtggagggattgacaagataagcaccgggtttacatatggat

SEQ ID NO: 57014 - DNA, 60 bp, Artificial
  Synthetic oligonucleotide
gaagaagcattaaggcagaaaattatggaaagtggagggattgacaagataagcaccggg

SEQ ID NO: 57015 - DNA, 60 bp, Artificial
  Synthetic oligonucleotide
agcaaaagcaggggaaaataaaagcaaccaagatgaaggcaataccattagtcttgctat

SEQ ID NO: 57016 - DNA, 60 bp, Artificial
  Synthetic oligonucleotide
tattgaggggggatggacaggaatgatagatggatggtatggttatcatcatcagaatga

SEQ ID NO: 57017 - DNA, 60 bp, Artificial
  Synthetic oligonucleotide
gtctctaccagaatgcagatgcctatgtttttgtggggtcatcaaaatacaacaagaaat

SEQ ID NO: 57018 - DNA, 50 bp, Artificial
  Synthetic oligonucleotide
tctaccagaatgcagatgcctatgtttttgtggggtcatcaaaatacaac

SEQ ID NO: 57019 - DNA, 60 bp, Artificial
  Synthetic oligonucleotide
caacaaagtctctaccagaatgcagatgcctatgtttttgtggggtcatcaaaatacaac

SEQ ID NO: 57020 - DNA, 60 bp, Artificial
  Synthetic oligonucleotide
caacaaagtctctaccagaatgcagatgcctatgtttttgtggggtcttcaaagtacaac

SEQ ID NO: 57021 - DNA, 60 bp, Artificial
  Synthetic oligonucleotide
gaattactattcacagcaagctcatggtcttacattgtggagacatctaactcagataat

SEQ ID NO: 57022 - DNA, 60 bp, Artificial
  Synthetic oligonucleotide
ccttcgcaatggaaagaggctctggatctggtattatcatttcagatacaccagtccacg

SEQ ID NO: 57023 - DNA, 55 bp, Artificial
  Synthetic oligonucleotide
cccgtctattcaatctagaggcctgtttggagccattgctggctttattgagggg

SEQ ID NO: 57024 - DNA, 60 bp, Artificial
  Synthetic oligonucleotide
cccgtctattcaatctagaggcctgtttggagccattgctggctttattgaggggggatg

SEQ ID NO: 57025 - DNA, 60 bp, Artificial
  Synthetic oligonucleotide
ccttgtttctatgttgaattgatcagaggcaggccaaaagagagtagtgtattgtggacg

SEQ ID NO: 57026 - DNA, 60 bp, Artificial
  Synthetic oligonucleotide
ctgaggaattccaatggaacacagtcaaacaaaatgggaaatccggggcatgcaaaagag

SEQ ID NO: 57027 - DNA, 60 bp, Artificial
  Synthetic oligonucleotide
gaggaattccaatggaacacagtcaaacaaaatgggaaatccggggcatgcaaaagagca

SEQ ID NO: 57028 - DNA, 60 bp, Artificial
  Synthetic oligonucleotide
gatgaaatggatgatggcaatgaaatacccaattacagcagacaaaaagataacggaaat

SEQ ID NO: 57029 - DNA, 60 bp, Artificial
  Synthetic oligonucleotide
acgaggaggcattaagacagaaaatcatggaaagtggagggattgacaagataagcactg

SEQ ID NO: 57030 - DNA, 60 bp, Artificial
  Synthetic oligonucleotide
caggggtcacaatgtacaaaatagtgcttgtactcgcgctccttggagcagtgaacggtc

SEQ ID NO: 57031 - DNA, 60 bp, Artificial
  Synthetic oligonucleotide
ggggatcaggaatgagaatacttgtaaggggtaattctccagtattcaactacaacaaga

SEQ ID NO: 57032 - DNA, 60 bp, Artificial
  Synthetic oligonucleotide
taaggccattagaggccaatacagtgggtttgttagaactctattccaacaaatgaggga

SEQ ID NO: 57033 - DNA, 60 bp, Artificial
  Synthetic oligonucleotide
atgaaggatcttatttcttcggagacaatgcagaggaatacgataattaaagaaaaatac

SEQ ID NO: 57034 - DNA, 60 bp, Artificial
  Synthetic oligonucleotide
gaatggttggtggaattggaagattctacatacagatgtgcactgaactcaagctcagcg

SEQ ID NO: 57035 - DNA, 60 bp, Artificial
  Synthetic oligonucleotide
gacaatagtaaggccaggtgataacatcactttttcacataacggtggactaatagcacc

SEQ ID NO: 57036 - DNA, 60 bp, Artificial
  Synthetic oligonucleotide
tgtcccaagtatgtcaggagtacaaaattaaggatggttacaggactaagaaacatccca

SEQ ID NO: 57037 - DNA, 60 bp, Artificial
  Synthetic oligonucleotide
cgatcactgggagtccgggagctcctggggtcaaaggattcggtttcctagatagtagca

SEQ ID NO: 57038 - DNA, 60 bp, Artificial
  Synthetic oligonucleotide
cgatcactgggagtccgggagctcctggggtcaaaggattcggtttcctagatagtggca

SEQ ID NO: 57039 - DNA, 60 bp, Artificial
  Synthetic oligonucleotide
ctgtaacaacccgatcactgggagtccgggagctcctggggtcaaaggattcggtttcct

SEQ ID NO: 57040 - DNA, 60 bp, Artificial
  Synthetic oligonucleotide
taataacccgatcactgggagtccgggagctcctggggtcaaaggattcggtttcctaga

SEQ ID NO: 57041 - DNA, 60 bp, Artificial
  Synthetic oligonucleotide
ggatgtcaatccgactttacttttcttaaaagttccagcgcaaaatgccataagcaccac

SEQ ID NO: 57042 - DNA, 60 bp, Artificial
  Synthetic oligonucleotide
tgagcaaataacatttatgcaagccttacaactactgcttgaagtagagcaagagataag

SEQ ID NO: 57043 - DNA, 60 bp, Artificial
  Synthetic oligonucleotide
tgaacaaataacatttatgcaagccttacaactactacttgaagtggagcaagagataag

SEQ ID NO: 57044 - DNA, 60 bp, Artificial
  Synthetic oligonucleotide
caatccgaccttacttttcttgaaagttccagcgcaaaatgccataagcaccacattccc

SEQ ID NO: 57045 - DNA, 60 bp, Artificial
  Synthetic oligonucleotide
atggatgtcaatccgaccttacttttcttgaaagttccagcgcaaaatgccataagcacc

SEQ ID NO: 57046 - DNA, 60 bp, Artificial
  Synthetic oligonucleotide
ggcgctcatggaatggctaaagacaagaccaatcctgtcacctctgactaaggggatttt

SEQ ID NO: 57047 - DNA, 60 bp, Artificial
  Synthetic oligonucleotide
ccttgcttttatgtggaattgatcagaggcaggccaaaagagagtagtgtattgtggacg

SEQ ID NO: 57048 - DNA, 60 bp, Artificial
  Synthetic oligonucleotide
gtgaattctgtaattgagaaaatgaacactcaattcacagctgtgggcaaagaattcaac

SEQ ID NO: 57049 - DNA, 60 bp, Artificial
  Synthetic oligonucleotide
attcgtcatcaatgatgtgggagatcaatggtcctgaatcggtgttggtcaatacttatc

SEQ ID NO: 57050 - DNA, 60 bp, Artificial
  Synthetic oligonucleotide
tgcaaatagggaatataatctcaatatggattagccattcaattcaaactggaagtcaaa

SEQ ID NO: 57051 - DNA, 60 bp, Artificial
  Synthetic oligonucleotide
atagggaatataatctcaatatggattagccattcaattcaaactggaagtcaaaaccat

SEQ ID NO: 57052 - DNA, 56 bp, Artificial
  Synthetic oligonucleotide
agctgagcaatcttgcaaaaggggagaaggctaatgtgctaattgggcaaggagac

SEQ ID NO: 57053 - DNA, 60 bp, Artificial
  Synthetic oligonucleotide
ggcagcactcttggtctggacatcgaaacagccactcgtgctggaaagcagatagtggag

SEQ ID NO: 57054 - DNA, 60 bp, Artificial
  Synthetic oligonucleotide
tttacagctacatatgcagacacaatatgtataggctaccatgcgaacaactcaaccgac

SEQ ID NO: 57055 - DNA, 57 bp, Artificial
  Synthetic oligonucleotide
ttacttgaagttgagagtgagataaggacattttcttttcagcttatttagtactaa

SEQ ID NO: 57056 - DNA, 60 bp, Artificial
  Synthetic oligonucleotide
gggccattgtagctgaaatatctcccattccttctatgccaggacattctacagaggatg

SEQ ID NO: 57057 - DNA, 60 bp, Artificial
  Synthetic oligonucleotide
cttttacttgaagttgagagtgagataaggacattttcttttcagcttatttagtactaa

SEQ ID NO: 57058 - DNA, 57 bp, Artificial
  Synthetic oligonucleotide
gaattcggatggccatcaattagtgtagaattgtttaaaaacgaccttgtttctact

SEQ ID NO: 57059 - DNA, 57 bp, Artificial
  Synthetic oligonucleotide
gaattcggatggccatcaattaatgtcgaattgtttaaaaacgaccttgtttctact

SEQ ID NO: 57060 - DNA, 60 bp, Artificial
  Synthetic oligonucleotide
ttccagacatgggtttgagatgatttgggatcctaatggatggacagagactgatagtga

SEQ ID NO: 57061 - DNA, 60 bp, Artificial
  Synthetic oligonucleotide
tttcatataggtatggtaatggtgtttggataggaaggaccaaaagtcacagttccagac

SEQ ID NO: 57062 - DNA, 60 bp, Artificial
  Synthetic oligonucleotide
tcatacaggtatggtaatggtgtttggataggaaggactaaaagtgacagttccagacag

SEQ ID NO: 57063 - DNA, 60 bp, Artificial
  Synthetic oligonucleotide
cgcatgccatgatggcatgggctggctaacaatcggaatttctggtccagataatggagc

SEQ ID NO: 57064 - DNA, 60 bp, Artificial
  Synthetic oligonucleotide
ccatgatggcatgggctggctaacaatcggaatttctggtccagataatggagcagtggc

SEQ ID NO: 57065 - DNA, 60 bp, Artificial
  Synthetic oligonucleotide
ggacaaaatttccctcagacaacaaacacctatcggaatacggacacagcagaacatctc

SEQ ID NO: 57066 - DNA, 60 bp, Artificial
  Synthetic oligonucleotide
gaagaagcattgaggcagaaaataatggaaagtggaggaatcagcaagatgagcactggc

SEQ ID NO: 57067 - DNA, 60 bp, Artificial
  Synthetic oligonucleotide
ttgagcgagagaatgccattgcccactgttatccaggggcaaccataaatgaagaagcat

SEQ ID NO: 57068 - DNA, 60 bp, Artificial
  Synthetic oligonucleotide
cactggcttcacttatgggtcttccatcacctcagctgggaccactaaggcatgcatgag

SEQ ID NO: 57069 - DNA, 60 bp, Artificial
  Synthetic oligonucleotide
gacacagcagaacatctcataatatggggaattcatcacccttccagcacacaggaaaag

SEQ ID NO: 57070 - DNA, 60 bp, Artificial
  Synthetic oligonucleotide
tgcttttggagagggggttctataaatacaaagctcccttttcaaaatctgtcacccaga

SEQ ID NO: 57071 - DNA, 60 bp, Artificial
  Synthetic oligonucleotide
caggtcaatggacaaagtgggcgaattgactttcactggacactagtacagccgggtgac

SEQ ID NO: 57072 - DNA, 60 bp, Artificial
  Synthetic oligonucleotide
gtcacccagaacagtaggtcaatgccccaaatacgtaaatcagaggagtttactgcttgc

SEQ ID NO: 57073 - DNA, 60 bp, Artificial
  Synthetic oligonucleotide
ggttctataaatacaaagctcccttttcaaaatctgtcacccagaacagtaggtcaatgc

SEQ ID NO: 57074 - DNA, 60 bp, Artificial
  Synthetic oligonucleotide
gacttatacggaactcagtcactatctatatcagttgagagttctacatatcagaacaac

SEQ ID NO: 57075 - DNA, 60 bp, Artificial
  Synthetic oligonucleotide
acaggaaaagaatgacttatacggaactcagtcactatctatatcagttgagagttctac

SEQ ID NO: 57076 - DNA, 60 bp, Artificial
  Synthetic oligonucleotide
cagaacaactttgttccagttgttggggcaagacctcaggtcaatggacaaagtgggcga

SEQ ID NO: 57077 - DNA, 60 bp, Artificial
  Synthetic oligonucleotide
agagttctacatatcagaacaactttgttccagttgttggggcaagacctcaggtcaatg

SEQ ID NO: 57078 - DNA, 60 bp, Artificial
  Synthetic oligonucleotide
gtatgaaaggaagaagctacaaggacttgggcaattgtcacccggtaggaatgttgatag

SEQ ID NO: 57079 - DNA, 54 bp, Artificial
  Synthetic oligonucleotide
ttggagcagtgaaaggtcttgacagaatctgcctaggacaccatgcggttgcca

SEQ ID NO: 57080 - DNA, 60 bp, Artificial
  Synthetic oligonucleotide
cccagtgaaactttcttcggggtacaaagacatcatactttggtttagcttcggggaatc

SEQ ID NO: 57081 - DNA, 60 bp, Artificial
  Synthetic oligonucleotide
agcaaaagcaggggtcacaatgtacaaagtagtagtaataattgcgctccttggagcagt

SEQ ID NO: 57082 - DNA, 60 bp, Artificial
  Synthetic oligonucleotide
aaacggatgggaaggaatggtagacggctggtatggtttcagacaccaaaatgcccaggg

SEQ ID NO: 57083 - DNA, 60 bp, Artificial
  Synthetic oligonucleotide
agcagggttcatagaaaacggatgggaaggaatggtagacggctggtatggtttcagaca

SEQ ID NO: 57084 - DNA, 60 bp, Artificial
  Synthetic oligonucleotide
aagggatgttttgagatatatcatacttgtgatgattcgtgcatggagagtataaggaac

SEQ ID NO: 57085 - DNA, 60 bp, Artificial
  Synthetic oligonucleotide
gacatttggacttacaacgcagagctattagtggcaatggagaatcagcacacaattgac

SEQ ID NO: 57086 - DNA, 60 bp, Artificial
  Synthetic oligonucleotide
tcggggaatcatgctttgttcttctagccgttgttatgggtcttgttttcttctgcctga

SEQ ID NO: 57087 - DNA, 60 bp, Artificial
  Synthetic oligonucleotide
cttcggggtacaaagacatcatactttggtttagcttcggggcatcatgctttgttcttc

SEQ ID NO: 57088 - DNA, 60 bp, Artificial
  Synthetic oligonucleotide
gagaatgccattgcccactgttatccaggggcaaccataaatgaagaagcattgaggcag

SEQ ID NO: 57089 - DNA, 60 bp, Artificial
  Synthetic oligonucleotide
tcggggcatcatgctttgttcttctagccgttgttatgggtcttgttttcttctgcctga

SEQ ID NO: 57090 - DNA, 60 bp, Artificial
  Synthetic oligonucleotide
gctacaaggacttgggcaattgtcacccggtaggaatgttgataggaacacctgtttgtg

SEQ ID NO: 57091 - DNA, 60 bp, Artificial
  Synthetic oligonucleotide
ctcagtgaaactttcttcggggtacaaagacatcatactttggtttagcttcggggcatc

SEQ ID NO: 57092 - DNA, 60 bp, Artificial
  Synthetic oligonucleotide
agacaaagggacaaaatttccctcagacaacaaacacctatcggaatacggacacagcag

SEQ ID NO: 57093 - DNA, 60 bp, Artificial
  Synthetic oligonucleotide
caggggtcacaatgtacaaagtagtagtaataattgcgctccttggagcagtgaaaggtc

SEQ ID NO: 57094 - DNA, 51 bp, Artificial
  Synthetic oligonucleotide
ataaggaacaatacttatgaccattcacaatacagagaggaggctcttctg

SEQ ID NO: 57095 - DNA, 52 bp, Artificial
  Synthetic oligonucleotide
tataaggaacaatacttatgaccattcacaatacagagaggaggctcttctg

SEQ ID NO: 57096 - DNA, 60 bp, Artificial
  Synthetic oligonucleotide
gggatgttttgagatatatcatacttgtgatgattcgtgcatggagagtataaggaacaa

SEQ ID NO: 57097 - DNA, 60 bp, Artificial
  Synthetic oligonucleotide
agtactcaagcagctattgaccaaatcacagggaaactgaacaggttgattgagaagacc

SEQ ID NO: 57098 - DNA, 60 bp, Artificial
  Synthetic oligonucleotide
gcagctattgaccaaatcacagggaaactgaacaggttgattgagaagaccaacactgag

SEQ ID NO: 57099 - DNA, 60 bp, Artificial
  Synthetic oligonucleotide
gtttcagacaccaaaatgcccagggcacaggccaagctgctgattacaagagtactcaag

SEQ ID NO: 57100 - DNA, 60 bp, Artificial
  Synthetic oligonucleotide
cagacaccaaaatgcccagggcacaggccaagctgctgattacaagagtactcaagcagc

SEQ ID NO: 57101 - DNA, 60 bp, Artificial
  Synthetic oligonucleotide
ctgagcatcaaattggtaacgtcattaattggaccaaagattcaataaccgacatttgga

SEQ ID NO: 57102 - DNA, 60 bp, Artificial
  Synthetic oligonucleotide
gtaacgtcattaattggaccaaagattcaataaccgacatttggacttacaacgcagagc

SEQ ID NO: 57103 - DNA, 60 bp, Artificial
  Synthetic oligonucleotide
tgagaagaccaacactgagtttgagtcaatagaatctgaattcagtgagactgagcatca

SEQ ID NO: 57104 - DNA, 60 bp, Artificial
  Synthetic oligonucleotide
ctgagtttgagtcaatagaatctgaattcagtgagactgagcatcaaattggtaacgtca

SEQ ID NO: 57105 - DNA, 60 bp, Artificial
  Synthetic oligonucleotide
gagcactggcttcacttatgggtcttccatcacctcagctgggaccactaaggcatgcat

SEQ ID NO: 57106 - DNA, 60 bp, Artificial
  Synthetic oligonucleotide
cactggcttcacttatgggtcttccatcaactcagctgggaccactaaggcatgcatgag

SEQ ID NO: 57107 - DNA, 60 bp, Artificial
  Synthetic oligonucleotide
gtaacgtcattaattggaccaaagattcaataaccgacatttggacttatcaagcagagc

SEQ ID NO: 57108 - DNA, 60 bp, Artificial
  Synthetic oligonucleotide
gacatttggacttatcaagcagagctattagtggcaatggagaatcagcacacaattgac

SEQ ID NO: 57109 - DNA, 60 bp, Artificial
  Synthetic oligonucleotide
cggggcatcatgctttgttcttctagccgttgttatgggtcttgttttcttctgcctgaa

SEQ ID NO: 57110 - DNA, 60 bp, Artificial
  Synthetic oligonucleotide
cggggaatcatgctttgttcttctagccgttgttatgggtcttgttttcttctgcctgaa

SEQ ID NO: 57111 - DNA, 60 bp, Artificial
  Synthetic oligonucleotide
gcagaaaataatggaaagtggaggaatcagcaagatgagcactggcttcacttatgggtc

SEQ ID NO: 57112 - DNA, 60 bp, Artificial
  Synthetic oligonucleotide
gagcactggcttcacttatgggtcttccatcaactcagctgggaccactaaggcatgcat

SEQ ID NO: 57113 - DNA, 60 bp, Artificial
  Synthetic oligonucleotide
tcgccgagatcagaggtctctaagaggaagaggcagcactcttggtctggacatcgaaac

SEQ ID NO: 57114 - DNA, 60 bp, Artificial
  Synthetic oligonucleotide
tcgccgagaccagaaatctctaagaggaagaggcagcactcttggtctggacatcgaaac

SEQ ID NO: 57115 - DNA, 60 bp, Artificial
  Synthetic oligonucleotide
tcgccgagaccaaaaatctctaagaggaagaggcagcactcttggtctggacatcgaaac

SEQ ID NO: 57116 - DNA, 60 bp, Artificial
  Synthetic oligonucleotide
tcgccgagatcagaagtctctaagaggaagaggcagcactcttggtctggacatcgaaac

SEQ ID NO: 57117 - DNA, 60 bp, Artificial
  Synthetic oligonucleotide
tcgccgcgatcagaaatctctaagaggaagaggcagcactcttggtctggacatcgaaac

SEQ ID NO: 57118 - DNA, 60 bp, Artificial
  Synthetic oligonucleotide
gctgggaagaacacagatcttgaggctctcatggaatggctaaagacaagaccaatcctg

SEQ ID NO: 57119 - DNA, 60 bp, Artificial
  Synthetic oligonucleotide
gaatggtgcagaatgggatgtcttcatagagcgacccaccgctgtggatacttgctatcc

SEQ ID NO: 57120 - DNA, 60 bp, Artificial
  Synthetic oligonucleotide
tgatcacttgaatggtgcagaatgggatgtcttcatagagcgacccaccgctgtggatac

SEQ ID NO: 57121 - DNA, 60 bp, Artificial
  Synthetic oligonucleotide
gttcatacaggagaccggttggaatttccagcatggtggaggccatggtgtctagggccc

SEQ ID NO: 57122 - DNA, 60 bp, Artificial
  Synthetic oligonucleotide
tagttcatacaggagaccggttggaatttccagcatggtggaggccatggtgtctagggc

SEQ ID NO: 57123 - DNA, 60 bp, Artificial
  Synthetic oligonucleotide
atggattctaacactgtgtcaagctttcaggtagactgctttctttggcatgtccgcaaa

SEQ ID NO: 57124 - DNA, 60 bp, Artificial
  Synthetic oligonucleotide
cttcctttgacatgagcaacgaaggatcttatttcttcggagacaatgcagaggagtatg

SEQ ID NO: 57125 - DNA, 60 bp, Artificial
  Synthetic oligonucleotide
tccctctagcacacaagaaaagaatgatctgtatgggacccagtcactttctatttcggt

SEQ ID NO: 57126 - DNA, 60 bp, Artificial
  Synthetic oligonucleotide
cttataatctggggaattcatcacccttcaagcacacaagaaaagaatgatctgtatgga

SEQ ID NO: 57127 - DNA, 50 bp, Artificial
  Synthetic oligonucleotide
gcgaccaaaagaattcggatggccatcaattagtgtcgaattgttaaaaa

SEQ ID NO: 57128 - DNA, 60 bp, Artificial
  Synthetic oligonucleotide
aattcttccctagcagttcatacaggagaccggttggaatttccagcatggtagaggcca

SEQ ID NO: 57129 - DNA, 60 bp, Artificial
  Synthetic oligonucleotide
ccatgacggcatctcaagaatgtcaatctgcatgtcaggacctaataacaatgcctcggc

SEQ ID NO: 57130 - DNA, 60 bp, Artificial
  Synthetic oligonucleotide
gaagtgaggcataaattgaagacgacagagaatagttttgagcaaataacatttatgcaa

SEQ ID NO: 57131 - DNA, 60 bp, Artificial
  Synthetic oligonucleotide
cggcacagattgaaaatgacagagaatagttttgagcaaataacatttatgcaagcctta

SEQ ID NO: 57132 - DNA, 60 bp, Artificial
  Synthetic oligonucleotide
acagatgtatcaaaagtgctgcaatctattcgagaaattcttccctagcagttcatacag

SEQ ID NO: 57133 - DNA, 60 bp, Artificial
  Synthetic oligonucleotide
cccagcgcggggaaagatcctaagaaaactggaggacccatatacaagagagtagataga

SEQ ID NO: 57134 - DNA, 60 bp, Artificial
  Synthetic oligonucleotide
caggagttgacaggttttatcgaacctgtaagctactcggaatcaatatgagcaagaaaa

SEQ ID NO: 57135 - DNA, 60 bp, Artificial
  Synthetic oligonucleotide
gggaaggttactaaatcaatagagttgaatgcacctaattctcactatgaggaatgttcc

SEQ ID NO: 57136 - DNA, 60 bp, Artificial
  Synthetic oligonucleotide
acaggggtcctcacagacacgagcagaccatcagacaaatcaataggagactgtaataac

SEQ ID NO: 57137 - DNA, 60 bp, Artificial
  Synthetic oligonucleotide
ggggtcctcacagacacgagcagaccatcagacaaatcaataggagactgtaataacccg

SEQ ID NO: 57138 - DNA, 60 bp, Artificial
  Synthetic oligonucleotide
gccatgacggcatcggacggatgaccatttgtgtgcagggaaataatgataacgcaacag

SEQ ID NO: 57139 - DNA, 60 bp, Artificial
  Synthetic oligonucleotide
gggacaagagtggtcccaagaggacaactgtccaccagaggagttcaaattgcttcaaat

SEQ ID NO: 57140 - DNA, 60 bp, Artificial
  Synthetic oligonucleotide
ggacaagagtggtcccaagaggacaactgtccaccagaggagttcaaattgcttcaaatg

SEQ ID NO: 57141 - DNA, 60 bp, Artificial
  Synthetic oligonucleotide
tacagagaatagttttgagcaaataacatttatgcaagccttgcaactattgcttgaagt

SEQ ID NO: 57142 - DNA, 60 bp, Artificial
  Synthetic oligonucleotide
gcaggcaaaccatttgaatggatgtcaatccgaccttacttttcttaaaagtgccagcac

SEQ ID NO: 57143 - DNA, 60 bp, Artificial
  Synthetic oligonucleotide
atttgaatggatgtcaatccgactttacttttcttgaaagttccagcgcaaaatgccata

SEQ ID NO: 57144 - DNA, 53 bp, Artificial
  Synthetic oligonucleotide
ggggcaatcagcttctggatgtgttctaatggttcattgcagtgcagaatatg

SEQ ID NO: 57145 - DNA, 60 bp, Artificial
  Synthetic oligonucleotide
gctttgaacaaataacatttatgcaagccttacaactattgcttgaagtggagcaagaga

SEQ ID NO: 57146 - DNA, 60 bp, Artificial
  Synthetic oligonucleotide
ttgagccctggaatgatgatgggcatgttcaacatgctaagtacggttttgggagtttcg

SEQ ID NO: 57147 - DNA, 60 bp, Artificial
  Synthetic oligonucleotide
tgaaagatgagtcttctaaccgaggtcgaaacgtacgttctctctattgtcccgtcaggc

SEQ ID NO: 57148 - DNA, 60 bp, Artificial
  Synthetic oligonucleotide
agtttagttgcactatgtggaagcccaatctcagttgggtccggttccttccccgatggg

SEQ ID NO: 57149 - DNA, 60 bp, Artificial
  Synthetic oligonucleotide
ttagttgcactatgtggaagcccagtcccagttgggtccggttccttccccgatggggca

SEQ ID NO: 57150 - DNA, 60 bp, Artificial
  Synthetic oligonucleotide
ataggagactgtaacaacccgattactgggagtccgggagctcctggggtcaaaggattc

SEQ ID NO: 57151 - DNA, 60 bp, Artificial
  Synthetic oligonucleotide
caataggagactgtaacaacccgattactgggagtccgggagctcctggggtcaaaggat

SEQ ID NO: 57152 - DNA, 60 bp, Artificial
  Synthetic oligonucleotide
ctgaaaatctacagagattcgcttggagaagccgtaatgaggatgggagaccttcactac

SEQ ID NO: 57153 - DNA, 60 bp, Artificial
  Synthetic oligonucleotide
tgaagaagtgcggcacagattgaaaagcacagagaatagtttcgaacaaataacatttat

SEQ ID NO: 57154 - DNA, 60 bp, Artificial
  Synthetic oligonucleotide
aatctacagagattcgcttggagaagccgtaatgaggatgggagaccttcactacctcca

SEQ ID NO: 57155 - DNA, 60 bp, Artificial
  Synthetic oligonucleotide
gtgcggcacagattgaaaagcacagagaatagtttcgaacaaataacatttatgcaagcc

SEQ ID NO: 57156 - DNA, 60 bp, Artificial
  Synthetic oligonucleotide
cggcacagactgaaaatgacagagaatagtttcgaacaaataacatttatgcaagcctta

SEQ ID NO: 57157 - DNA, 60 bp, Artificial
  Synthetic oligonucleotide
ggcacagactgaaaatgacagagaatagtttcgaacaaataacatttatgcaagccttac

SEQ ID NO: 57158 - DNA, 60 bp, Artificial
  Synthetic oligonucleotide
gactcaaggaacatgctgggaacagatgtacactccaggtggagaagtgaggaatgatga

SEQ ID NO: 57159 - DNA, 60 bp, Artificial
  Synthetic oligonucleotide
aaagtaggatgcagttctcctccttgactgtgaatgtgaggggatcaggaatgagaatac

SEQ ID NO: 57160 - DNA, 60 bp, Artificial
  Synthetic oligonucleotide
gtcacaattggagaatgtccaaaatatgtcaaaagcacaaaattgagaatggctacaggg

SEQ ID NO: 57161 - DNA, 60 bp, Artificial
  Synthetic oligonucleotide
aaaccactgtagaccacatggccataatcaagaagtacacatcaggaagacaggagaaaa

SEQ ID NO: 57162 - DNA, 51 bp, Artificial
  Synthetic oligonucleotide
tgtgttcacgctcaccgtgcccagtgagcgaggactgcagcgtagacgctt

SEQ ID NO: 57163 - DNA, 60 bp, Artificial
  Synthetic oligonucleotide
acatgcactgaaatagttgtggcaatgctactatttgctatccatactgtccaaaaaagt

SEQ ID NO: 57164 - DNA, 60 bp, Artificial
  Synthetic oligonucleotide
tcgccgagatcagaaatctttaagaggaagaggcagcactcttggtctggacatcgaaac

SEQ ID NO: 57165 - DNA, 60 bp, Artificial
  Synthetic oligonucleotide
tcgccgagatcagaagtccctgagaggaagaggcagcactcttggtctggacatcgaaac

SEQ ID NO: 57166 - DNA, 60 bp, Artificial
  Synthetic oligonucleotide
cagaatcactgaaaggcaagaaatagttgacaacaacaattggtcaggatactcagggag

SEQ ID NO: 57167 - DNA, 60 bp, Artificial
  Synthetic oligonucleotide
tccagaatcactgaaaggcaagaaatagttgacaacaacaattggtcaggatactcaggg

SEQ ID NO: 57168 - DNA, 60 bp, Artificial
  Synthetic oligonucleotide
tgatgccggatcagaccgagtgatggtatcacctctggctgtgacatggtggaataggaa

SEQ ID NO: 57169 - DNA, 60 bp, Artificial
  Synthetic oligonucleotide
attgaaagatgagtcttctaaccgaggtcgaaacgtacgttctctctatcgttccgtcag

SEQ ID NO: 57170 - DNA, 60 bp, Artificial
  Synthetic oligonucleotide
tatgaaagatgagtcttctaaccgaggtcgaaacgtacgttctctctatcgttccgtcag

SEQ ID NO: 57171 - DNA, 60 bp, Artificial
  Synthetic oligonucleotide
actcaaccgacactgttgacacagtactcgagaagaatgtaaccgtgacacactctgtta

SEQ ID NO: 57172 - DNA, 60 bp, Artificial
  Synthetic oligonucleotide
acagcagcacaacgagcaatgatggaccaggtgagagaaagtcggaatcctgggaatgct

SEQ ID NO: 57173 - DNA, 60 bp, Artificial
  Synthetic oligonucleotide
ggggctatacgaagcaattgaggagtgcctgattaatgatccctgggttttgcttaatgc

SEQ ID NO: 57174 - DNA, 52 bp, Artificial
  Synthetic oligonucleotide
tatggagtggctaaagacaagaccaatcctgtcacctctgactaaggggatt

SEQ ID NO: 57175 - DNA, 60 bp, Artificial
  Synthetic oligonucleotide
gggactacgcaagactttacatatggggagttcaccatccttcaaccgacacagaacaaa

SEQ ID NO: 57176 - DNA, 60 bp, Artificial
  Synthetic oligonucleotide
atttgaaatggatgtcaatccgactttacttttcttgaaagttccagcacaaaatgccat

SEQ ID NO: 57177 - DNA, 60 bp, Artificial
  Synthetic oligonucleotide
ggatgtcaatccgactttacttttcttgaaagttccagcacaaaatgccataagcaccac

SEQ ID NO: 57178 - DNA, 60 bp, Artificial
  Synthetic oligonucleotide
ccttgcttttatgtggaattgatcagaggcaggccaaaagagagcagtgtattgtggaca

SEQ ID NO: 57179 - DNA, 60 bp, Artificial
  Synthetic oligonucleotide
aaaacccatcacttaggatgaaatggatgatggcaatgaaatacccaattacagcagaca

SEQ ID NO: 57180 - DNA, 60 bp, Artificial
  Synthetic oligonucleotide
gacccaaggtgctctattaaatgacaaacattcaaatgggaccgttaaggacagaagtcc

SEQ ID NO: 57181 - DNA, 60 bp, Artificial
  Synthetic oligonucleotide
ctgacccaaggtgctctattaaatgacaaacattcaaatgggaccgttaaggacagaagt

SEQ ID NO: 57182 - DNA, 60 bp, Artificial
  Synthetic oligonucleotide
gcttaacaatagagagaatggtgctctctgcttttgacgagaggaggaataaatatctgg

SEQ ID NO: 57183 - DNA, 60 bp, Artificial
  Synthetic oligonucleotide
cagaaaaagagcacaattctaaatactgcagttcccatagggtcatgtgtcagcagatgc

SEQ ID NO: 57184 - DNA, 60 bp, Artificial
  Synthetic oligonucleotide
ggctttatagagaatggctggcaaggcctaattgatgggtggtatgggttcaggcaccag

SEQ ID NO: 57185 - DNA, 60 bp, Artificial
  Synthetic oligonucleotide
tgcatgctcttactctggagccagcagtttttatcggaatttgctatggataataaagaa

SEQ ID NO: 57186 - DNA, 58 bp, Artificial
  Synthetic oligonucleotide
aggaaatagacggtgtgaaactagaatcaatgggagtttaccagattttggcgatcta

SEQ ID NO: 57187 - DNA, 60 bp, Artificial
  Synthetic oligonucleotide
agttgaatagagaggaaatagacggtgtgaaactagaatcaatgggagtttaccagattt

SEQ ID NO: 57188 - DNA, 60 bp, Artificial
  Synthetic oligonucleotide
ccccaaatattcagaagaatccaaattgaatagagaggaaatagacggtgtgaaactaga

SEQ ID NO: 57189 - DNA, 60 bp, Artificial
  Synthetic oligonucleotide
atagagaggaaatagacggtgtgaaactagaatcaatgggagtttaccagattttggcga

SEQ ID NO: 57190 - DNA, 60 bp, Artificial
  Synthetic oligonucleotide
gatggatgtcaatccgactttacttttcttgaaagttccagcgcaaaatgccataagcac

SEQ ID NO: 57191 - DNA, 60 bp, Artificial
  Synthetic oligonucleotide
caatccgactttacttttcttgaaagttccagcgcaaaatgccataagcaccacattccc

SEQ ID NO: 57192 - DNA, 56 bp, Artificial
  Synthetic oligonucleotide
accgaagagggagcaattgttggcgaaatttcaccattgccttctcttccaggaca

SEQ ID NO: 57193 - DNA, 60 bp, Artificial
  Synthetic oligonucleotide
ggctttcaccgaagagggagcaattgttggcgaaatttcaccattgccttctcttccagg

SEQ ID NO: 57194 - DNA, 60 bp, Artificial
  Synthetic oligonucleotide
tcagagggacaagagtggtcccaagaggacaactgtccaccagaggagttcagattgctt

SEQ ID NO: 57195 - DNA, 60 bp, Artificial
  Synthetic oligonucleotide
tcagagggacaagagtggtcccaagaggacaactgtccaccagaggagttcagattgcat

SEQ ID NO: 57196 - DNA, 60 bp, Artificial
  Synthetic oligonucleotide
cagagggacaagagtggtcccaagaggacaactgtccaccagaggagttcagattgcttc

SEQ ID NO: 57197 - DNA, 58 bp, Artificial
  Synthetic oligonucleotide
atagaccaggcgatcatggataagaacatcatactgaaagcgaacttcagtgtgatct

SEQ ID NO: 57198 - DNA, 58 bp, Artificial
  Synthetic oligonucleotide
atggaccaggcgatcatggataagaacatcatactgaaagcgaacttcagtgtgatct

SEQ ID NO: 57199 - DNA, 60 bp, Artificial
  Synthetic oligonucleotide
atggaccaggcgatcatggataagaacatcatactgaaagcgaacttcagtgtgatcttc

SEQ ID NO: 57200 - DNA, 60 bp, Artificial
  Synthetic oligonucleotide
atagaccaggcgatcatggataagaacatcatactgaaagcgaacttcagtgtgatcttc

SEQ ID NO: 57201 - DNA, 60 bp, Artificial
  Synthetic oligonucleotide
ctatatgagagggtgaggaagcaactaaggcaaaatgcagaagaagatggaaaagggtgc

SEQ ID NO: 57202 - DNA, 60 bp, Artificial
  Synthetic oligonucleotide
gagagagtgaggaagcaactaaggcaaaatgcagaagaagatggaaaagggtgctttgaa

SEQ ID NO: 57203 - DNA, 60 bp, Artificial
  Synthetic oligonucleotide
cgaaagggtgaggaagcaactaaggcaaaatgcagaagaagatggaaaagggtgctttga

SEQ ID NO: 57204 - DNA, 60 bp, Artificial
  Synthetic oligonucleotide
gagagggtgaggaagcaactaaggcaaaatgcagaagaagatggaaaagggtgctttgaa

SEQ ID NO: 57205 - DNA, 60 bp, Artificial
  Synthetic oligonucleotide
ttaactgaagacccagatgaaggcacagctggagtggagtctgctgttctgagaggattc

SEQ ID NO: 57206 - DNA, 60 bp, Artificial
  Synthetic oligonucleotide
agaatgccactgaaatcagagcatctgttgggagaatggttggtggaatcgggaggttct

SEQ ID NO: 57207 - DNA, 60 bp, Artificial
  Synthetic oligonucleotide
cccagcgcggggaaagatcctaagaaaactggaggacccatatacaggagagtagatgga

SEQ ID NO: 57208 - DNA, 60 bp, Artificial
  Synthetic oligonucleotide
gcgacccaccgctgtggacacttgttatccatttgatgtgccagattatcagagcctacg

SEQ ID NO: 57209 - DNA, 60 bp, Artificial
  Synthetic oligonucleotide
gagggacggttgatccaaaacagcttaacaatagagagaatggtgctctctgcttttgac

SEQ ID NO: 57210 - DNA, 60 bp, Artificial
  Synthetic oligonucleotide
tgaagggcgattgatccagaacagcttaacaatagagagaatggtgctctctgcttttga

SEQ ID NO: 57211 - DNA, 60 bp, Artificial
  Synthetic oligonucleotide
ggcacataagaaagctgctcagcatgagagacatgtgtgatgctccctttgatgacagac

SEQ ID NO: 57212 - DNA, 60 bp, Artificial
  Synthetic oligonucleotide
atggcgccattgtagctgaaatatctcccattccttctatgccaggacattctacagagg

SEQ ID NO: 57213 - DNA, 60 bp, Artificial
  Synthetic oligonucleotide
gacaatggcgccattgtagctgaaatatctcccattccttccatgccaggacattctaca

SEQ ID NO: 57214 - DNA, 60 bp, Artificial
  Synthetic oligonucleotide
gacgatggcgccattgtagctgaaatatctcccattccttccatgccaggacattctaca

SEQ ID NO: 57215 - DNA, 60 bp, Artificial
  Synthetic oligonucleotide
atggggccattgtagctgaaatatctcccattccttctatgccaggacattctacagagg

SEQ ID NO: 57216 - DNA, 58 bp, Artificial
  Synthetic oligonucleotide
tcacagacgatggcgccattgtagctgaaatatctcccattccttctatgccaggaca

SEQ ID NO: 57217 - DNA, 60 bp, Artificial
  Synthetic oligonucleotide
gcgccattgtagctgaaatatctcccattccttctatgccaggacattctacagaggatg

SEQ ID NO: 57218 - DNA, 60 bp, Artificial
  Synthetic oligonucleotide
gagcatagaggaaataagcagggaatggtacatgctcatgccaaggcagaaaataacagg

SEQ ID NO: 57219 - DNA, 60 bp, Artificial
  Synthetic oligonucleotide
gcatagaggaaataagcagggaatggtacatgctcatgccaaggcagaaaataacagggg

SEQ ID NO: 57220 - DNA, 60 bp, Artificial
  Synthetic oligonucleotide
gcgccattgtagctgaaatatctcccattccttccatgccaggacattctacagaggatg

SEQ ID NO: 57221 - DNA, 60 bp, Artificial
  Synthetic oligonucleotide
cacaattggagaatgtccaaaatatgtcaaaagcacaaaattgagaatggctacaggact

SEQ ID NO: 57222 - DNA, 60 bp, Artificial
  Synthetic oligonucleotide
aattggagaatgtccaaaatatgtcaaaagcacaaaattgagaatggctacaggattaag

SEQ ID NO: 57223 - DNA, 60 bp, Artificial
  Synthetic oligonucleotide
ggggaatgtccaaaatatgtcaaaagcacaaaattgagaatggctacaggactaaggaat

SEQ ID NO: 57224 - DNA, 60 bp, Artificial
  Synthetic oligonucleotide
cctttgacatgaataacgagggatcttatttcttcggagacaatgcagaggagtatgaca

SEQ ID NO: 57225 - DNA, 50 bp, Artificial
  Synthetic oligonucleotide
ctcataagtcttgcctgcctgcttgtgtgtatggacttgccgtggccagt

SEQ ID NO: 57226 - DNA, 54 bp, Artificial
  Synthetic oligonucleotide
gaacggctacattgagggcaagctttctcaaatgtccaaagaagtaaatgctag

SEQ ID NO: 57227 - DNA, 60 bp, Artificial
  Synthetic oligonucleotide
cgaaaaggggaaggttactaaatcaatagagttgaatgcacccaattttcattatgagga

SEQ ID NO: 57228 - DNA, 60 bp, Artificial
  Synthetic oligonucleotide
tctttgaaagagttaaacgccaactacgagagaatgctgaggacaaagggaatggatgtt

SEQ ID NO: 57229 - DNA, 60 bp, Artificial
  Synthetic oligonucleotide
tctttgaaagagttagacgccaactacgggagaatgctgaggacaaagggaatggatgtt

SEQ ID NO: 57230 - DNA, 60 bp, Artificial
  Synthetic oligonucleotide
ttctaaggggatcagttgcacataagtcttgcctgcctgcttgtgtgtatgggcttgcag

SEQ ID NO: 57231 - DNA, 60 bp, Artificial
  Synthetic oligonucleotide
ttctaagggggtcagttgcacataagtcttgcctgcctgcttgtgtgtatgggcttgcag

SEQ ID NO: 57232 - DNA, 60 bp, Artificial
  Synthetic oligonucleotide
atgctgaacaaaagcttatgcaaagttgaaggatgggtagtggtagctaaggacaatgct

SEQ ID NO: 57233 - DNA, 60 bp, Artificial
  Synthetic oligonucleotide
gcaagccttacaactattgcttgaagtagaacaagagataagaactttctcgtttcagct

SEQ ID NO: 57234 - DNA, 60 bp, Artificial
  Synthetic oligonucleotide
gcgacactgtgggttggtcttggccagacggtgctgagttgccattcaccattgacaagt

SEQ ID NO: 57235 - DNA, 60 bp, Artificial
  Synthetic oligonucleotide
cataaacaggacaggaacatttgaattcacaagctttttctatcgctatggattcgtagc

SEQ ID NO: 57236 - DNA, 60 bp, Artificial
  Synthetic oligonucleotide
cgagaaggggaaggttactaaatcaatagagttggatgcacccaattatcattacgagga

SEQ ID NO: 57237 - DNA, 60 bp, Artificial
  Synthetic oligonucleotide
ggaagactgatccagaacagcttaacaatagagagaatggtgctctctgcttttgacgag

SEQ ID NO: 57238 - DNA, 60 bp, Artificial
  Synthetic oligonucleotide
ggaaggctgatccagaacagcttaacaatagagagaatggtgctctctgcttttgacgag

SEQ ID NO: 57239 - DNA, 60 bp, Artificial
  Synthetic oligonucleotide
gaatgtgcaacatcctcaaggggaaattccaaacagcagcacaacgagcaatgatggacc

SEQ ID NO: 57240 - DNA, 60 bp, Artificial
  Synthetic oligonucleotide
gggagattctacatacagatgtgcactgaactcaagctcagcgaccatgaagggaggctg

SEQ ID NO: 57241 - DNA, 60 bp, Artificial
  Synthetic oligonucleotide
cccagggaacatgctgggagcagatgtacactccaggaggggaagtgagaaatgatgatg

SEQ ID NO: 57242 - DNA, 60 bp, Artificial
  Synthetic oligonucleotide
cccaggggacatgctgggagcagatgtacactccaggaggggaagtgagaaatgatgatg

SEQ ID NO: 57243 - DNA, 60 bp, Artificial
  Synthetic oligonucleotide
ttagcaaaagcaggggaaaataaaagcaaccaaaatgaaggcaatactattagtcttgct

SEQ ID NO: 57244 - DNA, 60 bp, Artificial
  Synthetic oligonucleotide
atgctgtggtgatgccagctcatggtccagccaagagcatggaatatgatgctgttgcta

SEQ ID NO: 57245 - DNA, 60 bp, Artificial
  Synthetic oligonucleotide
aatgctgaatctatacgaaagggtgaggaagcaactaaggcaaaatgcagaagaagatgg

SEQ ID NO: 57246 - DNA, 55 bp, Artificial
  Synthetic oligonucleotide
gcaagagtggtcccaagaggacaactgtccaccagaggagtacagattgcttcaa

SEQ ID NO: 57247 - DNA, 60 bp, Artificial
  Synthetic oligonucleotide
gaatgtgtaacattctcaaagggaaattccaaacagcagcacaacgagcaatgatggacc

SEQ ID NO: 57248 - DNA, 60 bp, Artificial
  Synthetic oligonucleotide
gaatgtgcaacattctcaaagggaaattccaaacagcagcacaacgagcaatgatggatc

SEQ ID NO: 57249 - DNA, 60 bp, Artificial
  Synthetic oligonucleotide
gaatgtgcaacattctcaaagggaaattccaaacagcagcacaacgagcaatgatggacc

SEQ ID NO: 57250 - DNA, 60 bp, Artificial
  Synthetic oligonucleotide
agaatgtgcaacattctcaaagggaaattccaaacagcagcacaacgagcaatgatggac

SEQ ID NO: 57251 - DNA, 60 bp, Artificial
  Synthetic oligonucleotide
ggatcctcatcggaggacttgaatggaatgataacacagttcgagtctctgaaactctac

SEQ ID NO: 57252 - DNA, 60 bp, Artificial
  Synthetic oligonucleotide
gggtcatcatcggaggacttgaatggaatgataacacagttcgagtctctgaaactctac

SEQ ID NO: 57253 - DNA, 60 bp, Artificial
  Synthetic oligonucleotide
gtcccatccaggaatctttgaaaactcgtgtcttgagacgatggaagttgttcaacagac

SEQ ID NO: 57254 - DNA, 60 bp, Artificial
  Synthetic oligonucleotide
gagcctggagacacaataacattcgaagcaactggaaatctagtggtaccaagatatgcc

SEQ ID NO: 57255 - DNA, 60 bp, Artificial
  Synthetic oligonucleotide
cccaagaggacaactgtccaccagaggagttcagattgcttcaaatgagaacatggagac

SEQ ID NO: 57256 - DNA, 60 bp, Artificial
  Synthetic oligonucleotide
cggatcagaccgagtgatggtatcacctctggctgtgacatggtggaataggaatggacc

SEQ ID NO: 57257 - DNA, 60 bp, Artificial
  Synthetic oligonucleotide
gctcagaccgagtgatggtatcacctctggctgtgacatggtggaataggaatggaccaa

SEQ ID NO: 57258 - DNA, 60 bp, Artificial
  Synthetic oligonucleotide
ggatcagaccgagtgatggtatcacctctggctgtgacatggtggaataggaatggacca

SEQ ID NO: 57259 - DNA, 60 bp, Artificial
  Synthetic oligonucleotide
tgaatctatatgagagagtgaggaagcaactaaggcaaaatgcagaagaagatggaaaag

SEQ ID NO: 57260 - DNA, 60 bp, Artificial
  Synthetic oligonucleotide
tgaatctatatgagagagtgaggaagcaactaaggcaaaatgcagaagaagatgggaaag

SEQ ID NO: 57261 - DNA, 60 bp, Artificial
  Synthetic oligonucleotide
tgaatctatatgagagagtgaggaaacaactaaggcaaaatgcagaagaagatgggaaag

SEQ ID NO: 57262 - DNA, 60 bp, Artificial
  Synthetic oligonucleotide
tgaatctatatgagagggtgaggaaacaactaaggcaaaatgcagaagaagatgggaaag

SEQ ID NO: 57263 - DNA, 60 bp, Artificial
  Synthetic oligonucleotide
gagagagtgaggaagcaactaaggcaaaatgcagaagaagatgggaaagggtgctttgaa

SEQ ID NO: 57264 - DNA, 60 bp, Artificial
  Synthetic oligonucleotide
tgagagggtgaggaagcaactaaggcaaaatgcagaagaagatgggaaagggtgctttga

SEQ ID NO: 57265 - DNA, 60 bp, Artificial
  Synthetic oligonucleotide
tgtccgcaaacggtttgcagaccaagaactgggtgatgccccattccttgatcggcttcg

SEQ ID NO: 57266 - DNA, 60 bp, Artificial
  Synthetic oligonucleotide
actaatagtaagtgggagagatgagcagtcaattgctgaagcaataattgtggccatggt

SEQ ID NO: 57267 - DNA, 60 bp, Artificial
  Synthetic oligonucleotide
gcagatactgggctataagaaccaggagcggagggaacactaaccagcagagagcatctg

SEQ ID NO: 57268 - DNA, 60 bp, Artificial
  Synthetic oligonucleotide
gcttaatgcatcttggttcaactccttcctcatacatgcactgaaatagttgtggcaatg

SEQ ID NO: 57269 - DNA, 60 bp, Artificial
  Synthetic oligonucleotide
aggagtgcctgattaacgatccctgggttttgcttaatgcatcttggttcaactccttcc

SEQ ID NO: 57270 - DNA, 60 bp, Artificial
  Synthetic oligonucleotide
cgatccctgggttttgcttaatgcatcttggttcaactccttcctcacacatgcagtgaa

SEQ ID NO: 57271 - DNA, 60 bp, Artificial
  Synthetic oligonucleotide
actagtcaaacaagtgtaataccaaatattggcagtagaccatgggtgagaggccaaagc

SEQ ID NO: 57272 - DNA, 60 bp, Artificial
  Synthetic oligonucleotide
gttcgcaccggaatggatcccaggatgtgctctctgatgcaaggttcaactctccctagg

SEQ ID NO: 57273 - DNA, 60 bp, Artificial
  Synthetic oligonucleotide
aggctaacgtgttgatagggcaaggagacgtagtgttggtaatgaaacggaaacgggact

SEQ ID NO: 57274 - DNA, 60 bp, Artificial
  Synthetic oligonucleotide
ggctaacgtgttgatagggcaaggagacgtagtgttggtaatgaaacggaaacgggactc

SEQ ID NO: 57275 - DNA, 60 bp, Artificial
  Synthetic oligonucleotide
atggcccagcattaagcatcaatgaactgagcaatcttgcaaaaggagagaaggctaatg

SEQ ID NO: 57276 - DNA, 60 bp, Artificial
  Synthetic oligonucleotide
actcaccgagtgacatccacatcatggcgtctcaaggcaccaaacgatcttatgagcaga

SEQ ID NO: 57277 - DNA, 60 bp, Artificial
  Synthetic oligonucleotide
catggactccaataccctagaactaagaagcagatactgggccataaggaccaggagtgg

SEQ ID NO: 57278 - DNA, 60 bp, Artificial
  Synthetic oligonucleotide
gacacactctgttaacctgcttgaagacagccacaacggaaaactatgtagactgggagg

SEQ ID NO: 57279 - DNA, 60 bp, Artificial
  Synthetic oligonucleotide
cctgctcgaagacagccacaacggaaaactatgtagattaaaaggcataaccccactaca

SEQ ID NO: 57280 - DNA, 60 bp, Artificial
  Synthetic oligonucleotide
tggcacgatctgcactcattctgagaggatcagtggctcataaatcctgcctgcctgctt

SEQ ID NO: 57281 - DNA, 60 bp, Artificial
  Synthetic oligonucleotide
cctggttttattagtctccctgggggcaatcagcttctggatgtgttctaatgggtcatt

SEQ ID NO: 57282 - DNA, 60 bp, Artificial
  Synthetic oligonucleotide
gttcatggcccaatcatgaaacgaacagaggtgtgacggcagcatgtccttatgcaggag

SEQ ID NO: 57283 - DNA, 60 bp, Artificial
  Synthetic oligonucleotide
gaggaattggaagattctacatacagatgtgcactgaactccaactcagtgactatgaag

SEQ ID NO: 57284 - DNA, 60 bp, Artificial
  Synthetic oligonucleotide
atgggcatgttcaacatgctaagtacagttttaggagtctcaatcctaaatctaggacaa

SEQ ID NO: 57285 - DNA, 60 bp, Artificial
  Synthetic oligonucleotide
ttgagtcctggaatgatgatgggcatgttcaacatgctaagtactgttttaggagtctca

SEQ ID NO: 57286 - DNA, 60 bp, Artificial
  Synthetic oligonucleotide
cctagctgacatgaccctcgaggaaatgtcaagagactggttcatactcatgcctaggca

SEQ ID NO: 57287 - DNA, 60 bp, Artificial
  Synthetic oligonucleotide
gctacctagctgacatgaccctcgaggaaatgtcaagagactggttcatactcatgccta

SEQ ID NO: 57288 - DNA, 60 bp, Artificial
  Synthetic oligonucleotide
agaagaatcctgcgctcagaatgaaatggatgatggcaatgaaatacccaattacagcag

SEQ ID NO: 57289 - DNA, 60 bp, Artificial
  Synthetic oligonucleotide
aaaacccatcacttagaatgaaatggatgatggcaatgaaatacccaattacagcagaca

SEQ ID NO: 57290 - DNA, 56 bp, Artificial
  Synthetic oligonucleotide
aaaacccgtcacttaggatgaaatggatgatggcaatgaaatacccaattacagca

SEQ ID NO: 57291 - DNA, 60 bp, Artificial
  Synthetic oligonucleotide
gatggaaaagggtgctttgaaatatatcacaactgcgatgatagctgtatggagagcatt

SEQ ID NO: 57292 - DNA, 60 bp, Artificial
  Synthetic oligonucleotide
gagagggtgaggaagcagctgaggcaaaatgcagaagaagatggaaaagggtgctttgaa

SEQ ID NO: 57293 - DNA, 60 bp, Artificial
  Synthetic oligonucleotide
ctatatgagagggtgaggaagcagctgaggcaaaatgcagaagaagatggaaaagggtgc

SEQ ID NO: 57294 - DNA, 60 bp, Artificial
  Synthetic oligonucleotide
tctgtatggaacacaatcactttccatttcagtagggagttctacttatcaaaacaactt

SEQ ID NO: 57295 - DNA, 60 bp, Artificial
  Synthetic oligonucleotide
ggggcaatcagcttctggatgtgttctaatgggtcattgcaatgcagaatatgcatttag

SEQ ID NO: 57296 - DNA, 60 bp, Artificial
  Synthetic oligonucleotide
cctggtcttgttagtctccctgggggcagtcagcttctggatgtgttctaatgggtcatt

SEQ ID NO: 57297 - DNA, 60 bp, Artificial
  Synthetic oligonucleotide
attattattggacactgttagatcaaggagacaccataacgtttgaagccactgggaact

SEQ ID NO: 57298 - DNA, 60 bp, Artificial
  Synthetic oligonucleotide
ggtcaaatcgcaattgaggaacaatgccaaagaaatcgggaatggttgttttgagttcta

SEQ ID NO: 57299 - DNA, 52 bp, Artificial
  Synthetic oligonucleotide
tcttctaaccgaggtcgaaacgtacgttctctctatcgtcccgtcaggcccc

SEQ ID NO: 57300 - DNA, 57 bp, Artificial
  Synthetic oligonucleotide
atgagtcttttaaccgaggtcgaaacgtacgttctctctatcgtcccgtcaggcccc

SEQ ID NO: 57301 - DNA, 60 bp, Artificial
  Synthetic oligonucleotide
atgagtcttttaaccgaggtcgaaacgtacgttctctctatcgtcccgtcaggccccctc

SEQ ID NO: 57302 - DNA, 53 bp, Artificial
  Synthetic oligonucleotide
ggggcaatcagcttctggatgtgttctaatggatcattgcagtgcagaatatg

SEQ ID NO: 57303 - DNA, 60 bp, Artificial
  Synthetic oligonucleotide
ggcaggccaaaagagagtagtgtattgtggacatccaatagtatagtagcgctctgtgga

SEQ ID NO: 57304 - DNA, 60 bp, Artificial
  Synthetic oligonucleotide
ccttgtttttatgtggagttgatcagaggcaggccaaaagagagtagtgtattgtggaca

SEQ ID NO: 57305 - DNA, 60 bp, Artificial
  Synthetic oligonucleotide
cctggtcttgttagtctccctgggggcaatcagcttctggatgtgttctaatggatcatt

SEQ ID NO: 57306 - DNA, 60 bp, Artificial
  Synthetic oligonucleotide
ggacactaatagaacctggagacacaataacattcgaagcaactggaaacctagtggtac

SEQ ID NO: 57307 - DNA, 60 bp, Artificial
  Synthetic oligonucleotide
cgcaatgaaaagaggttctggatctggtattatcatttcagatacaccagtccacgattg

SEQ ID NO: 57308 - DNA, 60 bp, Artificial
  Synthetic oligonucleotide
cttcgcaatgaaaagaggttctggatctggtattatcatttcagatacaccagtccacga

SEQ ID NO: 57309 - DNA, 60 bp, Artificial
  Synthetic oligonucleotide
gagtggacaaactgacacaaggcagacagacctatgactggactctaaatagaaaccagc

SEQ ID NO: 57310 - DNA, 60 bp, Artificial
  Synthetic oligonucleotide
ggacaaactgacacaaggcagacagacctatgactggactctaaatagaaaccagcctgc

SEQ ID NO: 57311 - DNA, 60 bp, Artificial
  Synthetic oligonucleotide
ggtggacaaactgacacaaggcagacagacctatgactggactctaaatagaaaccagcc

SEQ ID NO: 57312 - DNA, 60 bp, Artificial
  Synthetic oligonucleotide
gggtggataaactgacacaaggcagacagacctatgactggactctaaatagaaaccagc

SEQ ID NO: 57313 - DNA, 57 bp, Artificial
  Synthetic oligonucleotide
tggaccaggcgatcatggataagaacatcatactgaaagcgaacttcagtgtgattt

SEQ ID NO: 57314 - DNA, 60 bp, Artificial
  Synthetic oligonucleotide
atgtgacctgttgctcactgcgaattcatggtcttacataatagagacttcaaattcaga

SEQ ID NO: 57315 - DNA, 60 bp, Artificial
  Synthetic oligonucleotide
gaggcaaatggaaatctaatagcgccatggtatgctttcgcactgagtagaggctttgga

SEQ ID NO: 57316 - DNA, 60 bp, Artificial
  Synthetic oligonucleotide
ggggaaattccaaacagcagcacaacgagcaatgatggatcaagtgagagaaagccggaa

SEQ ID NO: 57317 - DNA, 60 bp, Artificial
  Synthetic oligonucleotide
caacaacggggactacgcaagactttacatatggggagttcaccatccttcaactgacac

SEQ ID NO: 57318 - DNA, 59 bp, Artificial
  Synthetic oligonucleotide
acaaagattgacctgtggtcttacaatgctgaattgctggtggcattagaaaatcaaca

SEQ ID NO: 57319 - DNA, 60 bp, Artificial
  Synthetic oligonucleotide
acaaagattgacctgtggtcttacaatgctgaattgctggtggcattagaaaatcaacat

SEQ ID NO: 57320 - DNA, 60 bp, Artificial
  Synthetic oligonucleotide
agacacaaagattgacctgtggtcttacaatgctgaattgttggtggcattggaaaacca

SEQ ID NO: 57321 - DNA, 60 bp, Artificial
  Synthetic oligonucleotide
tcatacagacaggggttcaatctctacaactaaaccctttcagaacatctcgagaatatc

SEQ ID NO: 57322 - DNA, 60 bp, Artificial
  Synthetic oligonucleotide
cacactgacaagggttcaatctctacaactaaaccctttcagaacatctcgagaatatca

SEQ ID NO: 57323 - DNA, 60 bp, Artificial
  Synthetic oligonucleotide
ggagtatcctggcaaacaatgggaaatttgagttcattgctgaggaattccaatggaaca

SEQ ID NO: 57324 - DNA, 60 bp, Artificial
  Synthetic oligonucleotide
agcatcttagcaaacaacggaaaatttgagttcattgctgaggaattccaatggaacaca

SEQ ID NO: 57325 - DNA, 58 bp, Artificial
  Synthetic oligonucleotide
gtgttcacgctcaccgtgcccagtgagcgaggactgcagcgtagacgctttgtccaaa

SEQ ID NO: 57326 - DNA, 60 bp, Artificial
  Synthetic oligonucleotide
gcagtggggtgttcggtgacaatccgcgtcccaaagatggagagggcagctgtaatccag

SEQ ID NO: 57327 - DNA, 60 bp, Artificial
  Synthetic oligonucleotide
gagggctatacgaagcaattgaggagtgcctgattaatgatccctgggttttgcttaatg

SEQ ID NO: 57328 - DNA, 60 bp, Artificial
  Synthetic oligonucleotide
cctcctttgacatgagtaatgaaggatcttatttcttcggagacaatgcagaggattacg

SEQ ID NO: 57329 - DNA, 60 bp, Artificial
  Synthetic oligonucleotide
gaacggctgcattgagggcaagctttctcaaatgtccaaggaagtaaatgctagaattga

SEQ ID NO: 57330 - DNA, 50 bp, Artificial
  Synthetic oligonucleotide
atgaaggatcttatttcttcggagacaatgcagaggagtacgacaattaa

SEQ ID NO: 57331 - DNA, 60 bp, Artificial
  Synthetic oligonucleotide
tggaatcaacaaggatttaccagattttggcgatctattcaactatcgccagttcattgg

SEQ ID NO: 57332 - DNA, 60 bp, Artificial
  Synthetic oligonucleotide
cagagaggagatagatggagtaaagctggaatcaacaaggatttaccagattttggcgat

SEQ ID NO: 57333 - DNA, 60 bp, Artificial
  Synthetic oligonucleotide
ggtaaagctggaatcaacaaggatttaccagattttggcgatctattcaactatcgccag

SEQ ID NO: 57334 - DNA, 60 bp, Artificial
  Synthetic oligonucleotide
atcgaaaaggggaaggttactaaatcaatagagttgaatgcacctaattctcactatgag

SEQ ID NO: 57335 - DNA, 60 bp, Artificial
  Synthetic oligonucleotide
cgagaaggggaaggttactaaatcaatagagttggatgcacctaattctcactacgagga

SEQ ID NO: 57336 - DNA, 60 bp, Artificial
  Synthetic oligonucleotide
atcgagaaggggaaggttactaaatcaatagagttggatgcacctaattctcactacgag

SEQ ID NO: 57337 - DNA, 60 bp, Artificial
  Synthetic oligonucleotide
ctggaccttgctaaaacccggagacacaataatatttgaggcaaatggaaatctagtagc

SEQ ID NO: 57338 - DNA, 60 bp, Artificial
  Synthetic oligonucleotide
ccatgacggcatcggacggatgaccatttgtgtgcagggaaataatgataacgcaacagc

SEQ ID NO: 57339 - DNA, 60 bp, Artificial
  Synthetic oligonucleotide
caaaagttctgtattttcacaaaggactagtaataaaagaggaagccctcaaaggatcag

SEQ ID NO: 57340 - DNA, 60 bp, Artificial
  Synthetic oligonucleotide
gggaggctgattcagaacagcataacaatagagagaatggttctctcagcatttgatgag

SEQ ID NO: 57341 - DNA, 60 bp, Artificial
  Synthetic oligonucleotide
ttacaactattgcttgaagtggaacaagagataagaactttctcgtttcagcttatctga

SEQ ID NO: 57342 - DNA, 51 bp, Artificial
  Synthetic oligonucleotide
ttgtgtattggaagcaatggctttccttgaggaatcccatcctggtatttt

SEQ ID NO: 57343 - DNA, 60 bp, Artificial
  Synthetic oligonucleotide
tgatgattttgctctgattgtgaatgcacccaaccatgaaggaattcaagcaggagttga

SEQ ID NO: 57344 - DNA, 60 bp, Artificial
  Synthetic oligonucleotide
atcgtctgatgattttgctctgattgtgaatgcacccaactatgcaggaattcaagctgg

SEQ ID NO: 57345 - DNA, 60 bp, Artificial
  Synthetic oligonucleotide
tctgatgattttgctctgattgtgaatgcacccaactatgcaggaattcaagctggagtt

SEQ ID NO: 57346 - DNA, 60 bp, Artificial
  Synthetic oligonucleotide
gacaagctgacacaaggccgacagacctatgactggactctaaatagaaaccagcctgct

SEQ ID NO: 57347 - DNA, 60 bp, Artificial
  Synthetic oligonucleotide
ggccgacagacctatgactggactctaaatagaaaccagcctgctgcaacagcattggcc

SEQ ID NO: 57348 - DNA, 60 bp, Artificial
  Synthetic oligonucleotide
gacaagctgacacaaggccgacagacctatgactggactctaaatagaaaccagcctgcc

SEQ ID NO: 57349 - DNA, 60 bp, Artificial
  Synthetic oligonucleotide
gacaagctgacacaaggccgacagacctatgactggactctaaatagaaaccaacctgct

SEQ ID NO: 57350 - DNA, 60 bp, Artificial
  Synthetic oligonucleotide
gaccgtgactcactcagtgaatttgctcgaagacagccataatgggaaactctgcagcct

SEQ ID NO: 57351 - DNA, 60 bp, Artificial
  Synthetic oligonucleotide
gtaactgtgactcactcagtgaatttgctcgaagacagccataatgggaaactctgcagc

SEQ ID NO: 57352 - DNA, 60 bp, Artificial
  Synthetic oligonucleotide
ctgtgactcactcagtgaatttgctcgaagacagccataatgggaagctctgcagtctga

SEQ ID NO: 57353 - DNA, 60 bp, Artificial
  Synthetic oligonucleotide
gactcactcagtgaatttgctcgaagacagccataatgggaagctctgcagtctgaacgg

SEQ ID NO: 57354 - DNA, 60 bp, Artificial
  Synthetic oligonucleotide
gtgaccgtgactcactcagtgaatttgctcgaagacagccataatgggaagctctgcagt

SEQ ID NO: 57355 - DNA, 60 bp, Artificial
  Synthetic oligonucleotide
gcgggatggctccttggcaatccagagtgtgaccttctactcactgcaaactcatggtcc

SEQ ID NO: 57356 - DNA, 60 bp, Artificial
  Synthetic oligonucleotide
tagcgggatggctcctgggcaacccagaatgtgaccttctactcactgcaaactcatggt

SEQ ID NO: 57357 - DNA, 60 bp, Artificial
  Synthetic oligonucleotide
tggcgggatggctccttggcaatccagagtgtgaccttctactcactgcaaactcatggt

SEQ ID NO: 57358 - DNA, 60 bp, Artificial
  Synthetic oligonucleotide
gcgggatggctccttggcaatccagaatgtgaccttctactcactgcaaactcatggtcc

SEQ ID NO: 57359 - DNA, 60 bp, Artificial
  Synthetic oligonucleotide
ctcagtgaatttgctcgaagacagccataatgggaaactctgcagcctgaatgggatagc

SEQ ID NO: 57360 - DNA, 60 bp, Artificial
  Synthetic oligonucleotide
gctaagaatggcaacaggactaagaaatgtcccatccattcaatccagaggactatttgg

SEQ ID NO: 57361 - DNA, 60 bp, Artificial
  Synthetic oligonucleotide
cacatatgactatcccaaatattcagaagagtccaaattgaatcgagaggaaatagacgg

SEQ ID NO: 57362 - DNA, 60 bp, Artificial
  Synthetic oligonucleotide
tgcatggaaagtgtgaagaacggcacatatgactatcccaaatattcagaagagtctaaa

SEQ ID NO: 57363 - DNA, 60 bp, Artificial
  Synthetic oligonucleotide
tggctacaggactaagaaatgtcccatccattcaatccagaggactatttggagcaattg

SEQ ID NO: 57364 - DNA, 60 bp, Artificial
  Synthetic oligonucleotide
caccattggagaatgtcccaaatatgtcaagagcaccaagctaagaatggcaacaggact

SEQ ID NO: 57365 - DNA, 60 bp, Artificial
  Synthetic oligonucleotide
gcgggatggctcctgggcaacccagaatgtgaccttctactcactgcaaactcatggtcc

SEQ ID NO: 57366 - DNA, 60 bp, Artificial
  Synthetic oligonucleotide
agtgaatttgctcgaagacagccataatgggaaactctgcagcctgaacgggatagctcc

SEQ ID NO: 57367 - DNA, 60 bp, Artificial
  Synthetic oligonucleotide
ttctgaggggatcagtggctcataagtcctgcctgcctgcttgtgtgtatgggcttgctg

SEQ ID NO: 57368 - DNA, 60 bp, Artificial
  Synthetic oligonucleotide
gataatcactcaccgagtgacatccacatcatggcgtctcaaggcaccaaacgatcttat

SEQ ID NO: 57369 - DNA, 60 bp, Artificial
  Synthetic oligonucleotide
gagcctacggagcatcttagcaaacaatgggaaatttgagttcattgctgaggaattcca

SEQ ID NO: 57370 - DNA, 60 bp, Artificial
  Synthetic oligonucleotide
gtgtcaagctttcaggtagactgctttctttggcatgtccgcaaacgatttgcagaccgg

SEQ ID NO: 57371 - DNA, 60 bp, Artificial
  Synthetic oligonucleotide
tcgccgagaccagaagtctctaagaggaaggggcagcactcttggtctggacatcgaaac

SEQ ID NO: 57372 - DNA, 60 bp, Artificial
  Synthetic oligonucleotide
tgggagagatgaacagtcaattgctgaagcaataattgtggccatggtattttcacagga

SEQ ID NO: 57373 - DNA, 60 bp, Artificial
  Synthetic oligonucleotide
aaccatttgaatggatgtcaatccgactttacttttcttgaaagttccagcacaaaatgc

SEQ ID NO: 57374 - DNA, 60 bp, Artificial
  Synthetic oligonucleotide
accttcgatcttggagggctatatgaagcaattgaggagtgcctgattaatgatccctgg

SEQ ID NO: 57375 - DNA, 60 bp, Artificial
  Synthetic oligonucleotide
gctatccatttgatgtaccagattaccaaagcctacggagcatcttagcaaacaatggga

SEQ ID NO: 57376 - DNA, 60 bp, Artificial
  Synthetic oligonucleotide
acaacataccagaggacaagagctcttgttcgcaccggaatggatcccaggatgtgctct

SEQ ID NO: 57377 - DNA, 60 bp, Artificial
  Synthetic oligonucleotide
atctgttccaccattgaagagctcagacggcagaaatagtgaatttggcttgtccttcat

SEQ ID NO: 57378 - DNA, 60 bp, Artificial
  Synthetic oligonucleotide
atctgttccaccattgaagagctcagacggcaaaagtagtgaatttagcttgtccttcat

SEQ ID NO: 57379 - DNA, 60 bp, Artificial
  Synthetic oligonucleotide
atctgttccaccattgaagagctcagacggcagagatagtgaatttagcttgtccttcat

SEQ ID NO: 57380 - DNA, 60 bp, Artificial
  Synthetic oligonucleotide
ctcctgcagggtagataatcactcactgagtgacatcgaagccatggcgtctcaaggcac

SEQ ID NO: 57381 - DNA, 60 bp, Artificial
  Synthetic oligonucleotide
taagagtgcatgaggggtgtgaagaattcacaatggttgggagaagagcaacagccattc

SEQ ID NO: 57382 - DNA, 60 bp, Artificial
  Synthetic oligonucleotide
ggacagggatcaggctatgcagcggaccaaaagagcacacaaaatgccattgacgggatt

SEQ ID NO: 57383 - DNA, 60 bp, Artificial
  Synthetic oligonucleotide
cagcggaccaaaagagcacacaaaatgccattgacgggattactaacaaagtaaattctg

SEQ ID NO: 57384 - DNA, 60 bp, Artificial
  Synthetic oligonucleotide
cagggactgcaaagcaaaattacctaatgctgaacaaaagcttatgcaaagttgaaggat

SEQ ID NO: 57385 - DNA, 60 bp, Artificial
  Synthetic oligonucleotide
tgttcagcctgatcagaccaaatgaaaacccagcccacaaaagtcaattggtgtggatgg

SEQ ID NO: 57386 - DNA, 60 bp, Artificial
  Synthetic oligonucleotide
cagtcaagtgttcagcctgatcagaccaaatgaaaacccagcccacaaaagtcaattggt

SEQ ID NO: 57387 - DNA, 50 bp, Artificial
  Synthetic oligonucleotide
aagtggttccaagaggaaagctttccacaagaggggttcagattgcttca

SEQ ID NO: 57388 - DNA, 59 bp, Artificial
  Synthetic oligonucleotide
taaccggagggagcccagatcctggcgtaaaaggatttgcattcttagatggggggaat

SEQ ID NO: 57389 - DNA, 60 bp, Artificial
  Synthetic oligonucleotide
taaccggagggagcccagatcctggcgtaaaaggatttgcattcttagatggggggaatt

SEQ ID NO: 57390 - DNA, 58 bp, Artificial
  Synthetic oligonucleotide
gaacggctgcattgagggcaagctttctcaaatgtccaaagaagtgaatgccaggatt

SEQ ID NO: 57391 - DNA, 60 bp, Artificial
  Synthetic oligonucleotide
cccagtgcggggaaagatcctaagaaaactggaggacctatatacaggagagtaaacgga

SEQ ID NO: 57392 - DNA, 60 bp, Artificial
  Synthetic oligonucleotide
accaggcgattatggataagaacatcatactgaaagcgaacttcagtgtgatcttcgatc

SEQ ID NO: 57393 - DNA, 51 bp, Artificial
  Synthetic oligonucleotide
tccctgggggcaatcagtttctggatgtgctctaatgggtctttgcagtgc

SEQ ID NO: 57394 - DNA, 60 bp, Artificial
  Synthetic oligonucleotide
gtagtaccaaatattggcagtagaccatgggtgagaggccaaagcggcaggatcagcttc

SEQ ID NO: 57395 - DNA, 60 bp, Artificial
  Synthetic oligonucleotide
taccaaatattggcagtagaccatgggtgagaggccaaagcggcaggatcagcttctact

SEQ ID NO: 57396 - DNA, 60 bp, Artificial
  Synthetic oligonucleotide
ccgccgagatcagaaatctctaagaggaagaggcagcactcttggtctggacatcgaaac

SEQ ID NO: 57397 - DNA, 60 bp, Artificial
  Synthetic oligonucleotide
cgccgagatcagaaatctctaagaggaagaggcagcactcttggtctggacatcgaaaca

SEQ ID NO: 57398 - DNA, 60 bp, Artificial
  Synthetic oligonucleotide
tcgccgagatcagaaatctctaagaggaagaggcagcactcttggtctggacatcgaaac

SEQ ID NO: 57399 - DNA, 60 bp, Artificial
  Synthetic oligonucleotide
agacaccagaatgcagaaggaacaggaacagcggcagatctcaaatccactcaggcagcc

SEQ ID NO: 57400 - DNA, 60 bp, Artificial
  Synthetic oligonucleotide
gacaccagaatgcagaaggaacaggaacagcggcagatctcaaatccactcaggcagcca

SEQ ID NO: 57401 - DNA, 60 bp, Artificial
  Synthetic oligonucleotide
cagacaccagaatgcagaaggaacaggaacagcggcagatctcaaatccactcaggcagc

SEQ ID NO: 57402 - DNA, 60 bp, Artificial
  Synthetic oligonucleotide
cagacaccagaatgcagaaggaacaggaacagctgcagatctcaagtcgactcaggcagc

SEQ ID NO: 57403 - DNA, 60 bp, Artificial
  Synthetic oligonucleotide
ttgcagggtagataatcactcactgagtgacatcgaagccatggcgtctcaaggcaccaa

SEQ ID NO: 57404 - DNA, 60 bp, Artificial
  Synthetic oligonucleotide
tgcagggtagataatcactcactgagtgacatcgaagccatggcgtctcaaggcaccaaa

SEQ ID NO: 57405 - DNA, 60 bp, Artificial
  Synthetic oligonucleotide
gcagggtagataatcactcactgagtgacatcgaagccatggcgtctcaaggcaccaaac

SEQ ID NO: 57406 - DNA, 60 bp, Artificial
  Synthetic oligonucleotide
tggggtcctcatcggaggacttgaatggaatgataacacagttcgagtctctgaaactct

SEQ ID NO: 57407 - DNA, 60 bp, Artificial
  Synthetic oligonucleotide
gctgtgatcacctgaatggtgcggagtgggatgtcttcatagagcgacccaccgctgtgg

SEQ ID NO: 57408 - DNA, 60 bp, Artificial
  Synthetic oligonucleotide
taggatttgtgttcacgctcaccgtgcccagtgagcgaggactgcagcgtagacgctttg

SEQ ID NO: 57409 - DNA, 50 bp, Artificial
  Synthetic oligonucleotide
acgaaggatcttatttcttcggagacaatgcagaggagtatgacaattga

SEQ ID NO: 57410 - DNA, 60 bp, Artificial
  Synthetic oligonucleotide
gatccctgggttttgcttaatgcttcttggttcaactcattccttacacatgcattgagt

SEQ ID NO: 57411 - DNA, 60 bp, Artificial
  Synthetic oligonucleotide
gggttttgcttaatgcttcttggttcaactccttcctaacacatgcattgagatagttgg

SEQ ID NO: 57412 - DNA, 60 bp, Artificial
  Synthetic oligonucleotide
cctgggttttgcttaatgcttcttggttcaactccttcctaacacatgcattgagatagc

SEQ ID NO: 57413 - DNA, 60 bp, Artificial
  Synthetic oligonucleotide
gatccctgggttttgcttaatgcttcttggttcaactccttccttacacatgcattgagt

SEQ ID NO: 57414 - DNA, 60 bp, Artificial
  Synthetic oligonucleotide
gatccctgggttttgcttaatgcttcttggttcaactccttcctaacacatgcattgaga

SEQ ID NO: 57415 - DNA, 60 bp, Artificial
  Synthetic oligonucleotide
cagagggacaagagtggtcccaagaggacaactgtccaccagaggagttcagattgcatc

SEQ ID NO: 57416 - DNA, 60 bp, Artificial
  Synthetic oligonucleotide
cagtccacgattgtaatacgacttgtcaaacacccaaaggtgctataaacaccagcctcc

SEQ ID NO: 57417 - DNA, 60 bp, Artificial
  Synthetic oligonucleotide
gtccacgattgtaatacgacttgtcaaacacccaaaggtgctataaacaccagcctccca

SEQ ID NO: 57418 - DNA, 60 bp, Artificial
  Synthetic oligonucleotide
cagtgattatgagggacggctgatccagaacagcataacaatagagagaatggtgctctc

SEQ ID NO: 57419 - DNA, 60 bp, Artificial
  Synthetic oligonucleotide
agaacgccaaaatgctactgaaatcagagcatctgttgggagaatggttggaggaattgg

SEQ ID NO: 57420 - DNA, 60 bp, Artificial
  Synthetic oligonucleotide
gtctggtgaaatcacatgtgtgtgtagggataattggcatggctcaaatcggccgtgggt

SEQ ID NO: 57421 - DNA, 60 bp, Artificial
  Synthetic oligonucleotide
cgtcattacttacgaaaacaacacttgggtaaaccagacatatgttaacatcagcaacac

SEQ ID NO: 57422 - DNA, 60 bp, Artificial
  Synthetic oligonucleotide
gagaccttgcttttgggttgaactaatcagaggacgacccaaagagaacacaatctggac

SEQ ID NO: 57423 - DNA, 60 bp, Artificial
  Synthetic oligonucleotide
ggactggattgtatgagaccttgcttttgggttgaactaatcagaggacgacccaaagag

SEQ ID NO: 57424 - DNA, 60 bp, Artificial
  Synthetic oligonucleotide
ctgttatcctgagtctggtgaaatcacatgtgtgtgtagggataattggcatggctcaaa

SEQ ID NO: 57425 - DNA, 60 bp, Artificial
  Synthetic oligonucleotide
tcagcaacactaattttgttgctgaacaggcagtagtttcagtgaaattagcgggcaatt

SEQ ID NO: 57426 - DNA, 60 bp, Artificial
  Synthetic oligonucleotide
cggccgtgggtttctttcaatcagaatctggagtatcaaataggatacatatgcagtggg

SEQ ID NO: 57427 - DNA, 60 bp, Artificial
  Synthetic oligonucleotide
ataggatacatatgcagtgggattttcggagacaatccgcgccctaatgataggacaggc

SEQ ID NO: 57428 - DNA, 60 bp, Artificial
  Synthetic oligonucleotide
tgactcaaggggccctgctgaatgataaacattctaatggaaccattaaggacagaagcc

SEQ ID NO: 57429 - DNA, 60 bp, Artificial
  Synthetic oligonucleotide
ttctccatacaactcaaggtttgagtcagtcgcttggtcagcaagtgcttgccatgatgg

SEQ ID NO: 57430 - DNA, 64 bp, Artificial
  Synthetic oligonucleotide
cagcctgatattacaaattggaaacataatatcaatatggattagccactcaattcaaactggg

SEQ ID NO: 57431 - DNA, 60 bp, Artificial
  Synthetic oligonucleotide
gaccaaaacagacgttaacttctcagtaaagcaagatatcataggaatgactgattggtc

SEQ ID NO: 57432 - DNA, 60 bp, Artificial
  Synthetic oligonucleotide
ggacaggcagttgtggtccagtattttctaatggagcaaatggggtaaaaggattttcgt

SEQ ID NO: 57433 - DNA, 60 bp, Artificial
  Synthetic oligonucleotide
gcgggcaattcctctctctgccctgttagtggatgggctatatacagtaaagataatagt

SEQ ID NO: 57434 - DNA, 60 bp, Artificial
  Synthetic oligonucleotide
acactgtgtcaagctttcaggtagactgctttctttggcatgtccgcaaacggtttgcag

SEQ ID NO: 57435 - DNA, 60 bp, Artificial
  Synthetic oligonucleotide
tacagagaatagttttgagcaaataacatttatgcaagccttacaactactgcttgaagt

SEQ ID NO: 57436 - DNA, 60 bp, Artificial
  Synthetic oligonucleotide
cacactctgttaaccttctagaagacagacataacgggaaactatgtaaactaaaaggga

SEQ ID NO: 57437 - DNA, 60 bp, Artificial
  Synthetic oligonucleotide
ggtggactggaatgatagatggatggtatggttatcatcatcagaatgaacaaggatctg

SEQ ID NO: 57438 - DNA, 60 bp, Artificial
  Synthetic oligonucleotide
ggggtcagttgcacataagtcttgcctgcctgcttgtgtgtatgggcttgcagtagcaag

SEQ ID NO: 57439 - DNA, 60 bp, Artificial
  Synthetic oligonucleotide
ttcaatctctacaactaaaccctttcagaacatctcgagaatatcaatcggggactgccc

SEQ ID NO: 57440 - DNA, 60 bp, Artificial
  Synthetic oligonucleotide
acaacttaccagaggacaagagctcttgtccgcaccggaatggatcccaggatgtgctct

SEQ ID NO: 57441 - DNA, 60 bp, Artificial
  Synthetic oligonucleotide
gtcccacccaggaatctttgaaaactcgtgtcttgagacgatggaagttgttcaacaaac

SEQ ID NO: 57442 - DNA, 60 bp, Artificial
  Synthetic oligonucleotide
gtcccacccaggaatctttgaaaactcgtgtcttgagacgatggaagttgtccaacaaac

SEQ ID NO: 57443 - DNA, 60 bp, Artificial
  Synthetic oligonucleotide
tcagtcgagttgaatgctcctaattatcactacgaggaatgctcctgttatcctgattct

SEQ ID NO: 57444 - DNA, 52 bp, Artificial
  Synthetic oligonucleotide
accgatggaccaagtaatgggcaggcctcatacaagatcttcaagatagaaa

SEQ ID NO: 57445 - DNA, 60 bp, Artificial
  Synthetic oligonucleotide
tgtatttgtcataagagagccattcatctcatgctcccacttggaatgcagaaccttctt

SEQ ID NO: 57446 - DNA, 60 bp, Artificial
  Synthetic oligonucleotide
caaattggaaacataatctcaatatggattagtcattcaattcaacttgggaaccaaaat

SEQ ID NO: 57447 - DNA, 60 bp, Artificial
  Synthetic oligonucleotide
aatgaccgatggaccaagtaatgggcaggcctcatataagatcttcaagatagaaagggg

SEQ ID NO: 57448 - DNA, 60 bp, Artificial
  Synthetic oligonucleotide
ttactgtaatgaccgatggaccaagtaatgggcaggcctcatataagatcttcaagatag

SEQ ID NO: 57449 - DNA, 60 bp, Artificial
  Synthetic oligonucleotide
cgtgctcccacttggaatgcagaaccttcttcttgactcaaggagccctgctgaatgaca

SEQ ID NO: 57450 - DNA, 60 bp, Artificial
  Synthetic oligonucleotide
ttcgtgctcccacttggaatgcagaaccttcttcttgactcaaggagccctgctgaatga

SEQ ID NO: 57451 - DNA, 60 bp, Artificial
  Synthetic oligonucleotide
taatttctcagcaaagcaagatatcgtaggaataactgattggtcaggatatagtgggag

SEQ ID NO: 57452 - DNA, 60 bp, Artificial
  Synthetic oligonucleotide
agcaagatatcgtaggaataactgattggtcaggatatagcgggagttttgttcagcatc

SEQ ID NO: 57453 - DNA, 60 bp, Artificial
  Synthetic oligonucleotide
gtggtccagtatcttctaatggagcaaatggggtaaaagggttttcgtttaaatacggca

SEQ ID NO: 57454 - DNA, 60 bp, Artificial
  Synthetic oligonucleotide
ataactactcagagaagcaagatatcgtaggaataactgattggtcaggatatagcggga

SEQ ID NO: 57455 - DNA, 60 bp, Artificial
  Synthetic oligonucleotide
cactacgaggaatgctcctgttatcctgattctggtgtaatcacatgtgtatgcagggat

SEQ ID NO: 57456 - DNA, 60 bp, Artificial
  Synthetic oligonucleotide
ggagttttgttcagcatccagaactgaccggactggactgtatgagaccgtgcttctggg

SEQ ID NO: 57457 - DNA, 60 bp, Artificial
  Synthetic oligonucleotide
cgagttgaatgctcctaattatcactacgaggaatgctcctgttatcctgattctggtga

SEQ ID NO: 57458 - DNA, 60 bp, Artificial
  Synthetic oligonucleotide
taattatcactacgaggaatgctcctgttatcctgattctggtgtaatcacatgtgtatg

SEQ ID NO: 57459 - DNA, 60 bp, Artificial
  Synthetic oligonucleotide
gggagttttgttcagcatccagaactgaccggactggattgtatgagaccttgcttctgg

SEQ ID NO: 57460 - DNA, 60 bp, Artificial
  Synthetic oligonucleotide
atagtgggagttttgttcagcatccagaactgaccggactggactgtatgagaccgtgct

SEQ ID NO: 57461 - DNA, 60 bp, Artificial
  Synthetic oligonucleotide
tggtccagtatcctctaatggagcaaatggggtaaaagggttttcgtttaaatacggcaa

SEQ ID NO: 57462 - DNA, 60 bp, Artificial
  Synthetic oligonucleotide
agtgttgcatttgactcaaggaacatgctgggaacagatgtacactccaggtggagaagt

SEQ ID NO: 57463 - DNA, 60 bp, Artificial
  Synthetic oligonucleotide
cactatgtggaagcccagtctcagttgggtccggttccttccccgatggggcacaaatcc

SEQ ID NO: 57464 - DNA, 60 bp, Artificial
  Synthetic oligonucleotide
caatgaactgagcaatcttgcgaagggagagaaggctaatgtgctaattgggcaaggaga

SEQ ID NO: 57465 - DNA, 60 bp, Artificial
  Synthetic oligonucleotide
caacgaactgagcaaccttgcgaaaggagaaaaggctaatgtgctaattgggcaaggaga

SEQ ID NO: 57466 - DNA, 60 bp, Artificial
  Synthetic oligonucleotide
aatgaactgagcaaccttgcgaaaggagagaaggctaatgtgctaattgggcaaggagac

SEQ ID NO: 57467 - DNA, 60 bp, Artificial
  Synthetic oligonucleotide
cccagatgaaggcacagctggagtggaatctgctgttctgagaggattcctcattttggg

SEQ ID NO: 57468 - DNA, 60 bp, Artificial
  Synthetic oligonucleotide
caaagggcctctgcgggccaaatcagcatacaacctacgttttctgtgcagagaaacctc

SEQ ID NO: 57469 - DNA, 60 bp, Artificial
  Synthetic oligonucleotide
caaagggcatctgcgggccaaatcagcatacaacctacgttttctgtgcagagaaacctc

SEQ ID NO: 57470 - DNA, 60 bp, Artificial
  Synthetic oligonucleotide
gaccaaggagacaccataacgtttgaagccaccgggaatttgatagcaccatggtatgct

SEQ ID NO: 57471 - DNA, 55 bp, Artificial
  Synthetic oligonucleotide
accaagaactgggtgatgccccattccttgatcggcttcgccgagatcagaagtc

SEQ ID NO: 57472 - DNA, 60 bp, Artificial
  Synthetic oligonucleotide
tatggggcattcaccatccacctaccagtactgaccaacaaagtctctaccagaatgcag

SEQ ID NO: 57473 - DNA, 56 bp, Artificial
  Synthetic oligonucleotide
ggactttctttttaactcaaggggccttgttgaatgacaagcattccaatggaacc

SEQ ID NO: 57474 - DNA, 60 bp, Artificial
  Synthetic oligonucleotide
gtatttgtcatcagagagccttttatttcatgctctcacttggaatgcaggactttcttt

SEQ ID NO: 57475 - DNA, 60 bp, Artificial
  Synthetic oligonucleotide
atctcaatatgggttagccattcaattcaaactggaagtcagaaccaccccgaaacatgc

SEQ ID NO: 57476 - DNA, 60 bp, Artificial
  Synthetic oligonucleotide
tagctccagtaacactagcaggcaattcctctctctgtcccatcagtggatgggctatat

SEQ ID NO: 57477 - DNA, 60 bp, Artificial
  Synthetic oligonucleotide
gggttagccattcaattcaaactggaagtcagaaccaccccgaaacatgcaatcaaagtg

SEQ ID NO: 57478 - DNA, 60 bp, Artificial
  Synthetic oligonucleotide
tgggctatatacagcaaggataatggtataaggataggttccaagggagatgtatttgtc

SEQ ID NO: 57479 - DNA, 60 bp, Artificial
  Synthetic oligonucleotide
ccagtaacactagcaggcaattcctctctctgtcccatcagtggatgggctatatacagc

SEQ ID NO: 57480 - DNA, 60 bp, Artificial
  Synthetic oligonucleotide
tgtatttgtcatcagagagccttttatttcatgctctcacttggaatgcaggactttctt

SEQ ID NO: 57481 - DNA, 60 bp, Artificial
  Synthetic oligonucleotide
cagcaaggataatggtataaggataggttccaagggagatgtatttgtcatcagagagcc

SEQ ID NO: 57482 - DNA, 60 bp, Artificial
  Synthetic oligonucleotide
cagcatccagaactgacggggttggactgcatgaggccttgcttctgggttgagctgatc

SEQ ID NO: 57483 - DNA, 60 bp, Artificial
  Synthetic oligonucleotide
ggtagtcaaatcagttgagttgaatgcccctaattaccactatgaggagtgctcctgtta

SEQ ID NO: 57484 - DNA, 53 bp, Artificial
  Synthetic oligonucleotide
ttaccataatgactgatggaccaagtaatggccaggcctcatacaagattttc

SEQ ID NO: 57485 - DNA, 60 bp, Artificial
  Synthetic oligonucleotide
gctcctgttatcctgatgctagcgaggtaatgtgtgtatgcagagacaactggcatggtt

SEQ ID NO: 57486 - DNA, 60 bp, Artificial
  Synthetic oligonucleotide
tgagttgaatgcccctaattaccactatgaggagtgctcctgttatcctgatgctagcga

SEQ ID NO: 57487 - DNA, 60 bp, Artificial
  Synthetic oligonucleotide
ccggcccagacaatggggcggtggctgtattgaaatacaatggcataataacagatacta

SEQ ID NO: 57488 - DNA, 56 bp, Artificial
  Synthetic oligonucleotide
cctaatgagctgtcctgttggtgaagctccttctccatacaattcaaggtttgagt

SEQ ID NO: 57489 - DNA, 60 bp, Artificial
  Synthetic oligonucleotide
agagtctgaatgtgcctgcattaacggttcctgctttaccataatgactgatggaccaag

SEQ ID NO: 57490 - DNA, 60 bp, Artificial
  Synthetic oligonucleotide
tatattgagaacacaagagtctgaatgtgcctgcattaacggttcctgctttaccataat

SEQ ID NO: 57491 - DNA, 60 bp, Artificial
  Synthetic oligonucleotide
tggcatggttcaaatcgaccatgggtgtccttcaatcagaatctagaataccaaatagga

SEQ ID NO: 57492 - DNA, 60 bp, Artificial
  Synthetic oligonucleotide
atgctagcgaggtaatgtgtgtatgcagagacaactggcatggttcaaatcgaccatggg

SEQ ID NO: 57493 - DNA, 60 bp, Artificial
  Synthetic oligonucleotide
gggtttgagatgatttgggatcccaatgggtggacagagacagacaacagtttctctgtg

SEQ ID NO: 57494 - DNA, 60 bp, Artificial
  Synthetic oligonucleotide
gtttctctgtgaaacaagatattgtagcaataactgattggtcaggatatagcggaagtt

SEQ ID NO: 57495 - DNA, 52 bp, Artificial
  Synthetic oligonucleotide
gtaaaggggttttcatttaaatacggtaatggtgtttggataggaagaacta

SEQ ID NO: 57496 - DNA, 60 bp, Artificial
  Synthetic oligonucleotide
tgggtttgagatgatttgggatcccaatgggtggacagagacagacaacagtttctctgt

SEQ ID NO: 57497 - DNA, 60 bp, Artificial
  Synthetic oligonucleotide
atgatggaacaggcagttgtggtccagtgtcttctaatggggcatatggagtaaaggggt

SEQ ID NO: 57498 - DNA, 60 bp, Artificial
  Synthetic oligonucleotide
cgaccatgggtgtccttcaatcagaatctagaataccaaataggatacatatgcagcgga

SEQ ID NO: 57499 - DNA, 60 bp, Artificial
  Synthetic oligonucleotide
ccaaataggatacatatgcagcggagtttttggagacaacccacgccccaatgatggaac

SEQ ID NO: 57500 - DNA, 60 bp, Artificial
  Synthetic oligonucleotide
agcggaagttttgttcagcatccagaactgacggggttggactgcatgaggccttgcttc

SEQ ID NO: 57501 - DNA, 60 bp, Artificial
  Synthetic oligonucleotide
gacagaagtccttatagggccttaatgagctgtcctctaggtgaagctccgtccccatac

SEQ ID NO: 57502 - DNA, 60 bp, Artificial
  Synthetic oligonucleotide
cactaatgttgttgctggaaaggacaaaacttcagtgacattggccggcaattcatctct

SEQ ID NO: 57503 - DNA, 60 bp, Artificial
  Synthetic oligonucleotide
tgatgtgtgtatgcagggacaactggcatggttcaaatcgaccttgggtgtcttttaatc

SEQ ID NO: 57504 - DNA, 60 bp, Artificial
  Synthetic oligonucleotide
ggagggacgagcagtcaattgctgaagcaataattgtggccatggtattttcacaagagg

SEQ ID NO: 57505 - DNA, 60 bp, Artificial
  Synthetic oligonucleotide
gagagacgagcagtcaattgctgaagcaataattgtggccatggtattttcacaagagga

SEQ ID NO: 57506 - DNA, 60 bp, Artificial
  Synthetic oligonucleotide
ggagagacgagcagtcaattgctgaagcaataattgtggccatggtattttcacaagagg

SEQ ID NO: 57507 - DNA, 60 bp, Artificial
  Synthetic oligonucleotide
acaagtgtagtaccaaacattggcagtagaccatgggtgagaggccaaagcggcaggatc

SEQ ID NO: 57508 - DNA, 54 bp, Artificial
  Synthetic oligonucleotide
gacgactaatccaaaatagcataacaatagagagaatggtgctctctgcttttg

SEQ ID NO: 57509 - DNA, 60 bp, Artificial
  Synthetic oligonucleotide
gatgagtcttctaaccgaggtcgaaacgtacgttctctctatcgtcccgtcaggccccct

SEQ ID NO: 57510 - DNA, 58 bp, Artificial
  Synthetic oligonucleotide
gatgagtcttctaaccgaggtcgaaacgtacgttctctctatcgtcccgtcaggcccc

SEQ ID NO: 57511 - DNA, 60 bp, Artificial
  Synthetic oligonucleotide
ccactgaaatcagagcatctgttgggagaatggttggtggaatcgggagattctacatac

SEQ ID NO: 57512 - DNA, 60 bp, Artificial
  Synthetic oligonucleotide
gagaggaaatagatggagtaaagttggagtcaacaaggatttaccagattttggcgatct

SEQ ID NO: 57513 - DNA, 60 bp, Artificial
  Synthetic oligonucleotide
ggagtcaacaaggatttaccagattttggcgatctattcaactgccgccagttctttggt

SEQ ID NO: 57514 - DNA, 60 bp, Artificial
  Synthetic oligonucleotide
atcagtggctcataagtcttgcctgcctgcttgtgtgtacggacttgctgtggccagcgg

SEQ ID NO: 57515 - DNA, 60 bp, Artificial
  Synthetic oligonucleotide
ggcattaaccctgaacacaatgaccaaagatgctgagaggggaaaactaaaacgcagagc

SEQ ID NO: 57516 - DNA, 60 bp, Artificial
  Synthetic oligonucleotide
aacattggcagtagaccatgggtgagaggccaaagcggcagaattagcttctattggacg

SEQ ID NO: 57517 - DNA, 60 bp, Artificial
  Synthetic oligonucleotide
atgtgacagtgacacactctgtcaacctacttgaggacagacacaatggaaaactatgtc

SEQ ID NO: 57518 - DNA, 60 bp, Artificial
  Synthetic oligonucleotide
gggaacgggtgttttgaattctatcacaagtgtaacaatgaatgcatggaaagtgtgaaa

SEQ ID NO: 57519 - DNA, 60 bp, Artificial
  Synthetic oligonucleotide
actgttgacacaatactcgaaaagaatgtgacagtgacacactctgtcaacctactcgaa

SEQ ID NO: 57520 - DNA, 60 bp, Artificial
  Synthetic oligonucleotide
tgagaagaacgtgacagtgacacactctgtcaacctacttgaggacagtcacaacggaaa

SEQ ID NO: 57521 - DNA, 60 bp, Artificial
  Synthetic oligonucleotide
gagaagaacgtgacagtgacacactctgtcaacctacttgaggacagtcacaacggaaaa

SEQ ID NO: 57522 - DNA, 60 bp, Artificial
  Synthetic oligonucleotide
agaacgtgacagtgacacactctgtcaacctacttgaggacagtcacaacggaaaactat

SEQ ID NO: 57523 - DNA, 60 bp, Artificial
  Synthetic oligonucleotide
aatgtgacagtgacacactctgtcaacctacttgaggacagtcacaatggaaaactatgt

SEQ ID NO: 57524 - DNA, 60 bp, Artificial
  Synthetic oligonucleotide
gacactgttgacacagtacttgagaagaacgtgacagtgacacactctgtcaacctactt

SEQ ID NO: 57525 - DNA, 60 bp, Artificial
  Synthetic oligonucleotide
agacactgttgacacagtacttgagaagaatgtgacagtgacacactctgtcaacctact

SEQ ID NO: 57526 - DNA, 60 bp, Artificial
  Synthetic oligonucleotide
acactgttgacacagtactcgaaaagaacgtgacagtgacacactctgtcaacctacttg

SEQ ID NO: 57527 - DNA, 52 bp, Artificial
  Synthetic oligonucleotide
acgctcaccgtgcccagtgagcgaggactgcagcgtagacgctttgtccaaa

SEQ ID NO: 57528 - DNA, 51 bp, Artificial
  Synthetic oligonucleotide
cgctcaccgtgcccagtgagcgaggactgcagcgtagacgctttgtccaaa

SEQ ID NO: 57529 - DNA, 51 bp, Artificial
  Synthetic oligonucleotide
cgctcaccgtgcccagtgagcgaggactgcagcgtagacgctttgtccaga

SEQ ID NO: 57530 - DNA, 60 bp, Artificial
  Synthetic oligonucleotide
ggcccatgttcttgtatgtgagaacaaatggaacctcaaaaattaaaatgaaatggggaa

SEQ ID NO: 57531 - DNA, 60 bp, Artificial
  Synthetic oligonucleotide
acaaatggaacctcaaaaattaaaatgaaatggggaatggagatgaggcgttgcctcctt

SEQ ID NO: 57532 - DNA, 60 bp, Artificial
  Synthetic oligonucleotide
ccaatgataagcaaatgtagaactaaagagggaaggcgaaagaccaacttgtatggtttc

SEQ ID NO: 57533 - DNA, 60 bp, Artificial
  Synthetic oligonucleotide
ggcccatgttcttgtatgtgaggacaaatggaacctcaaaaattaaaatgaaatggggaa

SEQ ID NO: 57534 - DNA, 60 bp, Artificial
  Synthetic oligonucleotide
tccaatgataagcaaatgtagaactaaagagggaaggcgaaagaccaacttgtatggttt

SEQ ID NO: 57535 - DNA, 52 bp, Artificial
  Synthetic oligonucleotide
atggaacctcaaaaattaaaatgaaatggggaatggagatgagacgttgcct

SEQ ID NO: 57536 - DNA, 60 bp, Artificial
  Synthetic oligonucleotide
atggaacctcaaaaattaaaatgaaatggggaatggagatgaggcgttgcctcctccaat

SEQ ID NO: 57537 - DNA, 52 bp, Artificial
  Synthetic oligonucleotide
atggaacctcaaaaattaaaatgaaatggggaatggagatgaggcgttgcct

SEQ ID NO: 57538 - DNA, 52 bp, Artificial
  Synthetic oligonucleotide
atggaacctcaaaaattaaaatgaaatgggggatggagatgaggcgttgcct

SEQ ID NO: 57539 - DNA, 60 bp, Artificial
  Synthetic oligonucleotide
cgggagagacgaacagtcaattgctgaagcaataattgtggccatggtattttcacaaga

SEQ ID NO: 57540 - DNA, 60 bp, Artificial
  Synthetic oligonucleotide
cataagaaagctgctcagtatgagagacatgtgtgatgctccctttgatgatagactccg

SEQ ID NO: 57541 - DNA, 60 bp, Artificial
  Synthetic oligonucleotide
aagctgctcagtatgagagacatgtgtgatgctccctttgatgatagactccgaagagac

SEQ ID NO: 57542 - DNA, 60 bp, Artificial
  Synthetic oligonucleotide
agacatgtgtgatgctccctttgatgatagactcagaagagatcaaaaagcattaaaggg

SEQ ID NO: 57543 - DNA, 60 bp, Artificial
  Synthetic oligonucleotide
agacatgtgtgatgctccctttgatgatagactcaggagagatcaaaaggcattaaaggg

SEQ ID NO: 57544 - DNA, 60 bp, Artificial
  Synthetic oligonucleotide
cgccagaatgccactgaaatcagagcatctgttgggagaatggttggtggaatcggaaga

SEQ ID NO: 57545 - DNA, 60 bp, Artificial
  Synthetic oligonucleotide
cgtgctatggggcattcaccatccacctaccagtactgaccaacaaagtctctaccagaa

SEQ ID NO: 57546 - DNA, 60 bp, Artificial
  Synthetic oligonucleotide
ctaatagagcctggagacacaataacattcgaagcaactggaaacctagtggcaccaaga

SEQ ID NO: 57547 - DNA, 60 bp, Artificial
  Synthetic oligonucleotide
tagataatcactcaccgagtgacatccacatcatggcgtctcaaggcaccaaacgatctt

SEQ ID NO: 57548 - DNA, 60 bp, Artificial
  Synthetic oligonucleotide
tcccatgcggggaaaagcagtttttacagaaatttgctatggctgacggagaaggagggc

SEQ ID NO: 57549 - DNA, 60 bp, Artificial
  Synthetic oligonucleotide
taaacaatgctgtggtgatgccagctcatggcccagccaagagcatggaatatgatgctg

SEQ ID NO: 57550 - DNA, 60 bp, Artificial
  Synthetic oligonucleotide
gaagtttctaccagatttgtatgattacaaggagaatagattcatcgagattggagtgac

SEQ ID NO: 57551 - DNA, 60 bp, Artificial
  Synthetic oligonucleotide
actccttcctcacacatgcactgaaatagttgtggcaatgctactgtttgctatccatac

SEQ ID NO: 57552 - DNA, 60 bp, Artificial
  Synthetic oligonucleotide
ggacaagagctcttgtccgcaccggaatggatcccaggatgtgctctctgatgcagggtt

SEQ ID NO: 57553 - DNA, 60 bp, Artificial
  Synthetic oligonucleotide
acaacttaccagaggacaagggctcttgtccgcaccggaatggatcccaggatgtgctct

SEQ ID NO: 57554 - DNA, 60 bp, Artificial
  Synthetic oligonucleotide
acaacttaccagaggacaagagcccttgtccgcaccggaatggatcccaggatgtgctct

SEQ ID NO: 57555 - DNA, 60 bp, Artificial
  Synthetic oligonucleotide
cccatatactggagatcctccatacagccatggaacgggaacaggatacacgatggacac

SEQ ID NO: 57556 - DNA, 60 bp, Artificial
  Synthetic oligonucleotide
cataagcaccacattcccatatactggagatcctccatacagccatggaacgggaacagg

SEQ ID NO: 57557 - DNA, 60 bp, Artificial
  Synthetic oligonucleotide
gcaccacattcccatatactggagatcctccatacagccatggaacgggaacaggataca

SEQ ID NO: 57558 - DNA, 60 bp, Artificial
  Synthetic oligonucleotide
gcaccacattcccatatactggagatcctccatacagccatggaacgggaacagggtaca

SEQ ID NO: 57559 - DNA, 60 bp, Artificial
  Synthetic oligonucleotide
ccacattcccatatactggagatcctccatacagccatggaacgggaacaggatacacca

SEQ ID NO: 57560 - DNA, 59 bp, Artificial
  Synthetic oligonucleotide
catccacctaccagtactgatcaacaaagtctctaccagaatgcagatgcctatgtttt

SEQ ID NO: 57561 - DNA, 60 bp, Artificial
  Synthetic oligonucleotide
catccacctaccagtactgatcaacaaagtctctaccagaatgcagatgcctatgttttt

SEQ ID NO: 57562 - DNA, 60 bp, Artificial
  Synthetic oligonucleotide
ttcgatcttggaggactatatgaagcaattgaggagtgcctgattaatgatccctgggtt

SEQ ID NO: 57563 - DNA, 60 bp, Artificial
  Synthetic oligonucleotide
atgagggacgactgatccagaacagcttaacaatagagagaatggtgctctctgcttttg

SEQ ID NO: 57564 - DNA, 60 bp, Artificial
  Synthetic oligonucleotide
aactcagtaattgagaaaatgaacactcaattcactgcagtgggcaaggagttcaacaat

SEQ ID NO: 57565 - DNA, 60 bp, Artificial
  Synthetic oligonucleotide
tcctgaggggatcagtggctcataagtcctgcctgcctgcttgtgtgtatgggcttgctg

SEQ ID NO: 57566 - DNA, 60 bp, Artificial
  Synthetic oligonucleotide
ataaataggacaggaacatttgaattcacaagcttcttctatcgctatggatttgtggcc

SEQ ID NO: 57567 - DNA, 60 bp, Artificial
  Synthetic oligonucleotide
cagtgactatgaagggagactgatccaaaacagcataacaatagagagaatggttctctc

SEQ ID NO: 57568 - DNA, 60 bp, Artificial
  Synthetic oligonucleotide
gcaaaagcagggtagataatcactcactgagtgacatcaaagtcatggcgtcccaaggca

SEQ ID NO: 57569 - DNA, 60 bp, Artificial
  Synthetic oligonucleotide
caaaagcagggtagataatcactcactgagtgacatcaaagtcatggcgtcccaaggcac

SEQ ID NO: 57570 - DNA, 60 bp, Artificial
  Synthetic oligonucleotide
atatgcatctcagcaacaggaatgacactatccgtagtaagtctgctagtaggattggcc

SEQ ID NO: 57571 - DNA, 60 bp, Artificial
  Synthetic oligonucleotide
ttgatcagaggcaggccaaaagagagtagtgtattgtggacatccaatagtatagtagcg

SEQ ID NO: 57572 - DNA, 60 bp, Artificial
  Synthetic oligonucleotide
ccagcacctcatgccatgacggcatctcaagaatgtcaatctgcatgtcaggacctaata

SEQ ID NO: 57573 - DNA, 60 bp, Artificial
  Synthetic oligonucleotide
ccagcacttcatgccatgacggcatctcaagaatgtcaatctgcatgtcaggacctaaca

SEQ ID NO: 57574 - DNA, 60 bp, Artificial
  Synthetic oligonucleotide
agtgcttcaacccttgcttttatgtggaattgatcagaggcaggccaaaagagagtagtg

SEQ ID NO: 57575 - DNA, 60 bp, Artificial
  Synthetic oligonucleotide
cttttatgttgaattgatcagaggcaggccaaaagagagtagtgtattgtggacatccaa

SEQ ID NO: 57576 - DNA, 60 bp, Artificial
  Synthetic oligonucleotide
cacggtctgctctcattctgagaggatcagtggcccataagtcctgcctgcctgcttgtg

SEQ ID NO: 57577 - DNA, 60 bp, Artificial
  Synthetic oligonucleotide
attgctggctttattgagggggggtggacaggaatgatagatggatggtatggttatcat

SEQ ID NO: 57578 - DNA, 60 bp, Artificial
  Synthetic oligonucleotide
agcgaaagcaggcaaaccatttgaatggatgtcaatccgaccttacttttcttaaaagtg

SEQ ID NO: 57579 - DNA, 60 bp, Artificial
  Synthetic oligonucleotide
agcgaaagcaggcaaaccatttgaatggatgtcaatccgactttacttttcttaaaagtg

SEQ ID NO: 57580 - DNA, 60 bp, Artificial
  Synthetic oligonucleotide
agcgaaagcaggcaaaccatttgaatggatgtcaatccgacattacttttcttaaaagtg

SEQ ID NO: 57581 - DNA, 60 bp, Artificial
  Synthetic oligonucleotide
agcgaaagcaggcaaaccatttgaatggatgtcaatccgactttacttttcttgaaagtc

SEQ ID NO: 57582 - DNA, 60 bp, Artificial
  Synthetic oligonucleotide
gtggccatggtattttcacaagaggattgcatgatcaaggcagttcggggtgatctgaac

SEQ ID NO: 57583 - DNA, 60 bp, Artificial
  Synthetic oligonucleotide
tacgagtgcatgaggggtatgaagaattcacaatggttgggagaagagcaacagctattc

SEQ ID NO: 57584 - DNA, 60 bp, Artificial
  Synthetic oligonucleotide
taagagtgcatgaggggtatgaagaattcacaatggttgggagaagagcaacagctattc

SEQ ID NO: 57585 - DNA, 60 bp, Artificial
  Synthetic oligonucleotide
taagagtacatgaggggtatgaagaattcacaatggttgggagaagagcaacagccattc

SEQ ID NO: 57586 - DNA, 60 bp, Artificial
  Synthetic oligonucleotide
cgagtgcatgaggggtatgaagaattcacaatggttgggagaagagcaacagctattctc

SEQ ID NO: 57587 - DNA, 60 bp, Artificial
  Synthetic oligonucleotide
catggaatggttaaagacaagaccaatcctgtcacctctgactaaggggattttaggatt

SEQ ID NO: 57588 - DNA, 60 bp, Artificial
  Synthetic oligonucleotide
gtgaactcagtaattgagaaaatgaacactcaattcactgcagtgggcaaggaattcaac

SEQ ID NO: 57589 - DNA, 60 bp, Artificial
  Synthetic oligonucleotide
ccatatggccataatcaagaagtacacatcaggaagacaggagaagaaccctgccctcag

SEQ ID NO: 57590 - DNA, 60 bp, Artificial
  Synthetic oligonucleotide
gccagatttgtatgattacaaggagaatagattcatcgagattggagtgacaaggaggga

SEQ ID NO: 57591 - DNA, 60 bp, Artificial
  Synthetic oligonucleotide
cagagggacaagagtggtcccaagaggacaactgtccaccagaggagttcaaattgcttc

SEQ ID NO: 57592 - DNA, 60 bp, Artificial
  Synthetic oligonucleotide
ggcaaaagagatacaccaagactacttactggtgggatggtcttcaatcgtctgatgatt

SEQ ID NO: 57593 - DNA, 56 bp, Artificial
  Synthetic oligonucleotide
ggcaaaagagatacaccaagactacttactggtgggatggtcttcaatcgtctgat

SEQ ID NO: 57594 - DNA, 60 bp, Artificial
  Synthetic oligonucleotide
tcgttatgggtttgttgccaatttcagcatggaacttcctagttttggggtgtctggggt

SEQ ID NO: 57595 - DNA, 60 bp, Artificial
  Synthetic oligonucleotide
cacccaactatgcaggaattcaagctggagtcgacaggttttatcgaacctgtaagctgc

SEQ ID NO: 57596 - DNA, 60 bp, Artificial
  Synthetic oligonucleotide
ttgtgtattggaggcgatggctttccttgaggaatcccatcctggtatttttgaaaactc

SEQ ID NO: 57597 - DNA, 60 bp, Artificial
  Synthetic oligonucleotide
ggatgtcaatccaaccttacttttcttaaaagtgccagcacaaaatgctataagcacaac

SEQ ID NO: 57598 - DNA, 60 bp, Artificial
  Synthetic oligonucleotide
cttggacaaaagagatacaccaagactacttactggtgggatggtcttcaatcgtctgat

SEQ ID NO: 57599 - DNA, 60 bp, Artificial
  Synthetic oligonucleotide
ttccttgaagaatcccatcctggtatttttgaaaactcttgtattgaaacaatggaggtt

SEQ ID NO: 57600 - DNA, 60 bp, Artificial
  Synthetic oligonucleotide
gcaaaccatttgaatggatgtcaatccgacattacttttcttaaaagtgccagcacaaaa

SEQ ID NO: 57601 - DNA, 60 bp, Artificial
  Synthetic oligonucleotide
ccatttgaatggatgtcaatccaaccttacttttcttaaaagtgccagcacaaaatgcta

SEQ ID NO: 57602 - DNA, 60 bp, Artificial
  Synthetic oligonucleotide
ggatgtcaatccgacattacttttcttaaaagtgccagcacaaaatgctataagcacaac

SEQ ID NO: 57603 - DNA, 60 bp, Artificial
  Synthetic oligonucleotide
ggatgtcaatccgaccttacttttcttaaaagtgccagcacaaaatgctataagcacaac

SEQ ID NO: 57604 - DNA, 60 bp, Artificial
  Synthetic oligonucleotide
ccccaaggcaagttcatggcccaatcatgaaacgaacagaggtgtgacatcagcgtgtcc

SEQ ID NO: 57605 - DNA, 60 bp, Artificial
  Synthetic oligonucleotide
ttgagatattccccaaggcaaattcatggcccaatcatgaaacgaacagaggtgtgacat

SEQ ID NO: 57606 - DNA, 60 bp, Artificial
  Synthetic oligonucleotide
atgtgacctgttgctcacagcgaattcatggtcttacataatagagacttcaaattcaga

SEQ ID NO: 57607 - DNA, 60 bp, Artificial
  Synthetic oligonucleotide
agtgcctgattaatgatccctgggttttgcttaatgcttcttggttcaactcattcctta

SEQ ID NO: 57608 - DNA, 60 bp, Artificial
  Synthetic oligonucleotide
agtgcctgattaatgatccctgggttttgcttaatgcttcttggttcaactccttcctta

SEQ ID NO: 57609 - DNA, 60 bp, Artificial
  Synthetic oligonucleotide
agtgcctgattaatgatccctgggttttgcttaatgcttcttggttcaactccttcctaa

SEQ ID NO: 57610 - DNA, 60 bp, Artificial
  Synthetic oligonucleotide
gcctgattaatgatccctgggttttgcttaatgcttcttggttcaactccttcctaacac

SEQ ID NO: 57611 - DNA, 59 bp, Artificial
  Synthetic oligonucleotide
aatgcctgattaatgatccctgggttttgcttaatgcttcttggttcaactccttcctc

SEQ ID NO: 57612 - DNA, 60 bp, Artificial
  Synthetic oligonucleotide
agtgcctaattaatgatccctgggttttgcttaatgcttcttggttcaactccttcctta

SEQ ID NO: 57613 - DNA, 60 bp, Artificial
  Synthetic oligonucleotide
ggctaggaacattctaaggactcaggagtcagaatgtgtatgccataatggcacatgtgc

SEQ ID NO: 57614 - DNA, 60 bp, Artificial
  Synthetic oligonucleotide
tgccataatggcacatgtgcagttgtaatgactgacggatcagccagtagccaagcctat

SEQ ID NO: 57615 - DNA, 60 bp, Artificial
  Synthetic oligonucleotide
ggttagtgattaaggaagaaccactaaagggatcagccaaacatattgaggaatgctcct

SEQ ID NO: 57616 - DNA, 60 bp, Artificial
  Synthetic oligonucleotide
ggggaaagcgaacagatcatcgtcactagggagccatatgtatcatgcgacccatcgggg

SEQ ID NO: 57617 - DNA, 60 bp, Artificial
  Synthetic oligonucleotide
acaccaaggaactactatcagaaacaaacactcaaatgggacaatccatgatagaacggc

SEQ ID NO: 57618 - DNA, 60 bp, Artificial
  Synthetic oligonucleotide
ctactatcagaaacaaacactcaaatgggacaatccatgatagaacggctttcagaggtc

SEQ ID NO: 57619 - DNA, 60 bp, Artificial
  Synthetic oligonucleotide
ccctatgtggaagcccattcccagttgggtccggttctttccctgatggggcacagatcc

SEQ ID NO: 57620 - DNA, 60 bp, Artificial
  Synthetic oligonucleotide
cggctttcagaggtcttatatccactccattgggcactccaccaacagtaagtaacagtg

SEQ ID NO: 57621 - DNA, 60 bp, Artificial
  Synthetic oligonucleotide
gtcgagcacaagttgccacgatggagtcggcagaatgactatttgtatacaggggaataa

SEQ ID NO: 57622 - DNA, 60 bp, Artificial
  Synthetic oligonucleotide
cgagcacaagttgccacgatggagtcggcagaatgactatttgtatacaggggaataatg

SEQ ID NO: 57623 - DNA, 60 bp, Artificial
  Synthetic oligonucleotide
ttaaaccttgggctaggaacattctaaggactcaggagtcagaatgtgtatgccataatg

SEQ ID NO: 57624 - DNA, 58 bp, Artificial
  Synthetic oligonucleotide
ctgatggggcacagatccaatacttttcgtaaaatgcaaaaacacccttgtttctact

SEQ ID NO: 57625 - DNA, 60 bp, Artificial
  Synthetic oligonucleotide
tctaattgccctatgtggaagcccattcccagttgggtccggttctttccctgatggggc

SEQ ID NO: 57626 - DNA, 60 bp, Artificial
  Synthetic oligonucleotide
atagaacggctttcagaggtcttatatccactccattgggcactccaccaacagtaagta

SEQ ID NO: 57627 - DNA, 60 bp, Artificial
  Synthetic oligonucleotide
aatagcagaacgacaggaaatcgtcgacaataacaactggtcaggctactctgggagctt

SEQ ID NO: 57628 - DNA, 60 bp, Artificial
  Synthetic oligonucleotide
gaacgacaggaaatcgtcgacaataacaactggtcaggctactctgggagctttattgac

SEQ ID NO: 57629 - DNA, 60 bp, Artificial
  Synthetic oligonucleotide
tggagcacacaagcagatatgtgtgcactggaattctgacagataccagcagacccgggg

SEQ ID NO: 57630 - DNA, 60 bp, Artificial
  Synthetic oligonucleotide
gcagggcgcaaatagacccatcatagaaatcgatatgaacacattggagcacacaagcag

SEQ ID NO: 57631 - DNA, 60 bp, Artificial
  Synthetic oligonucleotide
taactggcagggcgcaaatagacccatcatagaaatcgatatgaacacattggagcacac

SEQ ID NO: 57632 - DNA, 60 bp, Artificial
  Synthetic oligonucleotide
ggacacaatcagaagataacttgtgtatgcagggataactggcagggcgcaaatagaccc

SEQ ID NO: 57633 - DNA, 60 bp, Artificial
  Synthetic oligonucleotide
attaccaaggaaccagatttgaaagctccaagctacttgctattaaataaaagcctatgc

SEQ ID NO: 57634 - DNA, 53 bp, Artificial
  Synthetic oligonucleotide
tcaaatgttggactgaatgtatctctacacctaaaagagaaaggaaccaaaca

SEQ ID NO: 57635 - DNA, 60 bp, Artificial
  Synthetic oligonucleotide
aagcctatgcagtgttgagggatgggttgtaatagccaaagacaatgcaataagatttgg

SEQ ID NO: 57636 - DNA, 60 bp, Artificial
  Synthetic oligonucleotide
gatttgaaagctccaagctacttgctattaaataaaagcctatgcagtgttgagggatgg

SEQ ID NO: 57637 - DNA, 60 bp, Artificial
  Synthetic oligonucleotide
taagatttggggaaagcgaacagatcatcgtcactagggagccatatgtatcatgcgacc

SEQ ID NO: 57638 - DNA, 60 bp, Artificial
  Synthetic oligonucleotide
gcagtgttgagggatgggttgtaatagccaaagacaatgcaataagatttggggaaagcg

SEQ ID NO: 57639 - DNA, 60 bp, Artificial
  Synthetic oligonucleotide
aaaatacccaatgcaggaactgatcccaattctagaatagcagaacgacaggaaatcgtc

SEQ ID NO: 57640 - DNA, 57 bp, Artificial
  Synthetic oligonucleotide
agacccggggacaaacctagtggtgattgttccaatccaataaccggaagtcctagt

SEQ ID NO: 57641 - DNA, 60 bp, Artificial
  Synthetic oligonucleotide
gagcacacaagcagatatgtgtgcactggaattctgacagataccagcagacccggggac

SEQ ID NO: 57642 - DNA, 60 bp, Artificial
  Synthetic oligonucleotide
ccataatggcacatgtgcagttgtaatgactgacggatcagccagtagccaagcctatac

SEQ ID NO: 57643 - DNA, 60 bp, Artificial
  Synthetic oligonucleotide
gaatgctcctgttatggacacaatcagaagataacttgtgtatgcagggataactggcag

SEQ ID NO: 57644 - DNA, 60 bp, Artificial
  Synthetic oligonucleotide
ggattcgaaatgctgaaaatacccaatgcaggaactgatcccaattctagaatagcagaa

SEQ ID NO: 57645 - DNA, 60 bp, Artificial
  Synthetic oligonucleotide
ggaagaaccactaaagggatcagccaaacatattgaggaatgctcctgttatggacacaa

SEQ ID NO: 57646 - DNA, 60 bp, Artificial
  Synthetic oligonucleotide
aagtgcaataggccaagtgtcaaggcccatgttcttgtatgtgaggacaaatggaacctc

SEQ ID NO: 57647 - DNA, 60 bp, Artificial
  Synthetic oligonucleotide
gtgcaataggccaagtgtcaaggcccatgttcttgtatgtgaggacaaatggaacctcaa

SEQ ID NO: 57648 - DNA, 60 bp, Artificial
  Synthetic oligonucleotide
acaatggttgggaaaagggcaacagctatactcagaaaagcaaccaggagattgattcaa

SEQ ID NO: 57649 - DNA, 60 bp, Artificial
  Synthetic oligonucleotide
agagctgctgtatcagcagatccactagcatctttattggagatgtgccacagcacacag

SEQ ID NO: 57650 - DNA, 60 bp, Artificial
  Synthetic oligonucleotide
ttgggagaagggcaacagctatactcagaaaagcaaccaggagattgattcagctgatag

SEQ ID NO: 57651 - DNA, 60 bp, Artificial
  Synthetic oligonucleotide
gggagaagggcaacagctatactcagaaaagcaaccaggagattgattcagctgatagtg

SEQ ID NO: 57652 - DNA, 60 bp, Artificial
  Synthetic oligonucleotide
acaatggttgggagaagagcaacagccatactcagaaaagcaaccaggagattgattcag

SEQ ID NO: 57653 - DNA, 60 bp, Artificial
  Synthetic oligonucleotide
caatggttgggaaaagggcaacagctatactcagaaaagcaaccaggagattgattcaac

SEQ ID NO: 57654 - DNA, 60 bp, Artificial
  Synthetic oligonucleotide
agagctgcagtatcagcagatccactagcatctttattggagatgtgccacagcacacag

SEQ ID NO: 57655 - DNA, 60 bp, Artificial
  Synthetic oligonucleotide
gagcctggagacacaataacattcgaagcaactggaaacctagtggcaccaagatatgcc

SEQ ID NO: 57656 - DNA, 60 bp, Artificial
  Synthetic oligonucleotide
gagcacacagaatgccattgacggggtcactaacaaagtaaactctgttattgaaaagat

SEQ ID NO: 57657 - DNA, 60 bp, Artificial
  Synthetic oligonucleotide
ttggaaatggctgctttgaattttaccacaaatgtgatgacacgtgcatggagagcgtca

SEQ ID NO: 57658 - DNA, 60 bp, Artificial
  Synthetic oligonucleotide
cttggagggctatacgaagcaattgaggagtgcctgattaatgatccctgggttttgctt

SEQ ID NO: 57659 - DNA, 60 bp, Artificial
  Synthetic oligonucleotide
gagggctatacgaagcaattgaggaatgcctgattaatgatccctgggttttgcttaatg

SEQ ID NO: 57660 - DNA, 60 bp, Artificial
  Synthetic oligonucleotide
aaacaatgctatcaatcacgattctgtttctgctcatagcagagggctcctctcaaaatt

SEQ ID NO: 57661 - DNA, 60 bp, Artificial
  Synthetic oligonucleotide
gacagaagcccttatagggccttaatgagctgtcctctaggtgaagctccgtctccatac

SEQ ID NO: 57662 - DNA, 60 bp, Artificial
  Synthetic oligonucleotide
tctttgaaagagttagacgccaactacgagagaatgctgaggacaaagggaatggatgtt

SEQ ID NO: 57663 - DNA, 60 bp, Artificial
  Synthetic oligonucleotide
catccacctaccagtaatgatcaacaaagtctctaccagaatgcagatgcctatgttttt

SEQ ID NO: 57664 - DNA, 59 bp, Artificial
  Synthetic oligonucleotide
catccacctaccagtaatgatcaacaaagtctctaccagaatgcagatgcctatgtttt

SEQ ID NO: 57665 - DNA, 59 bp, Artificial
  Synthetic oligonucleotide
catccacctaccagtactgaccaacaaagtctctaccagaatgcagatgcctatgtttt

SEQ ID NO: 57666 - DNA, 60 bp, Artificial
  Synthetic oligonucleotide
catccacctaccagtactgaccaacaaagtctctaccagaatgcagatgcctatgttttt

SEQ ID NO: 57667 - DNA, 60 bp, Artificial
  Synthetic oligonucleotide
agtttagttgcactatgtggaagcccagtctcagttgggtccggttccttccccgatggg

SEQ ID NO: 57668 - DNA, 60 bp, Artificial
  Synthetic oligonucleotide
agcaacagtttagttgcactatgtggaagcccagtcccagttgggtccggttccttcccc

SEQ ID NO: 57669 - DNA, 60 bp, Artificial
  Synthetic oligonucleotide
agcaggtactgattcaaaatggaagattttgtgcgacaatgcttcaatccaatgatcgtc

SEQ ID NO: 57670 - DNA, 60 bp, Artificial
  Synthetic oligonucleotide
gtgaagatgctactgctggtctcactcacctgatgatttggcattccaatctgaatgatg

SEQ ID NO: 57671 - DNA, 60 bp, Artificial
  Synthetic oligonucleotide
ccgaagagaccaaaaggcattaaagggaagaggcagcacacttggactcgacctaagagt

SEQ ID NO: 57672 - DNA, 60 bp, Artificial
  Synthetic oligonucleotide
tccctttgatgacagactcagaagagatcaaaaggcattaaagggaagaggcagcacact

SEQ ID NO: 57673 - DNA, 60 bp, Artificial
  Synthetic oligonucleotide
tccctttgatgatagactcagaagagaccaaaaggcattaaagggaagaggcagcacact

SEQ ID NO: 57674 - DNA, 60 bp, Artificial
  Synthetic oligonucleotide
atagactccgaagagaccaaaaggcattaaagggaagaggcagcacacttggactcgacc

SEQ ID NO: 57675 - DNA, 60 bp, Artificial
  Synthetic oligonucleotide
actcagaagagatcaaaaggcattaaagggaagaggcagcacacttggactcgatctgcg

SEQ ID NO: 57676 - DNA, 60 bp, Artificial
  Synthetic oligonucleotide
actcagaagagaccaaaaggcattaaagggaagaggcagcacacttggactcgacctgcg

SEQ ID NO: 57677 - DNA, 60 bp, Artificial
  Synthetic oligonucleotide
actcagaagagatcaaaaggcattaaagggaagaggcagcacacttggactcgacctgcg

SEQ ID NO: 57678 - DNA, 60 bp, Artificial
  Synthetic oligonucleotide
cttcctttgacatgagtaatgaagggtcttatttcttcggagacaatgcagaggaatatg

SEQ ID NO: 57679 - DNA, 60 bp, Artificial
  Synthetic oligonucleotide
gccttcctttgacatgagtaacgagggatcttatttcttcggagacaatgcagaggaata

SEQ ID NO: 57680 - DNA, 60 bp, Artificial
  Synthetic oligonucleotide
cttcctttgacatgagtaacgagggatcttatttcttcggagacaatgcagaggaatatg

SEQ ID NO: 57681 - DNA, 60 bp, Artificial
  Synthetic oligonucleotide
gtggaattggaagattctacatacagatgtgcactgaactcaagctcagcgactatgaag

SEQ ID NO: 57682 - DNA, 60 bp, Artificial
  Synthetic oligonucleotide
gttcgagtctctgaaactctacagagattcgcttggagaagctgtaatgagaatgggaga

SEQ ID NO: 57683 - DNA, 52 bp, Artificial
  Synthetic oligonucleotide
aggggaagaggcagcactcttggccttaacattgaaacagccactcttgttg

SEQ ID NO: 57684 - DNA, 59 bp, Artificial
  Synthetic oligonucleotide
gtccctaaggggaagaggcagcactcttggccttaacattgaaacagccactcttgttg

SEQ ID NO: 57685 - DNA, 60 bp, Artificial
  Synthetic oligonucleotide
gagacacaataacattcgaagcaactggaaacctagtggtaccaaggtatgcctttgcaa

SEQ ID NO: 57686 - DNA, 60 bp, Artificial
  Synthetic oligonucleotide
ccagcctcccatttcagaatatacatccagtcacaattggagaatgtccaaaatatgtca

SEQ ID NO: 57687 - DNA, 60 bp, Artificial
  Synthetic oligonucleotide
ccagcctcccatttcagaatgtacatccagtcacaattggagaatgtccaaaatatgtca

SEQ ID NO: 57688 - DNA, 60 bp, Artificial
  Synthetic oligonucleotide
ccagatgaaggcacagctggagtggaatctgctgttctaaggggattcctcattttaggc

SEQ ID NO: 57689 - DNA, 60 bp, Artificial
  Synthetic oligonucleotide
ccagatgaaggcacagctggagtggaatctgctgttctaaggggattcctcattctaggc

SEQ ID NO: 57690 - DNA, 60 bp, Artificial
  Synthetic oligonucleotide
tcacaagctttttctatcgttatggatttgttgccaatttcagcatggagcttcctagtt

SEQ ID NO: 57691 - DNA, 60 bp, Artificial
  Synthetic oligonucleotide
cgaggggtatgaagagttcacaatggttgggagaagagcaacagctattctcagaaaggc

SEQ ID NO: 57692 - DNA, 60 bp, Artificial
  Synthetic oligonucleotide
ccacccagggatctttgaaaactcgtgtcttgaaacgatggaagttgttcaacagacaag

SEQ ID NO: 57693 - DNA, 60 bp, Artificial
  Synthetic oligonucleotide
ccaggaatctttgaaaactcgtgtcttgaaacgatggaggttgttcaacagacaagggtg

SEQ ID NO: 57694 - DNA, 60 bp, Artificial
  Synthetic oligonucleotide
tgagcaaataacatttatgcaagccttacaactactgcttgaagtggagcaagagataag

SEQ ID NO: 57695 - DNA, 60 bp, Artificial
  Synthetic oligonucleotide
gagcaaataacatttatgcaagccttacaactactgcttgaagtggagcaagagataaga

SEQ ID NO: 57696 - DNA, 60 bp, Artificial
  Synthetic oligonucleotide
tgagcaaataacatttatgcaagccttacaactactgcttgaggtggagcaagagataag

SEQ ID NO: 57697 - DNA, 60 bp, Artificial
  Synthetic oligonucleotide
gacaagaccaatcctgtcacctctgactaaggggattttagggtttgtgtttacgctcac

SEQ ID NO: 57698 - DNA, 60 bp, Artificial
  Synthetic oligonucleotide
ccatttcagaatatacatccagtcacaattggagaatgtccaaaatatgtcaaaagcaca

SEQ ID NO: 57699 - DNA, 60 bp, Artificial
  Synthetic oligonucleotide
ttccattccagaatatacatccagttacaattggagaatgtccaaaatatgtcaaaagca

SEQ ID NO: 57700 - DNA, 60 bp, Artificial
  Synthetic oligonucleotide
ccattccagaatatacatccagttacaattggagaatgtccaaaatatgtcaaaagcaca

SEQ ID NO: 57701 - DNA, 60 bp, Artificial
  Synthetic oligonucleotide
catccagtcacaattggagaatgtccaaaatatgtcaaaagcacaaaattgagaatggct

SEQ ID NO: 57702 - DNA, 60 bp, Artificial
  Synthetic oligonucleotide
attccagaatgtacatccagtcacaattggagaatgtccaaaatatgtcaaaagcacaag

SEQ ID NO: 57703 - DNA, 60 bp, Artificial
  Synthetic oligonucleotide
acatccagtcacaattggagaatgtccaaaatatgtcaaaagcacaagattgagaatggc

SEQ ID NO: 57704 - DNA, 60 bp, Artificial
  Synthetic oligonucleotide
ttaccagattttggcgatctattcaactgtcgccagctcatcggtactgttggtctccct

SEQ ID NO: 57705 - DNA, 60 bp, Artificial
  Synthetic oligonucleotide
cagcagcatgccctcatgctgggacaaacagcttttacagaaatttaatatggctggtga

SEQ ID NO: 57706 - DNA, 60 bp, Artificial
  Synthetic oligonucleotide
tttaatatggctggtgaaaaaaggaaatacatatccaaagctcagcaaatcctatgttaa

SEQ ID NO: 57707 - DNA, 60 bp, Artificial
  Synthetic oligonucleotide
tggggcattcaccacccatctaccagtactgatcaacaaagtctctaccagaatgcagat

SEQ ID NO: 57708 - DNA, 60 bp, Artificial
  Synthetic oligonucleotide
ggatgtttggacttacaatgccgaactgttggtcctattggagaatgaaagaaccttgga

SEQ ID NO: 57709 - DNA, 60 bp, Artificial
  Synthetic oligonucleotide
gagaatgaaagaaccttggatttccacgactcgaatgtgaagaacctatatgaaaaagta

SEQ ID NO: 57710 - DNA, 60 bp, Artificial
  Synthetic oligonucleotide
tcatgaaacaaacagaggtgtgacagcagcatgcccacatgctgggacaaacagctttta

SEQ ID NO: 57711 - DNA, 60 bp, Artificial
  Synthetic oligonucleotide
tcatcattcgaaagatttgagatattccccaaggcaagttcatggcccaatcatgaaaca

SEQ ID NO: 57712 - DNA, 60 bp, Artificial
  Synthetic oligonucleotide
gctgagagagcaattgagctcagtgtcatcattcgaaagatttgagatattccccaaggc

SEQ ID NO: 57713 - DNA, 60 bp, Artificial
  Synthetic oligonucleotide
ccccaaggcaagctcatggcccaatcatgaaacaaacagaggtgtgacagcagcatgccc

SEQ ID NO: 57714 - DNA, 60 bp, Artificial
  Synthetic oligonucleotide
ttgagatattccccaaggcaagctcatggcccaatcatgaaacaaacagaggtgtgacag

SEQ ID NO: 57715 - DNA, 60 bp, Artificial
  Synthetic oligonucleotide
ccctaaggggaagaggcatcacccttggtcttaacattgaaacagctactcttgttggga

SEQ ID NO: 57716 - DNA, 60 bp, Artificial
  Synthetic oligonucleotide
gtccctaaggggaagaggcatcacccttggtcttaacattgaaacagctactcttgttgg

SEQ ID NO: 57717 - DNA, 60 bp, Artificial
  Synthetic oligonucleotide
tcaagagcccgaattgatgcacggattgattttgaatctggaaggataaagaaagaggaa

SEQ ID NO: 57718 - DNA, 60 bp, Artificial
  Synthetic oligonucleotide
agagtctgaatgtgcctgcataaatggttcttgctttaccataatgactgatggaccaag

SEQ ID NO: 57719 - DNA, 60 bp, Artificial
  Synthetic oligonucleotide
cccacgccccaatgatggaacaggcagttgtggtccagtgtcttctaatggggcatatgg

SEQ ID NO: 57720 - DNA, 60 bp, Artificial
  Synthetic oligonucleotide
gtgcctgcataaatggttcttgctttactataatgactgatggaccaagtaatggccagg

SEQ ID NO: 57721 - DNA, 60 bp, Artificial
  Synthetic oligonucleotide
tttcaggtagattgcttcctttggcatgtccgcaaacaagttgcagaccaggatctaggc

SEQ ID NO: 57722 - DNA, 60 bp, Artificial
  Synthetic oligonucleotide
caagctttcaggtagattgcttcctttggcatgtccgcaaacaagttgcagaccaaggtc

SEQ ID NO: 57723 - DNA, 60 bp, Artificial
  Synthetic oligonucleotide
ctgtgtcaagctttcaggtagattgcttcctttggcatgtccgcaaacaagttgcagacc

SEQ ID NO: 57724 - DNA, 60 bp, Artificial
  Synthetic oligonucleotide
attcccacactgtgtcaagctttcaggtagattgcttcctttggcatgtccgcaaacaag

SEQ ID NO: 57725 - DNA, 60 bp, Artificial
  Synthetic oligonucleotide
cccacactgtgtcaagctttcaggtagattgcttcctttggcatgtccgcaaacaagttg

SEQ ID NO: 57726 - DNA, 60 bp, Artificial
  Synthetic oligonucleotide
ccacactgtgtcaagctttcaggtagattgcttcctttggcatgtccgcaaacaagttgc

SEQ ID NO: 57727 - DNA, 60 bp, Artificial
  Synthetic oligonucleotide
cacactgtgtcaagctttcaggtagattgcttcctttggcatgtccgcaaacaagttgca

SEQ ID NO: 57728 - DNA, 60 bp, Artificial
  Synthetic oligonucleotide
ttcaggtagattgcttcctttggcatgtccgcaaacaagttgcagaccaggatctaggcg

SEQ ID NO: 57729 - DNA, 60 bp, Artificial
  Synthetic oligonucleotide
tcaggtagattgcttcctttggcatgtccgcaaacaagttgcagaccaagatctaggcga

SEQ ID NO: 57730 - DNA, 60 bp, Artificial
  Synthetic oligonucleotide
tcaggtagattgcttcctttggcatgtccgcaaacaagttgcagaccaaaatctaggcga

SEQ ID NO: 57731 - DNA, 60 bp, Artificial
  Synthetic oligonucleotide
tcaggtagattgcttcctttggcatgtccgcaaacaagttgcagaccaggatctaggcga

SEQ ID NO: 57732 - DNA, 60 bp, Artificial
  Synthetic oligonucleotide
ctgcacaaaaagcaatgatggatcaagtgagagaaagccggaacccaggaaatgctgaga

SEQ ID NO: 57733 - DNA, 60 bp, Artificial
  Synthetic oligonucleotide
tgcacaaaaagcaatgatggatcaagtgagagaaagccggaacccagggaatgctgagat

SEQ ID NO: 57734 - DNA, 60 bp, Artificial
  Synthetic oligonucleotide
tgcacaaaaagcaatgatggatcaagtgagagaaagccggaacccaggaaatgctgaaat

SEQ ID NO: 57735 - DNA, 60 bp, Artificial
  Synthetic oligonucleotide
tgcacaaaaagcaatgatggatcaagtgagagaaagccggaacccaggaaatgctgagat

SEQ ID NO: 57736 - DNA, 58 bp, Artificial
  Synthetic oligonucleotide
aaaagcaatgatggatcaagtgagagaaagccggaacccaggaaatgctgaaatcgaa

SEQ ID NO: 57737 - DNA, 58 bp, Artificial
  Synthetic oligonucleotide
aaaagcaatgatggatcaagtgagagaaagccggaacccaggaaatgctgagatcgaa

SEQ ID NO: 57738 - DNA, 58 bp, Artificial
  Synthetic oligonucleotide
aaaagcaatgatggatcaagtgagagaaagccggaacccagggaatgctgagatcgaa

SEQ ID NO: 57739 - DNA, 60 bp, Artificial
  Synthetic oligonucleotide
cttggacaaaagagatacaccaaaacaacatactggtgggatggactccaatcttctgat

SEQ ID NO: 57740 - DNA, 60 bp, Artificial
  Synthetic oligonucleotide
cgagttaaatgcccctaattaccactatgaggagtgttcctgttatcctgatgctggcga

SEQ ID NO: 57741 - DNA, 60 bp, Artificial
  Synthetic oligonucleotide
ccgaaggcaagctcatggccaaatcatgagacaaccaaaggtgttacagctgcatgctct

SEQ ID NO: 57742 - DNA, 60 bp, Artificial
  Synthetic oligonucleotide
tggaacctggaaccttcgatcttgggggactatatgaagcaattgaggagtgcctgatta

SEQ ID NO: 57743 - DNA, 60 bp, Artificial
  Synthetic oligonucleotide
ggcgtcaagcgaataatggagaagacgcaactgctggtctcacccatttgatgatctggc

SEQ ID NO: 57744 - DNA, 60 bp, Artificial
  Synthetic oligonucleotide
agagcctttcatttcatgctctcacttggaatgcaggactttctttctaactcaaggggc

SEQ ID NO: 57745 - DNA, 60 bp, Artificial
  Synthetic oligonucleotide
ttgagataggagatatgcttctaaggagtgcaataggccaagtgtcaaggcccatgttct

SEQ ID NO: 57746 - DNA, 60 bp, Artificial
  Synthetic oligonucleotide
aaggatgatggaaagtgcaagaccagaagaagtgtccttccaggggcggggagtctttga

SEQ ID NO: 57747 - DNA, 60 bp, Artificial
  Synthetic oligonucleotide
caccgagcttaaactcaatgattatgagggacgactgatccagaacagcttaacaataga

SEQ ID NO: 57748 - DNA, 60 bp, Artificial
  Synthetic oligonucleotide
gctgcagtcaaaggagttgggacaatggtattggagttaatcaggatgatcaaacgtggg

SEQ ID NO: 57749 - DNA, 60 bp, Artificial
  Synthetic oligonucleotide
caaacacccaaaggtgctataaacaccagcctcccattccagaatgtacatccagtcaca

SEQ ID NO: 57750 - DNA, 60 bp, Artificial
  Synthetic oligonucleotide
acacactctgtcaacctacttgaggacagtcacaatggaaaactatgtctactaaaagga

SEQ ID NO: 57751 - DNA, 60 bp, Artificial
  Synthetic oligonucleotide
cacactctgtcaacctacttgaggacagtcacaatggaaaactatgtctactaaaaggaa

SEQ ID NO: 57752 - DNA, 60 bp, Artificial
  Synthetic oligonucleotide
acactctgtcaacctacttgaggacagtcacaatggaaaactatgtctactaaaaggaat

SEQ ID NO: 57753 - DNA, 60 bp, Artificial
  Synthetic oligonucleotide
acactctgtcaacctacttgaggacagtcacaatggaaaactatgtctactaaaagggat

SEQ ID NO: 57754 - DNA, 60 bp, Artificial
  Synthetic oligonucleotide
tgtgacagtgacacactctgtcaacctacttgaggacagtcacaatggaaaactatgtct

SEQ ID NO: 57755 - DNA, 60 bp, Artificial
  Synthetic oligonucleotide
atgtgacagtgacacactctgtcaacctacttgaggacagtcacaatggaaaactatgtc

SEQ ID NO: 57756 - DNA, 56 bp, Artificial
  Synthetic oligonucleotide
gaatgtgacagtgacacactctgtcaacctacttgaggacagtcacaatggaaaac

SEQ ID NO: 57757 - DNA, 60 bp, Artificial
  Synthetic oligonucleotide
caactcaaccgacactgttgacacagtacttgagaagaatgtgacagtgacacactctgt

SEQ ID NO: 57758 - DNA, 60 bp, Artificial
  Synthetic oligonucleotide
aactcaaccgacactgttgacacagtacttgagaagaatgtgacagtgacacactctgtc

SEQ ID NO: 57759 - DNA, 60 bp, Artificial
  Synthetic oligonucleotide
agtacttgagaagaatgtgacagtgacacactctgtcaacctacttgaggacagtcacaa

SEQ ID NO: 57760 - DNA, 60 bp, Artificial
  Synthetic oligonucleotide
acaactcaacagacactgttgacacagtacttgagaagaatgtgacagtgacacactctg

SEQ ID NO: 57761 - DNA, 59 bp, Artificial
  Synthetic oligonucleotide
gaatgtgacagtgacacactctgtcaacctacttgaggacagtcacaatggaaaactat

SEQ ID NO: 57762 - DNA, 60 bp, Artificial
  Synthetic oligonucleotide
ttgacacagtacttgagaagaatgtgacagtgacacactctgtcaacctacttgaggaca

SEQ ID NO: 57763 - DNA, 60 bp, Artificial
  Synthetic oligonucleotide
gtacttgagaagaatgtgacagtgacacactctgtcaacctacttgaggacagtcacaat

SEQ ID NO: 57764 - DNA, 60 bp, Artificial
  Synthetic oligonucleotide
gacagtgacacactctgtcaacctacttgaggacagtcacaatggaaaactatgtctact

SEQ ID NO: 57765 - DNA, 60 bp, Artificial
  Synthetic oligonucleotide
gtgacagtgacacactctgtcaacctacttgaggacagtcacaatggaaaactatgtcta

SEQ ID NO: 57766 - DNA, 60 bp, Artificial
  Synthetic oligonucleotide
tttcaggtagattgctatctatggcacataagaaagctgctcagcatgagagacatgtgt

SEQ ID NO: 57767 - DNA, 60 bp, Artificial
  Synthetic oligonucleotide
ttacttgaagttgagagtgagataaggacattttcttttcagcttatttagtgctaaaaa

SEQ ID NO: 57768 - DNA, 60 bp, Artificial
  Synthetic oligonucleotide
aaactgagaacagcttcgagcagataacgttcttgcaggcattgcaactcttacttgaag

SEQ ID NO: 57769 - DNA, 60 bp, Artificial
  Synthetic oligonucleotide
ctcagaagagatcaaaaggcattaaagggaagaggcagcacacttggactcgacctgcga

SEQ ID NO: 57770 - DNA, 60 bp, Artificial
  Synthetic oligonucleotide
aaggcattaaagggaagaggcagcacacttggactcgacctgcgagtggccacaatggaa

SEQ ID NO: 57771 - DNA, 60 bp, Artificial
  Synthetic oligonucleotide
gctatctatggcacataagaaaactgctcagcatgagagacatgtgtgatgctccctttg

SEQ ID NO: 57772 - DNA, 60 bp, Artificial
  Synthetic oligonucleotide
gttatttatggcacataagaaagctgctcagcatgagagacatgtgtgatgctccctttg

SEQ ID NO: 57773 - DNA, 60 bp, Artificial
  Synthetic oligonucleotide
gaaagctactcagcatgagagacatgtgtgatgctccctttgatgatagactcagaagag

SEQ ID NO: 57774 - DNA, 60 bp, Artificial
  Synthetic oligonucleotide
cagcatgagagacatgtgtgatgctccctttgatgatagactcagaagagatcaaaaggc

SEQ ID NO: 57775 - DNA, 60 bp, Artificial
  Synthetic oligonucleotide
cagaagataacagggggtttgatggtgaaaatggatcaggccattatggacaagaggata

SEQ ID NO: 57776 - DNA, 50 bp, Artificial
  Synthetic oligonucleotide
taacaggaggtctgatggtgaaaatggatcaggccattatggacaagagg

SEQ ID NO: 57777 - DNA, 60 bp, Artificial
  Synthetic oligonucleotide
cactccctccaaaacagaaacgccacatggcgagaagagttgagtcagaagtttgaagag

SEQ ID NO: 57778 - DNA, 60 bp, Artificial
  Synthetic oligonucleotide
attggaagattctacatacagatgtgcactgaactcaaactcagcgactatgaagggagg

SEQ ID NO: 57779 - DNA, 60 bp, Artificial
  Synthetic oligonucleotide
atgccccgttccttgatcggctccgccgagatcaaaagtccctaaggggaagaggcagca

SEQ ID NO: 57780 - DNA, 60 bp, Artificial
  Synthetic oligonucleotide
gacaagaccgatcctgtcacctctgactaaggggattttgggatttgtgttcacgctcac

SEQ ID NO: 57781 - DNA, 60 bp, Artificial
  Synthetic oligonucleotide
cggtctgctctcattctgaggggatcagtggctcataagtcctgcctgcctgcttgtgtg

SEQ ID NO: 57782 - DNA, 60 bp, Artificial
  Synthetic oligonucleotide
cggtcagctctcattctgaggggatcagtggctcataagtcctgcctgcctgcttgtgtg

SEQ ID NO: 57783 - DNA, 60 bp, Artificial
  Synthetic oligonucleotide
catatgactatcccaagtattcagaagagtccaaattgaaccgagaagaaatagacggag

SEQ ID NO: 57784 - DNA, 60 bp, Artificial
  Synthetic oligonucleotide
ccctccttacagccatgggacaggaacagggtacaccatggatacagtcaacaggacaca

SEQ ID NO: 57785 - DNA, 60 bp, Artificial
  Synthetic oligonucleotide
gaaagagcacacagaatgccattgacggaatcactaacaaagtaaactctgttattgaaa

SEQ ID NO: 57786 - DNA, 60 bp, Artificial
  Synthetic oligonucleotide
agctttttctatcgttatgggtttgttgcaaatttcagcatggagcttcctagttttggg

SEQ ID NO: 57787 - DNA, 60 bp, Artificial
  Synthetic oligonucleotide
agcttcttctatcgttatgggtttgttgccaatttcagcatggagcttcctagttttggg

SEQ ID NO: 57788 - DNA, 60 bp, Artificial
  Synthetic oligonucleotide
gcacccttggtcttaacatcgaaacagctactcttgttgggaagcaaattgtagattgga

SEQ ID NO: 57789 - DNA, 58 bp, Artificial
  Synthetic oligonucleotide
gtgttcacgctcaccgtgcccagtgagcgaggactgcaacgtagacgctttgtccaaa

SEQ ID NO: 57790 - DNA, 60 bp, Artificial
  Synthetic oligonucleotide
tggccaaatcatgagacaactaaaggtgttacagccgcatgctcttactctggagccagc

SEQ ID NO: 57791 - DNA, 60 bp, Artificial
  Synthetic oligonucleotide
cgactatccaaagtattcagaagagtccaaattgaatcgagaagaaatagacggagtgaa

SEQ ID NO: 57792 - DNA, 60 bp, Artificial
  Synthetic oligonucleotide
gggtatcatcatcagaatgagcagggatcaggatatgctgctgatcagaaaagcacacag

SEQ ID NO: 57793 - DNA, 60 bp, Artificial
  Synthetic oligonucleotide
tttgaagccactgggaatttgatagcaccatggtatgctttcgcattgaacaaggggtct

SEQ ID NO: 57794 - DNA, 60 bp, Artificial
  Synthetic oligonucleotide
cactgggaatttgatagcaccatggtatgctttcgcattgaacaaggggtctgactccgg

SEQ ID NO: 57795 - DNA, 60 bp, Artificial
  Synthetic oligonucleotide
cctggaacctggaaccttcgatcttggagggctatatgaagcaattgaggagtgcctgat

SEQ ID NO: 57796 - DNA, 60 bp, Artificial
  Synthetic oligonucleotide
tatccgcaagcggtttgcagactatggactgggtgatgccccattccttgatcggctccg

SEQ ID NO: 57797 - DNA, 60 bp, Artificial
  Synthetic oligonucleotide
gcttctcattgttcaggcacttagggacaacctggaacctggtaccttcgatcttggagg

SEQ ID NO: 57798 - DNA, 60 bp, Artificial
  Synthetic oligonucleotide
acgaggggtcttatttcttcggagacaatgcagaggagtatgacaattaaagaaaaatac

SEQ ID NO: 57799 - DNA, 60 bp, Artificial
  Synthetic oligonucleotide
gtgctgcaatctattcgagaaattcttccctagcagttcatacaggagaccggttggaat

SEQ ID NO: 57800 - DNA, 60 bp, Artificial
  Synthetic oligonucleotide
cacaggggacatgctgggagcagatgtacactccaggtggggaggtgaggaatgatgatg

SEQ ID NO: 57801 - DNA, 60 bp, Artificial
  Synthetic oligonucleotide
tagcgctcagttattctgctggtgcacttgccagctgcatgggcctcatatacaacagga

SEQ ID NO: 57802 - DNA, 60 bp, Artificial
  Synthetic oligonucleotide
acaccagcctcccatttcagaatatacatccagtcacaattggagaatgtccaaaatatg

SEQ ID NO: 57803 - DNA, 60 bp, Artificial
  Synthetic oligonucleotide
gagaggtcaagcagggagaatgaactattactggacattagtagagcctggagacacaat

SEQ ID NO: 57804 - DNA, 60 bp, Artificial
  Synthetic oligonucleotide
acaccagcctcccatttcagaatgtacatccagtcacaattggagaatgtccaaaatatg

SEQ ID NO: 57805 - DNA, 60 bp, Artificial
  Synthetic oligonucleotide
ccgtgcccagtgagcgaggactgcagcgtagacgctttgtccaaaatgcccttgatggga

SEQ ID NO: 57806 - DNA, 60 bp, Artificial
  Synthetic oligonucleotide
gtgagcgaggactgcagcgtagacgctttgtccagaatgccctcaatgggaacggtgacc

SEQ ID NO: 57807 - DNA, 60 bp, Artificial
  Synthetic oligonucleotide
catagaggaaataagtagggaatggtacatgctcatgccaaggcagaaaataacaggagg

SEQ ID NO: 57808 - DNA, 60 bp, Artificial
  Synthetic oligonucleotide
gagaatagtttcgagcaaataacatttatgcaagccttgcaactactgctcgaagtagaa

SEQ ID NO: 57809 - DNA, 60 bp, Artificial
  Synthetic oligonucleotide
tagcactcagttattctgctggtgcacttgccagttgcatgggcctcatttacaacagaa

SEQ ID NO: 57810 - DNA, 60 bp, Artificial
  Synthetic oligonucleotide
ggtgccattgtagctgaaatatctcccattccttctatgccaggacattctacagaggat

SEQ ID NO: 57811 - DNA, 60 bp, Artificial
  Synthetic oligonucleotide
ttgatcttgggggattatatgaatcaattgaggagtgcctgattaatgatccctgggttt

SEQ ID NO: 57812 - DNA, 60 bp, Artificial
  Synthetic oligonucleotide
acgaaggatcttatttcttcggagacaatgcagaggaatatgacaattaaagaaaaatac

SEQ ID NO: 57813 - DNA, 60 bp, Artificial
  Synthetic oligonucleotide
tcccgtcaggccccctcaaagccgagatcgcacagagactggaagatgtctttgcaggga

SEQ ID NO: 57814 - DNA, 60 bp, Artificial
  Synthetic oligonucleotide
ggcaaggctaggaaaaggatacatgttcgaaagtaagagcatgaagcttcgaacacagat

SEQ ID NO: 57815 - DNA, 60 bp, Artificial
  Synthetic oligonucleotide
gaacccaggaaatgctgagattgaagatctaattttcctggcacggtcagcacttattct

SEQ ID NO: 57816 - DNA, 60 bp, Artificial
  Synthetic oligonucleotide
ccaaatgaaaacccagctcacaagagtcaattggtgtggatggcatgtcattctgctgca

SEQ ID NO: 57817 - DNA, 60 bp, Artificial
  Synthetic oligonucleotide
ccaaatgaaaacccagctcacaagagtcaattggtgtggatggcatgccactctgctgca

SEQ ID NO: 57818 - DNA, 55 bp, Artificial
  Synthetic oligonucleotide
cggaagttataaggatgatggaaagtgcaaagccagaagatttgtccttccaggg

SEQ ID NO: 57819 - DNA, 60 bp, Artificial
  Synthetic oligonucleotide
aggaaacgctgagattgaagatctcattttcctggcacggtcagcacttattctaagggg

SEQ ID NO: 57820 - DNA, 60 bp, Artificial
  Synthetic oligonucleotide
cgctgagattgaagatctcattttcctggcacggtcagcacttattctaaggggatcagt

SEQ ID NO: 57821 - DNA, 60 bp, Artificial
  Synthetic oligonucleotide
tcagcctgatcagaccaaatgaaaacccagctcacaagagtcaattggtgtggatggcat

SEQ ID NO: 57822 - DNA, 60 bp, Artificial
  Synthetic oligonucleotide
gcctgatcagaccaaatgaaaacccagctcacaagagtcaattggtgtggatggcatgcc

SEQ ID NO: 57823 - DNA, 60 bp, Artificial
  Synthetic oligonucleotide
ctgatcagaccaaatgaaaatccagctcacaagagtcaattggtgtggatggcatgccac

SEQ ID NO: 57824 - DNA, 60 bp, Artificial
  Synthetic oligonucleotide
tgatcagaccaaatgaaaacccagctcacaagagtcaattggtgtggatggcatgccact

SEQ ID NO: 57825 - DNA, 60 bp, Artificial
  Synthetic oligonucleotide
tgatcagaccaaatgaaaacccagctcacaagagtcaattggtgtggatggcatgtcatt

SEQ ID NO: 57826 - DNA, 60 bp, Artificial
  Synthetic oligonucleotide
ccaaatgaaaatccagctcacaagagtcaattggtgtggatggcatgccactctgctgca

SEQ ID NO: 57827 - DNA, 60 bp, Artificial
  Synthetic oligonucleotide
ggtgttacggcagcatgcccttatgctggagcaaacagcttctacagaaatttaatatgg

SEQ ID NO: 57828 - DNA, 60 bp, Artificial
  Synthetic oligonucleotide
ggtgtgacagcagcatgtccttatgctggagcaaacagcttctacagaaatttaatatgg

SEQ ID NO: 57829 - DNA, 54 bp, Artificial
  Synthetic oligonucleotide
ttttctatcgttatgggtttgttgccaatttcagcatggagcttcctagttttg

SEQ ID NO: 57830 - DNA, 60 bp, Artificial
  Synthetic oligonucleotide
cgttatgggtttgttgccaatttcagcatggagcttcctagttttggggtatctggggtc

SEQ ID NO: 57831 - DNA, 60 bp, Artificial
  Synthetic oligonucleotide
ctatcgttatggatttgttgccaatttcagcatggagcttcctagttttggagtgtctgg

SEQ ID NO: 57832 - DNA, 60 bp, Artificial
  Synthetic oligonucleotide
actgagatagttgtggcattgctactatttgctatccatactgtccaaaaaagtaccttg

SEQ ID NO: 57833 - DNA, 60 bp, Artificial
  Synthetic oligonucleotide
accttaatgagctgtcctgttggtgaggctccctctccatacaattcaagatttgagtcg

SEQ ID NO: 57834 - DNA, 60 bp, Artificial
  Synthetic oligonucleotide
ccagaaatgctgcaatctattcgagaaattcttccctagcagttcatacaggaggccagt

SEQ ID NO: 57835 - DNA, 60 bp, Artificial
  Synthetic oligonucleotide
gaagtgctgcaatctattcgagaaattcttccctagcagttcatacaggaggccagttgg

SEQ ID NO: 57836 - DNA, 60 bp, Artificial
  Synthetic oligonucleotide
ttcaatctagaggtctgtttggagccattgctggttttattgaggggggatggacaggaa

SEQ ID NO: 57837 - DNA, 60 bp, Artificial
  Synthetic oligonucleotide
ccaaaatatgtcaaaagcacaaaattgagaatggctacaggactaaggaatatcccgtct

SEQ ID NO: 57838 - DNA, 60 bp, Artificial
  Synthetic oligonucleotide
cttcctagttttggagtgtctggaattaatgagtctgcagacatgagtattggagttact

SEQ ID NO: 57839 - DNA, 60 bp, Artificial
  Synthetic oligonucleotide
aggtgttgcatttaacccaggggacatgctgggagcagatgtacactccaggaggggaag

SEQ ID NO: 57840 - DNA, 60 bp, Artificial
  Synthetic oligonucleotide
tgaggtattgcatttaacccaggggacatgctgggagcagatgtacactccaggagggga

SEQ ID NO: 57841 - DNA, 60 bp, Artificial
  Synthetic oligonucleotide
acgacttgtcaaacacccaaaggtgctataaacaccagcctcccatttcagaatgtgcat

SEQ ID NO: 57842 - DNA, 60 bp, Artificial
  Synthetic oligonucleotide
cgacttgtcaaacacccaaaggtgctataaacaccagcctcccatttcagaatgtgcatc

SEQ ID NO: 57843 - DNA, 60 bp, Artificial
  Synthetic oligonucleotide
cgattgcaacacgacttgtcaaacacccaaaggtgctataaacaccagccttccattcca

SEQ ID NO: 57844 - DNA, 60 bp, Artificial
  Synthetic oligonucleotide
gattgcaacacgacttgtcaaacacccaaaggtgctataaacaccagccttccattccag

SEQ ID NO: 57845 - DNA, 60 bp, Artificial
  Synthetic oligonucleotide
tgtaatactacttgtcaaacacccaaaggtgctataaacaccagcctcccattccagaat

SEQ ID NO: 57846 - DNA, 60 bp, Artificial
  Synthetic oligonucleotide
accagtccacgattgtaatacgacttgtcaaacacccaaaggtgctataaacaccagcct

SEQ ID NO: 57847 - DNA, 60 bp, Artificial
  Synthetic oligonucleotide
cccagttcacgattgtaatacgacttgtcaaacacccaaaggtgctataaacaccagcct

SEQ ID NO: 57848 - DNA, 60 bp, Artificial
  Synthetic oligonucleotide
gttcacgattgtaatacgacttgtcaaacacccaaaggtgctataaacaccagcctccca

SEQ ID NO: 57849 - DNA, 60 bp, Artificial
  Synthetic oligonucleotide
atatgagcatagaggaaataagcagggaatggtacatgctcatgcccaggcagaagataa

SEQ ID NO: 57850 - DNA, 60 bp, Artificial
  Synthetic oligonucleotide
aaatctcaagattgcaattgcatccagccctgctcctcggtacattactgatatgagcat

SEQ ID NO: 57851 - DNA, 60 bp, Artificial
  Synthetic oligonucleotide
gacgatggcgccattgtagctgaaatatctcccatcccttccatgccaggacattctaca

SEQ ID NO: 57852 - DNA, 60 bp, Artificial
  Synthetic oligonucleotide
tcaactggaaacattagtctcactgagggctttcacagacgatggcgccattgtagctga

SEQ ID NO: 57853 - DNA, 52 bp, Artificial
  Synthetic oligonucleotide
ggggtctgatggtgaaaatggatcaggccattatggacaagaggataacact

SEQ ID NO: 57854 - DNA, 60 bp, Artificial
  Synthetic oligonucleotide
ggggtttgatggtgaaaatggatcaggccattatggacaagaggataacactcaaagcaa

SEQ ID NO: 57855 - DNA, 60 bp, Artificial
  Synthetic oligonucleotide
cttaaaattgcaattgcatccagccctgctcctcggtacattaccgatatgagcatagag

SEQ ID NO: 57856 - DNA, 60 bp, Artificial
  Synthetic oligonucleotide
gcaattgcatccagccctgctcctcggtacattactgatatgagcatagaggaaataagc

SEQ ID NO: 57857 - DNA, 60 bp, Artificial
  Synthetic oligonucleotide
gatgggctatatacagcaaggacaatggtataaggataggttccaagggagatgtatttg

SEQ ID NO: 57858 - DNA, 60 bp, Artificial
  Synthetic oligonucleotide
tgaccattgaggaaatgtcacgaaattgggtcatgctcatgcctaagcaaaaggtgacag

SEQ ID NO: 57859 - DNA, 60 bp, Artificial
  Synthetic oligonucleotide
accattgaggaaatgtcacgaaattgggtcatgctcatgcctaagcaaaaggtgacaggc

SEQ ID NO: 57860 - DNA, 60 bp, Artificial
  Synthetic oligonucleotide
gggagaccttcactatctccagaacagaaatgaaaaatggcgagagcaattgggacagaa

SEQ ID NO: 57861 - DNA, 57 bp, Artificial
  Synthetic oligonucleotide
agaccaggcggtcatggaaaagaccatagtactgaaagcgaacttcagtgtgatttt

SEQ ID NO: 57862 - DNA, 60 bp, Artificial
  Synthetic oligonucleotide
tatggattgggtgatgccccattccttgatcggatccgccgagatcaaaaatccctaaaa

SEQ ID NO: 57863 - DNA, 50 bp, Artificial
  Synthetic oligonucleotide
tatggattgggtgatgccccattccttgatcggatccgccgagatcaaaa

SEQ ID NO: 57864 - DNA, 56 bp, Artificial
  Synthetic oligonucleotide
acgaggggtcttatttcttcggagacaatgcagaggagtatgacaattaaagaaaa

SEQ ID NO: 57865 - DNA, 60 bp, Artificial
  Synthetic oligonucleotide
ccgaccattattaatagatggaactgcatcattgagtcctggaatgatgatgggcatgtt

SEQ ID NO: 57866 - DNA, 60 bp, Artificial
  Synthetic oligonucleotide
ctcgtgctatggggaattcaccatccacctaccagtgctgaccaacaaagtctctaccag

SEQ ID NO: 57867 - DNA, 60 bp, Artificial
  Synthetic oligonucleotide
gctggaaaagaatgtaacagtaacacattctgttaaccttctagaagacagacataacgg

SEQ ID NO: 57868 - DNA, 60 bp, Artificial
  Synthetic oligonucleotide
cctcgtgctatggggaattcaccatccacctaccagtgctgaccaacaaagtctctacca

SEQ ID NO: 57869 - DNA, 60 bp, Artificial
  Synthetic oligonucleotide
atttatttcgtgctctcacttggaatgcaggactttctttctgactcaaggggccttgtt

SEQ ID NO: 57870 - DNA, 60 bp, Artificial
  Synthetic oligonucleotide
gctctcacttggaatgcaggactttctttctgactcaaggggccttgctgaatgacaaac

SEQ ID NO: 57871 - DNA, 60 bp, Artificial
  Synthetic oligonucleotide
ttaaatacggcaatggtgtttggataggaagaactaaaagcactagttcaaggagtggat

SEQ ID NO: 57872 - DNA, 60 bp, Artificial
  Synthetic oligonucleotide
tttaaatacggtaatggtgtttggataggaagaactaaaagcactagctcaaggagtggg

SEQ ID NO: 57873 - DNA, 60 bp, Artificial
  Synthetic oligonucleotide
taaagacaagaccgatcctgtcacctctgactaaggggattttaggatttgtgttcacgc

SEQ ID NO: 57874 - DNA, 60 bp, Artificial
  Synthetic oligonucleotide
gctatgcccaaacagattgtgtattagaagcaatggctttccttgaagaatcccatcctg

SEQ ID NO: 57875 - DNA, 60 bp, Artificial
  Synthetic oligonucleotide
gcacccaactatgcaggaattcaagctggagttgacaggttttatcgaacctgtaagctg

SEQ ID NO: 57876 - DNA, 58 bp, Artificial
  Synthetic oligonucleotide
gcacccaactatgcaggaattcaagctggagttgacaggttttatcgaacctgtaagc

SEQ ID NO: 57877 - DNA, 60 bp, Artificial
  Synthetic oligonucleotide
gtctttgcagggaagaacaccgatcttgaggcactcatggaatggctaaagacaagacca

SEQ ID NO: 57878 - DNA, 60 bp, Artificial
  Synthetic oligonucleotide
gtgtttgcagggaagaacaccgatcttgaggcactcatggaatggctaaagacaagacca

SEQ ID NO: 57879 - DNA, 60 bp, Artificial
  Synthetic oligonucleotide
gttctatcagtggatgggctatatacacaaaagacaacagcataagaattggctccaaag

SEQ ID NO: 57880 - DNA, 60 bp, Artificial
  Synthetic oligonucleotide
ggaagtttcgttcaacatcctgagttaacaggattggactgtataagaccttgcttctgg

SEQ ID NO: 57881 - DNA, 60 bp, Artificial
  Synthetic oligonucleotide
ttaacaatcggaatttctggtccagacaatggagctgtggctgtactaaaatacaacgga

SEQ ID NO: 57882 - DNA, 60 bp, Artificial
  Synthetic oligonucleotide
tgagttaacaggattggactgtataagaccttgcttctgggttgagttagtcagaggact

SEQ ID NO: 57883 - DNA, 60 bp, Artificial
  Synthetic oligonucleotide
gattggtcagggtacagcggaagtttcgttcaacatcctgagttaacaggattggactgt

SEQ ID NO: 57884 - DNA, 60 bp, Artificial
  Synthetic oligonucleotide
atgatggcatgggctggttaacaatcggaatttctggtccagacaatggagctgtggctg

SEQ ID NO: 57885 - DNA, 60 bp, Artificial
  Synthetic oligonucleotide
gcatgggctggttaacaatcggaatttctggtccagacaatggagctgtggctgtactaa

SEQ ID NO: 57886 - DNA, 60 bp, Artificial
  Synthetic oligonucleotide
tgctggaaaggacaaaacttcagtgacattggccggcaattcatctctttgttctatcag

SEQ ID NO: 57887 - DNA, 60 bp, Artificial
  Synthetic oligonucleotide
acaagagtctgaatgtgtctgtgtgaacgggtcatgtttcaccataatgaccgatggccc

SEQ ID NO: 57888 - DNA, 60 bp, Artificial
  Synthetic oligonucleotide
attatgaggaatgttcctgttacccagacactggcacagtgatgtgtgtatgcagggaca

SEQ ID NO: 57889 - DNA, 60 bp, Artificial
  Synthetic oligonucleotide
gcaattcatctctttgttctatcagtggatgggctatatacacaaaagacaacagcataa

SEQ ID NO: 57890 - DNA, 60 bp, Artificial
  Synthetic oligonucleotide
tggccggcaattcatctctttgttctatcagtggatgggctatatacacaaaagacaaca

SEQ ID NO: 57891 - DNA, 60 bp, Artificial
  Synthetic oligonucleotide
cagtgacattggccggcaattcatctctttgttctatcagtggatgggctatatacacaa

SEQ ID NO: 57892 - DNA, 60 bp, Artificial
  Synthetic oligonucleotide
aaacttcagtgacattggccggcaattcatctctttgttctatcagtggatgggctatat

SEQ ID NO: 57893 - DNA, 60 bp, Artificial
  Synthetic oligonucleotide
aggacaaaacttcagtgacattggccggcaattcatctctttgttctatcagtggatggg

SEQ ID NO: 57894 - DNA, 60 bp, Artificial
  Synthetic oligonucleotide
gaacaggcagttgtggtccagtgtcttctaatggggcatatggagtaaaagggttttcat

SEQ ID NO: 57895 - DNA, 60 bp, Artificial
  Synthetic oligonucleotide
gcacaggcagttgtggtccagtgtcttctaatggggcatatggagtaaaggggttttcat

SEQ ID NO: 57896 - DNA, 60 bp, Artificial
  Synthetic oligonucleotide
tggaacaggcagttgcggtccagtgtcttctaatggggcatatggagtaaaagggttttc

SEQ ID NO: 57897 - DNA, 60 bp, Artificial
  Synthetic oligonucleotide
ggaacaggcagttgcggtccagtgtcttctaatggggcatatggagtaaaagggttttca

SEQ ID NO: 57898 - DNA, 60 bp, Artificial
  Synthetic oligonucleotide
atgatggaacaggcagttgtggtccagtgtcttctaatggggcatatggagtaaagggat

SEQ ID NO: 57899 - DNA, 60 bp, Artificial
  Synthetic oligonucleotide
gaacaggcagttgtggtccagtgtcttctaatggggcatatggagtaaaggggttttcat

SEQ ID NO: 57900 - DNA, 60 bp, Artificial
  Synthetic oligonucleotide
ggaacaggcagttgtggtccagtgtcttctaatggggcatatggagtaaagggattttca

SEQ ID NO: 57901 - DNA, 60 bp, Artificial
  Synthetic oligonucleotide
ggagacgtggtgttggcaatgaaacggaaacgggactctagcatacttactgacagccag

SEQ ID NO: 57902 - DNA, 60 bp, Artificial
  Synthetic oligonucleotide
ctgtcgccagttcattggtactgttagtctccctgggggcaatcagtttctggatgtgct

SEQ ID NO: 57903 - DNA, 60 bp, Artificial
  Synthetic oligonucleotide
actgttggtctccctgggggcaatcagtttctggatgtgctctaatgggtctttacagtg

SEQ ID NO: 57904 - DNA, 60 bp, Artificial
  Synthetic oligonucleotide
gctcatcggtactgttggtctccctgggggcaatcagtttctggatgtgctccaatgggt

SEQ ID NO: 57905 - DNA, 60 bp, Artificial
  Synthetic oligonucleotide
agctcatcagtgctgttggtctccctgggggcaatcagtttctggatgtgctccaatggg

SEQ ID NO: 57906 - DNA, 60 bp, Artificial
  Synthetic oligonucleotide
atgagggacgactgatccagaacagtttaacaatagagagaatggtgctctctgcttttg

SEQ ID NO: 57907 - DNA, 60 bp, Artificial
  Synthetic oligonucleotide
tgagggacgactgatccagaacagcttaacaatagagagaatggtgctctctgcttttga

SEQ ID NO: 57908 - DNA, 60 bp, Artificial
  Synthetic oligonucleotide
ggattatatgaatcaattgaggagtgcctgattaatgatccctgggttttgcttaatgcg

SEQ ID NO: 57909 - DNA, 60 bp, Artificial
  Synthetic oligonucleotide
gaacggcacatatgactatcccaagtattcagaagagtccaaattgaaccgagaagaaat

SEQ ID NO: 57910 - DNA, 60 bp, Artificial
  Synthetic oligonucleotide
ccaaacccctcatggggctttgaacagcagccttccttttcagaatgtacatcctatcac

SEQ ID NO: 57911 - DNA, 60 bp, Artificial
  Synthetic oligonucleotide
gaccgtgactcactcagtgaatttgctcgaagacagccataatgggaaactctgcagctt

SEQ ID NO: 57912 - DNA, 60 bp, Artificial
  Synthetic oligonucleotide
gactgtgactcactcagtgaatttgctcgaagacagccataatgggaaactctgcagcct

SEQ ID NO: 57913 - DNA, 60 bp, Artificial
  Synthetic oligonucleotide
ctcagaccgagtgatggtatcacctctagctgtgacatggtggaataggaatgggccaac

SEQ ID NO: 57914 - DNA, 55 bp, Artificial
  Synthetic oligonucleotide
ggcagaaacagcagagtgctgtggatgttgacgatggtcattttgtcaacatagc

SEQ ID NO: 57915 - DNA, 60 bp, Artificial
  Synthetic oligonucleotide
ggagtctatgagggaagaatatcgacagaaacagcagagtgctgtggatgttgacgatgg

SEQ ID NO: 57916 - DNA, 60 bp, Artificial
  Synthetic oligonucleotide
gaagtccttgtgctatggggcattcaccatccacctaccagtgctgaccaacaaagtctc

SEQ ID NO: 57917 - DNA, 60 bp, Artificial
  Synthetic oligonucleotide
gaaggaagtccttgtgctatggggcattcaccatccacctaccagtgctgaccaacaaag

SEQ ID NO: 57918 - DNA, 60 bp, Artificial
  Synthetic oligonucleotide
cttactgacagccagacagcgaccaaaagaattcggatggccatcaattagtgtcgaatt

SEQ ID NO: 57919 - DNA, 60 bp, Artificial
  Synthetic oligonucleotide
cccagaagatctggagccgcaggtgctgcagtgaaaggagttggaacaatagcaatggaa

SEQ ID NO: 57920 - DNA, 60 bp, Artificial
  Synthetic oligonucleotide
ggtcggaatagaccccttcaaattgcttcaaaacagtcaagtgttcagcctgatcagacc

SEQ ID NO: 57921 - DNA, 60 bp, Artificial
  Synthetic oligonucleotide
gcagtggcaagtgggcatgactttgaaagggaaggatattcactggtcggaatagacccc

SEQ ID NO: 57922 - DNA, 60 bp, Artificial
  Synthetic oligonucleotide
acagctgcccagagggcaatgatggatcaagtgagagaaagtcggaacccaggaaacgct

SEQ ID NO: 57923 - DNA, 60 bp, Artificial
  Synthetic oligonucleotide
agtgagaatgtggaagctatggattctagtaccctggaactaagaagcagatattgggcc

SEQ ID NO: 57924 - DNA, 60 bp, Artificial
  Synthetic oligonucleotide
ttctaaggggatcagttgcacataagtcttgtctgcctgcttgtgtgtatgggcttgcag

SEQ ID NO: 57925 - DNA, 60 bp, Artificial
  Synthetic oligonucleotide
ataggatacatatgcagcggagtttttggagacaacccacgccccaatgatggaacaggc

SEQ ID NO: 57926 - DNA, 60 bp, Artificial
  Synthetic oligonucleotide
ttctgtggtgtaaatagcgacactgtgggttggtcttggccagacggtgctgagttgcca

SEQ ID NO: 57927 - DNA, 60 bp, Artificial
  Synthetic oligonucleotide
tctgcagcctgaacgggatagctcccctacaactgggaaagtgcaatgtggcgggatggc

SEQ ID NO: 57928 - DNA, 60 bp, Artificial
  Synthetic oligonucleotide
agtgtcaaacccctcatggggctttgaacagcagccttccttttcagaacgtacatccta

SEQ ID NO: 57929 - DNA, 60 bp, Artificial
  Synthetic oligonucleotide
ggataacgaagaagggaaattcatacccaaaactcagcaaatcatacacgaacaacaagg

SEQ ID NO: 57930 - DNA, 60 bp, Artificial
  Synthetic oligonucleotide
ccattcaatccagaggactatttggagcaattgctggattcattgagggaggatggacag

SEQ ID NO: 57931 - DNA, 60 bp, Artificial
  Synthetic oligonucleotide
ctcatggggctttgaacagcagccttccttttcagaacgtacatcctattactattgggg

SEQ ID NO: 57932 - DNA, 60 bp, Artificial
  Synthetic oligonucleotide
gtgtgaagaacggcacatacgactaccccaagtattcagaagagtccaaattgaatcgag

SEQ ID NO: 57933 - DNA, 60 bp, Artificial
  Synthetic oligonucleotide
gttctgttgtgtacatttacagctacatatgcagacacaatatgtataggctaccatgcg

SEQ ID NO: 57934 - DNA, 60 bp, Artificial
  Synthetic oligonucleotide
ttctgttatgtacatttacagctacatatgcagacacaatatgtataggctaccatgcca

SEQ ID NO: 57935 - DNA, 60 bp, Artificial
  Synthetic oligonucleotide
catttacagctacatatgcagacacaatatgtataggctaccatgccaacaactcaaccg

SEQ ID NO: 57936 - DNA, 60 bp, Artificial
  Synthetic oligonucleotide
agagtctgagtgtgcctgcattaatggttcttgctttaccataatgactgatggaccaag

SEQ ID NO: 57937 - DNA, 60 bp, Artificial
  Synthetic oligonucleotide
agagtctgaatgtgcttgcataaatggttcctgctttaccataatgactgatggaccaag

SEQ ID NO: 57938 - DNA, 60 bp, Artificial
  Synthetic oligonucleotide
agatagttagggcaatgctactatttactatccatactgtccaaaaaagtaccttgtttc

SEQ ID NO: 57939 - DNA, 51 bp, Artificial
  Synthetic oligonucleotide
gggctatatacacaaaagacaacagcataagaattggatccaaaggagatg

SEQ ID NO: 57940 - DNA, 60 bp, Artificial
  Synthetic oligonucleotide
tgggctatatacacaaaagacaacagcataagaattggatccaaaggagatgtttttgtc

SEQ ID NO: 57941 - DNA, 60 bp, Artificial
  Synthetic oligonucleotide
ccattccttgatcggctccgccgagatcaaaaatccctaaaaggaagaggcagcaccctt

SEQ ID NO: 57942 - DNA, 60 bp, Artificial
  Synthetic oligonucleotide
tgccccgttccttgatcggctccgccgagatcaaaagtccctaaggggaagaggcatcac

SEQ ID NO: 57943 - DNA, 60 bp, Artificial
  Synthetic oligonucleotide
cccaagcagaaagtagcgggctcactctgtatcagaatggaccaggcaataatggataag

SEQ ID NO: 57944 - DNA, 60 bp, Artificial
  Synthetic oligonucleotide
ctcaagaagtgggtttgagatgatttgggatcccaatgggtggacagagacagacaacag

SEQ ID NO: 57945 - DNA, 60 bp, Artificial
  Synthetic oligonucleotide
tctggaacctgggacctttgatcttgggggactatatgaagcaattgaggagtgcctaat

SEQ ID NO: 57946 - DNA, 60 bp, Artificial
  Synthetic oligonucleotide
aaagcaggcaaaccatttgaatggatgtcaatccgacattacttttcttaaaagtgccag

SEQ ID NO: 57947 - DNA, 60 bp, Artificial
  Synthetic oligonucleotide
tatctggaagaacatcccagtgcggggaaagatcctaagaaaactggaggacccatatac

SEQ ID NO: 57948 - DNA, 60 bp, Artificial
  Synthetic oligonucleotide
catgttctcacttggaatgcagaaccttttttctgacccaaggttctctattaaatgaca

SEQ ID NO: 57949 - DNA, 61 bp, Artificial
  Synthetic oligonucleotide
cagttttgaacaaataacatttatgcaagccttacaactattgcttgaagtggaacaagag

SEQ ID NO: 57950 - DNA, 60 bp, Artificial
  Synthetic oligonucleotide
cgagcaaataacatttatgcaagccttacaactattgcttgaagtagaacaagagataag

SEQ ID NO: 57951 - DNA, 60 bp, Artificial
  Synthetic oligonucleotide
tttcgagcaaataacatttatgcaagccttacaactattgcttgaagtagaacaagagat

SEQ ID NO: 57952 - DNA, 60 bp, Artificial
  Synthetic oligonucleotide
ccctatagaaccttaatgagctgtcctgttggtgaagctccctctccatacaattcaagg

SEQ ID NO: 57953 - DNA, 60 bp, Artificial
  Synthetic oligonucleotide
ctatagaaccttaatgagctgtcctgttggtgaggccccctctccatacaattcaaggtt

SEQ ID NO: 57954 - DNA, 60 bp, Artificial
  Synthetic oligonucleotide
ctatagaaccttaatgagctgtcctgttggtgaagctccctctccatacaattcaaggtt

SEQ ID NO: 57955 - DNA, 60 bp, Artificial
  Synthetic oligonucleotide
tgattatgagggacgattaattcaaaatagcataacaatagagagaatggtgctctctgc

SEQ ID NO: 57956 - DNA, 60 bp, Artificial
  Synthetic oligonucleotide
cggaagattctacatccaaatgtgcactgaactcaaactcagcgattatgagggacgact

SEQ ID NO: 57957 - DNA, 59 bp, Artificial
  Synthetic oligonucleotide
actacttcaaaacagtcaagtattcagcctgatcagaccaaatgaaaacccagctcaca

SEQ ID NO: 57958 - DNA, 60 bp, Artificial
  Synthetic oligonucleotide
ataagtcttgcctgcctgcttgtgtgtatgggcttgcagtagcgagtgggcatgactttg

SEQ ID NO: 57959 - DNA, 53 bp, Artificial
  Synthetic oligonucleotide
gacgactgattcaaaatagcataacaatagagagaatggtgctctctgctttt

SEQ ID NO: 57960 - DNA, 60 bp, Artificial
  Synthetic oligonucleotide
ctcttgaagagatgtcaagggactggttcatgctcatgcccaagcagaaagtagcgggct

SEQ ID NO: 57961 - DNA, 56 bp, Artificial
  Synthetic oligonucleotide
ggtatctagggccagaattgatgcacggattgatttcgaatctggaaggattaaga

SEQ ID NO: 57962 - DNA, 60 bp, Artificial
  Synthetic oligonucleotide
gtcttgctatgtacatttgcagccacaaatgcagacacactatgtataggttatcatgca

SEQ ID NO: 57963 - DNA, 60 bp, Artificial
  Synthetic oligonucleotide
agtcttgctatgtacatttgcagccacaaatgcagacacactatgtataggttatcatgc

SEQ ID NO: 57964 - DNA, 60 bp, Artificial
  Synthetic oligonucleotide
aagggaaggaagtccttgtgctatggggcattcaccatccacctaccagtactgaccaac

SEQ ID NO: 57965 - DNA, 60 bp, Artificial
  Synthetic oligonucleotide
ccgtgactcactcagtgaatctgctcgaagacagccataatgggaaactctgcagcctga

SEQ ID NO: 57966 - DNA, 60 bp, Artificial
  Synthetic oligonucleotide
gcagaggtgtctcattgcagagccacagaatatataatgaagggggtatacattaatacc

SEQ ID NO: 57967 - DNA, 60 bp, Artificial
  Synthetic oligonucleotide
gacttgagccacacaaatgggagaagtactgtgttcttgagataggggatatgcttctaa

SEQ ID NO: 57968 - DNA, 60 bp, Artificial
  Synthetic oligonucleotide
gtaccttcgatcttggaggactatacgaagcaattgaggagtgcctgattaatgatccct

SEQ ID NO: 57969 - DNA, 60 bp, Artificial
  Synthetic oligonucleotide
ccttcgatcttggaggactatacgaagcaattgaggagtgcctgattaatgatccctggg

SEQ ID NO: 57970 - DNA, 60 bp, Artificial
  Synthetic oligonucleotide
agtggctatgcccaaacagattgtgtattagaagcaatggctttccttgaagaatcccat

SEQ ID NO: 57971 - DNA, 60 bp, Artificial
  Synthetic oligonucleotide
aacccaggggacatgctgggagcagatgtacactccaggaggggaagtgagaaatgatga

SEQ ID NO: 57972 - DNA, 60 bp, Artificial
  Synthetic oligonucleotide
gatccctgggttttgcttaatgcatcttggttcaactccttcctcacacatgcactgaga

SEQ ID NO: 57973 - DNA, 60 bp, Artificial
  Synthetic oligonucleotide
ctacagaaccttaatgagctgtcctgttggtgaggctccctctccatacaattcaagatt

SEQ ID NO: 57974 - DNA, 60 bp, Artificial
  Synthetic oligonucleotide
ctatagaaccttaatgagctgtcctgttggtgaggctccctctccatacaattcaaggtt

SEQ ID NO: 57975 - DNA, 60 bp, Artificial
  Synthetic oligonucleotide
tgcttgaggtggagcaagagataagaactttctcgtttcagcttatttaatgataaaaaa

SEQ ID NO: 57976 - DNA, 60 bp, Artificial
  Synthetic oligonucleotide
ggaaaaacacagatcttgaggcactcatggaatggctaaagacaagaccaatcctgtcac

SEQ ID NO: 57977 - DNA, 60 bp, Artificial
  Synthetic oligonucleotide
gttgcatttaacccaggggacatgctgggagcagatgtacactccaggaggggaagtgag

SEQ ID NO: 57978 - DNA, 60 bp, Artificial
  Synthetic oligonucleotide
aggaagatctcacttaaggaatgacaccgatgtggtaaactttgtgagcatggaattttc

SEQ ID NO: 57979 - DNA, 60 bp, Artificial
  Synthetic oligonucleotide
ggatccaaatcatgaaggagagggaataccactatatgatgcaatcaagtgtatgagaac

SEQ ID NO: 57980 - DNA, 60 bp, Artificial
  Synthetic oligonucleotide
cggcttcatcataaaaggaagatctcacttaaggaatgacaccgatgtggtaaactttgt

SEQ ID NO: 57981 - DNA, 60 bp, Artificial
  Synthetic oligonucleotide
accaatttgtatggcttcatcataaaaggaagatctcacttaaggaatgacaccgatgtg

SEQ ID NO: 57982 - DNA, 60 bp, Artificial
  Synthetic oligonucleotide
agaaattacttcacagctgaggtgtcccattgcagagccacagaatatataatgaagggg

SEQ ID NO: 57983 - DNA, 60 bp, Artificial
  Synthetic oligonucleotide
agagattacttcacagctgaggtgtcccattgcagagccacagaatatataatgaagggg

SEQ ID NO: 57984 - DNA, 60 bp, Artificial
  Synthetic oligonucleotide
aagagattacttcacagctgaggtgtcccattgcagagccacagaatatataatgaaggg

SEQ ID NO: 57985 - DNA, 60 bp, Artificial
  Synthetic oligonucleotide
aagaaattacttcacagctgaggtgtcccattgcagagccacagaatatataatgaaggg

SEQ ID NO: 57986 - DNA, 60 bp, Artificial
  Synthetic oligonucleotide
cattttcaagttggatccagaatgagttcaacaaggcatgcgagctgaccgattcaatct

SEQ ID NO: 57987 - DNA, 60 bp, Artificial
  Synthetic oligonucleotide
cggcttcatcgtaaaaggaagatctcacttaaggaatgacaccgatgtggtaaactttgt

SEQ ID NO: 57988 - DNA, 60 bp, Artificial
  Synthetic oligonucleotide
gttcctgccagatttgtatgattacaaggagaatagattcatcgagattggagtgacaag

SEQ ID NO: 57989 - DNA, 60 bp, Artificial
  Synthetic oligonucleotide
gccagatctgtatgattacaaggagaatagattcatcgagattggagtgacaaggaggga

SEQ ID NO: 57990 - DNA, 60 bp, Artificial
  Synthetic oligonucleotide
gccagatctgtatgattacaaagagaatagattcatcgagattggagtgacaaggaggga

SEQ ID NO: 57991 - DNA, 60 bp, Artificial
  Synthetic oligonucleotide
gccagacctgtatgattacaaagagaatagattcatcgagattggagtgacaaggaggga

SEQ ID NO: 57992 - DNA, 60 bp, Artificial
  Synthetic oligonucleotide
atttgcagcaatatgcacccacttggaagtatgcttcatgtattcagattttcatttcat

SEQ ID NO: 57993 - DNA, 56 bp, Artificial
  Synthetic oligonucleotide
caatatgcactcacttggaagtatgcttcatgtattcagattttcatttcatcaat

SEQ ID NO: 57994 - DNA, 60 bp, Artificial
  Synthetic oligonucleotide
cacaaatgggagaagtactgtgttcttgagataggagatatgcttctaaggagtgcaata

SEQ ID NO: 57995 - DNA, 60 bp, Artificial
  Synthetic oligonucleotide
tgcttctaaggagtgcaataggccaagtgtcaaggcccatgttcttgtacgtaaggacaa

SEQ ID NO: 57996 - DNA, 60 bp, Artificial
  Synthetic oligonucleotide
tggagttttccctcactgacccaagacttgagccacacaaatgggagaagtactgtgtcc

SEQ ID NO: 57997 - DNA, 60 bp, Artificial
  Synthetic oligonucleotide
cctcactgacccaagacttgagccacacaaatgggagaagtactgtgttcttgagatagg

SEQ ID NO: 57998 - DNA, 60 bp, Artificial
  Synthetic oligonucleotide
attgaggatccaaatcatgaaggagagggaataccactatatgatgcaatcaagtgtatg

SEQ ID NO: 57999 - DNA, 60 bp, Artificial
  Synthetic oligonucleotide
gcatggagttttccctcactgacccaagacttgagccacacaaatgggagaagtactgtg

SEQ ID NO: 58000 - DNA, 60 bp, Artificial
  Synthetic oligonucleotide
ggcttcatcgtaaaaggaagatctcacttaaggaatgacaccgatgtggtaaactttgtg

SEQ ID NO: 58001 - DNA, 60 bp, Artificial
  Synthetic oligonucleotide
cggtctgaaaagagggccttctacggaaggagtgccggagtctatgagggaagaatatcg

SEQ ID NO: 58002 - DNA, 60 bp, Artificial
  Synthetic oligonucleotide
gtctctaagaggaagaggcagcactcttggtctggacatcgaaacagccactcgtgccgg

SEQ ID NO: 58003 - DNA, 60 bp, Artificial
  Synthetic oligonucleotide
tgcttgaagtggaacaagagataaggactttctcgtttcagcttatttaatgataaaaaa

SEQ ID NO: 58004 - DNA, 60 bp, Artificial
  Synthetic oligonucleotide
tggtaatgaaacggaaaagggactctagcatacttactgacagccagacagcgaccaaaa

SEQ ID NO: 58005 - DNA, 60 bp, Artificial
  Synthetic oligonucleotide
agcaaaagcagggtagataatcactcactgagtgacatcaaagtcatggcgtcccaaggc

SEQ ID NO: 58006 - DNA, 60 bp, Artificial
  Synthetic oligonucleotide
agcaaaagcagggtagataatcactcactgagtgacatcaaagtcatggcgtcccagggc

SEQ ID NO: 58007 - DNA, 60 bp, Artificial
  Synthetic oligonucleotide
gcaaaagcagggtagataatcactcactgagtgacatcaaagtcatggcgtcccagggca

SEQ ID NO: 58008 - DNA, 60 bp, Artificial
  Synthetic oligonucleotide
gaagctcatggcccaaccacaccgtaaccggagtatcagcatcatgctcccataatgggg

SEQ ID NO: 58009 - DNA, 60 bp, Artificial
  Synthetic oligonucleotide
ggaatcatggtcctacattgtagaaacaccaaatcctgagaatggaacatgttacccagg

SEQ ID NO: 58010 - DNA, 60 bp, Artificial
  Synthetic oligonucleotide
aaaatgaaaggactttggatttccatgactccaacgtgaagaatctgtatgagaaagtaa

SEQ ID NO: 58011 - DNA, 60 bp, Artificial
  Synthetic oligonucleotide
gagaaagtaaaaagccaattaaagaataatgccaaagaaataggaaacgggtgttttgaa

SEQ ID NO: 58012 - DNA, 60 bp, Artificial
  Synthetic oligonucleotide
tgggggcaatcagcttctggatgtgttccaatgggtctttgcagtgtagaatatgcatct

SEQ ID NO: 58013 - DNA, 60 bp, Artificial
  Synthetic oligonucleotide
tatgtctactaaaaggaatagccccactacaattgggtaattgcagcgttgccggatgga

SEQ ID NO: 58014 - DNA, 60 bp, Artificial
  Synthetic oligonucleotide
acgcagacacaatatgtataggctaccatgccaacaactcaaccgacactgttgacacag

SEQ ID NO: 58015 - DNA, 60 bp, Artificial
  Synthetic oligonucleotide
catcagaatgagcaaggatctggctatgccgcagatcaaaaaagcacacaaaatgccatt

SEQ ID NO: 58016 - DNA, 60 bp, Artificial
  Synthetic oligonucleotide
acatcccatccattcaatccagaggtttgtttggggccattgccggtttcattgaagggg

SEQ ID NO: 58017 - DNA, 60 bp, Artificial
  Synthetic oligonucleotide
ggaagaatcaactactactggactctgctggaacccggggacacaataatatttgaggca

SEQ ID NO: 58018 - DNA, 60 bp, Artificial
  Synthetic oligonucleotide
ccccactacaattgggtaattgcagcgttgccggatggatcttaggaaacccagaatgcg

SEQ ID NO: 58019 - DNA, 60 bp, Artificial
  Synthetic oligonucleotide
tgccggatggatcttaggaaacccagaatgcgaattactgatttccaaggaatcatggtc

SEQ ID NO: 58020 - DNA, 60 bp, Artificial
  Synthetic oligonucleotide
acactcaattcacagctgtgggcaaagaattcaacaaattggagagaaggatggaaaact

SEQ ID NO: 58021 - DNA, 60 bp, Artificial
  Synthetic oligonucleotide
taccatgccaacaactcaaccgacactgttgacacagtacttgagaagaatgtgacagtg

SEQ ID NO: 58022 - DNA, 60 bp, Artificial
  Synthetic oligonucleotide
cctacttgaggacagtcacaatggaaaactatgtctactaaaaggaatagccccactaca

SEQ ID NO: 58023 - DNA, 60 bp, Artificial
  Synthetic oligonucleotide
tatgctgcagatcaaaaaagcacacaaaatgccattgacgggattacaaacaaggtgaat

SEQ ID NO: 58024 - DNA, 60 bp, Artificial
  Synthetic oligonucleotide
tggtagatgggtggtatggttatcatcatcagaatgagcaaggatctggctatgctgcag

SEQ ID NO: 58025 - DNA, 60 bp, Artificial
  Synthetic oligonucleotide
ggggtggactggaatggtggatggttggtatggttatcatcatcagaatgagcaaggatc

SEQ ID NO: 58026 - DNA, 60 bp, Artificial
  Synthetic oligonucleotide
gtttggagccattgccggtttcattgaaggggggtggactggaatggtagatgggtggta

SEQ ID NO: 58027 - DNA, 60 bp, Artificial
  Synthetic oligonucleotide
tgccggtttcattgaaggggggtggactggaatggtagatgggtggtatggttatcatca

SEQ ID NO: 58028 - DNA, 60 bp, Artificial
  Synthetic oligonucleotide
tcattgaaggggggtggactggaatggtagatggttggtatggttatcatcatcagaatg

SEQ ID NO: 58029 - DNA, 60 bp, Artificial
  Synthetic oligonucleotide
cctggaacctggtactttcgatcttggggggctatatgaagcaattgaggagtgcctgat

SEQ ID NO: 58030 - DNA, 60 bp, Artificial
  Synthetic oligonucleotide
aaagacaggactgctggtttcagatggaggaccaaatctatacaatatccggaacctcca

SEQ ID NO: 58031 - DNA, 60 bp, Artificial
  Synthetic oligonucleotide
tagcgctcagttattctgctggtgcacttgccagttgtatgggcctcatatacaacagaa

SEQ ID NO: 58032 - DNA, 60 bp, Artificial
  Synthetic oligonucleotide
ccttgaagaatcccacccagggatctttgaaaactcgtgtcttgaaacgatggaagttgt

SEQ ID NO: 58033 - DNA, 60 bp, Artificial
  Synthetic oligonucleotide
gtatcaaaagtgctgcaatctattcgagaaattcttccctagcagttcatacaggagacc

SEQ ID NO: 58034 - DNA, 60 bp, Artificial
  Synthetic oligonucleotide
agaaattcttccctagcagttcatacaggagaccggttgggatttccagcatggtggagg

SEQ ID NO: 58035 - DNA, 60 bp, Artificial
  Synthetic oligonucleotide
agtgctgcaatctattcgagaaattcttccctagcagttcatacaggagaccagttggaa

SEQ ID NO: 58036 - DNA, 60 bp, Artificial
  Synthetic oligonucleotide
cccgaattgatgcacggattgattttgaatctggaaggataaagaaagaggaattcgctg

SEQ ID NO: 58037 - DNA, 60 bp, Artificial
  Synthetic oligonucleotide
gatgcacggattgattttgaatctggaaggataaagaaagaggaattcgctgagatcatg

SEQ ID NO: 58038 - DNA, 60 bp, Artificial
  Synthetic oligonucleotide
ccagttggaatttccagcatggtggaggccatggtatctagggccaggattgatgcacga

SEQ ID NO: 58039 - DNA, 60 bp, Artificial
  Synthetic oligonucleotide
ccagttggaatttccagcatggtggaggccatggtatctagggccaggattgatgcacgg

SEQ ID NO: 58040 - DNA, 60 bp, Artificial
  Synthetic oligonucleotide
catggaaaagaacatcatactgaaagcgaacttcagtgtgatttttgatcggttggagac

SEQ ID NO: 58041 - DNA, 60 bp, Artificial
  Synthetic oligonucleotide
gaccaggcaatcatggataagaacatcatactgaaagcgaacttcagtgtgatcttcgaa

SEQ ID NO: 58042 - DNA, 60 bp, Artificial
  Synthetic oligonucleotide
gcaggcaaaccatttgaatggatgtcaatccgaccttacttttcttgaaagtgccagcac

SEQ ID NO: 58043 - DNA, 60 bp, Artificial
  Synthetic oligonucleotide
aaagcaggcaaaccatttgaatggatgtcaatccgaccttacttttcttaaaagtgccag

SEQ ID NO: 58044 - DNA, 60 bp, Artificial
  Synthetic oligonucleotide
gaaagcaggcaaaccatttgaatggatgtcaatccgaccttacttttcttgaaagtgcca

SEQ ID NO: 58045 - DNA, 60 bp, Artificial
  Synthetic oligonucleotide
gaaagcaggcaaaccatttgaatggatgtcaatccgaccttacttttcttaaaagtgcca

SEQ ID NO: 58046 - DNA, 60 bp, Artificial
  Synthetic oligonucleotide
aattcaagctggagttgacaggttttatcgaacctgtaagctgctcggaattaatatgag

SEQ ID NO: 58047 - DNA, 58 bp, Artificial
  Synthetic oligonucleotide
tagttttggggtatctggggtcaatgagtctgcagacatgagtattggagtcactgtc

SEQ ID NO: 58048 - DNA, 60 bp, Artificial
  Synthetic oligonucleotide
caccgatgtggtaaactttgtgagcatggagttttccctcactgacccaagacttgagcc

SEQ ID NO: 58049 - DNA, 60 bp, Artificial
  Synthetic oligonucleotide
caccgatcttgaggcactcatggaatggttaaagacaagaccaatcctgtcacctctgac

SEQ ID NO: 58050 - DNA, 60 bp, Artificial
  Synthetic oligonucleotide
accccccttacagccatgggacaggaacagggtacaccatggatacagtcaacaggacac

SEQ ID NO: 58051 - DNA, 60 bp, Artificial
  Synthetic oligonucleotide
ctatcccaagtattcagaagagtccaaattgaatcgggaagaaatagacggagtgaaact

SEQ ID NO: 58052 - DNA, 60 bp, Artificial
  Synthetic oligonucleotide
cggcccaagcaatgggcaagcctcgtacaaaatattcaaaatggagaaagggaagattat

SEQ ID NO: 58053 - DNA, 60 bp, Artificial
  Synthetic oligonucleotide
tgtataaacggttcgtgttttactataatgactgacggcccaagcaatgggcaagcctcg

SEQ ID NO: 58054 - DNA, 60 bp, Artificial
  Synthetic oligonucleotide
cgtcaaggacaggagtccttatagaactctaatgagctgccccatcggtgaagctccatc

SEQ ID NO: 58055 - DNA, 60 bp, Artificial
  Synthetic oligonucleotide
gagtctgaatgtgtttgtataaacggttcgtgttttactataatgactgacggcccaagc

SEQ ID NO: 58056 - DNA, 60 bp, Artificial
  Synthetic oligonucleotide
gacaggagtccttatagaactctaatgagctgccccatcggtgaagctccatctccgtac

SEQ ID NO: 58057 - DNA, 60 bp, Artificial
  Synthetic oligonucleotide
tatatacagcaaagacaatagcataaggattggttccagaggagacatttttgtcatgag

SEQ ID NO: 58058 - DNA, 60 bp, Artificial
  Synthetic oligonucleotide
gccggcaattcctctctttgcccaatcagtgggtgggctatatacagcaaagacaatagc

SEQ ID NO: 58059 - DNA, 54 bp, Artificial
  Synthetic oligonucleotide
ttgtcatgagagagccattcatttcatgctctcacttggaatgcagaacctttt

SEQ ID NO: 58060 - DNA, 60 bp, Artificial
  Synthetic oligonucleotide
cagaatcttgattatcaaatagggtacatatgcagtggggttttcggtgataatccgcgt

SEQ ID NO: 58061 - DNA, 60 bp, Artificial
  Synthetic oligonucleotide
caaatagggtacatatgcagtggggttttcggtgataatccgcgttctaatgatgggaaa

SEQ ID NO: 58062 - DNA, 60 bp, Artificial
  Synthetic oligonucleotide
gcgtgaacagtggcactgcaagctggtcatggccagacggagctgatctgccattcacca

SEQ ID NO: 58063 - DNA, 60 bp, Artificial
  Synthetic oligonucleotide
tgtggcgtgaacagtggcactgcaagctggtcatggccagacggagctgatctgccattc

SEQ ID NO: 58064 - DNA, 60 bp, Artificial
  Synthetic oligonucleotide
caacatcctgaattaacaggaatgaactgcataaggccttgtttctgggtagagttaatc

SEQ ID NO: 58065 - DNA, 60 bp, Artificial
  Synthetic oligonucleotide
gcattaactgattggtcgggatacagtggaagttttgtccaacatcctgaattaacagga

SEQ ID NO: 58066 - DNA, 60 bp, Artificial
  Synthetic oligonucleotide
aagatattgtagcattaactgattggtcgggatacagtggaagttttgtccaacatcctg

SEQ ID NO: 58067 - DNA, 60 bp, Artificial
  Synthetic oligonucleotide
ggatcctaatggatggacagaaactgatagtagtttctctatgaagcaagatattgtagc

SEQ ID NO: 58068 - DNA, 60 bp, Artificial
  Synthetic oligonucleotide
ataaccattgggacaatctgtctaatagttggaataattagtctattattgcagatagga

SEQ ID NO: 58069 - DNA, 60 bp, Artificial
  Synthetic oligonucleotide
gcagataggaaatataatctcgttatggataagtcattcaattcagactggagaaaaaag

SEQ ID NO: 58070 - DNA, 60 bp, Artificial
  Synthetic oligonucleotide
cttatgtaaacattagcaatatcaatattgctgctggacagggtgtgactccaataatac

SEQ ID NO: 58071 - DNA, 60 bp, Artificial
  Synthetic oligonucleotide
tggataggaagaactaaaagtatcaactctagaagtggttttgagatgatttgggatcct

SEQ ID NO: 58072 - DNA, 60 bp, Artificial
  Synthetic oligonucleotide
ttgggatcctaatggatggacagaaactgatagtagtttctctatgaagcaagatattgt

SEQ ID NO: 58073 - DNA, 60 bp, Artificial
  Synthetic oligonucleotide
taatccgcgttctaatgatgggaaaggcaattgtggcccagtactttctaatggagcaaa

SEQ ID NO: 58074 - DNA, 60 bp, Artificial
  Synthetic oligonucleotide
tgatgggaaaggcaattgtggcccagtactttctaatggagcaaatggagtgaaggggtt

SEQ ID NO: 58075 - DNA, 60 bp, Artificial
  Synthetic oligonucleotide
gcaatatcaatattgctgctggacagggtgtgactccaataatactagccggcaattcct

SEQ ID NO: 58076 - DNA, 60 bp, Artificial
  Synthetic oligonucleotide
ccaataatactagccggcaattcctctctttgcccaatcagtgggtgggctatatacagc

SEQ ID NO: 58077 - DNA, 60 bp, Artificial
  Synthetic oligonucleotide
ctgttaccctgatacaggcaaagtggtgtgtgtgtgccgagacaattggcatgcttcgaa

SEQ ID NO: 58078 - DNA, 60 bp, Artificial
  Synthetic oligonucleotide
accctgatacaggcaaagtggtgtgtgtgtgccgagacaattggcatgcttcgaatcgac

SEQ ID NO: 58079 - DNA, 60 bp, Artificial
  Synthetic oligonucleotide
gagggatgagcagtcaattgctgaggcaataatcgtggccatggtattttcacaagagga

SEQ ID NO: 58080 - DNA, 60 bp, Artificial
  Synthetic oligonucleotide
aagtgcaataggccaagtgtcaaggcccatgttcttgtatgtaaggacaaatggaacctc

SEQ ID NO: 58081 - DNA, 60 bp, Artificial
  Synthetic oligonucleotide
gtgcaataggccaagtgtcaaggcccatgttcttgtatgtaaggacaaatggaacctcaa

SEQ ID NO: 58082 - DNA, 60 bp, Artificial
  Synthetic oligonucleotide
ctgtaggttggtcttggccagacggtgctgagttgccattcaccattgacaagtagtttg

SEQ ID NO: 58083 - DNA, 60 bp, Artificial
  Synthetic oligonucleotide
ttcacgctcaccgtgcccagtgagcgaggactgcagcgtagacgctttgtccagaatgcc

SEQ ID NO: 58084 - DNA, 60 bp, Artificial
  Synthetic oligonucleotide
aaaatgcaattggggtcctcatcggagggcttgaatggaatggtaacacagttcgagtct

SEQ ID NO: 58085 - DNA, 60 bp, Artificial
  Synthetic oligonucleotide
gctcatgcctaagcaaaaggtgacaggccttctttgtgtgcgaatggaccaggcgatcat

SEQ ID NO: 58086 - DNA, 60 bp, Artificial
  Synthetic oligonucleotide
gcggtttgcagactatggactgggtgatgccccattccttgatcggctccgccgagatca

SEQ ID NO: 58087 - DNA, 60 bp, Artificial
  Synthetic oligonucleotide
atggattccaacactgtgtcaagctttcaggtagactgtttcctttggcatatccgcaag

SEQ ID NO: 58088 - DNA, 60 bp, Artificial
  Synthetic oligonucleotide
gaagtgaggcataaattaaagacgacagagaatagttttgagcaaataacatttatgcaa

SEQ ID NO: 58089 - DNA, 60 bp, Artificial
  Synthetic oligonucleotide
gaagtgaggcataaattgaaaacgacagagaatagttttgagcaaataacatttatgcaa

SEQ ID NO: 58090 - DNA, 60 bp, Artificial
  Synthetic oligonucleotide
ggcataaattgaagacgacagagaatagttttgagcaaataacatttatgcaagcattac

SEQ ID NO: 58091 - DNA, 60 bp, Artificial
  Synthetic oligonucleotide
caaatgtaccagaagtgctgcaatctattcgagaaattcttccctagcagttcatacagg

SEQ ID NO: 58092 - DNA, 60 bp, Artificial
  Synthetic oligonucleotide
actggtgggatggactccaatcttctgatgacttcgccctcatagtgaatgcacctaatc

SEQ ID NO: 58093 - DNA, 60 bp, Artificial
  Synthetic oligonucleotide
atactggtgggatggactccaatcttctgatgacttcgccctcatagtgaatgcacctaa

SEQ ID NO: 58094 - DNA, 60 bp, Artificial
  Synthetic oligonucleotide
gtaaaggggttttcatttaaatacggtaatggtgtttggataggaagaactaaaagcact

SEQ ID NO: 58095 - DNA, 60 bp, Artificial
  Synthetic oligonucleotide
ctgagtccatgagggaagaatatcaacaggaacagcagagtgctgtggatgttgacgatg

SEQ ID NO: 58096 - DNA, 60 bp, Artificial
  Synthetic oligonucleotide
ttacaactattgcttgaagtggaacaagagataagaaccttctcgtttcagcttatttaa

SEQ ID NO: 58097 - DNA, 51 bp, Artificial
  Synthetic oligonucleotide
caactattgcttgaagtggaacaagagataagaaccttctcgtttcagctt

SEQ ID NO: 58098 - DNA, 60 bp, Artificial
  Synthetic oligonucleotide
agtgcctgattaatgatccctgggttttgcttaatgcatcttggttcaactccttcctca

SEQ ID NO: 58099 - DNA, 60 bp, Artificial
  Synthetic oligonucleotide
agtgcctgattaatgatccctgggttttgcttaatgcatcttggttcaactccttcctta

SEQ ID NO: 58100 - DNA, 60 bp, Artificial
  Synthetic oligonucleotide
ccgggccagacaacggggcagtggctgtattgaaatacaatggcataataacagacacta

SEQ ID NO: 58101 - DNA, 60 bp, Artificial
  Synthetic oligonucleotide
ccaagctaagaatggcaacaggactaagaaatgtcccatccattcaatccagagggctat

SEQ ID NO: 58102 - DNA, 60 bp, Artificial
  Synthetic oligonucleotide
caacaggactaagaaatgtcccatccattcaatccagagggctatttggagcaattgccg

SEQ ID NO: 58103 - DNA, 60 bp, Artificial
  Synthetic oligonucleotide
agaaatgtcccatccattcaatccagagggctatttggagcaattgctggattcattgag

SEQ ID NO: 58104 - DNA, 60 bp, Artificial
  Synthetic oligonucleotide
aaaaagaagtcctacataaataggacaggaacatttgaattcacaagctttttctatcgc

SEQ ID NO: 58105 - DNA, 60 bp, Artificial
  Synthetic oligonucleotide
ggactggttcatgctcatgcccaagcagaaagtggctggccctctttgtgtcaaaatgga

SEQ ID NO: 58106 - DNA, 60 bp, Artificial
  Synthetic oligonucleotide
gtcaagggactggttcatgctcatgcccaagcagaaagtggctggccctctttgtgtcag

SEQ ID NO: 58107 - DNA, 60 bp, Artificial
  Synthetic oligonucleotide
ccgatcttgaggctctcatggagtggctaaagacaagaccaatcctgtcacctctgacta

SEQ ID NO: 58108 - DNA, 57 bp, Artificial
  Synthetic oligonucleotide
agaatgccactgaaatcagagcatctgttgggagaatggttggtggaatcgggagat

SEQ ID NO: 58109 - DNA, 57 bp, Artificial
  Synthetic oligonucleotide
acaactgtccaccagaggagttcagattgcttcaaatgagaacatggagacaatgga

SEQ ID NO: 58110 - DNA, 60 bp, Artificial
  Synthetic oligonucleotide
atattgaaagatgagtcttctaaccgaggtcgaaacgtacgttctctctatcatcccgtc

SEQ ID NO: 58111 - DNA, 60 bp, Artificial
  Synthetic oligonucleotide
atattgaaagatgagtcttctaaccgaggtcgaaacgtacgttctctctatcgttccgtc

SEQ ID NO: 58112 - DNA, 60 bp, Artificial
  Synthetic oligonucleotide
atattgaaagatgagtcttctaaccgaggtcgaaacgtacgttctctctattgtcccgtc

SEQ ID NO: 58113 - DNA, 60 bp, Artificial
  Synthetic oligonucleotide
ggataacaaagaaagggacttcatatccaaaactcagcaaatcatacacgaacaataagg

SEQ ID NO: 58114 - DNA, 60 bp, Artificial
  Synthetic oligonucleotide
gtacatcctatcactattggagaatgtcccaaatacgtcaaaagcaccaagctaagaatg

SEQ ID NO: 58115 - DNA, 60 bp, Artificial
  Synthetic oligonucleotide
tggaagagcatcccagtgctgggaaggatcctaagaagactggaggtccaatctacagga

SEQ ID NO: 58116 - DNA, 60 bp, Artificial
  Synthetic oligonucleotide
tacctagctgacatgacccttgaggaaatgtcaagagattggttcatgctcatacctagg

SEQ ID NO: 58117 - DNA, 60 bp, Artificial
  Synthetic oligonucleotide
cctagctgacatgacccttgaggaaatgtcaagagattggttcatgctcatacctaggca

SEQ ID NO: 58118 - DNA, 60 bp, Artificial
  Synthetic oligonucleotide
cccagtgctgggaaagaccctaagaagactggaggtccaatctacaggaggagagatgga

SEQ ID NO: 58119 - DNA, 60 bp, Artificial
  Synthetic oligonucleotide
tctcattttgaggggatcagtggctcataagtcctgcctacctgcttgtgtgtacggact

SEQ ID NO: 58120 - DNA, 60 bp, Artificial
  Synthetic oligonucleotide
aaaagtgctgcaatctattcgagaaattcttccctagcagctcatacaggagaccggttg

SEQ ID NO: 58121 - DNA, 60 bp, Artificial
  Synthetic oligonucleotide
agcaattgggtcagaaatttgaggaaataaggtggctgattgaagaagtgcggcacaaat

SEQ ID NO: 58122 - DNA, 60 bp, Artificial
  Synthetic oligonucleotide
ttggcatatccgcaaacggtttgcggacaatggattgggtgatgccccattccttgatcg

SEQ ID NO: 58123 - DNA, 60 bp, Artificial
  Synthetic oligonucleotide
ggtcagaaatttgaggaaataaggtggctgattgaagaagtgcggcacaaattgaagatg

SEQ ID NO: 58124 - DNA, 56 bp, Artificial
  Synthetic oligonucleotide
tgggacagaaatttgaggaaataaggtggctgattgaagaagtgcggcagaaactg

SEQ ID NO: 58125 - DNA, 57 bp, Artificial
  Synthetic oligonucleotide
atacttactgacagccagacagcgaccaaaagaattcggatggccatcaattaattt

SEQ ID NO: 58126 - DNA, 60 bp, Artificial
  Synthetic oligonucleotide
tttgaagaaataagatggctgattgaagaagtgcgacatagactaaagattacagagaat

SEQ ID NO: 58127 - DNA, 60 bp, Artificial
  Synthetic oligonucleotide
tacagaaaacagttttgaacaaataacatttatgcaagccttacaactattgcttgaagt

SEQ ID NO: 58128 - DNA, 60 bp, Artificial
  Synthetic oligonucleotide
gaaagagcacacagaatgccattgacgggatcactaacaaagtaaactctgttattgaaa

SEQ ID NO: 58129 - DNA, 60 bp, Artificial
  Synthetic oligonucleotide
agaatgtaacagtaacacactctgttaaccttctagaagacagacataacggaaaactat

SEQ ID NO: 58130 - DNA, 60 bp, Artificial
  Synthetic oligonucleotide
tccagacagcagcacaacgagcaatgatggaccaagtgcgggaaagccggaatcctggga

SEQ ID NO: 58131 - DNA, 60 bp, Artificial
  Synthetic oligonucleotide
caaacagcagcacaacgagcaatgatggaccaagtgcgagaaagcaggaatcctgggaat

SEQ ID NO: 58132 - DNA, 60 bp, Artificial
  Synthetic oligonucleotide
cgtaaacagtgctgtggtaatgccagctcatggtccagccaagagcatggaatatgatgc

SEQ ID NO: 58133 - DNA, 60 bp, Artificial
  Synthetic oligonucleotide
aattgagtccgtaaacagtgctgtggtaatgccagctcatggtccagccaagagcatgga

SEQ ID NO: 58134 - DNA, 60 bp, Artificial
  Synthetic oligonucleotide
ggaaattgagtccgtaaacagtgctgtggtaatgccagctcatggtccagccaagagcat

SEQ ID NO: 58135 - DNA, 60 bp, Artificial
  Synthetic oligonucleotide
gtccgtaaacagtgctgtggtaatgccagctcatggtccagccaagagcatggaatatga

SEQ ID NO: 58136 - DNA, 60 bp, Artificial
  Synthetic oligonucleotide
tgagtccgtaaacagtgctgtgataatgccagctcatggtccagccaagagcatggaata

SEQ ID NO: 58137 - DNA, 60 bp, Artificial
  Synthetic oligonucleotide
ccaaagcttgattattgctgctaggaacatagtgagaagagcaacagtatcagcagaccc

SEQ ID NO: 58138 - DNA, 60 bp, Artificial
  Synthetic oligonucleotide
catccacctaccagtactgaccaacaaagcctctaccagaatgcagatgcctatgttttt

SEQ ID NO: 58139 - DNA, 60 bp, Artificial
  Synthetic oligonucleotide
caagccagaaatagcagcaagacccaaggtgagaggtcaagcagggaggatgaactatta

SEQ ID NO: 58140 - DNA, 60 bp, Artificial
  Synthetic oligonucleotide
tgaaagatgagtcttctaaccgaggtcgaaacgtacgttctctctatcatcccttcaggc

SEQ ID NO: 58141 - DNA, 60 bp, Artificial
  Synthetic oligonucleotide
tttaaagatgagtcttctaaccgaggtcgaaacgtacgttctctctatcgtcccgtcagg

SEQ ID NO: 58142 - DNA, 60 bp, Artificial
  Synthetic oligonucleotide
tgaaagatgagtcttctaaccgaggtcgaaacgtacgttctctctatcatcccatcaggc

SEQ ID NO: 58143 - DNA, 60 bp, Artificial
  Synthetic oligonucleotide
aagatgagtcttctaaccgaggtcgaaacgtacgttctctctatcatcccttcaggcccc

SEQ ID NO: 58144 - DNA, 60 bp, Artificial
  Synthetic oligonucleotide
cagcttctggatgtgttccaatgggtctttgcagtgtagaatatgcatctgagaccagaa

SEQ ID NO: 58145 - DNA, 60 bp, Artificial
  Synthetic oligonucleotide
acaggactaaggaacatcccatccattcaatccagaggtttgtttggagccattgccggt

SEQ ID NO: 58146 - DNA, 60 bp, Artificial
  Synthetic oligonucleotide
aggatggttacaggactaaggaacatcccatccattcaatccagaggtttgtttggagcc

SEQ ID NO: 58147 - DNA, 60 bp, Artificial
  Synthetic oligonucleotide
aaattaaggatggttacaggactaaggaacatcccatccattcaatccagaggtttgttt

SEQ ID NO: 58148 - DNA, 60 bp, Artificial
  Synthetic oligonucleotide
caggagtacaaaattaaggatggttacaggactaaggaacatcccatccattcaatccag

SEQ ID NO: 58149 - DNA, 60 bp, Artificial
  Synthetic oligonucleotide
ccaattgaagaataatgccaaagaaataggaaacgggtgttttgaattctatcacaagtg

SEQ ID NO: 58150 - DNA, 61 bp, Artificial
  Synthetic oligonucleotide
gccaattaaagaataatgccaaagaaataggaaacgggtgttttgaattctatcacaagtg

SEQ ID NO: 58151 - DNA, 60 bp, Artificial
  Synthetic oligonucleotide
tatgctgcagatcaaaaaagcacacaaaatgccattaatgggattacaaacaaggtgaat

SEQ ID NO: 58152 - DNA, 60 bp, Artificial
  Synthetic oligonucleotide
ggactaaggaacatcccatccattcaatccagaggtttgtttggagccattgccggtttc

SEQ ID NO: 58153 - DNA, 60 bp, Artificial
  Synthetic oligonucleotide
gatctactcaactgtcgctagttccctggttcttttggtctccctgggggcaatcagctt

SEQ ID NO: 58154 - DNA, 60 bp, Artificial
  Synthetic oligonucleotide
ctatcacaagtgtaacaatgaatgcatggaaagtgtgaaaaatggaacttatgactatcc

SEQ ID NO: 58155 - DNA, 56 bp, Artificial
  Synthetic oligonucleotide
aactcaaccgacactgttgacacagtacttgagaagaatgtgacagtgacacactc

SEQ ID NO: 58156 - DNA, 57 bp, Artificial
  Synthetic oligonucleotide
caactcaaccgacactgttgacacagtacttgagaagaatgtgacagtgacacactc

SEQ ID NO: 58157 - DNA, 60 bp, Artificial
  Synthetic oligonucleotide
ttacagctacatatgcagacacaatatgtataggctaccatgccaacaactcaaccgaca

SEQ ID NO: 58158 - DNA, 58 bp, Artificial
  Synthetic oligonucleotide
acaactcaaccgacactgttgacacagtacttgagaagaatgtgacagtgacacactc

SEQ ID NO: 58159 - DNA, 60 bp, Artificial
  Synthetic oligonucleotide
acaactcaaccgacactgttgacacagtacttgagaagaatgtgacagtgacacactctg

SEQ ID NO: 58160 - DNA, 58 bp, Artificial
  Synthetic oligonucleotide
acaactcaacagacactgttgacacagtacttgagaagaatgtgacagtgacacactc

SEQ ID NO: 58161 - DNA, 60 bp, Artificial
  Synthetic oligonucleotide
tctgctggaacccggggatacaataatatttgaggcaaatggaaatctaatagcgccacg

SEQ ID NO: 58162 - DNA, 60 bp, Artificial
  Synthetic oligonucleotide
gacacaataatatttgaggcaaatggaaatctaatagcgccatggtatgctttcgcaatg

SEQ ID NO: 58163 - DNA, 60 bp, Artificial
  Synthetic oligonucleotide
tgtccaaagtatgtcaggagtacaaaattaaggatggttacaggactaaggaacatccca

SEQ ID NO: 58164 - DNA, 60 bp, Artificial
  Synthetic oligonucleotide
gactctgctggaacccggggagacaataatatttgaggcaaatggaaatctaatagcgcc

SEQ ID NO: 58165 - DNA, 60 bp, Artificial
  Synthetic oligonucleotide
gacactgctggaacccggggacacaataatatttgaggcaaatggaaatctaatagcgcc

SEQ ID NO: 58166 - DNA, 60 bp, Artificial
  Synthetic oligonucleotide
caggagtacaaaattaaggatggttacaggactaaggaacgtcccatccattcaatccag

SEQ ID NO: 58167 - DNA, 53 bp, Artificial
  Synthetic oligonucleotide
ttactataatgactgatggaccaagtaatggccaggcctcatacaaaattttc

SEQ ID NO: 58168 - DNA, 51 bp, Artificial
  Synthetic oligonucleotide
actataatgactgatggaccaagtaatggccaggcctcatacaaaattttc

SEQ ID NO: 58169 - DNA, 60 bp, Artificial
  Synthetic oligonucleotide
catggagagcgtcagaaatgggacttatgattacccaaagtattcaaaagaatcaaaact

SEQ ID NO: 58170 - DNA, 53 bp, Artificial
  Synthetic oligonucleotide
ggagagcgtcagaaatgggacttatgattacctaaagtactcagaagaatcaa

SEQ ID NO: 58171 - DNA, 60 bp, Artificial
  Synthetic oligonucleotide
cgcaccggaatggatcccagaatgtgctccctaatgcaaggttcaacacttcccagaaga

SEQ ID NO: 58172 - DNA, 60 bp, Artificial
  Synthetic oligonucleotide
gcttgttcgcaccggaatggatcccagaatgtgctccctaatgcaaggttcaacacttcc

SEQ ID NO: 58173 - DNA, 60 bp, Artificial
  Synthetic oligonucleotide
gaggagcatcccactgctgggaaagatcctaagaaaactggaggacctatatataggaga

SEQ ID NO: 58174 - DNA, 60 bp, Artificial
  Synthetic oligonucleotide
cggaaggttctacatccaaatgtgcactgaactcaaactcagcgattatgagggacggct

SEQ ID NO: 58175 - DNA, 60 bp, Artificial
  Synthetic oligonucleotide
gaagaacaaggattgcatatgaaagaatgtgcaatattctcaaaggaaagtttcagacag

SEQ ID NO: 58176 - DNA, 60 bp, Artificial
  Synthetic oligonucleotide
ctcattttcctggcacggtcagcacttattctaagagggtcagttgcacataagtcttgc

SEQ ID NO: 58177 - DNA, 50 bp, Artificial
  Synthetic oligonucleotide
cttcctttgacatgagtaatgaggggtcttatttcttcggagacaatgca

SEQ ID NO: 58178 - DNA, 50 bp, Artificial
  Synthetic oligonucleotide
cttcgtttgacatgagtaatgaggggtcttatttcttcggagacaatgca

SEQ ID NO: 58179 - DNA, 60 bp, Artificial
  Synthetic oligonucleotide
gaaattctacatccaaatgtgcactgaactcaaactcagtgactatgagggacgactaat

SEQ ID NO: 58180 - DNA, 60 bp, Artificial
  Synthetic oligonucleotide
aatgaccgaaacttctggaggggtgaaaatggacgaaggacaaggattgcatatgaaaga

SEQ ID NO: 58181 - DNA, 60 bp, Artificial
  Synthetic oligonucleotide
cgaaacttctggaggggtgaaaatggacgaaggacaaggattgcatatgaaagaatgtgc

SEQ ID NO: 58182 - DNA, 60 bp, Artificial
  Synthetic oligonucleotide
cgactgatccagaacagcttaacaatagagagaatggtgctctctgcttttgatgagagg

SEQ ID NO: 58183 - DNA, 59 bp, Artificial
  Synthetic oligonucleotide
cgtggtaaactttgtgagcatggagttttccctcactgaccctaggctggaaccacata

SEQ ID NO: 58184 - DNA, 60 bp, Artificial
  Synthetic oligonucleotide
gatgggctatatatagcaaggacaatggtataaggataggttccaagggagatgtatttg

SEQ ID NO: 58185 - DNA, 60 bp, Artificial
  Synthetic oligonucleotide
aagatattgtagcaataactgattggtcaggatatagcggaagttatgttcagcatccag

SEQ ID NO: 58186 - DNA, 60 bp, Artificial
  Synthetic oligonucleotide
cagaaacgaatgggagtgcagatgcaacggttcaagtgatcctcttgttgttgccgcaag

SEQ ID NO: 58187 - DNA, 60 bp, Artificial
  Synthetic oligonucleotide
gtgcctgcacaaatggttcttgctttaccataatgactgatggaccaagtaatggccagg

SEQ ID NO: 58188 - DNA, 60 bp, Artificial
  Synthetic oligonucleotide
aggaagatctcacttaaggaatgacaccgatgtggtaaactttgtgagcatggagttttc

SEQ ID NO: 58189 - DNA, 60 bp, Artificial
  Synthetic oligonucleotide
cacttaaggaatgacaccgatgtggtaaactttgtgagcatggagttttccctcactgac

SEQ ID NO: 58190 - DNA, 60 bp, Artificial
  Synthetic oligonucleotide
cggtctgacagctaatgaatcaggaaggctaatagatttcctcaaggatgtgatggaatc

SEQ ID NO: 58191 - DNA, 60 bp, Artificial
  Synthetic oligonucleotide
tggtttaacggctaatgaatcaggaaggctaatagatttcctcaaggatgtgatggaatc

SEQ ID NO: 58192 - DNA, 60 bp, Artificial
  Synthetic oligonucleotide
cggtttaacggctaatgaatcaggaaggctaatagatttcctcaaggatgtgatggaatc

SEQ ID NO: 58193 - DNA, 60 bp, Artificial
  Synthetic oligonucleotide
caaaccatttgaatggatgtcaatccgactttacttttcttaaaagtgccagcacaaagt

SEQ ID NO: 58194 - DNA, 60 bp, Artificial
  Synthetic oligonucleotide
ggattcaacaaggatttaccagattttggcgatctattcaactgtcgccagctcatcggt

SEQ ID NO: 58195 - DNA, 56 bp, Artificial
  Synthetic oligonucleotide
aaaatccctaaaaggaagaggcagcacccttggtctaaacatcgaaacagctactc

SEQ ID NO: 58196 - DNA, 60 bp, Artificial
  Synthetic oligonucleotide
ggtctaaacatcgaaacagctactcttgttgggaaacaaattatagagtggattctgaaa

SEQ ID NO: 58197 - DNA, 60 bp, Artificial
  Synthetic oligonucleotide
cggttggaatttccagcatggtggaggccatggtgtctagggcccgaattgatgcgcgga

SEQ ID NO: 58198 - DNA, 60 bp, Artificial
  Synthetic oligonucleotide
atggatgtcaatccgactttacttttcttaaaagtgccagcacaaaatgctataagcaca

SEQ ID NO: 58199 - DNA, 60 bp, Artificial
  Synthetic oligonucleotide
agttggaattaatatgagcaaaaagaaatcttacataaataggacaggaacatttgaatt

SEQ ID NO: 58200 - DNA, 60 bp, Artificial
  Synthetic oligonucleotide
gctcagaccgagtgatggtatcacctctagctgtgacatggtggaataggaatgggccaa

SEQ ID NO: 58201 - DNA, 60 bp, Artificial
  Synthetic oligonucleotide
gccaaatcatgagacaactaaaggtgttacagctgcatgctcttactctggagccagcag

SEQ ID NO: 58202 - DNA, 60 bp, Artificial
  Synthetic oligonucleotide
actcatggccaaatcatgagacaactaaaggtgttacagctgcatgctcttactctggag

SEQ ID NO: 58203 - DNA, 60 bp, Artificial
  Synthetic oligonucleotide
gctcatggccaaatcatgagacaactaaaggtgttacagctgcatgctcttactctggag

SEQ ID NO: 58204 - DNA, 60 bp, Artificial
  Synthetic oligonucleotide
aatgagcagggatcaggatatgctgctgatcagaaaagcacacagaatgcgatcgacggg

SEQ ID NO: 58205 - DNA, 60 bp, Artificial
  Synthetic oligonucleotide
catcagaatgagcagggatcaggatatgctgctgatcagaaaagcacacagaatgcgatc

SEQ ID NO: 58206 - DNA, 60 bp, Artificial
  Synthetic oligonucleotide
catcaaaatgagcagggatcaggatatgctgctgatcagaaaagcacacaaaatgcgatc

SEQ ID NO: 58207 - DNA, 60 bp, Artificial
  Synthetic oligonucleotide
attcaatccagagggctatttggagcaattgctggattcattgagggaggatggacaggc

SEQ ID NO: 58208 - DNA, 60 bp, Artificial
  Synthetic oligonucleotide
gcagggatcaggatatgctgctgatcagaaaagcacacagaatgcgatcgacgggatcac

SEQ ID NO: 58209 - DNA, 60 bp, Artificial
  Synthetic oligonucleotide
aatgagcaaggatcaggatatgctgctgatcagaaaagcacacagaatgcgatcgacggg

SEQ ID NO: 58210 - DNA, 60 bp, Artificial
  Synthetic oligonucleotide
cccgaaggcaagctcatggccaaatcatgagacaactaaaggtgttacagctgcatgctc

SEQ ID NO: 58211 - DNA, 60 bp, Artificial
  Synthetic oligonucleotide
ccgaaggcaagctcatggccaaatcatgagacaactaaaggtgttacagccgcatgctct

SEQ ID NO: 58212 - DNA, 60 bp, Artificial
  Synthetic oligonucleotide
ccgaaggcaagctcatggccaaatcatgagacaactaaaggtgttacagctgcctgctct

SEQ ID NO: 58213 - DNA, 60 bp, Artificial
  Synthetic oligonucleotide
ttcccgaaggcaagctcatggccaaatcatgagacaactaaaggtgttacagctgcatgc

SEQ ID NO: 58214 - DNA, 60 bp, Artificial
  Synthetic oligonucleotide
ccgtgactcactcagtgaatttgctcgaagacagccataatgggaaactctgcagcctga

SEQ ID NO: 58215 - DNA, 60 bp, Artificial
  Synthetic oligonucleotide
cccactcagttaatttgctcgaagacagccataatgggaaactctgcagcctgaacggga

SEQ ID NO: 58216 - DNA, 60 bp, Artificial
  Synthetic oligonucleotide
acatacgactatcccaagtattcagaagagtccaaattgaatcgagaagaaatagacggg

SEQ ID NO: 58217 - DNA, 60 bp, Artificial
  Synthetic oligonucleotide
ctatcccaagtattcagaagagtccaaattgaatcgagaagaaatagacggagtgaaact

SEQ ID NO: 58218 - DNA, 60 bp, Artificial
  Synthetic oligonucleotide
gaacggcacatatgactatcccaagtattcagaagagtccaaattgaatcgagaagaaat

SEQ ID NO: 58219 - DNA, 60 bp, Artificial
  Synthetic oligonucleotide
aaacggcacatatgactatcccaagtattcagaagagtccaaattgaatcgagaagaaat

SEQ ID NO: 58220 - DNA, 60 bp, Artificial
  Synthetic oligonucleotide
cagggatcaggatatgctgctgatcagaaaagcacacaaaatgcgatcgacgggatcacg

SEQ ID NO: 58221 - DNA, 60 bp, Artificial
  Synthetic oligonucleotide
gaacggcacatacgactatcccaagtattcagaagagtccaaattgaatcgagaagaaat

SEQ ID NO: 58222 - DNA, 60 bp, Artificial
  Synthetic oligonucleotide
gaacgagcgatgccggatcagatcgggtgatggtatcacctctagctgtgacatggtgga

SEQ ID NO: 58223 - DNA, 60 bp, Artificial
  Synthetic oligonucleotide
gtatcaaaagtgctgcaatctattcgagaaattcttccccagcagttcatacaggagacc

SEQ ID NO: 58224 - DNA, 60 bp, Artificial
  Synthetic oligonucleotide
cacttaagaaatgacactgacgtggtaaattttgtgagcatggaattttccctcactgat

SEQ ID NO: 58225 - DNA, 60 bp, Artificial
  Synthetic oligonucleotide
ggatgtcaatccgacattactcttcttaaaagtgccagcacaaaatgctataagcacaac

SEQ ID NO: 58226 - DNA, 60 bp, Artificial
  Synthetic oligonucleotide
ggatgtcatcccaaccttacttttcttaaaagtgccagcacaaaatgctataagcacaac

SEQ ID NO: 58227 - DNA, 59 bp, Artificial
  Synthetic oligonucleotide
atggatgtcaatccgaccttacttttcttaaaagtgccagcacaaaatgctataagcac

SEQ ID NO: 58228 - DNA, 60 bp, Artificial
  Synthetic oligonucleotide
atggatgtcatcccaaccttacttttcttaaaagtgccagcacaaaatgctataagcaca

SEQ ID NO: 58229 - DNA, 60 bp, Artificial
  Synthetic oligonucleotide
atggatgtcaatccgacattacttttcttaaaagtgccagcacaaaatgctataagcaca

SEQ ID NO: 58230 - DNA, 60 bp, Artificial
  Synthetic oligonucleotide
ggatgtcaatctgactttacttttcttaaaagtgccagcacaaaatgctataagcacaac

SEQ ID NO: 58231 - DNA, 60 bp, Artificial
  Synthetic oligonucleotide
atgtcaatccgaccttacttttcttaaaagtgccagcacaaaatgctataagcacaactt

SEQ ID NO: 58232 - DNA, 60 bp, Artificial
  Synthetic oligonucleotide
gggacaaaccctctggagcaaaacaaatgatgccggctcagaccgagtgatggtatcacc

SEQ ID NO: 58233 - DNA, 60 bp, Artificial
  Synthetic oligonucleotide
aggacaaaccctctggagcaaaacaaatgacgccggctcagaccgagtgatggtatcacc

SEQ ID NO: 58234 - DNA, 60 bp, Artificial
  Synthetic oligonucleotide
ggggcaaaccctctggagcaaaacaaatgatgccggctcagaccgagtgatggtatcacc

SEQ ID NO: 58235 - DNA, 60 bp, Artificial
  Synthetic oligonucleotide
cctctggagcaaaacaaacgatgccggctcagaccgagtgatggtatcacctctggccgt

SEQ ID NO: 58236 - DNA, 60 bp, Artificial
  Synthetic oligonucleotide
ctggagcaaaacaaacgatgccggctcagaccgagtgatggtatcacctctggccgtgac

SEQ ID NO: 58237 - DNA, 56 bp, Artificial
  Synthetic oligonucleotide
ggactttctttctaactcaaggggccttgttgaatgacaagcattccaatggaacc

SEQ ID NO: 58238 - DNA, 58 bp, Artificial
  Synthetic oligonucleotide
caggactttctttctaactcaaggggccttgttgaatgacaagcattccaatggaacc

SEQ ID NO: 58239 - DNA, 60 bp, Artificial
  Synthetic oligonucleotide
tacggcaatggtgtttggataggaagaactaaaagcactagttcaaggagtgggtttgag

SEQ ID NO: 58240 - DNA, 60 bp, Artificial
  Synthetic oligonucleotide
aatacggtaatggtgtttggataggaagaactaaaagtactagctcaagaagtgggtttg

SEQ ID NO: 58241 - DNA, 60 bp, Artificial
  Synthetic oligonucleotide
ggcaatggtgtttggataggaagaactaaaagcactagttcaaggagtggatttgagatg

SEQ ID NO: 58242 - DNA, 51 bp, Artificial
  Synthetic oligonucleotide
gcttgaggtggagcaagagataagaactttctcgtttcagcttatttaatg

SEQ ID NO: 58243 - DNA, 60 bp, Artificial
  Synthetic oligonucleotide
cgaagtagaacaagagataagaactttctcgtttcagcttatttgataataaaaaacacc

SEQ ID NO: 58244 - DNA, 60 bp, Artificial
  Synthetic oligonucleotide
cctcgttccaggtagattgctatctatggcacataagaaagctactcagcatgagagaca

SEQ ID NO: 58245 - DNA, 60 bp, Artificial
  Synthetic oligonucleotide
tttcaggtagattgctatctatggcacataagaaaactgctcagcatgagagacatgtgt

SEQ ID NO: 58246 - DNA, 60 bp, Artificial
  Synthetic oligonucleotide
aaatatacagagattcgcttggggagtccgtgatgagaatgggggaccttcactccctcc

SEQ ID NO: 58247 - DNA, 60 bp, Artificial
  Synthetic oligonucleotide
gtttgaagagatcagatggctaattgcagagtgcagaaacatattaaccaaaactgagaa

SEQ ID NO: 58248 - DNA, 60 bp, Artificial
  Synthetic oligonucleotide
gtagggaatggtacatgctcatgccaaggcagaaaataacaggaggtctgatggtgaaaa

SEQ ID NO: 58249 - DNA, 60 bp, Artificial
  Synthetic oligonucleotide
tggtacatgctcatgccaaggcagaaaataacagggggtctgatggtgaaaatggatcag

SEQ ID NO: 58250 - DNA, 60 bp, Artificial
  Synthetic oligonucleotide
cgatctggactagtgggagcagcatttccttctgtggagtaaatagcgacactgtaggtt

SEQ ID NO: 58251 - DNA, 60 bp, Artificial
  Synthetic oligonucleotide
gtcaaaagctggagaaacaacatattgaggacacaagaatctgaatgtgcctgcataaat

SEQ ID NO: 58252 - DNA, 55 bp, Artificial
  Synthetic oligonucleotide
atactgcaaactggtcttggccagacggtgctgagttgccgtttaccattgacaa

SEQ ID NO: 58253 - DNA, 60 bp, Artificial
  Synthetic oligonucleotide
gtgctgcaacctattcgagaaattcttccctagcagttcatacaggagaccggttgggat

SEQ ID NO: 58254 - DNA, 51 bp, Artificial
  Synthetic oligonucleotide
gctttcaggtagactgtttcctttggcatattcgcaaacggtttgcagact

SEQ ID NO: 58255 - DNA, 51 bp, Artificial
  Synthetic oligonucleotide
gctttcaggtagactgtttcctttggcatatccgcaagcggtttgcagact

SEQ ID NO: 58256 - DNA, 53 bp, Artificial
  Synthetic oligonucleotide
gctttcaggtagactgtttcctttggcatatccgcaagcggtttgcagactat

SEQ ID NO: 58257 - DNA, 53 bp, Artificial
  Synthetic oligonucleotide
gctttcaggtagactgtttcctttggcatattcgcaaacggtttgcagacaat

SEQ ID NO: 58258 - DNA, 60 bp, Artificial
  Synthetic oligonucleotide
gctttcaggtagactgtttcctttggcatatccgcaagcggtttgcagactatggattgg

SEQ ID NO: 58259 - DNA, 60 bp, Artificial
  Synthetic oligonucleotide
atacttactgacagccagacagcgaccaaaagaattcggatggccatcaactaatttcga

SEQ ID NO: 58260 - DNA, 60 bp, Artificial
  Synthetic oligonucleotide
ggttggagactttgatactgctaagggctttcaccgaagagggagcaattgttggagaaa

SEQ ID NO: 58261 - DNA, 60 bp, Artificial
  Synthetic oligonucleotide
aaaagtctatagaacttactttgaaaaagtcgaaaggttaaaacatgggacttttggtcc

SEQ ID NO: 58262 - DNA, 60 bp, Artificial
  Synthetic oligonucleotide
agtgctggaaaagaccccaagaagactggaggtccaatctacaggaggagagatgggaag

SEQ ID NO: 58263 - DNA, 60 bp, Artificial
  Synthetic oligonucleotide
aaagaccctaagaagactggaggtccaatctacaggaggagagatgggaaatggatgaga

SEQ ID NO: 58264 - DNA, 60 bp, Artificial
  Synthetic oligonucleotide
gaccctaagaagactggaggtccaatctacaggaggagagatgggaaatggatgagagaa

SEQ ID NO: 58265 - DNA, 60 bp, Artificial
  Synthetic oligonucleotide
gctgctcagagggcaatgatggatcaagtgagagaaagccggaacccaggaaatgctgag

SEQ ID NO: 58266 - DNA, 51 bp, Artificial
  Synthetic oligonucleotide
ggggactatatgaagcaattgaggagtgcctgattaacgatccctgggttt

SEQ ID NO: 58267 - DNA, 60 bp, Artificial
  Synthetic oligonucleotide
agtgtcttctaatggggcatatggagtaaaggggttttcatttaaatacggcaatggtgt

SEQ ID NO: 58268 - DNA, 60 bp, Artificial
  Synthetic oligonucleotide
ggggcatatggagtaaaggggttttcatttaaatacggcaatggtgtttggataggaaga

SEQ ID NO: 58269 - DNA, 60 bp, Artificial
  Synthetic oligonucleotide
gaagtgaggcataaattgaagacaacagaaaatagttttgagcaaataacatttatgcaa

SEQ ID NO: 58270 - DNA, 60 bp, Artificial
  Synthetic oligonucleotide
cctatgtttttatacgtgagaacaaacgggacctcaaaaattaaaatgaaatggggaatg

SEQ ID NO: 58271 - DNA, 60 bp, Artificial
  Synthetic oligonucleotide
ctaaaagtatcaactctagaagtggttttgagatgatttgggatcctaatggatggacag

SEQ ID NO: 58272 - DNA, 60 bp, Artificial
  Synthetic oligonucleotide
tgagtctatgagggaagaatatcggcaggaacagcagagtgctgtggatgttgacgatgg

SEQ ID NO: 58273 - DNA, 60 bp, Artificial
  Synthetic oligonucleotide
ggagtctatgagggaagagtatcgacaggaacagcagagtgctgtggatgttgacgatgg

SEQ ID NO: 58274 - DNA, 60 bp, Artificial
  Synthetic oligonucleotide
cggagtctatgagggaagagtatcgacaggaacagcagagtgctgtggatgttgacgatg

SEQ ID NO: 58275 - DNA, 60 bp, Artificial
  Synthetic oligonucleotide
gtccatgagggaagaatatcgacaggaacagcagagtgctgtggatgttgacgatggtca

SEQ ID NO: 58276 - DNA, 60 bp, Artificial
  Synthetic oligonucleotide
ctgagtccatgagggaagaatatcgacaggaacagcagagtgctgtggatgttgacgatg

SEQ ID NO: 58277 - DNA, 60 bp, Artificial
  Synthetic oligonucleotide
gtctatgagggaagaatatcggcaggaacagcagagtgctgtggatgttgacgatggtca

SEQ ID NO: 58278 - DNA, 60 bp, Artificial
  Synthetic oligonucleotide
ggccctgagtcagtgttgatcaatacctatcagtggatcatcagaaactgggaaactgtt

SEQ ID NO: 58279 - DNA, 60 bp, Artificial
  Synthetic oligonucleotide
ttgtcatgagagagccattcatttcatgctctcacttggaatgcagaaccttttttctga

SEQ ID NO: 58280 - DNA, 60 bp, Artificial
  Synthetic oligonucleotide
aacctggaacctggaaccttcgatcttggagggctatatgaagcaattgaggagtgcctg

SEQ ID NO: 58281 - DNA, 60 bp, Artificial
  Synthetic oligonucleotide
agctaaattggcaaatgttgtgagaaaaatgatgactaactcacaagatacagagctctc

SEQ ID NO: 58282 - DNA, 60 bp, Artificial
  Synthetic oligonucleotide
agccaaattggcaaatgttgtgagaaaaatgatgactaactcacaagatacagagctctc

SEQ ID NO: 58283 - DNA, 60 bp, Artificial
  Synthetic oligonucleotide
gatgaccattgcatctgtaccttcttcgcgctacctagctgacatgacccttgaggaaat

SEQ ID NO: 58284 - DNA, 60 bp, Artificial
  Synthetic oligonucleotide
tagctgacatgacccttgaggaaatgtcaagggattggttcatgctcatgcctaggcaaa

SEQ ID NO: 58285 - DNA, 60 bp, Artificial
  Synthetic oligonucleotide
ggcacaaattgaagatgacagagaatagtttcgagcaaataacatttatgcaagccttac

SEQ ID NO: 58286 - DNA, 60 bp, Artificial
  Synthetic oligonucleotide
agacacactatgtataggttatcatgcaaataattcaactgacactgttgatacagtgct

SEQ ID NO: 58287 - DNA, 60 bp, Artificial
  Synthetic oligonucleotide
gcagacacattatgtataggttatcatgcaaataattcaactgacactgttgatacggta

SEQ ID NO: 58288 - DNA, 60 bp, Artificial
  Synthetic oligonucleotide
cacactatgtataggttatcatgcaaataattcaactgacactgttgatacagtgctgga

SEQ ID NO: 58289 - DNA, 60 bp, Artificial
  Synthetic oligonucleotide
tttgacatgagtaatgaaggatcttatttctttggagacaatgcagaggagtacgacaat

SEQ ID NO: 58290 - DNA, 60 bp, Artificial
  Synthetic oligonucleotide
cctcctttgacatgagtaatgaaggatcttatttcttcggagacaatgcaaaggagtacg

SEQ ID NO: 58291 - DNA, 60 bp, Artificial
  Synthetic oligonucleotide
ggcctcttctaatagatggtacagcctccttgagtcctggaatgatgatgggcatgttca

SEQ ID NO: 58292 - DNA, 60 bp, Artificial
  Synthetic oligonucleotide
cctgcactcagaatgaaatggatgatggcaatgaaatacccaataacggctgacaagagg

SEQ ID NO: 58293 - DNA, 60 bp, Artificial
  Synthetic oligonucleotide
atggcgaggctagggaaaggatacatgttcgaaagtaagagcatgaagcttcgagcgcag

SEQ ID NO: 58294 - DNA, 60 bp, Artificial
  Synthetic oligonucleotide
cccatgttcttgtacgtaaggacaaatggaacctcaaaaattaaaatgaaatggggaatg

SEQ ID NO: 58295 - DNA, 60 bp, Artificial
  Synthetic oligonucleotide
atggaacctcaaaaattaaaatgaaatggggaatggagatgaggcgttgcctccttcaat

SEQ ID NO: 58296 - DNA, 60 bp, Artificial
  Synthetic oligonucleotide
gagagcatctgcaggacaaatcagcgtacagcccacattctctgtgcagagaaacctccc

SEQ ID NO: 58297 - DNA, 60 bp, Artificial
  Synthetic oligonucleotide
acgtggaatcaatgaccgaaacttctggaggggtgaaaatggacgaaggacaaggattgc

SEQ ID NO: 58298 - DNA, 60 bp, Artificial
  Synthetic oligonucleotide
cgtggaatcaatgaccgaaacttctggaggggtgaaaatggacgaaggacaaggattgca

SEQ ID NO: 58299 - DNA, 60 bp, Artificial
  Synthetic oligonucleotide
acgtgggatcaatgaccgaaacttctggaggggtgaaaatggacgaaggacaaggattgc

SEQ ID NO: 58300 - DNA, 60 bp, Artificial
  Synthetic oligonucleotide
cgtgggatcaatgaccgaaacttctggaggggtgaaaatggacgaaggacaaggattgca

SEQ ID NO: 58301 - DNA, 60 bp, Artificial
  Synthetic oligonucleotide
cctcttttgacatgagtaatgaaggatcttatttcttcggagacaatgcagaggagtacg

SEQ ID NO: 58302 - DNA, 60 bp, Artificial
  Synthetic oligonucleotide
cctttgacatgagtaatgaaggatcttatttcttcggagacaatgcagaggagtacgacg

SEQ ID NO: 58303 - DNA, 60 bp, Artificial
  Synthetic oligonucleotide
catgagtaatgaaggatcttatttcttcggagacaatgcagaggagtacgacaattaatg

SEQ ID NO: 58304 - DNA, 60 bp, Artificial
  Synthetic oligonucleotide
gacatgagtaatgaaggatcttatttcttcggagacaatgcagaggagtacgacaattaa

SEQ ID NO: 58305 - DNA, 60 bp, Artificial
  Synthetic oligonucleotide
gtagtgttggtaatgaaacggaaacgggactctagcatacttactgacagccagacagcg

SEQ ID NO: 58306 - DNA, 60 bp, Artificial
  Synthetic oligonucleotide
ccgggccagacaatggggcagtggctgtattgaaatacaatggcataataacagacacta

SEQ ID NO: 58307 - DNA, 60 bp, Artificial
  Synthetic oligonucleotide
tctggaacctgggacctttgatcttgggggactatatgaagcaattgaggagtgcctgat

SEQ ID NO: 58308 - DNA, 60 bp, Artificial
  Synthetic oligonucleotide
gttgggaaacaaattgtagagtggattctgaaagaggaatccgacgaaacacttaagatg

SEQ ID NO: 58309 - DNA, 60 bp, Artificial
  Synthetic oligonucleotide
atcggctccgccgagatcaaaaatccctaaaaggaagaggcagcacccttggtctaaaca

SEQ ID NO: 58310 - DNA, 60 bp, Artificial
  Synthetic oligonucleotide
ttgtagattggattctgaaagaggaatccgacgaaacacttaagatggccattgcatctg

SEQ ID NO: 58311 - DNA, 60 bp, Artificial
  Synthetic oligonucleotide
gggaaacaaattgtagagtggattctgaaagaggaatccgacgaaacacttaagatggcc

SEQ ID NO: 58312 - DNA, 60 bp, Artificial
  Synthetic oligonucleotide
ctgaaagaggaatccgacgaaacacttaagatggccattgcatctgtacctacttcgcgc

SEQ ID NO: 58313 - DNA, 60 bp, Artificial
  Synthetic oligonucleotide
gattctgaaagaggaatccgacgaaacacttaagatggccattgcatctgtacctacttc

SEQ ID NO: 58314 - DNA, 60 bp, Artificial
  Synthetic oligonucleotide
acttaagatggccattgcatctatacctacttcgcgctatctagctgacatgaccattga

SEQ ID NO: 58315 - DNA, 60 bp, Artificial
  Synthetic oligonucleotide
ctgtgtcaagctttcaggtagactgtttcctttggcatatccgcaagcggtttgcagact

SEQ ID NO: 58316 - DNA, 54 bp, Artificial
  Synthetic oligonucleotide
attgcatctgtacctacttcgcgctatctagctgacatgaccattgaggaaatg

SEQ ID NO: 58317 - DNA, 60 bp, Artificial
  Synthetic oligonucleotide
ggccattgcatctatacctacttcgcgctatctagctgacatgaccattgaggaaatgtc

SEQ ID NO: 58318 - DNA, 60 bp, Artificial
  Synthetic oligonucleotide
ggctttcactgaaaagggagcaatcgctggagaaatttcaccaatactttctcttccagg

SEQ ID NO: 58319 - DNA, 60 bp, Artificial
  Synthetic oligonucleotide
ggaatccgacgaaacacttaagatggccattgcatctgtacctacttcgcgctatctagc

SEQ ID NO: 58320 - DNA, 60 bp, Artificial
  Synthetic oligonucleotide
ctttcaccgaagagggagcaatcgctggagaaatttcaccaatactttctcttccaggac

SEQ ID NO: 58321 - DNA, 60 bp, Artificial
  Synthetic oligonucleotide
gggctttcactgaaaagggagcaatcgctggagaaatttcaccaatactttctcttccag

SEQ ID NO: 58322 - DNA, 60 bp, Artificial
  Synthetic oligonucleotide
aggcgatcatggaaaagaccataatactgaaagcgaacttcagtgtgatttttgaccgat

SEQ ID NO: 58323 - DNA, 60 bp, Artificial
  Synthetic oligonucleotide
ctttcaccgaagagggagcgatcgctggagaaatttcaccaatactttctcttccaggac

SEQ ID NO: 58324 - DNA, 57 bp, Artificial
  Synthetic oligonucleotide
ggaccaggcgataatggaaaagaccataatactgaaagcgaacttcagtgtgatttt

SEQ ID NO: 58325 - DNA, 51 bp, Artificial
  Synthetic oligonucleotide
ggcgatcatggaaaagaccataatactgaaagcgaacttcagtgtgatttt

SEQ ID NO: 58326 - DNA, 60 bp, Artificial
  Synthetic oligonucleotide
atgtatcaaaagtgctgcaatctattcgagaaattcttccctagcagttcatacaggaga

SEQ ID NO: 58327 - DNA, 60 bp, Artificial
  Synthetic oligonucleotide
taaactttgtgagcatggagttttccctcactgacccaagacttgagccacacaaatggg

SEQ ID NO: 58328 - DNA, 60 bp, Artificial
  Synthetic oligonucleotide
ttgctggaaagaataccgatcttgaggctctcatggaatggctaaagacaagaccaatcc

SEQ ID NO: 58329 - DNA, 60 bp, Artificial
  Synthetic oligonucleotide
gaaagaataccgatcttgaggctctcatggaatggctaaagacaagaccaatcctgtcac

SEQ ID NO: 58330 - DNA, 60 bp, Artificial
  Synthetic oligonucleotide
ggaaagaataccgatcttgaggctctcatggaatggctaaagacaagaccaatcctgtca

SEQ ID NO: 58331 - DNA, 60 bp, Artificial
  Synthetic oligonucleotide
tccgtcggaagaatgattggtggaattgggcgattctacatccaaatgtgcaccgagctt

SEQ ID NO: 58332 - DNA, 60 bp, Artificial
  Synthetic oligonucleotide
gccagaatgcaactgaaatcagagcatccgtcggaagaatgattggtggaattgggcgat

SEQ ID NO: 58333 - DNA, 60 bp, Artificial
  Synthetic oligonucleotide
ccgtcggaagaatgattggtggaattgggcgattctacatccaaatgtgcaccgagctta

SEQ ID NO: 58334 - DNA, 60 bp, Artificial
  Synthetic oligonucleotide
attggtggaattgggcgattctacatccaaatgtgcactgagcttaaactcaacgatcat

SEQ ID NO: 58335 - DNA, 60 bp, Artificial
  Synthetic oligonucleotide
cgccagaatgcaactgaaatcagagcatccgtcggaagaatgattggtggaattgggcga

SEQ ID NO: 58336 - DNA, 60 bp, Artificial
  Synthetic oligonucleotide
cgccagaatgcaactgaaatcagagcatccgtcggaagaatgattggaggaattgggcga

SEQ ID NO: 58337 - DNA, 60 bp, Artificial
  Synthetic oligonucleotide
cgccagaatgcaactgaaatcagagcatccgtcggaagaatggttggtggaattgggcga

SEQ ID NO: 58338 - DNA, 60 bp, Artificial
  Synthetic oligonucleotide
gttggtggaattgggcgattctacatccaaatgtgcaccgagcttaaactcaatgattat

SEQ ID NO: 58339 - DNA, 60 bp, Artificial
  Synthetic oligonucleotide
gggtcctcatcggagggcttgaatggaatggtaacacagttcgagtctctgaaaatctac

SEQ ID NO: 58340 - DNA, 53 bp, Artificial
  Synthetic oligonucleotide
ttactattcacagtaagctcatggtcttacattgtggaaacatctaactcata

SEQ ID NO: 58341 - DNA, 54 bp, Artificial
  Synthetic oligonucleotide
ggggaatagccccattacacttgggtaaatgtaacattgctggatggcttttgg

SEQ ID NO: 58342 - DNA, 60 bp, Artificial
  Synthetic oligonucleotide
tttgagatattccccaaggcaagttcatggcccaatcatgaaacaaacagaggtgtgaca

SEQ ID NO: 58343 - DNA, 60 bp, Artificial
  Synthetic oligonucleotide
acagcttttacagaaatttaatatggctggtgaaaaaaggaaatacatatccaaagatca

SEQ ID NO: 58344 - DNA, 60 bp, Artificial
  Synthetic oligonucleotide
ctaggggtctgtttggagctattgctggttttattgaggaggggtggacaggaatgatag

SEQ ID NO: 58345 - DNA, 60 bp, Artificial
  Synthetic oligonucleotide
ggcattcaccacccatctaccagtactgatcaacaaagtctctaccagaatgcagatacc

SEQ ID NO: 58346 - DNA, 51 bp, Artificial
  Synthetic oligonucleotide
aaaagtaagacgccagctaaagaacaatgctaaggaaattgggaatggctg

SEQ ID NO: 58347 - DNA, 60 bp, Artificial
  Synthetic oligonucleotide
tgaaaaagtaagacgccagctaaagaacaatgctaaggaaattgggaatggctgttttga

SEQ ID NO: 58348 - DNA, 60 bp, Artificial
  Synthetic oligonucleotide
gaggcctgtttggagctattgctggttttattgaaggaggatggacaggaatgatagatg

SEQ ID NO: 58349 - DNA, 60 bp, Artificial
  Synthetic oligonucleotide
aagaccaatcctgtcacctctgactaaggggattttaggatttgtgttcacgctcaccgt

SEQ ID NO: 58350 - DNA, 60 bp, Artificial
  Synthetic oligonucleotide
agaccaatcctgtcacctctgactaaggggattttaggatttgtgttcacgctcaccgtg

SEQ ID NO: 58351 - DNA, 60 bp, Artificial
  Synthetic oligonucleotide
cttcatatccaaaactcagcaaatcatacacgaacaataaggggaaagaagtgcttgtgc

SEQ ID NO: 58352 - DNA, 60 bp, Artificial
  Synthetic oligonucleotide
tatccaaaactcagcaaatcatacacgaacaataaggggaaagaagtgctcgtgctctgg

SEQ ID NO: 58353 - DNA, 60 bp, Artificial
  Synthetic oligonucleotide
tccaaaactcagcaaatcatacacgaacaataaggggaaagaagtgctcgtgctctgggg

SEQ ID NO: 58354 - DNA, 60 bp, Artificial
  Synthetic oligonucleotide
tccaaaactcagcaaatcatacacgaacaataaggggaaagaagtgcttgtgctctgggg

SEQ ID NO: 58355 - DNA, 60 bp, Artificial
  Synthetic oligonucleotide
agtgaatttgctcgaagacagccataatgggaaactctgcagcttgaacgggatagctcc

SEQ ID NO: 58356 - DNA, 60 bp, Artificial
  Synthetic oligonucleotide
gctttgaacagcagccttccttttcagaatgtacatcctatcactattggagaatgtccc

SEQ ID NO: 58357 - DNA, 60 bp, Artificial
  Synthetic oligonucleotide
tttgaacagcagccttccttttcagaatgtacatcctatcactattggagaatgtcccaa

SEQ ID NO: 58358 - DNA, 60 bp, Artificial
  Synthetic oligonucleotide
actaagaatggcaacaggactaagaaatgtcccatccattcagtccagagggctatttgg

SEQ ID NO: 58359 - DNA, 60 bp, Artificial
  Synthetic oligonucleotide
ggcaacaggactaagaaatgtcccatccattcagtccagagggctatttggagcaattgc

SEQ ID NO: 58360 - DNA, 60 bp, Artificial
  Synthetic oligonucleotide
aagaagtgcttgtgctctggggggtgcaccaccctccaactgtcaatgagcaacaaaatc

SEQ ID NO: 58361 - DNA, 60 bp, Artificial
  Synthetic oligonucleotide
cggaagacaggagagaaacccatcacttaggatgaaatggatgatggcaatgaaataccc

SEQ ID NO: 58362 - DNA, 60 bp, Artificial
  Synthetic oligonucleotide
aggatgaaatggatgatggcaatgaaatacccaattacagctgataaaaggataacggaa

SEQ ID NO: 58363 - DNA, 60 bp, Artificial
  Synthetic oligonucleotide
ctagttggaatcaatatgagcaaaaagaaatcttacataaataggacaggaacatttgaa

SEQ ID NO: 58364 - DNA, 60 bp, Artificial
  Synthetic oligonucleotide
cggatatgcacaaacagattgtgtcctggaggcaatggctttccttgaggaatcccaccc

SEQ ID NO: 58365 - DNA, 58 bp, Artificial
  Synthetic oligonucleotide
tcagacctatgactggacattaaacagaaaccaaccggctgcaactgctttggccaac

SEQ ID NO: 58366 - DNA, 52 bp, Artificial
  Synthetic oligonucleotide
ctatgactggacattaaacagaaaccaaccggctgcaactgctttggccaac

SEQ ID NO: 58367 - DNA, 60 bp, Artificial
  Synthetic oligonucleotide
ttaagtcctggaatgatgatgggcatgtttaacatgctgagcacagtcctaggagtctca

SEQ ID NO: 58368 - DNA, 60 bp, Artificial
  Synthetic oligonucleotide
ttaagtcctggaatgatgatgggcatgtttaacatgctgagcacagtcctaggagtgtca

SEQ ID NO: 58369 - DNA, 50 bp, Artificial
  Synthetic oligonucleotide
ctggaatgatgatgggcatgtttaacatgctgagtacagtcctaggagtc

SEQ ID NO: 58370 - DNA, 60 bp, Artificial
  Synthetic oligonucleotide
ggatggactccaatcttctgatgacttcgccctcatagtgaatgcacctaatcatgaggg

SEQ ID NO: 58371 - DNA, 56 bp, Artificial
  Synthetic oligonucleotide
tgatgacttcgccctcatagtaaatgcacctaatcatgagggaatacaagcaggag

SEQ ID NO: 58372 - DNA, 60 bp, Artificial
  Synthetic oligonucleotide
gagctacccagctttggggtatctggggttaatgaatcggctgatatgagcattggagtg

SEQ ID NO: 58373 - DNA, 60 bp, Artificial
  Synthetic oligonucleotide
tggagctgcccagctttggggtgtctggggttaatgaatcggctgatatgagcattggag

SEQ ID NO: 58374 - DNA, 60 bp, Artificial
  Synthetic oligonucleotide
atggagttacccagctttggggtgtctggagttaatgaatcggctgatatgagcattgga

SEQ ID NO: 58375 - DNA, 60 bp, Artificial
  Synthetic oligonucleotide
aacatttgaattcacaagctttttctaccgctatgggtttgtagccaatttcagtatgga

SEQ ID NO: 58376 - DNA, 60 bp, Artificial
  Synthetic oligonucleotide
ctttaattgaagacccagatgaaggcacagctggagtggaatctgctgttctaaggggat

SEQ ID NO: 58377 - DNA, 60 bp, Artificial
  Synthetic oligonucleotide
atggggaacgccagaatgcaactgaaatcagagcatccgtcggaagaatggttggtggaa

SEQ ID NO: 58378 - DNA, 60 bp, Artificial
  Synthetic oligonucleotide
cgatcatgagggaagactgatccagaacagcttaacaatagagagaatggtgctctctgc

SEQ ID NO: 58379 - DNA, 60 bp, Artificial
  Synthetic oligonucleotide
caaaccagtcaagtatacagcctaatcagaccaaacgagaatcccgcacacaagagccag

SEQ ID NO: 58380 - DNA, 60 bp, Artificial
  Synthetic oligonucleotide
tggggaacgccagaatgcaactgaaatcagagcatccgtcggaagaatgattggtggaat

SEQ ID NO: 58381 - DNA, 60 bp, Artificial
  Synthetic oligonucleotide
ggagttgggacaatggtattggagttaatcaggatgatcaaacgtgggatcaatgaccga

SEQ ID NO: 58382 - DNA, 50 bp, Artificial
  Synthetic oligonucleotide
acccatatacaagagagtagatggaaagtgggtgagggaactcgtccttt

SEQ ID NO: 58383 - DNA, 60 bp, Artificial
  Synthetic oligonucleotide
gaaaactggaggacccatatacaagagagtagatggaaagtgggtgagggaactcgtcct

SEQ ID NO: 58384 - DNA, 60 bp, Artificial
  Synthetic oligonucleotide
acaacttaccagaggacaagagctcttgtccgcaccggaatggaccccaggatgtgctct

SEQ ID NO: 58385 - DNA, 60 bp, Artificial
  Synthetic oligonucleotide
tacagcctaatcagaccaaacgagaatcccgcacacaagagccagttggtgtggatggca

SEQ ID NO: 58386 - DNA, 60 bp, Artificial
  Synthetic oligonucleotide
tgcaagaccagaagaagtgtccttccaggggcggggagtctttgagctctcggacgaaag

SEQ ID NO: 58387 - DNA, 60 bp, Artificial
  Synthetic oligonucleotide
taatcagaccaaacgagaatcccgcacacaagagtcagctggtgtggatggcatgcaatt

SEQ ID NO: 58388 - DNA, 60 bp, Artificial
  Synthetic oligonucleotide
cagcctaatcagaccaaacgagaatcccgcacacaagagtcagttggtgtggatggcatg

SEQ ID NO: 58389 - DNA, 60 bp, Artificial
  Synthetic oligonucleotide
caagagtcagttggtgtggatggcatgcaattctgctgcatttgaagatctaagagtgtc

SEQ ID NO: 58390 - DNA, 60 bp, Artificial
  Synthetic oligonucleotide
gccagttggtgtggatggcatgcaattctgctgcatttgaagatctaagagtgtcaagct

SEQ ID NO: 58391 - DNA, 60 bp, Artificial
  Synthetic oligonucleotide
cgttctctctatcgtcccgtcaggccccctcaaagccgagatcgcacagagacttgaaga

SEQ ID NO: 58392 - DNA, 60 bp, Artificial
  Synthetic oligonucleotide
cgtacgttctctctatcgtcccgtcaggccccctcaaagccgagatcgcacagagacttg

SEQ ID NO: 58393 - DNA, 60 bp, Artificial
  Synthetic oligonucleotide
ccgaagatcctgatgaaggcacagctggagtggaatctgctgtcctgagaggattcctca

SEQ ID NO: 58394 - DNA, 60 bp, Artificial
  Synthetic oligonucleotide
aagaccggttggaatttccagcatggtggaggccatggtgtctagggcccgaattgatgc

SEQ ID NO: 58395 - DNA, 60 bp, Artificial
  Synthetic oligonucleotide
aatgaactgggcaatcttgcaaaaggagagaaggctaatgtgctaattgggcaaggagac

SEQ ID NO: 58396 - DNA, 60 bp, Artificial
  Synthetic oligonucleotide
catcaatgaactgggcaatcttgcaaaaggagagaaggctaatgtgctaattgggcaagg

SEQ ID NO: 58397 - DNA, 60 bp, Artificial
  Synthetic oligonucleotide
tcagaaatcaagttaagataagacggagggttgacataaaccctggccacgcagacctca

SEQ ID NO: 58398 - DNA, 60 bp, Artificial
  Synthetic oligonucleotide
gctgagcaatcttgcaaaaggagagaaggctaatgtgctaattgggcaaggagacgtggt

SEQ ID NO: 58399 - DNA, 60 bp, Artificial
  Synthetic oligonucleotide
cttattcatcatcaatgatgtgggagatcaatggtcctgagtcggtgttggtcaatactt

SEQ ID NO: 58400 - DNA, 60 bp, Artificial
  Synthetic oligonucleotide
taagcgggagagacgagcagtcaattgctgaagcaataattgtggccatggtattctcac

SEQ ID NO: 58401 - DNA, 60 bp, Artificial
  Synthetic oligonucleotide
ggagagttgacataaaccctggccacgcagacctcagtgccaaagaggcacaggatgtaa

SEQ ID NO: 58402 - DNA, 60 bp, Artificial
  Synthetic oligonucleotide
ggcggagagttgacataaaccctggccacgcagacctcagtgccaaagaggcacaggatg

SEQ ID NO: 58403 - DNA, 60 bp, Artificial
  Synthetic oligonucleotide
gacggagggttgacataaaccctggccacgcagacctcagtgccaaagaggcacaggatg

SEQ ID NO: 58404 - DNA, 60 bp, Artificial
  Synthetic oligonucleotide
agataagacggagggttgacataaaccctggccacgcagacctcagtgccaaagaggcgc

SEQ ID NO: 58405 - DNA, 60 bp, Artificial
  Synthetic oligonucleotide
ttaagataagacggagggttgacataaatcctggccacgcagacctcagtgccaaagagg

SEQ ID NO: 58406 - DNA, 60 bp, Artificial
  Synthetic oligonucleotide
ttaagataaggcggagagttgacataaaccctggccacgcagacctcagtgccaaagagg

SEQ ID NO: 58407 - DNA, 60 bp, Artificial
  Synthetic oligonucleotide
tttgcagggaaaaacaccgatcttgaggcactcatggaatggctaaagacaagaccaatc

SEQ ID NO: 58408 - DNA, 60 bp, Artificial
  Synthetic oligonucleotide
tggggtcctcatcggaggacttgaatggaatggtaacaagattcgagtctctgaaaatat

SEQ ID NO: 58409 - DNA, 60 bp, Artificial
  Synthetic oligonucleotide
ggccaaggaggtggcactcagctactcaactggtgcacttgccagttgcatgggcctcat

SEQ ID NO: 58410 - DNA, 60 bp, Artificial
  Synthetic oligonucleotide
ccgatgtggtaaactttgtgagcatggagttttccctcactgacccgagacttgagccac

SEQ ID NO: 58411 - DNA, 60 bp, Artificial
  Synthetic oligonucleotide
ggaggtcccacctgaggaacgacaccgatgtggtaaactttgtgagcatggagttttccc

SEQ ID NO: 58412 - DNA, 60 bp, Artificial
  Synthetic oligonucleotide
caccgatgtggtaaactttgtgagcatggagttttccctcactgacccgagacttgagcc

SEQ ID NO: 58413 - DNA, 60 bp, Artificial
  Synthetic oligonucleotide
aagaccaatcctgtcacctctgactaaggggattttagggtttgtattcacgctcaccgt

SEQ ID NO: 58414 - DNA, 60 bp, Artificial
  Synthetic oligonucleotide
tacataaacaggacaggaacatttgaattcacaagctttttctatcgctatggatttgta

SEQ ID NO: 58415 - DNA, 60 bp, Artificial
  Synthetic oligonucleotide
agcgacactgtgggttggtcttggccagacggtgctgagttgccattcaccattgacaag

SEQ ID NO: 58416 - DNA, 60 bp, Artificial
  Synthetic oligonucleotide
taaatagcgacactgtaggttggtcttggccagacggtgctgagttgccattcaccattg

SEQ ID NO: 58417 - DNA, 60 bp, Artificial
  Synthetic oligonucleotide
gcgacactgtaggttggtcttggccagacggtgctgagttgccattcaccattgacaagt

SEQ ID NO: 58418 - DNA, 60 bp, Artificial
  Synthetic oligonucleotide
atgataaacaatgaccttggaccagcaacagcccaaatggctcttcagctattcatcaag

SEQ ID NO: 58419 - DNA, 60 bp, Artificial
  Synthetic oligonucleotide
ccagcaactgcccaaatggctcttcagctattcatcaaggactacaggtatacataccgg

SEQ ID NO: 58420 - DNA, 60 bp, Artificial
  Synthetic oligonucleotide
taacggctaatgaatcaggaaggctaatagatttcctcaaggatgtgatggaatcaatgg

SEQ ID NO: 58421 - DNA, 60 bp, Artificial
  Synthetic oligonucleotide
atactgcaaactggtcttggccagacggtgctgagttgccgtttaccattgacaagtagt

SEQ ID NO: 58422 - DNA, 60 bp, Artificial
  Synthetic oligonucleotide
actgcaaactggtcttggccagacggtgctgagttgccgtttactattgacaagtagttc

SEQ ID NO: 58423 - DNA, 60 bp, Artificial
  Synthetic oligonucleotide
atactgcaaactggtcttggccagacggtgctgagttgcccttcaccattgacaagtagt

SEQ ID NO: 58424 - DNA, 60 bp, Artificial
  Synthetic oligonucleotide
tacagagaatagttttgagcaaataacatttatgcaagccttacaactactgcttgaggt

SEQ ID NO: 58425 - DNA, 60 bp, Artificial
  Synthetic oligonucleotide
cagagaatagttttgagcaaataacatttatgcaagccttacaactactgcttgaagtgg

SEQ ID NO: 58426 - DNA, 60 bp, Artificial
  Synthetic oligonucleotide
catggaatggctaaagacaagaccaatcctgtcacctctgaccaaggggattttaggatt

SEQ ID NO: 58427 - DNA, 60 bp, Artificial
  Synthetic oligonucleotide
ggaagattctacatccagatgtgcactgaactcaaactcagtgactatgagggacgactg

SEQ ID NO: 58428 - DNA, 60 bp, Artificial
  Synthetic oligonucleotide
caccgaagagggagcaattgttggcgaaatttcaccattgccttctcttccaggacatac

SEQ ID NO: 58429 - DNA, 60 bp, Artificial
  Synthetic oligonucleotide
gttttgcatttaacacaggggacatgctgggagcagatgtacactccaggtggggaggtg

SEQ ID NO: 58430 - DNA, 60 bp, Artificial
  Synthetic oligonucleotide
agttttgcatttaacacaggggacatgctgggagcagatgtacactccaggtggggaggt

SEQ ID NO: 58431 - DNA, 60 bp, Artificial
  Synthetic oligonucleotide
cttcgtttgacatgagtaatgaggggtcttatttcttcggagacaatgcagaggagtatg

SEQ ID NO: 58432 - DNA, 60 bp, Artificial
  Synthetic oligonucleotide
cttcctttgacatgagtaatgaggggtcttatttcttcggagacaatgcagaggagtatg

SEQ ID NO: 58433 - DNA, 60 bp, Artificial
  Synthetic oligonucleotide
actgtaggttggtcttggccagacggtgctgagttgccattcaccattgacaagtagttt

SEQ ID NO: 58434 - DNA, 60 bp, Artificial
  Synthetic oligonucleotide
tactctgccggtgcacttgccagttgcatgggcctcatttacaacagaatgggtactgtc

SEQ ID NO: 58435 - DNA, 60 bp, Artificial
  Synthetic oligonucleotide
cagagaatagtttcgagcaaataacatttatgcaagccttacaactattgcttgaagtgg

SEQ ID NO: 58436 - DNA, 60 bp, Artificial
  Synthetic oligonucleotide
caggcaaaccatttgaatggatgtcaatccgaccttacttttcttaaaagtgccagcaca

SEQ ID NO: 58437 - DNA, 60 bp, Artificial
  Synthetic oligonucleotide
aggcaaaccatttgaatggatgtcaatccgaccttacttttcttaaaagtgccagcacaa

SEQ ID NO: 58438 - DNA, 60 bp, Artificial
  Synthetic oligonucleotide
ggcaaaccatttgaatggatgtcaatccgaccttacttttcttaaaagtgccagcacaaa

SEQ ID NO: 58439 - DNA, 60 bp, Artificial
  Synthetic oligonucleotide
tggggtcctcatcgggggacttgaatggaatgataacacagttcgagtctctgaaactct

SEQ ID NO: 58440 - DNA, 54 bp, Artificial
  Synthetic oligonucleotide
ggacttgaatggaatgataacacagttcgagtctctgaaactctacagagattc

SEQ ID NO: 58441 - DNA, 50 bp, Artificial
  Synthetic oligonucleotide
ggggacttgaatggaatgataacacagttcgagtctctgaaactctacag

SEQ ID NO: 58442 - DNA, 54 bp, Artificial
  Synthetic oligonucleotide
atcgggggacttgaatggaatgataacacagttcgagtctctgaaactctacag

SEQ ID NO: 58443 - DNA, 60 bp, Artificial
  Synthetic oligonucleotide
tctggtccagacaatggagctgtggctgtactaaaatacaacggcataataactgaaacc

SEQ ID NO: 58444 - DNA, 60 bp, Artificial
  Synthetic oligonucleotide
ctatagaaccttaatgagctgtcctattggtgaggctccctctccatacaattcaaggtt

SEQ ID NO: 58445 - DNA, 60 bp, Artificial
  Synthetic oligonucleotide
ccccgagaggaatgagcaaggacaaaccctatggagcagaacgagcgatgccggatcaga

SEQ ID NO: 58446 - DNA, 60 bp, Artificial
  Synthetic oligonucleotide
tcacattcaaaagaacaagtggctcatcaaccaagagggaggaggaagtacttacgggca

SEQ ID NO: 58447 - DNA, 60 bp, Artificial
  Synthetic oligonucleotide
caatgaattgagtagtcttgcaaaaggagagaaagctaatgtactgattgggcaaggaga

SEQ ID NO: 58448 - DNA, 60 bp, Artificial
  Synthetic oligonucleotide
agtaagagatcagcaagggaacgtgctattgtctcccgaagaggtcagcgaaacacaggg

SEQ ID NO: 58449 - DNA, 60 bp, Artificial
  Synthetic oligonucleotide
tattcaactgtcgccagttcattggtactattggtctccctgggggcaatcagtttctgg

SEQ ID NO: 58450 - DNA, 60 bp, Artificial
  Synthetic oligonucleotide
tacatccacaaatgcagacacattatgtataggttatcatgcaaataattcaactgacac

SEQ ID NO: 58451 - DNA, 55 bp, Artificial
  Synthetic oligonucleotide
caaatgcagacacattatgtataggttatcatgcaaataattcaactgacactgt

SEQ ID NO: 58452 - DNA, 60 bp, Artificial
  Synthetic oligonucleotide
ccatatggccataatcaagaaatacacatcaggaaggcaggagaagaaccctgcactcag

SEQ ID NO: 58453 - DNA, 60 bp, Artificial
  Synthetic oligonucleotide
gcgaaagcaggcaaaccatttgaatggatgtcaatccgacattacttttcttaaaagtgc

SEQ ID NO: 58454 - DNA, 60 bp, Artificial
  Synthetic oligonucleotide
aaggggtttgagatgatttgggatcctaatggatggacagataccgacagtaatttctca

SEQ ID NO: 58455 - DNA, 60 bp, Artificial
  Synthetic oligonucleotide
tttcatatcatgttctcacttggaatgcagaaccttttttctgacccaaggtgctctatt

SEQ ID NO: 58456 - DNA, 60 bp, Artificial
  Synthetic oligonucleotide
gggtttgagatgatttgggatcctaatggatggacagatactgacagtgatttctcagtg

SEQ ID NO: 58457 - DNA, 60 bp, Artificial
  Synthetic oligonucleotide
gggtttgagatgatttgggatcctaatggatggacagataccgacagtaatttctcagtg

SEQ ID NO: 58458 - DNA, 60 bp, Artificial
  Synthetic oligonucleotide
gggtttgagatgatttgggatcctaatggatggacagataccgacagtaatttctcaatg

SEQ ID NO: 58459 - DNA, 60 bp, Artificial
  Synthetic oligonucleotide
aaggggtttgagatgatttgggatcctaatggatggacagatactgacagtgatttctca

SEQ ID NO: 58460 - DNA, 60 bp, Artificial
  Synthetic oligonucleotide
gagcacacaaaatgccattgacggaatcaccaacaaagtaaattctgttattgaaaagat

SEQ ID NO: 58461 - DNA, 60 bp, Artificial
  Synthetic oligonucleotide
gcaattggggtcctcatcggagggcttgaatggaatggtaacacagttcgagtctctgaa

SEQ ID NO: 58462 - DNA, 60 bp, Artificial
  Synthetic oligonucleotide
tggggtcctcatcggagggcttgaatggaatggtaacacagttcgagtctctgaaaatct

SEQ ID NO: 58463 - DNA, 60 bp, Artificial
  Synthetic oligonucleotide
ggaccaggcgataatggaaaagaccataatactgaaagcgaacttcagtgtgatttttga

SEQ ID NO: 58464 - DNA, 60 bp, Artificial
  Synthetic oligonucleotide
agaccaggcggtcatggaaaagaccatagtactgaaagcgaacttcagtgtgatttttga

SEQ ID NO: 58465 - DNA, 60 bp, Artificial
  Synthetic oligonucleotide
cccagtgctgggaaagatcctaagaaaactggaggacctatatataggagagtagacgga

SEQ ID NO: 58466 - DNA, 60 bp, Artificial
  Synthetic oligonucleotide
tcccagtgctgggaaagatcctaagaaaactggaggacctatatataggagagtagacgg

SEQ ID NO: 58467 - DNA, 60 bp, Artificial
  Synthetic oligonucleotide
cccagtgcggggaaagatcctaagaaaactggaggacccatatacaagagagtagatgga

SEQ ID NO: 58468 - DNA, 60 bp, Artificial
  Synthetic oligonucleotide
agtgctgggaaagatcctaagaaaactggaggacctatatataggagagtagacggaaag

SEQ ID NO: 58469 - DNA, 60 bp, Artificial
  Synthetic oligonucleotide
agagcacacagaatgccattgacggaatcactaacaaagtaaattctgttattgaaaaga

SEQ ID NO: 58470 - DNA, 56 bp, Artificial
  Synthetic oligonucleotide
tacaggcctatcagaaacgaatgggggtgcagatgcaacggttcaagtgaccctct

SEQ ID NO: 58471 - DNA, 60 bp, Artificial
  Synthetic oligonucleotide
cgaccatgggaaaaaacatcatactaaaagcgaatttcagtgtgatttttaatcgattgg

SEQ ID NO: 58472 - DNA, 60 bp, Artificial
  Synthetic oligonucleotide
aatcgattggagactttaatactactaagggctttcactgaagagggagcaatcgttgga

SEQ ID NO: 58473 - DNA, 60 bp, Artificial
  Synthetic oligonucleotide
gggtcctcatcggaggacttgaatggaatggtaacaagattcgagtctctgaaaatatac

SEQ ID NO: 58474 - DNA, 60 bp, Artificial
  Synthetic oligonucleotide
cgattggagactttaatactactaagggctttcactgaagagggagcaatcgttggagag

SEQ ID NO: 58475 - DNA, 60 bp, Artificial
  Synthetic oligonucleotide
aatatacagagattcgcttggggagaccgtaatgaggatgggagaccttcattatctcca

SEQ ID NO: 58476 - DNA, 60 bp, Artificial
  Synthetic oligonucleotide
ctgaaaatatacagagattcgcttggggagaccgtaatgaggatgggagaccttcattat

SEQ ID NO: 58477 - DNA, 60 bp, Artificial
  Synthetic oligonucleotide
aatggattgggtgatgccccgttccttgatcggctccgccgagatcaaaagtccctaagg

SEQ ID NO: 58478 - DNA, 60 bp, Artificial
  Synthetic oligonucleotide
tacggattgggtgatgccccgttccttgatcggctccgccgagatcaaaagtccctaagg

SEQ ID NO: 58479 - DNA, 60 bp, Artificial
  Synthetic oligonucleotide
aatcaaacgaaacacttaagatgaccattgcatccgtacctacttcacgctacctagctg

SEQ ID NO: 58480 - DNA, 60 bp, Artificial
  Synthetic oligonucleotide
ttaagatgaccattgcatccgtacctacttcacgctacctagctgacatgacccttgagg

SEQ ID NO: 58481 - DNA, 60 bp, Artificial
  Synthetic oligonucleotide
catacctaggcaaaaaataacaggctctctttgtgtgcgaatggaccaagcgaccatggg

SEQ ID NO: 58482 - DNA, 51 bp, Artificial
  Synthetic oligonucleotide
aaaataacaggctctctttgtgtgcgaatggaccaagcgaccatgggaaaa

SEQ ID NO: 58483 - DNA, 60 bp, Artificial
  Synthetic oligonucleotide
agatagttggggcaatgctactattcactatccatactgtccaaaaaagtaccttgtttc

SEQ ID NO: 58484 - DNA, 60 bp, Artificial
  Synthetic oligonucleotide
gaaatagttgtggcaatgctactatttgctatccatactgtccaaaaaagtaccttgttt

SEQ ID NO: 58485 - DNA, 60 bp, Artificial
  Synthetic oligonucleotide
agatagttaggacaatgctactatttactatccatactgtccaaaaaagtaccttgtttc

SEQ ID NO: 58486 - DNA, 60 bp, Artificial
  Synthetic oligonucleotide
gtggaccatatggccataatcaagaaatacacatcaggaaggcaggagaagaaccctgca

SEQ ID NO: 58487 - DNA, 60 bp, Artificial
  Synthetic oligonucleotide
gtcagaatggaccaggcaataatggataagaacatcatactgaaagcgaatttcagtgtg

SEQ ID NO: 58488 - DNA, 60 bp, Artificial
  Synthetic oligonucleotide
tttgtgtcagaatggaccaggcaataatggataagaacatcatactgaaagcgaatttca

SEQ ID NO: 58489 - DNA, 60 bp, Artificial
  Synthetic oligonucleotide
cccactcagtgaatttactggaagacagccataatgggaaactctgcagcctgaacggga

SEQ ID NO: 58490 - DNA, 60 bp, Artificial
  Synthetic oligonucleotide
tccttcctcacacatgcactgagatagttgtggcaatgctactatttgctatccatactg

SEQ ID NO: 58491 - DNA, 60 bp, Artificial
  Synthetic oligonucleotide
cctcacacatgcactgagatagttgtggcaatgctactatttgctatccatactgtccaa

SEQ ID NO: 58492 - DNA, 60 bp, Artificial
  Synthetic oligonucleotide
tctatcgtcccgtcaggccccctcaaagccgagatcgcacagagacttgaagatgtattt

SEQ ID NO: 58493 - DNA, 60 bp, Artificial
  Synthetic oligonucleotide
ctgctggtgcacttgccagttgcatgggcctcatatacaacagaatggggactgtcacca

SEQ ID NO: 58494 - DNA, 60 bp, Artificial
  Synthetic oligonucleotide
gaccactcctaatagatggcacggcctcattgagtcctggaatgatgatgggcatgttta

SEQ ID NO: 58495 - DNA, 60 bp, Artificial
  Synthetic oligonucleotide
aataatggataagaacatcatactgaaagcaaacttcagtgtgatctttgaccgactgga

SEQ ID NO: 58496 - DNA, 60 bp, Artificial
  Synthetic oligonucleotide
gtctttgcagggaagaacacagatcttgaggcactcatggaatggctaaagacaagacca

SEQ ID NO: 58497 - DNA, 59 bp, Artificial
  Synthetic oligonucleotide
gcaagccttacaactattgcttgaagtagaacaagagatgagaactttctcgtttcagc

SEQ ID NO: 58498 - DNA, 52 bp, Artificial
  Synthetic oligonucleotide
atacttactgacagccagacagcgaccaaaagaattcggatggccatcaatt

SEQ ID NO: 58499 - DNA, 55 bp, Artificial
  Synthetic oligonucleotide
tctagcatacttactgacagccagacagcgaccaaaagaattcggatggccatca

SEQ ID NO: 58500 - DNA, 60 bp, Artificial
  Synthetic oligonucleotide
cgggactcaagcatacttactgacagccagacagcgaccaaaagaattcgaatggccatc

SEQ ID NO: 58501 - DNA, 60 bp, Artificial
  Synthetic oligonucleotide
aacgggactctagcatacttactgacagccagacagcgaccaaaagaatccggatggcca

SEQ ID NO: 58502 - DNA, 60 bp, Artificial
  Synthetic oligonucleotide
aaagggactctagcatacttactgacagccagacagcgaccaaaagaattcggatggcca

SEQ ID NO: 58503 - DNA, 54 bp, Artificial
  Synthetic oligonucleotide
atacttactgacagccagacagcgaccaaaagaattcggatggccatcaattaa

SEQ ID NO: 58504 - DNA, 55 bp, Artificial
  Synthetic oligonucleotide
atacttactgacagccagacagcgaccaaaagaattcggatggccatcaattaat

SEQ ID NO: 58505 - DNA, 60 bp, Artificial
  Synthetic oligonucleotide
cgaagcaactggaaatctagtggtaccaagatatgccttcgcaatgaaaagaggttctgg

SEQ ID NO: 58506 - DNA, 60 bp, Artificial
  Synthetic oligonucleotide
gcaactggaaatctagtggtaccaagatatgctttcgcaatgaatagaggttttagatct

SEQ ID NO: 58507 - DNA, 60 bp, Artificial
  Synthetic oligonucleotide
taacattcgaagcaactggaaatctagtggtaccaagatatgccttcgcaatgaaaagag

SEQ ID NO: 58508 - DNA, 60 bp, Artificial
  Synthetic oligonucleotide
tcgaagcaactggaaatctagtggtaccaagatatgccttcgcaatgaaaagaggttctg

SEQ ID NO: 58509 - DNA, 60 bp, Artificial
  Synthetic oligonucleotide
ttgttttcacgctcaccgtgcccagtgagcgaggactgcagcgtagacgctttgtccaaa

SEQ ID NO: 58510 - DNA, 60 bp, Artificial
  Synthetic oligonucleotide
ggcaggcctcgtacaagattttcaagatagaaaaagggaaagtagtcaaatcggtcgagt

SEQ ID NO: 58511 - DNA, 60 bp, Artificial
  Synthetic oligonucleotide
gatgtatttgtcataagagagccgttcatttcatgttcccacttggaatgccgaacattt

SEQ ID NO: 58512 - DNA, 58 bp, Artificial
  Synthetic oligonucleotide
ccgaacatttttcctgactcaaggagccttgttaaatgacaaacactcaaatggaacc

SEQ ID NO: 58513 - DNA, 60 bp, Artificial
  Synthetic oligonucleotide
tgttaacatcagcaataccaatcttgtcattgagcgagatgtaatttcagtggcactact

SEQ ID NO: 58514 - DNA, 60 bp, Artificial
  Synthetic oligonucleotide
gatgggctatctacagcaaggacaatggcataagaattggttccaagggagatgtatttg

SEQ ID NO: 58515 - DNA, 60 bp, Artificial
  Synthetic oligonucleotide
gcaaggacaatggcataagaattggttccaagggagatgtatttgtcataagagagccgt

SEQ ID NO: 58516 - DNA, 60 bp, Artificial
  Synthetic oligonucleotide
gggttagccattcaattcagactgggaatcaaaaccaacctgaaacatgcaaccagagcg

SEQ ID NO: 58517 - DNA, 60 bp, Artificial
  Synthetic oligonucleotide
cctgaaacatgcaaccagagcgtcattacctatgagaacaaaacttgggtaaatcagaca

SEQ ID NO: 58518 - DNA, 60 bp, Artificial
  Synthetic oligonucleotide
ctcgtttaagtacggcaaaggtgtttggatagggagaactaagagcactagttccaggag

SEQ ID NO: 58519 - DNA, 60 bp, Artificial
  Synthetic oligonucleotide
ggaacaggcagctgtggcccagtgtcttctaatggagcctacggggtgaaaggattctcg

SEQ ID NO: 58520 - DNA, 60 bp, Artificial
  Synthetic oligonucleotide
ggggtgaaaggattctcgtttaagtacggcaaaggtgtttggatagggagaactaagagc

SEQ ID NO: 58521 - DNA, 60 bp, Artificial
  Synthetic oligonucleotide
ggcatggttcaaatcgaccgtgggtgtctttcaatcgaaatctggagtatcaaatagggt

SEQ ID NO: 58522 - DNA, 60 bp, Artificial
  Synthetic oligonucleotide
ccaatgatggaacaggcagctgtggcccagtgtcttctaatggagcctacggggtgaaag

SEQ ID NO: 58523 - DNA, 60 bp, Artificial
  Synthetic oligonucleotide
cctgatgctagcgaaataatgtgtgtgtgcagggataattggcatggttcaaatcgaccg

SEQ ID NO: 58524 - DNA, 60 bp, Artificial
  Synthetic oligonucleotide
gcactagttccaggagtggatttgaaatgatttgggatccgaatggatggacagagacag

SEQ ID NO: 58525 - DNA, 60 bp, Artificial
  Synthetic oligonucleotide
atggatggacagagacagatagtagtttctcagtaaagcaagacattgtagcaataactg

SEQ ID NO: 58526 - DNA, 60 bp, Artificial
  Synthetic oligonucleotide
ggagaaacaacatattgaggacacaagaatctgaatgtgcctgcataaatggctcttgct

SEQ ID NO: 58527 - DNA, 60 bp, Artificial
  Synthetic oligonucleotide
ggggcagttgcggtattgaaatacaatggcataataacagacaccgtcaaaagctggaga

SEQ ID NO: 58528 - DNA, 60 bp, Artificial
  Synthetic oligonucleotide
ggctcttgctttactataatgaccgatggaccaagtaatgggcaggcctcgtacaagatt

SEQ ID NO: 58529 - DNA, 60 bp, Artificial
  Synthetic oligonucleotide
tgcttgccatgatggcatcagctggttgacagtgggaatttccgggccagacaatggggc

SEQ ID NO: 58530 - DNA, 60 bp, Artificial
  Synthetic oligonucleotide
ggcatcagctggttgacagtgggaatttccgggccagacaatggggcagttgcggtattg

SEQ ID NO: 58531 - DNA, 60 bp, Artificial
  Synthetic oligonucleotide
gaggacggcctaaggagaatacaatttggactagtgggagcagcatttccttctgtggtg

SEQ ID NO: 58532 - DNA, 60 bp, Artificial
  Synthetic oligonucleotide
gggctggactgcataaggccttgcttttgggttgaattaataagaggacggcctaaggag

SEQ ID NO: 58533 - DNA, 60 bp, Artificial
  Synthetic oligonucleotide
aatgttcttgttatcctgatgctagcgaaataatgtgtgtgtgcagggataattggcatg

SEQ ID NO: 58534 - DNA, 60 bp, Artificial
  Synthetic oligonucleotide
gattggtcaggatatagtgggagttttgttcaacacccagaattaacagggctggactgc

SEQ ID NO: 58535 - DNA, 60 bp, Artificial
  Synthetic oligonucleotide
gaccaggcgattatggataagaacatcatactgaaagcgaacttcagtgtgatcttcgac

SEQ ID NO: 58536 - DNA, 60 bp, Artificial
  Synthetic oligonucleotide
agcaaaagcagggtgacaaatacataatggactccaacacgataacctcgtttcaggtag

SEQ ID NO: 58537 - DNA, 60 bp, Artificial
  Synthetic oligonucleotide
gcaaaagcagggtgacaaatacataatggactccaacacgataacctcgtttcaggtaga

SEQ ID NO: 58538 - DNA, 60 bp, Artificial
  Synthetic oligonucleotide
agcaaaagcagggtgacaaatacataatggactccaacacgataacctcgttccaggtag

SEQ ID NO: 58539 - DNA, 60 bp, Artificial
  Synthetic oligonucleotide
gaactgagaacagcttcgagcagataacgttcttgcaagcattgcaactattacttgaag

SEQ ID NO: 58540 - DNA, 60 bp, Artificial
  Synthetic oligonucleotide
gaaagtgccagcacaaaatgctataagcacaactttcccttatactggtgatcctcctta

SEQ ID NO: 58541 - DNA, 60 bp, Artificial
  Synthetic oligonucleotide
aaagtgccagcacaaaatgctataagcacaacttttccttatactggtgaccctccttac

SEQ ID NO: 58542 - DNA, 60 bp, Artificial
  Synthetic oligonucleotide
aaaagtgccagcacaaaatgctataagcacaacttttccttatactggtgacccccctta

SEQ ID NO: 58543 - DNA, 60 bp, Artificial
  Synthetic oligonucleotide
aaaagtgccagcacaaaatgctataagcacaacttttccttatactggtgatcctcctta

SEQ ID NO: 58544 - DNA, 60 bp, Artificial
  Synthetic oligonucleotide
aaaagtgccagcacaaaatgctataagcacaactttcccttatactggtgatcctcctta

SEQ ID NO: 58545 - DNA, 60 bp, Artificial
  Synthetic oligonucleotide
ttaaaagtgccagcacaaaatgctataagcacaacttttccttatactggtgaccctcct

SEQ ID NO: 58546 - DNA, 60 bp, Artificial
  Synthetic oligonucleotide
cttaaaagtgccagcacaaaatgctataagcacaactttcccttatactggtgatcctcc

SEQ ID NO: 58547 - DNA, 60 bp, Artificial
  Synthetic oligonucleotide
gggagactgatccaaaacagcataacaatagagagaatggttctctcggcgtttgatgag

SEQ ID NO: 58548 - DNA, 60 bp, Artificial
  Synthetic oligonucleotide
ggaatcaatgatcggaatttctggagaggcgaaaatggacggaggacaagaattgcatac

SEQ ID NO: 58549 - DNA, 60 bp, Artificial
  Synthetic oligonucleotide
tgaagggaggctgatccaaaacagcataacaatagagagaatggttctttctgcatttga

SEQ ID NO: 58550 - DNA, 60 bp, Artificial
  Synthetic oligonucleotide
gactacgaagggagactgatccaaaacagcataacaatagagagaatggttctctcggcg

SEQ ID NO: 58551 - DNA, 60 bp, Artificial
  Synthetic oligonucleotide
agggagactgatccaaaacagcataacaatagagagaatggttctctcggcgtttgatga

SEQ ID NO: 58552 - DNA, 60 bp, Artificial
  Synthetic oligonucleotide
gggatcaatgatcggaatttctggagaggcgaaaatggacggaggacaaggattgcttac

SEQ ID NO: 58553 - DNA, 60 bp, Artificial
  Synthetic oligonucleotide
tgactacgaagggagactgatccaaaacagcataacaatagagagaatggttctctcggc

SEQ ID NO: 58554 - DNA, 60 bp, Artificial
  Synthetic oligonucleotide
gggattaacgatcggaatttctggagaggcgaaaatggacggaggacaagaattgcttac

SEQ ID NO: 58555 - DNA, 60 bp, Artificial
  Synthetic oligonucleotide
gatttgtgttcacgctcaccgtgcccagtaagcgaggactgcagcgtagacgctttgtcc

SEQ ID NO: 58556 - DNA, 58 bp, Artificial
  Synthetic oligonucleotide
atacttactgacagccagacagcgaccaaaagaattcggatggccatcaattaatttt

SEQ ID NO: 58557 - DNA, 60 bp, Artificial
  Synthetic oligonucleotide
atacttactgacagccagacagcgaccaaaagaattcggatggccatcaattaatttcga

SEQ ID NO: 58558 - DNA, 60 bp, Artificial
  Synthetic oligonucleotide
atacttactgacagccagacagcgaccaaaagaattcggatggccatcaattaattttga

SEQ ID NO: 58559 - DNA, 60 bp, Artificial
  Synthetic oligonucleotide
aaagaatgtgcaacattctcaaagggaaatttcagacagctgcccagagggcaatgatgg

SEQ ID NO: 58560 - DNA, 60 bp, Artificial
  Synthetic oligonucleotide
tacagccatgggacaggaacaggatacaccatggatacagtcaacaggacacatcagtac

SEQ ID NO: 58561 - DNA, 60 bp, Artificial
  Synthetic oligonucleotide
gccatgggacaggaacaggatacaccatggatacagtcaacaggacacatcagtactcag

SEQ ID NO: 58562 - DNA, 60 bp, Artificial
  Synthetic oligonucleotide
gatcatggataagaacatcatactgaaagcgaacttcagtgtgatcttcgatcggctgga

SEQ ID NO: 58563 - DNA, 60 bp, Artificial
  Synthetic oligonucleotide
ccatggatacagtcaacaggacacatcagtactcagaaagaggaagatggacaaaaaata

SEQ ID NO: 58564 - DNA, 60 bp, Artificial
  Synthetic oligonucleotide
cgatgccacagaggtgacacacaaatacaaacccggagatcatttgagataaagaaacta

SEQ ID NO: 58565 - DNA, 60 bp, Artificial
  Synthetic oligonucleotide
cctagttttggggtgtctggggtcaatgaatctgcagacatgagtattggagtcactgtc

SEQ ID NO: 58566 - DNA, 60 bp, Artificial
  Synthetic oligonucleotide
gaagtctgcttgaaatgggagttgatggatgaggattaccaggggcggttatgcaaccca

SEQ ID NO: 58567 - DNA, 60 bp, Artificial
  Synthetic oligonucleotide
gggtacaccatggatacagtcaacaggacacatcagtactcagaaagaggaaggtggaca

SEQ ID NO: 58568 - DNA, 60 bp, Artificial
  Synthetic oligonucleotide
cagaggtgacacacaaatacaaacccggagatcatttgagataaagaaactatgggacca

SEQ ID NO: 58569 - DNA, 60 bp, Artificial
  Synthetic oligonucleotide
aaacagattgtgtattagaagcaatggctttccttgaagaatcccatcctggtatttttg

SEQ ID NO: 58570 - DNA, 60 bp, Artificial
  Synthetic oligonucleotide
aatctggaaggataaagaaagaggaattcgctgagatcatgaagacctgttccaccattg

SEQ ID NO: 58571 - DNA, 60 bp, Artificial
  Synthetic oligonucleotide
gacacatcagtactcagaaagaggaagatggacaaaaaataccgaaactggagcaccgca

SEQ ID NO: 58572 - DNA, 60 bp, Artificial
  Synthetic oligonucleotide
ggcagacagacctatgactggactctaaataggaaccagcctgctgccacagcattggcc

SEQ ID NO: 58573 - DNA, 60 bp, Artificial
  Synthetic oligonucleotide
gacacaaggcagacagacctatgactggactctaaataggaaccagcctgctgccacagc

SEQ ID NO: 58574 - DNA, 60 bp, Artificial
  Synthetic oligonucleotide
aacaggacacatcagtactcagaaagaggaagatggacaaaaaataccgaaactggagca

SEQ ID NO: 58575 - DNA, 60 bp, Artificial
  Synthetic oligonucleotide
aagggtggacaaactgacacaaggcagacagacctatgactggactctaaatagaaacca

SEQ ID NO: 58576 - DNA, 60 bp, Artificial
  Synthetic oligonucleotide
gtattgctccaataatgttttcaaacaaaatggcgagactaggtaaggggtacatgtttg

SEQ ID NO: 58577 - DNA, 60 bp, Artificial
  Synthetic oligonucleotide
agatggcgagactaggtaaggggtacatgtttgaaagcaagagtatgaaactgagaactc

SEQ ID NO: 58578 - DNA, 60 bp, Artificial
  Synthetic oligonucleotide
agactaggtaaggggtacatgtttgaaagcaagagtatgaaactgagaactcaaatacct

SEQ ID NO: 58579 - DNA, 60 bp, Artificial
  Synthetic oligonucleotide
tgaaccaagtggctatgcccaaacagactgtgtattagaagcaatggctttccttgagga

SEQ ID NO: 58580 - DNA, 60 bp, Artificial
  Synthetic oligonucleotide
ccaaaagacaatgaaccaagtggctatgcccaaacagattgtgtattagaagcaatggct

SEQ ID NO: 58581 - DNA, 60 bp, Artificial
  Synthetic oligonucleotide
attgatggaccactaccaaaagacaatgaaccaagtggctatgcccaaacagattgtgta

SEQ ID NO: 58582 - DNA, 60 bp, Artificial
  Synthetic oligonucleotide
gtgaccctccttacagccatgggacaggaacagggtacaccatggatacagtcaacagga

SEQ ID NO: 58583 - DNA, 60 bp, Artificial
  Synthetic oligonucleotide
tgtaagctgctcggaattaatatgagcaaaaagaagtcttacataaacagaacaggtacc

SEQ ID NO: 58584 - DNA, 60 bp, Artificial
  Synthetic oligonucleotide
catgggacaggaacagggtacaccatggatacagtcaacaggacacatcagtactcagaa

SEQ ID NO: 58585 - DNA, 60 bp, Artificial
  Synthetic oligonucleotide
cttacagccatgggacaggaacagggtacaccatggatacagtcaacaggacacatcagt

SEQ ID NO: 58586 - DNA, 60 bp, Artificial
  Synthetic oligonucleotide
accctccttacagccatgggacaggaacagggtacaccatggatacagtcaacaggacac

SEQ ID NO: 58587 - DNA, 60 bp, Artificial
  Synthetic oligonucleotide
caggaacagggtacaccatggatacagtcaacaggacacatcagtactcagaaagaggaa

SEQ ID NO: 58588 - DNA, 60 bp, Artificial
  Synthetic oligonucleotide
ggctatgcccaaacagattgtgtattagaagcaatggctttccttgaggaatcccatcct

SEQ ID NO: 58589 - DNA, 60 bp, Artificial
  Synthetic oligonucleotide
ttaatatgagcaaaaagaagtcttacataaacagaacaggtacctttgaattcacgagct

SEQ ID NO: 58590 - DNA, 60 bp, Artificial
  Synthetic oligonucleotide
gactggactctaaataggaaccagcctgctgccacagcattggccaacactatagaagta

SEQ ID NO: 58591 - DNA, 60 bp, Artificial
  Synthetic oligonucleotide
agacctatgactggactctaaataggaaccagcctgctgccacagcattggccaacacta

SEQ ID NO: 58592 - DNA, 60 bp, Artificial
  Synthetic oligonucleotide
ttggccaacactatagaagtgttcagatcaaacggcctcatagcaaatgaatctgggagg

SEQ ID NO: 58593 - DNA, 60 bp, Artificial
  Synthetic oligonucleotide
tatagaagtgttcagatcaaacggcctcatagcaaatgaatctgggaggctaatagactt

SEQ ID NO: 58594 - DNA, 60 bp, Artificial
  Synthetic oligonucleotide
agcaaatgttgtaaggaagatgatgaccaactcccaggacactgaaatttctttcaccat

SEQ ID NO: 58595 - DNA, 60 bp, Artificial
  Synthetic oligonucleotide
taatgttttcaaacaaaatggcgagactaggtaaggggtacatgtttgaaagcaagagta

SEQ ID NO: 58596 - DNA, 60 bp, Artificial
  Synthetic oligonucleotide
acatcagtactcagaaagaggaagatggacaaaaaataccgaaactggagcaccgcaact

SEQ ID NO: 58597 - DNA, 60 bp, Artificial
  Synthetic oligonucleotide
tcagtactcagaaagaggaagatggacaaaaaataccgaaactggagcaccgcaactcaa

SEQ ID NO: 58598 - DNA, 60 bp, Artificial
  Synthetic oligonucleotide
gaaagaggaagatggacaaaaaataccgaaactggagcaccgcaactcaacccaattgat

SEQ ID NO: 58599 - DNA, 60 bp, Artificial
  Synthetic oligonucleotide
gtactcagaaagaggaagatggacaaaaaataccgaaactggagcaccgcaactcaaccc

SEQ ID NO: 58600 - DNA, 60 bp, Artificial
  Synthetic oligonucleotide
aactcaacccaattgatgggccactaccagaagacaatgaaccaagtggctatgcccaaa

SEQ ID NO: 58601 - DNA, 60 bp, Artificial
  Synthetic oligonucleotide
gaggaagatggacaaaaaataccgaaactggagcaccgcaactcaacccaattgatggac

SEQ ID NO: 58602 - DNA, 58 bp, Artificial
  Synthetic oligonucleotide
ttttaaccggttggagaatctgacattactaagggctttcaccgaagagggagcaatt

SEQ ID NO: 58603 - DNA, 58 bp, Artificial
  Synthetic oligonucleotide
ttttgaccggttggagactctgacattactaagggctttcaccgaagagggagcaatt

SEQ ID NO: 58604 - DNA, 60 bp, Artificial
  Synthetic oligonucleotide
gatcggttggagaatctgacattactaagggctttcaccgaagagggagcaattgttggc

SEQ ID NO: 58605 - DNA, 58 bp, Artificial
  Synthetic oligonucleotide
ttttgacaggttggagactctgacattactaagggctttcaccgaagagggagcaatt

SEQ ID NO: 58606 - DNA, 58 bp, Artificial
  Synthetic oligonucleotide
ttttgatcggttggagaatctgacattactaagggctttcaccgaagagggagcaatt

SEQ ID NO: 58607 - DNA, 58 bp, Artificial
  Synthetic oligonucleotide
ttttgaccggttggagaatctgacattactaagggctttcaccgaagagggagcaatt

SEQ ID NO: 58608 - DNA, 60 bp, Artificial
  Synthetic oligonucleotide
cagagacttgaagatgtctttgcagggaagaacacagatcttgaggcactcatggaatgg

SEQ ID NO: 58609 - DNA, 60 bp, Artificial
  Synthetic oligonucleotide
ccgactggaaacactgatactactcagggctttcactgaagaaggagcaattgttggcga

SEQ ID NO: 58610 - DNA, 60 bp, Artificial
  Synthetic oligonucleotide
ccgatgaggcacttaaaatgactattgcctctgttcctgcttcacgctacctaactgaca

SEQ ID NO: 58611 - DNA, 60 bp, Artificial
  Synthetic oligonucleotide
tttgaagaaataagatggttaattgaagaagtgcgacatagactgagaattacagaaaac

SEQ ID NO: 58612 - DNA, 60 bp, Artificial
  Synthetic oligonucleotide
ccaagaactgggtgatgccccattcctcgaccggcttcgccgagatcagaagtccctaag

SEQ ID NO: 58613 - DNA, 60 bp, Artificial
  Synthetic oligonucleotide
tcgtcgccttaaatacggtttaaaaagagggccttctacggaaggagtgcctgagtccat

SEQ ID NO: 58614 - DNA, 60 bp, Artificial
  Synthetic oligonucleotide
gcaatggtgtttggataggaagaactaaaagcactagttcaaggagtggatttgagatga

SEQ ID NO: 58615 - DNA, 60 bp, Artificial
  Synthetic oligonucleotide
tttaaatacggcaatggtgtttggataggaagaactaaaagcactagttcaagaagtgga

SEQ ID NO: 58616 - DNA, 60 bp, Artificial
  Synthetic oligonucleotide
gaaacaaatatctggaagagcatcccagtgctgggaaagaccctaagaagactggaggtc

SEQ ID NO: 58617 - DNA, 60 bp, Artificial
  Synthetic oligonucleotide
ggagggatactccctagtcggaattgatcctttccgtctgctccaaaacagtcaagtctt

SEQ ID NO: 58618 - DNA, 60 bp, Artificial
  Synthetic oligonucleotide
gatactccctagtcggaattgatcctttccgtctgctccaaaacagtcaagtcttcagcc

SEQ ID NO: 58619 - DNA, 60 bp, Artificial
  Synthetic oligonucleotide
gagaaagctgcttctcattgttcaggcacttagggacaacctggaacctggtaccttcga

SEQ ID NO: 58620 - DNA, 60 bp, Artificial
  Synthetic oligonucleotide
tttcagctgaatcgaggaaattgcttctcattgttcaggcacttagggacaacctggaac

SEQ ID NO: 58621 - DNA, 60 bp, Artificial
  Synthetic oligonucleotide
gctgagtcaaggaaactgcttctcattgttcaggcacttagggacaacctggaacctggt

SEQ ID NO: 58622 - DNA, 60 bp, Artificial
  Synthetic oligonucleotide
acataatctcaatatgggttagccattcaattcagactgggaatcaaaaccaacctgaaa

SEQ ID NO: 58623 - DNA, 60 bp, Artificial
  Synthetic oligonucleotide
agcaaaagcagggtagataatcactcaccgagtgacatccacaccatggcgtctcaaggc

SEQ ID NO: 58624 - DNA, 60 bp, Artificial
  Synthetic oligonucleotide
cagggtagataatcactcaccgagtgacatccacaccatggcgtctcaaggcaccaaacg

SEQ ID NO: 58625 - DNA, 60 bp, Artificial
  Synthetic oligonucleotide
gagcagtcaattgctgaggcaataatcgtggccatggtattttcacaagaggactgcatg

SEQ ID NO: 58626 - DNA, 60 bp, Artificial
  Synthetic oligonucleotide
gatgaacagtcaattgctgaggcaataatcgtggctatggttttttcacaggaggattgt

SEQ ID NO: 58627 - DNA, 60 bp, Artificial
  Synthetic oligonucleotide
cctaggcaaaagatggcaggctctctttgtgtgcgaatggaccaggcaatcatggaaaag

SEQ ID NO: 58628 - DNA, 60 bp, Artificial
  Synthetic oligonucleotide
ccatacagccatggaacagggacaggatacaccatggacacagtcaacagaacacatcaa

SEQ ID NO: 58629 - DNA, 60 bp, Artificial
  Synthetic oligonucleotide
tccatacagccatggaacagggacaggatacaccatggacacagtcaacagaacacatca

SEQ ID NO: 58630 - DNA, 60 bp, Artificial
  Synthetic oligonucleotide
agagtccaaattgaatcgagaagaaatagacggagtgaaactagaatcaatgggagttta

SEQ ID NO: 58631 - DNA, 60 bp, Artificial
  Synthetic oligonucleotide
gatagagtctgtaaacaatgctgtggtgatgccagctcatggtccagccaagagcatgga

SEQ ID NO: 58632 - DNA, 60 bp, Artificial
  Synthetic oligonucleotide
tttgaagaaataaggtggctgattgaagaagtgcgacatagactaaagattacagagaat

SEQ ID NO: 58633 - DNA, 60 bp, Artificial
  Synthetic oligonucleotide
ctgatccagaacagcttaacaatagagagaatggtgctctctgcttttgatgagaggagg

SEQ ID NO: 58634 - DNA, 60 bp, Artificial
  Synthetic oligonucleotide
taacaatagagagaatggtgctctctgcttttgatgagaggaggaataagtatctggaag

SEQ ID NO: 58635 - DNA, 60 bp, Artificial
  Synthetic oligonucleotide
cttttccaggacatactaatgaggatgtcaaaaatgcaattggggtcctcatcgggggac

SEQ ID NO: 58636 - DNA, 60 bp, Artificial
  Synthetic oligonucleotide
ctcttccaggacatactaatgaggatgtcaaaaatgcaattggggtcctcatcgggggac

SEQ ID NO: 58637 - DNA, 60 bp, Artificial
  Synthetic oligonucleotide
caggacatactaatgaggatgtcaaaaatgcaattggggtcctcatcgggggacttgaat

SEQ ID NO: 58638 - DNA, 60 bp, Artificial
  Synthetic oligonucleotide
tggattcccacactgtgtcaagctttcaggtagattgcttcctttggcatgtccgcaaac

SEQ ID NO: 58639 - DNA, 60 bp, Artificial
  Synthetic oligonucleotide
atggattcccacactgtgtcaagctttcaggtagattgcttcctttggcatgtccgcaaa

SEQ ID NO: 58640 - DNA, 60 bp, Artificial
  Synthetic oligonucleotide
gttcatgctcatgcccaagcagaaagtggctggccctctttgtgtcagaatggaccaggc

SEQ ID NO: 58641 - DNA, 60 bp, Artificial
  Synthetic oligonucleotide
ggattcccacactgtgtcaagctttcaggtagattgcttcctttggcatgtccgcaaaca

SEQ ID NO: 58642 - DNA, 60 bp, Artificial
  Synthetic oligonucleotide
catgctcatgcccaagcagaaagtggctggccctctttgtgtcagaatggaccaggcgat

SEQ ID NO: 58643 - DNA, 60 bp, Artificial
  Synthetic oligonucleotide
ttcatgctcatgcccaagcagaaagtggctggccctctttgtgtcagaatggaccaggcg

SEQ ID NO: 58644 - DNA, 60 bp, Artificial
  Synthetic oligonucleotide
cattactaagggctttcaccgaagagggagcaattgtaggcgaaatttcaccattgcctt

SEQ ID NO: 58645 - DNA, 60 bp, Artificial
  Synthetic oligonucleotide
acattactgagggctttcaccgaagagggagcaattgttggcgaaatttcaccattgcct

SEQ ID NO: 58646 - DNA, 60 bp, Artificial
  Synthetic oligonucleotide
ccattgccttctcttccaggacatactaatgaggatgtcaaaaatgcaattggggtcctc

SEQ ID NO: 58647 - DNA, 60 bp, Artificial
  Synthetic oligonucleotide
accattgccttctcttccaggacatactaatgaggatgtcaaaaatgcaattgggatcct

SEQ ID NO: 58648 - DNA, 60 bp, Artificial
  Synthetic oligonucleotide
gcgaatattgagaacacaagagtctgaatgtgtctgtgtgaacgggtcatgtttcacctt

SEQ ID NO: 58649 - DNA, 60 bp, Artificial
  Synthetic oligonucleotide
gggtttgagatgatttgggatcctaatggatggacaaataccgacagtaatttctcagtg

SEQ ID NO: 58650 - DNA, 60 bp, Artificial
  Synthetic oligonucleotide
gaaccttttttctgacccaaggtgctctattaaatgacaaacattcaaatgggaccgtta

SEQ ID NO: 58651 - DNA, 60 bp, Artificial
  Synthetic oligonucleotide
gaaccttctttctgacccaaggtgctctattaaatgacaaacattcaaatgggaccgtta

SEQ ID NO: 58652 - DNA, 60 bp, Artificial
  Synthetic oligonucleotide
cggaatttctggtccagacaatggagctgtggctgtactaaaatacaacggcataataac

SEQ ID NO: 58653 - DNA, 60 bp, Artificial
  Synthetic oligonucleotide
gggtttgagatgatttgggatcctaatggatggacagataccgacagtgttttctcagtg

SEQ ID NO: 58654 - DNA, 60 bp, Artificial
  Synthetic oligonucleotide
gtggcaataactgattggtcagggtacagcggaagtttcgttcaacatcctgagttaaca

SEQ ID NO: 58655 - DNA, 60 bp, Artificial
  Synthetic oligonucleotide
aaggggtttgagatgatttgggatcctaatggatggacagataccgacagtgttttctca

SEQ ID NO: 58656 - DNA, 58 bp, Artificial
  Synthetic oligonucleotide
aaggggtttgagatgatttgggatcctaatggatggacagataccgacagtgatttct

SEQ ID NO: 58657 - DNA, 60 bp, Artificial
  Synthetic oligonucleotide
aaagggtttgagatgatttgggatcctaatggatggacagataccgacagtgatttctca

SEQ ID NO: 58658 - DNA, 60 bp, Artificial
  Synthetic oligonucleotide
aaggggtttgagatgatttgggatcctaatggatggacaaataccgacagtaatttctca

SEQ ID NO: 58659 - DNA, 60 bp, Artificial
  Synthetic oligonucleotide
tctcgaataaaatggcaagactaggaaaaggatacatgttcgaaagtaagagcatgaagc

SEQ ID NO: 58660 - DNA, 60 bp, Artificial
  Synthetic oligonucleotide
ggcaagactaggaaaaggatacatgttcgaaagtaagagcatgaagcttcgaacacagat

SEQ ID NO: 58661 - DNA, 60 bp, Artificial
  Synthetic oligonucleotide
cttggttcaactccttcctcacacatgcactgaagtagttgtggcaatgctactatttgc

SEQ ID NO: 58662 - DNA, 60 bp, Artificial
  Synthetic oligonucleotide
cccagccaagagcatggaatatgatgctgttgctactacacactcctggatccctaagag

SEQ ID NO: 58663 - DNA, 60 bp, Artificial
  Synthetic oligonucleotide
gcccagccaagagcatggaatatgatgctgttgctactacacactcctggatccctaaga

SEQ ID NO: 58664 - DNA, 60 bp, Artificial
  Synthetic oligonucleotide
ctcatggtccagccaagagcatggaatatgatgctgttgctacgacgcactcctggatcc

SEQ ID NO: 58665 - DNA, 56 bp, Artificial
  Synthetic oligonucleotide
tcatggcccggccaagagcatggaatatgatgctgttgctactacacactcctgga

SEQ ID NO: 58666 - DNA, 60 bp, Artificial
  Synthetic oligonucleotide
ggcccagccaagagcatggaatatgatgctgttgctactacacactcctggatccctaag

SEQ ID NO: 58667 - DNA, 60 bp, Artificial
  Synthetic oligonucleotide
ccagccaagagcatggaatatgatgctgttgctacgacgcactcctggatccctaagagg

SEQ ID NO: 58668 - DNA, 60 bp, Artificial
  Synthetic oligonucleotide
gctcatggcccagccaagagcatggaatatgatgctgttgctactacacactcctggatc

SEQ ID NO: 58669 - DNA, 60 bp, Artificial
  Synthetic oligonucleotide
cgctacctaactgacatgacccttgaggaaatgtcaagagactggttcatgctcatgccc

SEQ ID NO: 58670 - DNA, 60 bp, Artificial
  Synthetic oligonucleotide
gaatgatcggaatattgcctgacatgaccccaagtactgagatgtcgctgagggggataa

SEQ ID NO: 58671 - DNA, 60 bp, Artificial
  Synthetic oligonucleotide
ggaatgatcggaatattgcccgacatgaccccaagtactgagatgtcgctgagggggata

SEQ ID NO: 58672 - DNA, 60 bp, Artificial
  Synthetic oligonucleotide
gggatgatcggaatattgcccgacatgaccccaagtactgagatgtcgctgagggggata

SEQ ID NO: 58673 - DNA, 60 bp, Artificial
  Synthetic oligonucleotide
aatgtcacagtcccgcacccgcgagatactcaccaaaaccactgtggaccacatggccat

SEQ ID NO: 58674 - DNA, 60 bp, Artificial
  Synthetic oligonucleotide
tcccagtgctgggaaagatcctaagaaaactggaggacccatatatagaagagtagacgg

SEQ ID NO: 58675 - DNA, 58 bp, Artificial
  Synthetic oligonucleotide
ccaccattgaagatctcagacggcaaaagtagtgaatttagcttgtccttcatgaaaa

SEQ ID NO: 58676 - DNA, 60 bp, Artificial
  Synthetic oligonucleotide
ctgaaaatctacagagattcgcttggagaagccgtaatgagaatgggagacctccactac

SEQ ID NO: 58677 - DNA, 60 bp, Artificial
  Synthetic oligonucleotide
ctaatgtactgattgggcaaggagacgtagtgttggtaatgaaacggaaacgggactcaa

SEQ ID NO: 58678 - DNA, 60 bp, Artificial
  Synthetic oligonucleotide
ggctaatgtgctaattgggcaaggagacgtagtgttggtaatgaaacggaaaagggactc

SEQ ID NO: 58679 - DNA, 60 bp, Artificial
  Synthetic oligonucleotide
gggcaaggagacgtagtgttggtaatgaaacggaaacgggactcaagcatacttactgac

SEQ ID NO: 58680 - DNA, 60 bp, Artificial
  Synthetic oligonucleotide
ctcagaccgagtgatggtatcacctctggccgtgacatggtggaataggaatgggccaac

SEQ ID NO: 58681 - DNA, 54 bp, Artificial
  Synthetic oligonucleotide
ttttggagacaatccacgccccaatgatggaacaggcagttgtggtccagtgtc

SEQ ID NO: 58682 - DNA, 60 bp, Artificial
  Synthetic oligonucleotide
gcaaggacaatggtataaggataggttccaagggagatgtatttgtcatcagagagccat

SEQ ID NO: 58683 - DNA, 60 bp, Artificial
  Synthetic oligonucleotide
aataggttccaagggagatgtatttgtcatcagagagccattcatttcgtgctctcactt

SEQ ID NO: 58684 - DNA, 60 bp, Artificial
  Synthetic oligonucleotide
gataggttccaagggagatgtatttgtcatcagagagccatttatttcgtgctctcactt

SEQ ID NO: 58685 - DNA, 60 bp, Artificial
  Synthetic oligonucleotide
cagcaaggacaatggtataaggataggttccaagggagatgtatttgtcatcagagagcc

SEQ ID NO: 58686 - DNA, 60 bp, Artificial
  Synthetic oligonucleotide
ggctttcaccgaagagggagcaattgtaggcgaaatttcaccattgccttctcttccagg

SEQ ID NO: 58687 - DNA, 56 bp, Artificial
  Synthetic oligonucleotide
gaaagagcacacagaatgccattgacgggatcactaacaaagtaaactctgttatt

SEQ ID NO: 58688 - DNA, 53 bp, Artificial
  Synthetic oligonucleotide
gagcacacagaatgccattgacgggatcactaacaaagtaaattctgttattg

SEQ ID NO: 58689 - DNA, 60 bp, Artificial
  Synthetic oligonucleotide
gagcacacagaatgccattgacgggatcactaacaaagtaaattctgttattgaaaagat

SEQ ID NO: 58690 - DNA, 60 bp, Artificial
  Synthetic oligonucleotide
atatttaaagatgagtcttctaaccgaggtcgaaacgtacgttctttctatcatcccgtc

SEQ ID NO: 58691 - DNA, 56 bp, Artificial
  Synthetic oligonucleotide
aacaagagattagaacgttttcgtttcagcttatttaatgataaaaaacacccttg

SEQ ID NO: 58692 - DNA, 60 bp, Artificial
  Synthetic oligonucleotide
aggatttgtgttcacgctcaccgtgcccagtgagcgaggactgcaacgtagacgctttgt

SEQ ID NO: 58693 - DNA, 55 bp, Artificial
  Synthetic oligonucleotide
gaccaggcaatcatggataagaacatcatactgaaagcgaacttcagtgtgatct

SEQ ID NO: 58694 - DNA, 60 bp, Artificial
  Synthetic oligonucleotide
cttgaagagtcccacccaggaatctttgaaaactcgtgtcttgaaacgatggaagttgtc

SEQ ID NO: 58695 - DNA, 60 bp, Artificial
  Synthetic oligonucleotide
ccacccaggaatctttgaaaactcgtgtcttgaaacgatggaagttgttcaacaaacaag

SEQ ID NO: 58696 - DNA, 60 bp, Artificial
  Synthetic oligonucleotide
cacccaggaatctttgaaaactcgtgtcttgaaacgatggaagttgttcaacaaacgagg

SEQ ID NO: 58697 - DNA, 60 bp, Artificial
  Synthetic oligonucleotide
gatgggctatatacagcaaggataatggtataaggataggttccaagggagatgtatttg

SEQ ID NO: 58698 - DNA, 60 bp, Artificial
  Synthetic oligonucleotide
atctgttccaccattgaagagctcagacggcagaagtagtgaatttagcttgtccttcat

SEQ ID NO: 58699 - DNA, 60 bp, Artificial
  Synthetic oligonucleotide
tctgttccaccattgaagagctcagacggcagaagtagtgaatttagcttgtccttcatg

SEQ ID NO: 58700 - DNA, 51 bp, Artificial
  Synthetic oligonucleotide
gcgaggaatcaatgatcggaatttctggagaggcgaaaatgggcggaggac

SEQ ID NO: 58701 - DNA, 60 bp, Artificial
  Synthetic oligonucleotide
taggacaggaacatttgaattcacaagctttttttaccgctatgggtttgtagccaattt

SEQ ID NO: 58702 - DNA, 60 bp, Artificial
  Synthetic oligonucleotide
gatgtggtaaactttgtgagcatggagttttctcttactgacccgagactggagccacac

SEQ ID NO: 58703 - DNA, 56 bp, Artificial
  Synthetic oligonucleotide
acggcagaaatagtgaatttagcttgtccttcatgaaaaaatgccttgtttctact

SEQ ID NO: 58704 - DNA, 60 bp, Artificial
  Synthetic oligonucleotide
gtcacctctgactaagggaattctgggattcgtgttcacgctcaccgtgcccagtgagcg

SEQ ID NO: 58705 - DNA, 60 bp, Artificial
  Synthetic oligonucleotide
gtcacctctgactaagggaattttgggattcgtgttcacgctcaccgtgcccagtgagcg

SEQ ID NO: 58706 - DNA, 60 bp, Artificial
  Synthetic oligonucleotide
caggactttctttctgactcaaggggccttgttgaatgacaagcattccaatggaaccgt

SEQ ID NO: 58707 - DNA, 58 bp, Artificial
  Synthetic oligonucleotide
caggactttctttctgactcaaggggccttgttgaatgacaagcattccaatggaacc

SEQ ID NO: 58708 - DNA, 60 bp, Artificial
  Synthetic oligonucleotide
gcacaaacagactgtgtcttggaagcaatggctttccttgaagaatcccacccagggatc

SEQ ID NO: 58709 - DNA, 60 bp, Artificial
  Synthetic oligonucleotide
agaatgccactgagatcagagcatctgttgggagaatggttggtggaatcgggagattct

SEQ ID NO: 58710 - DNA, 60 bp, Artificial
  Synthetic oligonucleotide
cgtacgttctttctatcatcccgtcaggccccctcaaagccgagatcgcacagagactgg

SEQ ID NO: 58711 - DNA, 60 bp, Artificial
  Synthetic oligonucleotide
cgttctctctatcatcccgtcaggccccctcaaagccgagatcgcacagagacttgaaga

SEQ ID NO: 58712 - DNA, 60 bp, Artificial
  Synthetic oligonucleotide
cgtacgttctctctatcatcccgtcaggccccctcaaagccgagatcgcacagagacttg

SEQ ID NO: 58713 - DNA, 60 bp, Artificial
  Synthetic oligonucleotide
accttaatgagctgtcctgttggtgaggctccctctccatacaattcaaggtttgagtcg

SEQ ID NO: 58714 - DNA, 60 bp, Artificial
  Synthetic oligonucleotide
gagaatagtttcgagcaaataacatttatgcaagccttacaactattgcttgaagtagaa

SEQ ID NO: 58715 - DNA, 60 bp, Artificial
  Synthetic oligonucleotide
agttgaaaatgacagagaatagtttcgagcaaataacatttatgcaagccttacaactat

SEQ ID NO: 58716 - DNA, 60 bp, Artificial
  Synthetic oligonucleotide
atccaagcgggagttgacaggttttatcgaacctgtaagctactcggaattaacatgagc

SEQ ID NO: 58717 - DNA, 60 bp, Artificial
  Synthetic oligonucleotide
cttactgacagccagacagcgaccaaaagaattcggatggccatcaattaatttcgaata

SEQ ID NO: 58718 - DNA, 56 bp, Artificial
  Synthetic oligonucleotide
gctcaccgtgcccagtgagcgaggactgcagcgtagacgctttgtccagaatgctc

SEQ ID NO: 58719 - DNA, 60 bp, Artificial
  Synthetic oligonucleotide
cgctcaccgtgcccagtgagcgaggactgcagcgtagacgctttgtccagaatgccctca

SEQ ID NO: 58720 - DNA, 60 bp, Artificial
  Synthetic oligonucleotide
tctgttccaccattgaagagctcagacggcaaaagtagtgaatttagcttgtccttcatg

SEQ ID NO: 58721 - DNA, 60 bp, Artificial
  Synthetic oligonucleotide
atctgttccaccattgaagagctcagacggcaaaagtagtgaatttagcttgtccttcgt

SEQ ID NO: 58722 - DNA, 60 bp, Artificial
  Synthetic oligonucleotide
tctgttccaccattgaagagctcagacggcaaaagtagtgaatttagcttgtccttcgtg

SEQ ID NO: 58723 - DNA, 60 bp, Artificial
  Synthetic oligonucleotide
gggatactccctagtcggaattgatcctttccgtctgctccaaaacagtcaagtcttcag

SEQ ID NO: 58724 - DNA, 60 bp, Artificial
  Synthetic oligonucleotide
cagatgtgcactgaactcaaactcagtgactatgaagggagactaatccaaaacagcatc

SEQ ID NO: 58725 - DNA, 60 bp, Artificial
  Synthetic oligonucleotide
accattgaagagctcagacggcagaaatagtgaatttagcttgtccttcatgaaaaaatg

SEQ ID NO: 58726 - DNA, 56 bp, Artificial
  Synthetic oligonucleotide
accattgaagagctcagacggcagaaatagtgaatttagcttgtccttcatgaaaa

SEQ ID NO: 58727 - DNA, 60 bp, Artificial
  Synthetic oligonucleotide
ctattcgactggtgcacttgccagttgcatgggcctcatatacaacagaatgggaacagt

SEQ ID NO: 58728 - DNA, 60 bp, Artificial
  Synthetic oligonucleotide
ctactcaactggtgcacttgccagttgcatgggcctcatatacaacagaatgggaacagt

SEQ ID NO: 58729 - DNA, 60 bp, Artificial
  Synthetic oligonucleotide
agagctgcagtatcagcagatccactagcatctttattagaaatgtgccacagcacacag

SEQ ID NO: 58730 - DNA, 60 bp, Artificial
  Synthetic oligonucleotide
caggattgcaaaatttcccctttgatggttgcatacatgttagagagggaacttgtccgc

SEQ ID NO: 58731 - DNA, 60 bp, Artificial
  Synthetic oligonucleotide
aagtcaaaatacgccgaagagtcgacataaatcctggtcatgcagacctcagcgccaagg

SEQ ID NO: 58732 - DNA, 60 bp, Artificial
  Synthetic oligonucleotide
accgagatgtcaatgagaggagtgagagtcagcaaaatgggtgtagatgaatactccaat

SEQ ID NO: 58733 - DNA, 60 bp, Artificial
  Synthetic oligonucleotide
agaattcacaatggttgggaaaagggcaacagctatactcagaaaagcaaccaggagatt

SEQ ID NO: 58734 - DNA, 60 bp, Artificial
  Synthetic oligonucleotide
cctggtatgactccaagtaccgagatgtcaatgagaggagtgagagtcagcaaaatgggt

SEQ ID NO: 58735 - DNA, 60 bp, Artificial
  Synthetic oligonucleotide
gactccaagtaccgagatgtcaatgagaggagtgagagtcagcaaaatgggtgtagatga

SEQ ID NO: 58736 - DNA, 60 bp, Artificial
  Synthetic oligonucleotide
caggaatgagaatacttgtaaggggtaattctccagtattcaactacaacaagaccacca

SEQ ID NO: 58737 - DNA, 60 bp, Artificial
  Synthetic oligonucleotide
ttgggcaaggggatgtagtgttggtaatgaaacgaaaacgggactctagcatacttactg

SEQ ID NO: 58738 - DNA, 60 bp, Artificial
  Synthetic oligonucleotide
acatggaacctttggccctgtacactttagaaaccaagtcaaaatacgcagaagagtcga

SEQ ID NO: 58739 - DNA, 60 bp, Artificial
  Synthetic oligonucleotide
aaatggatgatggcaatgaaatacccaattacagctgataaaaggataacggaaatgatt

SEQ ID NO: 58740 - DNA, 60 bp, Artificial
  Synthetic oligonucleotide
ttagaaaccaagtcaaaatacgccgaagagtcgacataaatcctggtcatgcagacctca

SEQ ID NO: 58741 - DNA, 60 bp, Artificial
  Synthetic oligonucleotide
ctttgaaaaggttgaaaggttaaaacatggaacctttggccctgtacactttagaaacca

SEQ ID NO: 58742 - DNA, 60 bp, Artificial
  Synthetic oligonucleotide
ccggaagacaggagagaaacccatcacttaggatgaaatggatgatggcaatgaaatacc

SEQ ID NO: 58743 - DNA, 60 bp, Artificial
  Synthetic oligonucleotide
ggaccagtggcaagtactattcactatccaaaaatctacaaaacttactttgaaaaggtt

SEQ ID NO: 58744 - DNA, 60 bp, Artificial
  Synthetic oligonucleotide
tacgccgaagagtcgacataaatcctggtcatgcagacctcagcgccaaggaggcacagg

SEQ ID NO: 58745 - DNA, 60 bp, Artificial
  Synthetic oligonucleotide
cgaccattattaatagatggaactgcatcattgagtcctggaatgatgatgggcatgttc

SEQ ID NO: 58746 - DNA, 60 bp, Artificial
  Synthetic oligonucleotide
cttactgacagccagacagcgaccaaaagaattcggatggccatcaactaatttcgaata

SEQ ID NO: 58747 - DNA, 60 bp, Artificial
  Synthetic oligonucleotide
agttctgcatttaacacaggggacatgctgggagcagatgtacactccaggtggggaggt

SEQ ID NO: 58748 - DNA, 60 bp, Artificial
  Synthetic oligonucleotide
gcctgattaacgatccctgggttttgcttaatgcatcttggtttaactccttcctcacac

SEQ ID NO: 58749 - DNA, 60 bp, Artificial
  Synthetic oligonucleotide
tgcctgattaacgatccctgggttttgcttaatgcatcttggttcaactccttcctcaca

SEQ ID NO: 58750 - DNA, 60 bp, Artificial
  Synthetic oligonucleotide
atttgaaattacaggaaccatgcgcaggctcgccgaccaaagtctcccaccgaacttctc

SEQ ID NO: 58751 - DNA, 60 bp, Artificial
  Synthetic oligonucleotide
gatccctgggttttgcttaatgcatcttggttcaactccttccttacacatgcactgaaa

SEQ ID NO: 58752 - DNA, 60 bp, Artificial
  Synthetic oligonucleotide
atttgaagtcacaggaacaatgcgcaggcttgccgaccaaagtctcccaccgaacttctc

SEQ ID NO: 58753 - DNA, 60 bp, Artificial
  Synthetic oligonucleotide
ggacttgaatggaatgataacacagttcgagtctctgaaactctacagagattcgcttgg

SEQ ID NO: 58754 - DNA, 60 bp, Artificial
  Synthetic oligonucleotide
ctgaaactctacagagattcgcttggagaagcagtaatgagactgggggacctccattca

SEQ ID NO: 58755 - DNA, 60 bp, Artificial
  Synthetic oligonucleotide
cagtgctgtgataatgccagctcatggtccagccaagagcatggaatatgatgctgttgc

SEQ ID NO: 58756 - DNA, 60 bp, Artificial
  Synthetic oligonucleotide
cagtgctgtggtaatgccagctcatggtccagccaagagcatggaatatgatgctgttgc

SEQ ID NO: 58757 - DNA, 60 bp, Artificial
  Synthetic oligonucleotide
atgctgtggtaatgccagctcatggcccggccaagagcatggaatatgatgctgttgcta

SEQ ID NO: 58758 - DNA, 60 bp, Artificial
  Synthetic oligonucleotide
gacagctaatgaatcaggaaggctaatagattttctcaaggatgtgatggaatcaatgga

SEQ ID NO: 58759 - DNA, 60 bp, Artificial
  Synthetic oligonucleotide
gatatgcacagacagactgtgtcttggaagcaatggctttccttgaagagtcccacccag

SEQ ID NO: 58760 - DNA, 60 bp, Artificial
  Synthetic oligonucleotide
agtggatatgcacagacagactgtgtcttggaagcaatggctttccttgaagagtcccac

SEQ ID NO: 58761 - DNA, 60 bp, Artificial
  Synthetic oligonucleotide
tctgacagctaatgaatcaggaaggctaatagattttctcaaggatgtgatggaatcaat

SEQ ID NO: 58762 - DNA, 60 bp, Artificial
  Synthetic oligonucleotide
cggtttaacggctaatgaatcaggaaggctaatagatttcctgaaggatgtaatggaatc

SEQ ID NO: 58763 - DNA, 60 bp, Artificial
  Synthetic oligonucleotide
cctttgacatgagtaatgaggggtcttatttcttcggagacaatgcagaggagtatgaca

SEQ ID NO: 58764 - DNA, 60 bp, Artificial
  Synthetic oligonucleotide
gaataatgaggggtcttatttcttcggagacaatgcagaggagtatgacaattgaagagc

SEQ ID NO: 58765 - DNA, 60 bp, Artificial
  Synthetic oligonucleotide
gtttgacatgagtaatgaggggtcttatttcttcggagacaatgcagaggagtatgacag

SEQ ID NO: 58766 - DNA, 60 bp, Artificial
  Synthetic oligonucleotide
tgtcacctctgactaaggggattttaggatttgtgttcacgctcaccgtgcccagtgagc

SEQ ID NO: 58767 - DNA, 60 bp, Artificial
  Synthetic oligonucleotide
ggtgccaaacccctcatggggctttgaacagcagccttccttttcagaatgtacatccta

SEQ ID NO: 58768 - DNA, 55 bp, Artificial
  Synthetic oligonucleotide
acagagattcgcttggagaagcagtaatgagactgggggatctccattcactaca

SEQ ID NO: 58769 - DNA, 55 bp, Artificial
  Synthetic oligonucleotide
acagagattcgcttggagaagcagtaatgagactgggggacctccattctctcca

SEQ ID NO: 58770 - DNA, 60 bp, Artificial
  Synthetic oligonucleotide
aatctacagagattcgcttggagaagcagtaatgaggatgggagacctccactccctcca

SEQ ID NO: 58771 - DNA, 55 bp, Artificial
  Synthetic oligonucleotide
acagagattcgcttggagaagcagtaatgagactgggggatctccattcactcca

SEQ ID NO: 58772 - DNA, 55 bp, Artificial
  Synthetic oligonucleotide
acagagattcgcttggagaagcagtaatgagactgggggacctccattcactaca

SEQ ID NO: 58773 - DNA, 50 bp, Artificial
  Synthetic oligonucleotide
gcgaccaaaagaatccggatggccatcaattagtgtcgaattgtttaaaa

SEQ ID NO: 58774 - DNA, 60 bp, Artificial
  Synthetic oligonucleotide
gcgaccaaaagaatccggatggccatcaattagtgtcgaattgtttaaaaacgaccttgt

SEQ ID NO: 58775 - DNA, 58 bp, Artificial
  Synthetic oligonucleotide
agtgcctgattaatgatccctgggttttgcttaatgcttcttggttcaactccttcct

SEQ ID NO: 58776 - DNA, 60 bp, Artificial
  Synthetic oligonucleotide
aatgcctgattaatgatccctgggttttgcttaatgcttcttggttcaactccttcctaa

SEQ ID NO: 58777 - DNA, 60 bp, Artificial
  Synthetic oligonucleotide
gcaattgaggagtgcctgattaatgatccctgggttttgcttaatgcttcttggttcaac

SEQ ID NO: 58778 - DNA, 60 bp, Artificial
  Synthetic oligonucleotide
ggagtgcctgattaatgatccctgggttttgcttaatgcttcttggttcaactccttcct

SEQ ID NO: 58779 - DNA, 60 bp, Artificial
  Synthetic oligonucleotide
agtgcctaattaatgatccctgggttttgcttaatgcttcttggttcaactccttcctaa

SEQ ID NO: 58780 - DNA, 60 bp, Artificial
  Synthetic oligonucleotide
gacactaatagaacctggagacacaataacattcgaagcaactggaaatctagtggtacc

SEQ ID NO: 58781 - DNA, 60 bp, Artificial
  Synthetic oligonucleotide
gagacacaataacattcgaagcaactggaaatctagtggtaccaagatatgccttcgcaa

SEQ ID NO: 58782 - DNA, 60 bp, Artificial
  Synthetic oligonucleotide
gaaagcaggcaaaccatttgaatggatgtcaatccaacattacttttcttaaaagtgcca

SEQ ID NO: 58783 - DNA, 60 bp, Artificial
  Synthetic oligonucleotide
gcaggcaaaccatttgaatggatgtcaatccaacattacttttcttaaaagtgccagcac

SEQ ID NO: 58784 - DNA, 60 bp, Artificial
  Synthetic oligonucleotide
cgttatgggtttgttgccaatttcagcatggagcttcctagttttggggtgtctggggtc

SEQ ID NO: 58785 - DNA, 60 bp, Artificial
  Synthetic oligonucleotide
gccaatttcagcatggagcttcctagttttggggtgtctggggtcaatgaatctgcagac

SEQ ID NO: 58786 - DNA, 60 bp, Artificial
  Synthetic oligonucleotide
gaaagcaggcaaaccatttgaatggatgtcaatccgactttacttttcttaaaagtgcca

SEQ ID NO: 58787 - DNA, 60 bp, Artificial
  Synthetic oligonucleotide
gtttttggagacaacccacgccccaatgatggaacaggcagttgtggtccagtgtcttct

SEQ ID NO: 58788 - DNA, 60 bp, Artificial
  Synthetic oligonucleotide
taaactttgtgagcatggaattttccctcactgacccaagacttgagccacacaaatggg

SEQ ID NO: 58789 - DNA, 60 bp, Artificial
  Synthetic oligonucleotide
cggccactattaatagatggaactgcatcactgagtcctggaatgatgatgggcatgttc

SEQ ID NO: 58790 - DNA, 60 bp, Artificial
  Synthetic oligonucleotide
gctttcaggtagactgtttcctttggcatattcgcaaacggtttgcagactacggattgg

SEQ ID NO: 58791 - DNA, 60 bp, Artificial
  Synthetic oligonucleotide
gctttcaggtagactgtttcctttggcatattcgcaaacggtttgcagacaatggattgg

SEQ ID NO: 58792 - DNA, 60 bp, Artificial
  Synthetic oligonucleotide
ttggcgtcaagcgaataatggagaagacgcaactgctggtctcactcatctaatgatctg

SEQ ID NO: 58793 - DNA, 60 bp, Artificial
  Synthetic oligonucleotide
ggcgtcaagcgaataatggagaagacgcaactgctggtctcactcatctaatgatctggc

SEQ ID NO: 58794 - DNA, 60 bp, Artificial
  Synthetic oligonucleotide
ggcgtcaagcgaataatggagaagacgcaactgctggtctcacccatctgatgatctggc

SEQ ID NO: 58795 - DNA, 60 bp, Artificial
  Synthetic oligonucleotide
aaagcaggtagatattgaaagatgagtcttctaaccgaggtcgaaacgtacgttctctct

SEQ ID NO: 58796 - DNA, 60 bp, Artificial
  Synthetic oligonucleotide
gtagatattgaaagatgagtcttctaaccgaggtcgaaacgtacgttctctctatcgtcc

SEQ ID NO: 58797 - DNA, 60 bp, Artificial
  Synthetic oligonucleotide
gatggttaattgcagaatgcagaaacatattaaccagaactgagaacagcttcgagcaga

SEQ ID NO: 58798 - DNA, 57 bp, Artificial
  Synthetic oligonucleotide
cattaaagggaagaggcagcacacttgggctcgacctgcgagtggccacaatggaag

SEQ ID NO: 58799 - DNA, 60 bp, Artificial
  Synthetic oligonucleotide
cattaaagggaagaggcagcacacttgggctcgacctgcgagtggctacaatggaaggca

SEQ ID NO: 58800 - DNA, 57 bp, Artificial
  Synthetic oligonucleotide
cattaaagggaagaggcagcacacttgggctcgacctgcgagtggctacaatggaag

SEQ ID NO: 58801 - DNA, 60 bp, Artificial
  Synthetic oligonucleotide
atggaaagtgtgaagaacggcacatatgactatcccaagtattcagaagagtccaaattg

SEQ ID NO: 58802 - DNA, 60 bp, Artificial
  Synthetic oligonucleotide
aggacaaaccctctggagtaaaacaaacgatgccggctcagaccgagtgatggtatcacc

SEQ ID NO: 58803 - DNA, 60 bp, Artificial
  Synthetic oligonucleotide
gaggccactgggaatttgatagcaccatggtatgctttcgcactgaataagggatctgac

SEQ ID NO: 58804 - DNA, 60 bp, Artificial
  Synthetic oligonucleotide
gagaagaaatagacggagtgaaactagaatcaatgggagtttatcaaattttggcgatct

SEQ ID NO: 58805 - DNA, 60 bp, Artificial
  Synthetic oligonucleotide
ctccatacagccatggaacagggacaggatacaccatggatacagtcaacaggacacatc

SEQ ID NO: 58806 - DNA, 60 bp, Artificial
  Synthetic oligonucleotide
aatcctgtcacctctgactaaggggattttaggatttgtgttcacgctcaccgtgcccag

SEQ ID NO: 58807 - DNA, 60 bp, Artificial
  Synthetic oligonucleotide
atcctgtcacctctgactaaggggattttaggatttgtgttcacgctcaccgtgcccagt

SEQ ID NO: 58808 - DNA, 60 bp, Artificial
  Synthetic oligonucleotide
agaccgatcctgtcacctctgactaaggggattttaggatttgtgttcacgctcaccgtg

SEQ ID NO: 58809 - DNA, 60 bp, Artificial
  Synthetic oligonucleotide
ccaatcctgtcacctctgactaaggggattttaggatttgtgttcacgctcaccgtgccc

SEQ ID NO: 58810 - DNA, 58 bp, Artificial
  Synthetic oligonucleotide
tatcccgtctattcaatctagaggtctgtttggagccattgctggctttattgagggg

SEQ ID NO: 58811 - DNA, 60 bp, Artificial
  Synthetic oligonucleotide
tatcccgtctattcaatctagaggtctgtttggagccattgctggctttattgagggggg

SEQ ID NO: 58812 - DNA, 60 bp, Artificial
  Synthetic oligonucleotide
attgcctatgaaagaatgtgcaacattctcaaagggaaatttcaaacagctgcacagaga

SEQ ID NO: 58813 - DNA, 59 bp, Artificial
  Synthetic oligonucleotide
cgtggtaaactttgtgagcatggagttttctctcactgacccgaggctggaaccacaca

SEQ ID NO: 58814 - DNA, 60 bp, Artificial
  Synthetic oligonucleotide
cagctatactcagaaaagcaaccaggagattgattcaactgatagtgagtggaagagacg

SEQ ID NO: 58815 - DNA, 60 bp, Artificial
  Synthetic oligonucleotide
cgggcaacagctatactcagaaaagcaaccaggagattgattcagctgatagtgagtgga

SEQ ID NO: 58816 - DNA, 60 bp, Artificial
  Synthetic oligonucleotide
caatggttgggaaaagggcaacagctatactcagaaaagcaaccaggagattgatccaac

SEQ ID NO: 58817 - DNA, 60 bp, Artificial
  Synthetic oligonucleotide
acaatggttgggagaagggcaacagctatactcagaaaagcaaccaggagattgattcag

SEQ ID NO: 58818 - DNA, 60 bp, Artificial
  Synthetic oligonucleotide
acaatggttgggaaaagggcaacagctatactcagaaaagcaaccaggagattgattcag

SEQ ID NO: 58819 - DNA, 60 bp, Artificial
  Synthetic oligonucleotide
acaatggttgggaaaagggcaacagctatactcagaaaagcaaccaggagattgatccaa

SEQ ID NO: 58820 - DNA, 60 bp, Artificial
  Synthetic oligonucleotide
gtagatgttgaaagatgagtcttctaaccgaggtcgaaacgtacgttctctctatcgtcc

SEQ ID NO: 58821 - DNA, 60 bp, Artificial
  Synthetic oligonucleotide
gtagatattgaaagatgagtcttctaaccgaggtcgaaacgtacgttctctctatcatcc

SEQ ID NO: 58822 - DNA, 54 bp, Artificial
  Synthetic oligonucleotide
ttttgtcatgagagagccattcatttcatgctctcacttggaatgcagaacctt

SEQ ID NO: 58823 - DNA, 60 bp, Artificial
  Synthetic oligonucleotide
ttcacgctatctaactgacatgactcttgaagagatgtcaagagactggttcatgctcat

SEQ ID NO: 58824 - DNA, 60 bp, Artificial
  Synthetic oligonucleotide
gcattcaaatgggaccgttaaggacagaagcccttatagggccttaatgagttgtcctct

SEQ ID NO: 58825 - DNA, 60 bp, Artificial
  Synthetic oligonucleotide
ccttgaacctggaacctttgatcttggggggctatatgaagcaattgaggagtgcctgat

SEQ ID NO: 58826 - DNA, 60 bp, Artificial
  Synthetic oligonucleotide
tctggaacctgggacttttgatcttggggggctatatgaagcaattgaggagtgcctgat

SEQ ID NO: 58827 - DNA, 60 bp, Artificial
  Synthetic oligonucleotide
gcaaatattgagaacacaagagtctgaatgtgtctgtgtgaacgggtcatgtttcaccat

SEQ ID NO: 58828 - DNA, 60 bp, Artificial
  Synthetic oligonucleotide
acaagagtctgaatgtgtctgtgtgaacgggtcatgttttaccataatgaccgatggccc

SEQ ID NO: 58829 - DNA, 60 bp, Artificial
  Synthetic oligonucleotide
gccgacagacctatgactggactctaaatagaaaccagcctgctgcaacagcattggcca

SEQ ID NO: 58830 - DNA, 60 bp, Artificial
  Synthetic oligonucleotide
cagacctatgactggactctaaatagaaaccagcctgctgcaacagcattggccaacaca

SEQ ID NO: 58831 - DNA, 60 bp, Artificial
  Synthetic oligonucleotide
acagacctatgactggactctaaatagaaaccagcctgctgcaacagcattggccaacac

SEQ ID NO: 58832 - DNA, 60 bp, Artificial
  Synthetic oligonucleotide
ctgacggcccaagcaatgggcaagcctcgtacaaattattcaaaatggagaaagggaaga

SEQ ID NO: 58833 - DNA, 60 bp, Artificial
  Synthetic oligonucleotide
ctaatggaaccgtcaaggacaggagtccttatagaaccttaatgagctgccccatcggtg

SEQ ID NO: 58834 - DNA, 60 bp, Artificial
  Synthetic oligonucleotide
aatgacaggcattctaatggaaccgtcaaggacaggagtccttatagaaccttaatgagc

SEQ ID NO: 58835 - DNA, 60 bp, Artificial
  Synthetic oligonucleotide
gaatgtgtttgtataaacggttcgtgttttactataatgactgacggcccaagcaatggg

SEQ ID NO: 58836 - DNA, 60 bp, Artificial
  Synthetic oligonucleotide
gggtgtgactccaataatactagccggcaattcctctctttgcccaatcagtgggtgggc

SEQ ID NO: 58837 - DNA, 60 bp, Artificial
  Synthetic oligonucleotide
ttgctgctggacagggtgtgactccaataatactagccggcaattcctctctttgcccaa

SEQ ID NO: 58838 - DNA, 60 bp, Artificial
  Synthetic oligonucleotide
gattggttccaaaggagacatttttgtcatgagagagccattcatttcatgctctcactt

SEQ ID NO: 58839 - DNA, 60 bp, Artificial
  Synthetic oligonucleotide
gcagataggaaatataatcttgttatggatgagccattcaattcagactggagaaaaaag

SEQ ID NO: 58840 - DNA, 60 bp, Artificial
  Synthetic oligonucleotide
ttgggatcctaatggatggacagaaactgatagtagtttctctatgaagcaagatattat

SEQ ID NO: 58841 - DNA, 60 bp, Artificial
  Synthetic oligonucleotide
aagatattatagcattaactgattggtcgggatacagtggaagttttgtccaacatcctg

SEQ ID NO: 58842 - DNA, 60 bp, Artificial
  Synthetic oligonucleotide
taagagaacctttcatatcatgttctcacttggaatgcagaaccttttttctgacccaag

SEQ ID NO: 58843 - DNA, 60 bp, Artificial
  Synthetic oligonucleotide
tagccccactacaattgggtaattgcagcgttgccggatggatcttaggaaacccagaat

SEQ ID NO: 58844 - DNA, 60 bp, Artificial
  Synthetic oligonucleotide
ggtaactgcagcgttgccggatggatcttaggaaacccagaatgcgaattactgatttcc

SEQ ID NO: 58845 - DNA, 60 bp, Artificial
  Synthetic oligonucleotide
gcgttgccggatggatcttaggaaacccagaatgcgaattactgatttccaaggaatcat

SEQ ID NO: 58846 - DNA, 60 bp, Artificial
  Synthetic oligonucleotide
acaattgggtaattgcagcgttgccggatggatcttaggaaacccagaatgcgaatcact

SEQ ID NO: 58847 - DNA, 60 bp, Artificial
  Synthetic oligonucleotide
ctacaattgggtaattgcagcgttgccggatggatcttaggaaacccagaatgcgaatta

SEQ ID NO: 58848 - DNA, 60 bp, Artificial
  Synthetic oligonucleotide
ccactacaattgggtaattgcagcgttgccggatggatcttaggaaacccagaatgcgaa

SEQ ID NO: 58849 - DNA, 60 bp, Artificial
  Synthetic oligonucleotide
gggtaattgcagcgttgccggatggatcttaggaaacccagaatgcgaattactgatttc

SEQ ID NO: 58850 - DNA, 60 bp, Artificial
  Synthetic oligonucleotide
aaggcaccaaacgatcttatgaacagatggaaactggtggagaacgccaaaatgctactg

SEQ ID NO: 58851 - DNA, 60 bp, Artificial
  Synthetic oligonucleotide
ggcgccaagcaaacaatggtgaagatgctactgctggtctcactcacctgatgatttggc

SEQ ID NO: 58852 - DNA, 60 bp, Artificial
  Synthetic oligonucleotide
ggagttgggacgatggtaatggaactgattcgaatgataaagcggggtatcaatgatcgg

SEQ ID NO: 58853 - DNA, 60 bp, Artificial
  Synthetic oligonucleotide
actgaactccaactcagtgactatgaagggaggctgatccaaaatagtataacgatagag

SEQ ID NO: 58854 - DNA, 60 bp, Artificial
  Synthetic oligonucleotide
ctttcgagagagcgaccatcatggcagcattcactgggagcacggaaggcagaacatctg

SEQ ID NO: 58855 - DNA, 60 bp, Artificial
  Synthetic oligonucleotide
gccattctgcagcatttgaagatctgagggtgtcaagttttatcagagggacaaaagtga

SEQ ID NO: 58856 - DNA, 60 bp, Artificial
  Synthetic oligonucleotide
ggatcagtggcccacaaatcctgcctgcctgcttgtgtatatggacttgttgtggcaagt

SEQ ID NO: 58857 - DNA, 54 bp, Artificial
  Synthetic oligonucleotide
atacttactgacagccagacagcgaccaaaagaagtcggactgccatcaattaa

SEQ ID NO: 58858 - DNA, 60 bp, Artificial
  Synthetic oligonucleotide
cgaacggctacattgagggcaagctttctcaaatgtccaaagaagtgaatgctagaattg

SEQ ID NO: 58859 - DNA, 60 bp, Artificial
  Synthetic oligonucleotide
ccgaacggctacattgagggcaagctttctcaaatgtccaaagaagtgaatgctagaatt

SEQ ID NO: 58860 - DNA, 59 bp, Artificial
  Synthetic oligonucleotide
gaacggctacattgagggcaagctttctcaaatgtccaaagaagtgaatgctagaattg

SEQ ID NO: 58861 - DNA, 60 bp, Artificial
  Synthetic oligonucleotide
aaggttgaaaggttaaaacatggaacctttggccctgtacactttagaaaccaagtaaaa

SEQ ID NO: 58862 - DNA, 60 bp, Artificial
  Synthetic oligonucleotide
tcgaaaggttaaaacatggaacctttggccctgtacactttagaaaccaagtcaaaatac

SEQ ID NO: 58863 - DNA, 60 bp, Artificial
  Synthetic oligonucleotide
ggttgaaaggttaaaacatggaacctttggccctgtacactttagaaaccaagtcaaaat

SEQ ID NO: 58864 - DNA, 60 bp, Artificial
  Synthetic oligonucleotide
cctttgacatgagtaacgaggggtcttatttcttcggagacaatgcagaggagtatgaca

SEQ ID NO: 58865 - DNA, 60 bp, Artificial
  Synthetic oligonucleotide
gaacggctgcattgagggcaagctttctcaaatgtccaaagaagtgaatgccaggattga

SEQ ID NO: 58866 - DNA, 53 bp, Artificial
  Synthetic oligonucleotide
gaacagctgcattgagggcaagctttctcaaatgtccaaagaagtgaatgcca

SEQ ID NO: 58867 - DNA, 55 bp, Artificial
  Synthetic oligonucleotide
gaacggctgcattgagggcaagctttctcaaatgtccaaagaagtgaatgcaaaa

SEQ ID NO: 58868 - DNA, 60 bp, Artificial
  Synthetic oligonucleotide
cggtttcatcataaaaggaagatctcacttaaggaatgacaccgacgtggtaaactttgt

SEQ ID NO: 58869 - DNA, 60 bp, Artificial
  Synthetic oligonucleotide
tcataaaaggaagatctcacttaaggaatgacaccgacgtggtaaactttgtgagcatgg

SEQ ID NO: 58870 - DNA, 60 bp, Artificial
  Synthetic oligonucleotide
tgatgattttgctctgattgtgaatgcacccaatcatgaaggaattcaagccggagttga

SEQ ID NO: 58871 - DNA, 60 bp, Artificial
  Synthetic oligonucleotide
cctatgttaacaataaagggaaagaagtccttgtgctatggggtgttcatcatccgccta

SEQ ID NO: 58872 - DNA, 60 bp, Artificial
  Synthetic oligonucleotide
gtctgcttgaaatgggaattgatggatgaggattaccaggggcgtttatgcaacccactg

SEQ ID NO: 58873 - DNA, 60 bp, Artificial
  Synthetic oligonucleotide
gagaccctccttacagccatgggacaggaacagggtacaccatggatacagtcaacagga

SEQ ID NO: 58874 - DNA, 60 bp, Artificial
  Synthetic oligonucleotide
gatgcacggattgatttcgaatctggaaggataaagaaagaggaattcgctgagatcatg

SEQ ID NO: 58875 - DNA, 60 bp, Artificial
  Synthetic oligonucleotide
ccagagcccgaattgatgcacggattgatttcgaatctggaaggataaagaaagaggagt

SEQ ID NO: 58876 - DNA, 60 bp, Artificial
  Synthetic oligonucleotide
tactgtaaattggtcttggccagacggtgctgagttgccattcaccattgacaagtagtc

SEQ ID NO: 58877 - DNA, 60 bp, Artificial
  Synthetic oligonucleotide
gaaatgtcaagggactggttcatgctcatgcccaagcagaaagttgcgggtcccctttgc

SEQ ID NO: 58878 - DNA, 60 bp, Artificial
  Synthetic oligonucleotide
cctagctgacatgactcttgaggagatgtcaagggactggttcatgctcatgcccaagca

SEQ ID NO: 58879 - DNA, 60 bp, Artificial
  Synthetic oligonucleotide
atatgactcttggagaaatgtcaagggactggttcatgctcatgcccaagcagaaagttg

SEQ ID NO: 58880 - DNA, 60 bp, Artificial
  Synthetic oligonucleotide
tagataatcactcactgagtgacatcgaaatcatggcgtctcaaggcaccaaacgatcat

SEQ ID NO: 58881 - DNA, 60 bp, Artificial
  Synthetic oligonucleotide
aatgcaattctcctcactgactgtgaatgtgagaggatcaggaatgaggatactggtaag

SEQ ID NO: 58882 - DNA, 60 bp, Artificial
  Synthetic oligonucleotide
gtcgccagttcactggtgcttctggtctccctgggggcaatcagcttctggatgtgttct

SEQ ID NO: 58883 - DNA, 60 bp, Artificial
  Synthetic oligonucleotide
gtcaagctttcaggtagactgctttctttggcatgtccgcaaacgatttgcagactgggg

SEQ ID NO: 58884 - DNA, 60 bp, Artificial
  Synthetic oligonucleotide
catactgagaacacaagagtctgaatgtgcctgcataaatggttcctgctttaccataat

SEQ ID NO: 58885 - DNA, 60 bp, Artificial
  Synthetic oligonucleotide
tgatgggacaggcagttgtggtccagtgtcttctaatggggcatatggggtaaaagggtt

SEQ ID NO: 58886 - DNA, 60 bp, Artificial
  Synthetic oligonucleotide
ggactaaggaacatcccatccattcaatccagaggtctgtttggagccattgccggtttc

SEQ ID NO: 58887 - DNA, 60 bp, Artificial
  Synthetic oligonucleotide
cccacttaaggaatgacaccgacgtggtaaactttgtgagcatggagttttctctcactg

SEQ ID NO: 58888 - DNA, 60 bp, Artificial
  Synthetic oligonucleotide
cacggtctgctctcattctgaggggatcagtggctcataagtcctgcctgcctgcttgtg

SEQ ID NO: 58889 - DNA, 60 bp, Artificial
  Synthetic oligonucleotide
cagatactgggctataaggaccagaagcggagggaacactaaccagcagagagcatctgc

SEQ ID NO: 58890 - DNA, 60 bp, Artificial
  Synthetic oligonucleotide
tcagtggctcataagtcctgcctgcctgcttgtgtgtatggacttgctgtggccagtgga

SEQ ID NO: 58891 - DNA, 60 bp, Artificial
  Synthetic oligonucleotide
agatactgggctataaggaccagaagcggaggaaacactaaccagcagagagcatccgca

SEQ ID NO: 58892 - DNA, 60 bp, Artificial
  Synthetic oligonucleotide
cagatactgggctataaggaccagaagcggaggaaacactaaccagcagagagcatctgc

SEQ ID NO: 58893 - DNA, 60 bp, Artificial
  Synthetic oligonucleotide
ctgggctataaggaccagaagcggaggaaacactaaccagcagagagcatctgcaggaca

SEQ ID NO: 58894 - DNA, 53 bp, Artificial
  Synthetic oligonucleotide
ttatggcggcatttacaggaaacactgaaggcagaacttcagacatgagaact

SEQ ID NO: 58895 - DNA, 60 bp, Artificial
  Synthetic oligonucleotide
catttgcagctacaaatgcagacacactatgtataggttaccatgcaaataactcaaccg

SEQ ID NO: 58896 - DNA, 60 bp, Artificial
  Synthetic oligonucleotide
aaagcaaccgaaatgaaggcaatactattagtcttgttatgtgcatttgcagctacaaat

SEQ ID NO: 58897 - DNA, 60 bp, Artificial
  Synthetic oligonucleotide
accgaaatgaaggcaatactattagtcttgttatgtacatttgcagccacaaatgcagac

SEQ ID NO: 58898 - DNA, 60 bp, Artificial
  Synthetic oligonucleotide
ggcaatggtgtttggataggaagaactaaaagtatcagttccagaagcggatttgagatg

SEQ ID NO: 58899 - DNA, 60 bp, Artificial
  Synthetic oligonucleotide
ctaaaagtatcagctctagaagtggatttgagatgatttgggatcctaatggatggacag

SEQ ID NO: 58900 - DNA, 60 bp, Artificial
  Synthetic oligonucleotide
caatcagtttctggatgtgttctaatgggtctttgcagtgtagaatatgcatctgagacc

SEQ ID NO: 58901 - DNA, 56 bp, Artificial
  Synthetic oligonucleotide
caatcagtttctggatgtgttctaatgggtctttgcagtgtagaatatgcatctga

SEQ ID NO: 58902 - DNA, 51 bp, Artificial
  Synthetic oligonucleotide
ccattcaatccagaggtctgtttggagccattgccggtttcattgaagggg

SEQ ID NO: 58903 - DNA, 60 bp, Artificial
  Synthetic oligonucleotide
ggactggttcatgctcatgcccaagcagaaagtggcaggttccctttgcatcagaatgga

SEQ ID NO: 58904 - DNA, 57 bp, Artificial
  Synthetic oligonucleotide
ggactggttcatgctcatgcccaagcagaaagtggcaggttccctttgcatcagaat

SEQ ID NO: 58905 - DNA, 60 bp, Artificial
  Synthetic oligonucleotide
aaacatcccatccattcaatccagaggtctgtttggagccattgccggtttcattgaagg

SEQ ID NO: 58906 - DNA, 60 bp, Artificial
  Synthetic oligonucleotide
gaacatcccatccattcaatccagaggtctgtttggagccattgccggtttcattgaagg

SEQ ID NO: 58907 - DNA, 51 bp, Artificial
  Synthetic oligonucleotide
ctatcatcccgtcaggccccctcaaagccgagatcgcgcagagactggaag

SEQ ID NO: 58908 - DNA, 54 bp, Artificial
  Synthetic oligonucleotide
atactccttagagctttcacagaagaaggggcaattgtaggtgaaatctcaccg

SEQ ID NO: 58909 - DNA, 51 bp, Artificial
  Synthetic oligonucleotide
ctactgcttgaagtggagcaagagataaggactttctcgtttcagtttatt

SEQ ID NO: 58910 - DNA, 58 bp, Artificial
  Synthetic oligonucleotide
ggggcttggtgatgccccatttctcgataggcttcgccgagatcaaaagtccctaagg

SEQ ID NO: 58911 - DNA, 60 bp, Artificial
  Synthetic oligonucleotide
aaacgatttgcagactgggggcttggtgatgccccatttctcgataggcttcgccgagat

SEQ ID NO: 58912 - DNA, 56 bp, Artificial
  Synthetic oligonucleotide
atacttactgacagccagacagcgaccaaaagaattcggatggccatcaattaatt

SEQ ID NO: 58913 - DNA, 60 bp, Artificial
  Synthetic oligonucleotide
gagtaacagtgataaagaacaacatgataaacaatgaccttggaccagcaacagctcaaa

SEQ ID NO: 58914 - DNA, 60 bp, Artificial
  Synthetic oligonucleotide
ctggaaggataaagaaagaggatttcgctgagatcatgaagatctgttccaccattgaag

SEQ ID NO: 58915 - DNA, 60 bp, Artificial
  Synthetic oligonucleotide
gaaggataaagaaagaggagttcactgagatcatgaagatctgttccaccattgaagaaa

SEQ ID NO: 58916 - DNA, 60 bp, Artificial
  Synthetic oligonucleotide
aggataaagaaagaggatttcgctgagatcatgaagatctgttccaccattgaagagctc

SEQ ID NO: 58917 - DNA, 60 bp, Artificial
  Synthetic oligonucleotide
tgggcacttggtgagaacatggcaccagagaaagtggactttgaagattgcaaggatgtc

SEQ ID NO: 58918 - DNA, 60 bp, Artificial
  Synthetic oligonucleotide
aatgcatccaactatgcaggaattcaagctggagttgacaggttttatcgaacctgtaag

SEQ ID NO: 58919 - DNA, 60 bp, Artificial
  Synthetic oligonucleotide
atgcatccaactatgcaggaattcaagctggagttgacaggttttatcgaacctgtaagc

SEQ ID NO: 58920 - DNA, 51 bp, Artificial
  Synthetic oligonucleotide
caatcatgcaggaattcaagctggagttgacaggttttatcgaacctgtaa

SEQ ID NO: 58921 - DNA, 60 bp, Artificial
  Synthetic oligonucleotide
gcatggagttttctctcactgacccaagacttgagccacacaaatgggagaagtactgtg

SEQ ID NO: 58922 - DNA, 60 bp, Artificial
  Synthetic oligonucleotide
ttgtccaacaaacaagagtggacaaactgactcaaggtcgtcagacctatgactggacat

SEQ ID NO: 58923 - DNA, 60 bp, Artificial
  Synthetic oligonucleotide
gcaagccttacagctattgcttgaagtggagcaagagataagaactttctcgtttcagct

SEQ ID NO: 58924 - DNA, 60 bp, Artificial
  Synthetic oligonucleotide
gatcacttacataaccagaaatcagcccgaatggttcagaaatattctaagtattgctcc

SEQ ID NO: 58925 - DNA, 60 bp, Artificial
  Synthetic oligonucleotide
ggtgtgaatagtgacacagtgggttggtcttggccagacggtgctgagttgccatttacc

SEQ ID NO: 58926 - DNA, 60 bp, Artificial
  Synthetic oligonucleotide
aagaaattacttcacagcagaggtgtctcattgcagagccacagaatatataatgaaggg

SEQ ID NO: 58927 - DNA, 60 bp, Artificial
  Synthetic oligonucleotide
aaggaattacttcacagcagaggtgtctcattgcagagccacagaatatataatgaaggg

SEQ ID NO: 58928 - DNA, 60 bp, Artificial
  Synthetic oligonucleotide
aggaattacttcacagcagaggtgtctcattgcagagccacagaatatataatgaagggg

SEQ ID NO: 58929 - DNA, 60 bp, Artificial
  Synthetic oligonucleotide
agaaattacttcacagcagaggtgtctcattgcagagccacagaatatataatgaagggg

SEQ ID NO: 58930 - DNA, 60 bp, Artificial
  Synthetic oligonucleotide
ggacaagagctcttgttcgcaccggaatggatcccaggatgtgctctctgatgcaaggtt

SEQ ID NO: 58931 - DNA, 60 bp, Artificial
  Synthetic oligonucleotide
ggacaagagctcttgttcgcaccggaatggatcccaggatgtgctctctgatgcagggtt

SEQ ID NO: 58932 - DNA, 60 bp, Artificial
  Synthetic oligonucleotide
aacatcccatccattcaatctagaggtttgtttggagccattgccggtttcattgaaggg

SEQ ID NO: 58933 - DNA, 60 bp, Artificial
  Synthetic oligonucleotide
aaacatcccatccattcaatctagaggtttgtttggagccattgccggtttcattgaagg

SEQ ID NO: 58934 - DNA, 60 bp, Artificial
  Synthetic oligonucleotide
gaacatcccatccattcaatccagaggtctatttggagccattgccggtttcattgaagg

SEQ ID NO: 58935 - DNA, 60 bp, Artificial
  Synthetic oligonucleotide
acatcccatccattcaatccagaggtctatttggagccattgccggtttcattgaagggg

SEQ ID NO: 58936 - DNA, 60 bp, Artificial
  Synthetic oligonucleotide
acatcccatccattcaatctagaggtttgtttggagccattgccggtttcattgaagggg

SEQ ID NO: 58937 - DNA, 60 bp, Artificial
  Synthetic oligonucleotide
acatcccatccattcaatccaggggtctgtttggagccattgccggtttcattgaagggg

SEQ ID NO: 58938 - DNA, 60 bp, Artificial
  Synthetic oligonucleotide
caatcagcttctggatgtgttctaatgggtctttgcaatgcagaatatgcatctgagacc

SEQ ID NO: 58939 - DNA, 60 bp, Artificial
  Synthetic oligonucleotide
ttgaaaactcatgtattgaaacgatggaggttgttcagcaaacacgagtggacaagctga

SEQ ID NO: 58940 - DNA, 60 bp, Artificial
  Synthetic oligonucleotide
cacaggggacatgctgggaacagatgtacactccaggtggggaggtgaggaatgatgatg

SEQ ID NO: 58941 - DNA, 60 bp, Artificial
  Synthetic oligonucleotide
ggtcctgttatgtacatttacagctacatatgcagacacaatatgtataggctaccatgc

SEQ ID NO: 58942 - DNA, 60 bp, Artificial
  Synthetic oligonucleotide
ttgtcataagagaaccttttatatcatgctctcacttggaatgcagaaccttttttctga

SEQ ID NO: 58943 - DNA, 60 bp, Artificial
  Synthetic oligonucleotide
ccaaataggatacatatgcagcggggtctttggagacaatccacgccccaatgatggaac

SEQ ID NO: 58944 - DNA, 53 bp, Artificial
  Synthetic oligonucleotide
caaactggtcttggccagacggtgctgagttgccattcaccattgacaagtag

SEQ ID NO: 58945 - DNA, 60 bp, Artificial
  Synthetic oligonucleotide
tggtattctcacaagaagattgcgtggtaaaagcagttagaggtgatctgaatttcgtca

SEQ ID NO: 58946 - DNA, 60 bp, Artificial
  Synthetic oligonucleotide
aaggcctcttctaatagatggcacagcgtcattgagccctggaatgatgatgggcatgtt

SEQ ID NO: 58947 - DNA, 60 bp, Artificial
  Synthetic oligonucleotide
cctgaggataatgagccaagtggatatgcacaaacagactgtgtcctggaagctatggct

SEQ ID NO: 58948 - DNA, 60 bp, Artificial
  Synthetic oligonucleotide
ggcaaggctagggaaaggatacatgttcgaaagtaagagcatgaagcttcgaacacagat

SEQ ID NO: 58949 - DNA, 60 bp, Artificial
  Synthetic oligonucleotide
cccaattgatggaccactgcctgaggataatgagccaagtggatatgcacaaacagactg

SEQ ID NO: 58950 - DNA, 60 bp, Artificial
  Synthetic oligonucleotide
gaccactacctgaggataatgagccaagtggatatgcacaaacagactgtgtcctggaag

SEQ ID NO: 58951 - DNA, 54 bp, Artificial
  Synthetic oligonucleotide
gtatgattcgaaatggaagattttgtgcgacaatgcttcaatccgatgattgtc

SEQ ID NO: 58952 - DNA, 60 bp, Artificial
  Synthetic oligonucleotide
caaagcttagcaaatcctatgttaacaataaagggaaagaagtccttgtgctatggggtg

SEQ ID NO: 58953 - DNA, 60 bp, Artificial
  Synthetic oligonucleotide
attagaaatgtgccacagcacacagattggtggaacaaggatggtggacattctcaggca

SEQ ID NO: 58954 - DNA, 60 bp, Artificial
  Synthetic oligonucleotide
attggaaatgtgccacagcacacagattggtggaacaaggatggtggacattcttaggca

SEQ ID NO: 58955 - DNA, 60 bp, Artificial
  Synthetic oligonucleotide
attggaaatgtgccacagcacacagattggtggaacaaggatggtggacattctcaggca

SEQ ID NO: 58956 - DNA, 60 bp, Artificial
  Synthetic oligonucleotide
atttgaatggatgtcaatccgactttacttttcctgaaagttccagcgcaaaatgccata

SEQ ID NO: 58957 - DNA, 60 bp, Artificial
  Synthetic oligonucleotide
tcaaaaccagactattcaccataagacaagagatggccagtagaggtctctgggattcct

SEQ ID NO: 58958 - DNA, 60 bp, Artificial
  Synthetic oligonucleotide
tcaaaaccagactattcaccataagacaagaaatggccagcagaggcctctgggattcct

SEQ ID NO: 58959 - DNA, 54 bp, Artificial
  Synthetic oligonucleotide
cgaagagggagcaattgttggcgaaatttcaccattgccttctcttccaggaca

SEQ ID NO: 58960 - DNA, 60 bp, Artificial
  Synthetic oligonucleotide
gctttcaccgaagagggagcaattgttggcgaaatttcaccattgccttctcttccagga

SEQ ID NO: 58961 - DNA, 60 bp, Artificial
  Synthetic oligonucleotide
cttactgacagccagacagcgaccaaaagaattcggatggccatcatttaatttctaata

SEQ ID NO: 58962 - DNA, 60 bp, Artificial
  Synthetic oligonucleotide
cccagcttaacccgattgatggaccactacctgagggcaatgagccaagcgggtatgctc

SEQ ID NO: 58963 - DNA, 60 bp, Artificial
  Synthetic oligonucleotide
cccagcttaacccgattgatggaccactacctgaggacaatgagccaagcgggtatgctc

SEQ ID NO: 58964 - DNA, 60 bp, Artificial
  Synthetic oligonucleotide
caccccagcttaacccgattgatggaccactacctgagggcaatgagccaagcgggtatg

SEQ ID NO: 58965 - DNA, 60 bp, Artificial
  Synthetic oligonucleotide
caccccagcttaacccgattgatggaccactacctgaggacaatgagccaagcgggtatg

SEQ ID NO: 58966 - DNA, 60 bp, Artificial
  Synthetic oligonucleotide
gctcaaacagactgtgtcctggaggcaatggctttccttgaggaatcccacccagggata

SEQ ID NO: 58967 - DNA, 57 bp, Artificial
  Synthetic oligonucleotide
atgagtcttctaaccgaggtcgaaacgtacgttctctctatcatcccttcaggcccc

SEQ ID NO: 58968 - DNA, 60 bp, Artificial
  Synthetic oligonucleotide
atgagtcttctaaccgaggtcgaaacgtacgttctctctatcatcccttcaggccccctc

SEQ ID NO: 58969 - DNA, 60 bp, Artificial
  Synthetic oligonucleotide
aagatgagtcttctaaccgaggtcgaaacgtacgttctctctatcatcccgtccggcccc

SEQ ID NO: 58970 - DNA, 60 bp, Artificial
  Synthetic oligonucleotide
tgaaagatgagtcttctaaccgaggtcgaaacgtacgttctctctatcgttccgtcaggc

SEQ ID NO: 58971 - DNA, 60 bp, Artificial
  Synthetic oligonucleotide
tgactcaaggggccctgctgaatgacaaacattctaatggaaccattaaagacagaagcc

SEQ ID NO: 58972 - DNA, 60 bp, Artificial
  Synthetic oligonucleotide
tgactcaaggggccctgctgaatgacaaacattctaatggaaccattaaggacagaagcc

SEQ ID NO: 58973 - DNA, 60 bp, Artificial
  Synthetic oligonucleotide
ggggccctgctgaatgacaaacattctaatggaaccattaaagacagaagcccctatcga

SEQ ID NO: 58974 - DNA, 60 bp, Artificial
  Synthetic oligonucleotide
gactcaaggggccctgctgaatgacaaacattctaatggaaccattaaggacagaagccc

SEQ ID NO: 58975 - DNA, 60 bp, Artificial
  Synthetic oligonucleotide
gcgtgcgtgaatggttcttgctttactgtaatgaccgatggaccaagtaatgggcaggcc

SEQ ID NO: 58976 - DNA, 60 bp, Artificial
  Synthetic oligonucleotide
aatgtgcgtgcgtgaatggttcttgctttactgtaatgaccgatggaccaagtaatgggc

SEQ ID NO: 58977 - DNA, 60 bp, Artificial
  Synthetic oligonucleotide
tttgacatgagtaatgaaggatcttatttcttcggagacaatgcagaggtaaccgacaat

SEQ ID NO: 58978 - DNA, 60 bp, Artificial
  Synthetic oligonucleotide
catgagtaatgaaggatcttatttcttcggagacaatgcagaggtaaccgacaattaagg

SEQ ID NO: 58979 - DNA, 60 bp, Artificial
  Synthetic oligonucleotide
gaacgggagacctccattccctccaaaacagaaacggaaaatggcgagaacaattgggcc

SEQ ID NO: 58980 - DNA, 60 bp, Artificial
  Synthetic oligonucleotide
tctgatgattttgctctgattgtgaatgcacccaaccatgcaggcattcaagctggagtt

SEQ ID NO: 58981 - DNA, 60 bp, Artificial
  Synthetic oligonucleotide
tgatgattttgctctgattgtgaatgcacccaatcatgagggaattcaagccggagtcga

SEQ ID NO: 58982 - DNA, 60 bp, Artificial
  Synthetic oligonucleotide
tgatgattttgctctgattgtgaatgcacccaataatgaaggaattcaagccggagttga

SEQ ID NO: 58983 - DNA, 60 bp, Artificial
  Synthetic oligonucleotide
caaactggtcttggccagacggtgctgagttgccattcaccattgacaagtagttcgttg

SEQ ID NO: 58984 - DNA, 60 bp, Artificial
  Synthetic oligonucleotide
gcaagccttacagctattgtttgaagtggaacaagagataagaactttctcgtttcagct

SEQ ID NO: 58985 - DNA, 60 bp, Artificial
  Synthetic oligonucleotide
ccccactacaattggggaaatgtaacattgccggatggatcttaggaaacccagaatgcg

SEQ ID NO: 58986 - DNA, 60 bp, Artificial
  Synthetic oligonucleotide
cttactgacagccagacagcgaccaaaagaattcggatggccatcaattaatttcgacta

SEQ ID NO: 58987 - DNA, 60 bp, Artificial
  Synthetic oligonucleotide
ggaacaatgcgcaggctcgccgaccaaagtctcccgccgaacttctcctgccttgagaat

SEQ ID NO: 58988 - DNA, 60 bp, Artificial
  Synthetic oligonucleotide
tcatgctcatgcccaagcaaaaagtggcaggctccctctgtatcagaatggaccaggcga

SEQ ID NO: 58989 - DNA, 60 bp, Artificial
  Synthetic oligonucleotide
gtcaagggactggttcatgctcatgcccaagcagaaagtggcaggccctctttgtgtcag

SEQ ID NO: 58990 - DNA, 60 bp, Artificial
  Synthetic oligonucleotide
ccgactttacttttcttaaaagtgccagcacaaaatgctataagcacaactttcccctat

SEQ ID NO: 58991 - DNA, 60 bp, Artificial
  Synthetic oligonucleotide
caatccgaccttacttttcttaaaagtgccagcacaaaatgctataagcacaactttccc

SEQ ID NO: 58992 - DNA, 60 bp, Artificial
  Synthetic oligonucleotide
cccaaggtgctctattaaatgacaaacattcaaatgggaccgttaaggacagaagtcctt

SEQ ID NO: 58993 - DNA, 60 bp, Artificial
  Synthetic oligonucleotide
cccaaggtgctctattaaatgacaaacattcaaatgggaccgttaaggacagaagtccct

SEQ ID NO: 58994 - DNA, 60 bp, Artificial
  Synthetic oligonucleotide
ggggatgtagtgttggtaatgaaacgaaaacgggactctagcatacttactgacagccag

SEQ ID NO: 58995 - DNA, 60 bp, Artificial
  Synthetic oligonucleotide
ggggacgtagtgttggtaatgaaacggaaacgggactctagcatacttactgacagccag

SEQ ID NO: 58996 - DNA, 60 bp, Artificial
  Synthetic oligonucleotide
ggagacgtagtgttggtaatgaaacgaaaacgggactctagcatacttactgacagccag

SEQ ID NO: 58997 - DNA, 60 bp, Artificial
  Synthetic oligonucleotide
aggggacgtagtgttggtaatgaaacgaaaacgggactctagcatacttactgacagcca

SEQ ID NO: 58998 - DNA, 60 bp, Artificial
  Synthetic oligonucleotide
gtgaacaataaagagaaagaagtccttgtgctatggggtgttcatcacccgtctaacata

SEQ ID NO: 58999 - DNA, 60 bp, Artificial
  Synthetic oligonucleotide
tgtgaacaatcaagagaaagaagtccttgtgctatggggtgttcatcacccgtctaacat

SEQ ID NO: 59000 - DNA, 60 bp, Artificial
  Synthetic oligonucleotide
gtaaacaacaaggagaaagaagtccttgtgctatggggtgttcatcacccgtctaacata

SEQ ID NO: 59001 - DNA, 60 bp, Artificial
  Synthetic oligonucleotide
agacacaatatgtataggctaccatgcgaacaactcaaccgacactgttgacacagtact

SEQ ID NO: 59002 - DNA, 60 bp, Artificial
  Synthetic oligonucleotide
tctgctggaacctggggatacaataatatttgaggcaaatggaaatctaatagcgccacg

SEQ ID NO: 59003 - DNA, 60 bp, Artificial
  Synthetic oligonucleotide
gactctgctggaaccaggggacacaataatatttgaggcaaatggaaatctaatagcgcc

SEQ ID NO: 59004 - DNA, 60 bp, Artificial
  Synthetic oligonucleotide
ctgctggaaccaggggacacaataatatttgaggcaaatggaaatctaatagcgccatgg

SEQ ID NO: 59005 - DNA, 60 bp, Artificial
  Synthetic oligonucleotide
ataatatttgaggcaaatggaaatctaatagcgccatggtatgctttcgcactaaataga

SEQ ID NO: 59006 - DNA, 60 bp, Artificial
  Synthetic oligonucleotide
cggagacacaataatatttgaggcaaatggaaatctaatagcgccatggtatgctttcgc

SEQ ID NO: 59007 - DNA, 60 bp, Artificial
  Synthetic oligonucleotide
gatacaataatatttgaggcaaatggaaatctaatagcgccacggtatgctttcgcactg

SEQ ID NO: 59008 - DNA, 56 bp, Artificial
  Synthetic oligonucleotide
cactcactccaaaacagaaacggaaaatggcgagaacaattaggtcagaagtttga

SEQ ID NO: 59009 - DNA, 60 bp, Artificial
  Synthetic oligonucleotide
ctgggagacctccactcattccaaaacagaaacggaaaatggcgagaacaattaggtcag

SEQ ID NO: 59010 - DNA, 60 bp, Artificial
  Synthetic oligonucleotide
ccactcactccaaaacagaaacggaaaatggcgagaacaattaggtcagaagttcgaaga

SEQ ID NO: 59011 - DNA, 60 bp, Artificial
  Synthetic oligonucleotide
ctccactcactccaaaacagaaacggaaaatggcgagaacaattaggtcagaagttcgaa

SEQ ID NO: 59012 - DNA, 60 bp, Artificial
  Synthetic oligonucleotide
cctccactcactccaaaacagaaacggaaaatggcgagaacaattaggtcagaagttcga

SEQ ID NO: 59013 - DNA, 60 bp, Artificial
  Synthetic oligonucleotide
acctccactcactccaaaacagaaacggaaaatggcgagaacaattaggtcagaagttcg

SEQ ID NO: 59014 - DNA, 60 bp, Artificial
  Synthetic oligonucleotide
ggccctgagtcagtgttggtcaatacctatcagtggatcatcagaaactgggagactgtt

SEQ ID NO: 59015 - DNA, 60 bp, Artificial
  Synthetic oligonucleotide
cgtcccgtcaggccccctcaaagccgagatcgcgcagagacttgaagatgtgtttgcagg

SEQ ID NO: 59016 - DNA, 60 bp, Artificial
  Synthetic oligonucleotide
tgaagctaactgtgcatgaggggtatgaagagttcacaatggttgggaaaagggcaacag

SEQ ID NO: 59017 - DNA, 60 bp, Artificial
  Synthetic oligonucleotide
tgtcacctctgactaaggggattttaggatttgtgtttacgctcaccgtgcccagtgagc

SEQ ID NO: 59018 - DNA, 60 bp, Artificial
  Synthetic oligonucleotide
aactcaaccgacactgttgacacagtactcgaaaagaacgtgacagtgacacactctgtc

SEQ ID NO: 59019 - DNA, 60 bp, Artificial
  Synthetic oligonucleotide
aactcaaccgacactgttgacacagtactcgagaagaacgtaaccgtgacacactctgtt

SEQ ID NO: 59020 - DNA, 60 bp, Artificial
  Synthetic oligonucleotide
aagatgagtcttctaaccgaggtcgaaacgtacgttctttctatcatcccgtcaggcccc

SEQ ID NO: 59021 - DNA, 60 bp, Artificial
  Synthetic oligonucleotide
aagatgagtcttctaaccgaggtcgaaacgtacgttctttctatcatcccgtcgggcccc

SEQ ID NO: 59022 - DNA, 60 bp, Artificial
  Synthetic oligonucleotide
ggcaagactagggaaaggatacatgttcgaaagcaagagcatgaagcttcgaacacagat

SEQ ID NO: 59023 - DNA, 60 bp, Artificial
  Synthetic oligonucleotide
tcgaatcgaccatgggtgactttcaatcagaatctggagtatcaaataggatacatatgc

SEQ ID NO: 59024 - DNA, 60 bp, Artificial
  Synthetic oligonucleotide
ggcaatggtatttggatagggagaactaaaagcactagttcaaggagcggttttgagatg

SEQ ID NO: 59025 - DNA, 60 bp, Artificial
  Synthetic oligonucleotide
cgaaccctgatgagctgtcctattggtgaagtcccctctccatacaactcaagatttgag

SEQ ID NO: 59026 - DNA, 60 bp, Artificial
  Synthetic oligonucleotide
agcactagttcaaggagcggttttgagatgatttgggatccaaacggatggaccagaaca

SEQ ID NO: 59027 - DNA, 60 bp, Artificial
  Synthetic oligonucleotide
ctagttcaaggagcggttttgagatgatttgggatccaaacggatggaccagaacagacg

SEQ ID NO: 59028 - DNA, 60 bp, Artificial
  Synthetic oligonucleotide
tcgaatcgaccgtgggtgtctttcaatcagaatctggagtatcaaataggatacatatgc

SEQ ID NO: 59029 - DNA, 60 bp, Artificial
  Synthetic oligonucleotide
cggccgtgggtgtctttcaatcaaaatctggagtatcaaataggatacatatgcagtggg

SEQ ID NO: 59030 - DNA, 60 bp, Artificial
  Synthetic oligonucleotide
tagttcaaggagcggttttgagatgatttgggacccaaacggatggactggaacagacaa

SEQ ID NO: 59031 - DNA, 60 bp, Artificial
  Synthetic oligonucleotide
gttcaaggagcggttttgagatgatttgggacccaaacggatggactggaacagacaata

SEQ ID NO: 59032 - DNA, 60 bp, Artificial
  Synthetic oligonucleotide
gtgcatgcgtgaatggctcttgctttactgtaatgaccgatggaccaagtaatgggcagg

SEQ ID NO: 59033 - DNA, 60 bp, Artificial
  Synthetic oligonucleotide
gaccgtgggtgtctttcaatcagaatctggagtatcaaataggatacatatgcagtgggg

SEQ ID NO: 59034 - DNA, 60 bp, Artificial
  Synthetic oligonucleotide
ggtgactttcaatcagaatctggagtatcaaataggatacatatgcagtggggttctcgg

SEQ ID NO: 59035 - DNA, 60 bp, Artificial
  Synthetic oligonucleotide
tcatgctcatgcccaagcaaaaagtggcaggctccctctgtattagaatggaccaggcga

SEQ ID NO: 59036 - DNA, 60 bp, Artificial
  Synthetic oligonucleotide
ctggttcatgctcatgcccaagcaaaaagtggcaggctctctttgtataagaatggacca

SEQ ID NO: 59037 - DNA, 60 bp, Artificial
  Synthetic oligonucleotide
tcatgctcatgcccaagcaaaaagtggcaggctccctctgtatcaggatggaccaggcga

SEQ ID NO: 59038 - DNA, 60 bp, Artificial
  Synthetic oligonucleotide
cacagggaacatgctgggaacagatgtacactccaggtggagaagtgaggaatgatgatg

SEQ ID NO: 59039 - DNA, 60 bp, Artificial
  Synthetic oligonucleotide
ctcaaggaacatgctgggaacagatgtacactccaggtggagaagtaaggaatgatgatg

SEQ ID NO: 59040 - DNA, 60 bp, Artificial
  Synthetic oligonucleotide
ctcaaggaacatgctgggaacagatgtacactccaggtggagaagtgaggaatgatgatg

SEQ ID NO: 59041 - DNA, 60 bp, Artificial
  Synthetic oligonucleotide
gtgaggggatcaggaatgagaatacttgtaaggggtaattctccagtattcaactacaac

SEQ ID NO: 59042 - DNA, 60 bp, Artificial
  Synthetic oligonucleotide
cagagaagacacacatccacattttctcgttcactggagaagaaatggccactaaggcag

SEQ ID NO: 59043 - DNA, 60 bp, Artificial
  Synthetic oligonucleotide
atcagagaagacacacatccacattttctcgttcactggagaagaaatggccactaaggc

SEQ ID NO: 59044 - DNA, 60 bp, Artificial
  Synthetic oligonucleotide
aatccttgaagatgaacagatgtatcaaaagtgctgcaatctattcgagaaattcttccc

SEQ ID NO: 59045 - DNA, 58 bp, Artificial
  Synthetic oligonucleotide
ctgtgtaaatggttcatgttttactataatgactgacggtccgagtgatgggccggcc

SEQ ID NO: 59046 - DNA, 60 bp, Artificial
  Synthetic oligonucleotide
tgtgcctgtgtaaatggttcatgttttactataatgaccgatggcccaagtaatgggcag

SEQ ID NO: 59047 - DNA, 60 bp, Artificial
  Synthetic oligonucleotide
acgcaagagtctgaatgtgcctgtgtaaatggttcatgttttactataatgaccgatggc

SEQ ID NO: 59048 - DNA, 60 bp, Artificial
  Synthetic oligonucleotide
atatcatgttctcacttggaatgcagaaccttttttctgacccaaggtgctctattaaat

SEQ ID NO: 59049 - DNA, 60 bp, Artificial
  Synthetic oligonucleotide
agaacatcccagcgcggggaaagatcctaagaaaactggaggacccatatacaagagagt

SEQ ID NO: 59050 - DNA, 60 bp, Artificial
  Synthetic oligonucleotide
aacatcccagcgcggggaaagatcctaagaaaactggaggacccatatacaagagagtag

SEQ ID NO: 59051 - DNA, 60 bp, Artificial
  Synthetic oligonucleotide
gatggacctccctgttctcaacggtcaaaattcctgctgatggacgccttaaaattgagc

SEQ ID NO: 59052 - DNA, 60 bp, Artificial
  Synthetic oligonucleotide
ggcatgtgagttgacggattccagctggatagagcttgacgaaataggagaggatgtcgc

SEQ ID NO: 59053 - DNA, 60 bp, Artificial
  Synthetic oligonucleotide
acactcttgacgaggaaagcagagcaagaatcaagactagactattcaccatcaggcagg

SEQ ID NO: 59054 - DNA, 60 bp, Artificial
  Synthetic oligonucleotide
acgtggtaaattttgtgagtatggagttttctctcaccgatccgaggctggagccacaca

SEQ ID NO: 59055 - DNA, 60 bp, Artificial
  Synthetic oligonucleotide
gaggcgttgccttcttcagtctcttcaacagattgagagcatgatcgaagcggaatcttc

SEQ ID NO: 59056 - DNA, 60 bp, Artificial
  Synthetic oligonucleotide
atcccaatgataagcaaatgcagaacgaaagaagggaggcggaaaacaaatctatatggg

SEQ ID NO: 59057 - DNA, 60 bp, Artificial
  Synthetic oligonucleotide
ttgaggagtgcatgattaatgatccctgggttttgcttaacgcgtcttggttcaactcct

SEQ ID NO: 59058 - DNA, 60 bp, Artificial
  Synthetic oligonucleotide
aaaattgagcattgaggatccgagccatgagggggaggggataccgctatatgatgcaat

SEQ ID NO: 59059 - DNA, 60 bp, Artificial
  Synthetic oligonucleotide
gccgcatgagaaaggcataaatccaaactatctcctggcttggaaacaagtgctagctga

SEQ ID NO: 59060 - DNA, 60 bp, Artificial
  Synthetic oligonucleotide
gagggaagagaccgcacaatggcttggacagtggtaaacagcatctgcaatactacaggg

SEQ ID NO: 59061 - DNA, 60 bp, Artificial
  Synthetic oligonucleotide
ggagggaagaacatcagacatgagggcagaaatcataaggatgatggaaagtgcaagacc

SEQ ID NO: 59062 - DNA, 60 bp, Artificial
  Synthetic oligonucleotide
ccagcctgctgctacagcattggccaacacaatagaagtgttcagatcaaatggcctcat

SEQ ID NO: 59063 - DNA, 60 bp, Artificial
  Synthetic oligonucleotide
gcctgctgctacagcattggccaacacaatagaagtgttcagatcaaatggcctcatggc

SEQ ID NO: 59064 - DNA, 60 bp, Artificial
  Synthetic oligonucleotide
ctacatacgcagacacaatatgtataggctaccatgccaacaactcaaccgacactgttg

SEQ ID NO: 59065 - DNA, 60 bp, Artificial
  Synthetic oligonucleotide
cataagagagccttttatatcatgttctcatttggaatgcagaaccttttttctgaccca

SEQ ID NO: 59066 - DNA, 60 bp, Artificial
  Synthetic oligonucleotide
ctatgcccaaacagattgtgtattagaagcaatggctttccttgaggaatcccaccctgg

SEQ ID NO: 59067 - DNA, 57 bp, Artificial
  Synthetic oligonucleotide
acgaaggatcttatttcttcggagacaatgcagaggagtatgacaattaaagaaaat

SEQ ID NO: 59068 - DNA, 60 bp, Artificial
  Synthetic oligonucleotide
agttttgcatttaacacaggggacatgctgggaacagatgtacactccaggtggagaggt

SEQ ID NO: 59069 - DNA, 60 bp, Artificial
  Synthetic oligonucleotide
ggttttgcatttaacacaggggacatgctgggaacagatgtacactccaggtggagaggt

SEQ ID NO: 59070 - DNA, 60 bp, Artificial
  Synthetic oligonucleotide
tcactcacctgatgatttggcattccaacctgaatgatgccacatatcagagaacaagag

SEQ ID NO: 59071 - DNA, 60 bp, Artificial
  Synthetic oligonucleotide
ggacaggaacatttgaattcacaagctttttctaccgctatgggtttgtagccaacttca

SEQ ID NO: 59072 - DNA, 60 bp, Artificial
  Synthetic oligonucleotide
agcaaaaaaaagtcttacataaatagaacgggaacatttgaattcacaagctttttctat

SEQ ID NO: 59073 - DNA, 60 bp, Artificial
  Synthetic oligonucleotide
ggacaggaacatttgaattcacaagctttttctaccgctacgggtttgtagccaatttca

SEQ ID NO: 59074 - DNA, 58 bp, Artificial
  Synthetic oligonucleotide
tacgcagcagatcagaagagcacacagatcgcaattgatgggatcagcaacaaagtga

SEQ ID NO: 59075 - DNA, 60 bp, Artificial
  Synthetic oligonucleotide
ggcacgcatttgcattgaataagggctctagttctggaattatgatgtcggatgctcatg

SEQ ID NO: 59076 - DNA, 60 bp, Artificial
  Synthetic oligonucleotide
gcatgctcccattctggagccaacagtttttatcggaacttgctatggatagtaaagaaa

SEQ ID NO: 59077 - DNA, 60 bp, Artificial
  Synthetic oligonucleotide
tgtgacttgttgctcacagcgaattcgtggtcttacataatagagacttcaaattcaaaa

SEQ ID NO: 59078 - DNA, 60 bp, Artificial
  Synthetic oligonucleotide
cccagatattcagaagaatccaaattgaatagagaggaaatagacggggtgaaactagaa

SEQ ID NO: 59079 - DNA, 60 bp, Artificial
  Synthetic oligonucleotide
atgaagggaggctgattcagaacagcataacaatagagagaatggttctctcagcatttg

SEQ ID NO: 59080 - DNA, 57 bp, Artificial
  Synthetic oligonucleotide
gaagacacacatccacattttctcgttcactggggaagaaatggccacaaaggccga

SEQ ID NO: 59081 - DNA, 60 bp, Artificial
  Synthetic oligonucleotide
ccggagttgacaggttttatcgaacctgtaagctactcggaatcaatatgagcaagaaaa

SEQ ID NO: 59082 - DNA, 60 bp, Artificial
  Synthetic oligonucleotide
ggagtgtctgggattaatgaatcagctgatatgagcattggagtaacagtgataaagaac

SEQ ID NO: 59083 - DNA, 60 bp, Artificial
  Synthetic oligonucleotide
gagaagcttgaacagtctggacttccagttggaggcaatgaaaagaaggctaaactggca

SEQ ID NO: 59084 - DNA, 60 bp, Artificial
  Synthetic oligonucleotide
gtaatgagactgggagacctccactcactccaaaacagaaacggaaaatggcgagaacaa

SEQ ID NO: 59085 - DNA, 60 bp, Artificial
  Synthetic oligonucleotide
gtaatgagaatgggagacctccactcactccaaaacagaaacggaaaatggcgagaacaa

SEQ ID NO: 59086 - DNA, 60 bp, Artificial
  Synthetic oligonucleotide
cagtaatgagaatgggagacctccactcactccaaaacagaaacggaaaatggcgagaac

SEQ ID NO: 59087 - DNA, 60 bp, Artificial
  Synthetic oligonucleotide
atcgcttctgtgcctgcttcacgctatctaactgacatgactcttgaagagatgtcaagg

SEQ ID NO: 59088 - DNA, 58 bp, Artificial
  Synthetic oligonucleotide
atgaaggatcttatttcttcggagacaatgcagaggagtacgacaattaaggaaaaat

SEQ ID NO: 59089 - DNA, 60 bp, Artificial
  Synthetic oligonucleotide
tgatgtgtgtatgcagggacaactggcatggttcaaatcgaccctgggtgtcttttaatc

SEQ ID NO: 59090 - DNA, 60 bp, Artificial
  Synthetic oligonucleotide
ttcacgagctttttctatcgttatgggtttgttgccaatttcagcatggagcttcctagt

SEQ ID NO: 59091 - DNA, 60 bp, Artificial
  Synthetic oligonucleotide
ggtacatttgaattcacgagctttttctatcgttatgggtttgttgccaatttcagcatg

SEQ ID NO: 59092 - DNA, 60 bp, Artificial
  Synthetic oligonucleotide
gtacttttgaattcacgagctttttctatcgttatgggtttgttgccaatttcagcatgg

SEQ ID NO: 59093 - DNA, 60 bp, Artificial
  Synthetic oligonucleotide
ctttttctatcgttatgggtttgttgccaatttcagcatggagcttcccagttttggggt

SEQ ID NO: 59094 - DNA, 60 bp, Artificial
  Synthetic oligonucleotide
acttttgaattcacgagctttttctatcgttatgggtttgttgccaatttcagcatggaa

SEQ ID NO: 59095 - DNA, 54 bp, Artificial
  Synthetic oligonucleotide
ttttctatcgttatgggtttgttgccaatttcagcatggagcttcccagttttg

SEQ ID NO: 59096 - DNA, 53 bp, Artificial
  Synthetic oligonucleotide
ttttctatcgttatgggtttgttgccaatttcagcatggagcttcccagtttt

SEQ ID NO: 59097 - DNA, 60 bp, Artificial
  Synthetic oligonucleotide
attgatggaattggacgattctacatccaaatgtgcaccgagcttaaactcagtgattat

SEQ ID NO: 59098 - DNA, 60 bp, Artificial
  Synthetic oligonucleotide
attggtggaattggacgattctacatccaaatgtgcaccgagcttaaactcaatgattat

SEQ ID NO: 59099 - DNA, 60 bp, Artificial
  Synthetic oligonucleotide
ttgaatggatgtcaatccgaccttacttttcttaaaagtgccagcacaaaatgctataag

SEQ ID NO: 59100 - DNA, 60 bp, Artificial
  Synthetic oligonucleotide
gaatggatgtcaacccgactctacttttcttaaaagtgccagcacaaaatgctataagca

SEQ ID NO: 59101 - DNA, 60 bp, Artificial
  Synthetic oligonucleotide
taatgttctcaaacaaaatggcgagactaggtaaggggtacatgtttgaaagcaagagta

SEQ ID NO: 59102 - DNA, 60 bp, Artificial
  Synthetic oligonucleotide
ggacggctgatccagaacagcttaacaatagagagaatggtgctctctgcttttgacgag

SEQ ID NO: 59103 - DNA, 60 bp, Artificial
  Synthetic oligonucleotide
gggacggctgatccagaacagcttaacaatagagagaatggtgctctctgcttttgacga

SEQ ID NO: 59104 - DNA, 60 bp, Artificial
  Synthetic oligonucleotide
gggaagactgatccagaacagcttaacaatagagagaatggtgctctctgcttttgacga

SEQ ID NO: 59105 - DNA, 60 bp, Artificial
  Synthetic oligonucleotide
gagggaagactgatccagaacagcttaacaatagagagaatggtgctctctgcttttgac

SEQ ID NO: 59106 - DNA, 60 bp, Artificial
  Synthetic oligonucleotide
cgaggaaattacttctcattgttcaggcacttagggacaacctggaacctggaaccttcg

SEQ ID NO: 59107 - DNA, 60 bp, Artificial
  Synthetic oligonucleotide
tctagtcttgttagtctccctgggggcaatcagcttctggatgtgttctaatggatcatt

SEQ ID NO: 59108 - DNA, 60 bp, Artificial
  Synthetic oligonucleotide
gaacggctacattgagggcaagctttctcaaatgtccaaagaagtaaatgctagaattga

SEQ ID NO: 59109 - DNA, 60 bp, Artificial
  Synthetic oligonucleotide
ccgaacggctacattgagggcaagctttctcaaatgtccaaagaagtaaatgctagaatt

SEQ ID NO: 59110 - DNA, 60 bp, Artificial
  Synthetic oligonucleotide
cggctacattgagggcaagctttctcaaatgtccaaagaagtaaatgctagaattgaacc

SEQ ID NO: 59111 - DNA, 60 bp, Artificial
  Synthetic oligonucleotide
cggctacattgagggcaagctttctcaaatgtccaaagaagtaaatgctagaattgagcc

SEQ ID NO: 59112 - DNA, 60 bp, Artificial
  Synthetic oligonucleotide
caattccacagacactgtcgacacaatactagagaagaatgtgactgttacccattcagt

SEQ ID NO: 59113 - DNA, 60 bp, Artificial
  Synthetic oligonucleotide
ctaccatgctaacaattccacagacactgtcgacacaatactagagaagaatgtgactgt

SEQ ID NO: 59114 - DNA, 60 bp, Artificial
  Synthetic oligonucleotide
gtattattctgtgcattcactgcactgaaagctgacaccatttgtgtaggctaccatgct

SEQ ID NO: 59115 - DNA, 60 bp, Artificial
  Synthetic oligonucleotide
ttcactgcactgaaagctgacaccatttgtgtaggctaccatgctaacaattccacagac

SEQ ID NO: 59116 - DNA, 60 bp, Artificial
  Synthetic oligonucleotide
attcactgcactgaaagctgacaccatttgtgtaggctatcatgctaacaattccacaga

SEQ ID NO: 59117 - DNA, 60 bp, Artificial
  Synthetic oligonucleotide
gaaagctgacaccatttgtgtaggctatcatgctaacaattccacagacactgtcgacac

SEQ ID NO: 59118 - DNA, 60 bp, Artificial
  Synthetic oligonucleotide
actgcactgaaagctgacaccatttgtgtaggctatcatgctaacaattccacagacact

SEQ ID NO: 59119 - DNA, 60 bp, Artificial
  Synthetic oligonucleotide
atggatatcaccatcaaaatgagcagggatctggttacgcagcagatcagaagagcacac

SEQ ID NO: 59120 - DNA, 60 bp, Artificial
  Synthetic oligonucleotide
tgatagatggatggtatggatatcaccatcaaaatgagcagggatctggttacgcagcag

SEQ ID NO: 59121 - DNA, 51 bp, Artificial
  Synthetic oligonucleotide
ttttggggcaattgccggattcattgaaggaggatggacaggaatgataga

SEQ ID NO: 59122 - DNA, 60 bp, Artificial
  Synthetic oligonucleotide
aggactttttggggcaattgccggattcattgaaggaggatggacaggaatgatagatgg

SEQ ID NO: 59123 - DNA, 60 bp, Artificial
  Synthetic oligonucleotide
ggtcaaatctcaactgagaaacaatgccaaggaaatcggaaatggctgttttgagttcta

SEQ ID NO: 59124 - DNA, 60 bp, Artificial
  Synthetic oligonucleotide
gagcagggatctggttacgcagcagatcagaaaagcacacaaatcgcaattgatgggatc

SEQ ID NO: 59125 - DNA, 60 bp, Artificial
  Synthetic oligonucleotide
aatgagcagggatctggttacgcagcagatcagaaaagcacacaaatcgcaattgatggg

SEQ ID NO: 59126 - DNA, 60 bp, Artificial
  Synthetic oligonucleotide
aatgagcagggatctggttacgcagcagatcagaaaagtacacaaatcgcaattgatggg

SEQ ID NO: 59127 - DNA, 60 bp, Artificial
  Synthetic oligonucleotide
ttgagttctatcacaaatgtgataatgaatgcatggaaagcgtaaagaatggcacatata

SEQ ID NO: 59128 - DNA, 60 bp, Artificial
  Synthetic oligonucleotide
ggtcaaatcacaactgagaaacaatgccaaggaaatcggtaatggctgttttgagttcta

SEQ ID NO: 59129 - DNA, 60 bp, Artificial
  Synthetic oligonucleotide
cccctctacccaatccagaggactttttggggcaattgccggattcattgaaggaggatg

SEQ ID NO: 59130 - DNA, 60 bp, Artificial
  Synthetic oligonucleotide
cccttctattcaatccagaggactttttggggcaattgccggattcattgaaggaggatg

SEQ ID NO: 59131 - DNA, 60 bp, Artificial
  Synthetic oligonucleotide
attccacagacactgtcgacacaatactggagaagaatgtgactgttacccattcagtta

SEQ ID NO: 59132 - DNA, 60 bp, Artificial
  Synthetic oligonucleotide
tccacagacactgtcgacacaatactggagaagaatgtgactgttacccattcagttaac

SEQ ID NO: 59133 - DNA, 60 bp, Artificial
  Synthetic oligonucleotide
cacagacactgtcgacacaatactggagaagaatgtgactgttacccattcagttaattt

SEQ ID NO: 59134 - DNA, 60 bp, Artificial
  Synthetic oligonucleotide
cagacactgtcgacacaatactggagaagaatgtgactgttacccattcagttaatttac

SEQ ID NO: 59135 - DNA, 60 bp, Artificial
  Synthetic oligonucleotide
aatggaaaactttgtagcctgaatggaaaggcccccttacaactggggaactgcaacgta

SEQ ID NO: 59136 - DNA, 60 bp, Artificial
  Synthetic oligonucleotide
tcctaagctcagcaagtcatacacaaacaacaaaggaaaagaagtgcttgtaatctgggg

SEQ ID NO: 59137 - DNA, 60 bp, Artificial
  Synthetic oligonucleotide
aggaattatgatgtcggatgctcatgttcacaattgcactacaaagtgccaaactcctca

SEQ ID NO: 59138 - DNA, 60 bp, Artificial
  Synthetic oligonucleotide
atgatgtcggatgctcatgttcacaattgcactacaaagtgccaaactcctcatggggcc

SEQ ID NO: 59139 - DNA, 60 bp, Artificial
  Synthetic oligonucleotide
agaagaatccaaattgaatagagaggaaatagacggtgtgaaactagaatcaatgggagt

SEQ ID NO: 59140 - DNA, 55 bp, Artificial
  Synthetic oligonucleotide
atgggtctttacaatgcagagtatgcatttaagacttgaatttcaaagtgtacgg

SEQ ID NO: 59141 - DNA, 60 bp, Artificial
  Synthetic oligonucleotide
ttgagttctaccacaaatgtgataatgaatgcatggaaagcgtaaagaatggcacatata

SEQ ID NO: 59142 - DNA, 57 bp, Artificial
  Synthetic oligonucleotide
ttgagttctatcacaaatgtgataatgaatgcatggaaagcgtaaagaatggcacat

SEQ ID NO: 59143 - DNA, 60 bp, Artificial
  Synthetic oligonucleotide
agacctcttctaatagatggtacagcctcattgagccctggaatgatgatgggcatgttc

SEQ ID NO: 59144 - DNA, 60 bp, Artificial
  Synthetic oligonucleotide
cacagttcgagtctctaaaactctacagagattcgcttggagaagcagtaatgagaatgg

SEQ ID NO: 59145 - DNA, 60 bp, Artificial
  Synthetic oligonucleotide
ctctaaaactctacagagattcgcttggagaagcagtaatgagactgggagacctccact

SEQ ID NO: 59146 - DNA, 60 bp, Artificial
  Synthetic oligonucleotide
taacacagttcgagtctctaaaactctacagagattcgcttggagaagcagtaatgagaa

SEQ ID NO: 59147 - DNA, 60 bp, Artificial
  Synthetic oligonucleotide
taacacagttcgagtctctaaaactctacagagattcgcttggagaagcagtaatgagac

SEQ ID NO: 59148 - DNA, 60 bp, Artificial
  Synthetic oligonucleotide
cccaagtatgtcaggagtacaaaattaaggatggttacaggactaagaaacatcccatcc

SEQ ID NO: 59149 - DNA, 60 bp, Artificial
  Synthetic oligonucleotide
caggagtacaaaattaaggatggttacaggactaagaaacatcccatccattcaatccag

SEQ ID NO: 59150 - DNA, 60 bp, Artificial
  Synthetic oligonucleotide
tggaccttgctagaacccggagacacaataatatttgaggcaaatggaaatctaatagcg

SEQ ID NO: 59151 - DNA, 60 bp, Artificial
  Synthetic oligonucleotide
gaccttgctagaacccggagacacaataatatttgaggcaaatggaaatctaatagcgcc

SEQ ID NO: 59152 - DNA, 60 bp, Artificial
  Synthetic oligonucleotide
tttgctagaacccggagacacaataatatttgaggcaaatggaaatctaatagcgccatg

SEQ ID NO: 59153 - DNA, 60 bp, Artificial
  Synthetic oligonucleotide
tgcccaaaatacgtcaggagtacaaaattaaggatggttacaggactaagaaacatccca

SEQ ID NO: 59154 - DNA, 60 bp, Artificial
  Synthetic oligonucleotide
tcttgagataggggatatgcttctaagaagtgcaataggccaagtgtcaaggcccatgtt

SEQ ID NO: 59155 - DNA, 60 bp, Artificial
  Synthetic oligonucleotide
gagactagggaaaggatacatgttcgaaagtaagagaatgaagctccgaacacaaatacc

SEQ ID NO: 59156 - DNA, 60 bp, Artificial
  Synthetic oligonucleotide
taatgcgtcttggttcaactccttccttgtgcatgcactgaaatagttgtggcaatgcta

SEQ ID NO: 59157 - DNA, 60 bp, Artificial
  Synthetic oligonucleotide
gcgtcttggttcaactccttccttgtgcatgcactgaaatagttgtggcaatgctactat

SEQ ID NO: 59158 - DNA, 60 bp, Artificial
  Synthetic oligonucleotide
gttcctgttatcctgatgctagtgaggtaatgtgtgtatgcagggacaactggcatggtt

SEQ ID NO: 59159 - DNA, 60 bp, Artificial
  Synthetic oligonucleotide
atacttactgacagccagacagcgaccaaaagaattcggatggccatcaattagtgtcga

SEQ ID NO: 59160 - DNA, 60 bp, Artificial
  Synthetic oligonucleotide
gcatacttactgacagccagacagcgaccaaaagaattcgattggccatcaattagtgtc

SEQ ID NO: 59161 - DNA, 60 bp, Artificial
  Synthetic oligonucleotide
cgaagagggagcaattgttggcgaaatttcaccattgccttctcttccaggacatactgc

SEQ ID NO: 59162 - DNA, 60 bp, Artificial
  Synthetic oligonucleotide
cacttggtgaaaacatggcaccagagaaagtggactttgaagattgcaaggatgtcagcg

SEQ ID NO: 59163 - DNA, 60 bp, Artificial
  Synthetic oligonucleotide
ggcccattggggaatcacccaaaggagtagaagaaggttccattggaaaggtgtgcagga

SEQ ID NO: 59164 - DNA, 60 bp, Artificial
  Synthetic oligonucleotide
gatcccaatgataagcaaatgcagaaccaaagaagggcggcggaagacaaatctgtatgg

SEQ ID NO: 59165 - DNA, 60 bp, Artificial
  Synthetic oligonucleotide
catttttgaagacaacaccacgccccctgagattaccggaagggcccccttgctctcagc

SEQ ID NO: 59166 - DNA, 60 bp, Artificial
  Synthetic oligonucleotide
actcctaaaacaccgatttgaaataatcgaagggagagatcgtactatggcctggacagt

SEQ ID NO: 59167 - DNA, 60 bp, Artificial
  Synthetic oligonucleotide
cagtttctggatgtgttctaatgggtctttgcagtgtagaatatgcatctgagaccagaa

SEQ ID NO: 59168 - DNA, 60 bp, Artificial
  Synthetic oligonucleotide
caacccgactttacttttcttgaaagtgccagcgcaaaatgctataagcactacattccc

SEQ ID NO: 59169 - DNA, 60 bp, Artificial
  Synthetic oligonucleotide
ccaaaactacttactggtgggatggtcttcaatcgtctgatgattttgctctgattgtga

SEQ ID NO: 59170 - DNA, 60 bp, Artificial
  Synthetic oligonucleotide
ccaagactacttactggtgggatggtcttcaatcgtctgatgattttgctctgattgtga

SEQ ID NO: 59171 - DNA, 60 bp, Artificial
  Synthetic oligonucleotide
caggaagacaggagaaaaacccgtcacttaggatgaaatggatgatggcaatgaaatacc

SEQ ID NO: 59172 - DNA, 60 bp, Artificial
  Synthetic oligonucleotide
gacccaaggcgctctattaaatgacaagcattcaaatgggaccgttaaggacagaagccc

SEQ ID NO: 59173 - DNA, 60 bp, Artificial
  Synthetic oligonucleotide
gacccaaggtgctctattaaatgacaagcattcaaatgggaccgttaaggacagaagccc

SEQ ID NO: 59174 - DNA, 60 bp, Artificial
  Synthetic oligonucleotide
cccaaggtgctctattaaatgacaagcattcaaatgggaccgttaaggacagaagccctt

SEQ ID NO: 59175 - DNA, 60 bp, Artificial
  Synthetic oligonucleotide
aatgacaagcattcaaatgggaccgttaaggacagaagcccttatagggccttaatgagc

SEQ ID NO: 59176 - DNA, 60 bp, Artificial
  Synthetic oligonucleotide
ctaacccaaggtgctctattaaatgacaagcattcaaatgggaccgttaaggacagaagc

SEQ ID NO: 59177 - DNA, 60 bp, Artificial
  Synthetic oligonucleotide
ctgacccaaggtgctctattaaatgacaagcattcaaatgggaccgttaaggacagaagc

SEQ ID NO: 59178 - DNA, 60 bp, Artificial
  Synthetic oligonucleotide
ctcacttaaggaatgacaccgacgtggtaaactttgtgagcatggagttttctctcactg

SEQ ID NO: 59179 - DNA, 60 bp, Artificial
  Synthetic oligonucleotide
gccggatggatcttaggaaacccagaatgcgaatcactgctttctaagagatcatggtcc

SEQ ID NO: 59180 - DNA, 60 bp, Artificial
  Synthetic oligonucleotide
cattgccggatggatcttaggaaacccagaatgcgaatcactgctttctaagagatcatg

SEQ ID NO: 59181 - DNA, 60 bp, Artificial
  Synthetic oligonucleotide
ctggactagtgggagcagcatttctttttgtggcgtaaatagtgataccgcaaactggtc

SEQ ID NO: 59182 - DNA, 60 bp, Artificial
  Synthetic oligonucleotide
ctggactagtgggagcagcatttctttttgtggcgtaaatagcgagactgcaaactggtc

SEQ ID NO: 59183 - DNA, 60 bp, Artificial
  Synthetic oligonucleotide
ctggactagtgggagcagcatttctttttgtggcgttaatagcgagactgcaaattggtc

SEQ ID NO: 59184 - DNA, 60 bp, Artificial
  Synthetic oligonucleotide
ctggactagtgggagcagcatttctttttgtggcgttaatagtgatactgcaaactggtc

SEQ ID NO: 59185 - DNA, 60 bp, Artificial
  Synthetic oligonucleotide
ttggactagtgggagcagcatttctttttgtggcgtaaatagtgatactgcaaactggtc

SEQ ID NO: 59186 - DNA, 60 bp, Artificial
  Synthetic oligonucleotide
caatctggactagtgggagcagcatttctttttgtggcgtaaatagtgatactgcaaact

SEQ ID NO: 59187 - DNA, 60 bp, Artificial
  Synthetic oligonucleotide
ctggactagtgggagcagcatttctttttgtggcgtgaatagtgatactgtaaattggtc

SEQ ID NO: 59188 - DNA, 60 bp, Artificial
  Synthetic oligonucleotide
ctggactagtgggagcagcatttctttttgtggcgtaaatagcgagactgcagactggtc

SEQ ID NO: 59189 - DNA, 60 bp, Artificial
  Synthetic oligonucleotide
ctggactagtgggagcagcatttctttttgtggcgttaatagtgatactgcaaattggtc

SEQ ID NO: 59190 - DNA, 60 bp, Artificial
  Synthetic oligonucleotide
gctgggaagaacaccgatcttgaggctctcatggaatggctaaagacaagaccaatcctg

SEQ ID NO: 59191 - DNA, 60 bp, Artificial
  Synthetic oligonucleotide
gctggaaagaacaccgatcttgaggctctcatggaatggctaaagacaagaccaatcctg

SEQ ID NO: 59192 - DNA, 60 bp, Artificial
  Synthetic oligonucleotide
tttgcagggaagaacaccgatcttgaggctctcatggaatggctaaagacaagaccaatc

SEQ ID NO: 59193 - DNA, 60 bp, Artificial
  Synthetic oligonucleotide
gggaagaacaccgatcttgaggctctcatggaatggctaaagacaagaccaatcctgtca

SEQ ID NO: 59194 - DNA, 60 bp, Artificial
  Synthetic oligonucleotide
caggatgtagtggcaatgactgattggtcagggtacagcggaagtttcgttcaacatcct

SEQ ID NO: 59195 - DNA, 59 bp, Artificial
  Synthetic oligonucleotide
ggaaaatgaaaggactttggatttccatgactcaaatgtgaagaatctgtatgagaaag

SEQ ID NO: 59196 - DNA, 60 bp, Artificial
  Synthetic oligonucleotide
ggcgcaggatgtaatcatggaagttgttttcccaaatgaagtgggagctagaatactaac

SEQ ID NO: 59197 - DNA, 60 bp, Artificial
  Synthetic oligonucleotide
cgccatggtatgctttcgcactgagtagaggctttgggtcaggaatcatcacctcaaacg

SEQ ID NO: 59198 - DNA, 60 bp, Artificial
  Synthetic oligonucleotide
gccatggtatgctttcgcactgagtagaggctttgggtcaggaatcatcacctcaaacgc

SEQ ID NO: 59199 - DNA, 60 bp, Artificial
  Synthetic oligonucleotide
ccttcgatcttggagggctatatgaagctattgaggagtgcctgattaatgatccctggg

SEQ ID NO: 59200 - DNA, 60 bp, Artificial
  Synthetic oligonucleotide
gcattggccaacacaatagaagtgttcagatcaaatggcctcacggccaatgaatctgga

SEQ ID NO: 59201 - DNA, 60 bp, Artificial
  Synthetic oligonucleotide
gggtaattgcagcgttgccggatggatcttaggaaacccagaatgcgaatcactgttttc

SEQ ID NO: 59202 - DNA, 60 bp, Artificial
  Synthetic oligonucleotide
tgggtaactgcagcgttgccggatggatcttaggaaacccagaatgcgaattactgattt

SEQ ID NO: 59203 - DNA, 60 bp, Artificial
  Synthetic oligonucleotide
tagctccactacaattggggaaatgcagcattgccggatggatcttaggaaacccagaat

SEQ ID NO: 59204 - DNA, 60 bp, Artificial
  Synthetic oligonucleotide
ctccactacaattggggaaatgcagcattgccggatggatcttaggaaacccagaatgcg

SEQ ID NO: 59205 - DNA, 60 bp, Artificial
  Synthetic oligonucleotide
ccccactacaattggggaaatgcagcattgccggatggatcttaggaaacccagaatgcg

SEQ ID NO: 59206 - DNA, 60 bp, Artificial
  Synthetic oligonucleotide
cacagagctctctttcacaatcactggagacaacaccaaatggaatgaaaatcagaaccc

SEQ ID NO: 59207 - DNA, 60 bp, Artificial
  Synthetic oligonucleotide
ctctctttcacaatcactggagacaacaccaaatggaatgaaaatcagaaccctagggtg

SEQ ID NO: 59208 - DNA, 60 bp, Artificial
  Synthetic oligonucleotide
ttcacaatcactggagacaacaccaaatggaatgaaaatcagaaccctaggatgtttctg

SEQ ID NO: 59209 - DNA, 60 bp, Artificial
  Synthetic oligonucleotide
cacaatcactggagacaacaccaaatggaatgaaaatcagaaccctaggatgtttctggc

SEQ ID NO: 59210 - DNA, 60 bp, Artificial
  Synthetic oligonucleotide
cacaggggacctgctgggaacagatgtacactccaggtggagaggtgaggaatgatgatg

SEQ ID NO: 59211 - DNA, 60 bp, Artificial
  Synthetic oligonucleotide
ctcaaggaacctgctgggaacagatgtacactccaggtggagaggtgaagaatgatgatg

SEQ ID NO: 59212 - DNA, 60 bp, Artificial
  Synthetic oligonucleotide
ctcaaggaatctgctgggaacagatgtacactccaggtggagaggtgaagaatgatgatg

SEQ ID NO: 59213 - DNA, 60 bp, Artificial
  Synthetic oligonucleotide
tagattggtcttggccagacggtgccgagttgccattcaccattgacaagtagtttattc

SEQ ID NO: 59214 - DNA, 58 bp, Artificial
  Synthetic oligonucleotide
gatgagtcttctaaccgaggtcgaaacgtacgtactctctatcatcccgtcaggcccc

SEQ ID NO: 59215 - DNA, 60 bp, Artificial
  Synthetic oligonucleotide
gatgagtcttctaaccgaggtcgaaacgtacgtactctctatcatcccgtcaggccccct

SEQ ID NO: 59216 - DNA, 60 bp, Artificial
  Synthetic oligonucleotide
atttgagattacaggaaccatgcgcaggcttgccgaccaaagtctcccaccgaacttctc

SEQ ID NO: 59217 - DNA, 60 bp, Artificial
  Synthetic oligonucleotide
ctttaactgaagacccagatgaaggcacagctggagtggaatctgctgttttaagaggat

SEQ ID NO: 59218 - DNA, 60 bp, Artificial
  Synthetic oligonucleotide
ctttaactgaagacccagatgaaggcacagctggagtggagtccgctgttctgagaggat

SEQ ID NO: 59219 - DNA, 60 bp, Artificial
  Synthetic oligonucleotide
ctttaactgaagacccagatgaaggcacagctggagtggagtccgctgttctaaggggat

SEQ ID NO: 59220 - DNA, 60 bp, Artificial
  Synthetic oligonucleotide
ctttagctgaagacccagatgaaggcacagctggagtggaatctgctgttctaaggggat

SEQ ID NO: 59221 - DNA, 60 bp, Artificial
  Synthetic oligonucleotide
ctttaactgaagacccagatgaaggcacagctggagtggaatctgctgttctaagggggt

SEQ ID NO: 59222 - DNA, 58 bp, Artificial
  Synthetic oligonucleotide
ctttaactgaagacccagatgaaggcacagctggagtggaatctgctgttctaagggg

SEQ ID NO: 59223 - DNA, 60 bp, Artificial
  Synthetic oligonucleotide
tttaactgaagacccagatgaaggcacagctggagtggaatccgctgttctgaggggatt

SEQ ID NO: 59224 - DNA, 60 bp, Artificial
  Synthetic oligonucleotide
ctttaactgaagacccagatgaaggcacagctggagtggaatctgctgttttaagaggtt

SEQ ID NO: 59225 - DNA, 60 bp, Artificial
  Synthetic oligonucleotide
ctgaagacccagatgaaggcacagctggagtggaatctgctgttttaagaggtttcctca

SEQ ID NO: 59226 - DNA, 60 bp, Artificial
  Synthetic oligonucleotide
ttttaactgaagacccagatgaaggcacagctggagtggaatctgctgttttaaggggat

SEQ ID NO: 59227 - DNA, 60 bp, Artificial
  Synthetic oligonucleotide
ctgaagacccagatgaaggcacagctggagtggaatctgctgttttaaggggattcctca

SEQ ID NO: 59228 - DNA, 60 bp, Artificial
  Synthetic oligonucleotide
ctgaagacccagatgaaggcacagctggagtggaatctgctgttttaagaggattcctca

SEQ ID NO: 59229 - DNA, 60 bp, Artificial
  Synthetic oligonucleotide
agaatagttttgagcaaataacatttatgcaagccttacagctattgtttgaagtggaac

SEQ ID NO: 59230 - DNA, 60 bp, Artificial
  Synthetic oligonucleotide
ccaagactacttactggtgggaggggattcaatcgtctgatgattttgctctgattgtga

SEQ ID NO: 59231 - DNA, 60 bp, Artificial
  Synthetic oligonucleotide
tcgtttagatatggcaatggtgtttggataggaagaactaaaagtatcagttccagaagc

SEQ ID NO: 59232 - DNA, 60 bp, Artificial
  Synthetic oligonucleotide
cctctctttgccctatcagtaggtgggctatatacagcaaagacaatagcataagaattg

SEQ ID NO: 59233 - DNA, 60 bp, Artificial
  Synthetic oligonucleotide
cccaatcagtgggtgggctatatacagcaaagacaatagcataaggattggttccaaagg

SEQ ID NO: 59234 - DNA, 60 bp, Artificial
  Synthetic oligonucleotide
ctttgcccaatcagtgggtgggctatatacagcaaagacaatagcataaggattggttcc

SEQ ID NO: 59235 - DNA, 60 bp, Artificial
  Synthetic oligonucleotide
ataagaattggttccaaaggagacatttttgtcataagagaaccgtttatttcatgctct

SEQ ID NO: 59236 - DNA, 60 bp, Artificial
  Synthetic oligonucleotide
ccctatcagtaggtgggctatatacagcaaagacaatagcataagaattggttccaaagg

SEQ ID NO: 59237 - DNA, 58 bp, Artificial
  Synthetic oligonucleotide
cttaatgagctgccccatcggtgaagctccatctccgtacaattcaaggttcgaatca

SEQ ID NO: 59238 - DNA, 58 bp, Artificial
  Synthetic oligonucleotide
cttaatgagctgccctattggtgaagctccatctccgtacaattcaaggttcgaatcg

SEQ ID NO: 59239 - DNA, 60 bp, Artificial
  Synthetic oligonucleotide
aatggaccagtggcaagtactattcactatccaaaaatctacaaaacttactttgaaaag

SEQ ID NO: 59240 - DNA, 60 bp, Artificial
  Synthetic oligonucleotide
cagggacagggtacaccatggatacagtcaacaggacacatcagtactcagaaagaggaa

SEQ ID NO: 59241 - DNA, 60 bp, Artificial
  Synthetic oligonucleotide
acagggacagggtacaccatggatacagtcaacaggacacatcagtactcagaaagagga

SEQ ID NO: 59242 - DNA, 60 bp, Artificial
  Synthetic oligonucleotide
acagggacaggatacaccatggatactgtcaacaggacacatcagtactcagaaagggga

SEQ ID NO: 59243 - DNA, 60 bp, Artificial
  Synthetic oligonucleotide
agaaaactggaggacccatatacaagagagtagatggaaagtgggtgagggaactcgtcc

SEQ ID NO: 59244 - DNA, 54 bp, Artificial
  Synthetic oligonucleotide
ttgttggcgaaatttcaccattgccttctcttccaggacatactaatgaggatg

SEQ ID NO: 59245 - DNA, 60 bp, Artificial
  Synthetic oligonucleotide
cgggtatgctcaaacagactgtgtcctggaggcaatggctttccttgaggaatcccatcc

SEQ ID NO: 59246 - DNA, 60 bp, Artificial
  Synthetic oligonucleotide
ctgtaaattggtcttggccagacggtgctgagttgccattcaccattgacaagtagtccg

SEQ ID NO: 59247 - DNA, 60 bp, Artificial
  Synthetic oligonucleotide
gccccattccttgatcggcttcgccgagatcagaagtccctaaagggaagaggcagcact

SEQ ID NO: 59248 - DNA, 60 bp, Artificial
  Synthetic oligonucleotide
ccccattccttgatcggcttcgccgagatcagaagtccctaaagggaagaggcagcactc

SEQ ID NO: 59249 - DNA, 60 bp, Artificial
  Synthetic oligonucleotide
cagtgatgtgtgtatgcagggacaactggcatggttcaaatcgaccctgggtgtctttta

SEQ ID NO: 59250 - DNA, 60 bp, Artificial
  Synthetic oligonucleotide
ccaagaactgggtgatgccccattccttgatcggcttcgccgagatcagaaatctctaag

SEQ ID NO: 59251 - DNA, 60 bp, Artificial
  Synthetic oligonucleotide
gactggactctaaataggaaccagcctgctgccacagcattggccaacactatagaagtg

SEQ ID NO: 59252 - DNA, 60 bp, Artificial
  Synthetic oligonucleotide
cttcctttgacatgagtaacgaggggtcttatttcttcggagacaatgcagaggagtatg

SEQ ID NO: 59253 - DNA, 60 bp, Artificial
  Synthetic oligonucleotide
ctttgacatgagtaatgagggatcttatttcttcggagacaatgcagaggagtatgacag

SEQ ID NO: 59254 - DNA, 60 bp, Artificial
  Synthetic oligonucleotide
gattatatgatgcaattgaggagtgcctgattaatgatccctgggttttgcttaacgcgt

SEQ ID NO: 59255 - DNA, 60 bp, Artificial
  Synthetic oligonucleotide
ggtcctgagtcggtgttggtcaatacttatcagtggatcatcagaaactgggaaactgtg

SEQ ID NO: 59256 - DNA, 60 bp, Artificial
  Synthetic oligonucleotide
attagaaatgtgccacagcacacagattggtggaacaaagatggtggatattctcaggca

SEQ ID NO: 59257 - DNA, 60 bp, Artificial
  Synthetic oligonucleotide
attagaaatgtgccacagcacacagattggtggaacaaggatggtagacattctcaggca

SEQ ID NO: 59258 - DNA, 60 bp, Artificial
  Synthetic oligonucleotide
aagcagggtagataatcactcactgagtgacattcacaccatggcgtctcaaggcaccaa

SEQ ID NO: 59259 - DNA, 60 bp, Artificial
  Synthetic oligonucleotide
caaagcagggtagataatcactcactgagtgacattcacaccatggcgtctcaaggcacc

SEQ ID NO: 59260 - DNA, 60 bp, Artificial
  Synthetic oligonucleotide
aagcagggtagataatcactcactgagtgacattcacatcatggcgtctcaaggcaccaa

SEQ ID NO: 59261 - DNA, 60 bp, Artificial
  Synthetic oligonucleotide
caagttggatccagaatgagttcaacaaggcatgcgagctgaccgattcaatctggatag

SEQ ID NO: 59262 - DNA, 60 bp, Artificial
  Synthetic oligonucleotide
gggacgactgatccagaacagcttaacaatagagagaatggtgctctctgcttttgatga

SEQ ID NO: 59263 - DNA, 60 bp, Artificial
  Synthetic oligonucleotide
acaatctggactagtgggagcagcatttctttttgtggcgtgaatagtgatactgtaaat

SEQ ID NO: 59264 - DNA, 60 bp, Artificial
  Synthetic oligonucleotide
cagcaaggacaatggtataaggataggttctaagggagatgtgtttgtcatcagagagcc

SEQ ID NO: 59265 - DNA, 60 bp, Artificial
  Synthetic oligonucleotide
cgctatgggtttgtcgccaatttcagcatggagcttcctagttttggggtgtctggggtc

SEQ ID NO: 59266 - DNA, 60 bp, Artificial
  Synthetic oligonucleotide
caaacactgtgttaagctttcaggtagattgctttctttggcatgtccgcaagcggtttg

SEQ ID NO: 59267 - DNA, 60 bp, Artificial
  Synthetic oligonucleotide
ggacagaagcccttatagggccttaatgagctgtcctctaggtgaagctccgtctccata

SEQ ID NO: 59268 - DNA, 60 bp, Artificial
  Synthetic oligonucleotide
aaggacagaagcccttatagggccttaatgagctgtcctctaggtgaagctccgtctcca

SEQ ID NO: 59269 - DNA, 52 bp, Artificial
  Synthetic oligonucleotide
ggtcgaaaggttaaaacatggaacctttggccctgtccattttagaaaccaa

SEQ ID NO: 59270 - DNA, 56 bp, Artificial
  Synthetic oligonucleotide
aaaagtcgaaaggttaaaacatggaacctttggccctgtccattttagaaaccaag

SEQ ID NO: 59271 - DNA, 60 bp, Artificial
  Synthetic oligonucleotide
cgctatctaactgacatgactcttgaagaaatgtcaagggactggttcatgctcatgccc

SEQ ID NO: 59272 - DNA, 60 bp, Artificial
  Synthetic oligonucleotide
gaacggctgcattgagggcaagctttctcaaatgtccaaagaagtgaatgcaaaaattga

SEQ ID NO: 59273 - DNA, 60 bp, Artificial
  Synthetic oligonucleotide
cggctgcattgagggcaagctttctcaaatgtccaaagaagtgaatgccaggattgaacc

SEQ ID NO: 59274 - DNA, 60 bp, Artificial
  Synthetic oligonucleotide
cacgagctttttctatcgttatgggtttgttgccaatttcagcatggagcttcctagttt

SEQ ID NO: 59275 - DNA, 60 bp, Artificial
  Synthetic oligonucleotide
agctttttctatcgttatgggtttgttgccaatttcagcatggagcttcctagttttggg

SEQ ID NO: 59276 - DNA, 60 bp, Artificial
  Synthetic oligonucleotide
tatcgttatgggtttgttgccaatttcagcatggagcttcctagttttggggtgtctggg

SEQ ID NO: 59277 - DNA, 60 bp, Artificial
  Synthetic oligonucleotide
taatatgagcaaaaagaaatcttacataaatagaacaggcacttttgaattcacaagctt

SEQ ID NO: 59278 - DNA, 60 bp, Artificial
  Synthetic oligonucleotide
tcgttatgggtttgttgccaatttcagcatggagcttcctagttttggggtgtctggggt

SEQ ID NO: 59279 - DNA, 60 bp, Artificial
  Synthetic oligonucleotide
gtcaagggactggttcatgctcatgcccaagcagaaagtggctggccctctttgtgtcaa

SEQ ID NO: 59280 - DNA, 60 bp, Artificial
  Synthetic oligonucleotide
gtcaagggactggttcatgctcatgcccaagcagagagtggctggccctctttgtgtcag

SEQ ID NO: 59281 - DNA, 60 bp, Artificial
  Synthetic oligonucleotide
gtcttgttagtctccctgggggcaatcagcttctggatgtgttctaatgggtcattgcaa

SEQ ID NO: 59282 - DNA, 60 bp, Artificial
  Synthetic oligonucleotide
ggatggtcttcaatcgtctgatgattttgctctgattgtgaatgcatccaactatgcagg

SEQ ID NO: 59283 - DNA, 60 bp, Artificial
  Synthetic oligonucleotide
gttggaaatgtgccacagcacacagattggtggaataaggatggtggacatccttaggca

SEQ ID NO: 59284 - DNA, 60 bp, Artificial
  Synthetic oligonucleotide
gtaatgagactgggagacctccactcattccaaaacagaaacggaaaatggcgagaacaa

SEQ ID NO: 59285 - DNA, 60 bp, Artificial
  Synthetic oligonucleotide
aaccttttatatcatgttctcacttggaatgcagaaccttttttctgacccaaggcgctc

SEQ ID NO: 59286 - DNA, 60 bp, Artificial
  Synthetic oligonucleotide
ataagacaagaaatggcaagcagaggtctttgggactcctttcgtcagtccgaaagaggc

SEQ ID NO: 59287 - DNA, 60 bp, Artificial
  Synthetic oligonucleotide
ccggctggagaccctaatattactaagggctttcaccgaagagggagcaattgttggcga

SEQ ID NO: 59288 - DNA, 60 bp, Artificial
  Synthetic oligonucleotide
tagatgtttaaagatgagtcttctaaccgaggtcgaaacgtacgttctttctatcatccc

SEQ ID NO: 59289 - DNA, 60 bp, Artificial
  Synthetic oligonucleotide
tagatatttaaagatgagtcttctaaccgaggtcgaaacgtacgttctttctatcatccc

SEQ ID NO: 59290 - DNA, 60 bp, Artificial
  Synthetic oligonucleotide
gaggatcaggaatgagaatacttgtaaggggtaattctccagtattcaactacagcaaga

SEQ ID NO: 59291 - DNA, 60 bp, Artificial
  Synthetic oligonucleotide
gaggatcaggaatgagaatacttgtaaggggtaattctccagtgttcaactacaacaaga

SEQ ID NO: 59292 - DNA, 60 bp, Artificial
  Synthetic oligonucleotide
gaacatcccatccattcaatccaggggtctgtttggagccattgccggtttcattgaagg

SEQ ID NO: 59293 - DNA, 60 bp, Artificial
  Synthetic oligonucleotide
tttggcattccaatctgaatgatgccacatatcagagaacaagagctttagtgcgtacgg

SEQ ID NO: 59294 - DNA, 60 bp, Artificial
  Synthetic oligonucleotide
tctgcagcctgaacgggatagctcctctacaattggggaagtgcaatgtagcgggatggc

SEQ ID NO: 59295 - DNA, 53 bp, Artificial
  Synthetic oligonucleotide
gagacaattggcacggttcgaaccgaccatgggtgtctttcgatcaaaacctg

SEQ ID NO: 59296 - DNA, 60 bp, Artificial
  Synthetic oligonucleotide
tgtgcagagacaattggcacggttcgaaccgaccatgggtgtctttcgatcaaaatctgg

SEQ ID NO: 59297 - DNA, 55 bp, Artificial
  Synthetic oligonucleotide
cagagacaactggcatggttcgaaccgaccatgggtgtctttcgatcaaaatctg

SEQ ID NO: 59298 - DNA, 59 bp, Artificial
  Synthetic oligonucleotide
tgtgcagagacaattggcacggttcgaaccgaccatgggtgtctttcgatcaaaacctg

SEQ ID NO: 59299 - DNA, 60 bp, Artificial
  Synthetic oligonucleotide
cggccactattaatagatggaactgcatcactgagccctggaatgatgatgggcatgttc

SEQ ID NO: 59300 - DNA, 60 bp, Artificial
  Synthetic oligonucleotide
tgtataggctaccatgcgaacaactcaaccgacactgttgacacagtacttgagaagaac

SEQ ID NO: 59301 - DNA, 59 bp, Artificial
  Synthetic oligonucleotide
ggaagttgtccaacaaacaagagtggacaaactgacccagggtcgtcagacctatgatt

SEQ ID NO: 59302 - DNA, 60 bp, Artificial
  Synthetic oligonucleotide
ggtaatgaaacgaaaacgggactctagcatacttactgacagccagacagcgaccaaaag

SEQ ID NO: 59303 - DNA, 60 bp, Artificial
  Synthetic oligonucleotide
agaacatcccagcgcagggaaagatcctaagaaaactggaggacccatatacaagagagt

SEQ ID NO: 59304 - DNA, 60 bp, Artificial
  Synthetic oligonucleotide
cccagcgcagggaaagatcctaagaaaactggaggacccatatacaagagagtaggtgga

SEQ ID NO: 59305 - DNA, 60 bp, Artificial
  Synthetic oligonucleotide
cctcctttgacatgagtaatgaaggatcttatttcttcggagacaatgcagatgagtacg

SEQ ID NO: 59306 - DNA, 60 bp, Artificial
  Synthetic oligonucleotide
ttctgacccaaggtgctctattaaatgacaagcattcaaatgggaccgttaaggacagaa

SEQ ID NO: 59307 - DNA, 60 bp, Artificial
  Synthetic oligonucleotide
gcatacgaaagaatgtgcaacattctcaaagggaaattccaaacagcagcacaacgagca

SEQ ID NO: 59308 - DNA, 53 bp, Artificial
  Synthetic oligonucleotide
tgaagaaaacaagccaattgaaatgggcacttggtgagaacatggcaccggaa

SEQ ID NO: 59309 - DNA, 60 bp, Artificial
  Synthetic oligonucleotide
cgccccaatcgagcatattgcaagtaggaggaggaactacttctcatccgaagtatccca

SEQ ID NO: 59310 - DNA, 60 bp, Artificial
  Synthetic oligonucleotide
caggaccttactggcaaagtcagtattcaatagcctgtacgcatccccacaactcgaggg

SEQ ID NO: 59311 - DNA, 60 bp, Artificial
  Synthetic oligonucleotide
cacagccctactcaatgcatcttgtgcggcaatggatgacttccagttaatcccaatgat

SEQ ID NO: 59312 - DNA, 60 bp, Artificial
  Synthetic oligonucleotide
ccccacaactcgagggattttcagcagaatcaagaaagctacttctaattgttcaggcac

SEQ ID NO: 59313 - DNA, 60 bp, Artificial
  Synthetic oligonucleotide
attgtgttctcgaaataggagacatgcttctacgaacttcaattggccaagtgtcgaggc

SEQ ID NO: 59314 - DNA, 60 bp, Artificial
  Synthetic oligonucleotide
agcaaacaagataaaatcagagaagacacacatccacattttctcgttcacaggggaaga

SEQ ID NO: 59315 - DNA, 60 bp, Artificial
  Synthetic oligonucleotide
ctacagaggttgagaagcccaagtttcttccagatctatatgactataaggagaaccgat

SEQ ID NO: 59316 - DNA, 60 bp, Artificial
  Synthetic oligonucleotide
gcagagcaagaatcaagaccagactattcaccatcaggcaggaattggccattagaggcc

SEQ ID NO: 59317 - DNA, 60 bp, Artificial
  Synthetic oligonucleotide
gactgattctagctggatagaacttgacgaaataggagaggatgtcgccccaatcgagca

SEQ ID NO: 59318 - DNA, 52 bp, Artificial
  Synthetic oligonucleotide
gaggcgaagagacaattgaagagaggtttgaaatcaagggaaccatgcgtag

SEQ ID NO: 59319 - DNA, 60 bp, Artificial
  Synthetic oligonucleotide
ttgatgaacgaggtgaatcaatagttgttgaatctggtgatccaaatgcactcctaaaac

SEQ ID NO: 59320 - DNA, 60 bp, Artificial
  Synthetic oligonucleotide
ggtggaaggaacccaacattgtcaaaccgcacgagaaaggcataaaccccaattatctcc

SEQ ID NO: 59321 - DNA, 60 bp, Artificial
  Synthetic oligonucleotide
tcaaaattcctgcttatggatgccttaaaattaagcattgaggatccgagtcatgagggg

SEQ ID NO: 59322 - DNA, 60 bp, Artificial
  Synthetic oligonucleotide
ggggaagacccgaaaattgaaacaaacaaatttgctgcaatatgtacacacctggaagtc

SEQ ID NO: 59323 - DNA, 60 bp, Artificial
  Synthetic oligonucleotide
cgccacgccctctcagattacctgatggaccaccctgttcccaacgatcaaaattcctgc

SEQ ID NO: 59324 - DNA, 60 bp, Artificial
  Synthetic oligonucleotide
agacaacagcataagaattggttccaaaggagatgtttttgtcataagagaaccttttat

SEQ ID NO: 59325 - DNA, 60 bp, Artificial
  Synthetic oligonucleotide
tacacaaaagacaacagcataagaattggttccaaaggagatgtttttgtcataagagag

SEQ ID NO: 59326 - DNA, 60 bp, Artificial
  Synthetic oligonucleotide
tcccatccattcaatccagaggtttgtttggagccattgccggtttcattgaaggggggt

SEQ ID NO: 59327 - DNA, 60 bp, Artificial
  Synthetic oligonucleotide
gcacaaacagactgcgtcctggaagcaatggctttccttgaagagtcccacccaggaatc

SEQ ID NO: 59328 - DNA, 60 bp, Artificial
  Synthetic oligonucleotide
cgagccaaaggggaatccttgaagatgaacagatgtatcaaaagtgctgcaatctattcg

SEQ ID NO: 59329 - DNA, 60 bp, Artificial
  Synthetic oligonucleotide
gaagaaggctaaactggcaaacgtcgtgaggaaaatgatgactaattcacaagacacaga

SEQ ID NO: 59330 - DNA, 60 bp, Artificial
  Synthetic oligonucleotide
agccatggaacgggaacaggatacaccatggacacagtcaacagaacacatcaatattca

SEQ ID NO: 59331 - DNA, 60 bp, Artificial
  Synthetic oligonucleotide
cgggaacaggatacaccatggacacagtcaacaggacacatcaatattcagaaaagggga

SEQ ID NO: 59332 - DNA, 60 bp, Artificial
  Synthetic oligonucleotide
gtcccacccaggaatctttgaaaactcgtgtctcgaaacgatggaagttgttcaacaaac

SEQ ID NO: 59333 - DNA, 60 bp, Artificial
  Synthetic oligonucleotide
cagaggatttgtgtattttgttgaaacattagcgaggagcatttgtgagaagcttgagca

SEQ ID NO: 59334 - DNA, 60 bp, Artificial
  Synthetic oligonucleotide
cataagcaccacaatcccatatactggagatcctccatacagccatggaacgggaacagg

SEQ ID NO: 59335 - DNA, 60 bp, Artificial
  Synthetic oligonucleotide
gggatttccagcatggtggaggccatggtttctagggcccgaattgatgcgcgaattgac

SEQ ID NO: 59336 - DNA, 60 bp, Artificial
  Synthetic oligonucleotide
tagtgaatgcgccgaatcatgagggaatacaagcaggagtagatagattctataggactt

SEQ ID NO: 59337 - DNA, 60 bp, Artificial
  Synthetic oligonucleotide
ttcagctgttcatcaaggattacagatacacgtatcggtgtcacagaggggacacacaaa

SEQ ID NO: 59338 - DNA, 60 bp, Artificial
  Synthetic oligonucleotide
acgaggaggtcattcgagctgaagaagttgtgggaacaaacccgctcaaaggcaggactg

SEQ ID NO: 59339 - DNA, 60 bp, Artificial
  Synthetic oligonucleotide
acatgagcaaaaagaagtcctacataaacaggacagggacatttgaattcacaagctttt

SEQ ID NO: 59340 - DNA, 60 bp, Artificial
  Synthetic oligonucleotide
agaacaacatgataaacaatgaccttggaccagcaacagctcaaatggctcttcagttgt

SEQ ID NO: 59341 - DNA, 60 bp, Artificial
  Synthetic oligonucleotide
aagacacagaactctctttcacaatcactggagacaacaccaaatggaatgaaaatcaga

SEQ ID NO: 59342 - DNA, 60 bp, Artificial
  Synthetic oligonucleotide
tataggacttgcaagctagtcggaatcaatatgagcaaaaagaagtcctacataaacagg

SEQ ID NO: 59343 - DNA, 60 bp, Artificial
  Synthetic oligonucleotide
cgccgaatcatgagggaatacaagcaggagtagatagattctataggacttgcaagctag

SEQ ID NO: 59344 - DNA, 60 bp, Artificial
  Synthetic oligonucleotide
cccgctcaaaggcaggactgctggtttcagatggagggccaaacttatacaatatccgga

SEQ ID NO: 59345 - DNA, 60 bp, Artificial
  Synthetic oligonucleotide
ccattggggaatcacccaaaggggtggaagaaggctccattgggaaagtatgcaggacct

SEQ ID NO: 59346 - DNA, 60 bp, Artificial
  Synthetic oligonucleotide
ctgaagtatggcccattggggaatcacccaaaggggtggaagaaggctccatcggaaaag

SEQ ID NO: 59347 - DNA, 60 bp, Artificial
  Synthetic oligonucleotide
gagatcactagcaagctggattcagagtgaattcaacaaggcatgtgagctgactgattc

SEQ ID NO: 59348 - DNA, 60 bp, Artificial
  Synthetic oligonucleotide
tgagccaaaaatgagatcactagcaagctggattcagagtgaattcaacaaggcatgtga

SEQ ID NO: 59349 - DNA, 60 bp, Artificial
  Synthetic oligonucleotide
ctcgagggattttcagctgaatcaagaaagttacttctaattgttcaggcacttagggac

SEQ ID NO: 59350 - DNA, 60 bp, Artificial
  Synthetic oligonucleotide
ccattggggaatcacccaaaggggtggaagaaggctccatcggaaaagtatgcagggcct

SEQ ID NO: 59351 - DNA, 60 bp, Artificial
  Synthetic oligonucleotide
gaaatttctttcaccatcactggagataacaccaaatggaatgaaaatcagaaccctagg

SEQ ID NO: 59352 - DNA, 60 bp, Artificial
  Synthetic oligonucleotide
ctttcaccatcactggagataacaccaaatggaatgaaaatcagaaccctaggatgtttt

SEQ ID NO: 59353 - DNA, 59 bp, Artificial
  Synthetic oligonucleotide
atgaaggatcttatttcttcggagacaatgcagaggagtacgacaattaaggaaaaaat

SEQ ID NO: 59354 - DNA, 60 bp, Artificial
  Synthetic oligonucleotide
cggaggacttgaatggaatgataacacagttcgagtctctaaaactctacagagattcgc

SEQ ID NO: 59355 - DNA, 60 bp, Artificial
  Synthetic oligonucleotide
cctagttttggggtgtcaggggtcaatgagtctgcagacatgagtattggagtcactgtc

SEQ ID NO: 59356 - DNA, 60 bp, Artificial
  Synthetic oligonucleotide
ggaatgacaccgacgtggtaaactttgtgagcatggagttttctctcactgacccaagac

SEQ ID NO: 59357 - DNA, 57 bp, Artificial
  Synthetic oligonucleotide
tgcagggacaactggcatggttcaaatcgaccttgggtgtcttttaatcaaaacctg

SEQ ID NO: 59358 - DNA, 60 bp, Artificial
  Synthetic oligonucleotide
ttgtggtgtgaatagtgacacagtgggttggtcttggccagacggtgctgagttgccatt

SEQ ID NO: 59359 - DNA, 60 bp, Artificial
  Synthetic oligonucleotide
taaactttgtgagcatggagttttctctcactgacccgagacttgagccacacaaatggg

SEQ ID NO: 59360 - DNA, 60 bp, Artificial
  Synthetic oligonucleotide
gcaaaccatttgaatggatgtcaatccgactttacttttcttgaaagtgccagcacaaaa

SEQ ID NO: 59361 - DNA, 60 bp, Artificial
  Synthetic oligonucleotide
acagaacaggtacctttgaattcacgagctttttctatcgttatgggtttgttgccaatt

SEQ ID NO: 59362 - DNA, 60 bp, Artificial
  Synthetic oligonucleotide
ttgtgtattagaagcaatggctttccttgaggaatcccatcctggtatttttgaaaactc

SEQ ID NO: 59363 - DNA, 60 bp, Artificial
  Synthetic oligonucleotide
caaacagattgtgtattagaagcaatggctttccttgaggaatcccatcctggtattttt

SEQ ID NO: 59364 - DNA, 58 bp, Artificial
  Synthetic oligonucleotide
aaacagattgtgtattagaagcaatggctttccttgaggaatcccatcctggtatttt

SEQ ID NO: 59365 - DNA, 60 bp, Artificial
  Synthetic oligonucleotide
aaacagattgtgtattagaagcaatggctttccttgaggaatcccatcctggtatttttg

SEQ ID NO: 59366 - DNA, 60 bp, Artificial
  Synthetic oligonucleotide
taatctggggagtgcatcaccctccgactgacagtaatcaacaaaccctctaccagaata

SEQ ID NO: 59367 - DNA, 60 bp, Artificial
  Synthetic oligonucleotide
gggagtgcatcaccctccgactgacagtaatcaacaaaccctctaccagaataatcacac

SEQ ID NO: 59368 - DNA, 51 bp, Artificial
  Synthetic oligonucleotide
gacagtgttcaacaaaccctctaccagaataatcacacatatgtttcagtt

SEQ ID NO: 59369 - DNA, 60 bp, Artificial
  Synthetic oligonucleotide
atgtgactgttacccattcagttaatttactagaaaacagccataatggaaaactctgca

SEQ ID NO: 59370 - DNA, 60 bp, Artificial
  Synthetic oligonucleotide
cagggatctggttacgcagcagatcagaaaagtacacaaatcgcaattgatgggatcagc

SEQ ID NO: 59371 - DNA, 60 bp, Artificial
  Synthetic oligonucleotide
gtttttggatgtatggacatataacgctgagttactcattttgctcgagaacgaaaggac

SEQ ID NO: 59372 - DNA, 60 bp, Artificial
  Synthetic oligonucleotide
acaaagggaaagaagtgcttgtaatctggggagtgcatcaccctccgactgacagtgttc

SEQ ID NO: 59373 - DNA, 60 bp, Artificial
  Synthetic oligonucleotide
tgcttgtaatctggggagtgcatcaccctccgactgacagtgttcaacaaaccctctacc

SEQ ID NO: 59374 - DNA, 60 bp, Artificial
  Synthetic oligonucleotide
cccattcagttaatttactagaaaacagccataatggaaaactctgcaacctgaatggaa

SEQ ID NO: 59375 - DNA, 56 bp, Artificial
  Synthetic oligonucleotide
aatgggtcattgcaatgcagaatatgcatttaagacttgaatttcaaagtgtacgg

SEQ ID NO: 59376 - DNA, 60 bp, Artificial
  Synthetic oligonucleotide
ttttggatgtatggacatataacgctgagttactcattttgctcgagaacgaaagaaccc

SEQ ID NO: 59377 - DNA, 60 bp, Artificial
  Synthetic oligonucleotide
ggacatataacgctgagttactcattttgctcgagaacgaaaggaccctagatttccatg

SEQ ID NO: 59378 - DNA, 50 bp, Artificial
  Synthetic oligonucleotide
gatgctcatgttcacaattgcactacaaagtgccaaactcctcatggggc

SEQ ID NO: 59379 - DNA, 60 bp, Artificial
  Synthetic oligonucleotide
ggacatataacgctgagttactcattttgctcgagaacgaaagaaccctagatttccatg

SEQ ID NO: 59380 - DNA, 60 bp, Artificial
  Synthetic oligonucleotide
gtcatacacaaacaacaaaggaaaagaagtgcttgtaatctggggagtgcatcaccctcc

SEQ ID NO: 59381 - DNA, 60 bp, Artificial
  Synthetic oligonucleotide
ggggcaattgccggattcattgaaggaggatggacaggaatgatagatggatggtatgga

SEQ ID NO: 59382 - DNA, 56 bp, Artificial
  Synthetic oligonucleotide
aatcactcactgagtgacatcaaaatcatggcgtctcaaggcaccaaacgatctta

SEQ ID NO: 59383 - DNA, 60 bp, Artificial
  Synthetic oligonucleotide
gatggccttcaatcgtctgatgattttgctctgattgtgaatgcccccaactatgcagga

SEQ ID NO: 59384 - DNA, 60 bp, Artificial
  Synthetic oligonucleotide
aatcgtctgatgattttgctctgattgtgaacgcacccaattatgaagggattcaagcag

SEQ ID NO: 59385 - DNA, 60 bp, Artificial
  Synthetic oligonucleotide
ctgaagatcctgatgaaggcacagctggagtggagtctgctgtcctgagaggattcctca

SEQ ID NO: 59386 - DNA, 60 bp, Artificial
  Synthetic oligonucleotide
tcctgatgaaggcacagctggagtggagtctgctgtcctgagaggattcctcattttggg

SEQ ID NO: 59387 - DNA, 54 bp, Artificial
  Synthetic oligonucleotide
caggaaggcaagagaagaaccccgcactcagaatgaaatggatgatggcaatga

SEQ ID NO: 59388 - DNA, 60 bp, Artificial
  Synthetic oligonucleotide
gactaaggggattttaggatttgtgttcacactcaccgtgcccagtgagcgaggactgca

SEQ ID NO: 59389 - DNA, 60 bp, Artificial
  Synthetic oligonucleotide
actaaggggattttaggatttgtgttcacactcaccgtgcccagtgagcgaggactgcag

SEQ ID NO: 59390 - DNA, 60 bp, Artificial
  Synthetic oligonucleotide
ggtaatcaaatcagtcgaattgaatgctccaaattaccactatgaggagtgttcctgtta

SEQ ID NO: 59391 - DNA, 60 bp, Artificial
  Synthetic oligonucleotide
ggtaatcaaatcagttgagttgaatgccccaaattaccactatgaggagtgttcctgtta

SEQ ID NO: 59392 - DNA, 60 bp, Artificial
  Synthetic oligonucleotide
caggactttctttctaactcaaggggccttgttgaatgacaagcattccaatggaaccgt

SEQ ID NO: 59393 - DNA, 60 bp, Artificial
  Synthetic oligonucleotide
catactgagaacacaagagtctgaatgtgcctgcataaatggttcttgctttaccataat

SEQ ID NO: 59394 - DNA, 60 bp, Artificial
  Synthetic oligonucleotide
agagtctgaatgtgcctgcataaatggttcctgctttaccataatgactgatggaccaag

SEQ ID NO: 59395 - DNA, 60 bp, Artificial
  Synthetic oligonucleotide
tgaatgtgcttgcataaatggttcttgctttaccataatgactgatggaccaagtaatgg

SEQ ID NO: 59396 - DNA, 60 bp, Artificial
  Synthetic oligonucleotide
tgaatgtgcctgcattaatggttcttgctttaccataatgactgatggaccaagtaatgg

SEQ ID NO: 59397 - DNA, 60 bp, Artificial
  Synthetic oligonucleotide
gcctgcattaatggttcttgctttaccataatgactgatggaccaagtaatggccaggcc

SEQ ID NO: 59398 - DNA, 60 bp, Artificial
  Synthetic oligonucleotide
gcttgcataaatggttcttgctttaccataatgactgatggaccaagtaatggccaggcc

SEQ ID NO: 59399 - DNA, 60 bp, Artificial
  Synthetic oligonucleotide
cagcaaggacaatggtataaggataggttctaagggagatgtatttgtcatcagagagcc

SEQ ID NO: 59400 - DNA, 60 bp, Artificial
  Synthetic oligonucleotide
gatgggctatatacagcaaggacaatggtataaggataggttctaagggagatgtgtttg

SEQ ID NO: 59401 - DNA, 60 bp, Artificial
  Synthetic oligonucleotide
acagcaaggacaatggtataaggataggttctaagggagatgtatttgtcatcagagagc

SEQ ID NO: 59402 - DNA, 60 bp, Artificial
  Synthetic oligonucleotide
ggactggactgcatgagaccttgcttctgggttgaactgatcagaggaaggcccaaggag

SEQ ID NO: 59403 - DNA, 60 bp, Artificial
  Synthetic oligonucleotide
cgagttgaatgctccaaattaccactatgaggagtgttcctgttatcctgatgctagtga

SEQ ID NO: 59404 - DNA, 60 bp, Artificial
  Synthetic oligonucleotide
gagttgaatgcccctaattaccactatgaggagtgttcctgttatcctgatgctagcgag

SEQ ID NO: 59405 - DNA, 60 bp, Artificial
  Synthetic oligonucleotide
cgaattgaatgctccaaattaccactatgaggagtgttcctgttatcctgatgctagtga

SEQ ID NO: 59406 - DNA, 60 bp, Artificial
  Synthetic oligonucleotide
tgagttgaatgccccaaattaccactatgaggagtgttcctgttatcctgatgctagtga

SEQ ID NO: 59407 - DNA, 60 bp, Artificial
  Synthetic oligonucleotide
gtagtcaaatcagttgagttgaatgcccctaattaccactatgaggagtgttcctgttat

SEQ ID NO: 59408 - DNA, 60 bp, Artificial
  Synthetic oligonucleotide
ggtaatcaaatcagtcgagttgaatgctccaaattaccactatgaggagtgttcctgtta

SEQ ID NO: 59409 - DNA, 60 bp, Artificial
  Synthetic oligonucleotide
cacttggtgagaacatggcaccagagaaagtggactttgaagattgcaaggatgtcagcg

SEQ ID NO: 59410 - DNA, 60 bp, Artificial
  Synthetic oligonucleotide
cgaaaaggggaaggttactaaatcaatagagttgaatgcacccaattctcattatgagga

SEQ ID NO: 59411 - DNA, 60 bp, Artificial
  Synthetic oligonucleotide
ttgttggcgaaatttcaccattgccttctcttccaggacatactaatgaggatgtcaaaa

SEQ ID NO: 59412 - DNA, 60 bp, Artificial
  Synthetic oligonucleotide
ttaatagcgacactgtaggttggtcttggccagacggtgctgagttgccattcaccattg

SEQ ID NO: 59413 - DNA, 56 bp, Artificial
  Synthetic oligonucleotide
acccaaagagaacacaatctggactagcgggagcagcatatctttttgcggtgtaa

SEQ ID NO: 59414 - DNA, 60 bp, Artificial
  Synthetic oligonucleotide
gagaccttgcttttgggttgaactaatcagagggcgacccaaagagaacacaatctggac

SEQ ID NO: 59415 - DNA, 60 bp, Artificial
  Synthetic oligonucleotide
ggactggattgtatgagaccttgcttttgggttgaactaatcagagggcgacccaaagag

SEQ ID NO: 59416 - DNA, 60 bp, Artificial
  Synthetic oligonucleotide
atagcgggagttttgttcagcatccagaattgaccggactggattgtatgagaccttgct

SEQ ID NO: 59417 - DNA, 60 bp, Artificial
  Synthetic oligonucleotide
ctgttatcctgagtctggtgaaatcacatgtgtgtgccgagataattggcatggctcaaa

SEQ ID NO: 59418 - DNA, 60 bp, Artificial
  Synthetic oligonucleotide
tggtgaaatcacatgtgtgtgccgagataattggcatggctcaaatcggccgtgggtgtc

SEQ ID NO: 59419 - DNA, 60 bp, Artificial
  Synthetic oligonucleotide
gagagagccattcatctcatgctcccacttagaatgcagaactttcttcttgactcaagg

SEQ ID NO: 59420 - DNA, 60 bp, Artificial
  Synthetic oligonucleotide
ctcatgctcccacttagaatgcagaactttcttcttgactcaaggggccctgctgaatga

SEQ ID NO: 59421 - DNA, 60 bp, Artificial
  Synthetic oligonucleotide
ctctctgccctgttagtggatgggctatatacagtaaagataatagtgtaagaatcggtt

SEQ ID NO: 59422 - DNA, 60 bp, Artificial
  Synthetic oligonucleotide
agacactatcaagagttggaggaacaacatattaagaacacaagagtctgaatgtgcgtg

SEQ ID NO: 59423 - DNA, 60 bp, Artificial
  Synthetic oligonucleotide
gagttggaggaacaacatattaagaacacaagagtctgaatgtgcgtgcgtgaatggttc

SEQ ID NO: 59424 - DNA, 60 bp, Artificial
  Synthetic oligonucleotide
gacagaagcccatatagaaccctgatgagctgtcctattggtgaagttccttctccatat

SEQ ID NO: 59425 - DNA, 60 bp, Artificial
  Synthetic oligonucleotide
ggggcagtggctgtgctgaaatacaatggcataataacagacactatcaagagttggagg

SEQ ID NO: 59426 - DNA, 60 bp, Artificial
  Synthetic oligonucleotide
ggaatagtcagcttaatattacaaattggaaacctaatatcaatatgggccagccactca

SEQ ID NO: 59427 - DNA, 60 bp, Artificial
  Synthetic oligonucleotide
gaaagtagtttcagtaaaattagcgggcaattcctctctctgccctgttagtggatgggc

SEQ ID NO: 59428 - DNA, 60 bp, Artificial
  Synthetic oligonucleotide
ttttgttgctgaacagaaagtagtttcagtaaaattagcgggcaattcctctctctgccc

SEQ ID NO: 59429 - DNA, 60 bp, Artificial
  Synthetic oligonucleotide
ctgattggtcaggatatagcgggagttttgttcagcatccagaattgaccggactggatt

SEQ ID NO: 59430 - DNA, 60 bp, Artificial
  Synthetic oligonucleotide
taatttctcagtaaagcaagatatcataggaatgactgattggtcaggatatagcgggag

SEQ ID NO: 59431 - DNA, 60 bp, Artificial
  Synthetic oligonucleotide
ataggatacatatgcagtgggattttcggggacaatccgcgtcctaatgataggacaggc

SEQ ID NO: 59432 - DNA, 60 bp, Artificial
  Synthetic oligonucleotide
atggctcaaatcggccgtgggtgtctttcaatcaaaatctggagtatcaaataggataca

SEQ ID NO: 59433 - DNA, 60 bp, Artificial
  Synthetic oligonucleotide
gcagtgggattttcggggacaatccgcgtcctaatgataggacaggcagttgcggtccag

SEQ ID NO: 59434 - DNA, 60 bp, Artificial
  Synthetic oligonucleotide
aaggattttcgtttaaatatggcaatggtgtttggatagggagaaccaaaagcactagtt

SEQ ID NO: 59435 - DNA, 60 bp, Artificial
  Synthetic oligonucleotide
ggacaggcagttgcggtccagtattttctaatggagcaaatggggtaaaaggattttcgt

SEQ ID NO: 59436 - DNA, 60 bp, Artificial
  Synthetic oligonucleotide
gaccagaacagacgataatttctcagtaaagcaagatatcataggaatgactgattggtc

SEQ ID NO: 59437 - DNA, 60 bp, Artificial
  Synthetic oligonucleotide
aatatggcaatggtgtttggatagggagaaccaaaagcactagttcaaggagcggttttg

SEQ ID NO: 59438 - DNA, 60 bp, Artificial
  Synthetic oligonucleotide
gatctggcattccaatctgaatgatgccacatatcagaggacaagggcacttgtgcgtac

SEQ ID NO: 59439 - DNA, 60 bp, Artificial
  Synthetic oligonucleotide
tgatgatctggcattccaatctgaatgatgccacatatcagagaacaagggcacttgtgc

SEQ ID NO: 59440 - DNA, 60 bp, Artificial
  Synthetic oligonucleotide
tctaacccacttgatgatctggcattccaatctgaatgatgccacatatcagaggacaag

SEQ ID NO: 59441 - DNA, 60 bp, Artificial
  Synthetic oligonucleotide
ctgggattaatgaatcggccgacatgagcattggagtaacagtgataaagaacaacatga

SEQ ID NO: 59442 - DNA, 60 bp, Artificial
  Synthetic oligonucleotide
ctgggattaatgaatcggctgatatgagcattggagtaacagtgataaagaacaacatga

SEQ ID NO: 59443 - DNA, 60 bp, Artificial
  Synthetic oligonucleotide
catttgtgagaagcttgaacagtctggacttccagttggaggcaatgaaaagaaggctaa

SEQ ID NO: 59444 - DNA, 60 bp, Artificial
  Synthetic oligonucleotide
agccaagtggatatgcacaaacagactgtgtccttgaagcaatggctttccttgaagagt

SEQ ID NO: 59445 - DNA, 60 bp, Artificial
  Synthetic oligonucleotide
tctgggattaatgaatcggctgatatgagcattggagtaacagtgataaagaacaacatg

SEQ ID NO: 59446 - DNA, 60 bp, Artificial
  Synthetic oligonucleotide
tctgggattaatgaatcggccgacatgagcattggagtaacagtgataaagaacaacatg

SEQ ID NO: 59447 - DNA, 60 bp, Artificial
  Synthetic oligonucleotide
gaaaacacacatccacattttctcgttcactggggaagaaatggccacaaaggcagacta

SEQ ID NO: 59448 - DNA, 57 bp, Artificial
  Synthetic oligonucleotide
gaagacacacatccacattttctcgttcactggggaagaaatggccacaaaagccga

SEQ ID NO: 59449 - DNA, 50 bp, Artificial
  Synthetic oligonucleotide
tgttcacgctcaccgtgcccagtgagcgaggactgcagcgtagacgcttt

SEQ ID NO: 59450 - DNA, 60 bp, Artificial
  Synthetic oligonucleotide
aagatgagtcttctaaccgaggtcgaaacgtacgttctctctatcgtcccgtccggcccc

SEQ ID NO: 59451 - DNA, 58 bp, Artificial
  Synthetic oligonucleotide
gtgttcacgctcaccgtgcccagtgagcgaggactgcagcgtagacgttttgtccaaa

SEQ ID NO: 59452 - DNA, 60 bp, Artificial
  Synthetic oligonucleotide
ttgtgttcacgctcaccgtgcccagtgagcgaggactgcagcgtagacgctttgttcaaa

SEQ ID NO: 59453 - DNA, 58 bp, Artificial
  Synthetic oligonucleotide
gtgttcacactcaccgtgcccagtgagcgaggactgcagcgtagacgctttgtccaaa

SEQ ID NO: 59454 - DNA, 54 bp, Artificial
  Synthetic oligonucleotide
tcacgctcaccgtgcccagtgagcgaggactgcagcgtagacgctttgtccaaa

SEQ ID NO: 59455 - DNA, 53 bp, Artificial
  Synthetic oligonucleotide
cacgctcaccgtgcccagtgagcgaggactgcagcgtagacgctttgtccaaa

SEQ ID NO: 59456 - DNA, 60 bp, Artificial
  Synthetic oligonucleotide
gggcaatcagcttctggatgtgttctaatgggtctttgcagtgcagaatatgcatctgag

SEQ ID NO: 59457 - DNA, 60 bp, Artificial
  Synthetic oligonucleotide
catgagtaatgaaggatcttatttcttcggagacaatgcagaggagtacgacaactaagg

SEQ ID NO: 59458 - DNA, 60 bp, Artificial
  Synthetic oligonucleotide
tttgacatgagtaatgaaggatcttatttcttcggagacaatgcagaggagtacgacaac

SEQ ID NO: 59459 - DNA, 60 bp, Artificial
  Synthetic oligonucleotide
ggcctcttctaatagatggcacagcgtcattgagccctggaatgatgatgggcatgttca

SEQ ID NO: 59460 - DNA, 60 bp, Artificial
  Synthetic oligonucleotide
cggccactcctaatagatggaactgcatcactgagccctggaatgatgatgggcatgttc

SEQ ID NO: 59461 - DNA, 60 bp, Artificial
  Synthetic oligonucleotide
gaggagtgcctgattaacgatccctgggttttgcttaatgcgtcttggttcaactccttc

SEQ ID NO: 59462 - DNA, 60 bp, Artificial
  Synthetic oligonucleotide
gccccattccttgatcggcttcgccgagatcagaagtccctaagaggaagaggcagcact

SEQ ID NO: 59463 - DNA, 60 bp, Artificial
  Synthetic oligonucleotide
ttgtggtgtaaatagtgacactgtgggttggtcttggccagacggtgctgagttgccatt

SEQ ID NO: 59464 - DNA, 60 bp, Artificial
  Synthetic oligonucleotide
atgaatccaaatcaaaaaataataaccattgggtcaatcagtatagcaatcggaataatt

SEQ ID NO: 59465 - DNA, 60 bp, Artificial
  Synthetic oligonucleotide
tggtctccctgggggcaatcagcttctggatgtgttctaatgggtctttgcagtgcagaa

SEQ ID NO: 59466 - DNA, 60 bp, Artificial
  Synthetic oligonucleotide
ctcagttattctgctggtgcacttgccagttgtatgggcctcatatacaacagaatgggg

SEQ ID NO: 59467 - DNA, 59 bp, Artificial
  Synthetic oligonucleotide
tcagttattctgctggtgcacttgccagttgtatgggcctcatatacaacaggatgggg

SEQ ID NO: 59468 - DNA, 60 bp, Artificial
  Synthetic oligonucleotide
ctcagttattctgctggtgcacttgccagttgtatgggcctcatatacaacaggatgggg

SEQ ID NO: 59469 - DNA, 60 bp, Artificial
  Synthetic oligonucleotide
tcagttattctgctggtgcacttgccagttgtatgggcctcatatacaacaggatggggg

SEQ ID NO: 59470 - DNA, 60 bp, Artificial
  Synthetic oligonucleotide
aatggacgtcaatccgactttgcttttcttgaaagtgccagcacaaaatgctataagcac

SEQ ID NO: 59471 - DNA, 60 bp, Artificial
  Synthetic oligonucleotide
gacgtcaatccgactttgcttttcttgaaagtgccagcacaaaatgctataagcacaacg

SEQ ID NO: 59472 - DNA, 54 bp, Artificial
  Synthetic oligonucleotide
catgactcttgaagagatgtcaagggactggttcatgctcatgcccaagcaaaa

SEQ ID NO: 59473 - DNA, 60 bp, Artificial
  Synthetic oligonucleotide
tgcccaaaatacgtcaggagtacaaaattaaggatggttacaggactaaggaacatccca

SEQ ID NO: 59474 - DNA, 60 bp, Artificial
  Synthetic oligonucleotide
gccggcaattcatctctttgccctatccgtggatgggctatatacacaaaagacaacagc

SEQ ID NO: 59475 - DNA, 60 bp, Artificial
  Synthetic oligonucleotide
ccagcgcggggaaagatcctaagaaaactggaggacccatatacaagagagtgaatggta

SEQ ID NO: 59476 - DNA, 60 bp, Artificial
  Synthetic oligonucleotide
aatgattatgagggacgactgatccagaacagcttaacaatagagagaatggtgctctct

SEQ ID NO: 59477 - DNA, 60 bp, Artificial
  Synthetic oligonucleotide
ttcatgctctcacttggaatgcagaaccttttttctgactcaaggcgctttgctgaatga

SEQ ID NO: 59478 - DNA, 60 bp, Artificial
  Synthetic oligonucleotide
tcactcacctgatgatttggcattccaatctgaatgatgccacatatcagagaacaagag

SEQ ID NO: 59479 - DNA, 60 bp, Artificial
  Synthetic oligonucleotide
aatattaagaacacaagagtctgaatgtgtctgtataaacggttcatgttttaccataat

SEQ ID NO: 59480 - DNA, 60 bp, Artificial
  Synthetic oligonucleotide
aagcgaatattaagaacacaagagtctgaatgtgtctgtatgaacggttcatgttttacc

SEQ ID NO: 59481 - DNA, 60 bp, Artificial
  Synthetic oligonucleotide
ctttcactgaagaaggagcaatcgtcggcgaaatttcaccattgccttctcttccaggac

SEQ ID NO: 59482 - DNA, 60 bp, Artificial
  Synthetic oligonucleotide
cggctgcattgaaggcaagctttctcaaatgtccaaagaagtgaatgccagaattgaacc

SEQ ID NO: 59483 - DNA, 60 bp, Artificial
  Synthetic oligonucleotide
gaacggctgcattgaaggcaagctttctcaaatgtccaaagaagtgaatgccagaattga

SEQ ID NO: 59484 - DNA, 60 bp, Artificial
  Synthetic oligonucleotide
taatgctcaaagcaaacttctctgtcctatttgatcaactggaaacattagtctcactga

SEQ ID NO: 59485 - DNA, 60 bp, Artificial
  Synthetic oligonucleotide
actcagaagagatcaaaaggcattaaagggaagaggcagcacacttgggctcgacctgcg

SEQ ID NO: 59486 - DNA, 60 bp, Artificial
  Synthetic oligonucleotide
ggcacataagaaagctgctcagtatgagagacatgtgtgatgctccctttgatgatagac

SEQ ID NO: 59487 - DNA, 60 bp, Artificial
  Synthetic oligonucleotide
tatctatggcacataagaaagctgctcagtatgagagacatgtgtgatgctccctttgat

SEQ ID NO: 59488 - DNA, 60 bp, Artificial
  Synthetic oligonucleotide
gcatccagccctgctcctcgatacattaccgatatgagcatagaggaaataagcagggaa

SEQ ID NO: 59489 - DNA, 60 bp, Artificial
  Synthetic oligonucleotide
ctcaaaattgcaattgcatccagccctgctcctcgatacattaccgatatgagcatagag

SEQ ID NO: 59490 - DNA, 60 bp, Artificial
  Synthetic oligonucleotide
gcagcacacttgggctcgacctgcgagtggccacaatggaaggcaaaagaattgttgaag

SEQ ID NO: 59491 - DNA, 60 bp, Artificial
  Synthetic oligonucleotide
acttctctgtcctatttgatcaactggaaacattagtctcactgagggctttcacagacg

SEQ ID NO: 59492 - DNA, 60 bp, Artificial
  Synthetic oligonucleotide
gtctcactgagggctttcacagacgatggcgccattgtagctgaaatatctcctattcct

SEQ ID NO: 59493 - DNA, 59 bp, Artificial
  Synthetic oligonucleotide
tcacagacgatggcgccattgtagctgaaatatctcctattccttctatgccaggacat

SEQ ID NO: 59494 - DNA, 60 bp, Artificial
  Synthetic oligonucleotide
acaaatacataatggactccaacacgataacctcgtttcaggtagattgctatctatggc

SEQ ID NO: 59495 - DNA, 60 bp, Artificial
  Synthetic oligonucleotide
actccaacacgataacctcgtttcaggtagattgctatctatggcacataagaaagctgc

SEQ ID NO: 59496 - DNA, 60 bp, Artificial
  Synthetic oligonucleotide
agttttacatttaacacaggggacatgctgggaacagatgtacactccaggtggagaggt

SEQ ID NO: 59497 - DNA, 60 bp, Artificial
  Synthetic oligonucleotide
agtcttgcatctaacacaggggacatgctgggaacagatgtacactccaggtggagaggt

SEQ ID NO: 59498 - DNA, 60 bp, Artificial
  Synthetic oligonucleotide
gatccctgggttttgcttaatgcttcttggttcaactccttcctcacacatgcactgaga

SEQ ID NO: 59499 - DNA, 60 bp, Artificial
  Synthetic oligonucleotide
aggaagatctcacttaaggaatgacaccgacgtggtaaactttgtgagcatggagttttc

SEQ ID NO: 59500 - DNA, 60 bp, Artificial
  Synthetic oligonucleotide
gctctcacttggaatgcagaaccttttttctgacccaaggcgctttgctgaatgacaggc

SEQ ID NO: 59501 - DNA, 60 bp, Artificial
  Synthetic oligonucleotide
caatatgtatcggctaccatgccaacaactcaaccgacactgttgacacagtacttgaga

SEQ ID NO: 59502 - DNA, 58 bp, Artificial
  Synthetic oligonucleotide
ttttaaccggttggagactctgacattactaagggctttcaccgaagagggagcaatt

SEQ ID NO: 59503 - DNA, 58 bp, Artificial
  Synthetic oligonucleotide
ttttgaccggctggagactctaatattactaagggctttcaccgaagagggagcaatt

SEQ ID NO: 59504 - DNA, 58 bp, Artificial
  Synthetic oligonucleotide
ttttgaccggctggagactctaatattattaagggctttcaccgaagagggagcaatt

SEQ ID NO: 59505 - DNA, 59 bp, Artificial
  Synthetic oligonucleotide
ttttgaccggctggagactctaatattgctaagggctttcaccgaagagggagcaattg

SEQ ID NO: 59506 - DNA, 58 bp, Artificial
  Synthetic oligonucleotide
ttttgatcggttggaggatctgacattactaagggctttcaccgaagagggagcaatt

SEQ ID NO: 59507 - DNA, 58 bp, Artificial
  Synthetic oligonucleotide
ttttgatcgattggagaatctgacattactaagggctttcaccgaagagggagcaatt

SEQ ID NO: 59508 - DNA, 60 bp, Artificial
  Synthetic oligonucleotide
ccggctggagactctaatattactaagggctttcaccgaagagggagcaattgttggcga

SEQ ID NO: 59509 - DNA, 60 bp, Artificial
  Synthetic oligonucleotide
ggctttcaccgaagagggagcaattgttggcgaaatttcaccactgccttctcttccagg

SEQ ID NO: 59510 - DNA, 60 bp, Artificial
  Synthetic oligonucleotide
ccggttggagactttaatactactaagggctttcaccgaagagggagcaattgttggcga

SEQ ID NO: 59511 - DNA, 60 bp, Artificial
  Synthetic oligonucleotide
gacattactaagggctttcaccgaagagggagcaattgttggcgaaatttcaccattgcc

SEQ ID NO: 59512 - DNA, 60 bp, Artificial
  Synthetic oligonucleotide
attattaagggctttcaccgaagagggagcaattgttggcgaaatttcaccattgccttc

SEQ ID NO: 59513 - DNA, 60 bp, Artificial
  Synthetic oligonucleotide
actaagggctttcaccgaagagggagcaattgttggcgaaatttcaccattgccttctct

SEQ ID NO: 59514 - DNA, 60 bp, Artificial
  Synthetic oligonucleotide
cagactggtcttggccagacggtgctgagttgccattcaccattgacaagtagttcgttg

SEQ ID NO: 59515 - DNA, 60 bp, Artificial
  Synthetic oligonucleotide
caaattggtcttggccagacggtgctgagttgccattcaccattgacaagtagttcgttg

SEQ ID NO: 59516 - DNA, 60 bp, Artificial
  Synthetic oligonucleotide
gaagcaatggctttccttgaggaatcccatcctggtatttttgaaaactcttgtattgaa

SEQ ID NO: 59517 - DNA, 60 bp, Artificial
  Synthetic oligonucleotide
ccattcaatccagaggtctgtttggagccattgccggtttcattgaagggggatgggatg

SEQ ID NO: 59518 - DNA, 60 bp, Artificial
  Synthetic oligonucleotide
caccccagcttaacccgattgatggaccactaccagaggacaatgagccaagcggatatg

SEQ ID NO: 59519 - DNA, 60 bp, Artificial
  Synthetic oligonucleotide
caaccataagggaattgagtccgtaaacagtgccgtggtaatgccagcccatggtccagc

SEQ ID NO: 59520 - DNA, 60 bp, Artificial
  Synthetic oligonucleotide
gtctgcttgaaatgggagctaatggatgtagattatcggggaagattgtgtaatcctctg

SEQ ID NO: 59521 - DNA, 60 bp, Artificial
  Synthetic oligonucleotide
actggtgggatgggctccaatcttctgatgacttcgccctcatagtgaatgcacctaatc

SEQ ID NO: 59522 - DNA, 60 bp, Artificial
  Synthetic oligonucleotide
ctcgggccagcaacagcccaaatggctcttcagctattcattaaggactacaggtataca

SEQ ID NO: 59523 - DNA, 60 bp, Artificial
  Synthetic oligonucleotide
ccccggatgtttctggcaatgataacgtacatcacaagaaatcagcctgaatggttcaga

SEQ ID NO: 59524 - DNA, 60 bp, Artificial
  Synthetic oligonucleotide
ctgcaaactggtcggaatcaatatgagcaaaaagaaatcttacataaataggacaggaac

SEQ ID NO: 59525 - DNA, 60 bp, Artificial
  Synthetic oligonucleotide
gccaaattggcaaatgttgtgaggaaaatgatgaccaactcacaggatacagagctctcc

SEQ ID NO: 59526 - DNA, 60 bp, Artificial
  Synthetic oligonucleotide
agaaaccaaccggctgcaactgctttggccaacacaatagaggtcttcaggatgaacagt

SEQ ID NO: 59527 - DNA, 60 bp, Artificial
  Synthetic oligonucleotide
aacagggacaggatacaccatggacacggtcaacagaacacatcaatattcagaaagggg

SEQ ID NO: 59528 - DNA, 60 bp, Artificial
  Synthetic oligonucleotide
acatgttcgaaagtaagagcatgaagctacggacacaaataccagcagaaatgcttgcag

SEQ ID NO: 59529 - DNA, 60 bp, Artificial
  Synthetic oligonucleotide
catgagggaatacaagcaggagtggataggttctacaggacctgcaaactggtcggaatc

SEQ ID NO: 59530 - DNA, 60 bp, Artificial
  Synthetic oligonucleotide
ctaagccctggaatgatgatgggcatgtttaacatgctgagcacagttctaggagtctca

SEQ ID NO: 59531 - DNA, 60 bp, Artificial
  Synthetic oligonucleotide
gaacggctgcattgagggcaagctttctcaaatgtcaaaagaagtgaacgccaggatcga

SEQ ID NO: 59532 - DNA, 60 bp, Artificial
  Synthetic oligonucleotide
cggctgcattgagggcaagctttctcaaatgtcaaaagaagtgaacgccaggatcgagcc

SEQ ID NO: 59533 - DNA, 60 bp, Artificial
  Synthetic oligonucleotide
ctatcgaaccctgatgagctgtcctattggtgaagtcccctctccatacaactcaagatt

SEQ ID NO: 59534 - DNA, 60 bp, Artificial
  Synthetic oligonucleotide
ggcccagataatggggcagtggctgtgctgaaatacaatggcataataacagacactatc

SEQ ID NO: 59535 - DNA, 55 bp, Artificial
  Synthetic oligonucleotide
acaatggggcagtggctgtgctgaaatacaatgacataataacagacactatcaa

SEQ ID NO: 59536 - DNA, 60 bp, Artificial
  Synthetic oligonucleotide
aaccctgaacacaatgaccaaagatgctgagagggggaaactaaaacgcagagcaattgc

SEQ ID NO: 59537 - DNA, 60 bp, Artificial
  Synthetic oligonucleotide
agcattgaccctgaacacaatgaccaaagatgctgagagagggaagctaaaacgaagagc

SEQ ID NO: 59538 - DNA, 60 bp, Artificial
  Synthetic oligonucleotide
ccctgaacacaatgaccaaagatgctgagagagggaaactaaaacgtagagcaattgcaa

SEQ ID NO: 59539 - DNA, 60 bp, Artificial
  Synthetic oligonucleotide
gggtggacaaactgacacaaggcagacagacctatgactggactctaaataggaaccagc

SEQ ID NO: 59540 - DNA, 60 bp, Artificial
  Synthetic oligonucleotide
aagggtggacaaactgacacaaggcagacagacctatgactggactctaaataggaacca

SEQ ID NO: 59541 - DNA, 60 bp, Artificial
  Synthetic oligonucleotide
ggccctgaatcagtgttggtcaatacctatcagtggatcatcagaaactgggaaactgtt

SEQ ID NO: 59542 - DNA, 60 bp, Artificial
  Synthetic oligonucleotide
ggccctgagtcagtgttggtcaatacctatcagtggatcatcagaaactgggaaactgtt

SEQ ID NO: 59543 - DNA, 60 bp, Artificial
  Synthetic oligonucleotide
ggccctgaatcagtattggtcaatacctatcagtggatcatcagaaactgggaaactgtt

SEQ ID NO: 59544 - DNA, 60 bp, Artificial
  Synthetic oligonucleotide
gagtgcaataggccaagtgtcaaggcccatgtacttgtatgtaaggacaaatggaacctc

SEQ ID NO: 59545 - DNA, 60 bp, Artificial
  Synthetic oligonucleotide
ttcagaaacatcctgagcatcgcacccataatgttctcaaacaaaatggcgagactaggg

SEQ ID NO: 59546 - DNA, 60 bp, Artificial
  Synthetic oligonucleotide
ataatcactcactgagtgacatccacatcatggcgtctcaaggcaccaaacgatcttatg

SEQ ID NO: 59547 - DNA, 51 bp, Artificial
  Synthetic oligonucleotide
tgaagagctcagacggcaaaagtagtgaatttagcttgtccttcatgaaaa

SEQ ID NO: 59548 - DNA, 60 bp, Artificial
  Synthetic oligonucleotide
gagccttttatttcatgctctcacttggaatgcaggactttctttctaactcaaggggcc

SEQ ID NO: 59549 - DNA, 54 bp, Artificial
  Synthetic oligonucleotide
ttccagaagcggatttgagatgatttgggatcctaatgggtggacagagactga

SEQ ID NO: 59550 - DNA, 60 bp, Artificial
  Synthetic oligonucleotide
ggaaagaaaatgcttatgtctctgtagtgtcttcaaattataacaggagattcaccccgg

SEQ ID NO: 59551 - DNA, 60 bp, Artificial
  Synthetic oligonucleotide
agcaaagataatggcgtaagaattggttccaaaggagatgtttttgtcataagagaaccc

SEQ ID NO: 59552 - DNA, 60 bp, Artificial
  Synthetic oligonucleotide
ggagagctgcagtatcagcagatccactagcatctttattggaaatgtgccacagcacac

SEQ ID NO: 59553 - DNA, 60 bp, Artificial
  Synthetic oligonucleotide
gaaggtctcacttaaggaatgacaccgacgtggtaaactttgtgagcatggaattttctc

SEQ ID NO: 59554 - DNA, 60 bp, Artificial
  Synthetic oligonucleotide
cttctaatagatggtacagcctcactgagtcctggaatgatgatgggcatgttcaacatg

SEQ ID NO: 59555 - DNA, 60 bp, Artificial
  Synthetic oligonucleotide
cggtctgacggctaatgaatcaggaaggctaatagatttcctcaaggatgtgatggaatc

SEQ ID NO: 59556 - DNA, 60 bp, Artificial
  Synthetic oligonucleotide
ggctaaactggcaaacgtcgtgaggaaaatgatgactaattcacaagacacagagctctc

SEQ ID NO: 59557 - DNA, 60 bp, Artificial
  Synthetic oligonucleotide
caatccgactttacttttcttgaaagttccagcgcaaaatgccataagcaccacaatccc

SEQ ID NO: 59558 - DNA, 60 bp, Artificial
  Synthetic oligonucleotide
agccaagtggatatgcacaaacagactgtgtcctggaagcaatggctttccttgaagagt

SEQ ID NO: 59559 - DNA, 60 bp, Artificial
  Synthetic oligonucleotide
cggtttgacggccaatgaatcaggaaggctaatagatttcctcaaggatgtgatggaatc

SEQ ID NO: 59560 - DNA, 60 bp, Artificial
  Synthetic oligonucleotide
agctttttctatcgctatgggtttgtcgccaatttcagcatggagcttcctagttttggg

SEQ ID NO: 59561 - DNA, 60 bp, Artificial
  Synthetic oligonucleotide
ctttttctatcgctacgggtttgttgccaatttcagcatggagcttcctagttttggggt

SEQ ID NO: 59562 - DNA, 60 bp, Artificial
  Synthetic oligonucleotide
gtcaagggactggttcatgctcatgcccaagcaaaaagtggcaggccccctttgtgtcag

SEQ ID NO: 59563 - DNA, 60 bp, Artificial
  Synthetic oligonucleotide
ctaccatgcgaacaactcaaccgacactgttgacacagtactcgaaaagaatgtgacagt

SEQ ID NO: 59564 - DNA, 60 bp, Artificial
  Synthetic oligonucleotide
acacatcaggaagacaggagaaaaacccatcacttaggatgaaatggatgatggcaatga

SEQ ID NO: 59565 - DNA, 60 bp, Artificial
  Synthetic oligonucleotide
caaatactgtgtcaagctttcaggtagactgctttctttggcatgtccgcaaacgatttg

SEQ ID NO: 59566 - DNA, 56 bp, Artificial
  Synthetic oligonucleotide
ccaacactgtgtcaagctttcaggtagactgctttctttggcatgtccgcaaacgg

SEQ ID NO: 59567 - DNA, 60 bp, Artificial
  Synthetic oligonucleotide
caaacactgtgtcaagctttcaggtagactgctttctttggcatgtccgcaaacggtttg

SEQ ID NO: 59568 - DNA, 60 bp, Artificial
  Synthetic oligonucleotide
ggtagaagccatggtttccagagcccgaattgatgcacggattgatttcgaatctggaag

SEQ ID NO: 59569 - DNA, 60 bp, Artificial
  Synthetic oligonucleotide
ggctatggtttccagagcccgaattgatgcacggattgatttcgaatctggaaggataaa

SEQ ID NO: 59570 - DNA, 60 bp, Artificial
  Synthetic oligonucleotide
gtagaggccatggtttccagagcccgaattgatgcacggattgatttcgaatctggaagg

SEQ ID NO: 59571 - DNA, 60 bp, Artificial
  Synthetic oligonucleotide
gtggaggctatggtttccagagcccgaattgatgcacggattgatttcgaatctggaagg

SEQ ID NO: 59572 - DNA, 60 bp, Artificial
  Synthetic oligonucleotide
gtagaagccatggtttccagagcccgaattgatgcacggattgatttcgaatctggaagg

SEQ ID NO: 59573 - DNA, 60 bp, Artificial
  Synthetic oligonucleotide
ggtagaggccatggtttccagagcccgaattgatgcacggattgatttcgaatctggaag

SEQ ID NO: 59574 - DNA, 60 bp, Artificial
  Synthetic oligonucleotide
ggtggaggctatggtttccagagcccgaattgatgcacggattgatttcgaatctggaag

SEQ ID NO: 59575 - DNA, 60 bp, Artificial
  Synthetic oligonucleotide
tgccagatttgtatgattacaaggagaatagattcatcgagattggagtgacaaggaggg

SEQ ID NO: 59576 - DNA, 60 bp, Artificial
  Synthetic oligonucleotide
gtgacactgtgggttggtcttggccagacggtgctgagttgccatttaccattgacaagt

SEQ ID NO: 59577 - DNA, 60 bp, Artificial
  Synthetic oligonucleotide
gcgaacaactcaaccgacactgttgacacagtactcgaaaagaatgtgacagtgacacac

SEQ ID NO: 59578 - DNA, 60 bp, Artificial
  Synthetic oligonucleotide
gattggtcttggccagacggtgccgagttgccattcaccattgacaagtagtttgttcaa

SEQ ID NO: 59579 - DNA, 60 bp, Artificial
  Synthetic oligonucleotide
tagattggtcttggccagacggtgccgagttgccattcaccattgacaagtagtttgttc

SEQ ID NO: 59580 - DNA, 60 bp, Artificial
  Synthetic oligonucleotide
tgggtttgttgccaatttcagcatggagcttcccagttttggggtttctggaatcaacga

SEQ ID NO: 59581 - DNA, 60 bp, Artificial
  Synthetic oligonucleotide
caggaactatgcgcaggcttgccgaccaaagtctcccgccgaacttctcctgccttgaga

SEQ ID NO: 59582 - DNA, 60 bp, Artificial
  Synthetic oligonucleotide
ttcagctgaatcgaggaaattacttctcattgttcaggcacttagggacaacctggaacc

SEQ ID NO: 59583 - DNA, 60 bp, Artificial
  Synthetic oligonucleotide
tattgaggaaatgtcaagggactggttcatgctcatgcccaagcagaaagtggcaggccc

SEQ ID NO: 59584 - DNA, 60 bp, Artificial
  Synthetic oligonucleotide
cctaactgacatgactattgaggaaatgtcaagggactggttcatgctcatgcccaagca

SEQ ID NO: 59585 - DNA, 60 bp, Artificial
  Synthetic oligonucleotide
gtcctcatcggaggacttgaatggaatgataacacagttcgagtctctaaaactctacag

SEQ ID NO: 59586 - DNA, 60 bp, Artificial
  Synthetic oligonucleotide
ttggggtcctcatcggaggacttgaatggaatgataacacagttcgagtctctaaaactc

SEQ ID NO: 59587 - DNA, 60 bp, Artificial
  Synthetic oligonucleotide
attggggtcctcatcgggggacttgaatggaatgataacacagttcgagtctctgaaact

SEQ ID NO: 59588 - DNA, 60 bp, Artificial
  Synthetic oligonucleotide
ggggtcctcatcggaggacttgaatggaatgataacacagttcgagtctctgaaactcta

SEQ ID NO: 59589 - DNA, 60 bp, Artificial
  Synthetic oligonucleotide
atcggaggacttgaatggaatgataacacagttcgagtctctgaaactctacagagattc

SEQ ID NO: 59590 - DNA, 60 bp, Artificial
  Synthetic oligonucleotide
ggatcctcatcaaaggacttgaatggaatgataacacagttcgagtctctgaagctctac

SEQ ID NO: 59591 - DNA, 54 bp, Artificial
  Synthetic oligonucleotide
atcggaggacttgaatggaatgataacacagttcgagtctctaaaactctacag

SEQ ID NO: 59592 - DNA, 60 bp, Artificial
  Synthetic oligonucleotide
aagatgagttttctaaccgaggtcgaaacgtacgttctctctatcgtcccgtcaggcccc

SEQ ID NO: 59593 - DNA, 60 bp, Artificial
  Synthetic oligonucleotide
gaggatcaggaatgagaatacttgtaaggggtaattctccagtattcaactacaacaaga

SEQ ID NO: 59594 - DNA, 60 bp, Artificial
  Synthetic oligonucleotide
tagattggtcttggccagacggtgctgagttgccattcaccattgacaagtagtctgtgc

SEQ ID NO: 59595 - DNA, 60 bp, Artificial
  Synthetic oligonucleotide
atggatgtcaatccgaccttacttttcttaaaagtgccagcacaaaatgctataagcaca

SEQ ID NO: 59596 - DNA, 60 bp, Artificial
  Synthetic oligonucleotide
aatggatgtcaatccgaccttacttttcttaaaagtgccagcacaaaatgctataagcac

SEQ ID NO: 59597 - DNA, 60 bp, Artificial
  Synthetic oligonucleotide
aatggatgtcaatccgactttacttttcttaaaagtgccagcacaaaatgctataagcac

SEQ ID NO: 59598 - DNA, 60 bp, Artificial
  Synthetic oligonucleotide
cttaaaagtgccagcacaaaatgctataagcacaacttttccttatactggagaccctcc

SEQ ID NO: 59599 - DNA, 60 bp, Artificial
  Synthetic oligonucleotide
cttaaaagtgccagcacaaaatgctataagcacgactttcccttatactggagaccctcc

SEQ ID NO: 59600 - DNA, 60 bp, Artificial
  Synthetic oligonucleotide
caacccgactctacttttcttaaaagtgccagcacaaaatgctataagcactacattccc

SEQ ID NO: 59601 - DNA, 60 bp, Artificial
  Synthetic oligonucleotide
ggatgtcaatccgaccttacttttcttaaaagtgccagcacaaaatgctataagcacgac

SEQ ID NO: 59602 - DNA, 60 bp, Artificial
  Synthetic oligonucleotide
gggagattctacatacagatgtgcactgaactcaagctcagcgattatgaagggaggctg

SEQ ID NO: 59603 - DNA, 60 bp, Artificial
  Synthetic oligonucleotide
ggtggaatcgggagattctacatacagatgtgcactgaactcaaactcagtgactatgaa

SEQ ID NO: 59604 - DNA, 60 bp, Artificial
  Synthetic oligonucleotide
acagagattcgcttggagaagcagtaatgagactgggggacctccattcactccaacaca

SEQ ID NO: 59605 - DNA, 50 bp, Artificial
  Synthetic oligonucleotide
atgaaggatcttatttcttcggagacaatgcagaggaatacgacaattaa

SEQ ID NO: 59606 - DNA, 51 bp, Artificial
  Synthetic oligonucleotide
gaaggatcttatttcttcggagacaatgcagaggagtacgacaattaagaa

SEQ ID NO: 59607 - DNA, 60 bp, Artificial
  Synthetic oligonucleotide
gtcacctctgaccaagggaattctgggattcgtgttcacgctcaccgtgcccagtgagcg

SEQ ID NO: 59608 - DNA, 60 bp, Artificial
  Synthetic oligonucleotide
attctgtcacctctgactaaggggattttaggatttgtgttcacgctcaccgtgcccagt

SEQ ID NO: 59609 - DNA, 60 bp, Artificial
  Synthetic oligonucleotide
ccatttgaatggatgtcaatccgactttacttttcttgaaagttccagcacaaaatgcca

SEQ ID NO: 59610 - DNA, 60 bp, Artificial
  Synthetic oligonucleotide
gacaagctgacgcaaggccgacagacctatgactggactctaaataggaaccagcctgct

SEQ ID NO: 59611 - DNA, 60 bp, Artificial
  Synthetic oligonucleotide
ggccgacagacctatgactggactctaaataggaaccagcctgctgcaacagcattggcc

SEQ ID NO: 59612 - DNA, 60 bp, Artificial
  Synthetic oligonucleotide
ggatccaaacactgtgtcaagctttcaggtagattgctttctttggcatgtccgcaaacg

SEQ ID NO: 59613 - DNA, 60 bp, Artificial
  Synthetic oligonucleotide
ggatcccaacactgtgtcaagctttcaggtagattgctttctttggcatgtccgcaaacg

SEQ ID NO: 59614 - DNA, 55 bp, Artificial
  Synthetic oligonucleotide
tggccagacggcgctgagttgccattcaccattgacaagtagtttgttcaaaaaa

SEQ ID NO: 59615 - DNA, 53 bp, Artificial
  Synthetic oligonucleotide
tggccagacggcgctgagttgccattcaccattgacaagtagtttgttcaaaa

SEQ ID NO: 59616 - DNA, 60 bp, Artificial
  Synthetic oligonucleotide
gaaaataaaagcaaccgaaatgaaggcaatactattagtcttgttatgtgcatttgcagc

SEQ ID NO: 59617 - DNA, 60 bp, Artificial
  Synthetic oligonucleotide
tccagaaatagcagcgagacccaaagtgagaggtcaggcagggaggatgaactattactg

SEQ ID NO: 59618 - DNA, 60 bp, Artificial
  Synthetic oligonucleotide
acactctgttaacctgcttgaagacagccacaacggaaaactatgtagactagggggaat

SEQ ID NO: 59619 - DNA, 60 bp, Artificial
  Synthetic oligonucleotide
gaagccaactaaggaataatgccaaggaaatcgggaatggatgctttgaattctaccaca

SEQ ID NO: 59620 - DNA, 60 bp, Artificial
  Synthetic oligonucleotide
gatctattcaaccgtcgccagttcactagtgctgttagtctccctgggggcaatcagctt

SEQ ID NO: 59621 - DNA, 60 bp, Artificial
  Synthetic oligonucleotide
aagatatgctttcgcactgaatagaggttctgaatccggtatcatcacttcagacgcacc

SEQ ID NO: 59622 - DNA, 60 bp, Artificial
  Synthetic oligonucleotide
gaaatttactatggctggtaaagaaggaaaattcatacccaaagcttagcaaatcctatg

SEQ ID NO: 59623 - DNA, 60 bp, Artificial
  Synthetic oligonucleotide
tcctgtcacctctgactaaggggattttagggtttgtgttcacgctcaccgtgcccagtg

SEQ ID NO: 59624 - DNA, 60 bp, Artificial
  Synthetic oligonucleotide
cttactgacagccagacagcgaccaaaagaattcggatggccatcaattagtgtcgaata

SEQ ID NO: 59625 - DNA, 60 bp, Artificial
  Synthetic oligonucleotide
ttcactgggaatacggagggaagaacatcagacatgagggcagaaatcataaggatgatg

SEQ ID NO: 59626 - DNA, 58 bp, Artificial
  Synthetic oligonucleotide
agtgcctgattaatgatccctgggttttgcttaatgcgtcttggttcaactccttcct

SEQ ID NO: 59627 - DNA, 60 bp, Artificial
  Synthetic oligonucleotide
aacaatctggactagtgggagcagcatttctttttgtggcgtaaatagtgatactgcaaa

SEQ ID NO: 59628 - DNA, 60 bp, Artificial
  Synthetic oligonucleotide
ggtcctgagtcagtgttgatcaatacctatcagtggatcatcagaaactgggagactgtt

SEQ ID NO: 59629 - DNA, 50 bp, Artificial
  Synthetic oligonucleotide
gatccaaaatggaagactttgtgcgacaatgcttcaatccgatgattgtc

SEQ ID NO: 59630 - DNA, 60 bp, Artificial
  Synthetic oligonucleotide
gctggaaagaataccgatcttgaggctctcatggagtggctaaagacaagaccaatcctg

SEQ ID NO: 59631 - DNA, 60 bp, Artificial
  Synthetic oligonucleotide
gacaataacttattcatcatcaatgatgtgggagatcaatggtcctgagtcggtgttggt

SEQ ID NO: 59632 - DNA, 60 bp, Artificial
  Synthetic oligonucleotide
taaactttgtgagcatggagttttctctcactgacccaagacttgagccacacaaatggg

SEQ ID NO: 59633 - DNA, 60 bp, Artificial
  Synthetic oligonucleotide
gggactggttcatgctcatgcccaagcagaaagtggcaggccctctttgtgtcagaatgg

SEQ ID NO: 59634 - DNA, 60 bp, Artificial
  Synthetic oligonucleotide
gattagggaaaggatacatgttcgaaagtaagagcatgaagctacggacacaaataccag

SEQ ID NO: 59635 - DNA, 60 bp, Artificial
  Synthetic oligonucleotide
gattagggaaaggatacatgttcgaaagtaagagcatgaagctacgaacacaaataccag

SEQ ID NO: 59636 - DNA, 60 bp, Artificial
  Synthetic oligonucleotide
gtattgctccaataatgttctcaaacaaaatggcgagactaggaaagggatacatgtttg

SEQ ID NO: 59637 - DNA, 60 bp, Artificial
  Synthetic oligonucleotide
tctatcgctacgggtttgttgccaatttcagcatggagcttcctagttttggggtatctg

SEQ ID NO: 59638 - DNA, 55 bp, Artificial
  Synthetic oligonucleotide
atctgttccaccattgaagagctcagacggcagaaatagtgaatttagcttgtcc

SEQ ID NO: 59639 - DNA, 60 bp, Artificial
  Synthetic oligonucleotide
gagtcgggaaggctaatagatttcctcaaggatgtgatggaatcaatggataaagaggaa

SEQ ID NO: 59640 - DNA, 60 bp, Artificial
  Synthetic oligonucleotide
cattggagtgacagtgataaagaacaacatgataaacaatgatctcgggccagcaacagc

SEQ ID NO: 59641 - DNA, 54 bp, Artificial
  Synthetic oligonucleotide
ttgtccaacaaacaagagtggacaaactgacccaaggtcgtcagacctatgatt

SEQ ID NO: 59642 - DNA, 60 bp, Artificial
  Synthetic oligonucleotide
atcaggaatgagaatacttgtaaggggcaattctccagtattcaactacaacaagaccac

SEQ ID NO: 59643 - DNA, 60 bp, Artificial
  Synthetic oligonucleotide
ggatcaggaatgagaatacttgtaaggggcaattctccagtattcaactacaacaagacc

SEQ ID NO: 59644 - DNA, 60 bp, Artificial
  Synthetic oligonucleotide
attcaagcaggagttgacaggttttatcgaacctgtaagctactcggaattaatatgagc

SEQ ID NO: 59645 - DNA, 60 bp, Artificial
  Synthetic oligonucleotide
agctggagttgacaggttttatcgaacctgtaagctgctcgggattaatatgagcaaaaa

SEQ ID NO: 59646 - DNA, 51 bp, Artificial
  Synthetic oligonucleotide
tgatctaaaatggaagactttgtgcgacaatgcttcaatccaatgatcgtc

SEQ ID NO: 59647 - DNA, 60 bp, Artificial
  Synthetic oligonucleotide
gtattgcacttaactcaaggaacctgctgggaacagatgtacactccaggtggagaggtg

SEQ ID NO: 59648 - DNA, 60 bp, Artificial
  Synthetic oligonucleotide
gattggtcttggccagacggtgctgagttgccattcaccattgacaagtagtctgtgcaa

SEQ ID NO: 59649 - DNA, 60 bp, Artificial
  Synthetic oligonucleotide
agttttgcatttaacacaggggacctgctgggaacagatgtacactccaggtggagaggt

SEQ ID NO: 59650 - DNA, 60 bp, Artificial
  Synthetic oligonucleotide
gtattgcacttaactcaaggaatctgctgggaacagatgtacactccaggtggagaggtg

SEQ ID NO: 59651 - DNA, 58 bp, Artificial
  Synthetic oligonucleotide
atgaaggatcttatttcttcggagacaatgcagaggagtacgacaattaagaaaaaat

SEQ ID NO: 59652 - DNA, 60 bp, Artificial
  Synthetic oligonucleotide
atcgggggacttgaatggaatgataacacagttcgagtctctaaaactctacagagattc

SEQ ID NO: 59653 - DNA, 60 bp, Artificial
  Synthetic oligonucleotide
ctctgaaactctacagagattcgcttggagaagcagtaatgagactgggggacctccatt

SEQ ID NO: 59654 - DNA, 50 bp, Artificial
  Synthetic oligonucleotide
ctctgaaactctacagagattcgcttggagaagcagtaatgagactgggg

SEQ ID NO: 59655 - DNA, 60 bp, Artificial
  Synthetic oligonucleotide
gtctgcttgaaatgggaattgatggatgaggattaccaggggcgtttatgcaacccattg

SEQ ID NO: 59656 - DNA, 60 bp, Artificial
  Synthetic oligonucleotide
gtctgtttgaaatgggaattgatggatgaggattaccaggggcgtttatgcaacccattg

SEQ ID NO: 59657 - DNA, 60 bp, Artificial
  Synthetic oligonucleotide
gtatgcttgaaatgggaattgatggatgaggattaccaggggcgtttatgcaacccattg

SEQ ID NO: 59658 - DNA, 60 bp, Artificial
  Synthetic oligonucleotide
agtggctatgcccaaacagattgtgtattagaggcaatggctttccttgaggaatcccat

SEQ ID NO: 59659 - DNA, 60 bp, Artificial
  Synthetic oligonucleotide
cacatcatggcgtctcaaggcaccaaacgatcttatgagcagatggaaactggtggagaa

SEQ ID NO: 59660 - DNA, 60 bp, Artificial
  Synthetic oligonucleotide
atggatgtcaatccgactttgcttttcttgaaagttccagcgcaaaatgccataagcacc

SEQ ID NO: 59661 - DNA, 60 bp, Artificial
  Synthetic oligonucleotide
tccatcctgaatcttgggcaaaagagatacaccaagactacttactggtgggatggtctt

SEQ ID NO: 59662 - DNA, 60 bp, Artificial
  Synthetic oligonucleotide
acaccgatgtggtaaactttgtgagcatggagttttccctcactgacccaagacttgagc

SEQ ID NO: 59663 - DNA, 60 bp, Artificial
  Synthetic oligonucleotide
ctaacaggactggactgcataaggccttgcttctgggttgagttaatcagaggacaacct

SEQ ID NO: 59664 - DNA, 60 bp, Artificial
  Synthetic oligonucleotide
cttttgtggcgtgaatagtgatactgtaggctggtcttggccagacggcgctgagttgcc

SEQ ID NO: 59665 - DNA, 60 bp, Artificial
  Synthetic oligonucleotide
catctgcagtggggttttcggtgacaacccacgttccaatgatggaacaggcagctgtgg

SEQ ID NO: 59666 - DNA, 60 bp, Artificial
  Synthetic oligonucleotide
gagtttaaaatgaatacaaatcaaaaaataataaccattgggtcaatctgtctaatagtt

SEQ ID NO: 59667 - DNA, 60 bp, Artificial
  Synthetic oligonucleotide
ggacaggatgcaacttcaatgatattagccggcaattcctctctttgccctatcagtagg

SEQ ID NO: 59668 - DNA, 60 bp, Artificial
  Synthetic oligonucleotide
gcagctgtggtccagtgtcttctaatggagcaaatggagtaaaaggattttcgtttagat

SEQ ID NO: 59669 - DNA, 60 bp, Artificial
  Synthetic oligonucleotide
gggaggattattaaatcaattgagttgaatgcacctaattaccactacgaggaatgctcc

SEQ ID NO: 59670 - DNA, 60 bp, Artificial
  Synthetic oligonucleotide
ccgatggcccaagtaatgggcaggcctcgtacaaaatcttcaagatagagaaggggagga

SEQ ID NO: 59671 - DNA, 60 bp, Artificial
  Synthetic oligonucleotide
ggagcagcatttccttttgtggcgtgaatagtgatactgtaggctggtcttggccagacg

SEQ ID NO: 59672 - DNA, 60 bp, Artificial
  Synthetic oligonucleotide
gaggacaacctaaggagaacacaatctggactagtgggagcagcatttccttttgtggcg

SEQ ID NO: 59673 - DNA, 60 bp, Artificial
  Synthetic oligonucleotide
ggttgagttaatcagaggacaacctaaggagaacacaatctggactagtgggagcagcat

SEQ ID NO: 59674 - DNA, 60 bp, Artificial
  Synthetic oligonucleotide
cctgttatcctgatacaagtaaagtaatgtgtgtgtgcagagacaactggcatggttcga

SEQ ID NO: 59675 - DNA, 60 bp, Artificial
  Synthetic oligonucleotide
ccatgatggcatgagctggctaacaatcggaatttccggtccagataatggagcagtggc

SEQ ID NO: 59676 - DNA, 60 bp, Artificial
  Synthetic oligonucleotide
caataactgattggtcagggtacagcgggagtttcgttcaacatcctgaactaacaggac

SEQ ID NO: 59677 - DNA, 55 bp, Artificial
  Synthetic oligonucleotide
acatgcaaccaaagcatcattacctatgaaaacaacacatgggtgaatcaaacat

SEQ ID NO: 59678 - DNA, 60 bp, Artificial
  Synthetic oligonucleotide
taaagacaagaccgatcctgtcacctctgactaaggggattttaggatttgtgttcacac

SEQ ID NO: 59679 - DNA, 60 bp, Artificial
  Synthetic oligonucleotide
gcggttttgagatgatttgggacccaaacggatggactggaacagacaataacttctcag

SEQ ID NO: 59680 - DNA, 61 bp, Artificial
  Synthetic oligonucleotide
gctcgatctgtatgataaatggaattgctagcttgatattacaaattgggaacataatctc

SEQ ID NO: 59681 - DNA, 60 bp, Artificial
  Synthetic oligonucleotide
ttttcgtttaaatacggcaatggtgtttggatagggagaactaaaagcactagttcaagg

SEQ ID NO: 59682 - DNA, 60 bp, Artificial
  Synthetic oligonucleotide
caggcagttgtggtccagtatcgtctcatggagcaaatggggtaaaagggttttcgttta

SEQ ID NO: 59683 - DNA, 60 bp, Artificial
  Synthetic oligonucleotide
ggcaccagttggttgacaattggaatttctggcccagacaatggggcagtggctgtgctg

SEQ ID NO: 59684 - DNA, 60 bp, Artificial
  Synthetic oligonucleotide
attagctcgatctgtatgataaatggaattgctagcttgatattacaaattgggaacata

SEQ ID NO: 59685 - DNA, 60 bp, Artificial
  Synthetic oligonucleotide
ccatgatggcaccagttggttgacaattggaatttctggcccagacaatggggcagtggc

SEQ ID NO: 59686 - DNA, 60 bp, Artificial
  Synthetic oligonucleotide
gtgcatgcttgaatggctcttgctttactgtaatgaccgatggaccgagtaatgggcagg

SEQ ID NO: 59687 - DNA, 60 bp, Artificial
  Synthetic oligonucleotide
tgggaacataatctcaatatgggttagccattcaattcaaattgggaaccaaaaccagac

SEQ ID NO: 59688 - DNA, 61 bp, Artificial
  Synthetic oligonucleotide
caaattgggaacataatctcaatatggattagccattcaattcaaattgggaaccaaaacc

SEQ ID NO: 59689 - DNA, 60 bp, Artificial
  Synthetic oligonucleotide
gactgaaacatgcaatcaaagcgtcattacttacgaaaacaacacttgggtaaatcagac

SEQ ID NO: 59690 - DNA, 60 bp, Artificial
  Synthetic oligonucleotide
caatatgggttagccattcaattcaaattgggaaccaaaaccagactgaaacatgcaatc

SEQ ID NO: 59691 - DNA, 60 bp, Artificial
  Synthetic oligonucleotide
cgcttgccatgatggcaccagttggttgacaattggaatttctggcccagacaatggggc

SEQ ID NO: 59692 - DNA, 60 bp, Artificial
  Synthetic oligonucleotide
gcagtggggttctcggggacaatccgcgccctaatgatagaacaggcagttgtggtccag

SEQ ID NO: 59693 - DNA, 60 bp, Artificial
  Synthetic oligonucleotide
agtcgagttgaatgcccctaattatcactatgaggaatgttcctgttatcctgattctgg

SEQ ID NO: 59694 - DNA, 60 bp, Artificial
  Synthetic oligonucleotide
atacatatgcagtggggttctcggggacaatccgcgccctaatgatagaacaggcagttg

SEQ ID NO: 59695 - DNA, 60 bp, Artificial
  Synthetic oligonucleotide
cacaagagtctgaatgtgcatgcgtgaatggctcttgctttactgtaatgaccgatggac

SEQ ID NO: 59696 - DNA, 60 bp, Artificial
  Synthetic oligonucleotide
atacatatgcagtggggttctcggagacaatccgcgccctaatgatagaacaggcagttg

SEQ ID NO: 59697 - DNA, 60 bp, Artificial
  Synthetic oligonucleotide
gcagtggggttctcggagacaatccgcgccctaatgatagaacaggcagttgtggtccag

SEQ ID NO: 59698 - DNA, 60 bp, Artificial
  Synthetic oligonucleotide
gtagtcaaatcagtcgagttgaatgcccctaattatcactatgaggaatgttcctgttat

SEQ ID NO: 59699 - DNA, 60 bp, Artificial
  Synthetic oligonucleotide
actctacagagattcgcttggagaagcagtaatgaggatgggagacctccacttcctcca

SEQ ID NO: 59700 - DNA, 60 bp, Artificial
  Synthetic oligonucleotide
tgaaactctacagagattcgcttggagaagcagtaatgagaatgggagacctccactcac

SEQ ID NO: 59701 - DNA, 60 bp, Artificial
  Synthetic oligonucleotide
aactctacagagattcgcttggagaagcagtaatgagaatgggagacctccactcactcc

SEQ ID NO: 59702 - DNA, 60 bp, Artificial
  Synthetic oligonucleotide
ctctaaaactctacagagattcgcttggagaagcagtaatgagaatgggagacctccact

SEQ ID NO: 59703 - DNA, 55 bp, Artificial
  Synthetic oligonucleotide
acagagattcgcttggagaagcagtaatgagactaggggacctccattcactcca

SEQ ID NO: 59704 - DNA, 51 bp, Artificial
  Synthetic oligonucleotide
cgaaggatcttatttcttcggagacaatgcagaggagtatgacaattaaag

SEQ ID NO: 59705 - DNA, 60 bp, Artificial
  Synthetic oligonucleotide
atcctgtcacctctgactaaggggattttaggatttgtgtttacgctcaccgtgcccagt

SEQ ID NO: 59706 - DNA, 60 bp, Artificial
  Synthetic oligonucleotide
atcctgtcacctctgactaaggggattttaggatttgtgttcacactcaccgtgcccagt

SEQ ID NO: 59707 - DNA, 60 bp, Artificial
  Synthetic oligonucleotide
agaccaatcctgtcacctctgactaaggggattttaggggttgtgttcacgctcaccgtg

SEQ ID NO: 59708 - DNA, 60 bp, Artificial
  Synthetic oligonucleotide
gacaagaccaatcctgtcacctctgactaaggggattttaggatttgtgttcacgctcac

SEQ ID NO: 59709 - DNA, 60 bp, Artificial
  Synthetic oligonucleotide
acaagaccaatcctgtcacctctgactaaggggattttaggatttgtgttcacgctcacc

SEQ ID NO: 59710 - DNA, 60 bp, Artificial
  Synthetic oligonucleotide
ccgatcctgtcacctctgactaaggggattttaggatttgtgttcacactcaccgtgccc

SEQ ID NO: 59711 - DNA, 60 bp, Artificial
  Synthetic oligonucleotide
gatcctgtcacctctgactaaggggattttaggatttgtgttcacactcaccgtgcccag

SEQ ID NO: 59712 - DNA, 60 bp, Artificial
  Synthetic oligonucleotide
ccgattctgtcacctctgactaaggggattttaggatttgtgttcacgctcaccgtgccc

SEQ ID NO: 59713 - DNA, 60 bp, Artificial
  Synthetic oligonucleotide
aaccatttgaatggatgtcaatccgactttacttttcctgaaagttccagcgcaaaatgc

SEQ ID NO: 59714 - DNA, 60 bp, Artificial
  Synthetic oligonucleotide
ctatgcccaaacagattgtgtattagaagcaatggctttccttgaggaatcccatcctgg

SEQ ID NO: 59715 - DNA, 56 bp, Artificial
  Synthetic oligonucleotide
ggggtccaatctacaggaggagagatgggaaatggatgagagaattgatcctatac

SEQ ID NO: 59716 - DNA, 60 bp, Artificial
  Synthetic oligonucleotide
caaatcagcgtacagcccacattctccgtgcagagaaacctcccattcgagagagcaacc

SEQ ID NO: 59717 - DNA, 60 bp, Artificial
  Synthetic oligonucleotide
aacctcccattcgagagagcaaccattatggcggcattcacgggaaacactgaaggcaga

SEQ ID NO: 59718 - DNA, 60 bp, Artificial
  Synthetic oligonucleotide
gtacagagaaacctcccattcgagagagcaaccattatggcggcatttacaggaaacact

SEQ ID NO: 59719 - DNA, 60 bp, Artificial
  Synthetic oligonucleotide
cctcccattcgagagagcaaccattatggcggcatttacaggaaacactgaaggcagaac

SEQ ID NO: 59720 - DNA, 60 bp, Artificial
  Synthetic oligonucleotide
acctcccattcgagagagcaaccattatggcggcatttacaggaaacactgaaggcagaa

SEQ ID NO: 59721 - DNA, 60 bp, Artificial
  Synthetic oligonucleotide
cctcccattcgagagagcaaccattatggcggcattcacgggaaacactgaaggcagaac

SEQ ID NO: 59722 - DNA, 60 bp, Artificial
  Synthetic oligonucleotide
aagatgagccttctaaccgaggtcgaaacgtacgttctctctatcgtcccatcaggcccc

SEQ ID NO: 59723 - DNA, 60 bp, Artificial
  Synthetic oligonucleotide
tcttgagataggagatatgcttctaagaagtgcaataggccaagtgtcaaggcccatgtt

SEQ ID NO: 59724 - DNA, 51 bp, Artificial
  Synthetic oligonucleotide
ggggtggactggaatgatagatggatggtatggttatcatcatcagaatga

SEQ ID NO: 59725 - DNA, 60 bp, Artificial
  Synthetic oligonucleotide
ggactggaatgatagatggatggtatggttatcatcatcagaatgaacagggatctggct

SEQ ID NO: 59726 - DNA, 60 bp, Artificial
  Synthetic oligonucleotide
ggactggaatgatagatggatggtatggttatcatcatcagaatgaacagggatccggct

SEQ ID NO: 59727 - DNA, 60 bp, Artificial
  Synthetic oligonucleotide
ggggtggactggaatgatagatggatggtatggttatcatcatcagaatgaacagggatc

SEQ ID NO: 59728 - DNA, 60 bp, Artificial
  Synthetic oligonucleotide
atcgggggacttgaatggaatgataacacagttcgagtctctgaaattctacagagattc

SEQ ID NO: 59729 - DNA, 60 bp, Artificial
  Synthetic oligonucleotide
aattcaaccgacactgttgacacagtactcgaaaagaatgtgacagtgacacactctgta

SEQ ID NO: 59730 - DNA, 56 bp, Artificial
  Synthetic oligonucleotide
aactcaaccgacactgttgacacagtactcgaaaagaatgtgacagtgacacactc

SEQ ID NO: 59731 - DNA, 60 bp, Artificial
  Synthetic oligonucleotide
aactcaaccgacactgttgacacagtactcgaaaagaatgtgacagtgacacactctgta

SEQ ID NO: 59732 - DNA, 56 bp, Artificial
  Synthetic oligonucleotide
aattcaaccgacactgttgacacagtactcgaaaagaatgtgacagtgacacactc

SEQ ID NO: 59733 - DNA, 60 bp, Artificial
  Synthetic oligonucleotide
tacttttgaattcacaagctttttctatcgttatgggtttgttgccaatttcagcatgga

SEQ ID NO: 59734 - DNA, 60 bp, Artificial
  Synthetic oligonucleotide
aatgtgaggggatcaggaatgagaatacttgtaaggggtaattctccagtattcaactac

SEQ ID NO: 59735 - DNA, 60 bp, Artificial
  Synthetic oligonucleotide
tgtcacctctgactaaggggattttaggggttgtgttcacgctcaccgtgcccagtgagc

SEQ ID NO: 59736 - DNA, 60 bp, Artificial
  Synthetic oligonucleotide
gggtttgagatgatttgggatcctaatggatggacagataccgacagtgatttcgcagtg

SEQ ID NO: 59737 - DNA, 60 bp, Artificial
  Synthetic oligonucleotide
aaggggtttgagatgatttgggatcctaatggatggacagataccgacagtgatttcgca

SEQ ID NO: 59738 - DNA, 60 bp, Artificial
  Synthetic oligonucleotide
tgaatggaatgataacacagttcgagtctctaaaactctacagagattcgcttggagaag

SEQ ID NO: 59739 - DNA, 60 bp, Artificial
  Synthetic oligonucleotide
gacactgttgacacagtacttgagaagaatgtgacagtgacacactctgtcaacctactt

SEQ ID NO: 59740 - DNA, 60 bp, Artificial
  Synthetic oligonucleotide
agaagtgctgcaatctattcgagaaattcttccctagcagctcatataggagaccggttg

SEQ ID NO: 59741 - DNA, 60 bp, Artificial
  Synthetic oligonucleotide
gaagtgctgcaatctattcgagaaattcttccctagcagctcatataggagaccggttgg

SEQ ID NO: 59742 - DNA, 51 bp, Artificial
  Synthetic oligonucleotide
gctgcaatctattcgagaaattcttccctagcagttcatacaggaggccag

SEQ ID NO: 59743 - DNA, 60 bp, Artificial
  Synthetic oligonucleotide
aagaattggttccaaaggagatgtttttgtcataagagaaccttttatttcatgttctca

SEQ ID NO: 59744 - DNA, 60 bp, Artificial
  Synthetic oligonucleotide
aagaattggttccaaaggagatgtttttgtcataagagaaccctttatttcatgttctca

SEQ ID NO: 59745 - DNA, 60 bp, Artificial
  Synthetic oligonucleotide
cctcttctaatagatggtacagcctcattgagccctggaatgatgatgggcatgttcaac

SEQ ID NO: 59746 - DNA, 60 bp, Artificial
  Synthetic oligonucleotide
gggcgactgatccagaacagcttaacaatagagagaatggtactctctgcttttgacgag

SEQ ID NO: 59747 - DNA, 60 bp, Artificial
  Synthetic oligonucleotide
tattgaaagatgagtcttctaaccgaggtcgaaacgtacgttctctctatcgtcccgtca

SEQ ID NO: 59748 - DNA, 60 bp, Artificial
  Synthetic oligonucleotide
cggtctgaaaagagggccttctacggaaggagtgccagagtccatgagggaagaatatcg

SEQ ID NO: 59749 - DNA, 60 bp, Artificial
  Synthetic oligonucleotide
cggtctgaaaagagggccttctacggaaggagtgccagagtctatgagggaagaatatcg

SEQ ID NO: 59750 - DNA, 60 bp, Artificial
  Synthetic oligonucleotide
ggatgtcaatccgactttacttttcttgaaagtgccagcacaaaatgctataagcacaac

SEQ ID NO: 59751 - DNA, 60 bp, Artificial
  Synthetic oligonucleotide
aatcactcactgagtgacatcaacatcatggcgtctcaaggcaccaaacgatcttatgag

SEQ ID NO: 59752 - DNA, 60 bp, Artificial
  Synthetic oligonucleotide
taatcactcaccgagtgacatccacatcatggcgtctcaaggcaccaaacgatcttatga

SEQ ID NO: 59753 - DNA, 57 bp, Artificial
  Synthetic oligonucleotide
cactcactgagtgacattcacaccatggcgtctcaaggcaccaaacgatcttatgaa

SEQ ID NO: 59754 - DNA, 59 bp, Artificial
  Synthetic oligonucleotide
cactcactgagtgacattcacatcatggcgtctcaaggcaccaaacgatcttatgaaca

SEQ ID NO: 59755 - DNA, 59 bp, Artificial
  Synthetic oligonucleotide
cactcactgagtgacattcacaccatggcgtctcaaggcaccaaacgatcttatgaaca

SEQ ID NO: 59756 - DNA, 60 bp, Artificial
  Synthetic oligonucleotide
cactcaccgagtgacatccacatcatggcgtctcaaggcaccaaacgatcttatgagcag

SEQ ID NO: 59757 - DNA, 60 bp, Artificial
  Synthetic oligonucleotide
gcaagccttacagctattgtttgaagtggagcaagagataagaactttctcgtttcagct

SEQ ID NO: 59758 - DNA, 60 bp, Artificial
  Synthetic oligonucleotide
catgactcttgaagagatgtcaagggactggttcatgctcatgcccaagcaaaaagtggc

SEQ ID NO: 59759 - DNA, 60 bp, Artificial
  Synthetic oligonucleotide
actgcaaactggtcttggccagacggtgctgagttgccgtttaccattgacaagtagttc

SEQ ID NO: 59760 - DNA, 60 bp, Artificial
  Synthetic oligonucleotide
cataaacaggacaggaacatttgaattcacaagctttttctaccgctatgggttcgtagc

SEQ ID NO: 59761 - DNA, 60 bp, Artificial
  Synthetic oligonucleotide
caatccgacattacttttcttaaaagtgccagcacaaaatgctataagcacaacgtttcc

SEQ ID NO: 59762 - DNA, 60 bp, Artificial
  Synthetic oligonucleotide
gtacctttgaattcacgagctttttctatcgttatgggtttgttgccaatttcagcatgg

SEQ ID NO: 59763 - DNA, 60 bp, Artificial
  Synthetic oligonucleotide
aaatgaaaggactttggattttcatgactcaaatgtgaagaatctgtatgagaaagtaaa

SEQ ID NO: 59764 - DNA, 60 bp, Artificial
  Synthetic oligonucleotide
gcaaatattaagaacacaagagtctgaatgtgtctgtgttaacgggtcatgtttcaccat

SEQ ID NO: 59765 - DNA, 60 bp, Artificial
  Synthetic oligonucleotide
gcgaatattaagaacacaagagtctgaatgtgtctgtgtgaacgggtcatgtttcaccat

SEQ ID NO: 59766 - DNA, 60 bp, Artificial
  Synthetic oligonucleotide
ggggccaaagaaatagcactcagttattctgctggtgcacttgccagttgtatgggcctt

SEQ ID NO: 59767 - DNA, 60 bp, Artificial
  Synthetic oligonucleotide
ccatggggccaaagaaatagcactcagttattctgctggtgcacttgccagttgtatggg

SEQ ID NO: 59768 - DNA, 60 bp, Artificial
  Synthetic oligonucleotide
catggggccaaagaaatagcactcagttattctgctggtgcacttgccagttgtatgggc

SEQ ID NO: 59769 - DNA, 60 bp, Artificial
  Synthetic oligonucleotide
cctgatgaaggcacagctggagtggagtctgctgttctgagaggattcctcattttgggc

SEQ ID NO: 59770 - DNA, 60 bp, Artificial
  Synthetic oligonucleotide
cgaagatcctgatgaaggcacagctggagtggagtctgctgttctgagaggattcctcat

SEQ ID NO: 59771 - DNA, 60 bp, Artificial
  Synthetic oligonucleotide
ggatggtcttcaatcgtctgatgattttgctctgattgtgaatgcacccaatcatgcagg

SEQ ID NO: 59772 - DNA, 60 bp, Artificial
  Synthetic oligonucleotide
ggatggtcttcaatcgtctgatgattttgctctgattgtgaatgcacccaaccatgcagg

SEQ ID NO: 59773 - DNA, 60 bp, Artificial
  Synthetic oligonucleotide
ggatggtcttcaatcgtctgatgattttgctctgattgtgaatgcacccaactatgcagg

SEQ ID NO: 59774 - DNA, 60 bp, Artificial
  Synthetic oligonucleotide
ttcaatcgtctgatgattttgctctgattgtgaatgcacccaactatgcaggaattcaag

SEQ ID NO: 59775 - DNA, 60 bp, Artificial
  Synthetic oligonucleotide
gctatggtttccagagcccgaattgatgcacggattgatttcgaatctggaaggataaag

SEQ ID NO: 59776 - DNA, 60 bp, Artificial
  Synthetic oligonucleotide
cgctacctaactgacatgactcttgaagagatgtcaagagactggttcatgctcatgccc

SEQ ID NO: 59777 - DNA, 60 bp, Artificial
  Synthetic oligonucleotide
cgctatctaactgacatgactcttgaagagatgtcaagagactggttcatgctcatgccc

SEQ ID NO: 59778 - DNA, 60 bp, Artificial
  Synthetic oligonucleotide
ttcacgctacctaactgacatgactcttgaagagatgtcaagagactggttcatgctcat

SEQ ID NO: 59779 - DNA, 60 bp, Artificial
  Synthetic oligonucleotide
ggaaatgtcaagggactggttcatgctcatgcccaagcagaaagtggcaggccctctttg

SEQ ID NO: 59780 - DNA, 60 bp, Artificial
  Synthetic oligonucleotide
gtcaagggactggttcatgctcatgcccaagcagaaagtggcaggccctctttgtatcag

SEQ ID NO: 59781 - DNA, 60 bp, Artificial
  Synthetic oligonucleotide
cactgggaatgcggagggaagaacatcagacatgagggcagaaatcataaggatgatgga

SEQ ID NO: 59782 - DNA, 60 bp, Artificial
  Synthetic oligonucleotide
cagtgatgtgtgtatgcagggacaactggcatggttcaaatcgaccttgggtgtctttta

SEQ ID NO: 59783 - DNA, 60 bp, Artificial
  Synthetic oligonucleotide
cccaaggcgccctgttgaatgacaagcattcaaatgggaccgttaaggacagaagccctt

SEQ ID NO: 59784 - DNA, 60 bp, Artificial
  Synthetic oligonucleotide
acccaaggcgccctgttgaatgacaagcattcaaatgggaccgttaaggacagaagccct

SEQ ID NO: 59785 - DNA, 60 bp, Artificial
  Synthetic oligonucleotide
gacccaaggcgccctgttgaatgacaagcattcaaatgggaccgttaaggacagaagccc

SEQ ID NO: 59786 - DNA, 60 bp, Artificial
  Synthetic oligonucleotide
tgacccaaggcgccctgttgaatgacaagcattcaaatgggaccgttaaggacagaagcc

SEQ ID NO: 59787 - DNA, 60 bp, Artificial
  Synthetic oligonucleotide
catagaggatcaaaagaccctctatcggaaagaaaatgcttatgtctctgtagtgtcttc

SEQ ID NO: 59788 - DNA, 60 bp, Artificial
  Synthetic oligonucleotide
agcgggtatgctcaaacagactgtgtcctggaggcaatggctttccttgaggaatcccat

SEQ ID NO: 59789 - DNA, 60 bp, Artificial
  Synthetic oligonucleotide
agcggatatgctcaaacagactgtgtcctggaggcaatggctttccttgaggaatcccac

SEQ ID NO: 59790 - DNA, 60 bp, Artificial
  Synthetic oligonucleotide
tgcctgctcttactctggagccagcagtttttatcggaatttgctgtggataacaaagaa

SEQ ID NO: 59791 - DNA, 60 bp, Artificial
  Synthetic oligonucleotide
taacaaagaaggggacttcatatccaaaactcagcaaatcatacacgaacaataagggga

SEQ ID NO: 59792 - DNA, 60 bp, Artificial
  Synthetic oligonucleotide
tgcctgctcttattctggagccagcagtttttatcggaatttgctgtggataacaaagaa

SEQ ID NO: 59793 - DNA, 60 bp, Artificial
  Synthetic oligonucleotide
tgcctgctcttattctggagccagcagtttttatcggaatttgctgtggataataaagaa

SEQ ID NO: 59794 - DNA, 60 bp, Artificial
  Synthetic oligonucleotide
tggccaaaccatgagacaactaaaggtgttacagctgcctgctcttactctggagccagc

SEQ ID NO: 59795 - DNA, 60 bp, Artificial
  Synthetic oligonucleotide
tgcctgctcctactctggagccagcagtttttatcggaatttgctgtggctaacaaagaa

SEQ ID NO: 59796 - DNA, 60 bp, Artificial
  Synthetic oligonucleotide
tggccaaaccatgagacaactaaaggtgttacagctgcctgctcctactctggagccagc

SEQ ID NO: 59797 - DNA, 60 bp, Artificial
  Synthetic oligonucleotide
taataaagaagggaacttcatatccaaaactcagcaaatcatacacgaacaataagggga

SEQ ID NO: 59798 - DNA, 60 bp, Artificial
  Synthetic oligonucleotide
taacaaagaagggaacttcatatccaaaactcagcaaatcatacacgaacaataagggga

SEQ ID NO: 59799 - DNA, 60 bp, Artificial
  Synthetic oligonucleotide
gcaggatggctcctgggcaacccagaatgtgaccttctactcactgcaaactcatggtcc

SEQ ID NO: 59800 - DNA, 60 bp, Artificial
  Synthetic oligonucleotide
gggatggctcctgggcaacccagaatgtgaccttttactcactgcaaactcatggtccta

SEQ ID NO: 59801 - DNA, 60 bp, Artificial
  Synthetic oligonucleotide
ctcatggtcctatataatagagacttccaattcagagaacggaacatgctatcccggtga

SEQ ID NO: 59802 - DNA, 60 bp, Artificial
  Synthetic oligonucleotide
catggtcctatataatagagacttccaattcagagaacggaacatgctatcccggtgagt

SEQ ID NO: 59803 - DNA, 60 bp, Artificial
  Synthetic oligonucleotide
ggtcctatataatagagacttccaattcagagaacggaacatgctatcccggtgagttca

SEQ ID NO: 59804 - DNA, 60 bp, Artificial
  Synthetic oligonucleotide
gagttgctcgttctactcgaaaatgaaagaactctggactttcatgattccaatgtgagg

SEQ ID NO: 59805 - DNA, 60 bp, Artificial
  Synthetic oligonucleotide
tcggtaattgaaaagatgaacactcaattcactgcagtgggcaaggaattcaacaatcta

SEQ ID NO: 59806 - DNA, 60 bp, Artificial
  Synthetic oligonucleotide
gtgtgaagaacggcacatatgactatcccaaatattcagaagagtccaaattgaatcgag

SEQ ID NO: 59807 - DNA, 60 bp, Artificial
  Synthetic oligonucleotide
gcatggaaagtgtgaagaacggcacatatgactatcccaaatattcagaagagtccaaat

SEQ ID NO: 59808 - DNA, 60 bp, Artificial
  Synthetic oligonucleotide
tgcatggaaagtgtgaagaacggcacatatgactatcccaaatattcagaagagtccaaa

SEQ ID NO: 59809 - DNA, 60 bp, Artificial
  Synthetic oligonucleotide
aatgtcccaaatatgtcaagagcaccaagctaagaatggcaacaggactaagaaatgtcc

SEQ ID NO: 59810 - DNA, 60 bp, Artificial
  Synthetic oligonucleotide
aaaatgtcccaaatacgtcaagagcaccaagctaagaatggcaacaggactaagaaatgt

SEQ ID NO: 59811 - DNA, 60 bp, Artificial
  Synthetic oligonucleotide
gtcaagagcaccaagctaagaatggcaacaggactaagaaatgtcccatctattcagtcc

SEQ ID NO: 59812 - DNA, 60 bp, Artificial
  Synthetic oligonucleotide
cccaaatacgtcaagagcaccaagctaagaatggcaacaggactaagaaatgtcccatcc

SEQ ID NO: 59813 - DNA, 60 bp, Artificial
  Synthetic oligonucleotide
caccagtgagcaacagagtctataccagaacactgatgcatacgtttcagttggatcatc

SEQ ID NO: 59814 - DNA, 60 bp, Artificial
  Synthetic oligonucleotide
taacaaagaagggaacttcatatccaaagctcagcaaatcatacacgaacaataagggaa

SEQ ID NO: 59815 - DNA, 60 bp, Artificial
  Synthetic oligonucleotide
ggaatgtcccaaatacgtcaagagcaccaagctaagaatggcaacaggactaagaaatgt

SEQ ID NO: 59816 - DNA, 60 bp, Artificial
  Synthetic oligonucleotide
gagaatgtcccaaatacgtcaagagcaccaagctaagaatggcaacaggactaagaaatg

SEQ ID NO: 59817 - DNA, 60 bp, Artificial
  Synthetic oligonucleotide
taagaaatgtcccatccattcaatccagaggactatttggagcaattgccggattcattg

SEQ ID NO: 59818 - DNA, 60 bp, Artificial
  Synthetic oligonucleotide
ctaagaaatgtcccatccattcaatccagaggactatttggagcaattgccggattcatt

SEQ ID NO: 59819 - DNA, 60 bp, Artificial
  Synthetic oligonucleotide
ccattcaatccagaggactatttggagcaattgccggattcattgagggaggatggacag

SEQ ID NO: 59820 - DNA, 60 bp, Artificial
  Synthetic oligonucleotide
gggaggatggacaggcatgatagatggatggtatgggtaccatcaccagaatgagcaggg

SEQ ID NO: 59821 - DNA, 60 bp, Artificial
  Synthetic oligonucleotide
cgacggaataacaaataaggtaaattcggtaattgaaaagatgaacactcaattcactgc

SEQ ID NO: 59822 - DNA, 60 bp, Artificial
  Synthetic oligonucleotide
cggattcattgagggaggatggacaggcatgatagatgggtggtatgggtaccatcacca

SEQ ID NO: 59823 - DNA, 60 bp, Artificial
  Synthetic oligonucleotide
ggattcattgagggaggatggacaggcatgatagatgggtggtatgggtaccatcaccag

SEQ ID NO: 59824 - DNA, 60 bp, Artificial
  Synthetic oligonucleotide
attcattgagggaggatggacaggcatgatagatggatggtatgggtaccatcatcagaa

SEQ ID NO: 59825 - DNA, 60 bp, Artificial
  Synthetic oligonucleotide
agaaatgtcccatctattcagtccagaggactatttggagcaattgccggattcattgag

SEQ ID NO: 59826 - DNA, 60 bp, Artificial
  Synthetic oligonucleotide
ccatccattcaatccagaggactatttggagcaattgccggattcattgagggaggatgg

SEQ ID NO: 59827 - DNA, 60 bp, Artificial
  Synthetic oligonucleotide
cgggatagctcctctacaattggggaagtgcaatgtagcgggatggctcctgggcaaccc

SEQ ID NO: 59828 - DNA, 60 bp, Artificial
  Synthetic oligonucleotide
attcagtccagaggactatttggagcaattgccggattcattgagggaggatggacaggc

SEQ ID NO: 59829 - DNA, 60 bp, Artificial
  Synthetic oligonucleotide
ggggaagatccgaaaatcgaaactaacaaattcgctgcaatatgcacacacttggaagtc

SEQ ID NO: 59830 - DNA, 50 bp, Artificial
  Synthetic oligonucleotide
aaaatcgagacaaacaaattcgctgcaatatgcacacacttggaagtgtg

SEQ ID NO: 59831 - DNA, 60 bp, Artificial
  Synthetic oligonucleotide
ggaaccatgcgcaggcttgccgaccaaagcctcccaccgaacttctccagccttgaaaac

SEQ ID NO: 59832 - DNA, 60 bp, Artificial
  Synthetic oligonucleotide
ggggaagatccgaaaatcgagactaacaaattcgctgcaatatgcacacacttggaagtc

SEQ ID NO: 59833 - DNA, 60 bp, Artificial
  Synthetic oligonucleotide
agtgataaagaacaacatgataaacaatgaccttggaccagcaacagcccagatggctct

SEQ ID NO: 59834 - DNA, 60 bp, Artificial
  Synthetic oligonucleotide
caatccgactttgcttttcttgaaagttccagcgcaaaatgccataagcaccacattccc

SEQ ID NO: 59835 - DNA, 60 bp, Artificial
  Synthetic oligonucleotide
atgttctcgaataaaatggcaagactagggaaaggatacatgttcgaaagtaagagcatg

SEQ ID NO: 59836 - DNA, 60 bp, Artificial
  Synthetic oligonucleotide
ctgcaaactggtcttggccagacggtgctgagttgccgtttaccattgacaagtagttcg

SEQ ID NO: 59837 - DNA, 60 bp, Artificial
  Synthetic oligonucleotide
agacacgatatgtataggctaccatgccaacaactcaaccgacactgttgacacagtact

SEQ ID NO: 59838 - DNA, 60 bp, Artificial
  Synthetic oligonucleotide
caacacaatatgtataggctaccatgccaacaactcaaccgacactgttgacacagtact

SEQ ID NO: 59839 - DNA, 56 bp, Artificial
  Synthetic oligonucleotide
tggtcttggccagacggtgctgagttgccatttaccattgacaagtaatttattca

SEQ ID NO: 59840 - DNA, 60 bp, Artificial
  Synthetic oligonucleotide
tgatgatgccggcacatggtccagccaaaaatatggagtatgacgctgttgcaacaacac

SEQ ID NO: 59841 - DNA, 60 bp, Artificial
  Synthetic oligonucleotide
tgatgatgccggcacatggtccagccaaaaatatggagtatgacgctgttgcaacaacgc

SEQ ID NO: 59842 - DNA, 60 bp, Artificial
  Synthetic oligonucleotide
gcttgatattacaaattgggaacataatctcaatatggattagccattcaattcaaattg

SEQ ID NO: 59843 - DNA, 60 bp, Artificial
  Synthetic oligonucleotide
agaaaccaagtcaaaatacgtcgaagagttgacataaatcctggtcatgcagacctcagt

SEQ ID NO: 59844 - DNA, 60 bp, Artificial
  Synthetic oligonucleotide
ataacatttatgcaagccttacagctattgtttgaagtggagcaagagataagaactttc

SEQ ID NO: 59845 - DNA, 60 bp, Artificial
  Synthetic oligonucleotide
gtcggaattgatcctttccgtctgctccaaaacagtcaagtcttcagtcttatcagacca

SEQ ID NO: 59846 - DNA, 60 bp, Artificial
  Synthetic oligonucleotide
tcaaagggaagttccaaacagcagcacaacgagcaatgatggaccaagtaagggaaagcc

SEQ ID NO: 59847 - DNA, 60 bp, Artificial
  Synthetic oligonucleotide
tcagcttgtgtggatggcatgcaattctgctgcatttgaagatctaagagtatcaagctt

SEQ ID NO: 59848 - DNA, 60 bp, Artificial
  Synthetic oligonucleotide
cagcttgtgtggatggcatgcaattctgctgcatttgaagatctaagagtatcaagcttc

SEQ ID NO: 59849 - DNA, 60 bp, Artificial
  Synthetic oligonucleotide
tcagctggtgtggatggcatgcaattctgctgcatttgaagatctaagagtatcaagctt

SEQ ID NO: 59850 - DNA, 60 bp, Artificial
  Synthetic oligonucleotide
cagctggtgtggatggcatgcaattctgctgcatttgaagatctaagagtatcaagcttc

SEQ ID NO: 59851 - DNA, 60 bp, Artificial
  Synthetic oligonucleotide
aggagtctcaatcctgaatcttgggcaaaagagatacactaaaaccacatactggtggga

SEQ ID NO: 59852 - DNA, 60 bp, Artificial
  Synthetic oligonucleotide
tgttcaggcacttagggacaacctggaacctgggacctttgatcttgggggattatatga

SEQ ID NO: 59853 - DNA, 50 bp, Artificial
  Synthetic oligonucleotide
tgttcaggcacttagggacaacctggaacctgggacctttgatcttgggg

SEQ ID NO: 59854 - DNA, 60 bp, Artificial
  Synthetic oligonucleotide
tgttcaggcacttagggacaacctggaacctgggacctttgatcttgggggactatatga

SEQ ID NO: 59855 - DNA, 60 bp, Artificial
  Synthetic oligonucleotide
gctcctcattgttcaggcacttagggacaacctggaacctggtaccttcgatcttggagg

SEQ ID NO: 59856 - DNA, 60 bp, Artificial
  Synthetic oligonucleotide
agctgctcctcattgttcaggcacttagggacaacctggaacctggtaccttcgatcttg

SEQ ID NO: 59857 - DNA, 60 bp, Artificial
  Synthetic oligonucleotide
gagaaagctgctcctcattgttcaggcacttagggacaacctggaacctggtaccttcga

SEQ ID NO: 59858 - DNA, 60 bp, Artificial
  Synthetic oligonucleotide
atcatggataagaacatcatactgaaagcgaatttcagtgtgatttttgaccggctggag

SEQ ID NO: 59859 - DNA, 50 bp, Artificial
  Synthetic oligonucleotide
cgaccaaaagaattcggatggccatcaattagtgtcgaatagtttaaaaa

SEQ ID NO: 59860 - DNA, 54 bp, Artificial
  Synthetic oligonucleotide
gcgaccaaaagaattcggatggccatcaattagtgtcgaattgtttaaaaacga

SEQ ID NO: 59861 - DNA, 60 bp, Artificial
  Synthetic oligonucleotide
acggaaacgggactctagcatacttactgacagccagacagcgaccaaaagaattcggtt

SEQ ID NO: 59862 - DNA, 60 bp, Artificial
  Synthetic oligonucleotide
acgggactctagcatacttactgacagccagacagcgaccaaaagaattcggatggccat

SEQ ID NO: 59863 - DNA, 60 bp, Artificial
  Synthetic oligonucleotide
cgggactctagcatacttactgacagccagacagcgaccaaaagaattcggttggccatc

SEQ ID NO: 59864 - DNA, 55 bp, Artificial
  Synthetic oligonucleotide
tctagcatacttactgacagccagacagcgaccaaaagaattcgaatggccatca

SEQ ID NO: 59865 - DNA, 60 bp, Artificial
  Synthetic oligonucleotide
tctagcatacttactgacagccagacagcgaccaaaagaattcgaatggccatcaattaa

SEQ ID NO: 59866 - DNA, 60 bp, Artificial
  Synthetic oligonucleotide
actctagcatacttactgacagccagacagcgaccaaaagaattcgaatggccatcaatt

SEQ ID NO: 59867 - DNA, 60 bp, Artificial
  Synthetic oligonucleotide
ctctagcatacttactgacagccagacagcgaccaaaagaattcgattggccatcaatta

SEQ ID NO: 59868 - DNA, 60 bp, Artificial
  Synthetic oligonucleotide
ctctagcatacttactgacagccagacagcgaccaaaagaattcgaatggccatcaatta

SEQ ID NO: 59869 - DNA, 60 bp, Artificial
  Synthetic oligonucleotide
ggaaggactaaaagtaacagactcagaaagggatttgagatgatttgggatcctaatgga

SEQ ID NO: 59870 - DNA, 60 bp, Artificial
  Synthetic oligonucleotide
ttgaggagtgcctgattaatgatccctgggttttgcttaacgcgtcttggttcaactcct

SEQ ID NO: 59871 - DNA, 60 bp, Artificial
  Synthetic oligonucleotide
gacaggaacagggtataccatggatacagtcaacaggacacatcagtactcagaaagagg

SEQ ID NO: 59872 - DNA, 60 bp, Artificial
  Synthetic oligonucleotide
gggacaggaacagggtataccatggatacagtcaacaggacacatcagtactcagaaaga

SEQ ID NO: 59873 - DNA, 60 bp, Artificial
  Synthetic oligonucleotide
acaggaacagggtacaccatggatacagtcaacaggacacatcagtactcagaaagagga

SEQ ID NO: 59874 - DNA, 60 bp, Artificial
  Synthetic oligonucleotide
gtgcctacttcacgctatctaactgacatgactcttgaagaaatgtcaagggactggttc

SEQ ID NO: 59875 - DNA, 60 bp, Artificial
  Synthetic oligonucleotide
ctccaaaacagaaacggaaaatggcgagaacaattaggtcggaagttcgaagaaataaga

SEQ ID NO: 59876 - DNA, 60 bp, Artificial
  Synthetic oligonucleotide
gggactggttcatgctcatgcccaagcagaaagtggcaggccctctttgtatcagaatgg

SEQ ID NO: 59877 - DNA, 60 bp, Artificial
  Synthetic oligonucleotide
ctggcattccaatctgaatgatgccacatatcagagaacaagggcacttgtgcgcactgg

SEQ ID NO: 59878 - DNA, 60 bp, Artificial
  Synthetic oligonucleotide
ctggaaatctagtggtaccaagatatgctttcgcaatgaatagaggttctggatctggta

SEQ ID NO: 59879 - DNA, 60 bp, Artificial
  Synthetic oligonucleotide
catccacctaccagtactgatcaacaaagtctctaccaaaatgcagatgcctatgttttt

SEQ ID NO: 59880 - DNA, 60 bp, Artificial
  Synthetic oligonucleotide
cctatgttaacaataaagggaaggaagtccttgtgctatggggcattcatcatccaccta

SEQ ID NO: 59881 - DNA, 60 bp, Artificial
  Synthetic oligonucleotide
aagggaaggaagtccttgtgctatggggcattcatcatccacctaccagtactgatcaac

SEQ ID NO: 59882 - DNA, 60 bp, Artificial
  Synthetic oligonucleotide
tagcagcaagacccaaggtgagaggtcaagcagggaggatgaactattactggacactaa

SEQ ID NO: 59883 - DNA, 60 bp, Artificial
  Synthetic oligonucleotide
cccaaggtgagaggtcaagcagggaggatgaactattactggacactaatagaacctgga

SEQ ID NO: 59884 - DNA, 60 bp, Artificial
  Synthetic oligonucleotide
ctatgtttttgtagggtcatcaaaatataacagaaagttcaagccagaaatagcagcaag

SEQ ID NO: 59885 - DNA, 60 bp, Artificial
  Synthetic oligonucleotide
gtcatcaaaatataacagaaagttcaagccagaaatagcagcaagacccaaggtgagagg

SEQ ID NO: 59886 - DNA, 60 bp, Artificial
  Synthetic oligonucleotide
ggtgtgacggcagcatgcccttatgctggagcaaacagcttctacagaaatttaatatgg

SEQ ID NO: 59887 - DNA, 53 bp, Artificial
  Synthetic oligonucleotide
ttactactcacagtaagctcatggtcttacattgtggaaacatcgaactcaga

SEQ ID NO: 59888 - DNA, 60 bp, Artificial
  Synthetic oligonucleotide
ggaaactatgtaaactgggggggatagccccattgcacttgggtaaatgtaacattgccg

SEQ ID NO: 59889 - DNA, 60 bp, Artificial
  Synthetic oligonucleotide
gaatgtaacagtaacacactctgttaatcttcttgaagacagacataacgggaaactatg

SEQ ID NO: 59890 - DNA, 60 bp, Artificial
  Synthetic oligonucleotide
tttaatatggctggtgaaaaaagaaaattcatacccaaagctcagcaaatcctatgttaa

SEQ ID NO: 59891 - DNA, 60 bp, Artificial
  Synthetic oligonucleotide
attttggcgatctattcaactgtcgccagttcattggtactgttggtctccctgggggca

SEQ ID NO: 59892 - DNA, 60 bp, Artificial
  Synthetic oligonucleotide
aatgatagatggatggtatggttatcaccatcagaatgaacagggatcaggatatgcagc

SEQ ID NO: 59893 - DNA, 60 bp, Artificial
  Synthetic oligonucleotide
cagcggaccaaaggagcacacaaaatgccattgacgggatcactaacaaagtaaattctg

SEQ ID NO: 59894 - DNA, 60 bp, Artificial
  Synthetic oligonucleotide
ttataatttcggatgcaccagttcatgattgtaacacgaagtgtcaaacacccaagggtg

SEQ ID NO: 59895 - DNA, 60 bp, Artificial
  Synthetic oligonucleotide
gttctggatctggtattataatttcggatgcaccagttcatgattgtaacacgaagtgtc

SEQ ID NO: 59896 - DNA, 60 bp, Artificial
  Synthetic oligonucleotide
cccaagggtgccataaacaccagcctcccatttcagaatatacatccagtcacaattgga

SEQ ID NO: 59897 - DNA, 60 bp, Artificial
  Synthetic oligonucleotide
acgaagtgtcaaacacccaagggtgccataaacaccagcctcccatttcagaatatacat

SEQ ID NO: 59898 - DNA, 60 bp, Artificial
  Synthetic oligonucleotide
ggctacaggactaaggaatatcccgtctattcaatctagaggtctgtttggagccattgc

SEQ ID NO: 59899 - DNA, 60 bp, Artificial
  Synthetic oligonucleotide
caaaattgagaatggctacaggactaaggaatatcccgtctattcaatctagaggtctgt

SEQ ID NO: 59900 - DNA, 60 bp, Artificial
  Synthetic oligonucleotide
tgagaaagtaagaagccagctaaggaacaatgccaaagaaattgggaatggctgctttga

SEQ ID NO: 59901 - DNA, 60 bp, Artificial
  Synthetic oligonucleotide
aacaaagtaaattctgttattgaaaagatgaacacgcaattcacggcagtgggtaaagaa

SEQ ID NO: 59902 - DNA, 60 bp, Artificial
  Synthetic oligonucleotide
gaaggcaatactattagtcttgttatgtacatttgcagccacaaatgcagacacactatg

SEQ ID NO: 59903 - DNA, 54 bp, Artificial
  Synthetic oligonucleotide
aaatgcagacacactatgtataggttatcatgcaaataattcaactgacactgt

SEQ ID NO: 59904 - DNA, 60 bp, Artificial
  Synthetic oligonucleotide
gatatgcagcggaccaaaggagcacacaaaatgccattgacgggatcactaacaaagtaa

SEQ ID NO: 59905 - DNA, 60 bp, Artificial
  Synthetic oligonucleotide
gtatggttatcaccatcagaatgaacagggatcaggatatgcagcggaccaaaggagcac

SEQ ID NO: 59906 - DNA, 60 bp, Artificial
  Synthetic oligonucleotide
gaaaatgaaagaactctggatttccacgactcgaatgtaaagaacctgtatgagaaagta

SEQ ID NO: 59907 - DNA, 60 bp, Artificial
  Synthetic oligonucleotide
atggttttctggatatttggacatacaatgcagaactgttggttctattggaaaatgaaa

SEQ ID NO: 59908 - DNA, 60 bp, Artificial
  Synthetic oligonucleotide
ctgttattgaaaagatgaacacgcaattcacggcagtgggtaaagaattcaaccacttgg

SEQ ID NO: 59909 - DNA, 60 bp, Artificial
  Synthetic oligonucleotide
cgggagacctccattccctccaaaacagaaacggaaaatggcgagaacaattgggccaga

SEQ ID NO: 59910 - DNA, 60 bp, Artificial
  Synthetic oligonucleotide
ctccaaaacagaaacggaaaatggcgagaacaattaggtcagaagttcgaagaaataaga

SEQ ID NO: 59911 - DNA, 60 bp, Artificial
  Synthetic oligonucleotide
gggtagctcctttacaattggggaagtgcaatgtagcgggatggctcctgggcaacccag

SEQ ID NO: 59912 - DNA, 60 bp, Artificial
  Synthetic oligonucleotide
cagtgatgtgtgtatgcagagacaactggcatggttcaaatcgaccttgggtgtctttta

SEQ ID NO: 59913 - DNA, 57 bp, Artificial
  Synthetic oligonucleotide
ggtccagacaatggagctgtggctgtactaaaatacaacggcataataactgaaacc

SEQ ID NO: 59914 - DNA, 60 bp, Artificial
  Synthetic oligonucleotide
gacatcaacatcatggcgtctcaaggcaccaaacgatcttatgagcagatggagactggt

SEQ ID NO: 59915 - DNA, 60 bp, Artificial
  Synthetic oligonucleotide
gggtagataatcactcaccgagtgacatccacatcatggcgtctcaaggcaccaaacgat

SEQ ID NO: 59916 - DNA, 60 bp, Artificial
  Synthetic oligonucleotide
attcagaacagcataacaatagagagaatggtgctctctgcttttgacgagaggaggaac

SEQ ID NO: 59917 - DNA, 60 bp, Artificial
  Synthetic oligonucleotide
gacaataacctattcatcatcaatgatgtgggagatcaatggacctgagtcagtgctcgt

SEQ ID NO: 59918 - DNA, 58 bp, Artificial
  Synthetic oligonucleotide
atctgttccaccattgaagagctcagacggcagaaatagtgaatttagcttgtccttc

SEQ ID NO: 59919 - DNA, 60 bp, Artificial
  Synthetic oligonucleotide
ctatatgatgcaattgaggagtgcctgattaacgatccctgggttttgcttaatgcgtct

SEQ ID NO: 59920 - DNA, 60 bp, Artificial
  Synthetic oligonucleotide
ctgaaacatggcccattggggaatcacccaaaggggtggaagaaggctccattgggaaag

SEQ ID NO: 59921 - DNA, 60 bp, Artificial
  Synthetic oligonucleotide
cgtctgatgattttgctctgattgtgaatgcacccaactatgcaggaattcaagctggag

SEQ ID NO: 59922 - DNA, 60 bp, Artificial
  Synthetic oligonucleotide
tcatctgatgattttgctctgattgtgaatgcacccaatcatgcaggaattcaagctgga

SEQ ID NO: 59923 - DNA, 60 bp, Artificial
  Synthetic oligonucleotide
acatcccatccattcaatccagaggtctgtttggagccattgccggtttcattgaagggg

SEQ ID NO: 59924 - DNA, 54 bp, Artificial
  Synthetic oligonucleotide
gcgaccaaaagaattcggatggccatcaattagtgtcgaattgttaaaaacgac

SEQ ID NO: 59925 - DNA, 60 bp, Artificial
  Synthetic oligonucleotide
attagaaatgtgccacagcacacagattggtggaacaaggatggtggatattctcaggca

SEQ ID NO: 59926 - DNA, 60 bp, Artificial
  Synthetic oligonucleotide
attggaaatgtgccacagcacacagattggtggaacaaggatggtggatattctcaggca

SEQ ID NO: 59927 - DNA, 60 bp, Artificial
  Synthetic oligonucleotide
agaggacaagggcacttgtgcgtactgggatggatcccaggatgtgctctctgatgcaag

SEQ ID NO: 59928 - DNA, 60 bp, Artificial
  Synthetic oligonucleotide
gaggacaagggcacttgtgcgtactgggatggatcccaggatgtgctctctgatgcaagg

SEQ ID NO: 59929 - DNA, 60 bp, Artificial
  Synthetic oligonucleotide
taatgaagggggtatacattaatactgccttgcttaatgcatcctgtgcagcaatggacg

SEQ ID NO: 59930 - DNA, 60 bp, Artificial
  Synthetic oligonucleotide
taatgaagggggtatacattaatactgccttgcttaatgcatcctgtgcagcaatggatg

SEQ ID NO: 59931 - DNA, 60 bp, Artificial
  Synthetic oligonucleotide
tccctcactgacccaagacttgagccacacaaatgggagaagtactgtgttcttgagata

SEQ ID NO: 59932 - DNA, 60 bp, Artificial
  Synthetic oligonucleotide
cactgacccaagacttgagccacacaaatgggagaagtactgtgttcttgagatagggga

SEQ ID NO: 59933 - DNA, 60 bp, Artificial
  Synthetic oligonucleotide
ctccttcctcacacatgcactgaaatagttgtggcagtgctactatttgctatccatatt

SEQ ID NO: 59934 - DNA, 60 bp, Artificial
  Synthetic oligonucleotide
ccctcaaagccgagatcgcacagagacttgaagatgtctttgcagggaagaacaccgatc

SEQ ID NO: 59935 - DNA, 60 bp, Artificial
  Synthetic oligonucleotide
caggccccctcaaagccgagatcgcacagagacttgaagatgtctttgcagggaagaaca

SEQ ID NO: 59936 - DNA, 60 bp, Artificial
  Synthetic oligonucleotide
ggagacctccactcactccaaaacagaaacggaaaatggcgagaacaattaggtcagaag

SEQ ID NO: 59937 - DNA, 60 bp, Artificial
  Synthetic oligonucleotide
ctgggagacctccactcactccaaaacagaaacggaaaatggcgagaacaattaggtcag

SEQ ID NO: 59938 - DNA, 60 bp, Artificial
  Synthetic oligonucleotide
caaggcgctctattaaatgacaagcattcaaatgggaccgttaaggacagaagcccttat

SEQ ID NO: 59939 - DNA, 60 bp, Artificial
  Synthetic oligonucleotide
ttttttctgacccaaggcgctctattaaatgacaagcattcaaatgggaccgttaaggac

SEQ ID NO: 59940 - DNA, 60 bp, Artificial
  Synthetic oligonucleotide
tcaaatgggaccgttaaggacagaagcccttatagggccttaatgagctgccctgtcggt

SEQ ID NO: 59941 - DNA, 60 bp, Artificial
  Synthetic oligonucleotide
gatggcatgggctggctaacaatcggaatttctggtccagatgatggagcagtggctgtg

SEQ ID NO: 59942 - DNA, 60 bp, Artificial
  Synthetic oligonucleotide
ttgaatgacaagcattcaaatgggaccgttaaggacagaagcccttatagggccttaatg

SEQ ID NO: 59943 - DNA, 60 bp, Artificial
  Synthetic oligonucleotide
tctattaaatgacaagcattcaaatgggaccgttaaggacagaagcccttatagggcctt

SEQ ID NO: 59944 - DNA, 60 bp, Artificial
  Synthetic oligonucleotide
ggcatgggctggctaacaatcggaatttctggtccagatgatggagcagtggctgtacta

SEQ ID NO: 59945 - DNA, 60 bp, Artificial
  Synthetic oligonucleotide
gctctattaaatgacaagcattcaaatgggaccgttaaggacagaagcccttatagggcc

SEQ ID NO: 59946 - DNA, 51 bp, Artificial
  Synthetic oligonucleotide
ggggcaatcagcttctggatgtgttctaatggatcattgcaatgcagaata

SEQ ID NO: 59947 - DNA, 53 bp, Artificial
  Synthetic oligonucleotide
ggggcaatcagcttctggatgtgttctaatgggtcattgcaatgcagagtatg

SEQ ID NO: 59948 - DNA, 60 bp, Artificial
  Synthetic oligonucleotide
cttcctagttttggggtgtctggggtcaatgagtctgcagacatgagtattggagtcact

SEQ ID NO: 59949 - DNA, 60 bp, Artificial
  Synthetic oligonucleotide
ggcagacagacctatgactggactctaaatagaaaccagcctgctgctacagcattggcc

SEQ ID NO: 59950 - DNA, 60 bp, Artificial
  Synthetic oligonucleotide
agtgcctgattaatgatccctgggttttgcttaatgcttcttggttcaactccttcctca

SEQ ID NO: 59951 - DNA, 59 bp, Artificial
  Synthetic oligonucleotide
agtgcctgattaatgatccctgggttttgcttaatgcttcttggttcaactccttcctc

SEQ ID NO: 59952 - DNA, 60 bp, Artificial
  Synthetic oligonucleotide
cccaaacctgagcatgtcctatgtaaacaacaaagggaaagaagtccttgtgctatgggg

SEQ ID NO: 59953 - DNA, 58 bp, Artificial
  Synthetic oligonucleotide
cactggcaagctggattcagagtgaattcaacaaggcatgtgagttgacggattccag

SEQ ID NO: 59954 - DNA, 60 bp, Artificial
  Synthetic oligonucleotide
gagccaaaaattagatcactggcaagctggattcagagtgaattcaacaaggcatgtgag

SEQ ID NO: 59955 - DNA, 60 bp, Artificial
  Synthetic oligonucleotide
ctacgaacttcaattggccaagtgtcgaggccaatgtttctgtatgtgagaaccaatgga

SEQ ID NO: 59956 - DNA, 60 bp, Artificial
  Synthetic oligonucleotide
taggagacatgattctacgaacttcaattggccaagtgtcgaggccaatgtttctgtatg

SEQ ID NO: 59957 - DNA, 60 bp, Artificial
  Synthetic oligonucleotide
aaaattgagcattgaggatccgagtcatgagggggaggggataccgctatatgatgcaat

SEQ ID NO: 59958 - DNA, 60 bp, Artificial
  Synthetic oligonucleotide
cacaggggaagaaatggccactaaggcagattacactcttgatgaggagagcagagcaag

SEQ ID NO: 59959 - DNA, 60 bp, Artificial
  Synthetic oligonucleotide
atgatgcaatcaagtgcatgaagacatttttcggatggaaagagccccacattgtcaagc

SEQ ID NO: 59960 - DNA, 60 bp, Artificial
  Synthetic oligonucleotide
cgagtcatgagggggagggaataccgctatatgatgcaatcaagtgcatgaagacatttt

SEQ ID NO: 59961 - DNA, 60 bp, Artificial
  Synthetic oligonucleotide
ggattttcagctgaatcaagaaagctgcttctaattgttcaggcacttagggacaacctg

SEQ ID NO: 59962 - DNA, 60 bp, Artificial
  Synthetic oligonucleotide
acattttctcgttcacaggggaagaaatggccactaaggcagattacactcttgatgagg

SEQ ID NO: 59963 - DNA, 60 bp, Artificial
  Synthetic oligonucleotide
caggggttgagaagcccaagttccttccggatctatatgactataaggagaaccgattca

SEQ ID NO: 59964 - DNA, 60 bp, Artificial
  Synthetic oligonucleotide
cccgaaaattgaaacaaacaaatttgctgcaatatgcacacacatggaagtctgtttcat

SEQ ID NO: 59965 - DNA, 60 bp, Artificial
  Synthetic oligonucleotide
cccgaaaattgaaacaaacaaatttgctgcaatatgcacacatatggaagtctgtttcat

SEQ ID NO: 59966 - DNA, 59 bp, Artificial
  Synthetic oligonucleotide
gcaagccttacaactattgcttgaagtggaacaagagataagaactttctcgtttcagc

SEQ ID NO: 59967 - DNA, 60 bp, Artificial
  Synthetic oligonucleotide
acaaaagtggtcccaagaggacaactgtccaccagaggagttcaaattgcttcaaatgaa

SEQ ID NO: 59968 - DNA, 60 bp, Artificial
  Synthetic oligonucleotide
ggacaagagtagtcccaagaggacaactgtccaccagaggagttcaaattgcttcaaatg

SEQ ID NO: 59969 - DNA, 54 bp, Artificial
  Synthetic oligonucleotide
cactcactgagtgacattcacatcatggcgtctcaaggcaccaaacgatcttat

SEQ ID NO: 59970 - DNA, 60 bp, Artificial
  Synthetic oligonucleotide
ggtcccaagaggacaactgtccaccagaggagttcaaattgcttcaaatgaaaacatgga

SEQ ID NO: 59971 - DNA, 60 bp, Artificial
  Synthetic oligonucleotide
gggacaagagtagtcccaagaggacaactgtccaccagaggagttcaaattgcttcaaat

SEQ ID NO: 59972 - DNA, 60 bp, Artificial
  Synthetic oligonucleotide
ggcattccaacctgaatgatgccacatatcagagaacaagagctctcgtgcgtactggga

SEQ ID NO: 59973 - DNA, 60 bp, Artificial
  Synthetic oligonucleotide
cactcaccgagtgacattcacatcatggcgtctcaaggcaccaaacgatcttatgagcag

SEQ ID NO: 59974 - DNA, 60 bp, Artificial
  Synthetic oligonucleotide
caaaagtggtaccaagaggacaactgtccaccagaggagttcaaattgcttcaaatgaaa

SEQ ID NO: 59975 - DNA, 60 bp, Artificial
  Synthetic oligonucleotide
agtggtcccaagaggacaactgtccaccagaggagttcaaattgcttcaaatgaaaacat

SEQ ID NO: 59976 - DNA, 60 bp, Artificial
  Synthetic oligonucleotide
atgataagcaaatgtagaactaaagagggaaggcgaaagaccaatttgtacggcttcatc

SEQ ID NO: 59977 - DNA, 60 bp, Artificial
  Synthetic oligonucleotide
ttgaaagatgagtcttctaaccgaggtcgaaacgtacgttctctctatcatcccttcagg

SEQ ID NO: 59978 - DNA, 60 bp, Artificial
  Synthetic oligonucleotide
aaagatgagtcttctaaccgaggtcgaaacgtacgttctctctatcatcccttcaggccc

SEQ ID NO: 59979 - DNA, 60 bp, Artificial
  Synthetic oligonucleotide
agatgagtcttctaaccgaggtcgaaacgtacgttctctctatcatcccttcaggccccc

SEQ ID NO: 59980 - DNA, 59 bp, Artificial
  Synthetic oligonucleotide
agatgagtcttctaaccgaggtcgaaacgtacgttctctctatcatcccttcaggcccc

SEQ ID NO: 59981 - DNA, 60 bp, Artificial
  Synthetic oligonucleotide
gtataggctaccatgcgaacaactcaaccgacactgttgacacagtacttgagaagaacg

SEQ ID NO: 59982 - DNA, 60 bp, Artificial
  Synthetic oligonucleotide
ctaccatgcgaacaactcaaccgacactgttgacacagtacttgagaagaacgtgacagt

SEQ ID NO: 59983 - DNA, 60 bp, Artificial
  Synthetic oligonucleotide
ttgggcaaggggacgtagtgttggtaatgaaacgaaaacgggactctagcatacttactg

SEQ ID NO: 59984 - DNA, 60 bp, Artificial
  Synthetic oligonucleotide
gccacagcacacagattggtggaacaaggatggtggatattctcaggcaaaacccaacag

SEQ ID NO: 59985 - DNA, 60 bp, Artificial
  Synthetic oligonucleotide
acatggaacctttggccctgtacactttagaaaccaagtcaaaatacgccgaagagtcga

SEQ ID NO: 59986 - DNA, 60 bp, Artificial
  Synthetic oligonucleotide
ttttaggatttgtgttcacgctcaccgtgcccagtgagcggggactgcagcgtagacgct

SEQ ID NO: 59987 - DNA, 60 bp, Artificial
  Synthetic oligonucleotide
ggtcctgaatcagtgttggtcaatacctatcagtggatcatcagaaactgggaaactgtt

SEQ ID NO: 59988 - DNA, 60 bp, Artificial
  Synthetic oligonucleotide
tatataagaatggaccaggcgatcatggaaaagaacatcatactgaaagcgaacttcagt

SEQ ID NO: 59989 - DNA, 60 bp, Artificial
  Synthetic oligonucleotide
ctacattgcagaaacaccaaactccgagaatggaacatgttacccagggtatttcgccga

SEQ ID NO: 59990 - DNA, 60 bp, Artificial
  Synthetic oligonucleotide
cctacattgcagaaacaccaaactccgagaatggaacatgttacccagggtatttcgccg

SEQ ID NO: 59991 - DNA, 60 bp, Artificial
  Synthetic oligonucleotide
tacattgcagaaacaccaaactccgagaatggaacatgttacccagggtatttcgccgac

SEQ ID NO: 59992 - DNA, 60 bp, Artificial
  Synthetic oligonucleotide
ggaatgacaccgatgtggtaaactttgtgagcatggagttttccctcactgacccaagac

SEQ ID NO: 59993 - DNA, 60 bp, Artificial
  Synthetic oligonucleotide
acataaggaagctgctcagcatgagagacatgtgtgatgctccctttgatgacaggctca

SEQ ID NO: 59994 - DNA, 60 bp, Artificial
  Synthetic oligonucleotide
ttgaaaactcgtgtcttgaaacgatggaggttgttcagcaaacacgagtggacaagctga

SEQ ID NO: 59995 - DNA, 60 bp, Artificial
  Synthetic oligonucleotide
ttgagacctcgtgtcttgaaacgatggaggttgttcagcaaacacgagtggacaagctga

SEQ ID NO: 59996 - DNA, 60 bp, Artificial
  Synthetic oligonucleotide
ggaagaagcaaatattaagaacacaagagtctgaatgtgtctgtgtgaacggttcatgtt

SEQ ID NO: 59997 - DNA, 60 bp, Artificial
  Synthetic oligonucleotide
gcttcctagttttggggtgtctggggtcaatgagtctgcagacatgagtattggagtcac

SEQ ID NO: 59998 - DNA, 60 bp, Artificial
  Synthetic oligonucleotide
catggggccaaagaaatagcattcagttattctgctggtgcacttgccagttgtatgggc

SEQ ID NO: 59999 - DNA, 60 bp, Artificial
  Synthetic oligonucleotide
catggggccaaggaaatagcactcagttattctgctggtgcacttgccagttgtatgggc

SEQ ID NO: 60000 - DNA, 60 bp, Artificial
  Synthetic oligonucleotide
tccatggggccaaagagatagcactcagttattctgctggtgcacttgccagttgtatgg

SEQ ID NO: 60001 - DNA, 60 bp, Artificial
  Synthetic oligonucleotide
ggggccaaagaaatagcattcagttattctgctggtgcacttgccagttgtatgggcctc

SEQ ID NO: 60002 - DNA, 60 bp, Artificial
  Synthetic oligonucleotide
ggggccaaagagatagcactcagttattctgctggtgcacttgccagttgtatgggcctt

SEQ ID NO: 60003 - DNA, 60 bp, Artificial
  Synthetic oligonucleotide
tggaatgataacacagttcgagtctctgaaactctacaaagattcgcttggagaagcagt

SEQ ID NO: 60004 - DNA, 60 bp, Artificial
  Synthetic oligonucleotide
tggaatgataacacagttcgagtctctgaaactctacagagatttgcttggagaagcagt

SEQ ID NO: 60005 - DNA, 60 bp, Artificial
  Synthetic oligonucleotide
gactctgctggaacctggggatacaataatatttgaggcaaatggaaatctaatagcgcc

SEQ ID NO: 60006 - DNA, 60 bp, Artificial
  Synthetic oligonucleotide
gactctgctggaacctggggacacaataatatttgaggcaaatggaaatctaatagcgcc

SEQ ID NO: 60007 - DNA, 60 bp, Artificial
  Synthetic oligonucleotide
ggaacctggggacacaataatatttgaggcaaatggaaatctaatagcgccatggcatgc

SEQ ID NO: 60008 - DNA, 60 bp, Artificial
  Synthetic oligonucleotide
ctgctggaacccggggacacaataatatttgaggcaaatggaaatctaatagcgccaagg

SEQ ID NO: 60009 - DNA, 60 bp, Artificial
  Synthetic oligonucleotide
atgcagacacaatatgtataggctaccatgcgaacaactcaaccgacactgttgacacag

SEQ ID NO: 60010 - DNA, 60 bp, Artificial
  Synthetic oligonucleotide
agatgcagacacaatatgtataggctaccatgcgaacaactcaaccgacactgttgacac

SEQ ID NO: 60011 - DNA, 60 bp, Artificial
  Synthetic oligonucleotide
tgttgacacagtacttgagaagaatgtgacagtgacacactctgtcaacctacttgagga

SEQ ID NO: 60012 - DNA, 60 bp, Artificial
  Synthetic oligonucleotide
ccaaagtacgtcaggagtacaaaattaaggatggttacaggactaaggaacatcccatcc

SEQ ID NO: 60013 - DNA, 60 bp, Artificial
  Synthetic oligonucleotide
ttgtcatgagagagccgttcatttcatgctctcacttggaatgcagaaccttttttctga

SEQ ID NO: 60014 - DNA, 55 bp, Artificial
  Synthetic oligonucleotide
ccccaaaggagtggaagaaggttccattgggaaggtctgcaggactttattagct

SEQ ID NO: 60015 - DNA, 50 bp, Artificial
  Synthetic oligonucleotide
ccccaaaggagtggaagaaggttccattgggaaggtctgcaggactttat

SEQ ID NO: 60016 - DNA, 60 bp, Artificial
  Synthetic oligonucleotide
cagcttctggatgtgttctaatgggtctttgcagtgtagaatatgcatctgagaccagaa

SEQ ID NO: 60017 - DNA, 60 bp, Artificial
  Synthetic oligonucleotide
gttcgcactgggatggatcccagaatgtgctccctaatgcaaggttcaacactccccaga

SEQ ID NO: 60018 - DNA, 60 bp, Artificial
  Synthetic oligonucleotide
atgcaaggttcaacacttcccagaaggtctggagccgcaggtgctgcagtgaaaggagtc

SEQ ID NO: 60019 - DNA, 60 bp, Artificial
  Synthetic oligonucleotide
agggggtcagttgcacataagtcttgcctgcctgcttgtgtgtatgggcttgcagtagcg

SEQ ID NO: 60020 - DNA, 60 bp, Artificial
  Synthetic oligonucleotide
gttgcacgtaagtcttgcctgcctgcttgtgtgtatgggcttgcagtagcgagtgggcat

SEQ ID NO: 60021 - DNA, 60 bp, Artificial
  Synthetic oligonucleotide
gcacgtaagtcttgcctgcctgcttgtgtgtatgggcttgcagtagcgagtgggcatgac

SEQ ID NO: 60022 - DNA, 60 bp, Artificial
  Synthetic oligonucleotide
ccacaagaggggttcagattgcttcaaatgagaatgtggaagctatggactctagtaccc

SEQ ID NO: 60023 - DNA, 60 bp, Artificial
  Synthetic oligonucleotide
caagaggaaggctttccacaagaggggttcagattgcttcaaatgagaatgtggaagcta

SEQ ID NO: 60024 - DNA, 60 bp, Artificial
  Synthetic oligonucleotide
gagtgggcatgactttgaaagagaaggatattcactggtcgggatagaccccttcaaatt

SEQ ID NO: 60025 - DNA, 60 bp, Artificial
  Synthetic oligonucleotide
tttggcactccaatctgaatgatgccacctatcagagaacaagagcgcttgttcgcactg

SEQ ID NO: 60026 - DNA, 60 bp, Artificial
  Synthetic oligonucleotide
cctgcctgcttgtgtgtatgggcttgcagtagcgagtgggcatgactttgaaagagaagg

SEQ ID NO: 60027 - DNA, 60 bp, Artificial
  Synthetic oligonucleotide
gaacaagagcgcttgttcgcactgggatggatcccagaatgtgctccctaatgcaaggtt

SEQ ID NO: 60028 - DNA, 60 bp, Artificial
  Synthetic oligonucleotide
ctaccagtggatcatcagaaactgggaaactgttaaaattcagtggtcgcaggaccctac

SEQ ID NO: 60029 - DNA, 60 bp, Artificial
  Synthetic oligonucleotide
tacctaccagtggatcatcagaaactgggaaactgttaaaattcagtggtcgcaggaccc

SEQ ID NO: 60030 - DNA, 60 bp, Artificial
  Synthetic oligonucleotide
gataacctcgtttcaggtagattgttatctatggcacataaggaagctgctcagcatgag

SEQ ID NO: 60031 - DNA, 60 bp, Artificial
  Synthetic oligonucleotide
gacaggctcagaagagaccaaaaggcattaaagggaagaggcagcacacttggactcgac

SEQ ID NO: 60032 - DNA, 60 bp, Artificial
  Synthetic oligonucleotide
acagataacgtttgtacaggcattgcaactcttacttgaagttgagagtgagataaggac

SEQ ID NO: 60033 - DNA, 51 bp, Artificial
  Synthetic oligonucleotide
tttgaagagatcagatggctcattgctgaatgcaggaatatactgacaaag

SEQ ID NO: 60034 - DNA, 60 bp, Artificial
  Synthetic oligonucleotide
aatggattccaacacgataacctcgtttcaggtagattgttatctatggcacataaggaa

SEQ ID NO: 60035 - DNA, 60 bp, Artificial
  Synthetic oligonucleotide
cactccctccaaaacagaaacgctacatggcgagacgagttgagtcagaaatttgaagag

SEQ ID NO: 60036 - DNA, 60 bp, Artificial
  Synthetic oligonucleotide
cggtggacttgaatggaatgataacacaattcgagcgtctgaaaatatacagagattcgc

SEQ ID NO: 60037 - DNA, 52 bp, Artificial
  Synthetic oligonucleotide
gtttgaagagatcagatggctcattgctgaatgcaggaatatactgacaaag

SEQ ID NO: 60038 - DNA, 60 bp, Artificial
  Synthetic oligonucleotide
gataacctcgtttcaggtagattgttatctatggcacataaggaagctactcagcatgag

SEQ ID NO: 60039 - DNA, 60 bp, Artificial
  Synthetic oligonucleotide
atcctcatcggtggacttgaatggaatgataacacaattcgagcgtctgaaaatatacag

SEQ ID NO: 60040 - DNA, 57 bp, Artificial
  Synthetic oligonucleotide
ctatttgaccaactagagacgttagtctctctgagggcattcacagaagatggtgct

SEQ ID NO: 60041 - DNA, 57 bp, Artificial
  Synthetic oligonucleotide
ctatttgaccaactagagacattagtctctctgagggcattcacagaagatggtgct

SEQ ID NO: 60042 - DNA, 60 bp, Artificial
  Synthetic oligonucleotide
ctgaagagtgaaacagatgaaaacctcaaaatagccattgcctccagtcctgcccctcgg

SEQ ID NO: 60043 - DNA, 60 bp, Artificial
  Synthetic oligonucleotide
ctgaagagtgaaacagatgaaaacctcaaaatagccattgcctccagtcatgctcctcgg

SEQ ID NO: 60044 - DNA, 60 bp, Artificial
  Synthetic oligonucleotide
acattctgaagagtgaaacagatgaaaacctcaaaatagccattgcctccagtcctgccc

SEQ ID NO: 60045 - DNA, 60 bp, Artificial
  Synthetic oligonucleotide
acattctgaagagtgaaacagatgaaaacctcaaaatagccattgcctccagtcatgctc

SEQ ID NO: 60046 - DNA, 60 bp, Artificial
  Synthetic oligonucleotide
tggactcgacctaagagtggctacaatggaagggaaaaagatcgttgaggacattctgaa

SEQ ID NO: 60047 - DNA, 60 bp, Artificial
  Synthetic oligonucleotide
caggctcagaagagaccaaaaggcattaaagggaagaggcagcacacttggactcgacct

SEQ ID NO: 60048 - DNA, 60 bp, Artificial
  Synthetic oligonucleotide
cagataacgttcttacaggcattgcaactcttacttgaagttgagagtgagataagaact

SEQ ID NO: 60049 - DNA, 60 bp, Artificial
  Synthetic oligonucleotide
cgtttgtacaggcattgcaactcttacttgaagttgagagtgagataaggactttctcgt

SEQ ID NO: 60050 - DNA, 60 bp, Artificial
  Synthetic oligonucleotide
ccccattccttgatcggcttcgccgagatcagaagtccctaaggggaagaggcagcactc

SEQ ID NO: 60051 - DNA, 60 bp, Artificial
  Synthetic oligonucleotide
ccccattccttgatcggcttcgccgagatcagaagtccctaaatggaagaggcagcactc

SEQ ID NO: 60052 - DNA, 60 bp, Artificial
  Synthetic oligonucleotide
ccccatttcttgatcggcttcgccgagatcagaagtccctaaagggaagaggcagcactc

SEQ ID NO: 60053 - DNA, 60 bp, Artificial
  Synthetic oligonucleotide
tccttgatcggcttcgccgagatcagaagtccctaaggggaagaggcagcactctcggtc

SEQ ID NO: 60054 - DNA, 60 bp, Artificial
  Synthetic oligonucleotide
ccccattccttgatcggcttcgccgagatcagaagtccctaaaaggaagaggcagcactc

SEQ ID NO: 60055 - DNA, 60 bp, Artificial
  Synthetic oligonucleotide
tccttgatcggcttcgccgagatcagaagtccctaaagggaagaggcagcactctcggtc

SEQ ID NO: 60056 - DNA, 60 bp, Artificial
  Synthetic oligonucleotide
ctttaactgaagacccagatgaaggcacagctggagtggaatccgctgttctaaggggat

SEQ ID NO: 60057 - DNA, 60 bp, Artificial
  Synthetic oligonucleotide
cagcgatactcagaaaagcaaccaggagattgattcaactgatagtgagtggaagagacg

SEQ ID NO: 60058 - DNA, 60 bp, Artificial
  Synthetic oligonucleotide
ctttgactgaagacccagatgaaggcacagctggagtggaatccgctgttctaaggggat

SEQ ID NO: 60059 - DNA, 60 bp, Artificial
  Synthetic oligonucleotide
atgataagcaaatgtagaactaaagagggaaggcgaaagaccaatttgtacggtttcatc

SEQ ID NO: 60060 - DNA, 60 bp, Artificial
  Synthetic oligonucleotide
atccagaacagcttaacaatagagagaatggtgctctctgcttttgacgagaggaggaat

SEQ ID NO: 60061 - DNA, 60 bp, Artificial
  Synthetic oligonucleotide
tacttactgacagccagacagcgaccaaaagaattcggatggccatcaattaatttcgaa

SEQ ID NO: 60062 - DNA, 60 bp, Artificial
  Synthetic oligonucleotide
ggggccaaagaaatagcactcagttattctgctggtgcacttgccagttgtatgggcctc

SEQ ID NO: 60063 - DNA, 60 bp, Artificial
  Synthetic oligonucleotide
cacggggccaaagaaatagcactcagttattctgctggtgcacttgccagttgtatgggc

SEQ ID NO: 60064 - DNA, 60 bp, Artificial
  Synthetic oligonucleotide
tctatggggccaaagaaatagcactcagttattctgctggtgcacttgccagttgtatgg

SEQ ID NO: 60065 - DNA, 60 bp, Artificial
  Synthetic oligonucleotide
tccatggggccaaagaaatagcactcagttattctgctggtgcacttgccagttgtatgg

SEQ ID NO: 60066 - DNA, 60 bp, Artificial
  Synthetic oligonucleotide
cagttattctgctggtgcacttgccagttgtatgggcctcatatacaacaggatgggggc

SEQ ID NO: 60067 - DNA, 60 bp, Artificial
  Synthetic oligonucleotide
aaagaaatagcactcagttattctgctggtgcacttgccagttgtatgggcctcatatac

SEQ ID NO: 60068 - DNA, 58 bp, Artificial
  Synthetic oligonucleotide
cagttattctgctggtgcacttgccagttgtatgggcctcatatacaacaggatgggg

SEQ ID NO: 60069 - DNA, 60 bp, Artificial
  Synthetic oligonucleotide
tggtgctctctgcttttgacgagaggaggaacaaatatctggaagaacatcccagcgcgg

SEQ ID NO: 60070 - DNA, 60 bp, Artificial
  Synthetic oligonucleotide
aggaagatctcacttaaggaatgacaccgatgtggtaaattttgtgagcatggagttttc

SEQ ID NO: 60071 - DNA, 56 bp, Artificial
  Synthetic oligonucleotide
agaatgtgcaacattctcaaagggaaatttcaaacagctgcacaaagagcaatgat

SEQ ID NO: 60072 - DNA, 60 bp, Artificial
  Synthetic oligonucleotide
gaatgtgcaacattctcaaagggaaatttcaaacagctgcacaaagagcaatgatggatc

SEQ ID NO: 60073 - DNA, 60 bp, Artificial
  Synthetic oligonucleotide
gaatgtgcaacattctcaaagggaaatttcaaacagctgcacaaagagcaatggtggatc

SEQ ID NO: 60074 - DNA, 60 bp, Artificial
  Synthetic oligonucleotide
ccacggaaatcagagcatctgtaggaagaatgattggtggaattgggcgattctacatcc

SEQ ID NO: 60075 - DNA, 60 bp, Artificial
  Synthetic oligonucleotide
ccacggaaatcagggcatctgtaggaagaatgattggtggaattgggcgattctacatcc

SEQ ID NO: 60076 - DNA, 60 bp, Artificial
  Synthetic oligonucleotide
attggtggaattgggcgattctacatccaaatgtgcaccgagcttaagctcaatgattat

SEQ ID NO: 60077 - DNA, 60 bp, Artificial
  Synthetic oligonucleotide
caccctggtatttttgaaaactcgtgtattgaaacgatggaggttgttcagcaaacaaga

SEQ ID NO: 60078 - DNA, 60 bp, Artificial
  Synthetic oligonucleotide
gatccctgggttttgcttaatgcttcttggttcaactccttcctcacacatgcattgaga

SEQ ID NO: 60079 - DNA, 60 bp, Artificial
  Synthetic oligonucleotide
tgcaattggggtcctcatcgggggacttgaatggaatgataacacagttcgagtctctga

SEQ ID NO: 60080 - DNA, 60 bp, Artificial
  Synthetic oligonucleotide
cctcatcggaggacttgaatggaatgataacacagttcgagtctctgaagctctacagag

SEQ ID NO: 60081 - DNA, 60 bp, Artificial
  Synthetic oligonucleotide
gggatcctcatcgggggacttgaatggaatgataacacagttcgagtctctgaaactcta

SEQ ID NO: 60082 - DNA, 60 bp, Artificial
  Synthetic oligonucleotide
ctcatcgggggacttgaatggaatgataacacagttcgagtctctgaaactctacagaga

SEQ ID NO: 60083 - DNA, 60 bp, Artificial
  Synthetic oligonucleotide
atcgggggacttgaatggaatgataacacagttcgagtctctgaaactctacaaagattc

SEQ ID NO: 60084 - DNA, 60 bp, Artificial
  Synthetic oligonucleotide
atcgggggacttgaatggaatgataacacagttcgagtctctgaaactctacagagattt

SEQ ID NO: 60085 - DNA, 60 bp, Artificial
  Synthetic oligonucleotide
ctggttcatgctcatgcccaagcagaaagtggcaggccctctttgtatcagaatggacca

SEQ ID NO: 60086 - DNA, 60 bp, Artificial
  Synthetic oligonucleotide
cactggttcatgctcatgcccaagcagaaagtggcaggccctctttgtatcagaatggac

SEQ ID NO: 60087 - DNA, 60 bp, Artificial
  Synthetic oligonucleotide
ggaaatgtcaaggcactggttcatgctcatgcccaagcagaaagtggcaggccctctttg

SEQ ID NO: 60088 - DNA, 60 bp, Artificial
  Synthetic oligonucleotide
ggcactggttcatgctcatgcccaagcagaaagtggcaggccctctttgtatcagaatgg

SEQ ID NO: 60089 - DNA, 60 bp, Artificial
  Synthetic oligonucleotide
cgaaatttctggaggggtgaaaatggacgaaggacaaggattgcatatgaaagaatgtgc

SEQ ID NO: 60090 - DNA, 60 bp, Artificial
  Synthetic oligonucleotide
aacatttatgcaagccttacagctattgtttgaagtggaacaagagataagaactttctc

SEQ ID NO: 60091 - DNA, 60 bp, Artificial
  Synthetic oligonucleotide
tgaggggcggctgatccagaacagcttaacaatagagagaatggtgctctctgcttttga

SEQ ID NO: 60092 - DNA, 60 bp, Artificial
  Synthetic oligonucleotide
ttaggatttgtgttcacgctcaccgtgcccagtgagcggggactgcagcgtagacgcttt

SEQ ID NO: 60093 - DNA, 60 bp, Artificial
  Synthetic oligonucleotide
gcatgaagggtacgaagaatttacaatggttgggaaaagggcaacagctatactcagaaa

SEQ ID NO: 60094 - DNA, 59 bp, Artificial
  Synthetic oligonucleotide
aaatgccattaacgggattacaaacaaggtgaactctgttatcgagaaaatgaacactc

SEQ ID NO: 60095 - DNA, 60 bp, Artificial
  Synthetic oligonucleotide
aaatgccattaacgggattacaaacaaggtgaactctgttatcgagaaaatgaacactca

SEQ ID NO: 60096 - DNA, 60 bp, Artificial
  Synthetic oligonucleotide
taatactactaagggctttcaccgaagagggagcaattgttggcgaaatttcaccattgc

SEQ ID NO: 60097 - DNA, 60 bp, Artificial
  Synthetic oligonucleotide
aagaattggttccaaaggagatgtttttgtcataagagaaccttttatatcatgttctca

SEQ ID NO: 60098 - DNA, 60 bp, Artificial
  Synthetic oligonucleotide
ccctatccgtggatgggctatatacacaaaagacaacagcataagaattggttccaaagg

SEQ ID NO: 60099 - DNA, 60 bp, Artificial
  Synthetic oligonucleotide
aagaattggttccaaaggagatgtttttgtcataagagagccttttatatcatgttctca

SEQ ID NO: 60100 - DNA, 60 bp, Artificial
  Synthetic oligonucleotide
caaagacaacagcataagaattggttccaaaggagatgtttttgtcataagagaaccttt

SEQ ID NO: 60101 - DNA, 60 bp, Artificial
  Synthetic oligonucleotide
aattggttccaaaggagatgtttttgtcataagagaaccttttatatcatgttctcactt

SEQ ID NO: 60102 - DNA, 60 bp, Artificial
  Synthetic oligonucleotide
gagaaccttttatatcatgttctcacttggaatgcagaaccttttttctgacccaaggtg

SEQ ID NO: 60103 - DNA, 60 bp, Artificial
  Synthetic oligonucleotide
taacacactctgttaatctgcttgaagacagacacaacgggaaactatgtaaactagggg

SEQ ID NO: 60104 - DNA, 60 bp, Artificial
  Synthetic oligonucleotide
taatatggctggtgaaaaaagggagttcatacccaaagctcagcgaatcctatgttaaca

SEQ ID NO: 60105 - DNA, 60 bp, Artificial
  Synthetic oligonucleotide
cagcggaccaaaagagcacacaaaatgcaattgacgggattactaacaaagtaaattctg

SEQ ID NO: 60106 - DNA, 60 bp, Artificial
  Synthetic oligonucleotide
ggttatcaccatcagaatgggcagggatcaggatatgcagcggaccaaaagagcacacaa

SEQ ID NO: 60107 - DNA, 60 bp, Artificial
  Synthetic oligonucleotide
aaccgaaatgaaggcaatactattagtcttgttatgtacatttgcagccacaaatgcaga

SEQ ID NO: 60108 - DNA, 60 bp, Artificial
  Synthetic oligonucleotide
gagaagagatagatggagtgaagttggaatcaacaagggtctaccagatcctggcgatct

SEQ ID NO: 60109 - DNA, 60 bp, Artificial
  Synthetic oligonucleotide
catggagagcgtcaaaaatgggacttatgattatccaaagtactcagaagaatcaaaact

SEQ ID NO: 60110 - DNA, 60 bp, Artificial
  Synthetic oligonucleotide
ggatgtttggacttataatgccgaactgttggttctattggaaaatgaaagaactctgga

SEQ ID NO: 60111 - DNA, 60 bp, Artificial
  Synthetic oligonucleotide
gaaagtaagaagccagctaagaaataatgccaaagaaattgggaatggatgctttgaatt

SEQ ID NO: 60112 - DNA, 60 bp, Artificial
  Synthetic oligonucleotide
aaagggaaggaagtccttgtgctatggggtattcaccatccgcctaccagtactgatcaa

SEQ ID NO: 60113 - DNA, 60 bp, Artificial
  Synthetic oligonucleotide
gacattaatagaacctggagacacaataacattcgaggcaactggaaatctagtggtacc

SEQ ID NO: 60114 - DNA, 60 bp, Artificial
  Synthetic oligonucleotide
ctcggacgaaaaggcgacgaacccgatcgtgccttcctttgacatgagtaacgagggatc

SEQ ID NO: 60115 - DNA, 60 bp, Artificial
  Synthetic oligonucleotide
aataacattcgaagcaactggaaatctagtggtaccaagatatgccttcgcaatgaaaag

SEQ ID NO: 60116 - DNA, 60 bp, Artificial
  Synthetic oligonucleotide
acacccaaaggtgctataaacaccagcctcccatttcagaatatacatccagtcacaatt

SEQ ID NO: 60117 - DNA, 60 bp, Artificial
  Synthetic oligonucleotide
gatacaccagtccacgattgtaatacgacttgtcaaacacccaaaggtgctataaacacc

SEQ ID NO: 60118 - DNA, 60 bp, Artificial
  Synthetic oligonucleotide
ccaaagctcagcaaatcctatgttaacaataaggagaaggaagtcctcgtgctatggggc

SEQ ID NO: 60119 - DNA, 60 bp, Artificial
  Synthetic oligonucleotide
cctatgttaacaataaggagaaggaagtcctcgtgctatggggcattcaccatccaccta

SEQ ID NO: 60120 - DNA, 60 bp, Artificial
  Synthetic oligonucleotide
aggagaaggaagtcctcgtgctatggggcattcaccatccacctaccagtactgaccaac

SEQ ID NO: 60121 - DNA, 60 bp, Artificial
  Synthetic oligonucleotide
caatgaaaagaggttctggatctggtattatcatttcagatacaccggtccacgattgta

SEQ ID NO: 60122 - DNA, 60 bp, Artificial
  Synthetic oligonucleotide
ctcgtgctatggggcattcaccatccacctaccagtactgaccaacaaagtctctaccag

SEQ ID NO: 60123 - DNA, 60 bp, Artificial
  Synthetic oligonucleotide
gaaaataaaagcaaccaaaatgaaggcaatactattagtcttgctatatacatttacagc

SEQ ID NO: 60124 - DNA, 60 bp, Artificial
  Synthetic oligonucleotide
gtcttgctatatacatttacagccgcaaatgcagacacattatgtatcggttatcatgca

SEQ ID NO: 60125 - DNA, 60 bp, Artificial
  Synthetic oligonucleotide
cacgattgtaatacgacttgtcaaacacccaaaggtgctataaacaccagcctcccattt

SEQ ID NO: 60126 - DNA, 60 bp, Artificial
  Synthetic oligonucleotide
cacactctgttaaccttctagaagacagacataacggaaaactatgtaaactaaggggag

SEQ ID NO: 60127 - DNA, 50 bp, Artificial
  Synthetic oligonucleotide
atggttttctggatgtttggacttacaatgccgaactgttggttctattg

SEQ ID NO: 60128 - DNA, 60 bp, Artificial
  Synthetic oligonucleotide
cccatttcagaatatacatccagtcacaattggagaatgtccaaaatatgtcaaaagcac

SEQ ID NO: 60129 - DNA, 60 bp, Artificial
  Synthetic oligonucleotide
ccaaggaaattggaaatggctgctttgaattttaccacaaatgtgatgacacgtgcatgg

SEQ ID NO: 60130 - DNA, 60 bp, Artificial
  Synthetic oligonucleotide
gattaccatgactcaaatgtgaagaacctatatgagaaagtaagaagccagctaaaaaac

SEQ ID NO: 60131 - DNA, 60 bp, Artificial
  Synthetic oligonucleotide
tggacactagtagagcctggagacacaataacattcgaagcaactggaaatctagtggta

SEQ ID NO: 60132 - DNA, 60 bp, Artificial
  Synthetic oligonucleotide
gggagaatgaactattactggacactagtagagcctggagacacaataacattcgaagca

SEQ ID NO: 60133 - DNA, 60 bp, Artificial
  Synthetic oligonucleotide
tctagtggtaccaagatatgccttcgcaatgaaaagaggttctggatctggtattatcat

SEQ ID NO: 60134 - DNA, 60 bp, Artificial
  Synthetic oligonucleotide
ctcagaagaatcaaaactaaacagagaggaaatagatggggtgaagctggaatcaacaag

SEQ ID NO: 60135 - DNA, 60 bp, Artificial
  Synthetic oligonucleotide
acaacaagaaattcaagccagaaatagcaacaagacccaaggtgagaggtcaagcaggga

SEQ ID NO: 60136 - DNA, 60 bp, Artificial
  Synthetic oligonucleotide
ccaaggtgagaggtcaagcagggagaatgaactattactggacactagtagagcctggag

SEQ ID NO: 60137 - DNA, 60 bp, Artificial
  Synthetic oligonucleotide
cccaatcatgaaacgaacagaggtgtgacggcagcatgcccttatgctggagcaaacagc

SEQ ID NO: 60138 - DNA, 60 bp, Artificial
  Synthetic oligonucleotide
ccccaaggcaagttcatggcccaatcatgaaacgaatagaggtgtgacggcagcatgccc

SEQ ID NO: 60139 - DNA, 60 bp, Artificial
  Synthetic oligonucleotide
ttgagatattccccaaggcaagttcatggcccaatcatgaaacgaatagaggtgtgacgg

SEQ ID NO: 60140 - DNA, 53 bp, Artificial
  Synthetic oligonucleotide
tcactgttcacagcaagctcatggtcttacattgtggaaacatctaactcaga

SEQ ID NO: 60141 - DNA, 60 bp, Artificial
  Synthetic oligonucleotide
gacggcagcatgcccttatgctggagcaaacagcttctacagaaatttaatatggctggt

SEQ ID NO: 60142 - DNA, 60 bp, Artificial
  Synthetic oligonucleotide
gtattatcatttcagatacaccagtccacgattgtaatacgacttgtcaaacacccaaag

SEQ ID NO: 60143 - DNA, 60 bp, Artificial
  Synthetic oligonucleotide
atggtggagcagtggctgtactaaaatacaacggcataataactgaaaccataaaaagtt

SEQ ID NO: 60144 - DNA, 56 bp, Artificial
  Synthetic oligonucleotide
atggtggagcagtggctgtactaaaatacaacggcataataactgaaaccataaaa

SEQ ID NO: 60145 - DNA, 60 bp, Artificial
  Synthetic oligonucleotide
cttgaaacgatggaggttgttcagcaaacacgagtggacaagctgacacaaggccgacag

SEQ ID NO: 60146 - DNA, 60 bp, Artificial
  Synthetic oligonucleotide
acttcccagaaggtctggagccgcaggtgctgcagtgaaaggagttggaacaatagcaat

SEQ ID NO: 60147 - DNA, 60 bp, Artificial
  Synthetic oligonucleotide
cccagaaggtctggagccgcaggtgctgcagtgaaaggagttggaacaatagcaatggag

SEQ ID NO: 60148 - DNA, 60 bp, Artificial
  Synthetic oligonucleotide
caaaggagttgggacaatggtgatggagttgatcaggatgatcaaacgtgggatcaatga

SEQ ID NO: 60149 - DNA, 60 bp, Artificial
  Synthetic oligonucleotide
ggagttgggacaatggtgatggagttgatcaggatgatcaaacgtgggatcaatgatcgg

SEQ ID NO: 60150 - DNA, 60 bp, Artificial
  Synthetic oligonucleotide
gcagggtagataatcactcaccgagtgacattcacatcatggcgtctcaaggcaccaaac

SEQ ID NO: 60151 - DNA, 60 bp, Artificial
  Synthetic oligonucleotide
gggaatggttggtggaattggaagattctacatacagatgtgcactgaactcaaactcag

SEQ ID NO: 60152 - DNA, 60 bp, Artificial
  Synthetic oligonucleotide
aagaattgcatatgagagaatgtgcaacatcctcaaagggaaatttcagacagcagcgca

SEQ ID NO: 60153 - DNA, 60 bp, Artificial
  Synthetic oligonucleotide
gcatatgagagaatgtgcaacatcctcaaagggaaatttcagacagcagcgcaacgagca

SEQ ID NO: 60154 - DNA, 60 bp, Artificial
  Synthetic oligonucleotide
aggactaaagagggaaggcgaaagaccaatttgtacggtttcatcataaaaggaagatct

SEQ ID NO: 60155 - DNA, 60 bp, Artificial
  Synthetic oligonucleotide
agaactaaagagggaaggcgaaagaccaatttgtacggtttcatcataaaaggaagatct

SEQ ID NO: 60156 - DNA, 60 bp, Artificial
  Synthetic oligonucleotide
gtgggcatgactttgaaagagaaggatattcactggtcgggatagaccccttcaaattac

SEQ ID NO: 60157 - DNA, 60 bp, Artificial
  Synthetic oligonucleotide
gcagtagcgagtgggcatgactttgaaagagaaggatattcactggtcgggatagacccc

SEQ ID NO: 60158 - DNA, 60 bp, Artificial
  Synthetic oligonucleotide
tgcagtagcgagtgggcatgactttgaaagagaaggatattcactggtcgggatagaccc

SEQ ID NO: 60159 - DNA, 60 bp, Artificial
  Synthetic oligonucleotide
caagcattcaaacggaaccgttaaggacagaagcccttatagggccttaatgagctgtcc

SEQ ID NO: 60160 - DNA, 60 bp, Artificial
  Synthetic oligonucleotide
gcagacggagtaaaggggttttcatacaggtatggtaatggtgtttggataggaaggact

SEQ ID NO: 60161 - DNA, 60 bp, Artificial
  Synthetic oligonucleotide
atgtgcactgaactcaaactcagtgactatgaagggaggctgatccagaatagcataaca

SEQ ID NO: 60162 - DNA, 60 bp, Artificial
  Synthetic oligonucleotide
ggcgatcatggaaaagaatatcatactgaaagcgaacttcagtgtgatttttaaccgatt

SEQ ID NO: 60163 - DNA, 60 bp, Artificial
  Synthetic oligonucleotide
cggaacttctggaggggtgaaaatggacgaaggacaagaattgcctatgaaagaatgtgc

SEQ ID NO: 60164 - DNA, 60 bp, Artificial
  Synthetic oligonucleotide
gcaactggaaatctagtggtaccaagatatgctttcgcaatgaatagaggttctggatct

SEQ ID NO: 60165 - DNA, 60 bp, Artificial
  Synthetic oligonucleotide
tagcaacaagacccaaggtgagaggtcaagcagggagaatgaactattactggacactag

SEQ ID NO: 60166 - DNA, 60 bp, Artificial
  Synthetic oligonucleotide
accagattttggcgatctattcaactgtcgccagttcattggtactgttagtctccctgg

SEQ ID NO: 60167 - DNA, 60 bp, Artificial
  Synthetic oligonucleotide
accagattttggcgatctattcaactgtcgccagttcattggtactgtcagtctccctgg

SEQ ID NO: 60168 - DNA, 60 bp, Artificial
  Synthetic oligonucleotide
cagatcctggcgatctattcaactgtcgccagttcattggtactgttggtctccctgggg

SEQ ID NO: 60169 - DNA, 60 bp, Artificial
  Synthetic oligonucleotide
tcattggtactgttagtctccctgggggcaatcagtttctggatgtgctccaatgggtct

SEQ ID NO: 60170 - DNA, 60 bp, Artificial
  Synthetic oligonucleotide
tggagaatgtccaaaatatgtcaaaagcaccaaattgagaatggctacaggactaaggaa

SEQ ID NO: 60171 - DNA, 60 bp, Artificial
  Synthetic oligonucleotide
agtcacaattggagaatgtccaaaatatgtcaaaagcacaaaattgagaatggctacagg

SEQ ID NO: 60172 - DNA, 60 bp, Artificial
  Synthetic oligonucleotide
aatcaacaaggatttaccagattttggcgatctattcaactgtcgccagttcattggtac

SEQ ID NO: 60173 - DNA, 60 bp, Artificial
  Synthetic oligonucleotide
agggtctaccagatcctggcgatctattcaactgtcgccagttcattggtactgttggtc

SEQ ID NO: 60174 - DNA, 60 bp, Artificial
  Synthetic oligonucleotide
gcacaaaattgagaatggctacaggactaaggaatatcccgtctattcaatctagaggtc

SEQ ID NO: 60175 - DNA, 60 bp, Artificial
  Synthetic oligonucleotide
atgtcaaaagcacaaaattgagaatggctacaggactaaggaatatcccgtctattcaat

SEQ ID NO: 60176 - DNA, 60 bp, Artificial
  Synthetic oligonucleotide
atgtccaaaatatgtcaaaagcacaaaattgagaatggctacaggactaaggaatatccc

SEQ ID NO: 60177 - DNA, 60 bp, Artificial
  Synthetic oligonucleotide
tgagaatggctacaggactaaggaatatcccgtctattcaatctagaggtctgtttggag

SEQ ID NO: 60178 - DNA, 60 bp, Artificial
  Synthetic oligonucleotide
aataaatacctagaagagcatcccagtgctgggaaagatcctaagaaaactggaggaccc

SEQ ID NO: 60179 - DNA, 60 bp, Artificial
  Synthetic oligonucleotide
agtacccttgaactgagaagcagatactgggccataaggaccagaagtggagggaacacc

SEQ ID NO: 60180 - DNA, 60 bp, Artificial
  Synthetic oligonucleotide
gaatggaccaggcgatcatggaaaagaacatcatactgaaagcgaacttcagtgtgattt

SEQ ID NO: 60181 - DNA, 60 bp, Artificial
  Synthetic oligonucleotide
ccagacatgggtttgagatgatttgggatcctaatggatggacagagactgatagtaggt

SEQ ID NO: 60182 - DNA, 60 bp, Artificial
  Synthetic oligonucleotide
ttccagacatgggtttgagatgatttgggatcctaatggatggacagagactgatagtag

SEQ ID NO: 60183 - DNA, 60 bp, Artificial
  Synthetic oligonucleotide
agttccagacatgggtttgagatgatttgggatcctaatggatggacagagactgatagt

SEQ ID NO: 60184 - DNA, 53 bp, Artificial
  Synthetic oligonucleotide
aatcagcttctggatgtgttctaatgggtctttgcagtgcagaatatgcatct

SEQ ID NO: 60185 - DNA, 56 bp, Artificial
  Synthetic oligonucleotide
caatcagcttctggatgtgttctaatgggtctttgcagtgcagaatatgcatctga

SEQ ID NO: 60186 - DNA, 60 bp, Artificial
  Synthetic oligonucleotide
gtacttttgaattcacgagctttttctatcgttatgggtttgttgccaatttcagtatgg

SEQ ID NO: 60187 - DNA, 60 bp, Artificial
  Synthetic oligonucleotide
tctagcatacttactgacagccagacagcgaccaaaagaattcgaatggccttcaattaa

SEQ ID NO: 60188 - DNA, 60 bp, Artificial
  Synthetic oligonucleotide
acggaaacggaactctagcatacttactgacagccagacagcgaccaaaagaattcggat

SEQ ID NO: 60189 - DNA, 60 bp, Artificial
  Synthetic oligonucleotide
aaacgggactcaagcatacttactgacagccagacagcgaccaaaagaattcgaatggcc

SEQ ID NO: 60190 - DNA, 54 bp, Artificial
  Synthetic oligonucleotide
atacttactgacagccagacagcgaccaaaagaattcggatggccatcatttaa

SEQ ID NO: 60191 - DNA, 60 bp, Artificial
  Synthetic oligonucleotide
agcatacttactgacagccagacagcgaccaaaagaattcgaatggccatcaattagtgt

SEQ ID NO: 60192 - DNA, 60 bp, Artificial
  Synthetic oligonucleotide
ctagcatacttactgacagccagacagcgaccaaaagaattcgaatggccttcaattaat

SEQ ID NO: 60193 - DNA, 54 bp, Artificial
  Synthetic oligonucleotide
atacttactgacagccagacagcgaccaaaagaattcggatggccatcaattag

SEQ ID NO: 60194 - DNA, 56 bp, Artificial
  Synthetic oligonucleotide
atacttactgacagccagacagcgaccaaaagaattcggatggccatcaattagtg

SEQ ID NO: 60195 - DNA, 60 bp, Artificial
  Synthetic oligonucleotide
atgttgaaagatgagtcttctaaccgaggtcgaaacgtacgttctctctatcgtcccgtc

SEQ ID NO: 60196 - DNA, 60 bp, Artificial
  Synthetic oligonucleotide
ggctttcaccgaagagggggcaattgttggcgaaatttcaccattgccttctcttccagg

SEQ ID NO: 60197 - DNA, 60 bp, Artificial
  Synthetic oligonucleotide
cgaagagggagcaattgttggcgaaatttcaccattgccttctcttccaggacatactaa

SEQ ID NO: 60198 - DNA, 60 bp, Artificial
  Synthetic oligonucleotide
attactaagggctttcaccgaagagggagcaattgttggcgaaatttcaccattgccttc

SEQ ID NO: 60199 - DNA, 60 bp, Artificial
  Synthetic oligonucleotide
aagggctttcaccgaagagggagcaattgttggcgaaatttcaccattgccttctcttcc

SEQ ID NO: 60200 - DNA, 60 bp, Artificial
  Synthetic oligonucleotide
ggctttcaccgaagagggacgaattgttggcgaaatttcaccattgccttctcttccagg

SEQ ID NO: 60201 - DNA, 60 bp, Artificial
  Synthetic oligonucleotide
ctcggacgaaaaggcaacgagcccgatcgtgccttcctttgacatgagtaacgaaggatc

SEQ ID NO: 60202 - DNA, 53 bp, Artificial
  Synthetic oligonucleotide
atgatggagcagtggctgtactaaaatacaacggcataataactgaaaccata

SEQ ID NO: 60203 - DNA, 60 bp, Artificial
  Synthetic oligonucleotide
tcattggtactgtcagtctccctgggggcaatcagtttctggatgtgctccaatgggtct

SEQ ID NO: 60204 - DNA, 60 bp, Artificial
  Synthetic oligonucleotide
gtttctgtagggtcatcaaaatatgacaggaggttcactccagaaatagcagcgagaccc

SEQ ID NO: 60205 - DNA, 60 bp, Artificial
  Synthetic oligonucleotide
gcagatgcttatgtttctgtagggtcatcaaaatatgacaggaggttcactccagaaata

SEQ ID NO: 60206 - DNA, 60 bp, Artificial
  Synthetic oligonucleotide
catcattcgaaaaattcgagatatttcccaagacaagctcgtggcccaatcatgaaacaa

SEQ ID NO: 60207 - DNA, 57 bp, Artificial
  Synthetic oligonucleotide
actcagataatgggacatgttacccaggagatttcatcgactatgaagaactgagag

SEQ ID NO: 60208 - DNA, 60 bp, Artificial
  Synthetic oligonucleotide
ggggaaatgtaatattgccggatggctcttgggaaacccagaatgcgatttgctgctcac

SEQ ID NO: 60209 - DNA, 60 bp, Artificial
  Synthetic oligonucleotide
acaactggggaaatgtaatattgccggatggctcttgggaaacccagaatgcgatttgct

SEQ ID NO: 60210 - DNA, 60 bp, Artificial
  Synthetic oligonucleotide
ttcatacccaaagcttagcaaatcctatgttaacaataaagggaaagaagtccttgtgct

SEQ ID NO: 60211 - DNA, 60 bp, Artificial
  Synthetic oligonucleotide
catgaaacaaccagaggtgtaacggcagcatgcccctatgctggagcaagcagcttttac

SEQ ID NO: 60212 - DNA, 60 bp, Artificial
  Synthetic oligonucleotide
tgaattctaccacaaatgtgatgatgcatgcatggaaagcgtcagaaatgggacttatga

SEQ ID NO: 60213 - DNA, 60 bp, Artificial
  Synthetic oligonucleotide
ctaccacaaatgtgatgatgcatgcatggaaagcgtcagaaatgggacttatgattaccc

SEQ ID NO: 60214 - DNA, 60 bp, Artificial
  Synthetic oligonucleotide
tgacgggattactaacaaggtgaattctgttatcgagaagatgaacacgcaattcacagt

SEQ ID NO: 60215 - DNA, 60 bp, Artificial
  Synthetic oligonucleotide
gcaagaagccaactaaggaataatgccaaggaaatcgggaatggatgctttgaattctac

SEQ ID NO: 60216 - DNA, 60 bp, Artificial
  Synthetic oligonucleotide
ggactctggatttccatgactcaaatgtaaagaacctgtatgagaaagcaagaagccaac

SEQ ID NO: 60217 - DNA, 60 bp, Artificial
  Synthetic oligonucleotide
acacagtactcgagaagaacgtaaccgtgacacactctgttaacctgcttgaagacagcc

SEQ ID NO: 60218 - DNA, 60 bp, Artificial
  Synthetic oligonucleotide
aggttaccatgcaaataactcaaccgacactgttgacacagtactcgagaagaacgtaac

SEQ ID NO: 60219 - DNA, 60 bp, Artificial
  Synthetic oligonucleotide
atgaaggcaatactattagtcttgttatgtgcatttgcagctacaaatgcagacacacta

SEQ ID NO: 60220 - DNA, 60 bp, Artificial
  Synthetic oligonucleotide
gaagacagccacaacggaaaactatgtagactagggggaatagccccattacaactgggg

SEQ ID NO: 60221 - DNA, 60 bp, Artificial
  Synthetic oligonucleotide
aaatttagtggcaccaagatatgctttcgcactgaatagaggttctgaatccggtatcat

SEQ ID NO: 60222 - DNA, 60 bp, Artificial
  Synthetic oligonucleotide
ctcgagaagaacgtaaccgtgacacactctgttaacctgcttgaagacagccacaacgga

SEQ ID NO: 60223 - DNA, 60 bp, Artificial
  Synthetic oligonucleotide
gatggagtgggctggctaacaatcggaatttctggtccagatgatggagcagtggctgta

SEQ ID NO: 60224 - DNA, 60 bp, Artificial
  Synthetic oligonucleotide
tgcatgtcatgatggagtgggctggctaacaatcggaatttctggtccagatgatggagc

SEQ ID NO: 60225 - DNA, 60 bp, Artificial
  Synthetic oligonucleotide
aacggtttgcagacaatggattgggtgatgccccattccttgatcggctccgccgagatc

SEQ ID NO: 60226 - DNA, 57 bp, Artificial
  Synthetic oligonucleotide
cggacaatggattgggtgatgccccattccttgatcggctccgccgagatcagaagt

SEQ ID NO: 60227 - DNA, 60 bp, Artificial
  Synthetic oligonucleotide
gtgcgaatggaccaggcgatcatggaaaagaacatcatactaaaagcgaacttcagtgtg

SEQ ID NO: 60228 - DNA, 60 bp, Artificial
  Synthetic oligonucleotide
ttcctttggcatatccgcaaacggtttgcagacaatggattgggtgatgccccattcctt

SEQ ID NO: 60229 - DNA, 60 bp, Artificial
  Synthetic oligonucleotide
ataacatttatgcaagccttgcaactattgcttgaagtggagcaagagataagaactttc

SEQ ID NO: 60230 - DNA, 56 bp, Artificial
  Synthetic oligonucleotide
ataacatttatgcaagccttgcaactattgcttgaagtggagcaagagataagaac

SEQ ID NO: 60231 - DNA, 60 bp, Artificial
  Synthetic oligonucleotide
ctgtgtaaacggttcatgttttaccataatgaccgatggcccgagtaatggacctgcctc

SEQ ID NO: 60232 - DNA, 60 bp, Artificial
  Synthetic oligonucleotide
cgatcctgtcacctctgactaaggggattttaggatttgtgttcacactcaccgtgccca

SEQ ID NO: 60233 - DNA, 60 bp, Artificial
  Synthetic oligonucleotide
cgatcctgtcacctctgactaaggggattttaggatttgtgttcacgctcaccgtgccca

SEQ ID NO: 60234 - DNA, 60 bp, Artificial
  Synthetic oligonucleotide
gatcctgtcacctctgactaaggggattttaggatttgtgttcacgctcaccgtgcccag

SEQ ID NO: 60235 - DNA, 60 bp, Artificial
  Synthetic oligonucleotide
cccacttaaggaatgacaccgacgtggtaaactttgtgagcatggagttttccctcactg

SEQ ID NO: 60236 - DNA, 60 bp, Artificial
  Synthetic oligonucleotide
ggaatgacaccgacgtggtaaactttgtgagcatggagttttccctcactgacccaagac

SEQ ID NO: 60237 - DNA, 60 bp, Artificial
  Synthetic oligonucleotide
aatttgcaggcctatcagaaacgaatgggggtgcagatgcaacgattcaagtgatcctct

SEQ ID NO: 60238 - DNA, 60 bp, Artificial
  Synthetic oligonucleotide
gccggcaattcctctctttgtccaataagtgggtgggctatatacagcaaagacaatagc

SEQ ID NO: 60239 - DNA, 60 bp, Artificial
  Synthetic oligonucleotide
gaatttggcgccaagcaaacaatggtgaagatgctactgctggtctcactcacctgatga

SEQ ID NO: 60240 - DNA, 60 bp, Artificial
  Synthetic oligonucleotide
gggcaatcagtttctggatgtgttctaatgggtctttgcagtgtagaatatgcatctgag

SEQ ID NO: 60241 - DNA, 60 bp, Artificial
  Synthetic oligonucleotide
tttgggatcctaatggatggacagataccgatagtaatttcttagtgaaacaggatgtag

SEQ ID NO: 60242 - DNA, 60 bp, Artificial
  Synthetic oligonucleotide
tgtggcgtaaatagtgatactgcaaactggtcttggccagacggtgccgagttgccattc

SEQ ID NO: 60243 - DNA, 60 bp, Artificial
  Synthetic oligonucleotide
ggcgtaaatagtgatactgcaaactggtcttggccagacggtgccgagttgccattcacc

SEQ ID NO: 60244 - DNA, 60 bp, Artificial
  Synthetic oligonucleotide
ttgatcttggggggttatatgaatcaattgaggagtgcctgattaatgatccctgggttt

SEQ ID NO: 60245 - DNA, 55 bp, Artificial
  Synthetic oligonucleotide
gggacgactgattcaaaatagcataacaatagagagaatggtgctctctgctttt

SEQ ID NO: 60246 - DNA, 60 bp, Artificial
  Synthetic oligonucleotide
gccacagcacacagattggtggaacaaggatggtggacattcttaggcagaacccaacag

SEQ ID NO: 60247 - DNA, 60 bp, Artificial
  Synthetic oligonucleotide
gccacagcacacagattggtggaacaaggatggtggacattctcaggcaaaatccaacag

SEQ ID NO: 60248 - DNA, 60 bp, Artificial
  Synthetic oligonucleotide
gattacaaacaaggtgaactctgttatcgagaaaatgaacactcaattcacagctgtggg

SEQ ID NO: 60249 - DNA, 60 bp, Artificial
  Synthetic oligonucleotide
gattacaaacaaggtgaactctgtaatcgagaaaatgaacactcaattcacagctgtggg

SEQ ID NO: 60250 - DNA, 60 bp, Artificial
  Synthetic oligonucleotide
gattacaaacaaggtgaactctataatcgagaaaatgaacactcaattcacagctgtggg

SEQ ID NO: 60251 - DNA, 60 bp, Artificial
  Synthetic oligonucleotide
cccagtgcggggaaagatcctaagaaaactggaggacctatctacaggagagtaaatgga

SEQ ID NO: 60252 - DNA, 60 bp, Artificial
  Synthetic oligonucleotide
cccagtgcggggaaagatcctaagaaaactggaggacctatctacaggagagtagatgga

SEQ ID NO: 60253 - DNA, 60 bp, Artificial
  Synthetic oligonucleotide
cccagtgcggggaaagatcctaagaaaactggaggacctatatacaggagagtagatgga

SEQ ID NO: 60254 - DNA, 60 bp, Artificial
  Synthetic oligonucleotide
gcaaggttcaacactccccagaaggtctggagccgcaggtgctgcagtgaaaggagttgg

SEQ ID NO: 60255 - DNA, 60 bp, Artificial
  Synthetic oligonucleotide
ctacatatgcagacacaatatgtataggctaccatgcgaacaactcaactgacactgttg

SEQ ID NO: 60256 - DNA, 60 bp, Artificial
  Synthetic oligonucleotide
ctacagatgcagacacaatatgtataggctaccatgcgaacaactcaactgacactgttg

SEQ ID NO: 60257 - DNA, 60 bp, Artificial
  Synthetic oligonucleotide
tgcaagccttgcaactattgcttgaagtggagcaagagataagaactttctcgtttcagc

SEQ ID NO: 60258 - DNA, 60 bp, Artificial
  Synthetic oligonucleotide
aatttgcaggcctatcagaaacgaatgggggtgcagatgcagcgattcaagtgatcctct

SEQ ID NO: 60259 - DNA, 60 bp, Artificial
  Synthetic oligonucleotide
aatttgcaggcctatcagaaacgaatgggggtgcagatgcaacgattcaagtgatccgct

SEQ ID NO: 60260 - DNA, 60 bp, Artificial
  Synthetic oligonucleotide
ggaggaagcaaatattaagaacacaagagtctgaatgtgtctgtgtaaacggttcatgtt

SEQ ID NO: 60261 - DNA, 60 bp, Artificial
  Synthetic oligonucleotide
ggatcaatgaccgaaacttctggaggggtgaaaatggacgaaggacaaggattgcatatg

SEQ ID NO: 60262 - DNA, 60 bp, Artificial
  Synthetic oligonucleotide
catttacagctacatatgcagacacaatatgtataggctaccatgcgaacaactcaaccg

SEQ ID NO: 60263 - DNA, 60 bp, Artificial
  Synthetic oligonucleotide
gggtgatgccccattccttgatcggctccgccgagatcaaaagtctctaagaagaagagg

SEQ ID NO: 60264 - DNA, 60 bp, Artificial
  Synthetic oligonucleotide
tgccccattccttgatcggctccgccgagatcaaaagtccctaaaaggaagaggcagcac

SEQ ID NO: 60265 - DNA, 60 bp, Artificial
  Synthetic oligonucleotide
taatgaagggggtatacattaatactgctttgcttaatgcatcctgtgcagcaatggatg

SEQ ID NO: 60266 - DNA, 60 bp, Artificial
  Synthetic oligonucleotide
ctcttgaactgagaagcagatactgggccataaggaccagaagtggagggaacactaatc

SEQ ID NO: 60267 - DNA, 60 bp, Artificial
  Synthetic oligonucleotide
gcatggagttttctctcactgacccgaggcttgagccacacaaatgggagaagtactgtg

SEQ ID NO: 60268 - DNA, 60 bp, Artificial
  Synthetic oligonucleotide
gcatggagttttctcttactgacccaagacttgagccacacaaatgggagaagtactgtg

SEQ ID NO: 60269 - DNA, 60 bp, Artificial
  Synthetic oligonucleotide
gcatggagttctccctcactgacccaagacttgagccacacaaatgggagaagtactgtg

SEQ ID NO: 60270 - DNA, 60 bp, Artificial
  Synthetic oligonucleotide
cacaaatgggagaagtactgtgttcttgagataggagatatgcttctaaggagtgccata

SEQ ID NO: 60271 - DNA, 60 bp, Artificial
  Synthetic oligonucleotide
gatataagcgatttgaagcaatatgatagtgacgagcctgaattaaggtcactctcaagt

SEQ ID NO: 60272 - DNA, 60 bp, Artificial
  Synthetic oligonucleotide
gccagatttgtatgattacaaggaaaatagattcatcgagattggagtgacaaggaggga

SEQ ID NO: 60273 - DNA, 60 bp, Artificial
  Synthetic oligonucleotide
aaagatataagcgatttgaagcaatatgatagtgacgagcctgaattaaggtcactttca

SEQ ID NO: 60274 - DNA, 60 bp, Artificial
  Synthetic oligonucleotide
gcatggaattttccctcactgacccaagacttgagccacacaaatgggagaagtactgtg

SEQ ID NO: 60275 - DNA, 60 bp, Artificial
  Synthetic oligonucleotide
gccagatctgtacgattacaaagagaatagattcatcgagattggagtgacaaggaggga

SEQ ID NO: 60276 - DNA, 60 bp, Artificial
  Synthetic oligonucleotide
cggtttcatcataaaaggaagatctcacttaaggaatgacaccgatgtggtaaattttgt

SEQ ID NO: 60277 - DNA, 60 bp, Artificial
  Synthetic oligonucleotide
taaattttgtgagcatggagttttctctcactgacccaagacttgagccacacaaatggg

SEQ ID NO: 60278 - DNA, 60 bp, Artificial
  Synthetic oligonucleotide
gcatggagttttctctcactgacccgagacttgagccacacaaatgggagaagtactgtg

SEQ ID NO: 60279 - DNA, 60 bp, Artificial
  Synthetic oligonucleotide
atgtcttgaaacgatggaggttgttcagcaaacacgggtggacaaactaacgcaaggacg

SEQ ID NO: 60280 - DNA, 60 bp, Artificial
  Synthetic oligonucleotide
tcacaagctttttctatcgttatgggtttgttgccaatttcagcatggagcttcctagtt

SEQ ID NO: 60281 - DNA, 59 bp, Artificial
  Synthetic oligonucleotide
gcaagccttacagctattgcttgaagtagaacaagagataagaactttctcgtttcagc

SEQ ID NO: 60282 - DNA, 60 bp, Artificial
  Synthetic oligonucleotide
aatctacagagattcgcttggagaagccgtaatgagaatgggagaccttcactacctcca

SEQ ID NO: 60283 - DNA, 60 bp, Artificial
  Synthetic oligonucleotide
tggggtcctcatcggagggcttgaatggaatggtaacacggttcaagtctctgaaaatct

SEQ ID NO: 60284 - DNA, 60 bp, Artificial
  Synthetic oligonucleotide
ctgaaaatctacagagattcgcttggagaagccgtaatgagaatgggagatcttcactac

SEQ ID NO: 60285 - DNA, 60 bp, Artificial
  Synthetic oligonucleotide
ctgaaaatctacagagattcgcttggagaagccgtaatgagaatgggagaccttcactac

SEQ ID NO: 60286 - DNA, 60 bp, Artificial
  Synthetic oligonucleotide
aaaatctacagagattcgcttggagaagccgtaatgagaatgggagatcttcactacctc

SEQ ID NO: 60287 - DNA, 60 bp, Artificial
  Synthetic oligonucleotide
gggtcctcatcggagggcttgaatggaatggtaacacggttcaagtctctgaaaatctac

SEQ ID NO: 60288 - DNA, 60 bp, Artificial
  Synthetic oligonucleotide
tgaggtcctcatcggagggcttgaatggaatggtaacacagttcgagtctctgaaaatct

SEQ ID NO: 60289 - DNA, 57 bp, Artificial
  Synthetic oligonucleotide
ctgaaaatctacagagattcgcttggagaagccgtaatgagaatgggagaccttcac

SEQ ID NO: 60290 - DNA, 60 bp, Artificial
  Synthetic oligonucleotide
cctcatcggagggcttgaatggaatggtaacacagttcgagtctctgaaaatctacagag

SEQ ID NO: 60291 - DNA, 60 bp, Artificial
  Synthetic oligonucleotide
ctcgtgtattgaaacgatggaggttgttcagcaaacacgagtggacaaactaacacaagg

SEQ ID NO: 60292 - DNA, 60 bp, Artificial
  Synthetic oligonucleotide
ctcgtgtattgaaacgatggaggttgttcagcaaacacgagtggacaaactgacacaagg

SEQ ID NO: 60293 - DNA, 60 bp, Artificial
  Synthetic oligonucleotide
gcacacagaatgccattaacgggattacaaacaaggtgaactctgttatcgagaaaatga

SEQ ID NO: 60294 - DNA, 60 bp, Artificial
  Synthetic oligonucleotide
gcaggcaaaccatttgaatggatgtcaatccgactttgcttttcctgaaagtgccagcac

SEQ ID NO: 60295 - DNA, 60 bp, Artificial
  Synthetic oligonucleotide
gatctactcaactgtcgccagttcactggtgcttttggtctccctgggggcaatcagttt

SEQ ID NO: 60296 - DNA, 60 bp, Artificial
  Synthetic oligonucleotide
tgagggacggctgattcagaacagcataacaatagagagaatggtgctctctgcttttga

SEQ ID NO: 60297 - DNA, 54 bp, Artificial
  Synthetic oligonucleotide
gacgactaattcaaaatagcataacaatagagagaatggtgctctctgcttttg

SEQ ID NO: 60298 - DNA, 60 bp, Artificial
  Synthetic oligonucleotide
ggaagaagcgaatattaagaacacaagagtctgaatgtgtctgtgtgaacggttcatgtt

SEQ ID NO: 60299 - DNA, 60 bp, Artificial
  Synthetic oligonucleotide
ggaggaagcgaatattaagaacacaagagtctgaatgtgtctgtgtaaacggttcatgtt

SEQ ID NO: 60300 - DNA, 54 bp, Artificial
  Synthetic oligonucleotide
aaaatgcaattggggtcctcatcggaggacttgaatggaatgataacacagttc

SEQ ID NO: 60301 - DNA, 60 bp, Artificial
  Synthetic oligonucleotide
atgcaaggttcaacacttcccagaaggtctggagccgcaggtgctgcagtaaaaggagtt

SEQ ID NO: 60302 - DNA, 60 bp, Artificial
  Synthetic oligonucleotide
aatggactccaacactgtgtcaagctttcaggtagactgctttctttggcatatccgcaa

SEQ ID NO: 60303 - DNA, 60 bp, Artificial
  Synthetic oligonucleotide
ggctacattgagggcaagctttctcaaatgtccaaagaagtaaatgctagaattgagccc

SEQ ID NO: 60304 - DNA, 60 bp, Artificial
  Synthetic oligonucleotide
gggtttgagatgatttgggatcctaatggatggacagagactgatagtaggttctctgtg

SEQ ID NO: 60305 - DNA, 60 bp, Artificial
  Synthetic oligonucleotide
ataagtcctgcctgcctgcttgtgtgtatgggcttgcagtagcaagtgggcatgactttg

SEQ ID NO: 60306 - DNA, 60 bp, Artificial
  Synthetic oligonucleotide
ctcgtgtattgaaacgatggaggttgttcagcaaacaagagtggacaaactgacacaagg

SEQ ID NO: 60307 - DNA, 60 bp, Artificial
  Synthetic oligonucleotide
aaactcgtgtattgaaacgatggaggttgttcagcaaacaagagtggacaaactgacaca

SEQ ID NO: 60308 - DNA, 60 bp, Artificial
  Synthetic oligonucleotide
gaacatagtgagaagagctgcagtatcagcagatccactagcatctttattggaaatgtg

SEQ ID NO: 60309 - DNA, 60 bp, Artificial
  Synthetic oligonucleotide
aggaacatagtgagaagagctgcagtatcagcagatccactagcatctttattggaaatg

SEQ ID NO: 60310 - DNA, 60 bp, Artificial
  Synthetic oligonucleotide
aacatagtgagaagagctgcagtatcagcagatccactagcatctttattggaaatgtgc

SEQ ID NO: 60311 - DNA, 60 bp, Artificial
  Synthetic oligonucleotide
ggtctccctgggggcaatcagtttctggatgtgttctaatgggtctttgcagtgtagaat

SEQ ID NO: 60312 - DNA, 60 bp, Artificial
  Synthetic oligonucleotide
tatatacagcaaagacaacagcataaggattggttccaaaggagacatttttgtcataag

SEQ ID NO: 60313 - DNA, 60 bp, Artificial
  Synthetic oligonucleotide
tatatacagcaaagacaatagcataaggattggttccaaaggagacatttttgtcataag

SEQ ID NO: 60314 - DNA, 60 bp, Artificial
  Synthetic oligonucleotide
aaaggcaattgtggcccagtactttctaatggagcaaatggagtaaaggggttttcattt

SEQ ID NO: 60315 - DNA, 60 bp, Artificial
  Synthetic oligonucleotide
ggactgcataaggccttgtttctgggttgagttaatcagaggacaacccaaggagagcac

SEQ ID NO: 60316 - DNA, 60 bp, Artificial
  Synthetic oligonucleotide
tatatacagcaaagacaatagcataaggattggttccaaaggagacatttttgtcatgag

SEQ ID NO: 60317 - DNA, 60 bp, Artificial
  Synthetic oligonucleotide
cagacaccatatgtataggctaccatgcgaacaactcaaccgacactgttgacacagtac

SEQ ID NO: 60318 - DNA, 60 bp, Artificial
  Synthetic oligonucleotide
ggaaatgtcaaggcactggttcatgctcatgcccaagcagaaagtggctggccctctttg

SEQ ID NO: 60319 - DNA, 60 bp, Artificial
  Synthetic oligonucleotide
ggttcatgctcatgcccaagcagaaagtggcaggttccctttatatcagaatggaccagg

SEQ ID NO: 60320 - DNA, 60 bp, Artificial
  Synthetic oligonucleotide
actggttcatgctcatgcccaagcagaaagtggcaggttccctttgcatcagaatggacc

SEQ ID NO: 60321 - DNA, 60 bp, Artificial
  Synthetic oligonucleotide
ttgtgttcacgctcaccgtgcccggtgagcgaggactgcagcgtagacgctttgtccaaa

SEQ ID NO: 60322 - DNA, 60 bp, Artificial
  Synthetic oligonucleotide
gaaatatagtctcgttatggataagccattcaattcagactggagaaaaaaaccaccctg

SEQ ID NO: 60323 - DNA, 60 bp, Artificial
  Synthetic oligonucleotide
gctggcaattcccctctttgcccaatcagtgggtgggctatatacagcaaagacaatagc

SEQ ID NO: 60324 - DNA, 60 bp, Artificial
  Synthetic oligonucleotide
ccgtcaaggacaggagtccttatagaaccttaatgagctgccccattggtgaagctccat

SEQ ID NO: 60325 - DNA, 56 bp, Artificial
  Synthetic oligonucleotide
ccgtcaaggacaggagtccttatagaaccttaatgagctgccccattggtgaagct

SEQ ID NO: 60326 - DNA, 60 bp, Artificial
  Synthetic oligonucleotide
cgtcaaggacaggagtccttatagaaccttaatgagctgcccgattggtgaagctccatc

SEQ ID NO: 60327 - DNA, 60 bp, Artificial
  Synthetic oligonucleotide
cttgtttctgggtagagttaatcagaggacaacccaaggagagcacaatctggactagtg

SEQ ID NO: 60328 - DNA, 60 bp, Artificial
  Synthetic oligonucleotide
gcattaactgattggtcaggatacagtggaagttttgtccaacatcctgaattaacagga

SEQ ID NO: 60329 - DNA, 60 bp, Artificial
  Synthetic oligonucleotide
gcagtggggttttcggtgataatccgcgttctaatgatgggaaaggcaattgtggcccag

SEQ ID NO: 60330 - DNA, 60 bp, Artificial
  Synthetic oligonucleotide
cagatagggtacatatgcagtggggttttcggtgataacccgcgttctaatgatgggaaa

SEQ ID NO: 60331 - DNA, 60 bp, Artificial
  Synthetic oligonucleotide
ggtacatatgcagtggggttttcggtgataatccgcgttctaatgatgggaaaggcaatt

SEQ ID NO: 60332 - DNA, 60 bp, Artificial
  Synthetic oligonucleotide
ggacaggagtccttatagaaccttaatgagctgcccgattggtgaagctccatctccgta

SEQ ID NO: 60333 - DNA, 60 bp, Artificial
  Synthetic oligonucleotide
ggaatataatctcgttatggataagccattcaattcagactagagaaaaaaaccatcctg

SEQ ID NO: 60334 - DNA, 60 bp, Artificial
  Synthetic oligonucleotide
tggacagagcagttaaactgtatagaaagcttaagagggagataacattccacggggcca

SEQ ID NO: 60335 - DNA, 60 bp, Artificial
  Synthetic oligonucleotide
cgtctgatgattttgctctgattgtaaatgcacccaatcatgaagggattcaagcaggag

SEQ ID NO: 60336 - DNA, 60 bp, Artificial
  Synthetic oligonucleotide
ttgaaaactcatgtcttgaaacgatggaggttgttcagcaaacacgggtggacaaactaa

SEQ ID NO: 60337 - DNA, 60 bp, Artificial
  Synthetic oligonucleotide
cacttaagaaatgacactgacgtggtaaactttgtgagcatggaattttccctcactgat

SEQ ID NO: 60338 - DNA, 60 bp, Artificial
  Synthetic oligonucleotide
actgacgtggtaaactttgtgagcatggaattttccctcactgatccaagacttgaactg

SEQ ID NO: 60339 - DNA, 60 bp, Artificial
  Synthetic oligonucleotide
agcttaacaatagagagaatggtgctctctgcttttgacgagaggaggaataaatatctg

SEQ ID NO: 60340 - DNA, 60 bp, Artificial
  Synthetic oligonucleotide
atgttgaaagatgagccttccaaccgaggtcgaaacgtacgttctctctatcgtcccatc

SEQ ID NO: 60341 - DNA, 60 bp, Artificial
  Synthetic oligonucleotide
ctcacttaaggaatgacaccgatgtggtaaactttgtgagcatggaattttccctcactg

SEQ ID NO: 60342 - DNA, 53 bp, Artificial
  Synthetic oligonucleotide
gaagtggaacaagagataagaactttctcgtttcagcttatttaatgataaaa

SEQ ID NO: 60343 - DNA, 60 bp, Artificial
  Synthetic oligonucleotide
tctctttgtcctatcagtgggtgggctatatacagcaaagacaacagcataagaattggt

SEQ ID NO: 60344 - DNA, 60 bp, Artificial
  Synthetic oligonucleotide
gttcgcaccggaatggatcccaggatgtgctctctgatgcagggttcaactctccccagg

SEQ ID NO: 60345 - DNA, 60 bp, Artificial
  Synthetic oligonucleotide
ggatcatcaggaactgggaaactgttaaaattcagtggtcacaagaccccacaatgctgt

SEQ ID NO: 60346 - DNA, 53 bp, Artificial
  Synthetic oligonucleotide
cagaaactgggaaactgttaaaattcagtggtcccagaatcctacaatgctgt

SEQ ID NO: 60347 - DNA, 60 bp, Artificial
  Synthetic oligonucleotide
ggatcatcagaaactgggaaactgttaaaattcagtggtcacaggatcctacaatgctat

SEQ ID NO: 60348 - DNA, 60 bp, Artificial
  Synthetic oligonucleotide
gatgagtcttctaaccgaggtcgaaacgtacgttctctctatcatcccttcaggccccct

SEQ ID NO: 60349 - DNA, 60 bp, Artificial
  Synthetic oligonucleotide
gatggaatgggctggctaacaatcggaatttctggtccagatgatggagcagtggctgta

SEQ ID NO: 60350 - DNA, 60 bp, Artificial
  Synthetic oligonucleotide
cgatggcatgggctggctaacaatcggaatttctggtccagatgatggagcagtggctgt

SEQ ID NO: 60351 - DNA, 60 bp, Artificial
  Synthetic oligonucleotide
cgcatgtcatgatggcatgggctggctaacaatcggaatttctggtccagatgatggagc

SEQ ID NO: 60352 - DNA, 60 bp, Artificial
  Synthetic oligonucleotide
tgcatgtcacgatggcatgggctggctaacaatcggaatttctggtccagatgatggagc

SEQ ID NO: 60353 - DNA, 60 bp, Artificial
  Synthetic oligonucleotide
ccgcaaacaagttgcagaccaagagctaggtgatgccccattccttgatcggctccgccg

SEQ ID NO: 60354 - DNA, 60 bp, Artificial
  Synthetic oligonucleotide
ggctaatgtactgattgggcaaggagacgtagtgttggtaatgaaacggaaacgggactc

SEQ ID NO: 60355 - DNA, 60 bp, Artificial
  Synthetic oligonucleotide
aggctaatgtactgattgggcaaggagacgtagtgttggtaatgaaacggaaacgggact

SEQ ID NO: 60356 - DNA, 60 bp, Artificial
  Synthetic oligonucleotide
ggagacgtagtgttggtaatgaaacggaaacgggactcaagcatacttactgacagccag

SEQ ID NO: 60357 - DNA, 60 bp, Artificial
  Synthetic oligonucleotide
agaactaaagagggaaggcgaaagaccaatttgtacggcttcatcataaaaggaagatct

SEQ ID NO: 60358 - DNA, 60 bp, Artificial
  Synthetic oligonucleotide
atccaaatgtgcaccgaactcaaactcagtgattatgagggacggctgattcagaacagc

SEQ ID NO: 60359 - DNA, 60 bp, Artificial
  Synthetic oligonucleotide
gtgatctgaagcaatatgatagtgatgaaccagaatttagatcgcttgcaagttggattc

SEQ ID NO: 60360 - DNA, 60 bp, Artificial
  Synthetic oligonucleotide
atgagggacgactgatccaaaacagcttaacaatagagagaatggtgctctctgcttttg

SEQ ID NO: 60361 - DNA, 60 bp, Artificial
  Synthetic oligonucleotide
cggcacaaattgaaaatgacggagaatagttttgagcaaataacatttatgcaagcctta

SEQ ID NO: 60362 - DNA, 60 bp, Artificial
  Synthetic oligonucleotide
gggcggctgatccagaacagcttaacaatagagagaatggtgctctctgcttttgacgag

SEQ ID NO: 60363 - DNA, 60 bp, Artificial
  Synthetic oligonucleotide
gggtacaccatggatacagtcaacaggacacatcagtactcagaaagaggaagatggaca

SEQ ID NO: 60364 - DNA, 60 bp, Artificial
  Synthetic oligonucleotide
ggggcaatcagtttctggatgtgttctaatgggtctttgcagtgcagaatatgcatctga

SEQ ID NO: 60365 - DNA, 60 bp, Artificial
  Synthetic oligonucleotide
ccaatttgtacggattcatcataaaaggaagatcccacttaagaaatgacactgacgtgg

SEQ ID NO: 60366 - DNA, 60 bp, Artificial
  Synthetic oligonucleotide
ggacgattctacatccaaatgtgcaccgaacttaaactcaatgattatgagggacggctg

SEQ ID NO: 60367 - DNA, 60 bp, Artificial
  Synthetic oligonucleotide
tctgatgtcacaatctcgcactcgcgagatactaacaagaaccactgtggatcatatggc

SEQ ID NO: 60368 - DNA, 60 bp, Artificial
  Synthetic oligonucleotide
gacacagactgaagataacagagaatagtttcgagcaaataacatttatgcaagccttgc

SEQ ID NO: 60369 - DNA, 60 bp, Artificial
  Synthetic oligonucleotide
ttgaagaagtgagacacagactgaagataacagagaatagtttcgagcaaataacattta

SEQ ID NO: 60370 - DNA, 60 bp, Artificial
  Synthetic oligonucleotide
atgatggagcagtggctgtactaaaatacaacggcataataactgaaaccataaaaagtt

SEQ ID NO: 60371 - DNA, 60 bp, Artificial
  Synthetic oligonucleotide
cttaaaagtgccagcacaaaatgctataagcacaactttcccttatactggagaccctcc

SEQ ID NO: 60372 - DNA, 60 bp, Artificial
  Synthetic oligonucleotide
gctttgaacaaataacgtttatgcaagccttacaactattgcttgaagtggagcaagaga

SEQ ID NO: 60373 - DNA, 60 bp, Artificial
  Synthetic oligonucleotide
taagagaaccttttatatcatgttctcacttggaatgcagaaccttttttctaacccaag

SEQ ID NO: 60374 - DNA, 60 bp, Artificial
  Synthetic oligonucleotide
cagcggaagtttcgttcaacatcctgagctaacaggattggactgtatgaggccttgctt

SEQ ID NO: 60375 - DNA, 60 bp, Artificial
  Synthetic oligonucleotide
ctacaagaggagttcagattgcttcaaatgagaatgtggaggctatggactctagtaccc

SEQ ID NO: 60376 - DNA, 60 bp, Artificial
  Synthetic oligonucleotide
caagaggaaagctttctacaagaggagttcagattgcttcaaatgagaatgtggaggcta

SEQ ID NO: 60377 - DNA, 60 bp, Artificial
  Synthetic oligonucleotide
gactcaaggcgccttactgaatgacaagcattcaaatgggaccgttaaggacagaagccc

SEQ ID NO: 60378 - DNA, 60 bp, Artificial
  Synthetic oligonucleotide
tggggtcctcatcggagggcttgaatggaatggtaacacggttcgagtctctgaaaatct

SEQ ID NO: 60379 - DNA, 60 bp, Artificial
  Synthetic oligonucleotide
gggtcctcatcggagggcttgaatggaatggtaacacggttcgagtctctgaaaatctac

SEQ ID NO: 60380 - DNA, 60 bp, Artificial
  Synthetic oligonucleotide
tggagtcctcatcggagggcttgaatggaatggtaacacggttcgagtctctgaaaatct

SEQ ID NO: 60381 - DNA, 60 bp, Artificial
  Synthetic oligonucleotide
cctcatcggagggcttgaatggaatggtaacacggttcgagtctctgaaaatctacagag

SEQ ID NO: 60382 - DNA, 60 bp, Artificial
  Synthetic oligonucleotide
cactcacttgatgatctggcattccaacctgaatgatgccacatatcagagaacaagagc

SEQ ID NO: 60383 - DNA, 60 bp, Artificial
  Synthetic oligonucleotide
ggagcagacggagtaaaggggttttcatacagatatggcaatggtgtttggataggaagg

SEQ ID NO: 60384 - DNA, 60 bp, Artificial
  Synthetic oligonucleotide
gatccctgggttttgcttaatgcttcttggttcaactccttcctcacacatgcattgagt

SEQ ID NO: 60385 - DNA, 52 bp, Artificial
  Synthetic oligonucleotide
cccaaaggagtggaagaaggttccattggaaaggtctgcaggacattgttgg

SEQ ID NO: 60386 - DNA, 60 bp, Artificial
  Synthetic oligonucleotide
tgcacacatatggaagtatgcttcatgtattcagatttccacttcatcaatgagcggggt

SEQ ID NO: 60387 - DNA, 53 bp, Artificial
  Synthetic oligonucleotide
ccccaaaggggtggaagaaggttccattggaaaggtctgtcggacgttgttgg

SEQ ID NO: 60388 - DNA, 56 bp, Artificial
  Synthetic oligonucleotide
cattgagggcaagctttcccaaatgtctagagaagtaaatgctagaatcgagcctt

SEQ ID NO: 60389 - DNA, 60 bp, Artificial
  Synthetic oligonucleotide
actgacgtggtaaattttgtgagcatggaattttccctcactgatccaagacttgaaccg

SEQ ID NO: 60390 - DNA, 60 bp, Artificial
  Synthetic oligonucleotide
tggttctaagaactgccataggtcaagtggcaaggcccatgtttctatacgtgaggacaa

SEQ ID NO: 60391 - DNA, 60 bp, Artificial
  Synthetic oligonucleotide
acaggagaagaaatggcaacaaaagccgactacacactagatgaagaaagtagagccaga

SEQ ID NO: 60392 - DNA, 60 bp, Artificial
  Synthetic oligonucleotide
ttgagataggagatatggttctaagaactgccataggtcaagtggcaaggcccatgtttc

SEQ ID NO: 60393 - DNA, 60 bp, Artificial
  Synthetic oligonucleotide
ctatgtggatggattcgagccgaatggctacattgagggcaagctttcccaaatgtctag

SEQ ID NO: 60394 - DNA, 59 bp, Artificial
  Synthetic oligonucleotide
cctcacacatgcactaagatagttgtggcattgctactatttgctatccatactgtcca

SEQ ID NO: 60395 - DNA, 60 bp, Artificial
  Synthetic oligonucleotide
ttgatcttggggggttatatgaatcaattgaggagtgcctaattaatgatccctgggttt

SEQ ID NO: 60396 - DNA, 60 bp, Artificial
  Synthetic oligonucleotide
ggacggttgtaaacagtatttgtaacactacaggggttggaaaaccaaggtttctcccag

SEQ ID NO: 60397 - DNA, 60 bp, Artificial
  Synthetic oligonucleotide
gggatcggaatatggcatggacggtggtaaacagtatttgtaacactacaggggttggga

SEQ ID NO: 60398 - DNA, 60 bp, Artificial
  Synthetic oligonucleotide
agaaggaataccgctttatgatgcggtcagatgcatgaagacgttctttgggtggaagga

SEQ ID NO: 60399 - DNA, 60 bp, Artificial
  Synthetic oligonucleotide
caaagatgtgagtgatctgaagcaatatgatagtgatgaaccagaacttagatcgcttgc

SEQ ID NO: 60400 - DNA, 60 bp, Artificial
  Synthetic oligonucleotide
tgcttctcattgttcaagctcttagggacaaccttgaacctggaacctttgatcttgggg

SEQ ID NO: 60401 - DNA, 60 bp, Artificial
  Synthetic oligonucleotide
tgcttgtatgcgtctccacaattagagggattctcagctgaatcaaggaaattgcttctc

SEQ ID NO: 60402 - DNA, 60 bp, Artificial
  Synthetic oligonucleotide
ccaatttatacggattcatcataaaaggaagatcccacttaagaaatgacactgacgtgg

SEQ ID NO: 60403 - DNA, 60 bp, Artificial
  Synthetic oligonucleotide
cctcactgatccaagacttgaaccgcataaatgggagaagtactgcatccttgagatagg

SEQ ID NO: 60404 - DNA, 51 bp, Artificial
  Synthetic oligonucleotide
acagcagaagtgtctcattgcagagctacagagtacataatgaagggagta

SEQ ID NO: 60405 - DNA, 60 bp, Artificial
  Synthetic oligonucleotide
ccgagaggaatgagcaaggacaaaccctatggagtagaacgagcgatgctggatcagatc

SEQ ID NO: 60406 - DNA, 60 bp, Artificial
  Synthetic oligonucleotide
tggtggggtaagaatggtggacatcctcaggcaaaacccgacagaggaacaagcagtgga

SEQ ID NO: 60407 - DNA, 60 bp, Artificial
  Synthetic oligonucleotide
agagggtggtggtaagcattgaccgttttttaagagtaagagaccaacaagggaacgtgc

SEQ ID NO: 60408 - DNA, 60 bp, Artificial
  Synthetic oligonucleotide
tcacagtcctaggaaaggatgcaggtgctttaaatgaagacccagacgaaggaacaactg

SEQ ID NO: 60409 - DNA, 60 bp, Artificial
  Synthetic oligonucleotide
agggaagacgaaagaccaatttgtacggattcatcataaaaggaagatcccacttaagaa

SEQ ID NO: 60410 - DNA, 60 bp, Artificial
  Synthetic oligonucleotide
gagggaaggcgaaagaccaatttgtacgggttcatcataaaaggaagatcccacttaagg

SEQ ID NO: 60411 - DNA, 60 bp, Artificial
  Synthetic oligonucleotide
aaggaaggcgaaagaccaatttatacggattcatcataaaaggaagatcccacttaagaa

SEQ ID NO: 60412 - DNA, 60 bp, Artificial
  Synthetic oligonucleotide
agagggaaggcgaaagaccaatttgtacgggttcatcataaaaggaagatcccacttaag

SEQ ID NO: 60413 - DNA, 60 bp, Artificial
  Synthetic oligonucleotide
cgacactgttgacacagtactcgaaaagaacgtgacagtgacacactctgtcaacctact

SEQ ID NO: 60414 - DNA, 60 bp, Artificial
  Synthetic oligonucleotide
acgtgacagtgacacactctgtcaacctacttgaggacagtcacaacggaaaactatgcc

SEQ ID NO: 60415 - DNA, 60 bp, Artificial
  Synthetic oligonucleotide
ctcgaaaagaacgtgacagtgacacactctgtcaacctacttgaggacagtcacaacgga

SEQ ID NO: 60416 - DNA, 51 bp, Artificial
  Synthetic oligonucleotide
gaaggatcttatttcttcggagacaatgcagaggagtacgacaattaatga

SEQ ID NO: 60417 - DNA, 60 bp, Artificial
  Synthetic oligonucleotide
actagatgaagaaagtagagccagaataaagaccaggctattcaccataagacaagagat

SEQ ID NO: 60418 - DNA, 60 bp, Artificial
  Synthetic oligonucleotide
tagatgaagaaagtagagccagaataaagaccaggctattcaccataagacaagagatgg

SEQ ID NO: 60419 - DNA, 60 bp, Artificial
  Synthetic oligonucleotide
gtagagccagaataaagaccaggctattcaccataagacaagagatggctagcagaggtc

SEQ ID NO: 60420 - DNA, 60 bp, Artificial
  Synthetic oligonucleotide
agctagaataaagaccaggctattcaccataagacaagagatggctagcagaggcctttg

SEQ ID NO: 60421 - DNA, 60 bp, Artificial
  Synthetic oligonucleotide
gggctagaatcaaaaccaggctattcaccataagacaagagatggctagcagaggccttt

SEQ ID NO: 60422 - DNA, 60 bp, Artificial
  Synthetic oligonucleotide
ccaggctattcaccataagacaagagatggctagcagaggcctttgggattcctttcgcc

SEQ ID NO: 60423 - DNA, 60 bp, Artificial
  Synthetic oligonucleotide
ccaggctattcaccataagacaagagatggctagcagaggcctttgggattcctttcgtc

SEQ ID NO: 60424 - DNA, 60 bp, Artificial
  Synthetic oligonucleotide
gattgcttatgagagaatgtgcaacatcctcaaaggtaaatttcaaacagctgcacaaag

SEQ ID NO: 60425 - DNA, 60 bp, Artificial
  Synthetic oligonucleotide
caaggattgcatatgagagaatgtgcaacatcctcaaaggaaaattccaaacagcagcac

SEQ ID NO: 60426 - DNA, 60 bp, Artificial
  Synthetic oligonucleotide
tggaggaacaaaatattaagaacacaagagtctgaatgtgtttgtataaacggttcgtgt

SEQ ID NO: 60427 - DNA, 60 bp, Artificial
  Synthetic oligonucleotide
aaagaatgtgcaacattctcaaagggaaatttcagacagctgcacagagagcaatgatgg

SEQ ID NO: 60428 - DNA, 60 bp, Artificial
  Synthetic oligonucleotide
gaatgtgcaacattctcaaagggaaatttcagacagctgcacaaagagcaatgatggatc

SEQ ID NO: 60429 - DNA, 60 bp, Artificial
  Synthetic oligonucleotide
gaatgtgcaacattctcaaagggaaatttcaagcagctgcacaaagagcaatgatggatc

SEQ ID NO: 60430 - DNA, 60 bp, Artificial
  Synthetic oligonucleotide
ccagagcccgaattgatgcacggattgattttgaatctggaaggataaagaaagaggagt

SEQ ID NO: 60431 - DNA, 60 bp, Artificial
  Synthetic oligonucleotide
tccagagcccgaattgatgcacggattgattttgaatctggaaggataaagaaagaggag

SEQ ID NO: 60432 - DNA, 60 bp, Artificial
  Synthetic oligonucleotide
gggaaggatcctaagaaaactggaggacccatatacaagagagtagatagaaagtggatg

SEQ ID NO: 60433 - DNA, 60 bp, Artificial
  Synthetic oligonucleotide
ggacggctgatccagaacagcttaacaatagaaagaatggtgctctctgcttttgacgag

SEQ ID NO: 60434 - DNA, 60 bp, Artificial
  Synthetic oligonucleotide
acccaaggtgctctattaaatgacaagcattcaaatgggaccgttaaggacagaagccct

SEQ ID NO: 60435 - DNA, 60 bp, Artificial
  Synthetic oligonucleotide
ctgggctataagaaccaggagcggaggaaacaccaaccaacagagagcatctgcagggca

SEQ ID NO: 60436 - DNA, 60 bp, Artificial
  Synthetic oligonucleotide
ggaagactgattcagaacagcttaacaatagagagaatggtgctctctgcttttgacgag

SEQ ID NO: 60437 - DNA, 58 bp, Artificial
  Synthetic oligonucleotide
atgaaggatcttatttcttcggagacaatgctgaggagtacgacaattaaggaaaaat

SEQ ID NO: 60438 - DNA, 60 bp, Artificial
  Synthetic oligonucleotide
gactccaacactgtgtcaagctttcaggtagactgctttctttggcatatccgcaaacgg

SEQ ID NO: 60439 - DNA, 60 bp, Artificial
  Synthetic oligonucleotide
tcaagaaatacacatcaggaagacaggagaaaaacccatcacttaggatgaaatggatga

SEQ ID NO: 60440 - DNA, 60 bp, Artificial
  Synthetic oligonucleotide
aagaagtacacatcaggaagacaggagaaaaaccccgcacttagaatgaaatggatgatg

SEQ ID NO: 60441 - DNA, 60 bp, Artificial
  Synthetic oligonucleotide
agaaatacacatcaggaagacaggagaaaaacccgtcacttaggatgaaatggatgatgg

SEQ ID NO: 60442 - DNA, 60 bp, Artificial
  Synthetic oligonucleotide
agaaatacacatcaggaagacaggagaaaaacccatcacttaggatgaaatggatgatgg

SEQ ID NO: 60443 - DNA, 60 bp, Artificial
  Synthetic oligonucleotide
ttgggaaaagggcaacagctatactcagaaaagcaaccaggagattgattcaactgatag

SEQ ID NO: 60444 - DNA, 60 bp, Artificial
  Synthetic oligonucleotide
ctgtgtaaacggttcatgttttaccataatgaccgatggcccgagtaatgggcctgcctc

SEQ ID NO: 60445 - DNA, 60 bp, Artificial
  Synthetic oligonucleotide
ctgtgtaaacggttcatgttttaccataatgaccgatggcccgagtgatgggccggcctc

SEQ ID NO: 60446 - DNA, 60 bp, Artificial
  Synthetic oligonucleotide
ctgtgtaaacggttcatgttttaccataatgaccgatggcccgaataatggacctgcctc

SEQ ID NO: 60447 - DNA, 60 bp, Artificial
  Synthetic oligonucleotide
ctgtgtaaacggttcatgttttaccataatgaccgatggcccaagtaatgggccggcctc

SEQ ID NO: 60448 - DNA, 60 bp, Artificial
  Synthetic oligonucleotide
ggacaagagctcttgttcgcaccggaatggatcccaggatgtgctctttgatgcagggtt

SEQ ID NO: 60449 - DNA, 60 bp, Artificial
  Synthetic oligonucleotide
ttatgcaagccttacagctattgtttgaagtggaacaagagataagaactttctcgtttc

SEQ ID NO: 60450 - DNA, 60 bp, Artificial
  Synthetic oligonucleotide
ttggaaagatgagtcttctaaccgaggtcgaaacgtacgttctctctatcgtcccgtcag

SEQ ID NO: 60451 - DNA, 60 bp, Artificial
  Synthetic oligonucleotide
gagggaaggcgaaagaccaatttgtacggtttcatcataaaaggaagatcccacttaagg

SEQ ID NO: 60452 - DNA, 60 bp, Artificial
  Synthetic oligonucleotide
ggagggaaggcgaaagaccaatttgtacggtttcatcataaaaggaagatcccacttaag

SEQ ID NO: 60453 - DNA, 60 bp, Artificial
  Synthetic oligonucleotide
gcaatgggcaagcctcgtacaaaatcttcaaaatggagaaagggaggattattaagtcaa

SEQ ID NO: 60454 - DNA, 60 bp, Artificial
  Synthetic oligonucleotide
taacaggaatggactgcataaggccttgtttctgggttgagttaatcagaggacaaccca

SEQ ID NO: 60455 - DNA, 60 bp, Artificial
  Synthetic oligonucleotide
cccagtactttctaatggagcaaatggagtaaaggggttttcatttagatatggcaacgg

SEQ ID NO: 60456 - DNA, 60 bp, Artificial
  Synthetic oligonucleotide
gcaatgccaatattgttgctggacagggtgtgacttcaataatactagctggcaattccc

SEQ ID NO: 60457 - DNA, 60 bp, Artificial
  Synthetic oligonucleotide
cggttcgtgttttactataatgactgacggcccaagcaatgggcaagcctcgtacaaaat

SEQ ID NO: 60458 - DNA, 60 bp, Artificial
  Synthetic oligonucleotide
ggcgtaaacagtggcactgcaaactggtcatggccagacggcgctgatctgccattcacc

SEQ ID NO: 60459 - DNA, 60 bp, Artificial
  Synthetic oligonucleotide
gagcacaatctggactagtgggagcagcatttccttctgtggcgtaaacagtggcactgc

SEQ ID NO: 60460 - DNA, 60 bp, Artificial
  Synthetic oligonucleotide
ggacaacccaaggagagcacaatctggactagtgggagcagcatttccttctgtggcgta

SEQ ID NO: 60461 - DNA, 60 bp, Artificial
  Synthetic oligonucleotide
ggacggctgattcagaacagcttaacaatagagagaatggtgctctctgcttttgacgag

SEQ ID NO: 60462 - DNA, 60 bp, Artificial
  Synthetic oligonucleotide
ttcatgctcatgcccaagcagaaagtggcaggccctctttgtgtcagaatggaccaggcg

SEQ ID NO: 60463 - DNA, 60 bp, Artificial
  Synthetic oligonucleotide
gttctcacttggaatgcagaaccttttttctgactcaaggtgctctattaaatgacaagc

SEQ ID NO: 60464 - DNA, 60 bp, Artificial
  Synthetic oligonucleotide
aatccgactttacttttcttgaaagtgccagcacaaaatgctataagcacaactttcccc

SEQ ID NO: 60465 - DNA, 60 bp, Artificial
  Synthetic oligonucleotide
atctactcaactgtcgccagttcactggtgcttttggtctccctgggggcaatcagcttc

SEQ ID NO: 60466 - DNA, 60 bp, Artificial
  Synthetic oligonucleotide
gggaaggacatcagacatgagaaccgaaatcataaggatgatggaaagtgcaagaccaga

SEQ ID NO: 60467 - DNA, 60 bp, Artificial
  Synthetic oligonucleotide
ggtacttttgaattcacgagctttttctatcgttatgggtttgttgccaatttcagcatg

SEQ ID NO: 60468 - DNA, 60 bp, Artificial
  Synthetic oligonucleotide
cgcatgtcatgatggcatgggctggctaacaatcggaatttctggtccagatggtggagc

SEQ ID NO: 60469 - DNA, 60 bp, Artificial
  Synthetic oligonucleotide
tgcatgtcatgatggcatgggctggctaacaatcggaatttctggtccagataatggagc

SEQ ID NO: 60470 - DNA, 60 bp, Artificial
  Synthetic oligonucleotide
gatggcatgggctggctaacaatcggaatttctggtccagataatggagcagtggctgta

SEQ ID NO: 60471 - DNA, 60 bp, Artificial
  Synthetic oligonucleotide
ggcatgggctggctaacaatcggaatttctggtccagatggtggagcagtggctgtacta

SEQ ID NO: 60472 - DNA, 60 bp, Artificial
  Synthetic oligonucleotide
atcgttatgggtttgttgccaatttcagcatggagcttcctagttttggagtgtctggga

SEQ ID NO: 60473 - DNA, 53 bp, Artificial
  Synthetic oligonucleotide
cttaatgcatcctgtgcagcaatggatgattttcaattgatcccaatgataag

SEQ ID NO: 60474 - DNA, 53 bp, Artificial
  Synthetic oligonucleotide
cttaatgcatcctgtgcagcaatggatgattttcaattaatcccaatgataag

SEQ ID NO: 60475 - DNA, 60 bp, Artificial
  Synthetic oligonucleotide
aattaatatgagcaaaaagaaatcttacataaacaggacaggtacttttgaattcacgag

SEQ ID NO: 60476 - DNA, 60 bp, Artificial
  Synthetic oligonucleotide
gggacagtctgtctgatagttggaatagttagtctattattgcagataggaaatatagtc

SEQ ID NO: 60477 - DNA, 60 bp, Artificial
  Synthetic oligonucleotide
ataaccgttgggacagtctgtctgatagttggaatagttagtctattattgcagatagga

SEQ ID NO: 60478 - DNA, 60 bp, Artificial
  Synthetic oligonucleotide
tcacaagttttttctatcgttatggatttgttgccaatttcagcatggagcttcctagtt

SEQ ID NO: 60479 - DNA, 60 bp, Artificial
  Synthetic oligonucleotide
ccaattcccaggacacggagctctcctttaccatcactggagataacaccaaatggaatg

SEQ ID NO: 60480 - DNA, 60 bp, Artificial
  Synthetic oligonucleotide
cccgacatgacttcaagcaccgagatgtcaatgagaggagtgagagtcagcaaaatgggt

SEQ ID NO: 60481 - DNA, 60 bp, Artificial
  Synthetic oligonucleotide
atcccagcgcggggaaagatcctaagaaaactggaggacccatatacaagagagtagatg

SEQ ID NO: 60482 - DNA, 60 bp, Artificial
  Synthetic oligonucleotide
ctctagaagtggatttgagatgatttgggatcctaatggatggacagaaactgatagtag

SEQ ID NO: 60483 - DNA, 51 bp, Artificial
  Synthetic oligonucleotide
gaagtggaacaagagataagaactttctcgtttcagcttatttaatgataa

SEQ ID NO: 60484 - DNA, 53 bp, Artificial
  Synthetic oligonucleotide
tgcttgaagtggagcaagagataagaactttctcgtttcagcttatttaatga

SEQ ID NO: 60485 - DNA, 51 bp, Artificial
  Synthetic oligonucleotide
gacgactgattcaaaatagcataacaatagagagaatggtgctctctgctt

SEQ ID NO: 60486 - DNA, 60 bp, Artificial
  Synthetic oligonucleotide
gggtacgaagaatttacaatggttgggaaaagggcaacagctatactcagaaaagcaact

SEQ ID NO: 60487 - DNA, 60 bp, Artificial
  Synthetic oligonucleotide
gggttatatgaatcaattgaggagtgcctaattaatgatccctgggttttgcttaatgcg

SEQ ID NO: 60488 - DNA, 60 bp, Artificial
  Synthetic oligonucleotide
gcgtatgagagaatgtgcaacatcctcaaagggaaatttcaaacagctgcacaaagagca

SEQ ID NO: 60489 - DNA, 60 bp, Artificial
  Synthetic oligonucleotide
gtggatggcatgcaattctgctgcatttgaagatctaagagtatcaagcttcatcagagg

SEQ ID NO: 60490 - DNA, 60 bp, Artificial
  Synthetic oligonucleotide
gagctgcagtatcagcagatccactagcatctttattggaaatgtgccacagcacacaga

SEQ ID NO: 60491 - DNA, 60 bp, Artificial
  Synthetic oligonucleotide
ccagaacagcttaacaatagagagaatggtgctctctgcttttgacgagaggaggaataa

SEQ ID NO: 60492 - DNA, 60 bp, Artificial
  Synthetic oligonucleotide
tttgtgtcagaatggatcaggcgataatggataagaacatcatactgaaagcgaatttca

SEQ ID NO: 60493 - DNA, 60 bp, Artificial
  Synthetic oligonucleotide
tttgtgtcaaaatggaccaggcgataatggataagaacatcatactgaaagcgaatttca

SEQ ID NO: 60494 - DNA, 60 bp, Artificial
  Synthetic oligonucleotide
tttgtatcagaatggaccaggcgataatggataagaacatcatactgaaagcgaatttca

SEQ ID NO: 60495 - DNA, 60 bp, Artificial
  Synthetic oligonucleotide
gtgtgtgcagagacaattggcatggttcgaatcgaccttgggtgtcttttaatcaaaacc

SEQ ID NO: 60496 - DNA, 60 bp, Artificial
  Synthetic oligonucleotide
ggcagaacccgacagaagagcaggccgtggatatatgcaaggcagcaatgggtctgagaa

SEQ ID NO: 60497 - DNA, 60 bp, Artificial
  Synthetic oligonucleotide
agaatgccacggaaatcagggcatctgtaggaagaatgattggtggaattgggcgattct

SEQ ID NO: 60498 - DNA, 60 bp, Artificial
  Synthetic oligonucleotide
agaatgccacggaaatcagagcatctgtaggaagaatgattggtggaattgggcgattct

SEQ ID NO: 60499 - DNA, 60 bp, Artificial
  Synthetic oligonucleotide
ctctgaataggaatcagcctgctgcaacagcattggccaacacaatagaagtgttcagat

SEQ ID NO: 60500 - DNA, 60 bp, Artificial
  Synthetic oligonucleotide
cagcctgctgcaacagcattggccaacacaatagaagtgttcagattaaacggcctcacg

SEQ ID NO: 60501 - DNA, 60 bp, Artificial
  Synthetic oligonucleotide
cctgctgcaacagcattggccaacacaatagaagtgttcagattgaacggcctcacagcc

SEQ ID NO: 60502 - DNA, 60 bp, Artificial
  Synthetic oligonucleotide
gaaagaggagttcactgagatcatgaagatctgttccaccattgaagagctcagacggca

SEQ ID NO: 60503 - DNA, 60 bp, Artificial
  Synthetic oligonucleotide
tgactaaggggattttaggatttgtgttcacactcaccgtgcccagtgagcgaggactgc

SEQ ID NO: 60504 - DNA, 60 bp, Artificial
  Synthetic oligonucleotide
taaagacaagaccgattctgtcacctctgactaaggggattttaggatttgtgttcacgc

SEQ ID NO: 60505 - DNA, 60 bp, Artificial
  Synthetic oligonucleotide
tacctagaagagcatccaagtgctgggaaggatcctaagaaaactggaggacccatatat

SEQ ID NO: 60506 - DNA, 60 bp, Artificial
  Synthetic oligonucleotide
cctagaagagcatcccagtgctgggaaagatcctaagaaaactggaggacccatatataa

SEQ ID NO: 60507 - DNA, 60 bp, Artificial
  Synthetic oligonucleotide
acaacttatcagaggacaagagctcttgtccgcactgggatggatcccaggatgtgctct

SEQ ID NO: 60508 - DNA, 60 bp, Artificial
  Synthetic oligonucleotide
tggctacaggactaaggaatatcccgtctattcaatctagaggtctgtttggagccattg

SEQ ID NO: 60509 - DNA, 60 bp, Artificial
  Synthetic oligonucleotide
tctattcaatctagaggtctgtttggagccattgctggctttattgaggggggatggaca

SEQ ID NO: 60510 - DNA, 51 bp, Artificial
  Synthetic oligonucleotide
tctattcaatctagaggtctgtttggagccattgctggctttattgagggg

SEQ ID NO: 60511 - DNA, 60 bp, Artificial
  Synthetic oligonucleotide
caggactaaggaatatcccgtctattcaatctagaggtctgtttggagccattgctggct

SEQ ID NO: 60512 - DNA, 58 bp, Artificial
  Synthetic oligonucleotide
atgaaggatcttatttcttcggagacaatgcagaggagtacgacaattaatgaaaaat

SEQ ID NO: 60513 - DNA, 60 bp, Artificial
  Synthetic oligonucleotide
cagctacagatgcagacacaatatgtataggctaccatgcgaacaactcaaccgacactg

SEQ ID NO: 60514 - DNA, 60 bp, Artificial
  Synthetic oligonucleotide
agctacagatgcagacacaatatgtataggctaccatgcgaacaactcaaccgacactgt

SEQ ID NO: 60515 - DNA, 60 bp, Artificial
  Synthetic oligonucleotide
gctacagatgcagacacaatatgtataggctaccatgcgaacaactcaaccgacactgtt

SEQ ID NO: 60516 - DNA, 60 bp, Artificial
  Synthetic oligonucleotide
tacatatgcagacacaatatgtataggctaccatgcgaacaactcaaccgacactgttga

SEQ ID NO: 60517 - DNA, 60 bp, Artificial
  Synthetic oligonucleotide
gattccaacactgtgtcaagctttcaggtagactgtttcctttggcatatccgcaaacgg

SEQ ID NO: 60518 - DNA, 60 bp, Artificial
  Synthetic oligonucleotide
ggattccaacactgtgtcaagctttcaggtagactgtttcctttggcatatccgcaaacg

SEQ ID NO: 60519 - DNA, 58 bp, Artificial
  Synthetic oligonucleotide
cctgaaagtgccagcacaaaatgctataagcacaacgtttccttacactggagacccc

SEQ ID NO: 60520 - DNA, 60 bp, Artificial
  Synthetic oligonucleotide
cccgacatgactccaagcaccgagatgtcaatgagaggagtgagagtcagcaaaatgggt

SEQ ID NO: 60521 - DNA, 60 bp, Artificial
  Synthetic oligonucleotide
ccgacatgactccaagcaccgagatgtcaatgagaggagtgagagtcagcaaaatgggtg

SEQ ID NO: 60522 - DNA, 60 bp, Artificial
  Synthetic oligonucleotide
cccgacatgactccaagcaccgagatgtcaatgagaggagtgagagtcagcaaaatgggg

SEQ ID NO: 60523 - DNA, 60 bp, Artificial
  Synthetic oligonucleotide
gggatacagtggaagttttgtccaacatcctgaattaacaggaatggactgcataaggcc

SEQ ID NO: 60524 - DNA, 60 bp, Artificial
  Synthetic oligonucleotide
atcaactgattggtcgggatacagtggaagttttgtccaacatcctgaattaacaggaat

SEQ ID NO: 60525 - DNA, 60 bp, Artificial
  Synthetic oligonucleotide
tgaaactctacagagattcgcttggagaagcagtaatgagaatgggggacctccactcac

SEQ ID NO: 60526 - DNA, 55 bp, Artificial
  Synthetic oligonucleotide
acagagattcgcttggagaagcagtaatgagaatgggggacatccactcactcca

SEQ ID NO: 60527 - DNA, 60 bp, Artificial
  Synthetic oligonucleotide
acagagattcgcttggagaagcagtaatgagaatgggggacctccactcactccaacata

SEQ ID NO: 60528 - DNA, 60 bp, Artificial
  Synthetic oligonucleotide
atcagcttctggatgtgttctaatgggtctttgcagtgcagaatatgcatctgagaccag

SEQ ID NO: 60529 - DNA, 60 bp, Artificial
  Synthetic oligonucleotide
caatcagcttctggatgtgttctaatgggtctttgcagtgcaaaatatgcatctgagacc

SEQ ID NO: 60530 - DNA, 60 bp, Artificial
  Synthetic oligonucleotide
cttcctttgacatgaattatgaggggtcttatttcttcggagacaatgcagaggagtatg

SEQ ID NO: 60531 - DNA, 60 bp, Artificial
  Synthetic oligonucleotide
cggaggacttgaatggaatgataacacagttcgagtctctaaaactctacagagattctc

SEQ ID NO: 60532 - DNA, 60 bp, Artificial
  Synthetic oligonucleotide
tcaaatgggaccgttaaggacagaagcccttatagggccttaatgagctgtcctctaggt

SEQ ID NO: 60533 - DNA, 60 bp, Artificial
  Synthetic oligonucleotide
tcaagggactggttcatgctcatgcccaagcagaaagtggcaggttccctttatatcaga

SEQ ID NO: 60534 - DNA, 60 bp, Artificial
  Synthetic oligonucleotide
gattgcgtatgagagaatgtgcaacatcctcaaagggaaatttcaaacagctgcacaaag

SEQ ID NO: 60535 - DNA, 60 bp, Artificial
  Synthetic oligonucleotide
caccctggtatttttgaaaactcatgtattgaaacgatggaggttgttcagcaaacaaga

SEQ ID NO: 60536 - DNA, 60 bp, Artificial
  Synthetic oligonucleotide
ggacgattctacatccaaatgtgcaccgaacttaaactcagtgattatgagggacggctg

SEQ ID NO: 60537 - DNA, 60 bp, Artificial
  Synthetic oligonucleotide
ggacgattctacatccaaatgtgcaccgagcttaaactcagtgattatgagggacggctg

SEQ ID NO: 60538 - DNA, 50 bp, Artificial
  Synthetic oligonucleotide
agaatgtgcaacattctcaaagggaaatttcaaacagctgcacaacgagc

SEQ ID NO: 60539 - DNA, 60 bp, Artificial
  Synthetic oligonucleotide
gaatgtgcaacattctcaaagggaaatttcaaacagctgcacagagagcaatgatggatc

SEQ ID NO: 60540 - DNA, 60 bp, Artificial
  Synthetic oligonucleotide
tgctaattggacaaggggacgtagtgttggtaatgaaacggaaacgggactctagcatac

SEQ ID NO: 60541 - DNA, 51 bp, Artificial
  Synthetic oligonucleotide
gatggagcagtggctgtactaaaatacaacggcataataactgaaaccata

SEQ ID NO: 60542 - DNA, 60 bp, Artificial
  Synthetic oligonucleotide
cggctgattcagaacagcataacaatagagagaatggtgctctctgcttttgacgagagg

SEQ ID NO: 60543 - DNA, 59 bp, Artificial
  Synthetic oligonucleotide
ccccaaaggagtggaagaaggttccattgggaaggtctgtaggactttgttggcaaagt

SEQ ID NO: 60544 - DNA, 60 bp, Artificial
  Synthetic oligonucleotide
gcagggaaagatcctaagaaaactggaggacccatatacaagagagtagatggaaagtgg

SEQ ID NO: 60545 - DNA, 60 bp, Artificial
  Synthetic oligonucleotide
tacagagaatagctttgaacaaataacgtttatgcaagccttacaactattgcttgaagt

SEQ ID NO: 60546 - DNA, 60 bp, Artificial
  Synthetic oligonucleotide
ggaagaacatcccagcgcggggaaagatcctaagaaaactggaggacccatatacaagag

SEQ ID NO: 60547 - DNA, 60 bp, Artificial
  Synthetic oligonucleotide
gatacaataaaaagttggaggaacaaaatattaagaacacaagagtctgaatgtgtttgt

SEQ ID NO: 60548 - DNA, 60 bp, Artificial
  Synthetic oligonucleotide
cccagcgcggggaaagatcctaagaaaactggagggcccatatacaagagagtagatgga

SEQ ID NO: 60549 - DNA, 60 bp, Artificial
  Synthetic oligonucleotide
agtcgaaaggttaaaacatggaacctttggccctgtccactttagaaaccaagtcaaaat

SEQ ID NO: 60550 - DNA, 60 bp, Artificial
  Synthetic oligonucleotide
agtcgaaaggttaaaacatggaacctttggccctgtccattttagaaaccaagtcaaaat

SEQ ID NO: 60551 - DNA, 60 bp, Artificial
  Synthetic oligonucleotide
aaagtcgaaaggttaaaacatggaacctttggccctgtccattttagaaaccaagtcaaa

SEQ ID NO: 60552 - DNA, 60 bp, Artificial
  Synthetic oligonucleotide
gtcagaatggaccaggcgataatggataagaacatcatactgaaagcgaacttcagtgtg

SEQ ID NO: 60553 - DNA, 60 bp, Artificial
  Synthetic oligonucleotide
gcctgcttgtgtgtatgggcttgcagtagcgagtgggcatgactttgaaagagaaggata

SEQ ID NO: 60554 - DNA, 56 bp, Artificial
  Synthetic oligonucleotide
atgaaggatcttatttcttcggagacaatgctgaggagtacgacaattaaggaaaa

SEQ ID NO: 60555 - DNA, 60 bp, Artificial
  Synthetic oligonucleotide
ccaaagaagtagcgctcagttattctgctggtgcacttgccagttgtatgggcctcatat

SEQ ID NO: 60556 - DNA, 60 bp, Artificial
  Synthetic oligonucleotide
tttgtgtcagaatggaccaggcgataatggataagaacatcatactgaaagcgaatttca

SEQ ID NO: 60557 - DNA, 60 bp, Artificial
  Synthetic oligonucleotide
taatgaagggggtgtacatcaatactgccttgcttaatgcatcctgtgcagcaatggatg

SEQ ID NO: 60558 - DNA, 60 bp, Artificial
  Synthetic oligonucleotide
taatgaagggggtgtacattaatactgccttgcttaatgcatcctgtgcagcaatggatg

SEQ ID NO: 60559 - DNA, 60 bp, Artificial
  Synthetic oligonucleotide
ggccctgagtcagtgttgatcaatacctatcagtggatcatcagaaactgggagactgtt

SEQ ID NO: 60560 - DNA, 55 bp, Artificial
  Synthetic oligonucleotide
ttggtcaatacctatcagtggatcatcagaaactgggagactgttaaaattcagt

SEQ ID NO: 60561 - DNA, 60 bp, Artificial
  Synthetic oligonucleotide
agaaagaagtccttgtactatggggtgttcatcacccgtctaacatagaggaccaaaaga

SEQ ID NO: 60562 - DNA, 55 bp, Artificial
  Synthetic oligonucleotide
gaaagaagtccttgtactatggggtgttcatcacccgtctaacatagaggaccaa

SEQ ID NO: 60563 - DNA, 60 bp, Artificial
  Synthetic oligonucleotide
aatggatgtcaatccgacattacttttcttaaaagtgccagcacaaaatgctataagcac

SEQ ID NO: 60564 - DNA, 60 bp, Artificial
  Synthetic oligonucleotide
aatggacgtcaatccgactttgcttttcctgaaagtgccagcacaaaatgctataagcac

SEQ ID NO: 60565 - DNA, 60 bp, Artificial
  Synthetic oligonucleotide
aatggatgtcaatccgaccttacttttcctaaaagtgccagcacaaaatgctataagcac

SEQ ID NO: 60566 - DNA, 60 bp, Artificial
  Synthetic oligonucleotide
gatacaataaaaagttggagaaacaaaatactaagaacacaagagtcagaatgtgtttgt

SEQ ID NO: 60567 - DNA, 60 bp, Artificial
  Synthetic oligonucleotide
gacccaaggtgctttgctgaatgacaggcattctaatggaaccgtcaaggacaggagtcc

SEQ ID NO: 60568 - DNA, 60 bp, Artificial
  Synthetic oligonucleotide
tggagaaacaaaatactaagaacacaagagtcagaatgtgtttgtataaacggttcgtgt

SEQ ID NO: 60569 - DNA, 61 bp, Artificial
  Synthetic oligonucleotide
gttggagaaacaaaatactaagaacacaagagtcagaatgtgtttgtataaacggttcatg

SEQ ID NO: 60570 - DNA, 60 bp, Artificial
  Synthetic oligonucleotide
ttgtcataagagaaccattcatttcatgctctcacttggagtgcagaaccttttttctga

SEQ ID NO: 60571 - DNA, 60 bp, Artificial
  Synthetic oligonucleotide
ttttttctgacccaaggtgctttgctgaatgacaggcattctaatggaaccgtcaaggac

SEQ ID NO: 60572 - DNA, 51 bp, Artificial
  Synthetic oligonucleotide
gtcataagagaaccattcatttcatgctctcacttggagtgcagaactttt

SEQ ID NO: 60573 - DNA, 57 bp, Artificial
  Synthetic oligonucleotide
aagagtcagaatgtgtttgtataaacggttcatgttttactataatgactgatggcc

SEQ ID NO: 60574 - DNA, 60 bp, Artificial
  Synthetic oligonucleotide
tgtggcgtggacagtgaaaccgcaagctggtcatggccagacggagctgatctgccattc

SEQ ID NO: 60575 - DNA, 60 bp, Artificial
  Synthetic oligonucleotide
gcattaactgattggtcaggatacagtggaagttttgtccaacatcccgaattaacagga

SEQ ID NO: 60576 - DNA, 60 bp, Artificial
  Synthetic oligonucleotide
ggatccaaatggatggacggaaactgatagtagtttctctataaagcaggatattatagc

SEQ ID NO: 60577 - DNA, 60 bp, Artificial
  Synthetic oligonucleotide
ttgggatccaaatggatggacggaaactgatagtagtttctctataaagcaggatattat

SEQ ID NO: 60578 - DNA, 60 bp, Artificial
  Synthetic oligonucleotide
gatgatttgggatccaaatggatggacggaaactgatagtagtttctctataaagcagga

SEQ ID NO: 60579 - DNA, 60 bp, Artificial
  Synthetic oligonucleotide
aagtggatttgagatgatttgggatccaaatggatggacggaaactgatagtagtttctc

SEQ ID NO: 60580 - DNA, 60 bp, Artificial
  Synthetic oligonucleotide
aggatattatagcattaactgattggtcaggatacagtggaagttttgtccaacatcccg

SEQ ID NO: 60581 - DNA, 60 bp, Artificial
  Synthetic oligonucleotide
agcaggatattatagcattaactgattggtcaggatacagtggaagttttgtccaacatc

SEQ ID NO: 60582 - DNA, 60 bp, Artificial
  Synthetic oligonucleotide
gtagtttctctataaagcaggatattatagcattaactgattggtcaggatacagtggaa

SEQ ID NO: 60583 - DNA, 60 bp, Artificial
  Synthetic oligonucleotide
gtacaaaatattcaaaatggagaaagggaagattattaagtcagttgagctggatgcacc

SEQ ID NO: 60584 - DNA, 60 bp, Artificial
  Synthetic oligonucleotide
caaaatggagaaagggaagattattaagtcagttgagctggatgcacctaattaccacta

SEQ ID NO: 60585 - DNA, 60 bp, Artificial
  Synthetic oligonucleotide
tcgtacaaaatattcaaaatggagaaagggaagattattaagtcagttgagctggatgca

SEQ ID NO: 60586 - DNA, 60 bp, Artificial
  Synthetic oligonucleotide
ggcaatggtgtttggataggaagaactaaaagtatcagctctagaagtggatttgagatg

SEQ ID NO: 60587 - DNA, 60 bp, Artificial
  Synthetic oligonucleotide
tggatagggagaactaaaagtatcagctctagaagtggatttgagatgatttgggatcca

SEQ ID NO: 60588 - DNA, 60 bp, Artificial
  Synthetic oligonucleotide
cagaatcttgattatcagatagggtacatatgcagtggggttttcggtgataacccgcgt

SEQ ID NO: 60589 - DNA, 60 bp, Artificial
  Synthetic oligonucleotide
agatatggcaatggtgtttggataggaagaactaaaagtatcagctctagaagtggattt

SEQ ID NO: 60590 - DNA, 60 bp, Artificial
  Synthetic oligonucleotide
ctaaaagtatcagctctagaagtggatttgagatgatttgggatccaaatggatggacgg

SEQ ID NO: 60591 - DNA, 60 bp, Artificial
  Synthetic oligonucleotide
gcaataccaacattgctgatggacagggtgtgacttcaataatactagccggcaattcct

SEQ ID NO: 60592 - DNA, 60 bp, Artificial
  Synthetic oligonucleotide
gcaataccaacattgctgatggacagggcgtgacttcaataatactagccggcaattcct

SEQ ID NO: 60593 - DNA, 60 bp, Artificial
  Synthetic oligonucleotide
gcagataggaaatatagtctcgttatggataagccattcaattcagactggagaaaaaaa

SEQ ID NO: 60594 - DNA, 60 bp, Artificial
  Synthetic oligonucleotide
gcgtggacagtgaaaccgcaagctggtcatggccagacggagctgatctgccattcacca

SEQ ID NO: 60595 - DNA, 60 bp, Artificial
  Synthetic oligonucleotide
tcaataatactagccggcaattcctctctttgtccaataagtgggtgggctatatacagc

SEQ ID NO: 60596 - DNA, 60 bp, Artificial
  Synthetic oligonucleotide
ccccattccttgatcggctccgccgagatcaaaagtctctaagaagaagaggcagcaccc

SEQ ID NO: 60597 - DNA, 60 bp, Artificial
  Synthetic oligonucleotide
ccccattccttgatcggctccgccgagatcaaaagtccctaaaaggaagaggcagcaccc

SEQ ID NO: 60598 - DNA, 60 bp, Artificial
  Synthetic oligonucleotide
acaccgatgtggtaaactttgtgagcatggaattttccctcactgacccaagacttgagc

SEQ ID NO: 60599 - DNA, 60 bp, Artificial
  Synthetic oligonucleotide
cactcgcgagatactcacaaggaccaccgtggaccatatggccataatcaagaagtacac

SEQ ID NO: 60600 - DNA, 60 bp, Artificial
  Synthetic oligonucleotide
gcactcgcgagatactcacaaggaccaccgtggaccatatggccataatcaagaagtaca

SEQ ID NO: 60601 - DNA, 60 bp, Artificial
  Synthetic oligonucleotide
gacgactaattcaaaatagcataacaatagagagaatggtgctctctgcttttgacgaaa

SEQ ID NO: 60602 - DNA, 60 bp, Artificial
  Synthetic oligonucleotide
acatcagatatgcgaaccgaaatcataaggatgatggaaagtgcaaagccagaagatttg

SEQ ID NO: 60603 - DNA, 60 bp, Artificial
  Synthetic oligonucleotide
attggtggaattgggcgattctacatccaaatgtgcaccgagcttaaactcaatgattat

SEQ ID NO: 60604 - DNA, 60 bp, Artificial
  Synthetic oligonucleotide
agacacactatgtataggttaccatgcaaataactcaaccgacactgttgacacagtact

SEQ ID NO: 60605 - DNA, 60 bp, Artificial
  Synthetic oligonucleotide
taagagagccttttatatcatgctctcacttggaatgcagaaccttttttctgacccaag

SEQ ID NO: 60606 - DNA, 60 bp, Artificial
  Synthetic oligonucleotide
gaatgtgcaacatcctcaaagggaaatttcaaacagctgcacaaagagcaatgatggatc

SEQ ID NO: 60607 - DNA, 60 bp, Artificial
  Synthetic oligonucleotide
tcagtttctggatgtgttctaatgggtctttgcagtgtagaatatgcatctgagaccaga

SEQ ID NO: 60608 - DNA, 60 bp, Artificial
  Synthetic oligonucleotide
agagcgacagtatctgcagatccactggcatctctgttggaaatgtgccacagcacacag

SEQ ID NO: 60609 - DNA, 60 bp, Artificial
  Synthetic oligonucleotide
catcgctgctaggagcatagtgagaagagctacagtatctgcagatccactggcatctct

SEQ ID NO: 60610 - DNA, 60 bp, Artificial
  Synthetic oligonucleotide
tcgctgctaggagcatagtgagaagagctacagtatctgcagatccactggcatctctgt

SEQ ID NO: 60611 - DNA, 60 bp, Artificial
  Synthetic oligonucleotide
cacggtctgctctcatcctgaggggatcagtggctcataagtcctgcctgcctgcttgtg

SEQ ID NO: 60612 - DNA, 60 bp, Artificial
  Synthetic oligonucleotide
ctcacatgatgatctggcattccaatttgaatgatgccacttatcagaggacaagagctc

SEQ ID NO: 60613 - DNA, 60 bp, Artificial
  Synthetic oligonucleotide
gactcacatgatgatctggcattccaatttgaatgatgccacttatcagaggacaagagc

SEQ ID NO: 60614 - DNA, 60 bp, Artificial
  Synthetic oligonucleotide
cttgaatggaatgataacacagttcgagtctctaaaactctacagagattcgcttggaga

SEQ ID NO: 60615 - DNA, 60 bp, Artificial
  Synthetic oligonucleotide
gaggacttgaatggaatgataacacagttcgagtctctaaaactctacagagattcgctt

SEQ ID NO: 60616 - DNA, 56 bp, Artificial
  Synthetic oligonucleotide
caatcagcttctggatgtgttctaatgggtctttgcagtgtagaatatgcatctga

SEQ ID NO: 60617 - DNA, 60 bp, Artificial
  Synthetic oligonucleotide
tcagggtacagcggaagtttcgttcaacatcctgagctaacagggctagactgtatgagg

SEQ ID NO: 60618 - DNA, 60 bp, Artificial
  Synthetic oligonucleotide
ggtcagggtacagcggaagtttcgttcaacatcctgagctaacagggctagactgtatga

SEQ ID NO: 60619 - DNA, 60 bp, Artificial
  Synthetic oligonucleotide
cggtcagggtacagcggaagtttcgttcaacatcctgagctaacagggctagactgtatg

SEQ ID NO: 60620 - DNA, 60 bp, Artificial
  Synthetic oligonucleotide
tggcaatgactgatcggtcagggtacagcggaagtttcgttcaacatcctgagctaacag

SEQ ID NO: 60621 - DNA, 60 bp, Artificial
  Synthetic oligonucleotide
gggtacagcggaagtttcgttcaacatcctgagctaacagggctagactgtatgaggcct

SEQ ID NO: 60622 - DNA, 60 bp, Artificial
  Synthetic oligonucleotide
cactagcatctttattggaaatgtgccacagcacacagattggtggaacaaggatggtgg

SEQ ID NO: 60623 - DNA, 60 bp, Artificial
  Synthetic oligonucleotide
attggaaatgtgccacagcacacagattggtggaacaaggatggtggacattctcagaca

SEQ ID NO: 60624 - DNA, 60 bp, Artificial
  Synthetic oligonucleotide
tggaaatgtgccacagcacacagattggtggaacaaggatggtggacattcttaggcaaa

SEQ ID NO: 60625 - DNA, 60 bp, Artificial
  Synthetic oligonucleotide
ggaaatgtgccacagcacacagattggtggaacaaggatggtggacattctcaggcaaaa

SEQ ID NO: 60626 - DNA, 60 bp, Artificial
  Synthetic oligonucleotide
tggaaatgtgccacagcacacagattggtggaacaaggatggtggacattctcaggcaaa

SEQ ID NO: 60627 - DNA, 60 bp, Artificial
  Synthetic oligonucleotide
tgaaaccataaaaagttggaggaagcgaatattaagaacacaagagtctgaatgtgtctg

SEQ ID NO: 60628 - DNA, 60 bp, Artificial
  Synthetic oligonucleotide
acgaaggatcttatttcttcggagacaatgcagaggagtatgacaattaaagaaaaatac

SEQ ID NO: 60629 - DNA, 60 bp, Artificial
  Synthetic oligonucleotide
ggactctagtaccctagaactaagaagcagatactgggccataaggaccagaagtggagg

SEQ ID NO: 60630 - DNA, 60 bp, Artificial
  Synthetic oligonucleotide
actgttggtctccctgggggcaatcagtttctggatgtgctctaatgggtctttgcagtg

SEQ ID NO: 60631 - DNA, 60 bp, Artificial
  Synthetic oligonucleotide
ggtggactggaatgatagatggatggtatggttatcatcatcagaatgaacaaggatccg

SEQ ID NO: 60632 - DNA, 60 bp, Artificial
  Synthetic oligonucleotide
ggatcctaagaaaactggaggacccatatatagaagggtagacggaaaatggatgagaga

SEQ ID NO: 60633 - DNA, 60 bp, Artificial
  Synthetic oligonucleotide
agatcctaagaaaactggaggacccatatatagaagagtagacggaaaatggatgaggga

SEQ ID NO: 60634 - DNA, 60 bp, Artificial
  Synthetic oligonucleotide
ggatcctaagaaaactggaggacccatatatagaagagtagacggaaagtggatgagaga

SEQ ID NO: 60635 - DNA, 60 bp, Artificial
  Synthetic oligonucleotide
cagcataacaatagagagaatggttctctctgcatttgacgagaggaggaacaaatacct

SEQ ID NO: 60636 - DNA, 60 bp, Artificial
  Synthetic oligonucleotide
cagcataacaatagagagaatggttctctctgcttttgacgagaggaggaacaaatacct

SEQ ID NO: 60637 - DNA, 60 bp, Artificial
  Synthetic oligonucleotide
agggaggctgattcaaaacagcataacaatagagagaatggttctctctgcttttgatga

SEQ ID NO: 60638 - DNA, 60 bp, Artificial
  Synthetic oligonucleotide
acatttatgcaagccttacaactattgcttgaagtagaacaagagataagaactttctcg

SEQ ID NO: 60639 - DNA, 60 bp, Artificial
  Synthetic oligonucleotide
cctcactgacccaagacttgaaccacacaaatgggagaagtactgtgttcttgaggtagg

SEQ ID NO: 60640 - DNA, 55 bp, Artificial
  Synthetic oligonucleotide
gggacgactgattcaaaacagcataacaatagagagaatggtgctctctgctttt

SEQ ID NO: 60641 - DNA, 60 bp, Artificial
  Synthetic oligonucleotide
gcgaaccgaaatcataaggatgatggaaagtgcaaagccagaagatttgtccttccaggg

SEQ ID NO: 60642 - DNA, 60 bp, Artificial
  Synthetic oligonucleotide
aagaaatcttcctttcgagagagcgaccatcatggcggcatttacaggaaacactgaagg

SEQ ID NO: 60643 - DNA, 60 bp, Artificial
  Synthetic oligonucleotide
gggcgattctacatccaaatgtgcaccgaactcaaactcagtgattatgagggacgactg

SEQ ID NO: 60644 - DNA, 58 bp, Artificial
  Synthetic oligonucleotide
gaacggctacattgagggcaagctttctcaaatgtccaaagaagtaaatgctagaatt

SEQ ID NO: 60645 - DNA, 60 bp, Artificial
  Synthetic oligonucleotide
cctttgacatgaattatgaggggtcttatttcttcggagacaatgcagaggagtatgaca

SEQ ID NO: 60646 - DNA, 60 bp, Artificial
  Synthetic oligonucleotide
agagtctgaatgtgtctgtataaacggttcatgttttaccataatgaccgatggcccaag

SEQ ID NO: 60647 - DNA, 60 bp, Artificial
  Synthetic oligonucleotide
aaggaattatttcacagcagaggtgtctcattgcagagccacagaatacataatgaaggg

SEQ ID NO: 60648 - DNA, 60 bp, Artificial
  Synthetic oligonucleotide
aggaattatttcacagcagaggtgtctcattgcagagccacagaatacataatgaagggg

SEQ ID NO: 60649 - DNA, 60 bp, Artificial
  Synthetic oligonucleotide
cacagcagaggtgtctcattgcagagccacagaatacataatgaagggagtgtacatcaa

SEQ ID NO: 60650 - DNA, 60 bp, Artificial
  Synthetic oligonucleotide
caaatgggaccgttaaggacagaagcccttatagggccttaatgagctgtcctataggtg

SEQ ID NO: 60651 - DNA, 60 bp, Artificial
  Synthetic oligonucleotide
ccgttaaggacagaagcccttatagggccttaatgagctgtcctataggtgaagctccgt

SEQ ID NO: 60652 - DNA, 60 bp, Artificial
  Synthetic oligonucleotide
ggacagaagcccttatagggccttaatgagctgtcctataggtgaagctccgtctccata

SEQ ID NO: 60653 - DNA, 60 bp, Artificial
  Synthetic oligonucleotide
gacagaagcccttatagggccttaatgagctgtcctataggtgaagctccgtctccatac

SEQ ID NO: 60654 - DNA, 60 bp, Artificial
  Synthetic oligonucleotide
gacagaagcccttatagggccttaatgagctgtcctataggtgaagctccgtctccctac

SEQ ID NO: 60655 - DNA, 60 bp, Artificial
  Synthetic oligonucleotide
acagaagcccttatagggccttaatgagctgccctgtcggtgaagctccgtccccgtaca

SEQ ID NO: 60656 - DNA, 60 bp, Artificial
  Synthetic oligonucleotide
tttgtgtcagaatggaccaggcgataatggaaaagaacatcatactgaaagcgaatttca

SEQ ID NO: 60657 - DNA, 60 bp, Artificial
  Synthetic oligonucleotide
tgtcacctctgactaaggggattttggggtttgtgttcacgctcaccgtgcccagtgagc

SEQ ID NO: 60658 - DNA, 60 bp, Artificial
  Synthetic oligonucleotide
tgtcacctctgactaaggggattttagggtttgtgttcacgctcaccgtgcccagtgagc

SEQ ID NO: 60659 - DNA, 60 bp, Artificial
  Synthetic oligonucleotide
tggtggaattggacgattctacatccaaatgtgcaccgagcttaaactcaatgattatga

SEQ ID NO: 60660 - DNA, 60 bp, Artificial
  Synthetic oligonucleotide
tagttttgagcaaataacatttatgcaagccttacagctattgtttgaagtggaacaaga

SEQ ID NO: 60661 - DNA, 60 bp, Artificial
  Synthetic oligonucleotide
gttttgagcaaataacatttatgcaagccttacagctattgtttgaagtggaacaagaga

SEQ ID NO: 60662 - DNA, 60 bp, Artificial
  Synthetic oligonucleotide
ttgagcaaataacatttatgcaagccttacagctattgtttgaagtggaacaagagataa

SEQ ID NO: 60663 - DNA, 60 bp, Artificial
  Synthetic oligonucleotide
agtttcgagcaaataacatttatgcaagccttacaactattgcttgaagtagaacaagag

SEQ ID NO: 60664 - DNA, 60 bp, Artificial
  Synthetic oligonucleotide
agggcaacagctatactcagaaaagcaaccaggagattgattcaactgatagtgagtggg

SEQ ID NO: 60665 - DNA, 60 bp, Artificial
  Synthetic oligonucleotide
agggcaacagctatactcagaaaagcaaccaggagattgattcaactgatagtgagtgga

SEQ ID NO: 60666 - DNA, 60 bp, Artificial
  Synthetic oligonucleotide
cccagcccggggaaagatcctaagaaaactggaggacccatatacaagagagtagatgga

SEQ ID NO: 60667 - DNA, 60 bp, Artificial
  Synthetic oligonucleotide
cagcgcagggaaagatcctaagaaaactggaggacccatatacaagagagtagatggaaa

SEQ ID NO: 60668 - DNA, 60 bp, Artificial
  Synthetic oligonucleotide
aggaactacttcacagcagaggtgtctcattgcagagccacagaatatataatgaagggg

SEQ ID NO: 60669 - DNA, 60 bp, Artificial
  Synthetic oligonucleotide
aaggaactacttcacagcagaggtgtctcattgcagagccacagaatatataatgaaggg

SEQ ID NO: 60670 - DNA, 60 bp, Artificial
  Synthetic oligonucleotide
tggagcacttgccagttgtatgggcctcatatacaacaggatgggggctgtgaccaccga

SEQ ID NO: 60671 - DNA, 60 bp, Artificial
  Synthetic oligonucleotide
tggtgcacttgccagttgtatgggcctcatatacaacaggatgggggctgtgaccaccga

SEQ ID NO: 60672 - DNA, 60 bp, Artificial
  Synthetic oligonucleotide
gcagggaagaacaccgatcttgaggctctcatggaatggctaaagacaagaccaatcctg

SEQ ID NO: 60673 - DNA, 60 bp, Artificial
  Synthetic oligonucleotide
tgggaagaacaccgatcttgaggctctcatggaatggctaaagacaagaccaatcctgtc

SEQ ID NO: 60674 - DNA, 60 bp, Artificial
  Synthetic oligonucleotide
gtgctctctgcttttgacgagaggaggaacaaatatctggaagaacatcccagcgcgggg

SEQ ID NO: 60675 - DNA, 60 bp, Artificial
  Synthetic oligonucleotide
gcagggtagataatcactcactgagtgacatcgaagtcatggcgtctcaaggcaccaaac

SEQ ID NO: 60676 - DNA, 60 bp, Artificial
  Synthetic oligonucleotide
tgctaattggacaaggagacgtagtgttggtaatgaaacgaaaacgggactctagcatac

SEQ ID NO: 60677 - DNA, 60 bp, Artificial
  Synthetic oligonucleotide
caagcattcaaatgggaccgttaaggacagaagcccttatagggccttaatgagctgtcc

SEQ ID NO: 60678 - DNA, 60 bp, Artificial
  Synthetic oligonucleotide
ggcacaaattgaaaatgacagagaatagtttcgagcaaataacatttatgcaagccttac

SEQ ID NO: 60679 - DNA, 60 bp, Artificial
  Synthetic oligonucleotide
ggcacaaattgaagataacagagaatagtttcgagcaaataacatttatgcaagccttac

SEQ ID NO: 60680 - DNA, 60 bp, Artificial
  Synthetic oligonucleotide
cggcacaaattgaagataacagagaatagtttcgagcaaataacatttatgcaagcctta

SEQ ID NO: 60681 - DNA, 60 bp, Artificial
  Synthetic oligonucleotide
cggcacaaattgaaaatgacagagaatagtttcgagcaaataacatttatgcaagcctta

SEQ ID NO: 60682 - DNA, 60 bp, Artificial
  Synthetic oligonucleotide
cagtgattatgagggacggctgattcagaacagcttaacaatagagagaatggtgctctc

SEQ ID NO: 60683 - DNA, 60 bp, Artificial
  Synthetic oligonucleotide
cttcctagttttggagtgtctggaattaatgaatctgcagacatgagtattggagttact

SEQ ID NO: 60684 - DNA, 60 bp, Artificial
  Synthetic oligonucleotide
atgacggagagtagtttcgagcaaataacatttatgcaagccttacagctattgcttgaa

SEQ ID NO: 60685 - DNA, 60 bp, Artificial
  Synthetic oligonucleotide
taacagagaatagttttgagcaaataacatttatgcaagccttacagctattgtttgaag

SEQ ID NO: 60686 - DNA, 60 bp, Artificial
  Synthetic oligonucleotide
gccccattccttgatcggcttcgccgagatcagaagtccctaaaaggaagaggcagcact

SEQ ID NO: 60687 - DNA, 60 bp, Artificial
  Synthetic oligonucleotide
cgtctctttaaacacggtctgaaaagagggccttctacggaaggagtgccagagtctatg

SEQ ID NO: 60688 - DNA, 60 bp, Artificial
  Synthetic oligonucleotide
ttgaggtcctcatcggaggacttgaatggaatgataacacagttcgagtctctgaagctc

SEQ ID NO: 60689 - DNA, 60 bp, Artificial
  Synthetic oligonucleotide
tgcaattggggtcctcatcggaggacttgaatggaatgataacacagttcgagtctctga

SEQ ID NO: 60690 - DNA, 60 bp, Artificial
  Synthetic oligonucleotide
gtcaagggactggttcatgctcatgcccaagcaaaaagtggctggccctctttgtgtcag

SEQ ID NO: 60691 - DNA, 59 bp, Artificial
  Synthetic oligonucleotide
ggggttatatgaatcaattgaggagtgcctgattaatgatccctgggttttgcttaatg

SEQ ID NO: 60692 - DNA, 60 bp, Artificial
  Synthetic oligonucleotide
gagaagcagatactgggccataaggaccagaagtggagggaacaccaatcaacagagggc

SEQ ID NO: 60693 - DNA, 60 bp, Artificial
  Synthetic oligonucleotide
gactttgacgattgtaaagatgtaggcgatttgaagcaatatgatagtgatgaaccagaa

SEQ ID NO: 60694 - DNA, 60 bp, Artificial
  Synthetic oligonucleotide
gactttgacgactgtaaagatgtaggcgatttgaagcaatatgatagtgatgaaccagaa

SEQ ID NO: 60695 - DNA, 60 bp, Artificial
  Synthetic oligonucleotide
acaatggttgggagaagagcaacagctatactcagaaaagcaaccaggagattgattcag

SEQ ID NO: 60696 - DNA, 60 bp, Artificial
  Synthetic oligonucleotide
tactcagaaagaggaagatggacaaaaaataccgaaactggagcaccgcaactcaacccg

SEQ ID NO: 60697 - DNA, 60 bp, Artificial
  Synthetic oligonucleotide
ctcagaaaggggaagatggacaaaaaacaccgaaactggagcaccgcaactcaacccgat

SEQ ID NO: 60698 - DNA, 60 bp, Artificial
  Synthetic oligonucleotide
ctcagaaagaggaagatggacaaaaaataccgaaactggagcaccgcaactcaacccgat

SEQ ID NO: 60699 - DNA, 60 bp, Artificial
  Synthetic oligonucleotide
gggcaacaaacaccgaaactggagcaccgcaactcaacccgattgatgggccactgccag

SEQ ID NO: 60700 - DNA, 60 bp, Artificial
  Synthetic oligonucleotide
gggtacaccatggatacagtcaacaggacacatcagtactcagaaaggggaagatggaca

SEQ ID NO: 60701 - DNA, 60 bp, Artificial
  Synthetic oligonucleotide
tactcagaaagaggaagatggacaaaaaataccgaaactggagcaccgcaactcaaccca

SEQ ID NO: 60702 - DNA, 60 bp, Artificial
  Synthetic oligonucleotide
ccagagcccgaattgatgcacggattgatttcgaatctggaaggataaagaaagaggaat

SEQ ID NO: 60703 - DNA, 60 bp, Artificial
  Synthetic oligonucleotide
cccgaatcgatgcacggattgatttcgaatctggaaggataaagaaagaggagttcgctg

SEQ ID NO: 60704 - DNA, 60 bp, Artificial
  Synthetic oligonucleotide
tccagagcccgaattgatgcacggattgatttcgaatctggaaggataaagaaagaggag

SEQ ID NO: 60705 - DNA, 55 bp, Artificial
  Synthetic oligonucleotide
aaaacaccgaaactggagcaccgcaactcaacccgattgatgggccactaccaaa

SEQ ID NO: 60706 - DNA, 60 bp, Artificial
  Synthetic oligonucleotide
gcattaaccctgaacacaatgaccaaagatgctgagagggggaaactaaaacgtagagca

SEQ ID NO: 60707 - DNA, 60 bp, Artificial
  Synthetic oligonucleotide
aaccctgaacacaatgaccaaagatgctgagagggggaaactaaaacgtagagcaattgc

SEQ ID NO: 60708 - DNA, 56 bp, Artificial
  Synthetic oligonucleotide
aaaataccgaaactggagcaccgcaactcaacccgattgatgggccactaccaaaa

SEQ ID NO: 60709 - DNA, 55 bp, Artificial
  Synthetic oligonucleotide
aaaataccgaaactggagcaccgcaactcaacccgattgatgggccattaccaaa

SEQ ID NO: 60710 - DNA, 60 bp, Artificial
  Synthetic oligonucleotide
gacaggaacagggtacaccatggatacagtcaacaggacacatcagtactcagaaagagg

SEQ ID NO: 60711 - DNA, 60 bp, Artificial
  Synthetic oligonucleotide
tgggacaggaacagggtacaccatggatacagtcaacaggacacatcagtactcagaaag

SEQ ID NO: 60712 - DNA, 55 bp, Artificial
  Synthetic oligonucleotide
aaaataccgaaactggagcaccgcaactcaacccgattgatggaccattaccaaa

SEQ ID NO: 60713 - DNA, 60 bp, Artificial
  Synthetic oligonucleotide
gacaggaacagggtacaccatggatacagtcaacaggacacatcagtactcagaaagggg

SEQ ID NO: 60714 - DNA, 60 bp, Artificial
  Synthetic oligonucleotide
gacagggacagggtacaccatggatacagtcaacaggacacatcagtactcagaaagagg

SEQ ID NO: 60715 - DNA, 60 bp, Artificial
  Synthetic oligonucleotide
gggacaggaacagggtacaccatggatacagtcaacaggacacatcagtactcagaaagg

SEQ ID NO: 60716 - DNA, 60 bp, Artificial
  Synthetic oligonucleotide
gggacaggaacagggtacaccatggatacagtcaacaggacacatcagtactcagaaaga

SEQ ID NO: 60717 - DNA, 60 bp, Artificial
  Synthetic oligonucleotide
acaggaacagggtacaccatggatacagtcaacaggacacatcagtactcagaaagggga

SEQ ID NO: 60718 - DNA, 60 bp, Artificial
  Synthetic oligonucleotide
tgccagcacaaaatgctataagcacaactttcccttatactggagaccctccttacagcc

SEQ ID NO: 60719 - DNA, 60 bp, Artificial
  Synthetic oligonucleotide
gacagggacagggtacaccatggatacagtcaacaggacacatcagtactcagaaagggg

SEQ ID NO: 60720 - DNA, 60 bp, Artificial
  Synthetic oligonucleotide
gggacagggacagggtacaccatggatacagtcaacaggacacatcagtactcagaaaga

SEQ ID NO: 60721 - DNA, 60 bp, Artificial
  Synthetic oligonucleotide
ggacaacaaacaccgaaactggagcaccgcaactcaacccgattgatgggccactgccag

SEQ ID NO: 60722 - DNA, 60 bp, Artificial
  Synthetic oligonucleotide
caggaacagggtacaccatggatacagtcaacaggacacatcagtactcagaaaggggaa

SEQ ID NO: 60723 - DNA, 56 bp, Artificial
  Synthetic oligonucleotide
aaaacaccgaaactggagcaccgcaactcaacccgattgatgggccactaccaaaa

SEQ ID NO: 60724 - DNA, 52 bp, Artificial
  Synthetic oligonucleotide
aaaacaccgaaactggagcaccgcaactcaacccgattgatgggccactacc

SEQ ID NO: 60725 - DNA, 60 bp, Artificial
  Synthetic oligonucleotide
tccagagcccgaattgatgcacggattgatttcgaatctggaaggataaagaaagaggaa

SEQ ID NO: 60726 - DNA, 55 bp, Artificial
  Synthetic oligonucleotide
aaaataccgaaactggagcaccgcaactcaacccgattgatgggccactaccaga

SEQ ID NO: 60727 - DNA, 60 bp, Artificial
  Synthetic oligonucleotide
ctcggacgaaaaggcaacgagcccgatcgtgccctcctttgacatgagtaatgaaggatc

SEQ ID NO: 60728 - DNA, 60 bp, Artificial
  Synthetic oligonucleotide
tgattgggcaaggagacgtagtgttggtaatgaaacggaaacgggactcaagcatactta

SEQ ID NO: 60729 - DNA, 60 bp, Artificial
  Synthetic oligonucleotide
tcattggtactgttagtctccctgggggcaatcagcttctggatgtgctccaatgggtct

SEQ ID NO: 60730 - DNA, 60 bp, Artificial
  Synthetic oligonucleotide
gaaaatttacaggcctatcagaaacgaatgggggtgcaaatgcaacgattcaagtgatcc

SEQ ID NO: 60731 - DNA, 56 bp, Artificial
  Synthetic oligonucleotide
gaaaatctacaggcctatcagaaacgaatgggggtgcaaatgcaacgattcaagtg

SEQ ID NO: 60732 - DNA, 60 bp, Artificial
  Synthetic oligonucleotide
tcttgaaaatttgcaggcctatcagaaacgaatgggggtgcagatgcaacgattcaagtg

SEQ ID NO: 60733 - DNA, 60 bp, Artificial
  Synthetic oligonucleotide
gaaaatttgcaggcctatcagaaacgaatgggggtgcagatgcaacgattcaagtgatcc

SEQ ID NO: 60734 - DNA, 60 bp, Artificial
  Synthetic oligonucleotide
ctttttctatcgttatgggtttgttgccaatttcagcatggaacttcctagttttggggt

SEQ ID NO: 60735 - DNA, 60 bp, Artificial
  Synthetic oligonucleotide
cacaagctttttctatcgttatgggtttgttgccaatttcagcatggaacttcctagttt

SEQ ID NO: 60736 - DNA, 60 bp, Artificial
  Synthetic oligonucleotide
aattcacgagctttttctatcgttatgggtttgttgccaatttcagcatggaacttccta

SEQ ID NO: 60737 - DNA, 60 bp, Artificial
  Synthetic oligonucleotide
tctatcgttatgggtttgttgccaatttcagcatggaacttcctagttttggggtgtctg

SEQ ID NO: 60738 - DNA, 60 bp, Artificial
  Synthetic oligonucleotide
agcaaaagcagggtagataatcactcactgagtgacatcgaagccatggcgtctcaaggc

SEQ ID NO: 60739 - DNA, 60 bp, Artificial
  Synthetic oligonucleotide
gtgcgaatggaccaggcgatcatggaaaagaacatcatactgaaagcgaacttcagtgtg

SEQ ID NO: 60740 - DNA, 60 bp, Artificial
  Synthetic oligonucleotide
ccgtgggtgggctatatacagcaaagacaacagcataagaattggttccaaaggagatgt

SEQ ID NO: 60741 - DNA, 60 bp, Artificial
  Synthetic oligonucleotide
atggattccaacactgtgtcaagctttcaggtagattgcttcctttggcatgtccgcaaa

SEQ ID NO: 60742 - DNA, 60 bp, Artificial
  Synthetic oligonucleotide
ttgacatgagtaatgaaggatcttatttcttcggagacaatgcagaggagtacgacaatt

SEQ ID NO: 60743 - DNA, 60 bp, Artificial
  Synthetic oligonucleotide
acatgagtaatgaaggatcttatttcttcggagacaatgcagaggagtacgacaattaag

SEQ ID NO: 60744 - DNA, 60 bp, Artificial
  Synthetic oligonucleotide
cctttgacatgagtaatgagggatcttatttcttcggagacaatgcagaggagtatggca

SEQ ID NO: 60745 - DNA, 60 bp, Artificial
  Synthetic oligonucleotide
gccggcaattcctctctttgcccaataagtgggtgggctatatacagcaaagacaacagc

SEQ ID NO: 60746 - DNA, 60 bp, Artificial
  Synthetic oligonucleotide
tggtgcacttgccagttgtatgggcctcatatacaacagaatgggggctgtgaccactga

SEQ ID NO: 60747 - DNA, 60 bp, Artificial
  Synthetic oligonucleotide
tggtgcacttgccagttgtatgggcctcatatacaacaggatgggggctgtaaccaccga

SEQ ID NO: 60748 - DNA, 60 bp, Artificial
  Synthetic oligonucleotide
gagaatgtgcaacatcctcaaagggaaatttcagacagcagcgcaacgagcaatgatgga

SEQ ID NO: 60749 - DNA, 60 bp, Artificial
  Synthetic oligonucleotide
cggtatatcactgatatgagcatagaggagataagccgagaatggtatatgctgatgcct

SEQ ID NO: 60750 - DNA, 60 bp, Artificial
  Synthetic oligonucleotide
agtcctgcccctcggtatatcactgatatgagcatagaggagataagccgagaatggtat

SEQ ID NO: 60751 - DNA, 60 bp, Artificial
  Synthetic oligonucleotide
gctactcagcatgagagacatgtgtatgctccctttgattgacaggctcagaagagacca

SEQ ID NO: 60752 - DNA, 60 bp, Artificial
  Synthetic oligonucleotide
acataaggaagctactcagcatgagagacatgtgtatgctccctttgattgacaggctca

SEQ ID NO: 60753 - DNA, 60 bp, Artificial
  Synthetic oligonucleotide
gccccattccttgatcggcttcgccgagatcagaagtccctaaggggaagaggcagcact

SEQ ID NO: 60754 - DNA, 60 bp, Artificial
  Synthetic oligonucleotide
gccccatttcttgatcggcttcgccgagatcagaagtccctaaagggaagaggcagcact

SEQ ID NO: 60755 - DNA, 60 bp, Artificial
  Synthetic oligonucleotide
gccccatttcttgatcggcttcgccgagatcagaagtccctaaagagaagaggcagcact

SEQ ID NO: 60756 - DNA, 56 bp, Artificial
  Synthetic oligonucleotide
ttccttgatcggcttcgccgagatcagaagtctctaaagggaagaggcagcactct

SEQ ID NO: 60757 - DNA, 60 bp, Artificial
  Synthetic oligonucleotide
ccccttccttgatcggcttcgccgagatcagaagtctctaaagggaagaggcagcactct

SEQ ID NO: 60758 - DNA, 60 bp, Artificial
  Synthetic oligonucleotide
gcccccttccttgatcggcttcgccgagatcagaagtctctaaagggaagaggcagcact

SEQ ID NO: 60759 - DNA, 51 bp, Artificial
  Synthetic oligonucleotide
ttctatcgttatgggtttgttgccaatttcagcatggagcttcctagtttt

SEQ ID NO: 60760 - DNA, 60 bp, Artificial
  Synthetic oligonucleotide
cctgaaagtgccagcacaaaatgctataagcacaacgtttccttacactggagacccccc

SEQ ID NO: 60761 - DNA, 60 bp, Artificial
  Synthetic oligonucleotide
gcctctgtacctgcatcgcgctacctaactgacatgactcttgaggaaatgtcaaggcac

SEQ ID NO: 60762 - DNA, 60 bp, Artificial
  Synthetic oligonucleotide
accatggcctctgtacctgcatcgcgctacctaactgacatgactcttgaggaaatgtca

SEQ ID NO: 60763 - DNA, 60 bp, Artificial
  Synthetic oligonucleotide
gaccatggcctctgtacctgcgtcgcgctacctaactgacatgactcttgaggaaatgtc

SEQ ID NO: 60764 - DNA, 60 bp, Artificial
  Synthetic oligonucleotide
gaccatggcctctgtacctgcatcgcgctacctaactgacatgactcttgaggaaatgtc

SEQ ID NO: 60765 - DNA, 60 bp, Artificial
  Synthetic oligonucleotide
cgctacctaactgacatgactcttgaggaaatgtcaaggcactggttcatgctcatgccc

SEQ ID NO: 60766 - DNA, 60 bp, Artificial
  Synthetic oligonucleotide
gtggaattggacgattctacatccaaatgtgcaccgaacttaaactcagtgattatgagg

SEQ ID NO: 60767 - DNA, 60 bp, Artificial
  Synthetic oligonucleotide
attggacgattctacatccaaatgtgcaccgaacttaaactcagtgattatgaggggcgg

SEQ ID NO: 60768 - DNA, 60 bp, Artificial
  Synthetic oligonucleotide
ccccattccttgatcggcttcgccgagatcagaagtccctaagaggaagaggcagcactc

SEQ ID NO: 60769 - DNA, 60 bp, Artificial
  Synthetic oligonucleotide
gacacaaattgaagataacagagaatagttttgagcaaataacatttatgcaagccttgc

SEQ ID NO: 60770 - DNA, 60 bp, Artificial
  Synthetic oligonucleotide
gacataaattgaagataacagagaatagttttgagcaaataacatttatgcaagccttac

SEQ ID NO: 60771 - DNA, 60 bp, Artificial
  Synthetic oligonucleotide
ctatcgttatggatttgttgccaatttcagcatggagcttcctagttttggagtatctgg

SEQ ID NO: 60772 - DNA, 54 bp, Artificial
  Synthetic oligonucleotide
cactcactgagtgacatcgaaatcatggcgtctcaaggcaccaaacgatcatac

SEQ ID NO: 60773 - DNA, 60 bp, Artificial
  Synthetic oligonucleotide
gcatacttactgacagccagacagcgaccaaaagaattcgaatggccatcaattagtgta

SEQ ID NO: 60774 - DNA, 60 bp, Artificial
  Synthetic oligonucleotide
atggaacctcaaaaattaaaatgaaatggggaatggagatgaggcgttgcctcctccagt

SEQ ID NO: 60775 - DNA, 60 bp, Artificial
  Synthetic oligonucleotide
atggaacctcaaaaattaaaatgaaatggggaatggagatgaggcgttgcctccttcagt

SEQ ID NO: 60776 - DNA, 60 bp, Artificial
  Synthetic oligonucleotide
cttactgacagccagacagcgaccaaaagaattcggatggccatcaattaatgtcgaata

SEQ ID NO: 60777 - DNA, 60 bp, Artificial
  Synthetic oligonucleotide
tccgcaaacggtttgcagacaatggattgggtgatgccccattccttgatcggctccgcc

SEQ ID NO: 60778 - DNA, 60 bp, Artificial
  Synthetic oligonucleotide
cagacaatggattgggtgatgccccattccttgatcggctccgccgagatcaaaagtccc

SEQ ID NO: 60779 - DNA, 60 bp, Artificial
  Synthetic oligonucleotide
ggaagaagcgaatattaagaacacaagagtctgaatgtgtctgtatgaacggttcatgtt

SEQ ID NO: 60780 - DNA, 60 bp, Artificial
  Synthetic oligonucleotide
aacatcccatccattcaatacagaggtctatttggagccattgctggttttattgagggg

SEQ ID NO: 60781 - DNA, 60 bp, Artificial
  Synthetic oligonucleotide
aaacatcccatccattcaatacagaggtctatttggagccattgctggttttattgaggg

SEQ ID NO: 60782 - DNA, 60 bp, Artificial
  Synthetic oligonucleotide
tcagggtacagcggaagtttcgttcaacatcctgagctaacaggattggactgtatgaga

SEQ ID NO: 60783 - DNA, 60 bp, Artificial
  Synthetic oligonucleotide
gggtacagcggaagtttcgttcaacatcctgagctaacaggattggactgtatgagacct

SEQ ID NO: 60784 - DNA, 60 bp, Artificial
  Synthetic oligonucleotide
acaggatgttgtggcaataactgattggtctgggtacagcggaagtttcgttcaacatcc

SEQ ID NO: 60785 - DNA, 60 bp, Artificial
  Synthetic oligonucleotide
acaatggttgggaaaagggcaacagcgatactcagaaaagcaaccaggagattgattcaa

SEQ ID NO: 60786 - DNA, 60 bp, Artificial
  Synthetic oligonucleotide
acaatggttgggaaaagggcaacagccatactcagaaaagcaaccaggagattgattcaa

SEQ ID NO: 60787 - DNA, 58 bp, Artificial
  Synthetic oligonucleotide
gatgagtcttctaaccgaggtcgaaacgtacgttctctctatcgtcccatcaggcccc

SEQ ID NO: 60788 - DNA, 60 bp, Artificial
  Synthetic oligonucleotide
gatgagtcttctaaccgaggtcgaaacgtacgttctctctatcgtcccatcaggccccct

SEQ ID NO: 60789 - DNA, 54 bp, Artificial
  Synthetic oligonucleotide
ttgtcatgagagagccgttcatttcatgctctcacttggaatgcagaacctttt

SEQ ID NO: 60790 - DNA, 60 bp, Artificial
  Synthetic oligonucleotide
gcagatactgggccataaggaccagaagtggagggaacactaatcaacaaagggcctctg

SEQ ID NO: 60791 - DNA, 60 bp, Artificial
  Synthetic oligonucleotide
gcagatactgggccataaggaccagaagtggagggaacactaatcaacaaagggcctccg

SEQ ID NO: 60792 - DNA, 60 bp, Artificial
  Synthetic oligonucleotide
gcagatactgggccataaggaccagaagtggagggaacactaatcaacaaagggcctcag

SEQ ID NO: 60793 - DNA, 61 bp, Artificial
  Synthetic oligonucleotide
cacaaattgaagataacagagaatagttttgagcaaataacatttatgcaagccttgcagc

SEQ ID NO: 60794 - DNA, 60 bp, Artificial
  Synthetic oligonucleotide
tatcgttatgggtttgttgccaatttcagcatggagcttcccagttttggggtgtctggg

SEQ ID NO: 60795 - DNA, 60 bp, Artificial
  Synthetic oligonucleotide
tggaatggctaaagacaagaccaatcctgtcacctctgactaaggggattttaggatttg

SEQ ID NO: 60796 - DNA, 60 bp, Artificial
  Synthetic oligonucleotide
caagaccaatcctgtcacctctgactaaggggattttagggtttgtgttcacgctcaccg

SEQ ID NO: 60797 - DNA, 60 bp, Artificial
  Synthetic oligonucleotide
aagaccgatcctgtcacctctgactaaggggattttaggatttgtgttcacgctcaccgt

SEQ ID NO: 60798 - DNA, 60 bp, Artificial
  Synthetic oligonucleotide
accgatcctgtcacctctgactaaggggattttaggatttgtgttcacgctcaccgtgcc

SEQ ID NO: 60799 - DNA, 60 bp, Artificial
  Synthetic oligonucleotide
caatcctgtcacctctgactaaggggattttaggatttgtgttcacgctcaccgtgccca

SEQ ID NO: 60800 - DNA, 60 bp, Artificial
  Synthetic oligonucleotide
taagagtccgagaccagcggggaaacgtgctattatctcctgaagaggttagtgaaacac

SEQ ID NO: 60801 - DNA, 60 bp, Artificial
  Synthetic oligonucleotide
tacagtcctcggaaaggatgcaggcgcactgacagaagacccagatgaaggaacagcggg

SEQ ID NO: 60802 - DNA, 60 bp, Artificial
  Synthetic oligonucleotide
ccaggaggggaggtgaggaatgatgatgttgaccagagcttaatcattgctgctagacac

SEQ ID NO: 60803 - DNA, 60 bp, Artificial
  Synthetic oligonucleotide
agcaagacaaatgatgctggatcggacagagtgatggtatcacctctagctgtgacgtgg

SEQ ID NO: 60804 - DNA, 60 bp, Artificial
  Synthetic oligonucleotide
aggaattcacaatggttggacgacgggcaacagccattctaaggaaagcaaccaggaggc

SEQ ID NO: 60805 - DNA, 53 bp, Artificial
  Synthetic oligonucleotide
cactcactgagtgacatcgaagccatggcgtctcaaggcaccaaacgatcata

SEQ ID NO: 60806 - DNA, 60 bp, Artificial
  Synthetic oligonucleotide
aactgacacaaggcagacagacctatgactggactctaaataggaaccagcctgctgcca

SEQ ID NO: 60807 - DNA, 60 bp, Artificial
  Synthetic oligonucleotide
actgacacaaggcagacagacctatgactggactctaaataggaaccagcctgctgccac

SEQ ID NO: 60808 - DNA, 60 bp, Artificial
  Synthetic oligonucleotide
ggacaaactgacacaaggcagacagacctatgactggactctaaataggaaccagcctgc

SEQ ID NO: 60809 - DNA, 60 bp, Artificial
  Synthetic oligonucleotide
caaactgacacaaggcagacagacctatgactggactctaaataggaaccagcctgctgc

SEQ ID NO: 60810 - DNA, 60 bp, Artificial
  Synthetic oligonucleotide
aaactgacacaaggcagacagacctatgactggactctaaataggaaccagcctgctgcc

SEQ ID NO: 60811 - DNA, 60 bp, Artificial
  Synthetic oligonucleotide
gcaggcaaaccatttgaatggatgtcaatccgactttgcttttcttgaaagttccagcgc

SEQ ID NO: 60812 - DNA, 60 bp, Artificial
  Synthetic oligonucleotide
gcaggcaaaccatttgaatggatgtcaatccgactctacttttcttaaaagttccagcgc

SEQ ID NO: 60813 - DNA, 60 bp, Artificial
  Synthetic oligonucleotide
agcaaaagcaggcaaaccatttgaatggatgtcaatccgactctacttttcttaaaagtt

SEQ ID NO: 60814 - DNA, 60 bp, Artificial
  Synthetic oligonucleotide
agcgaaagcaggcaaaccatttgaatggatgtcaatccgactttgcttttcttgaaagtt

SEQ ID NO: 60815 - DNA, 60 bp, Artificial
  Synthetic oligonucleotide
agcaaaagcaggcaaaccatttgaatggatgtcaatccgaccttacttttcttaaaagtg

SEQ ID NO: 60816 - DNA, 60 bp, Artificial
  Synthetic oligonucleotide
agcaaaagcaggcaaaccatttgaatggatgtcaatccgactttgcttttcctgaaagtg

SEQ ID NO: 60817 - DNA, 60 bp, Artificial
  Synthetic oligonucleotide
tacacatcaggaagacaggagaaaaacccatcacttagaatgaaatggatgatggcaatg

SEQ ID NO: 60818 - DNA, 60 bp, Artificial
  Synthetic oligonucleotide
ggaaatgtgccacagcacacagattggtggaataaggatggtggacatccttaggcagaa

SEQ ID NO: 60819 - DNA, 60 bp, Artificial
  Synthetic oligonucleotide
atattgaaagatgagccttctaaccgaggtcgaaacgtacgttctctctatcgtcccgtc

SEQ ID NO: 60820 - DNA, 60 bp, Artificial
  Synthetic oligonucleotide
cctctctttgccccatcagtgggtgggctatatacagcaaagacaatggcataagaattg

SEQ ID NO: 60821 - DNA, 60 bp, Artificial
  Synthetic oligonucleotide
cctgctgcaacagcattggccaacacaatagaagtgttcagatcaaatggcctcacggcc

SEQ ID NO: 60822 - DNA, 60 bp, Artificial
  Synthetic oligonucleotide
ccagcctgctgcaacagcattggccaacacaatagaagtgttcagatcaaatggcctcac

SEQ ID NO: 60823 - DNA, 60 bp, Artificial
  Synthetic oligonucleotide
ctttcaccgaagagggagcaattgttggcgaaatttcaccattgccttctcttccaggac

SEQ ID NO: 60824 - DNA, 60 bp, Artificial
  Synthetic oligonucleotide
agaatgaaatggatgatggcaatgaaatatccaattacagcggacaagagaataactgaa

SEQ ID NO: 60825 - DNA, 60 bp, Artificial
  Synthetic oligonucleotide
cctagttttggagtatctggaattaatgaatctgcagacatgagtattggagttactgtc

SEQ ID NO: 60826 - DNA, 60 bp, Artificial
  Synthetic oligonucleotide
atctgttccaccattgaagagctcagacggcagaaatagtgaatttagcttgtcctcaga

SEQ ID NO: 60827 - DNA, 60 bp, Artificial
  Synthetic oligonucleotide
tggggtcctcatcggagggcttgaatggaatggtaacaaagttcgagtctctgaaaatct

SEQ ID NO: 60828 - DNA, 60 bp, Artificial
  Synthetic oligonucleotide
gggtcctcatcggagggcttgaatggaatggtaacaaagttcgagtctctgaaaatctac

SEQ ID NO: 60829 - DNA, 52 bp, Artificial
  Synthetic oligonucleotide
cggacaatggattgggtgatgccccattccttgatcggctccgccgagatca

SEQ ID NO: 60830 - DNA, 60 bp, Artificial
  Synthetic oligonucleotide
ccgcaaacggtttgcagacaataaattgggtgatgccccattccttgatcggctccgccg

SEQ ID NO: 60831 - DNA, 60 bp, Artificial
  Synthetic oligonucleotide
ggactggaatgatagatggatggtatggttaccatcagcagaatggacaaggatcaggct

SEQ ID NO: 60832 - DNA, 57 bp, Artificial
  Synthetic oligonucleotide
atgagccttctaaccgaggtcgaaacgtacgttctctctatcgtcccatcaggcccc

SEQ ID NO: 60833 - DNA, 60 bp, Artificial
  Synthetic oligonucleotide
gttcactgcactaaaagccgacaccatctgtataggctaccatgcaaacaattctacgga

SEQ ID NO: 60834 - DNA, 51 bp, Artificial
  Synthetic oligonucleotide
cagtaaatcatatacaaacaacaaggggaaagaagtgcttgtactttgggg

SEQ ID NO: 60835 - DNA, 52 bp, Artificial
  Synthetic oligonucleotide
tcagtaaatcatatacaaacaacaaggggaaagaagtgcttgtactttgggg

SEQ ID NO: 60836 - DNA, 60 bp, Artificial
  Synthetic oligonucleotide
agccgacaccatctgtataggctaccatgcaaacaattctacggacactgtcgacacagt

SEQ ID NO: 60837 - DNA, 60 bp, Artificial
  Synthetic oligonucleotide
cacagcactgaaagccgacaccatctgtataggctaccatgcaaataattctacagacac

SEQ ID NO: 60838 - DNA, 60 bp, Artificial
  Synthetic oligonucleotide
cataaacaggacaggaacatttgaattcacaagctttttctatcgttatggattcgtagc

SEQ ID NO: 60839 - DNA, 52 bp, Artificial
  Synthetic oligonucleotide
ttgatcggcttcgccgagatcagaagtccctaaggggaagaggcagcactct

SEQ ID NO: 60840 - DNA, 52 bp, Artificial
  Synthetic oligonucleotide
ttgatcggcttcgccgagatcagaagtccctaaagggaagaggcagcactct

SEQ ID NO: 60841 - DNA, 59 bp, Artificial
  Synthetic oligonucleotide
gcaagccttacaactattgcttgaagtagaacaagagataagaactttctcgtttcagc

SEQ ID NO: 60842 - DNA, 60 bp, Artificial
  Synthetic oligonucleotide
tgcaggcctaccagagacgaatgggggtgcagatgcaacgattcaagtgaccctctcgtt

SEQ ID NO: 60843 - DNA, 60 bp, Artificial
  Synthetic oligonucleotide
ctatcagaaacgaatgggggtgcagatgcaacgattcaagtgatcctcttgttgttgccg

SEQ ID NO: 60844 - DNA, 60 bp, Artificial
  Synthetic oligonucleotide
cattaacgggattacaaacaaggtgaattctgtaattgagaaaatgaacactcaattcac

SEQ ID NO: 60845 - DNA, 65 bp, Artificial
  Synthetic oligonucleotide
gagacacagattgaaaataacagagaatagttttgagcaaataacatttatgcaagccttacagc

SEQ ID NO: 60846 - DNA, 60 bp, Artificial
  Synthetic oligonucleotide
ttgggcaaggggatgtagtgttggtaatgaaacggaaacgggactctagcatacttactg

SEQ ID NO: 60847 - DNA, 60 bp, Artificial
  Synthetic oligonucleotide
ttactaagggctttcaccgaagagggagcaattgttggcgaaatttcaccattgccttct

SEQ ID NO: 60848 - DNA, 60 bp, Artificial
  Synthetic oligonucleotide
atttgagattacaggaaccatgcgcaggctcgccgaccaaagtctcccaccgaacttctc

SEQ ID NO: 60849 - DNA, 60 bp, Artificial
  Synthetic oligonucleotide
gaagtacacatcagggagacaggaaaagaacccgtcacttaggatgaaatggatgatggc

SEQ ID NO: 60850 - DNA, 60 bp, Artificial
  Synthetic oligonucleotide
gaagtacacatcaggaagacaggagaagaacccgtcacttaggatgaaatggatgatggc

SEQ ID NO: 60851 - DNA, 60 bp, Artificial
  Synthetic oligonucleotide
cctaacacatgcattgagatagctgtggcaatgctactatttgctatccatactgtccaa

SEQ ID NO: 60852 - DNA, 60 bp, Artificial
  Synthetic oligonucleotide
gacaagcattcaaatgggaccgttaaggacagaagcccttatagggccttaatgagctgc

SEQ ID NO: 60853 - DNA, 60 bp, Artificial
  Synthetic oligonucleotide
tctccaacaaaatggcaaggttagggaaaggatacatgttcgaaagtaagagcatgaagc

SEQ ID NO: 60854 - DNA, 55 bp, Artificial
  Synthetic oligonucleotide
tgacgccggatcagaccgagtgatggtatcacctctggctgtaacatggtggaat

SEQ ID NO: 60855 - DNA, 60 bp, Artificial
  Synthetic oligonucleotide
agttcgagtctctaaaactctacagagattcgcttggagaagcagtaatgagaatgggag

SEQ ID NO: 60856 - DNA, 60 bp, Artificial
  Synthetic oligonucleotide
cgagtctctaaaactctacagagattcgcttggagaagcagtaatgagaatgggagacct

SEQ ID NO: 60857 - DNA, 60 bp, Artificial
  Synthetic oligonucleotide
tgacacaaggcagacagacctatgactggactctaaataggaaccagcctgctgctacag

SEQ ID NO: 60858 - DNA, 60 bp, Artificial
  Synthetic oligonucleotide
tgacacaaggcagacagacctatgactggactctaaataggaaccagcctgctgccacag

SEQ ID NO: 60859 - DNA, 60 bp, Artificial
  Synthetic oligonucleotide
agtatcagctctagaagtggatttgagatgatttgggatcctaatggatggacagaaact

SEQ ID NO: 60860 - DNA, 58 bp, Artificial
  Synthetic oligonucleotide
caaactggtcttggccagacggtgctgagttgccgttcaccattgacaagtagttcgt

SEQ ID NO: 60861 - DNA, 60 bp, Artificial
  Synthetic oligonucleotide
caaactggtcttggccagacggtgctgagttgccgttcaccattgacaagtagttcgttg

SEQ ID NO: 60862 - DNA, 53 bp, Artificial
  Synthetic oligonucleotide
caaactggtcttggccagacggtgctgagttgccgttcatcattgacaaatag

SEQ ID NO: 60863 - DNA, 53 bp, Artificial
  Synthetic oligonucleotide
caaactggtcttggccagacggtgctgagttgccgttcaccattgacaaatag

SEQ ID NO: 60864 - DNA, 60 bp, Artificial
  Synthetic oligonucleotide
caaactggtcttggccagacggtgctgagttgccgttcaccattgacaaatagttcgttg

SEQ ID NO: 60865 - DNA, 53 bp, Artificial
  Synthetic oligonucleotide
caaactggtcttggccagacggtgctgagttgccgttcaccattgacaagtag

SEQ ID NO: 60866 - DNA, 60 bp, Artificial
  Synthetic oligonucleotide
atgagccttctaaccgaggtcgaaacgtacgttctctctatcgtcccatcaggccccctc

SEQ ID NO: 60867 - DNA, 60 bp, Artificial
  Synthetic oligonucleotide
tcattctgagaggatcagtggctcataagtcttgcctgcctgcttgtgtgtatgggcttg

SEQ ID NO: 60868 - DNA, 60 bp, Artificial
  Synthetic oligonucleotide
ttgtgttcacgctcaccgtgcccagtgagcgaggactacagcgtagacgctttgtccaga

SEQ ID NO: 60869 - DNA, 60 bp, Artificial
  Synthetic oligonucleotide
ggccgacagacctatgactggactctaaataggaaccagcctgctgcaacagctttggcc

SEQ ID NO: 60870 - DNA, 50 bp, Artificial
  Synthetic oligonucleotide
tggccagacggcgctgagttgccattcaccattgacaagtagtttgttca

SEQ ID NO: 60871 - DNA, 60 bp, Artificial
  Synthetic oligonucleotide
accatttgaatggatgtcaatccgactttacttttcttaaaagtgccagcacaaaatgct

SEQ ID NO: 60872 - DNA, 60 bp, Artificial
  Synthetic oligonucleotide
cgatccctgggttttgcttaatgcatcttggttcaactccttcctcacacatgcactgag

SEQ ID NO: 60873 - DNA, 50 bp, Artificial
  Synthetic oligonucleotide
agaagcggatttgagatgatttgggatcctaatgggtggacagagactga

SEQ ID NO: 60874 - DNA, 60 bp, Artificial
  Synthetic oligonucleotide
actattgaggaaatgtcaagggactggttcatgctcatgcccaagcagaaagtggcaggc

SEQ ID NO: 60875 - DNA, 60 bp, Artificial
  Synthetic oligonucleotide
catgactattgaggaaatgtcaagggactggttcatgctcatgcccaagcagaaagtggc

SEQ ID NO: 60876 - DNA, 60 bp, Artificial
  Synthetic oligonucleotide
gggatttgatgtcacagtctcgcactcgcgagatactgacaaaaaccacagtggaccata

SEQ ID NO: 60877 - DNA, 60 bp, Artificial
  Synthetic oligonucleotide
taagtagcgacactgtaggttggtcttggccagacggtgctgagttgccattcaccattg

SEQ ID NO: 60878 - DNA, 60 bp, Artificial
  Synthetic oligonucleotide
tagcgacactgtgggttggtcttggccagacggtgctgagttgccattcaccattgacaa

SEQ ID NO: 60879 - DNA, 60 bp, Artificial
  Synthetic oligonucleotide
cagaaatgttctaagtattgctccaataatgttctcaaataaaatggctaggttgggcaa

SEQ ID NO: 60880 - DNA, 60 bp, Artificial
  Synthetic oligonucleotide
gcaaatactgggctataagaaccaggagcggaggaaacaccaaccaacagagagcatctg

SEQ ID NO: 60881 - DNA, 60 bp, Artificial
  Synthetic oligonucleotide
aattgaagaccttatctttctggcacggtctgcactcattctgagaggatcagtggccca

SEQ ID NO: 60882 - DNA, 60 bp, Artificial
  Synthetic oligonucleotide
gtcaagggactggttcatgctcatgcccaagcagaaagtggcaggttccctttgcatcag

SEQ ID NO: 60883 - DNA, 60 bp, Artificial
  Synthetic oligonucleotide
gatcacaggaacaatgcgcaggcttgctgaccaaagtctcccaccgaacttctccagtct

SEQ ID NO: 60884 - DNA, 60 bp, Artificial
  Synthetic oligonucleotide
atttgaaatcacaggaactatgcgcaggcttgccgaccaaagtctcccaccgaacttctc

SEQ ID NO: 60885 - DNA, 60 bp, Artificial
  Synthetic oligonucleotide
atgaaggatcttatttcttcggagacaatgcagaggagtacgacaactaaggaaaaatac

SEQ ID NO: 60886 - DNA, 60 bp, Artificial
  Synthetic oligonucleotide
ttacaaggagaatagattcatcgagattggagtgacaaggagggaagtccacatatacta

SEQ ID NO: 60887 - DNA, 60 bp, Artificial
  Synthetic oligonucleotide
gtctcaaggcaccaaacgatcttatgagcagatggaaactggtggagagcgccagaatgc

SEQ ID NO: 60888 - DNA, 60 bp, Artificial
  Synthetic oligonucleotide
cagttttcttctctggctgtgaatgtaagaggatcaggaatgagaatacttgtaaggggc

SEQ ID NO: 60889 - DNA, 60 bp, Artificial
  Synthetic oligonucleotide
cagtggctcataagtcctgcctgcctgcttgtgtatatggacttgctgtggccagtggat

SEQ ID NO: 60890 - DNA, 60 bp, Artificial
  Synthetic oligonucleotide
gagaggatcagtggctcataagtcctgcctgcctgcttgtgtgtatgggcttgctgtggc

SEQ ID NO: 60891 - DNA, 60 bp, Artificial
  Synthetic oligonucleotide
ctgggaccttcgatcttggagggctatatgaagcaattgaggagtgcctgattaacgatc

SEQ ID NO: 60892 - DNA, 60 bp, Artificial
  Synthetic oligonucleotide
tgggtttgttgccaatttcagcatggagcttcccagttttggggtgtctggaatcaacga

SEQ ID NO: 60893 - DNA, 60 bp, Artificial
  Synthetic oligonucleotide
cgctacgggtttgttgccaatttcagcatggagcttcctagttttggggtatctgggatc

SEQ ID NO: 60894 - DNA, 60 bp, Artificial
  Synthetic oligonucleotide
ctgattcagaacagcataacaatagagagaatggtgctctctgcttttgacgagaggagg

SEQ ID NO: 60895 - DNA, 60 bp, Artificial
  Synthetic oligonucleotide
caatgaaacaggatgtcgtggcaatgactgattggtcagggtacagcggaagttttgttc

SEQ ID NO: 60896 - DNA, 60 bp, Artificial
  Synthetic oligonucleotide
ctgtgagacaagatgttgtggcaatgactgattggtcagggtacagcggaagtttcgttc

SEQ ID NO: 60897 - DNA, 60 bp, Artificial
  Synthetic oligonucleotide
ccggaagacaggagaaaaacccatcacttaggatgaaatggatgatggcaatgaaatacc

SEQ ID NO: 60898 - DNA, 60 bp, Artificial
  Synthetic oligonucleotide
tgtgtaggctaccatgctaacaattccacagacactgtcgacacaatactggagaaaaat

SEQ ID NO: 60899 - DNA, 60 bp, Artificial
  Synthetic oligonucleotide
gaacatgctaccccggagaattcgctgattatgaagaattaagggagcagctgagttcag

SEQ ID NO: 60900 - DNA, 60 bp, Artificial
  Synthetic oligonucleotide
ggtcgatgatggatttttggatgtttggacatataatgctgagttgctcgttttgctcga

SEQ ID NO: 60901 - DNA, 60 bp, Artificial
  Synthetic oligonucleotide
cactgggaacttaatagcaccatggtacgcattcgcattgaataagggctctggttccgg

SEQ ID NO: 60902 - DNA, 60 bp, Artificial
  Synthetic oligonucleotide
gcaccgaactcaaactcagtgattatgagggacggctgattcagaacagcataacaatag

SEQ ID NO: 60903 - DNA, 60 bp, Artificial
  Synthetic oligonucleotide
gagatgtcaagggactggttcatgctcatgcccaagcagaaagtggcaggttccctttgc

SEQ ID NO: 60904 - DNA, 60 bp, Artificial
  Synthetic oligonucleotide
ccatccgtgggtgggctatatacagcaaagacaatggcataagaattggttccaaaggag

SEQ ID NO: 60905 - DNA, 60 bp, Artificial
  Synthetic oligonucleotide
ccaacagaagagcaagctgtggatatatgcaaggcagcaatgggactgagaatcagctca

SEQ ID NO: 60906 - DNA, 60 bp, Artificial
  Synthetic oligonucleotide
acagaagagcaagctgtggatatatgcaaggcagcaatgggactgagaatcagctcatcc

SEQ ID NO: 60907 - DNA, 60 bp, Artificial
  Synthetic oligonucleotide
tgcccaaaatacgtcaagagtgccaaattgaggatggttacaggactaagaaacatccca

SEQ ID NO: 60908 - DNA, 60 bp, Artificial
  Synthetic oligonucleotide
aagaaatacacatcaggaagacaggagaaaaacccatcacttaggatgaaatggatgatg

SEQ ID NO: 60909 - DNA, 60 bp, Artificial
  Synthetic oligonucleotide
gaaatacacatcaggaagacaggagaaaaacccatcacttaggatgaaatggatgatggc

SEQ ID NO: 60910 - DNA, 60 bp, Artificial
  Synthetic oligonucleotide
cagaggaacaagagtggtcccaagaggacaactgtccaccagaggagttcaaattgcttc

SEQ ID NO: 60911 - DNA, 60 bp, Artificial
  Synthetic oligonucleotide
tcagaggaacaagagtggtcccaagaggacaactgtccaccagaggagttcaaattgctt

SEQ ID NO: 60912 - DNA, 60 bp, Artificial
  Synthetic oligonucleotide
tcttgaggctctcatggagtggctaaagacaagaccaatcctgtcacctctgactaaggg

SEQ ID NO: 60913 - DNA, 60 bp, Artificial
  Synthetic oligonucleotide
ggaatggactgcataaggccttgtttctgggttgagttaatcagaggacaacctaaggag

SEQ ID NO: 60914 - DNA, 60 bp, Artificial
  Synthetic oligonucleotide
atctggattatcaaatagggtacatctgcagtggggttttcggtgacaacccgcgttcca

SEQ ID NO: 60915 - DNA, 60 bp, Artificial
  Synthetic oligonucleotide
atcaaatagggtacatctgcagtggggttttcggtgataatccgcgttccaatgatggga

SEQ ID NO: 60916 - DNA, 60 bp, Artificial
  Synthetic oligonucleotide
tagggtacatctgcagtggggttttcggtgacaacccgcgttccaatgatggaacaggca

SEQ ID NO: 60917 - DNA, 60 bp, Artificial
  Synthetic oligonucleotide
ggacaacctaaggagaatacaatctggactagtgggagcagcatttccttttgtggcgtg

SEQ ID NO: 60918 - DNA, 50 bp, Artificial
  Synthetic oligonucleotide
ggaacctcaaaaattaaaatgaaatggggaatggagatgaggcgttgcct

SEQ ID NO: 60919 - DNA, 60 bp, Artificial
  Synthetic oligonucleotide
acatcaggaagacaggagaaaaacccgtcacttaggatgaaatggatgatggcaatgaaa

SEQ ID NO: 60920 - DNA, 60 bp, Artificial
  Synthetic oligonucleotide
ttcttaggcagaacccaacagaagagcaagctgtggatatatgcaaggctgcaatgggac

SEQ ID NO: 60921 - DNA, 60 bp, Artificial
  Synthetic oligonucleotide
aattcaaccgacactgttgacacagtactcgagaagaatgtgacagtgacacactctgta

SEQ ID NO: 60922 - DNA, 60 bp, Artificial
  Synthetic oligonucleotide
gggaaaagggcaacagctatactcagaaaagcaaccaggagattgattcagctgatagtg

SEQ ID NO: 60923 - DNA, 60 bp, Artificial
  Synthetic oligonucleotide
tggggaaaagggcaacagctatactcagaaaagcaaccaggagattgattcagctgatag

SEQ ID NO: 60924 - DNA, 60 bp, Artificial
  Synthetic oligonucleotide
cagacagcagcacaacgagcaatgatggaccaggtgcgagaaagcagaaatcctgggaat

SEQ ID NO: 60925 - DNA, 60 bp, Artificial
  Synthetic oligonucleotide
aggcgatcatggataagagcatcatactgaaagcgaacttcagtgtgatttttgaccggc

SEQ ID NO: 60926 - DNA, 52 bp, Artificial
  Synthetic oligonucleotide
aggcgatcatggataagagcatcatactgaaagcgaacttcagtgtgatttt

SEQ ID NO: 60927 - DNA, 60 bp, Artificial
  Synthetic oligonucleotide
ctttttctatcgttatgggtttgttgccaatttcagcatggagcttcctagttttggggt

SEQ ID NO: 60928 - DNA, 60 bp, Artificial
  Synthetic oligonucleotide
gtgatccgcttgttgttgccgcaagtatcattgggattttgcacttgatattgtggattc

SEQ ID NO: 60929 - DNA, 60 bp, Artificial
  Synthetic oligonucleotide
gtgatccgcttgttgttgccgcaagtatcattgggattttgcacttgatattgtggattt

SEQ ID NO: 60930 - DNA, 60 bp, Artificial
  Synthetic oligonucleotide
gtgatcctcttgttgttgccgcaagtatcattgggattttgcacttgatattgtggattc

SEQ ID NO: 60931 - DNA, 60 bp, Artificial
  Synthetic oligonucleotide
tgaattgggtgatgccccattccttgatcggctccgccgagatcagaagtccctaagagg

SEQ ID NO: 60932 - DNA, 60 bp, Artificial
  Synthetic oligonucleotide
aaagggaaatttcaaacagctgcacaaagagcaatgatggatcaagtgagagaaagccgg

SEQ ID NO: 60933 - DNA, 60 bp, Artificial
  Synthetic oligonucleotide
gggctgcggtatcagcagatccactagcatctttattagagatgtgccacagcacacaga

SEQ ID NO: 60934 - DNA, 60 bp, Artificial
  Synthetic oligonucleotide
caatagcaatggagttaatcagaatgataaaacgtgggatcaatgaccgaaacttctgga

SEQ ID NO: 60935 - DNA, 54 bp, Artificial
  Synthetic oligonucleotide
ctctagaagtggatttgagatgatttgggatcctaatggatggacagaaactga

SEQ ID NO: 60936 - DNA, 60 bp, Artificial
  Synthetic oligonucleotide
atgcaattggggtcctcatcggaggacttgaatggaatgataacacagttcgagtctcta

SEQ ID NO: 60937 - DNA, 60 bp, Artificial
  Synthetic oligonucleotide
cgaaaaggggaaggttactaaatcaatagagttaaatgcacccaattttcattatgagga

SEQ ID NO: 60938 - DNA, 60 bp, Artificial
  Synthetic oligonucleotide
acctatgactggactctaaataggaaccagcctgctgcaacagcattggccaacacaata

SEQ ID NO: 60939 - DNA, 60 bp, Artificial
  Synthetic oligonucleotide
tgatcttcttgaaaatttgcaggcctatcagaaacgaatgggggtgcagatgcaacgatt

SEQ ID NO: 60940 - DNA, 53 bp, Artificial
  Synthetic oligonucleotide
atggagagtgtgaagaacggcacatatgactatcctaagtattcagaggagtc

SEQ ID NO: 60941 - DNA, 60 bp, Artificial
  Synthetic oligonucleotide
cggccattattaatagatggaactgcatcattgagccctggaatgatgatgggcatgttc

SEQ ID NO: 60942 - DNA, 60 bp, Artificial
  Synthetic oligonucleotide
tgatgattttgctctgattgtgaatgcacccgaccatgagggaattcaagccggagtcga

SEQ ID NO: 60943 - DNA, 60 bp, Artificial
  Synthetic oligonucleotide
ccaccattgaagatctcagacggcaaaagtagtgaatttagcttgtccttcatgaaaaaa

SEQ ID NO: 60944 - DNA, 60 bp, Artificial
  Synthetic oligonucleotide
ccaatttcagcatggagcttcctagttttggggtgtctggggtcaatgaatctgcagaca

SEQ ID NO: 60945 - DNA, 54 bp, Artificial
  Synthetic oligonucleotide
gacgattaattcaaaatagcataacaatagagagaatggtgctctctgcttttg

SEQ ID NO: 60946 - DNA, 60 bp, Artificial
  Synthetic oligonucleotide
aatgataacacagttcgagtctctaaaactctacagagattcgcttggagaagcagtaat

SEQ ID NO: 60947 - DNA, 60 bp, Artificial
  Synthetic oligonucleotide
cctgatatgactccaagtaccgagatgtcaatgagaggagtgagagtcagcaaaacgggt

SEQ ID NO: 60948 - DNA, 60 bp, Artificial
  Synthetic oligonucleotide
ctgacatgactccaagtaccgagatgtcaatgagaggagtgagagtcagcaaaatgggtg

SEQ ID NO: 60949 - DNA, 60 bp, Artificial
  Synthetic oligonucleotide
gactccaagtaccgagatgtcaatgagaggagtgagagtcagcaaaacgggtgtagatga

SEQ ID NO: 60950 - DNA, 60 bp, Artificial
  Synthetic oligonucleotide
atgactccaagtaccgagatgtcaatgagaggagtgagagtcagcaaaatgggtgtagat

SEQ ID NO: 60951 - DNA, 60 bp, Artificial
  Synthetic oligonucleotide
gcctgatatgactccaagtaccgagatgtcaatgagaggagtgagagtcagcaaaatggg

SEQ ID NO: 60952 - DNA, 60 bp, Artificial
  Synthetic oligonucleotide
attggtggaattggacgattctacatccaaatgtgcaccgaactcaaactcagtgattat

SEQ ID NO: 60953 - DNA, 60 bp, Artificial
  Synthetic oligonucleotide
tacctaactgacatgactattgaggaaatgtcaagggactggttcatgctcatgcccaag

SEQ ID NO: 60954 - DNA, 60 bp, Artificial
  Synthetic oligonucleotide
cgctacctaactgacatgactattgaggaaatgtcaagggactggttcatgctcatgccc

SEQ ID NO: 60955 - DNA, 60 bp, Artificial
  Synthetic oligonucleotide
ccgaagatccagatgaaggcacagctggagtggagtctgctgttctgagaggattcctca

SEQ ID NO: 60956 - DNA, 60 bp, Artificial
  Synthetic oligonucleotide
gggcagggagacgtagtgttggtaatgaaacggaaacgggactctagcatacttactgac

SEQ ID NO: 60957 - DNA, 60 bp, Artificial
  Synthetic oligonucleotide
gtcgccagttcactagtgcttctggtctccctgggggcaatcagcttctggatgtgttct

SEQ ID NO: 60958 - DNA, 60 bp, Artificial
  Synthetic oligonucleotide
gattccaacactgtgtcaagctttcaggtagactgctttctttggcatgtccgcaaacgg

SEQ ID NO: 60959 - DNA, 60 bp, Artificial
  Synthetic oligonucleotide
tatgcagacacaatatgtataggctaccatgcgaacaactcaactgacactgttgacaca

SEQ ID NO: 60960 - DNA, 60 bp, Artificial
  Synthetic oligonucleotide
ccgctacagatgcagacacaatatgtataggctaccatgcaaacaattcaaccgacactg

SEQ ID NO: 60961 - DNA, 60 bp, Artificial
  Synthetic oligonucleotide
ccacagatgcagacacaatatgtataggctaccatgcgaacaactcaaccgacactgttg

SEQ ID NO: 60962 - DNA, 58 bp, Artificial
  Synthetic oligonucleotide
cctgaaagtgccagcacaaaatgctataagcacaacgttcccttacactggagacccc

SEQ ID NO: 60963 - DNA, 60 bp, Artificial
  Synthetic oligonucleotide
gattctgttatgtacatttacagctacatatgcagacacaatatgtataggctaccatgc

SEQ ID NO: 60964 - DNA, 60 bp, Artificial
  Synthetic oligonucleotide
taattcacaagatacagagctctctttcacaatcactggagacaacaccaaatggaacga

SEQ ID NO: 60965 - DNA, 60 bp, Artificial
  Synthetic oligonucleotide
ggaggcaatggctttccttgaagaatcccatccagggatctttgaaaactcgtgtcttga

SEQ ID NO: 60966 - DNA, 60 bp, Artificial
  Synthetic oligonucleotide
atagcaacaagacccaaggtgagaggtcaagcagggagaatgaactattactggacacta

SEQ ID NO: 60967 - DNA, 60 bp, Artificial
  Synthetic oligonucleotide
caacacttcccagaaggtctggagccgcaggtgctgcagtgaaaggagttggaacaatag

SEQ ID NO: 60968 - DNA, 60 bp, Artificial
  Synthetic oligonucleotide
tagataatcactcactgagtgacatcgaaatcatggcgtcccaaggcaccaaacggtctt

SEQ ID NO: 60969 - DNA, 60 bp, Artificial
  Synthetic oligonucleotide
gtattagaagcaatggctttccttgaagaatcccatcctggtatctttgaaaactcttgt

SEQ ID NO: 60970 - DNA, 60 bp, Artificial
  Synthetic oligonucleotide
ccttagacaaaacccaacagaagagcaagctgtggatatatgcaaggcagcaatgggcct

SEQ ID NO: 60971 - DNA, 60 bp, Artificial
  Synthetic oligonucleotide
cttaggcaaaatccaacagaagagcaagctgtggatatatgcaaggcagcaatgggactg

SEQ ID NO: 60972 - DNA, 60 bp, Artificial
  Synthetic oligonucleotide
ttcttaggcaaaatccaacagaagagcaagctgtggatatatgcaaggcagcaatgggac

SEQ ID NO: 60973 - DNA, 60 bp, Artificial
  Synthetic oligonucleotide
gacatccttagacaaaacccaacagaagagcaagctgtggatatatgcaaggcagcaatg

SEQ ID NO: 60974 - DNA, 60 bp, Artificial
  Synthetic oligonucleotide
actgaagacccagatgaaggcacagctggagtggaatctgctgttctaaggggattcctc

SEQ ID NO: 60975 - DNA, 60 bp, Artificial
  Synthetic oligonucleotide
tggaaatgtgccacagcacacagattggtggaataaggatggtggacatcctcaggcaga

SEQ ID NO: 60976 - DNA, 60 bp, Artificial
  Synthetic oligonucleotide
ctttttctatcgttatgggtttgttgccaatttcagtatggagcttcctagttttggagt

SEQ ID NO: 60977 - DNA, 60 bp, Artificial
  Synthetic oligonucleotide
gtgttggtaatgaaacggaaacgggactcaagcatacttactgacagccagacagcgacc

SEQ ID NO: 60978 - DNA, 60 bp, Artificial
  Synthetic oligonucleotide
gaatggaccaggcgatcatggaaaagaacatcatactgaaagcgaacttcagtgtaattt

SEQ ID NO: 60979 - DNA, 60 bp, Artificial
  Synthetic oligonucleotide
tggaccaggcgatcatggataagaacatcatactgaaagcgaacttcagtgtgatttttg

SEQ ID NO: 60980 - DNA, 60 bp, Artificial
  Synthetic oligonucleotide
caaagtgaactcagtaattgagaaaatgaacactcaatttacttcagtgggcaaggagtt

SEQ ID NO: 60981 - DNA, 60 bp, Artificial
  Synthetic oligonucleotide
cctatggagtaaaacgagcgatgccggatcagaccgagtgatggtatcacctctggctgt

SEQ ID NO: 60982 - DNA, 60 bp, Artificial
  Synthetic oligonucleotide
tctatggagtaaaacgagcgatgccggatcagaccgagtgatggtatcacctctggctgt

SEQ ID NO: 60983 - DNA, 60 bp, Artificial
  Synthetic oligonucleotide
ccggccattattaatagatggaactgcatcattgagccctggaatgatgatgggcatgtt

SEQ ID NO: 60984 - DNA, 60 bp, Artificial
  Synthetic oligonucleotide
ccattcaatccagaggtctgtttggagccattgccggtttcattgaagggggatgggctg

SEQ ID NO: 60985 - DNA, 60 bp, Artificial
  Synthetic oligonucleotide
acattactaagggctttcaccgaagagggagcaattgttggcgaaatttcaccattgcct

SEQ ID NO: 60986 - DNA, 60 bp, Artificial
  Synthetic oligonucleotide
ggctttcaccgaagagggagcaattgttggcgaaatttcaccattgccttcttttccagg

SEQ ID NO: 60987 - DNA, 60 bp, Artificial
  Synthetic oligonucleotide
gactggtcttggccagacggtgctgagttgccattcaccattgacaagtagtctgttcaa

SEQ ID NO: 60988 - DNA, 60 bp, Artificial
  Synthetic oligonucleotide
agactggtcttggccagacggtgctgagttgccattcaccattgacaagtagtctgttca

SEQ ID NO: 60989 - DNA, 60 bp, Artificial
  Synthetic oligonucleotide
gggaagatctcacttaaggaatgacaccgatgtggtaaactttgtgagcatggagttttc

SEQ ID NO: 60990 - DNA, 60 bp, Artificial
  Synthetic oligonucleotide
aagccttacaactactgcttgaagtggagcaagagataagaactttctcgtttcagctta

SEQ ID NO: 60991 - DNA, 60 bp, Artificial
  Synthetic oligonucleotide
gcaagccttgcaactattgcttgaagtggagcaagagataagaactttctcgtttcagct

SEQ ID NO: 60992 - DNA, 65 bp, Artificial
  Synthetic oligonucleotide
gagacacaaattgaagataacagagaatagttttgagcaaataacatttatgcaagccttacagc

SEQ ID NO: 60993 - DNA, 60 bp, Artificial
  Synthetic oligonucleotide
ctaaaagtatcagctctagacgtggatttgagatgatttgggatcctaatggatggacag

SEQ ID NO: 60994 - DNA, 60 bp, Artificial
  Synthetic oligonucleotide
ctggcaatctccaaacattgaagataagagtgcatgagggatatgaagaattcacaatgg

SEQ ID NO: 60995 - DNA, 60 bp, Artificial
  Synthetic oligonucleotide
cgggcaatctccaaacattgaagataagagtgcatgagggatatgaagaattcacaatgg

SEQ ID NO: 60996 - DNA, 60 bp, Artificial
  Synthetic oligonucleotide
atgataagcaaatgtagaactaaagagggaaggagaaagaccaatttgtacggcttcatc

SEQ ID NO: 60997 - DNA, 60 bp, Artificial
  Synthetic oligonucleotide
atgataagcaaatgtagaactaaagagggaaggagaaagaccaatttgtacggcttcatt

SEQ ID NO: 60998 - DNA, 60 bp, Artificial
  Synthetic oligonucleotide
atggcaagactagggaaaggatacatgttcgaaagtaagagcatgaaacttcgaacacag

SEQ ID NO: 60999 - DNA, 60 bp, Artificial
  Synthetic oligonucleotide
cactgagtgacattcacatcatggcgtctcaaggcaccaaacgatcttatgggcagatgg

SEQ ID NO: 61000 - DNA, 60 bp, Artificial
  Synthetic oligonucleotide
gtattcacgctcaccgtgcccagtgagcgaggactgcagcgtagacgctttgtccaaaat

SEQ ID NO: 61001 - DNA, 60 bp, Artificial
  Synthetic oligonucleotide
gaatggaccaggcgatcatggaaaagagcatcatactgaaagcgaacttcagtgtgattt

SEQ ID NO: 61002 - DNA, 60 bp, Artificial
  Synthetic oligonucleotide
ggattttaggatttgtgttcacgctcaccgtgcccagtgagcggggactgcagcgtagac

SEQ ID NO: 61003 - DNA, 60 bp, Artificial
  Synthetic oligonucleotide
ctaaagacaagaccaatcctgtcacctctgactaaggggattttaggatttgtgttcacg

SEQ ID NO: 61004 - DNA, 60 bp, Artificial
  Synthetic oligonucleotide
agttcatggtcctacataatagagacttcaaattcagaaaacggaacatgctaccccgga

SEQ ID NO: 61005 - DNA, 60 bp, Artificial
  Synthetic oligonucleotide
gagaagagatagacggggtgaaactagaatcaatgggagtttaccagattttggcgatct

SEQ ID NO: 61006 - DNA, 60 bp, Artificial
  Synthetic oligonucleotide
ttgaagccactgggaacttaatagcaccatggtacgctttcgcattgaacaagggttctg

SEQ ID NO: 61007 - DNA, 60 bp, Artificial
  Synthetic oligonucleotide
ataacttttgaagccactgggaacttaatagcaccatggtacgcattcgcattgaataag

SEQ ID NO: 61008 - DNA, 60 bp, Artificial
  Synthetic oligonucleotide
ggtcctacataatagagacttcaaattcagaaaacggaacatgctaccccggagagttca

SEQ ID NO: 61009 - DNA, 60 bp, Artificial
  Synthetic oligonucleotide
tgatgattttgctctgattgtgaatgcacccaatcatgaaggaattcaagccggagtcaa

SEQ ID NO: 61010 - DNA, 56 bp, Artificial
  Synthetic oligonucleotide
agttttgcatttaacacaggggacatgctgggaacagatgtacactccaggtgggg

SEQ ID NO: 61011 - DNA, 60 bp, Artificial
  Synthetic oligonucleotide
atgagggacggctgatccagaacagcttaacaatagagagaatggtgctctctgcttttg

SEQ ID NO: 61012 - DNA, 60 bp, Artificial
  Synthetic oligonucleotide
tatgaggtacggctgatccagaacagcttaacaatagagagaatggtgctctctgctttt

SEQ ID NO: 61013 - DNA, 60 bp, Artificial
  Synthetic oligonucleotide
tgaggggcggctgatccagaacagcctaacaatagagagaatggtgctctctgcttttga

SEQ ID NO: 61014 - DNA, 60 bp, Artificial
  Synthetic oligonucleotide
ttctctcagcatttgatgagaggagaaacaaatatctggaagagcatcccagtgctggga

SEQ ID NO: 61015 - DNA, 60 bp, Artificial
  Synthetic oligonucleotide
ccgtctgctccaaaacagtcaagtcttcagtcttatcagaccaaacgaaaatccagcaca

SEQ ID NO: 61016 - DNA, 60 bp, Artificial
  Synthetic oligonucleotide
cccgaattgatgcacggattgatttcgaatctggaaggataaagaaagaggagttcgctg

SEQ ID NO: 61017 - DNA, 60 bp, Artificial
  Synthetic oligonucleotide
caagagcccgaattgatgcacggattgatttcgaatctggaaggataaagaaagaggaat

SEQ ID NO: 61018 - DNA, 60 bp, Artificial
  Synthetic oligonucleotide
cagaaaggggaagatggacaaaaaacaccgaaactggagcaccgcaactcaacccgattg

SEQ ID NO: 61019 - DNA, 60 bp, Artificial
  Synthetic oligonucleotide
tactcagaaaggggaagatggacaaaaaacaccgaaactggagcaccgcaactcaacccg

SEQ ID NO: 61020 - DNA, 60 bp, Artificial
  Synthetic oligonucleotide
actcagaaaggggaagatggacaaaaaacaccgaaactggagcaccgcaactcaacccga

SEQ ID NO: 61021 - DNA, 60 bp, Artificial
  Synthetic oligonucleotide
agagaccctaatactactaagggctttcaccgaagagggagcaattgttggcgaaatttc

SEQ ID NO: 61022 - DNA, 60 bp, Artificial
  Synthetic oligonucleotide
atacttactgacagccagacagcgaccaaaagaattcggatggccatcaattaatgtcga

SEQ ID NO: 61023 - DNA, 60 bp, Artificial
  Synthetic oligonucleotide
tgacataaatccaggtcatgcagatctcagtgccaaagaagcacaagatgttatcatgga

SEQ ID NO: 61024 - DNA, 60 bp, Artificial
  Synthetic oligonucleotide
gcagagtagaatgcagttttcttctctggctgtgaatgtaagaggatcaggaatgagaat

SEQ ID NO: 61025 - DNA, 60 bp, Artificial
  Synthetic oligonucleotide
gcagagtagaatgcagttttcttctctgaccgtgaatgtaagaggatcaggaatgagaat

SEQ ID NO: 61026 - DNA, 60 bp, Artificial
  Synthetic oligonucleotide
acaaagtagaatgcagttttcttctctaaccgtgaatgtaagaggatcaggaatgagaat

SEQ ID NO: 61027 - DNA, 60 bp, Artificial
  Synthetic oligonucleotide
gcagagtggaatgcagttttcttctctggctgtgaatgtaagaggatcaggaatgagaat

SEQ ID NO: 61028 - DNA, 60 bp, Artificial
  Synthetic oligonucleotide
cactgaaatagttgtggcaatgctactatttgctatccatactgtccaaaaaagtacctt

SEQ ID NO: 61029 - DNA, 50 bp, Artificial
  Synthetic oligonucleotide
gattcgaaatggaagattttgtgcgacaatgcttcaatccgatgattgtc

SEQ ID NO: 61030 - DNA, 60 bp, Artificial
  Synthetic oligonucleotide
cagctcatggcccagccaagagcatggaatatgatgctgttgctactacgcattcttgga

SEQ ID NO: 61031 - DNA, 57 bp, Artificial
  Synthetic oligonucleotide
caaactggtcttggccagacggtgctgagttgccattcaccattgacaagtagtccg

SEQ ID NO: 61032 - DNA, 60 bp, Artificial
  Synthetic oligonucleotide
gaaggggagagttactaaatcaatagagttggatgcacccaattatcattacgaggaatg

SEQ ID NO: 61033 - DNA, 60 bp, Artificial
  Synthetic oligonucleotide
tccctcactgacccaagacttgaaccacacaaatgggagaagtactgtgttcttgagata

SEQ ID NO: 61034 - DNA, 60 bp, Artificial
  Synthetic oligonucleotide
ggaacaggtagttgtggtccagtgtcttctaatggggcatatggagtaaagggattttca

SEQ ID NO: 61035 - DNA, 60 bp, Artificial
  Synthetic oligonucleotide
gcaggcaattcctctctctgtcccatcagtggatgggctatatacagcaaggacaatggt

SEQ ID NO: 61036 - DNA, 60 bp, Artificial
  Synthetic oligonucleotide
acagcaaggacaatggtataaggataggttccaagggagatgtatttgtcatcagagagc

SEQ ID NO: 61037 - DNA, 60 bp, Artificial
  Synthetic oligonucleotide
gttcctgttatcctgatgctagcgaggtaatgtgtgtatgcagagacaactggcatggtt

SEQ ID NO: 61038 - DNA, 60 bp, Artificial
  Synthetic oligonucleotide
aacactagcaggcaattcctctctctgtcccatcagtggatgggctatatacagcaagga

SEQ ID NO: 61039 - DNA, 60 bp, Artificial
  Synthetic oligonucleotide
atgctagtgaggtaatgtgtgtatgcagagacaactggcatggttcaaatcggccatggg

SEQ ID NO: 61040 - DNA, 60 bp, Artificial
  Synthetic oligonucleotide
tcaaataggatacatatgcagcggagtttttggagacaatccacgccccaatgatggaac

SEQ ID NO: 61041 - DNA, 60 bp, Artificial
  Synthetic oligonucleotide
ccaaatagggtacatatgcagcggagtttttggagacaacccacgccccaatgatggaac

SEQ ID NO: 61042 - DNA, 60 bp, Artificial
  Synthetic oligonucleotide
cacgccccaatgatgggacaggcagttgtggtccagtgtcttctaatggggcatatgggg

SEQ ID NO: 61043 - DNA, 60 bp, Artificial
  Synthetic oligonucleotide
atgatggaacaggtagttgtggtccagtgtcttctaatggggcatatggagtaaagggat

SEQ ID NO: 61044 - DNA, 60 bp, Artificial
  Synthetic oligonucleotide
gtgcctgcatgaatggttcttgctttaccataatgactgatggaccaagtaatggccagg

SEQ ID NO: 61045 - DNA, 60 bp, Artificial
  Synthetic oligonucleotide
gtgcctgcattaatggttcttgctttaccataatgactgatggaccaagtaatggccagg

SEQ ID NO: 61046 - DNA, 60 bp, Artificial
  Synthetic oligonucleotide
tctgggttgagctaatcaggggaagacccaaggagaatacaatctggaccagtggaagca

SEQ ID NO: 61047 - DNA, 60 bp, Artificial
  Synthetic oligonucleotide
ccggcccagacaacggggcagtggctgtattgaaatacaatggcataataacagacacta

SEQ ID NO: 61048 - DNA, 60 bp, Artificial
  Synthetic oligonucleotide
ccggcccagacaatggggcagtggctgtattgaaatacaatggcataataacagatacta

SEQ ID NO: 61049 - DNA, 60 bp, Artificial
  Synthetic oligonucleotide
tgcaggactttctttctaactcaaggggccttgttgaatgacaagcattccaatggaacc

SEQ ID NO: 61050 - DNA, 60 bp, Artificial
  Synthetic oligonucleotide
cttggaatgcaggactttctttctaactcaaggggccttgttgaatgacaagcattccaa

SEQ ID NO: 61051 - DNA, 60 bp, Artificial
  Synthetic oligonucleotide
gtgttcctgttatcctgatgctagcgaggtgatgtgtgtatgcagagacaactggcatgg

SEQ ID NO: 61052 - DNA, 60 bp, Artificial
  Synthetic oligonucleotide
ctgcattaacggttcctgctttaccataatgactgatggaccaagtaatggccaggcctc

SEQ ID NO: 61053 - DNA, 60 bp, Artificial
  Synthetic oligonucleotide
gctcctgttatcctgatgctagtgaggtaatgtgtgtatgcagagacaactggcatggtt

SEQ ID NO: 61054 - DNA, 60 bp, Artificial
  Synthetic oligonucleotide
ctcacatgatgatctggcattccaatttgaatgatacaacttaccagaggacaagagctc

SEQ ID NO: 61055 - DNA, 60 bp, Artificial
  Synthetic oligonucleotide
gactcacatgatgatctggcattccaatttgaatgatacaacttaccagaggacaagagc

SEQ ID NO: 61056 - DNA, 60 bp, Artificial
  Synthetic oligonucleotide
cgggaaggatgcaggtgcattaactgaagacccagatgaaggcacagctggagtggagtc

SEQ ID NO: 61057 - DNA, 60 bp, Artificial
  Synthetic oligonucleotide
aacaggtaccttcgaattcacgagctttttctatcgttatgggtttgttgccaatttcag

SEQ ID NO: 61058 - DNA, 60 bp, Artificial
  Synthetic oligonucleotide
ggtacatttgaattcactagctttttctatcgttatgggtttgttgccaatttcagcatg

SEQ ID NO: 61059 - DNA, 60 bp, Artificial
  Synthetic oligonucleotide
acagaacaggtacatttgaattcacgagctttttctatcgttatgggtttgttgccaatt

SEQ ID NO: 61060 - DNA, 60 bp, Artificial
  Synthetic oligonucleotide
gaaatcaagtcaaaatacgccgaagagtcgacataaatcctggtcatgcagacctcagcg

SEQ ID NO: 61061 - DNA, 60 bp, Artificial
  Synthetic oligonucleotide
gaatgataacacagttcgagtctctgaaactctacagagattcgcttggagaagcagtaa

SEQ ID NO: 61062 - DNA, 60 bp, Artificial
  Synthetic oligonucleotide
ccggctggagactctaatattgctaagggctttcaccgaagagggagcaattgttggcga

SEQ ID NO: 61063 - DNA, 60 bp, Artificial
  Synthetic oligonucleotide
ccggctagagaccctaatactactaagggctttcaccgaagagggagcaattgttggcga

SEQ ID NO: 61064 - DNA, 60 bp, Artificial
  Synthetic oligonucleotide
accggttggagactttaatactactaagggctttcaccgaagagggagcaattgttggcg

SEQ ID NO: 61065 - DNA, 60 bp, Artificial
  Synthetic oligonucleotide
gaccggctggagactctaatattactaagggctttcaccgaagagggagcaattgttggc

SEQ ID NO: 61066 - DNA, 58 bp, Artificial
  Synthetic oligonucleotide
ttttgaccggttggaggctctgacattactaagggctttcaccgaagagggagcaatt

SEQ ID NO: 61067 - DNA, 60 bp, Artificial
  Synthetic oligonucleotide
ttttgaccggttggagactttaatactactaagggctttcaccgaagagggagcaattgt

SEQ ID NO: 61068 - DNA, 60 bp, Artificial
  Synthetic oligonucleotide
tttgaccggctggagactctaatattactaagggctttcaccgaagagggagcaattgtt

SEQ ID NO: 61069 - DNA, 60 bp, Artificial
  Synthetic oligonucleotide
cctagtcttgttagtctccctgggggcaatcagcttctggatgtgttctaatgggtcatt

SEQ ID NO: 61070 - DNA, 53 bp, Artificial
  Synthetic oligonucleotide
cactcactgagtgacatcgaaatcatggcgtctcaaggcaccaaacgatcata

SEQ ID NO: 61071 - DNA, 60 bp, Artificial
  Synthetic oligonucleotide
cagaccaagagctaggtgatgccccatttcttgatcggcttcgccgagatcagaagtccc

SEQ ID NO: 61072 - DNA, 60 bp, Artificial
  Synthetic oligonucleotide
gtcgaacggtctaacagctaatgaatcggggaggctaatagatttcctcaaggatgtgat

SEQ ID NO: 61073 - DNA, 60 bp, Artificial
  Synthetic oligonucleotide
cgaacggtctaacagctaatgaatcggggaggctaatagatttcctcaaggatgtgatgg

SEQ ID NO: 61074 - DNA, 60 bp, Artificial
  Synthetic oligonucleotide
cttcctagttttggagtatctggaattaatgaatctgcagacatgagtattggagttact

SEQ ID NO: 61075 - DNA, 60 bp, Artificial
  Synthetic oligonucleotide
cggctgctttgagttctaccacaagtgtgatgatgagtgcatggagagtgtgaagaatgg

SEQ ID NO: 61076 - DNA, 60 bp, Artificial
  Synthetic oligonucleotide
tgttttgagttctaccacaagtgtgatgatgagtgcatggaaagtgtgaagaacggcaca

SEQ ID NO: 61077 - DNA, 60 bp, Artificial
  Synthetic oligonucleotide
tgatggaattggacgattctacatccaaatgtgcaccgagcttaaactcaatgattatga

SEQ ID NO: 61078 - DNA, 60 bp, Artificial
  Synthetic oligonucleotide
tttaactgaagatccagatgaaggcacagctggagtggaatctgctgttctaaggggatt

SEQ ID NO: 61079 - DNA, 60 bp, Artificial
  Synthetic oligonucleotide
gtcagtgttggtcaatacctatcagtggatcatcagaaactgggaaactgttaaaattca

SEQ ID NO: 61080 - DNA, 60 bp, Artificial
  Synthetic oligonucleotide
gataatcactcactgagtgacatcaacatcatggcgtctcaaggcaccaaacgatcttat

SEQ ID NO: 61081 - DNA, 60 bp, Artificial
  Synthetic oligonucleotide
ttagatatggcaatggtgtttggataggaagaactaaaagtatcagttccagaagcggat

SEQ ID NO: 61082 - DNA, 60 bp, Artificial
  Synthetic oligonucleotide
gcaaatggagtaaaaggattttcgtttagatatggcaatggtgtttggataggaagaact

SEQ ID NO: 61083 - DNA, 60 bp, Artificial
  Synthetic oligonucleotide
agcaaatggagtaaaaggattttcgtttagatatggcaatggtgtttggataggaagaac

SEQ ID NO: 61084 - DNA, 60 bp, Artificial
  Synthetic oligonucleotide
gggaggatggacaggcatgatagatgggtggtatgggtaccatcaccagaatgagcaggg

SEQ ID NO: 61085 - DNA, 60 bp, Artificial
  Synthetic oligonucleotide
agggaggatggacaggcatgatagatgggtggtatgggtaccatcaccagaatgagcagg

SEQ ID NO: 61086 - DNA, 60 bp, Artificial
  Synthetic oligonucleotide
catggaaaagagcatcatactgaaagcgaacttcagtgtgattttcgaccggttggagac

SEQ ID NO: 61087 - DNA, 59 bp, Artificial
  Synthetic oligonucleotide
ggggtgcagatgcaacgattcaagtgatcctcttgttgttgccgcaagtataattggga

SEQ ID NO: 61088 - DNA, 59 bp, Artificial
  Synthetic oligonucleotide
ggggtgcagatgcaacgattcaagtgatcctcttgttgttgccgcaagtatagttggga

SEQ ID NO: 61089 - DNA, 60 bp, Artificial
  Synthetic oligonucleotide
gataacactgttcgagtctctaaaactctacagagattcgcttggagaagcagtagtgag

SEQ ID NO: 61090 - DNA, 60 bp, Artificial
  Synthetic oligonucleotide
acaactgtccaccagaggagttcaaattgcttcaaatgagaacatggaaacaatggactc

SEQ ID NO: 61091 - DNA, 60 bp, Artificial
  Synthetic oligonucleotide
atgataagcaaatgtagaactaaagagggaagacgaaagaccaatttgtacggattcatc

SEQ ID NO: 61092 - DNA, 50 bp, Artificial
  Synthetic oligonucleotide
acgaaggatcttatttcttcggagacaatgcagaggagtatgacaattaa

SEQ ID NO: 61093 - DNA, 53 bp, Artificial
  Synthetic oligonucleotide
acgaaggatcttatttcttcggagacaatgcagaggagtatgacaattaaaga

SEQ ID NO: 61094 - DNA, 60 bp, Artificial
  Synthetic oligonucleotide
gggacgactgattcaaaatagcataacaatagagagaatggtgctctctgcttttgacga

SEQ ID NO: 61095 - DNA, 60 bp, Artificial
  Synthetic oligonucleotide
tgaagatctcagacggcaaaagtagtgaatttagcttgtccttcatgaaaaaatgccttg

SEQ ID NO: 61096 - DNA, 60 bp, Artificial
  Synthetic oligonucleotide
aaactcgtgtcttgaaacgatggaagttgttcagcaaacaagagtggacaaactgaccca

SEQ ID NO: 61097 - DNA, 60 bp, Artificial
  Synthetic oligonucleotide
cactgagtgacatcaacatcatggcgtctcaaggcaccaaacgatcttatgagcagatgg

SEQ ID NO: 61098 - DNA, 60 bp, Artificial
  Synthetic oligonucleotide
atcggaggacttgaatggaatgataacacagttcgagtctctaaaactctacagagattc

SEQ ID NO: 61099 - DNA, 54 bp, Artificial
  Synthetic oligonucleotide
cagagattcgcttggagaagcagtaatgagactgggggacctccattcactcca

SEQ ID NO: 61100 - DNA, 60 bp, Artificial
  Synthetic oligonucleotide
tcccagtgcggggaaagatcctaagaaaactggaggacctatatacaggagagtagatgg

SEQ ID NO: 61101 - DNA, 60 bp, Artificial
  Synthetic oligonucleotide
cctttgacatgagtaatgagggatcttatttcttcggagacactgcagaagagtatgaca

SEQ ID NO: 61102 - DNA, 60 bp, Artificial
  Synthetic oligonucleotide
cttcctttgacatgagtaatgagggatcttatttcttcggagacactgcagaagagtatg

SEQ ID NO: 61103 - DNA, 60 bp, Artificial
  Synthetic oligonucleotide
cacaggaactatgcgcaggcttgccgaccaaagtctcccaccgaacttctccagccttga

SEQ ID NO: 61104 - DNA, 60 bp, Artificial
  Synthetic oligonucleotide
ggagtgcctgattaatgatccctgggttttgcttaatgcgtcttggttcaactccttcct

SEQ ID NO: 61105 - DNA, 60 bp, Artificial
  Synthetic oligonucleotide
agtgcctaattaatgatccctgggttttgcttaatgcttcttggttcaactccttcctca

SEQ ID NO: 61106 - DNA, 60 bp, Artificial
  Synthetic oligonucleotide
cacttgcagctacaaatgcagacacactatgtataggttaccatgcaaataactcaaccg

SEQ ID NO: 61107 - DNA, 60 bp, Artificial
  Synthetic oligonucleotide
catttgcagtcacaaatgcagacacactatgtataggttatcatgcaaataactcaaccg

SEQ ID NO: 61108 - DNA, 60 bp, Artificial
  Synthetic oligonucleotide
gttatcatgcaaataactcaaccgacactgttgatacagtactcgagaagaatgtaaccg

SEQ ID NO: 61109 - DNA, 60 bp, Artificial
  Synthetic oligonucleotide
ggacaaggatcaggctatgcagcggaccaaaagagcacacaaaatgccattgacgggatc

SEQ ID NO: 61110 - DNA, 60 bp, Artificial
  Synthetic oligonucleotide
ggacagggatcaggctatgcagcggaccaaaagagcacacaaaaggccattgacgggatt

SEQ ID NO: 61111 - DNA, 60 bp, Artificial
  Synthetic oligonucleotide
gagcgatgccggatcagaccgagtgatggtatcacctctggctgtgacatggtggaatag

SEQ ID NO: 61112 - DNA, 60 bp, Artificial
  Synthetic oligonucleotide
tgcatgctcttactctggagccagcagtttttatcggaatttgctgtggataacaaagaa

SEQ ID NO: 61113 - DNA, 60 bp, Artificial
  Synthetic oligonucleotide
agctgcatgctcttactctggagccagcagtttttatcggaatttgctatggataacaga

SEQ ID NO: 61114 - DNA, 60 bp, Artificial
  Synthetic oligonucleotide
tactctggagccagcagtttttatcggaatttgctgtggataacaaagaagggaacgtca

SEQ ID NO: 61115 - DNA, 60 bp, Artificial
  Synthetic oligonucleotide
gaggaaatgtcaagggactggttcatgctcatgcccaagcagaaagtggcaggccctctt

SEQ ID NO: 61116 - DNA, 60 bp, Artificial
  Synthetic oligonucleotide
agccattgccggtttcattgaagggggatggactggaatgatagatggatggtatggtta

SEQ ID NO: 61117 - DNA, 60 bp, Artificial
  Synthetic oligonucleotide
gactctactggaacctggggatacaataatatttgaggcaaatggaaatctaatagcgcc

SEQ ID NO: 61118 - DNA, 60 bp, Artificial
  Synthetic oligonucleotide
gacactgctggaacccggggatacaataatatttgaggcaaatggaaatctaatagcgcc

SEQ ID NO: 61119 - DNA, 60 bp, Artificial
  Synthetic oligonucleotide
cagaccaagaactaggtgatgccccattccttgatcggcttcgccgagatcagaagtccc

SEQ ID NO: 61120 - DNA, 60 bp, Artificial
  Synthetic oligonucleotide
tatgcagacacaatatgtataggctaccatgccaacaactcaaccgacactgttgacaca

SEQ ID NO: 61121 - DNA, 60 bp, Artificial
  Synthetic oligonucleotide
atgcagacacaatatgtataggctaccatgccaacaactcaaccgacactgttgacacag

SEQ ID NO: 61122 - DNA, 60 bp, Artificial
  Synthetic oligonucleotide
acagctacatatgcagacacaatatgtataggctaccatgccaacaactcaaccgacact

SEQ ID NO: 61123 - DNA, 60 bp, Artificial
  Synthetic oligonucleotide
ctagtcctgttatgtacatttacagctacatatgcagacacaatatgtataggctaccat

SEQ ID NO: 61124 - DNA, 60 bp, Artificial
  Synthetic oligonucleotide
tacatacgcagacacaatatgtataggctaccatgccaacaactcaaccgacactgttga

SEQ ID NO: 61125 - DNA, 60 bp, Artificial
  Synthetic oligonucleotide
ctacatatgcagacacaatatgtataggctaccatgccaacaactcaaccgacactgttg

SEQ ID NO: 61126 - DNA, 60 bp, Artificial
  Synthetic oligonucleotide
tccaaattgaacagagaagagatagacggggtgaaactagaatcaatgggagtttaccag

SEQ ID NO: 61127 - DNA, 60 bp, Artificial
  Synthetic oligonucleotide
aggtgaactcagtaattgagaaaatgaacactcaattcactgcggtgggcaaggagttca

SEQ ID NO: 61128 - DNA, 60 bp, Artificial
  Synthetic oligonucleotide
gtgaactcagtaattgagaaaatgaacactcaattcactgcggtgggcaaggagttcaac

SEQ ID NO: 61129 - DNA, 60 bp, Artificial
  Synthetic oligonucleotide
atggtatgctttcgcactgaataaggggtctgattctggaattataacatcagatgctcc

SEQ ID NO: 61130 - DNA, 60 bp, Artificial
  Synthetic oligonucleotide
ggtatgctttcgcactgaataaggggtctgattctggaattataacatcagatgctccag

SEQ ID NO: 61131 - DNA, 55 bp, Artificial
  Synthetic oligonucleotide
gaagtggaacaagagataagaactttctcgtttcagcttatttaatgataaaaaa

SEQ ID NO: 61132 - DNA, 60 bp, Artificial
  Synthetic oligonucleotide
aacttaatagcaccatggtatgctttcgcactgaacaagggctctgattctggtattata

SEQ ID NO: 61133 - DNA, 51 bp, Artificial
  Synthetic oligonucleotide
agagggagcaattgttggcgaaatttcaccattgccttctcttccaggaca

SEQ ID NO: 61134 - DNA, 60 bp, Artificial
  Synthetic oligonucleotide
cctgaaagtgccagcacaaaatgctataagcacaacgttcccttacactggagacccccc

SEQ ID NO: 61135 - DNA, 60 bp, Artificial
  Synthetic oligonucleotide
gtgagacacagactgaagataacagagaatagttttgagcaaataacgtttatgcaagcc

SEQ ID NO: 61136 - DNA, 60 bp, Artificial
  Synthetic oligonucleotide
cctttgacatgagtaatgagggatcttatttcttcggagacaatgcagaggaatatgaca

SEQ ID NO: 61137 - DNA, 60 bp, Artificial
  Synthetic oligonucleotide
ccaactggagactctaatattactaagggctttcaccgaagagggagcaattgttggcga

SEQ ID NO: 61138 - DNA, 60 bp, Artificial
  Synthetic oligonucleotide
ttgtcataagagagccgttcatttcatgctctcacttggaatgcagaaccttttttctga

SEQ ID NO: 61139 - DNA, 60 bp, Artificial
  Synthetic oligonucleotide
caaataacatttatgcaagccttacaactattgcttgaagtagaacaagagatgagaact

SEQ ID NO: 61140 - DNA, 60 bp, Artificial
  Synthetic oligonucleotide
cggccactcttaatagatggaactgcatcactgagccctggaatgatgatgggcatgttc

SEQ ID NO: 61141 - DNA, 60 bp, Artificial
  Synthetic oligonucleotide
tggtgctattgtggctgaaatatctcccattccctccatgccaggacattctacagagga

SEQ ID NO: 61142 - DNA, 60 bp, Artificial
  Synthetic oligonucleotide
ccaactagagacattagtctctctgagggcattcacagaagatggtgctattgtggctga

SEQ ID NO: 61143 - DNA, 60 bp, Artificial
  Synthetic oligonucleotide
aaatatacagagattcgcttggggaatccgtgatgagaatgggagacctccactccctcc

SEQ ID NO: 61144 - DNA, 60 bp, Artificial
  Synthetic oligonucleotide
gtgctattgtggctgaaatatctcccattccctccatgccaggacattctacagaggatg

SEQ ID NO: 61145 - DNA, 51 bp, Artificial
  Synthetic oligonucleotide
gtttgaagagatcagatggctcattgctgaatgcagaaatatactaacaag

SEQ ID NO: 61146 - DNA, 58 bp, Artificial
  Synthetic oligonucleotide
agataagaactttctcttttcagcttatttaatactaaaaaacacccttgtttctact

SEQ ID NO: 61147 - DNA, 60 bp, Artificial
  Synthetic oligonucleotide
ctatttgaccaactagagacattagtctctctgagggcattcacagaagatggtgctatt

SEQ ID NO: 61148 - DNA, 60 bp, Artificial
  Synthetic oligonucleotide
taaccggaggcctaatggtgaaaatggaccaagccataatggataagagaatcatcctta

SEQ ID NO: 61149 - DNA, 60 bp, Artificial
  Synthetic oligonucleotide
atgagcatagaggagataagccgagaatggtatatgctgatgcctaggcagaaaataacc

SEQ ID NO: 61150 - DNA, 59 bp, Artificial
  Synthetic oligonucleotide
cattctgaagagtgaaacagacgaaaacctcaaaatagccattgcgtccagtcctgctc

SEQ ID NO: 61151 - DNA, 60 bp, Artificial
  Synthetic oligonucleotide
gaaaataaccggaggcctaatggtgaaaatggaccaagccataatggataagagaatcat

SEQ ID NO: 61152 - DNA, 60 bp, Artificial
  Synthetic oligonucleotide
gaggagataagccgagaatggtatatgctgatgcctaggcagaaaataaccggaggccta

SEQ ID NO: 61153 - DNA, 60 bp, Artificial
  Synthetic oligonucleotide
gggctcgatctaagagtggctacaatggaagggaaaaagatcgttgaggacattctgaag

SEQ ID NO: 61154 - DNA, 60 bp, Artificial
  Synthetic oligonucleotide
cataagaaagctgctcagtatgagagacatgtgtgatgctccctttgatgacaggctccg

SEQ ID NO: 61155 - DNA, 56 bp, Artificial
  Synthetic oligonucleotide
ccgaacggctacattgagggcaagctttctcaaatgtccaaagaagtaaatgctag

SEQ ID NO: 61156 - DNA, 60 bp, Artificial
  Synthetic oligonucleotide
ccaaacggctacattgagggcaagctttctcaaatgtccaaagaagtaaatgctagaatt

SEQ ID NO: 61157 - DNA, 60 bp, Artificial
  Synthetic oligonucleotide
aacggctacattgagggcaagctttctcaaatgtccaaagaagtaaatgctagaattgag

SEQ ID NO: 61158 - DNA, 52 bp, Artificial
  Synthetic oligonucleotide
tgaagtggagcaagagataagaactttctcgtttcagcttatttaatgataa

SEQ ID NO: 61159 - DNA, 60 bp, Artificial
  Synthetic oligonucleotide
cgacggaataactaacaaggtgaattcggtaattgagaaaatgaacactcaattcactgt

SEQ ID NO: 61160 - DNA, 58 bp, Artificial
  Synthetic oligonucleotide
ttttgaccggttggaaaatctgacattactaagggctttcaccgaagagggagcaatt

SEQ ID NO: 61161 - DNA, 58 bp, Artificial
  Synthetic oligonucleotide
ttttgatcggttagagaatctgacattactaagggctttcaccgaagagggagcaatt

SEQ ID NO: 61162 - DNA, 59 bp, Artificial
  Synthetic oligonucleotide
ttttgaccggttggagaatctgacattactaagggctttcaccgaagagggagcaattg

SEQ ID NO: 61163 - DNA, 60 bp, Artificial
  Synthetic oligonucleotide
gctggcaattcctctctttgcccaatcagtgggtgggctatatacagcaaagacaatagc

SEQ ID NO: 61164 - DNA, 60 bp, Artificial
  Synthetic oligonucleotide
gcaaatggagtgaaggggttttcatttagatatggcaatggtgtttggataggaagaact

SEQ ID NO: 61165 - DNA, 60 bp, Artificial
  Synthetic oligonucleotide
gagcaaatggagtgaaggggttttcatttagatatggcaatggtgtttggataggaagaa

SEQ ID NO: 61166 - DNA, 60 bp, Artificial
  Synthetic oligonucleotide
gttctcacttggaatgcagaacctttttcctgacccaaggtgctctattaaatgacaagc

SEQ ID NO: 61167 - DNA, 60 bp, Artificial
  Synthetic oligonucleotide
ggaccttttttctgacccaaggtgctctattaaatgacaaacattcaaatggaaccgtta

SEQ ID NO: 61168 - DNA, 55 bp, Artificial
  Synthetic oligonucleotide
ttttctgacccaaggtgctctattaaatgacaaacattcaaatgggaccgttaag

SEQ ID NO: 61169 - DNA, 60 bp, Artificial
  Synthetic oligonucleotide
aatgggggtgcagatgcaacgattcaagtgaccctctcgttgctgccgcaagcatcattg

SEQ ID NO: 61170 - DNA, 60 bp, Artificial
  Synthetic oligonucleotide
cacctatcagtggatcatcagaaactgggaaactgttaaaattcagtggtcacaagatcc

SEQ ID NO: 61171 - DNA, 54 bp, Artificial
  Synthetic oligonucleotide
ttgtcataagagagccgttcatttcatgctctcacttggaatgcagaacctttt

SEQ ID NO: 61172 - DNA, 60 bp, Artificial
  Synthetic oligonucleotide
ccaaggtgagaggtcaagcagggagaatgaactattactggacactaatagagcctggag

SEQ ID NO: 61173 - DNA, 60 bp, Artificial
  Synthetic oligonucleotide
ccaaggtgagaggtcaagcagggagaatgaactattactggacactagttgagcctggag

SEQ ID NO: 61174 - DNA, 60 bp, Artificial
  Synthetic oligonucleotide
gaaagaggatttcgccgagatcatgaagatctgttccaccattgaagatctcagacggca

SEQ ID NO: 61175 - DNA, 60 bp, Artificial
  Synthetic oligonucleotide
ggtcttatttcttcggagacaatgcagaggagtatgacaattgaagaaaaatacccttgt

SEQ ID NO: 61176 - DNA, 58 bp, Artificial
  Synthetic oligonucleotide
gtcagtctccctgggggcaatcagtttctggatgtgctccaatgggtctttacagtgc

SEQ ID NO: 61177 - DNA, 60 bp, Artificial
  Synthetic oligonucleotide
agaacccaacagaagagcaagctgtggatatatgcaaggctgcaatgggactgagaatca

SEQ ID NO: 61178 - DNA, 60 bp, Artificial
  Synthetic oligonucleotide
cccaacagaagagcaagctgtggatatatgcaaggctgcaatgggactgagaatcagctc

SEQ ID NO: 61179 - DNA, 60 bp, Artificial
  Synthetic oligonucleotide
tggctaacaatcggaatttctggtccagataatggagcagtggctgtactaaaatacaac

SEQ ID NO: 61180 - DNA, 60 bp, Artificial
  Synthetic oligonucleotide
ctaacaatcggaatttctggtccagataatggagcagtggctgtactaaaatacaacggc

SEQ ID NO: 61181 - DNA, 60 bp, Artificial
  Synthetic oligonucleotide
ggacaaatgggacctcaaaaattaaaatgaaatggggaatggaaatgagacgttgcctcc

SEQ ID NO: 61182 - DNA, 50 bp, Artificial
  Synthetic oligonucleotide
ggaacctcaaaaattaaaatgaaatggggaatggagatgaggcattgcct

SEQ ID NO: 61183 - DNA, 60 bp, Artificial
  Synthetic oligonucleotide
taagaacatcatactgaaagcgaacttcagtgtgatttttgaccggctggagactctaat

SEQ ID NO: 61184 - DNA, 60 bp, Artificial
  Synthetic oligonucleotide
atcctgtcacctctgactaaggggattttagggtttgtgttcacgctcaccgtgcccagt

SEQ ID NO: 61185 - DNA, 60 bp, Artificial
  Synthetic oligonucleotide
atcctgtcacctctgactaaggggattttaggattcgtgttcacgctcaccgtgcccagt

SEQ ID NO: 61186 - DNA, 60 bp, Artificial
  Synthetic oligonucleotide
aatcctgtcacctctgactaaggggattttagggtttgtgttcacgctcaccgtgcccag

SEQ ID NO: 61187 - DNA, 55 bp, Artificial
  Synthetic oligonucleotide
ggtgtaacggcagcatgcccttatgctggagcaaacagcttttacagaaatttga

SEQ ID NO: 61188 - DNA, 60 bp, Artificial
  Synthetic oligonucleotide
ggccgtgacatggtggaataggaatggaccaacaacaagtacagttcactacccaaaggt

SEQ ID NO: 61189 - DNA, 60 bp, Artificial
  Synthetic oligonucleotide
ctctggccgtgacatggtggaataggaatggaccaacaacaagtacagttcactacccaa

SEQ ID NO: 61190 - DNA, 60 bp, Artificial
  Synthetic oligonucleotide
ccccattccttgatcggctccgccgagatcaaaagtctctaagaggaagaggcagcaccc

SEQ ID NO: 61191 - DNA, 60 bp, Artificial
  Synthetic oligonucleotide
gggtgatgccccattccttgatcggctccgccgagatcaaaagtctctaagaggaagagg

SEQ ID NO: 61192 - DNA, 60 bp, Artificial
  Synthetic oligonucleotide
gactggttcatgctcatgcccaagcagaaagtggcaggttccctttgcatcagaatggac

SEQ ID NO: 61193 - DNA, 60 bp, Artificial
  Synthetic oligonucleotide
agagtaggatgcagttctcctcactgactgtgaatgtaagaggatcaggaatgaggatac

SEQ ID NO: 61194 - DNA, 60 bp, Artificial
  Synthetic oligonucleotide
agggatttgagatgatttgggatcctaatggatggacagataccgatagtaatttcttag

SEQ ID NO: 61195 - DNA, 60 bp, Artificial
  Synthetic oligonucleotide
gggatttgagatgatttgggatcctaatggatggacagataccgatagtaatttcttagt

SEQ ID NO: 61196 - DNA, 60 bp, Artificial
  Synthetic oligonucleotide
gcaaatagtggagtggattctgaaagaagaatccaacgaggcacttaagatgaccattgc

SEQ ID NO: 61197 - DNA, 60 bp, Artificial
  Synthetic oligonucleotide
cttgctggaaagcaaatagtggagtggattctgaaagaagaatccaacgaggcacttaag

SEQ ID NO: 61198 - DNA, 60 bp, Artificial
  Synthetic oligonucleotide
ccactcttgctgggaggcaaattgtggagtggattctgaaagaagaatccaacgagacac

SEQ ID NO: 61199 - DNA, 56 bp, Artificial
  Synthetic oligonucleotide
aagatgagtcttctaaccgaggtcgaaacgtacgttctctctatcgtcccgtcagg

SEQ ID NO: 61200 - DNA, 60 bp, Artificial
  Synthetic oligonucleotide
aagatgagtcttctaaccgaggtcgaaacgtacgttctctctatcgtcccatcaggcccc

SEQ ID NO: 61201 - DNA, 54 bp, Artificial
  Synthetic oligonucleotide
agatgagtcttctaaccgaggtcgaaacgtacgttctctctatcgtcccgtcag

SEQ ID NO: 61202 - DNA, 60 bp, Artificial
  Synthetic oligonucleotide
ttctatcatcccgtcaggccccctcaaagccgagatcgcgcagagactggaagatgtctt

SEQ ID NO: 61203 - DNA, 60 bp, Artificial
  Synthetic oligonucleotide
ctctatcatcccgtcaggccccctcaaagccgagatcgcgcagagactggaagatgtctt

SEQ ID NO: 61204 - DNA, 60 bp, Artificial
  Synthetic oligonucleotide
ggagcaattgctggattcattgaagggggatggacaggaatgatagatggatggtatgga

SEQ ID NO: 61205 - DNA, 60 bp, Artificial
  Synthetic oligonucleotide
caatggagttaatcagaatgataaaacgtgggatcaatgaccgaaacttctggaggggtg

SEQ ID NO: 61206 - DNA, 50 bp, Artificial
  Synthetic oligonucleotide
gattcgaaatggaagactttgtgcgacaatgcttcaatccgatgattgtc

SEQ ID NO: 61207 - DNA, 60 bp, Artificial
  Synthetic oligonucleotide
attggaagattctacatacagatgtgcactgaactcaaactcagtgactatgaagggagg

SEQ ID NO: 61208 - DNA, 60 bp, Artificial
  Synthetic oligonucleotide
gggagattctacatacagatgtgcactgaactcaagctcagcgactatgaagggaggctg

SEQ ID NO: 61209 - DNA, 60 bp, Artificial
  Synthetic oligonucleotide
gtgggattggaagattctacatacagatgtgcactgaactcaaactcagcgactatgaag

SEQ ID NO: 61210 - DNA, 60 bp, Artificial
  Synthetic oligonucleotide
gaaaatttacaggcctatcagaaacgaatgggggtgcagatgcaacgattcaagtgatcc

SEQ ID NO: 61211 - DNA, 60 bp, Artificial
  Synthetic oligonucleotide
aatccgactttacttttcttaaaagtgccagcacaaaatgctataagcacaactttcccc

SEQ ID NO: 61212 - DNA, 60 bp, Artificial
  Synthetic oligonucleotide
ccgactttacttttcttaaaagtgccagcacaaaatgctataagcacaactttcccttac

SEQ ID NO: 61213 - DNA, 60 bp, Artificial
  Synthetic oligonucleotide
gaatggatgtcaatccgaccttacttttcttaaaagtgccagcacaaaatgctataagca

SEQ ID NO: 61214 - DNA, 60 bp, Artificial
  Synthetic oligonucleotide
aaggagttatctaattagggcattaaccctgaacacaatgaccaaagatgctgagagggg

SEQ ID NO: 61215 - DNA, 60 bp, Artificial
  Synthetic oligonucleotide
ccgaccttacttttcttaaaagtgccagcacaaaatgctataagcacaactttcccttac

SEQ ID NO: 61216 - DNA, 60 bp, Artificial
  Synthetic oligonucleotide
tgaatggatgtcaatccgacattacttttcttaaaagtgccagcacaaaatgctataagc

SEQ ID NO: 61217 - DNA, 60 bp, Artificial
  Synthetic oligonucleotide
catttgaatggatgtcaatccgaccttacttttcttaaaagtgccagcacaaaatgctat

SEQ ID NO: 61218 - DNA, 60 bp, Artificial
  Synthetic oligonucleotide
atttgaatggatgtcaatccgacattacttttcttaaaagtgccagcacaaaatgctata

SEQ ID NO: 61219 - DNA, 60 bp, Artificial
  Synthetic oligonucleotide
atttgaatggatgtcaatccgaccttacttttcttaaaagtgccagcacaaaatgctata

SEQ ID NO: 61220 - DNA, 60 bp, Artificial
  Synthetic oligonucleotide
catttgaatggatgtcaatccgacattacttttcttaaaagtgccagcacaaaatgctat

SEQ ID NO: 61221 - DNA, 60 bp, Artificial
  Synthetic oligonucleotide
ccatttgaatggatgtcaatccgaccttacttttcttaaaagtgccagcacaaaatgcta

SEQ ID NO: 61222 - DNA, 60 bp, Artificial
  Synthetic oligonucleotide
tttgaatggatgtcaatccgaccttacttttcttaaaagtgccagcacaaaatgctataa

SEQ ID NO: 61223 - DNA, 60 bp, Artificial
  Synthetic oligonucleotide
tttgaatggatgtcaatccgacattacttttcttaaaagtgccagcacaaaatgctataa

SEQ ID NO: 61224 - DNA, 60 bp, Artificial
  Synthetic oligonucleotide
ttgaatggatgtcaatccgacattacttttcttaaaagtgccagcacaaaatgctataag

SEQ ID NO: 61225 - DNA, 60 bp, Artificial
  Synthetic oligonucleotide
caggaagacaagagaagaaccccgctctcagaatgaaatggatgatggcaatgaaatatc

SEQ ID NO: 61226 - DNA, 60 bp, Artificial
  Synthetic oligonucleotide
gaacggctacattgagggcaagctttctcaaatgtccaaagaggtaaatgctaaaattga

SEQ ID NO: 61227 - DNA, 53 bp, Artificial
  Synthetic oligonucleotide
agcaaaagcagggtgacaaagacataatggattccaacactgtgtcaagcttt

SEQ ID NO: 61228 - DNA, 53 bp, Artificial
  Synthetic oligonucleotide
agcaaaagcagggtgacaaagacataatggactccaacactgtgtcaagcttt

SEQ ID NO: 61229 - DNA, 60 bp, Artificial
  Synthetic oligonucleotide
agcaaaagcagggtgacaaagacataatggatttcaacactgtgtcaagctttcaggtag

SEQ ID NO: 61230 - DNA, 60 bp, Artificial
  Synthetic oligonucleotide
gatctattcaaccgtcgccagttcactagtgctgtcagtctccctgggggcaatcagctt

SEQ ID NO: 61231 - DNA, 60 bp, Artificial
  Synthetic oligonucleotide
gcaattgagctcagtgtcatcattcgaaagattcgagatatttcccaagacaagctcgtg

SEQ ID NO: 61232 - DNA, 60 bp, Artificial
  Synthetic oligonucleotide
aatgtaaccgtgacacactctgttaacctgcttgaagacagccacaacggaaaactatgt

SEQ ID NO: 61233 - DNA, 60 bp, Artificial
  Synthetic oligonucleotide
ctcgtggcccaatcatgaaacaaccagaggagtaacggcagcatgcccctatgctggagc

SEQ ID NO: 61234 - DNA, 60 bp, Artificial
  Synthetic oligonucleotide
gcagatgcttatgtttctgtagggtcatcaaaatataacaggaggttcaccccagaaata

SEQ ID NO: 61235 - DNA, 60 bp, Artificial
  Synthetic oligonucleotide
ctgggaggaatagccccattacaactggggaaatgtaatattgccggatggctcttggga

SEQ ID NO: 61236 - DNA, 60 bp, Artificial
  Synthetic oligonucleotide
agtggcaccaagatatgctttcgcactgaatagaggttctggatccggtatcatcacttc

SEQ ID NO: 61237 - DNA, 60 bp, Artificial
  Synthetic oligonucleotide
ccggtgtcatcacttcagacgcaccagtgcatgattgtgacacgaagtgtcaaacacccc

SEQ ID NO: 61238 - DNA, 60 bp, Artificial
  Synthetic oligonucleotide
agtcttgttatgtgcacttgcagctacaaatgcagacacactatgtataggttaccatgc

SEQ ID NO: 61239 - DNA, 60 bp, Artificial
  Synthetic oligonucleotide
gggaatggatgctttgaattctaccacaaatgtgataatgcatgcatggagagcgtcaga

SEQ ID NO: 61240 - DNA, 58 bp, Artificial
  Synthetic oligonucleotide
aaatgccattgacgggatcacaaacaaggtgaattctgttatcgagaagatgaacacg

SEQ ID NO: 61241 - DNA, 60 bp, Artificial
  Synthetic oligonucleotide
cccagaaatagcagcgagacccaaagtgagaggtcaggcagggaggatgaactattactg

SEQ ID NO: 61242 - DNA, 60 bp, Artificial
  Synthetic oligonucleotide
cttcctttgacatgagtaatgagggatcttatttcttcggagacaatgcagaggaatatg

SEQ ID NO: 61243 - DNA, 60 bp, Artificial
  Synthetic oligonucleotide
atgagggatcttatttcttcggagacaatgcagaggagtatgacaattaaagaaaaatac

SEQ ID NO: 61244 - DNA, 60 bp, Artificial
  Synthetic oligonucleotide
gatttcaacactgtgtcaagctttcaggtagactgctttctttggcatatccgcaaacgg

SEQ ID NO: 61245 - DNA, 60 bp, Artificial
  Synthetic oligonucleotide
ccaacactgtgtcaagctttcaggtagactgctatctttggcatgtccgcaaacgatttg

SEQ ID NO: 61246 - DNA, 60 bp, Artificial
  Synthetic oligonucleotide
cgatcggcttcgccgagatcagaagtccctaagaggaagaggcagcactcttggtctgga

SEQ ID NO: 61247 - DNA, 60 bp, Artificial
  Synthetic oligonucleotide
cgctacctaactgacatgactcttgaagaaatgtcaagggactggttcatgctcatgccc

SEQ ID NO: 61248 - DNA, 51 bp, Artificial
  Synthetic oligonucleotide
acccatcacttaggatgaaatggatgatggcaatgaaatacccaattacag

SEQ ID NO: 61249 - DNA, 51 bp, Artificial
  Synthetic oligonucleotide
gagggatcttatttcttcggagacaatgcagaggagtatgacaattaaaga

SEQ ID NO: 61250 - DNA, 51 bp, Artificial
  Synthetic oligonucleotide
gaagggtcttatttcttcggagacaatgcagaggagtatgacaattaaaga

SEQ ID NO: 61251 - DNA, 60 bp, Artificial
  Synthetic oligonucleotide
agagggagcaattgttggcgaaatttcaccattgccttctcttccaggacatactgctga

SEQ ID NO: 61252 - DNA, 60 bp, Artificial
  Synthetic oligonucleotide
ccgtcgctttaaatacggtctgaaaagagggccttctacggaaggagtgccggagtccat

SEQ ID NO: 61253 - DNA, 60 bp, Artificial
  Synthetic oligonucleotide
acgggacctcaaaaattaaaatgaaatggggaatggaaatgagacgttgcctccttcagt

SEQ ID NO: 61254 - DNA, 60 bp, Artificial
  Synthetic oligonucleotide
ggaacctcaaaaattaaaatgaaatggggaatggagatgaggcgttgcctccttcagtca

SEQ ID NO: 61255 - DNA, 60 bp, Artificial
  Synthetic oligonucleotide
cccattccttgatcggctccgccgagatcagaagtccctaagaggaagaggcagcaccct

SEQ ID NO: 61256 - DNA, 60 bp, Artificial
  Synthetic oligonucleotide
atttgaatggatgtcaatccgactttacttttcttaaaagtgccagcacaaaatgctata

SEQ ID NO: 61257 - DNA, 60 bp, Artificial
  Synthetic oligonucleotide
tgattgaagaagtgcggcacaaattgaagataacagagaatagtttcgagcaaataacat

SEQ ID NO: 61258 - DNA, 60 bp, Artificial
  Synthetic oligonucleotide
aggatgtagtggcaatgactgattggtcagggtacagcggaagtttcgttcaacatcctg

SEQ ID NO: 61259 - DNA, 50 bp, Artificial
  Synthetic oligonucleotide
caaacactgtgtcaagctttcaggtagactgctttctttggcatgtccgc

SEQ ID NO: 61260 - DNA, 60 bp, Artificial
  Synthetic oligonucleotide
tgaactgctcgttctacttgaaaatgaaagaactctggactttcatgattccaatgtgag

SEQ ID NO: 61261 - DNA, 60 bp, Artificial
  Synthetic oligonucleotide
gggatggctcctgggcaacccagaatgtgaccttctactcactgcaaactcatggtccta

SEQ ID NO: 61262 - DNA, 60 bp, Artificial
  Synthetic oligonucleotide
cgagctgctcgttctacttgagaatgaaagaactctggactttcatgattccaatgtgag

SEQ ID NO: 61263 - DNA, 60 bp, Artificial
  Synthetic oligonucleotide
gaactgcttgttctacttgaaaatgaaagaactctggactttcatgattccaatgtgagg

SEQ ID NO: 61264 - DNA, 60 bp, Artificial
  Synthetic oligonucleotide
gaactgctcgttctacttgaaaatgaaagaactctggactttcatgattccaatgtgagg

SEQ ID NO: 61265 - DNA, 60 bp, Artificial
  Synthetic oligonucleotide
tcgagaagaaatagacggagtgaaactagaatcaatgggagtttaccaaattttggcgat

SEQ ID NO: 61266 - DNA, 60 bp, Artificial
  Synthetic oligonucleotide
tgaactgcttgttctacttgaaaatgaaagaactctggactttcatgattccaatgtgag

SEQ ID NO: 61267 - DNA, 60 bp, Artificial
  Synthetic oligonucleotide
gaactgctcgttttactggagaatgaaagaactctggactttcatgattccaatgtgagg

SEQ ID NO: 61268 - DNA, 60 bp, Artificial
  Synthetic oligonucleotide
gagctgctcgttctacttgagaatgaaagaactctggactttcatgattccaatgtgagg

SEQ ID NO: 61269 - DNA, 60 bp, Artificial
  Synthetic oligonucleotide
cattgagggaggatggacaggcatgatagatggatggtatgggtaccaccaccagaatga

SEQ ID NO: 61270 - DNA, 60 bp, Artificial
  Synthetic oligonucleotide
tgaactgctcgttttactggagaatgaaagaactctggactttcatgattccaatgtgag

SEQ ID NO: 61271 - DNA, 60 bp, Artificial
  Synthetic oligonucleotide
ggagcaattgctggattcattgagggaggatggacaggcatgatagatgggtggtacggg

SEQ ID NO: 61272 - DNA, 60 bp, Artificial
  Synthetic oligonucleotide
gtctcaaggcaccaaacgatcttatgagcagatggaaaccggtggagaacgccagaatgc

SEQ ID NO: 61273 - DNA, 60 bp, Artificial
  Synthetic oligonucleotide
gggaaaggcaactgtggcccagtactttctaatggagcaaatggagtaaaagggttttca

SEQ ID NO: 61274 - DNA, 60 bp, Artificial
  Synthetic oligonucleotide
caacgtggcggggtggctccttggcaacccagaatgtgacctgttgctcactgcgaattc

SEQ ID NO: 61275 - DNA, 60 bp, Artificial
  Synthetic oligonucleotide
tggcggggtggctccttggcaacccagaatgtgacctgttgctcactgcgagttcatggt

SEQ ID NO: 61276 - DNA, 60 bp, Artificial
  Synthetic oligonucleotide
acaactagggaaatgcaacgtggcggggtggctccttggcaacccagaatgtgacctgtt

SEQ ID NO: 61277 - DNA, 60 bp, Artificial
  Synthetic oligonucleotide
tcagtaattgagaaaatgaacactcaattcactgcagtgagcaaggagtttaacaatcta

SEQ ID NO: 61278 - DNA, 59 bp, Artificial
  Synthetic oligonucleotide
gtattgttctgtacattcgctgcactgaaagccgacaccatctgtataggctaccatgc

SEQ ID NO: 61279 - DNA, 60 bp, Artificial
  Synthetic oligonucleotide
gggaacggatgctttgagttctaccacaagtgtgatgatgagtgcatggagagtgtgaaa

SEQ ID NO: 61280 - DNA, 60 bp, Artificial
  Synthetic oligonucleotide
cggggtggctccttggcaacccagaatgtgacctgttgctcactgcgagttcatggtcct

SEQ ID NO: 61281 - DNA, 60 bp, Artificial
  Synthetic oligonucleotide
cctgttgctcactgcgaattcatggtcttatataatagagacttcaaattcagaaaacgg

SEQ ID NO: 61282 - DNA, 60 bp, Artificial
  Synthetic oligonucleotide
ggacttttcggagcgatcgctggattcattgaagggggatggacaggaatgatagatggg

SEQ ID NO: 61283 - DNA, 54 bp, Artificial
  Synthetic oligonucleotide
cactcactgagtgacatcgaaatcatggcgtctcaaggcaccaaacgatcatat

SEQ ID NO: 61284 - DNA, 60 bp, Artificial
  Synthetic oligonucleotide
cttcctttgacatgagtaacgaaggatcttatttcttcggagacaatgctgaggaatatg

SEQ ID NO: 61285 - DNA, 60 bp, Artificial
  Synthetic oligonucleotide
cctttgacatgagtaacgaaggatcttatttcttcggagacaatgctgaggaatatgaca

SEQ ID NO: 61286 - DNA, 60 bp, Artificial
  Synthetic oligonucleotide
taatgaagggagtatacatcaatactgctttgcttaatgcatcctgtgcagcaatggatg

SEQ ID NO: 61287 - DNA, 60 bp, Artificial
  Synthetic oligonucleotide
atgaagggagtatacatcaatactgctttgcttaatgcatcctgtgcagcaatggatgat

SEQ ID NO: 61288 - DNA, 60 bp, Artificial
  Synthetic oligonucleotide
ctgttccaccattgaagatctcagacggcaaaagtagtgaatttagcttgtccttcatga

SEQ ID NO: 61289 - DNA, 60 bp, Artificial
  Synthetic oligonucleotide
tctgttccaccattgaagatctcagacggcaaaagtagtgaatttaacttgtccttcatg

SEQ ID NO: 61290 - DNA, 60 bp, Artificial
  Synthetic oligonucleotide
ctgttccaccattgaagatctcagacggcaaaagtagtgaatttggcttgtccttcatga

SEQ ID NO: 61291 - DNA, 60 bp, Artificial
  Synthetic oligonucleotide
ctgttccaccattgaagatctcagacggcaaaagtagtgaatttaacttgtccttcatga

SEQ ID NO: 61292 - DNA, 50 bp, Artificial
  Synthetic oligonucleotide
attgaagatctcagacggcaaaagtagtgaatttagcttgtccttcatga

SEQ ID NO: 61293 - DNA, 60 bp, Artificial
  Synthetic oligonucleotide
atggatgtcaatccgactttgcttttcctgaaagtgccagcgcaaaatgctataagcaca

SEQ ID NO: 61294 - DNA, 60 bp, Artificial
  Synthetic oligonucleotide
gaatggatgtcaatccgactttgcttttcctgaaagtgccagcacaaaatgctataagca

SEQ ID NO: 61295 - DNA, 60 bp, Artificial
  Synthetic oligonucleotide
gaatggatgtcaatccgactttgcttttcctgaaagtgccagcgcaaaatgctataagca

SEQ ID NO: 61296 - DNA, 60 bp, Artificial
  Synthetic oligonucleotide
agcaaaaagaaatcttacataaatagaacaggcacatttgaattcacaagctttttctat

SEQ ID NO: 61297 - DNA, 60 bp, Artificial
  Synthetic oligonucleotide
gctcatataggagaccagtcgggatttccagtatggtggaggccatggtttccagggccc

SEQ ID NO: 61298 - DNA, 60 bp, Artificial
  Synthetic oligonucleotide
atctgttccaccattgaagatctcagacggcaaaagtagtgaatttggcttgtccttcat

SEQ ID NO: 61299 - DNA, 60 bp, Artificial
  Synthetic oligonucleotide
ttcaaatgaaaacatggatgctattgtatcgagtactcttgaactgagaagcagatactg

SEQ ID NO: 61300 - DNA, 60 bp, Artificial
  Synthetic oligonucleotide
agctgtggatatatgcaaggctgcaatgggactgagaatcagctcatccttcagttttgg

SEQ ID NO: 61301 - DNA, 60 bp, Artificial
  Synthetic oligonucleotide
gtggatatatgcaaggctgcaatgggactgagaatcagctcatccttcagttttggcggg

SEQ ID NO: 61302 - DNA, 55 bp, Artificial
  Synthetic oligonucleotide
tccttgatcggcttcgccgagatcagaagtccctaaagggaagaggcagcactct

SEQ ID NO: 61303 - DNA, 60 bp, Artificial
  Synthetic oligonucleotide
tttcttgatcggcttcgccgagatcagaagtccctaaagggaagaggcagcactctcggt

SEQ ID NO: 61304 - DNA, 56 bp, Artificial
  Synthetic oligonucleotide
ttccttgatcggcttcgccgagatcagaagtccctaaagggaagaggcagcactct

SEQ ID NO: 61305 - DNA, 57 bp, Artificial
  Synthetic oligonucleotide
aatgggtcattgcaatgcagaatatgcatttagagctggaacttcaaattgtatgga

SEQ ID NO: 61306 - DNA, 60 bp, Artificial
  Synthetic oligonucleotide
aatgggtcattgcaatgcagaatatgcatttagagttggaatttcaaaatgtatggaaaa

SEQ ID NO: 61307 - DNA, 60 bp, Artificial
  Synthetic oligonucleotide
atgggtcattgcaatgcagaatatgcatttaggactgggatttcaaattgtatggaaaaa

SEQ ID NO: 61308 - DNA, 59 bp, Artificial
  Synthetic oligonucleotide
atgggtcattgcaatgcagaatatgcatttaggactgggatttcaaattgtatggaaaa

SEQ ID NO: 61309 - DNA, 56 bp, Artificial
  Synthetic oligonucleotide
atgggtcattgcaatgcagaatatgcatttagagctggaatttcaaattgtatgga

SEQ ID NO: 61310 - DNA, 60 bp, Artificial
  Synthetic oligonucleotide
gcaaacggagtgaagggattttcatataggtatggtaatggtgtttggataggaaggact

SEQ ID NO: 61311 - DNA, 60 bp, Artificial
  Synthetic oligonucleotide
caatcagcttctggatgtgttctaatgggtctttacagtgcaggatatgcatttaaaatt

SEQ ID NO: 61312 - DNA, 58 bp, Artificial
  Synthetic oligonucleotide
caaactggtcttggccagacggtgctgagttgccattcaccattgacaagtagtccgt

SEQ ID NO: 61313 - DNA, 60 bp, Artificial
  Synthetic oligonucleotide
ttcgaaatcaagttaaaatacgccgcagagttgacataaacccgggccatgcagacctca

SEQ ID NO: 61314 - DNA, 60 bp, Artificial
  Synthetic oligonucleotide
tgaacagagcgaaccaacggctgaatcccatgcatcaactcctgaggcacttccaaaagg

SEQ ID NO: 61315 - DNA, 60 bp, Artificial
  Synthetic oligonucleotide
caggactgtaagattgctcctttgatggtggcatacatgttggaaagagaactggttcgc

SEQ ID NO: 61316 - DNA, 60 bp, Artificial
  Synthetic oligonucleotide
tctcacttaaggaatgacaccgatgtggtaaactttgtgagcatggagttttccctcact

SEQ ID NO: 61317 - DNA, 60 bp, Artificial
  Synthetic oligonucleotide
tgtcccatccgtgggtgggctatatacagcaaagacaatggcataagaattggttccaaa

SEQ ID NO: 61318 - DNA, 60 bp, Artificial
  Synthetic oligonucleotide
tttgtatcagaatggaccaggcaataatggataagaacatcatactgaaagcgaatttca

SEQ ID NO: 61319 - DNA, 60 bp, Artificial
  Synthetic oligonucleotide
gaattggacgattctacatccaaatgtgcaccgagcttaaactcaatgattatgaggtac

SEQ ID NO: 61320 - DNA, 60 bp, Artificial
  Synthetic oligonucleotide
atggaacctcaaaaattaaaatgaaatggggaatggagatgagacgttgcctcctccaat

SEQ ID NO: 61321 - DNA, 60 bp, Artificial
  Synthetic oligonucleotide
atggaacctcaaaaattaaaatgaaatggggaatggagatgaggcgttgtctcctccaat

SEQ ID NO: 61322 - DNA, 60 bp, Artificial
  Synthetic oligonucleotide
atggaacctcaaaaattaaaatgaaatggggaatggaaatgaggcgttgcctccttcagt

SEQ ID NO: 61323 - DNA, 60 bp, Artificial
  Synthetic oligonucleotide
ggatgggagacctccactccctccaaaacagaaacggaaaatggcgagaacagttgagtc

SEQ ID NO: 61324 - DNA, 60 bp, Artificial
  Synthetic oligonucleotide
agggcaacagctatactcagaaaagcaaccaggagattgattcaactaatagtgagtgga

SEQ ID NO: 61325 - DNA, 60 bp, Artificial
  Synthetic oligonucleotide
cttgaagagtcccacccagggatctttgaaaactcgtgtcttgaaacgatggaagttgtc

SEQ ID NO: 61326 - DNA, 60 bp, Artificial
  Synthetic oligonucleotide
gtcccacccagggatctttgaaaactcgtgtcttgaaacgatggaagttgtccaacaaac

SEQ ID NO: 61327 - DNA, 60 bp, Artificial
  Synthetic oligonucleotide
agagctctctttcacaatcactggagacaacaccaaatggaacgaaaatcagaaccctag

SEQ ID NO: 61328 - DNA, 60 bp, Artificial
  Synthetic oligonucleotide
ccatgcgaacaattcaaccgacactgttgacacagtactcgagaagaatgtgacagtgac

SEQ ID NO: 61329 - DNA, 60 bp, Artificial
  Synthetic oligonucleotide
gccgaagagtcgacataaatcctggccatgcagacctcagtgccaaggaggcacaggatg

SEQ ID NO: 61330 - DNA, 60 bp, Artificial
  Synthetic oligonucleotide
gccgaagagtagacataaatcctggccatgcagacctcagtgccaaggaggcacaggatg

SEQ ID NO: 61331 - DNA, 60 bp, Artificial
  Synthetic oligonucleotide
aaactctacagagattcgcttggagaagcagtaatgagaatgggagacctccactccctc

SEQ ID NO: 61332 - DNA, 60 bp, Artificial
  Synthetic oligonucleotide
gtgaattctgtaattgagaaaatgaacactcaattcacagctgtgggcaaagaattcagc

SEQ ID NO: 61333 - DNA, 60 bp, Artificial
  Synthetic oligonucleotide
ctagcagttcatacaggagaccggttggaatttccagcatggtggaggccatggtgtcta

SEQ ID NO: 61334 - DNA, 60 bp, Artificial
  Synthetic oligonucleotide
agagcaccaagctaagaatggcaacaggactaagaaatgtcccatccattcaatccagag

SEQ ID NO: 61335 - DNA, 60 bp, Artificial
  Synthetic oligonucleotide
taacaaagaagggaacttcatatccaaaactcagcaaatcatacacgaacaataagggaa

SEQ ID NO: 61336 - DNA, 60 bp, Artificial
  Synthetic oligonucleotide
agaatgtcccaaatacgtcaagagcaccaagctaagaatggcaacaggactaagaaatgt

SEQ ID NO: 61337 - DNA, 60 bp, Artificial
  Synthetic oligonucleotide
cttcatatccaaaactcagcaaatcatacacgaacaataagggaaaagaagtgcttgtgc

SEQ ID NO: 61338 - DNA, 60 bp, Artificial
  Synthetic oligonucleotide
agaatgtcccaaatatgtcaagagtaccaagctaagaatggcaacaggactaagaaatgt

SEQ ID NO: 61339 - DNA, 60 bp, Artificial
  Synthetic oligonucleotide
gccccaaatatgtcaagagcaccaagctaagaatggcaacaggactaagaaatgtcccat

SEQ ID NO: 61340 - DNA, 60 bp, Artificial
  Synthetic oligonucleotide
cccaaatacgtcaagagcgtcaagctaagaatggcaacaggactaagaaatgtcccatcc

SEQ ID NO: 61341 - DNA, 60 bp, Artificial
  Synthetic oligonucleotide
cccaaatatgtcaagagtaccaagctaagaatggcaacaggactaagaaatgtcccatcc

SEQ ID NO: 61342 - DNA, 60 bp, Artificial
  Synthetic oligonucleotide
gactatttggagcaattgctggattcattgagggaggatggacaggcatgatagatgggt

SEQ ID NO: 61343 - DNA, 60 bp, Artificial
  Synthetic oligonucleotide
caatccagaggactgtttggagcaattgccggattcattgagggaggatggacaggcatg

SEQ ID NO: 61344 - DNA, 60 bp, Artificial
  Synthetic oligonucleotide
aatgtcccaaatacgtcaagagcgtcaagctaagaatggcaacaggactaagaaatgtcc

SEQ ID NO: 61345 - DNA, 60 bp, Artificial
  Synthetic oligonucleotide
cactcactccaaaacagaaacggaaaatggcgagagcaattaggtcagaagttcgaagaa

SEQ ID NO: 61346 - DNA, 60 bp, Artificial
  Synthetic oligonucleotide
tccactcactccaaaacagaaacggaaaatggcgagaacaattaggtcagaagttcgaag

SEQ ID NO: 61347 - DNA, 55 bp, Artificial
  Synthetic oligonucleotide
actcactccaaaacagaaacggaaaatggcgagaacaattaggtcagaagttcga

SEQ ID NO: 61348 - DNA, 60 bp, Artificial
  Synthetic oligonucleotide
gggttttgcttaatgcttcttggttcaactccttcctaactcatgcattgagatagttgg

SEQ ID NO: 61349 - DNA, 60 bp, Artificial
  Synthetic oligonucleotide
cagtagtgagaatgggagacctccactcactccaaaacagaaacggaaaatggcgagaac

SEQ ID NO: 61350 - DNA, 60 bp, Artificial
  Synthetic oligonucleotide
aaattgaatagagaggaagtagacggtgtgaaactagaatcaatgggagtttaccagatt

SEQ ID NO: 61351 - DNA, 60 bp, Artificial
  Synthetic oligonucleotide
gtctcaaggcaccaaacgatcatatgaacaaatggaaactggtggagaacgccagaatgc

SEQ ID NO: 61352 - DNA, 60 bp, Artificial
  Synthetic oligonucleotide
gctaagttcagtttcttcatttgaaaggtttgaaattttcccgaaggcaaactcatggcc

SEQ ID NO: 61353 - DNA, 60 bp, Artificial
  Synthetic oligonucleotide
acctagctgacatgactcttgaggagatgtcaagggactggttcatgctcatgcccaagc

SEQ ID NO: 61354 - DNA, 56 bp, Artificial
  Synthetic oligonucleotide
acctagctgacatgactcttgaggagatgtcaagggactggttcatgctcatgccc

SEQ ID NO: 61355 - DNA, 60 bp, Artificial
  Synthetic oligonucleotide
tatataatagagacttcaaattcagaaaatggaacatgctaccccggggaattcatcgat

SEQ ID NO: 61356 - DNA, 60 bp, Artificial
  Synthetic oligonucleotide
ctcacagcgaattcatggtcttacataatagagacttcaaattcagaaaatggaacatgc

SEQ ID NO: 61357 - DNA, 60 bp, Artificial
  Synthetic oligonucleotide
tcaaattcagaaaatggaacatgctaccccggggaattcatcgattatgaagaattgcga

SEQ ID NO: 61358 - DNA, 60 bp, Artificial
  Synthetic oligonucleotide
ggaattgatggatgaggattaccaggggcgtttatgcaacccattgaacccatttgtcag

SEQ ID NO: 61359 - DNA, 60 bp, Artificial
  Synthetic oligonucleotide
ggaattgatggatgaggattaccaggggcgtttatgcaacccattgaacccgtttgtcag

SEQ ID NO: 61360 - DNA, 60 bp, Artificial
  Synthetic oligonucleotide
ggatttgatggatgaggattaccaggggcgtttatgcaacccattgaacccatttgtcag

SEQ ID NO: 61361 - DNA, 60 bp, Artificial
  Synthetic oligonucleotide
tatgcttctaagaagtgccataggccaggtgtcaaggcccatgttcctgtatgtgaggac

SEQ ID NO: 61362 - DNA, 60 bp, Artificial
  Synthetic oligonucleotide
tctacaaaacttattttgaaaaagtcgaaaggttaaaacatggaacctttggccctgtcc

SEQ ID NO: 61363 - DNA, 60 bp, Artificial
  Synthetic oligonucleotide
ctactgagatcagagcatctgttgggagaatggttggtgggattggaagattctacatac

SEQ ID NO: 61364 - DNA, 60 bp, Artificial
  Synthetic oligonucleotide
caatggactccagtactcttgaactgagaagcagatactgggctataaggaccaggagcg

SEQ ID NO: 61365 - DNA, 57 bp, Artificial
  Synthetic oligonucleotide
ttgaggcactcatggagtggctaaagacaagaccaatcctgtcacctctgactaagg

SEQ ID NO: 61366 - DNA, 60 bp, Artificial
  Synthetic oligonucleotide
ctcgaggctctcatggagtggctaaagacaagaccaatcctgtcacctctgactaagggg

SEQ ID NO: 61367 - DNA, 60 bp, Artificial
  Synthetic oligonucleotide
ccagtaacgctagcaggcaattcctctctctgtcccatcagtgggtgggctatatacagc

SEQ ID NO: 61368 - DNA, 60 bp, Artificial
  Synthetic oligonucleotide
cagcaaggataatggtataagaataggttccaagggagatgtatttgtcatcagagagcc

SEQ ID NO: 61369 - DNA, 60 bp, Artificial
  Synthetic oligonucleotide
gatgtatttgtcatcagagagccttttatttcatgctctcaattggaatgcaggactttc

SEQ ID NO: 61370 - DNA, 60 bp, Artificial
  Synthetic oligonucleotide
ggaaaggtagtcaaatcagttgagttgaatgcccctaattaccactatgaggagtgttcc

SEQ ID NO: 61371 - DNA, 60 bp, Artificial
  Synthetic oligonucleotide
ggtagtcaaatcagttgagttgaatgcccctaattaccactacgaggagtgctcctgtta

SEQ ID NO: 61372 - DNA, 60 bp, Artificial
  Synthetic oligonucleotide
gcaagacattgtagcaataactgattggtcaggatatagcggaagttttgttcagcatcc

SEQ ID NO: 61373 - DNA, 60 bp, Artificial
  Synthetic oligonucleotide
atttctctgtgaaacaagatattgtagcaataactgattggtcaggatatagcggaagtt

SEQ ID NO: 61374 - DNA, 60 bp, Artificial
  Synthetic oligonucleotide
gtttctctgtgaagcaagacattgtagcaataactgattggtcaggatatagcggaagtt

SEQ ID NO: 61375 - DNA, 60 bp, Artificial
  Synthetic oligonucleotide
tggtgcacttgccagttgcatgggcctcatatacaacaggatgggggctgtgaccactga

SEQ ID NO: 61376 - DNA, 60 bp, Artificial
  Synthetic oligonucleotide
agtcaaaatacgccgaagagtcgacataaatcctggccatgcagacctcagtgccaagga

SEQ ID NO: 61377 - DNA, 60 bp, Artificial
  Synthetic oligonucleotide
aagtcaaaatacgccgaagagtcgacataaatcctggccatgcagacctcagtgccaagg

SEQ ID NO: 61378 - DNA, 60 bp, Artificial
  Synthetic oligonucleotide
ggtacttttgaattcacaagctttttctatcgttatgggtttgttgccaatttcagcatg

SEQ ID NO: 61379 - DNA, 60 bp, Artificial
  Synthetic oligonucleotide
gaaaactcatgtattgaaacgatggaggctgttcagcaaacaagagtggacaaactgaca

SEQ ID NO: 61380 - DNA, 60 bp, Artificial
  Synthetic oligonucleotide
ccaccagaggagttcaaattgcttcaaatgagaacatggaaacaatggactccagtactc

SEQ ID NO: 61381 - DNA, 60 bp, Artificial
  Synthetic oligonucleotide
cttcgccgagatcagaagtccctaagaggaagaggcagcactctcggtctggacatcgag

SEQ ID NO: 61382 - DNA, 60 bp, Artificial
  Synthetic oligonucleotide
cgatcggcttcgccgagatcagaagtccctaagaggaagaggctgcactcttggtctgga

SEQ ID NO: 61383 - DNA, 54 bp, Artificial
  Synthetic oligonucleotide
aagaactttctcgtttcagcttatttagtactaaaaaacacccttgtttctact

SEQ ID NO: 61384 - DNA, 58 bp, Artificial
  Synthetic oligonucleotide
aaaattaaaatgaaatggggaatggaaatgagacgttgcctccttcagtcccttcagc

SEQ ID NO: 61385 - DNA, 60 bp, Artificial
  Synthetic oligonucleotide
agggctttcaccgaagagggagcaattgttggagaaatttcaccactactttctcttcca

SEQ ID NO: 61386 - DNA, 53 bp, Artificial
  Synthetic oligonucleotide
agggctttcaccgaagagggagcaattgttggagaaatttcaccactactttc

SEQ ID NO: 61387 - DNA, 60 bp, Artificial
  Synthetic oligonucleotide
ctaagggctttcaccgaagagggagcaattgttggcgaaatttcaccattgccttctctt

SEQ ID NO: 61388 - DNA, 53 bp, Artificial
  Synthetic oligonucleotide
tgagtaaccttgcgaaaggagaaaaggctaatgtgctaattgggcaaggagac

SEQ ID NO: 61389 - DNA, 60 bp, Artificial
  Synthetic oligonucleotide
ttgtgtattggaagcaatggctttccttgaggaatcccatcctggtatctttgaaaactc

SEQ ID NO: 61390 - DNA, 60 bp, Artificial
  Synthetic oligonucleotide
ggtagataatcactcactgagtgacattcacatcatggcgtctcaaggcaccaaacgatc

SEQ ID NO: 61391 - DNA, 60 bp, Artificial
  Synthetic oligonucleotide
cagcagcacaacgagcaatgatggaccaggtgagggaaagccggaatcctgggaatgctg

SEQ ID NO: 61392 - DNA, 60 bp, Artificial
  Synthetic oligonucleotide
gcacacaaaatgccattaacgggattacaaataaggtgaactctgttatcgagaaaatga

SEQ ID NO: 61393 - DNA, 60 bp, Artificial
  Synthetic oligonucleotide
gcacacaaaatgccattaacgggattacaaacaaggtgaattctgtaattgagaaaatga

SEQ ID NO: 61394 - DNA, 60 bp, Artificial
  Synthetic oligonucleotide
caaaaaagcacacaaaatgccattaacgggattacaaacaaggtgaactctgttatcgag

SEQ ID NO: 61395 - DNA, 60 bp, Artificial
  Synthetic oligonucleotide
aaaaagcacacaaaatgccattaacgggattacaaataaggtgaactctgttatcgagaa

SEQ ID NO: 61396 - DNA, 60 bp, Artificial
  Synthetic oligonucleotide
aagcacacaaaatgccattaacgggattacaaacaaggtgaattctgtaattgagaaaat

SEQ ID NO: 61397 - DNA, 60 bp, Artificial
  Synthetic oligonucleotide
gtcagaatggaccaggcgataacggataagaacatcatactgaaagcgaacttcagtgtg

SEQ ID NO: 61398 - DNA, 60 bp, Artificial
  Synthetic oligonucleotide
aattggggtcctcatcgggggacttgaatggaatgataacacagttcgagtctctgaaac

SEQ ID NO: 61399 - DNA, 60 bp, Artificial
  Synthetic oligonucleotide
ggagaccggttggaatttccagcatggtggaggccatggtgtctagggcccgaattgacg

SEQ ID NO: 61400 - DNA, 56 bp, Artificial
  Synthetic oligonucleotide
atgaggggtcttatttcttcggagacaatgcagaggagtatgacaattgaagaaaa

SEQ ID NO: 61401 - DNA, 60 bp, Artificial
  Synthetic oligonucleotide
gaagtctgtttgaaatgggaattgatggatgaggattaccaggggcgtttatgcaaccca

SEQ ID NO: 61402 - DNA, 60 bp, Artificial
  Synthetic oligonucleotide
atacgccgaagggttgacataaatccaggtcatgcagacctcagtgccaaagaagcacaa

SEQ ID NO: 61403 - DNA, 60 bp, Artificial
  Synthetic oligonucleotide
gccgaagggttgacataaatccaggtcatgcagacctcagtgccaaagaagcacaagatg

SEQ ID NO: 61404 - DNA, 60 bp, Artificial
  Synthetic oligonucleotide
ctccccagaaggtctggagccgcaggtgctgcagtcaaaggagttgggacaatggtgatg

SEQ ID NO: 61405 - DNA, 60 bp, Artificial
  Synthetic oligonucleotide
cagggaaagatcctaagaaaactggaggacccatatacaagagagtagatggaaagtgga

SEQ ID NO: 61406 - DNA, 60 bp, Artificial
  Synthetic oligonucleotide
aatttgcaggcctatcagaaacgaatgggagtgcagatgcaacgattcaagtgatcctct

SEQ ID NO: 61407 - DNA, 60 bp, Artificial
  Synthetic oligonucleotide
tatgcccaaacagattgtgtattagaagcaatggctttccttgaagaatcccatcctggt

SEQ ID NO: 61408 - DNA, 60 bp, Artificial
  Synthetic oligonucleotide
atgcccaaacagattgtgtattagaagcaatggctttccttgaagaatcccatcctggta

SEQ ID NO: 61409 - DNA, 60 bp, Artificial
  Synthetic oligonucleotide
ggatcatcagaaactgggaaactgttaaaattcagtggtcgcaggaccctacaatgctat

SEQ ID NO: 61410 - DNA, 60 bp, Artificial
  Synthetic oligonucleotide
ggatcatcaggaactgggaaactgttaaaattcagtggtcacaagaccctacaatgctgt

SEQ ID NO: 61411 - DNA, 60 bp, Artificial
  Synthetic oligonucleotide
ggatcatcagaaactgggaaactgttaaaattcagtggtcacaggatcctacaatgctgt

SEQ ID NO: 61412 - DNA, 51 bp, Artificial
  Synthetic oligonucleotide
cagaaactgggaaactgttaaaattcagtggtctcagaatcctacaatgct

SEQ ID NO: 61413 - DNA, 60 bp, Artificial
  Synthetic oligonucleotide
ggatcatcagaaactgggaaactgttaaaattcagtggtcacaagaccctacaatgctgt

SEQ ID NO: 61414 - DNA, 53 bp, Artificial
  Synthetic oligonucleotide
cagaaactgggaaactgttaaaattcagtggtctcagaatcctacaatgctat

SEQ ID NO: 61415 - DNA, 60 bp, Artificial
  Synthetic oligonucleotide
cttaaaagttccagcgcaaaatgccataagcaccacattcccttatactggagatcctcc

SEQ ID NO: 61416 - DNA, 60 bp, Artificial
  Synthetic oligonucleotide
acatgacccttgaagagatgtcaagggactggttcatgctcatgcccaagcagaaagtag

SEQ ID NO: 61417 - DNA, 60 bp, Artificial
  Synthetic oligonucleotide
cgggactctagcatacttactgacagccagacagctaccaaaagaattcggatggccatc

SEQ ID NO: 61418 - DNA, 60 bp, Artificial
  Synthetic oligonucleotide
gaatcaatgaccgaaacttctggaggggtgaaaatggacgaaggacaaggattgcatatg

SEQ ID NO: 61419 - DNA, 60 bp, Artificial
  Synthetic oligonucleotide
aacttctggaggggtgaaaatggacgaaggacaaggattgcatatgaaagaatgtgcaat

SEQ ID NO: 61420 - DNA, 60 bp, Artificial
  Synthetic oligonucleotide
tcttctaatagatggtacagcctcattgagccctggaatgatgatgggcatgttcaacat

SEQ ID NO: 61421 - DNA, 60 bp, Artificial
  Synthetic oligonucleotide
ggatgtcaatccgactttacttttcctgaaagttccagcgcaaaatgccataagcaccac

SEQ ID NO: 61422 - DNA, 60 bp, Artificial
  Synthetic oligonucleotide
aaggttaaaacatggaacctttggccctgtacactttagaaaccaagtcaaaatacgccg

SEQ ID NO: 61423 - DNA, 54 bp, Artificial
  Synthetic oligonucleotide
gttagaggtgatctgaatttcgttaatagagcgaatcagcggttgaatcccatg

SEQ ID NO: 61424 - DNA, 60 bp, Artificial
  Synthetic oligonucleotide
catggaacctttggccctgtacactttagaaaccaagtcaaaatacgccgaagagtcgac

SEQ ID NO: 61425 - DNA, 60 bp, Artificial
  Synthetic oligonucleotide
aacactgtgtcaagctttcaggtagattgcttcctttggcatgtccgcaaacaagttgca

SEQ ID NO: 61426 - DNA, 60 bp, Artificial
  Synthetic oligonucleotide
ggatccccacactgtgtcaagctttcaggtagattgcttcctttggcatgtccgcaaaca

SEQ ID NO: 61427 - DNA, 60 bp, Artificial
  Synthetic oligonucleotide
caacactgtgtcaagctttcaggtagattgcttcctttggcatgtccgcaaacaagttgc

SEQ ID NO: 61428 - DNA, 60 bp, Artificial
  Synthetic oligonucleotide
atcaaatgggatacatctgcagtggggttttcggtgacaatccgcgtcccaaagatggaa

SEQ ID NO: 61429 - DNA, 60 bp, Artificial
  Synthetic oligonucleotide
gggttatatgaatcaattgaggagtgcctgattaatgatccctgggttttgcttaatgcg

SEQ ID NO: 61430 - DNA, 60 bp, Artificial
  Synthetic oligonucleotide
atacagatgtgcactgaactcaaactcagtgactatgaagggaggctgatccagaacagc

SEQ ID NO: 61431 - DNA, 60 bp, Artificial
  Synthetic oligonucleotide
aagacccagatgaaggcacagctggagtggaatctgctgttttaaggggattcctcattc

SEQ ID NO: 61432 - DNA, 60 bp, Artificial
  Synthetic oligonucleotide
gtggacatgactttgaaagagaagggtactctctggtcggaatagaccctttccgactgc

SEQ ID NO: 61433 - DNA, 60 bp, Artificial
  Synthetic oligonucleotide
ggtagataatcactcactgagtgacatccacatcatggcgtctcaaggcaccaaacgatc

SEQ ID NO: 61434 - DNA, 60 bp, Artificial
  Synthetic oligonucleotide
tgagggacgactgattcagaacagcataacaatagagagaatggtgctctctgcttttga

SEQ ID NO: 61435 - DNA, 60 bp, Artificial
  Synthetic oligonucleotide
aatatgtataggctaccatgcgaacaattcaaccgacactgttgacacagtactcgagaa

SEQ ID NO: 61436 - DNA, 56 bp, Artificial
  Synthetic oligonucleotide
aattcaaccgacactgttgacacagtactcgagaagaatgtgacagtgacacactc

SEQ ID NO: 61437 - DNA, 60 bp, Artificial
  Synthetic oligonucleotide
acaatctggactagtgggagcagcatttccttttgtggcgtgaatagtgatactgcaaat

SEQ ID NO: 61438 - DNA, 60 bp, Artificial
  Synthetic oligonucleotide
gatctaatctttcttgcacggtctgctctcattctgagaggatcagtggctcataagtcc

SEQ ID NO: 61439 - DNA, 60 bp, Artificial
  Synthetic oligonucleotide
atacacatcaggaagacaggagaaaaacccatcacttaggatgaaatggatgatggcaat

SEQ ID NO: 61440 - DNA, 60 bp, Artificial
  Synthetic oligonucleotide
tggactccagtactcttgaactgagaagcagatactgggctataaggaccaggagcgggg

SEQ ID NO: 61441 - DNA, 60 bp, Artificial
  Synthetic oligonucleotide
agcaaaagcagggtagataatcactcaccgagtgacatcaaaatcatggcgtcccaaggc

SEQ ID NO: 61442 - DNA, 60 bp, Artificial
  Synthetic oligonucleotide
caggcgatcatggaaaagagcatcatactgaaagcgaacttcagtgtgattttcgaccgg

SEQ ID NO: 61443 - DNA, 60 bp, Artificial
  Synthetic oligonucleotide
catcatggaaaagagcatcatactgaaagcgaacttcagtgtgattttcgaccggttgga

SEQ ID NO: 61444 - DNA, 60 bp, Artificial
  Synthetic oligonucleotide
tgaatggaatgataacacagttcgagtctctgaagctctacagagattcgcttggagaag

SEQ ID NO: 61445 - DNA, 60 bp, Artificial
  Synthetic oligonucleotide
tttaatatggctggtgaaaaaaggaaattcatacccaaagctcagcaaatcctatgttaa

SEQ ID NO: 61446 - DNA, 60 bp, Artificial
  Synthetic oligonucleotide
tatgctggagcaaacagcttctacagaaatttaatatggctggtaaaaaaaggaaattca

SEQ ID NO: 61447 - DNA, 57 bp, Artificial
  Synthetic oligonucleotide
aaaaggaaattcatacccaaagctcagcaaatcctatgttaacaataaggggaagga

SEQ ID NO: 61448 - DNA, 60 bp, Artificial
  Synthetic oligonucleotide
ggtgtgacggcagcatgcccttatgccggagcaaacagcttctacagaaatttaatatgg

SEQ ID NO: 61449 - DNA, 60 bp, Artificial
  Synthetic oligonucleotide
aacacactctgttaaccttctagaagacagacataacggaaaactatgtaaactaagggg

SEQ ID NO: 61450 - DNA, 60 bp, Artificial
  Synthetic oligonucleotide
cggcagcatgcccttatgccggagcaaacagcttctacagaaatttaatatggctggtga

SEQ ID NO: 61451 - DNA, 60 bp, Artificial
  Synthetic oligonucleotide
aacacccaaaggtgctataaacaccagcctcccatttcagaatatacatccagtcacaat

SEQ ID NO: 61452 - DNA, 60 bp, Artificial
  Synthetic oligonucleotide
gacttgtcaaacacccaaaggtgctataaacaccagcctcccatttcagaatatacatcc

SEQ ID NO: 61453 - DNA, 60 bp, Artificial
  Synthetic oligonucleotide
cctcccatttcagaatatacatccagtcacaattggagaatgtccaaaatatgtcaaaag

SEQ ID NO: 61454 - DNA, 60 bp, Artificial
  Synthetic oligonucleotide
ccaaaggtgctataaacaccagcctcccatttcagaatatacatccagtcacaattggag

SEQ ID NO: 61455 - DNA, 60 bp, Artificial
  Synthetic oligonucleotide
gagcacacagaatgccattgacgggatcactaacaaagtaaactctgttattgaaaagat

SEQ ID NO: 61456 - DNA, 60 bp, Artificial
  Synthetic oligonucleotide
caagcagggagaatgaactattactggacactagtagagcctggagacacaataacattc

SEQ ID NO: 61457 - DNA, 60 bp, Artificial
  Synthetic oligonucleotide
aggaagtcctcgtgctatggggcattcaccatccacctaccagtactgaccaacaaagtc

SEQ ID NO: 61458 - DNA, 60 bp, Artificial
  Synthetic oligonucleotide
gagcctggagacacaataacattcgaagcaactggaaatctagtggtgccaagatatgcc

SEQ ID NO: 61459 - DNA, 60 bp, Artificial
  Synthetic oligonucleotide
ctggacactagttgagcctggagacacaataacattcgaagcaactggaaatctagtggt

SEQ ID NO: 61460 - DNA, 60 bp, Artificial
  Synthetic oligonucleotide
aaccgagatgaaggcaatactattagtcttgctatatacatttacagccgcaaatgcaga

SEQ ID NO: 61461 - DNA, 60 bp, Artificial
  Synthetic oligonucleotide
atgaaggcaatactattagtcttgctatatacattcacagccgcaaatgcagacacatta

SEQ ID NO: 61462 - DNA, 60 bp, Artificial
  Synthetic oligonucleotide
gagaggaaatagatggggtaaagctggaatcaacaaggatttaccagattttggcgatct

SEQ ID NO: 61463 - DNA, 60 bp, Artificial
  Synthetic oligonucleotide
agtaaagctggaatcaacaaggatttaccagattttggcgatctattcaactgtcgccag

SEQ ID NO: 61464 - DNA, 60 bp, Artificial
  Synthetic oligonucleotide
agtcaacaaggatttaccagattttggcgatctattcaactgccgccagttcattggtac

SEQ ID NO: 61465 - DNA, 60 bp, Artificial
  Synthetic oligonucleotide
atttaccagattttggcgatctattcaactgtcgccagttcattggtactgtcagtctcc

SEQ ID NO: 61466 - DNA, 60 bp, Artificial
  Synthetic oligonucleotide
tacctatcagtggatcatcagaaactgggaaactgttaaaattcagtggtctcagaatcc

SEQ ID NO: 61467 - DNA, 60 bp, Artificial
  Synthetic oligonucleotide
ttttcccgaaggcaagctcgtggccaaatcatgagacaaccaaaggtgtcacagctgcgt

SEQ ID NO: 61468 - DNA, 60 bp, Artificial
  Synthetic oligonucleotide
tttgaaattttcccgaaggcaagctcatggccaaatcatgagacaaccaaaggtgtcaca

SEQ ID NO: 61469 - DNA, 60 bp, Artificial
  Synthetic oligonucleotide
ggcaacaggtttaagaaatatcccttccactcaatctagaggacttttcggagcaattgc

SEQ ID NO: 61470 - DNA, 60 bp, Artificial
  Synthetic oligonucleotide
gctccggttcataattgtgacacaaagtgccaaaccccttatggggccttgaacagtagt

SEQ ID NO: 61471 - DNA, 60 bp, Artificial
  Synthetic oligonucleotide
tggcaacaggtttaagaaatatcccttccactcaatctagaggacttttcggagcaattg

SEQ ID NO: 61472 - DNA, 60 bp, Artificial
  Synthetic oligonucleotide
attataacatcagatgctccggttcataattgtgacacaaagtgccaaaccccttatggg

SEQ ID NO: 61473 - DNA, 60 bp, Artificial
  Synthetic oligonucleotide
agatgctccggttcataattgtgacacaaagtgccaaaccccttatggtgccttgaacag

SEQ ID NO: 61474 - DNA, 60 bp, Artificial
  Synthetic oligonucleotide
gggtcatcaaagtataaccggagattcacacccgaaatatcagctagacctaaagtcaga

SEQ ID NO: 61475 - DNA, 60 bp, Artificial
  Synthetic oligonucleotide
tggtattataacatcagatgctccggttcataattgtgacacaaagtgccaaacccctta

SEQ ID NO: 61476 - DNA, 60 bp, Artificial
  Synthetic oligonucleotide
gcaatctccaaacattgaagataagagtgcacgaagggtacgaagaatttacaatggttg

SEQ ID NO: 61477 - DNA, 60 bp, Artificial
  Synthetic oligonucleotide
gaagtacttacgggcaatctccaaacattgaagataagagtgcatgagggatatgaagaa

SEQ ID NO: 61478 - DNA, 60 bp, Artificial
  Synthetic oligonucleotide
gggtacagcggaagtttcgttcaacatcctgagttaacaggattggactgtataagacct

SEQ ID NO: 61479 - DNA, 60 bp, Artificial
  Synthetic oligonucleotide
tcagggtacagcggaagtttcgttcaacatcctgagttaacaggattggactgtataaga

SEQ ID NO: 61480 - DNA, 60 bp, Artificial
  Synthetic oligonucleotide
tcattctgagaggatcagtggctcataagtcctgcctgcctgcttgtgtatatggacttg

SEQ ID NO: 61481 - DNA, 60 bp, Artificial
  Synthetic oligonucleotide
gaagattctacatccaaatgtgcactgaactcaaactcagtgactatgaaggacgactga

SEQ ID NO: 61482 - DNA, 60 bp, Artificial
  Synthetic oligonucleotide
gattctacatccaaatgtgcactgaactcaaactcagtgactatgaaggacgactgattc

SEQ ID NO: 61483 - DNA, 60 bp, Artificial
  Synthetic oligonucleotide
ctgcacaaagagcaatgatggatcaagtgagagaaagccggaatccaggaaatgctgaga

SEQ ID NO: 61484 - DNA, 60 bp, Artificial
  Synthetic oligonucleotide
cacaaagagcaatgatggatcaagtgagagaaagccggaatccaggaaatgctgagatcg

SEQ ID NO: 61485 - DNA, 60 bp, Artificial
  Synthetic oligonucleotide
ctgcacaaagagcaatgatggatcaagtgagagaaagccggaacccaggaaatgctgaga

SEQ ID NO: 61486 - DNA, 60 bp, Artificial
  Synthetic oligonucleotide
tgcacaaagagcaatgatggatcaagtgagagaaagccggaacccaggaaatgctgagat

SEQ ID NO: 61487 - DNA, 60 bp, Artificial
  Synthetic oligonucleotide
tgcacaaagagcaatgatggatcaagtgagagaaagccggaatccaggaaatgctgagat

SEQ ID NO: 61488 - DNA, 52 bp, Artificial
  Synthetic oligonucleotide
ggggtctgatggttaaaatggatcaggccattatggacaagaggataacact

SEQ ID NO: 61489 - DNA, 60 bp, Artificial
  Synthetic oligonucleotide
agataacagggggtctgatggttaaaatggatcaggccattatggacaagaggataacac

SEQ ID NO: 61490 - DNA, 60 bp, Artificial
  Synthetic oligonucleotide
ttgaagttgagagtgagataaggacattttcttttcagcttatttagtactaaaaaacac

SEQ ID NO: 61491 - DNA, 60 bp, Artificial
  Synthetic oligonucleotide
ctcaaaattgcaattgcgtccagccctgctcctcggtacattactgatatgagcatagag

SEQ ID NO: 61492 - DNA, 60 bp, Artificial
  Synthetic oligonucleotide
gcgtccagccctgctcctcggtacattactgatatgagcatagaggaaataagcagggaa

SEQ ID NO: 61493 - DNA, 60 bp, Artificial
  Synthetic oligonucleotide
caactagaaacactagtctcactgagggctttcacagatgatggcgccattgtagctgaa

SEQ ID NO: 61494 - DNA, 60 bp, Artificial
  Synthetic oligonucleotide
tgagaacagcttcgagcagataacgttcttgcaggcattgcaactcttacttgaagttga

SEQ ID NO: 61495 - DNA, 60 bp, Artificial
  Synthetic oligonucleotide
cctatttgatcaactagaaacactagtctcactgagggctttcacagatgatggcgccat

SEQ ID NO: 61496 - DNA, 60 bp, Artificial
  Synthetic oligonucleotide
gatggttttctagatgtttggacatataatgccgaactgttggttctattggaaaatgaa

SEQ ID NO: 61497 - DNA, 60 bp, Artificial
  Synthetic oligonucleotide
atggttttctggatgtttggacatacaatgccgaactgttggttctattggaaaatgaaa

SEQ ID NO: 61498 - DNA, 60 bp, Artificial
  Synthetic oligonucleotide
ggatgtttggacatacaatgccgaactgttggttctattggaaaatgaaagaactctgga

SEQ ID NO: 61499 - DNA, 60 bp, Artificial
  Synthetic oligonucleotide
gtttggacatataatgccgaactgttggttctattggaaaatgaaagaactctggatttc

SEQ ID NO: 61500 - DNA, 60 bp, Artificial
  Synthetic oligonucleotide
cccaagacaagttcgtggcccaatcatgaaacaaacagaggtgtaacggcagcatgccct

SEQ ID NO: 61501 - DNA, 60 bp, Artificial
  Synthetic oligonucleotide
ccccaaggcaagttcgtggcccaatcatgaaacaaacataggtgtgacggcagcatgccc

SEQ ID NO: 61502 - DNA, 60 bp, Artificial
  Synthetic oligonucleotide
tctagtggtaccaagatatgctttcgcaatgagtagaggttctggatctggtattataat

SEQ ID NO: 61503 - DNA, 52 bp, Artificial
  Synthetic oligonucleotide
ctgattcgaaatggaagattttgtgcgacaatgcttcaatccgatgattgtc

SEQ ID NO: 61504 - DNA, 60 bp, Artificial
  Synthetic oligonucleotide
gagaatagttttgaacaaataacatttatgcaagccttacaactactgcttgaagtggag

SEQ ID NO: 61505 - DNA, 60 bp, Artificial
  Synthetic oligonucleotide
aaaccaaagtttctgccagatctgtatgattacaaggagaatagattcatcgagattgga

SEQ ID NO: 61506 - DNA, 60 bp, Artificial
  Synthetic oligonucleotide
ggggacatagtgttggtgatgaaacgaaaacgggactctagcatacttactgacagccag

SEQ ID NO: 61507 - DNA, 60 bp, Artificial
  Synthetic oligonucleotide
gcaagccttacagctactatttgaagtggaacaagagataagaactttctcgtttcagct

SEQ ID NO: 61508 - DNA, 60 bp, Artificial
  Synthetic oligonucleotide
gcggatattgagaacacaagagtctgaatgtgtctgtgtgaacgggtcatgtttcaccat

SEQ ID NO: 61509 - DNA, 60 bp, Artificial
  Synthetic oligonucleotide
ttgagtcctggaatgatgatgggcatgttcaacatgctaagtactgttctaggagtttca

SEQ ID NO: 61510 - DNA, 56 bp, Artificial
  Synthetic oligonucleotide
ttcctaacacatgcattgagatagctgtggcaatgctactatttgctatccatact

SEQ ID NO: 61511 - DNA, 60 bp, Artificial
  Synthetic oligonucleotide
ttcctaacacatgcattgagatagctgtggcaatgctactatttgctatccatactgtcc

SEQ ID NO: 61512 - DNA, 54 bp, Artificial
  Synthetic oligonucleotide
ttcctaacacatgcattgagatagctgtggcaatgctactatttgctatccata

SEQ ID NO: 61513 - DNA, 55 bp, Artificial
  Synthetic oligonucleotide
ttcctaacacatgcattgagatagctgtggcaatgctactatttgctatccatac

SEQ ID NO: 61514 - DNA, 60 bp, Artificial
  Synthetic oligonucleotide
gaatgtgcaacattctcaaagggaaatttcagacagctgcacagagagcaatgatggatc

SEQ ID NO: 61515 - DNA, 60 bp, Artificial
  Synthetic oligonucleotide
aaaagtgctgcaatctattcgagaaattcttccctagcagttcatacaggagaccggttg

SEQ ID NO: 61516 - DNA, 60 bp, Artificial
  Synthetic oligonucleotide
gggcggctgatccagaacagcctaacaatagagagaatggtgctctctgcttttgacgag

SEQ ID NO: 61517 - DNA, 60 bp, Artificial
  Synthetic oligonucleotide
tttcccaaaagcaacctcatggccaaatcatgagacaaccaaaggtgccacagctgcatg

SEQ ID NO: 61518 - DNA, 60 bp, Artificial
  Synthetic oligonucleotide
ccggccattattaatagatggaactgcatcactgagtcctggaatgatgatgggcatgtt

SEQ ID NO: 61519 - DNA, 60 bp, Artificial
  Synthetic oligonucleotide
gtcctgttatgtgcactttcagctacagatgcagacacaatatgtataggctaccatgcg

SEQ ID NO: 61520 - DNA, 60 bp, Artificial
  Synthetic oligonucleotide
cctcacacatgcattgagatagttgtggcaatgctactatttgctatccatactgtccaa

SEQ ID NO: 61521 - DNA, 60 bp, Artificial
  Synthetic oligonucleotide
gagatgtcaagggactggttcatgctcatgcccaagcagaaagtagcaggttccctttgc

SEQ ID NO: 61522 - DNA, 60 bp, Artificial
  Synthetic oligonucleotide
acagagattcgcttggagaagcagtaatgagaatgggagacctccactcactccaaaaca

SEQ ID NO: 61523 - DNA, 60 bp, Artificial
  Synthetic oligonucleotide
tccctagcagttcatacaggagaccggttgggatttccagcatggtggaggccatggtgt

SEQ ID NO: 61524 - DNA, 60 bp, Artificial
  Synthetic oligonucleotide
ggccactcttaatagatggaactgcatcattgagccctggaatgatgatgggcatgttca

SEQ ID NO: 61525 - DNA, 60 bp, Artificial
  Synthetic oligonucleotide
ggccactcttaatagatggaactgcatcactgagccctggaatgatgatgggcatgttca

SEQ ID NO: 61526 - DNA, 60 bp, Artificial
  Synthetic oligonucleotide
ttgaagaagtgagacacagactgaagataacagagaatagttttgagcaaataacattta

SEQ ID NO: 61527 - DNA, 60 bp, Artificial
  Synthetic oligonucleotide
caggaagacaagagaagaaccccgcactcaggatgaaatggatgatggcaatgaaatatc

SEQ ID NO: 61528 - DNA, 60 bp, Artificial
  Synthetic oligonucleotide
agattaatggccctgagtcagtgttgatcaatacctatcagtggatcatcagaaactggg

SEQ ID NO: 61529 - DNA, 60 bp, Artificial
  Synthetic oligonucleotide
agattaatggccctgagtcagtgttggtcaatacctatcagtggatcatcagaaactggg

SEQ ID NO: 61530 - DNA, 60 bp, Artificial
  Synthetic oligonucleotide
gagattaatggtcctgaatcagtgttggtcaatacctatcagtggatcatcagaaactgg

SEQ ID NO: 61531 - DNA, 60 bp, Artificial
  Synthetic oligonucleotide
gagattaatggccctgaatcagtgttggtcaatacctatcagtggatcatcagaaactgg

SEQ ID NO: 61532 - DNA, 60 bp, Artificial
  Synthetic oligonucleotide
caatccgctgaatccatttgtcagccataaagagattgaatcagtgaataacgcagtggt

SEQ ID NO: 61533 - DNA, 60 bp, Artificial
  Synthetic oligonucleotide
caatccgctgaatccatttgtcagccataaagagattgaatcagtgaataacgcggtagt

SEQ ID NO: 61534 - DNA, 60 bp, Artificial
  Synthetic oligonucleotide
ctggacgaattaagaaagaagagttctccgagatcatgaagatctgttccaccattgaag

SEQ ID NO: 61535 - DNA, 60 bp, Artificial
  Synthetic oligonucleotide
atctggaaggataaagaaagaggatttcgccgagatcatgaagatctgttccaccattga

SEQ ID NO: 61536 - DNA, 60 bp, Artificial
  Synthetic oligonucleotide
gatgagaggagaaacaaatatctggaagagcatcccagtgctgggaaagaccctaagaag

SEQ ID NO: 61537 - DNA, 60 bp, Artificial
  Synthetic oligonucleotide
ggagaaacaaatatctggaagagcatcccagtgctgggaaagaccctaagaagactggag

SEQ ID NO: 61538 - DNA, 60 bp, Artificial
  Synthetic oligonucleotide
gaaacaaatatctggaagagcatcccagtgctggaaaagaccctaagaagactggaggtc

SEQ ID NO: 61539 - DNA, 60 bp, Artificial
  Synthetic oligonucleotide
ggggttggaacaatggtgatggaattgatccggatgatcaagcgagggatcaatgatcgg

SEQ ID NO: 61540 - DNA, 60 bp, Artificial
  Synthetic oligonucleotide
cagcacaacgagcaatgatggaccaggtgagggaaagccggaatcctgggaatgctgaaa

SEQ ID NO: 61541 - DNA, 60 bp, Artificial
  Synthetic oligonucleotide
gcagtgaaaggagttggaacaatggtgatggaattgatccgaatgatcaagcgagggatc

SEQ ID NO: 61542 - DNA, 60 bp, Artificial
  Synthetic oligonucleotide
cccattcgagagagcaaccattatggcggcatttacgggaaacactgaaggcagaacttc

SEQ ID NO: 61543 - DNA, 60 bp, Artificial
  Synthetic oligonucleotide
cctcccgttcgagagagcaaccattatggcggcattcacaggaaacactgaaggcagaac

SEQ ID NO: 61544 - DNA, 60 bp, Artificial
  Synthetic oligonucleotide
cagcattcgatgagaggagaaacaaatatctggaagagcatcccagtgctgggaaagacc

SEQ ID NO: 61545 - DNA, 52 bp, Artificial
  Synthetic oligonucleotide
gtcaagtcttcagtcttatcagaccaaacgaaaatccagcacataaaagcca

SEQ ID NO: 61546 - DNA, 60 bp, Artificial
  Synthetic oligonucleotide
caaactggtcttggccagacggtgctgagttgccattcaccattgacaagtagtccgtta

SEQ ID NO: 61547 - DNA, 60 bp, Artificial
  Synthetic oligonucleotide
atcagtgttggtcaacacctatcagtggatcatcagaaactgggaaactgttaaaattca

SEQ ID NO: 61548 - DNA, 60 bp, Artificial
  Synthetic oligonucleotide
cccaaagcttagcaaatcctatgttaacaataaagggaaagaagtccttgtgctatgggg

SEQ ID NO: 61549 - DNA, 56 bp, Artificial
  Synthetic oligonucleotide
atgaaggatcttatttcttcggagacaatgcagaggagtacgacaactaaggaaaa

SEQ ID NO: 61550 - DNA, 60 bp, Artificial
  Synthetic oligonucleotide
ttgatcggcttcgccgagatcagaagtccctaaagggaagaggcagcactctcggtctgg

SEQ ID NO: 61551 - DNA, 60 bp, Artificial
  Synthetic oligonucleotide
caggaagacaggagaaaaacccatcacttaggatgaaatggatgatggcaatgaaatacc

SEQ ID NO: 61552 - DNA, 60 bp, Artificial
  Synthetic oligonucleotide
gagccttttatttcatgctctcacttggaatgcaggactttcttcctaactcaaggggcc

SEQ ID NO: 61553 - DNA, 60 bp, Artificial
  Synthetic oligonucleotide
ctttgaaaaagtcgaaaggttaaaacatggaacctttggccctgtacactttagaaatca

SEQ ID NO: 61554 - DNA, 60 bp, Artificial
  Synthetic oligonucleotide
tcagaggaacaagagtagtcccaagaggacaactgtccaccagaggagttcagattgctt

SEQ ID NO: 61555 - DNA, 60 bp, Artificial
  Synthetic oligonucleotide
caccgaccttgaggctctcatggaatggctaaagacaagaccaatcctgtcacctctgac

SEQ ID NO: 61556 - DNA, 60 bp, Artificial
  Synthetic oligonucleotide
cagtgaaacaggatgttgtggcaataactgattggtcagggtacagcggaagtttcgttc

SEQ ID NO: 61557 - DNA, 60 bp, Artificial
  Synthetic oligonucleotide
gggtttgagatgatttgggatcctaatggatggacagataccgacagtgatttcttagtg

SEQ ID NO: 61558 - DNA, 60 bp, Artificial
  Synthetic oligonucleotide
acaatggttgggaaaagggcaacagctatactcagaaaagcaactagaaggttggttcaa

SEQ ID NO: 61559 - DNA, 60 bp, Artificial
  Synthetic oligonucleotide
agaatgggagacctccactcactccaaaacagaaacggaaaatggcgagaacaattaggt

SEQ ID NO: 61560 - DNA, 60 bp, Artificial
  Synthetic oligonucleotide
tgggagacctccactcactccaaaacagaaacggaaaatggcgagaacaattaggtcaga

SEQ ID NO: 61561 - DNA, 60 bp, Artificial
  Synthetic oligonucleotide
tctacatacagatgtgcactgaactcaaactcagcgactatgaagggaggctgatccaga

SEQ ID NO: 61562 - DNA, 60 bp, Artificial
  Synthetic oligonucleotide
actctacagagattcgcttggagaagcagtaatgagaatgggggacctccactcactcca

SEQ ID NO: 61563 - DNA, 60 bp, Artificial
  Synthetic oligonucleotide
cgaaacttctggagaggtgaaaatggacgaaggacaagaattgcctatgaaagaatgtgc

SEQ ID NO: 61564 - DNA, 60 bp, Artificial
  Synthetic oligonucleotide
cagccggctgcaactgcattagctaatactatagaggtcttcagatcgaacggtctgaca

SEQ ID NO: 61565 - DNA, 60 bp, Artificial
  Synthetic oligonucleotide
tataggacctgcaagctagtcggaatcaatatgagcaaaaagaagtcctacataaacagg

SEQ ID NO: 61566 - DNA, 60 bp, Artificial
  Synthetic oligonucleotide
gttgaaacattagcgaggagcatttgtgagaagcttgaacaatctggactcccagttgga

SEQ ID NO: 61567 - DNA, 60 bp, Artificial
  Synthetic oligonucleotide
gccggctgcaactgcattagctaatactatagaggtcttcagatcgaacggtctgacagc

SEQ ID NO: 61568 - DNA, 60 bp, Artificial
  Synthetic oligonucleotide
tataggacctgcaagctggtcggaatcaacatgagcaaaaagaagtcctacataaacagg

SEQ ID NO: 61569 - DNA, 60 bp, Artificial
  Synthetic oligonucleotide
cacaatcactggagacaacaccaaatggaatgaaaatcagaaccctagaatgtttctggc

SEQ ID NO: 61570 - DNA, 60 bp, Artificial
  Synthetic oligonucleotide
aaagaaggctaaactggcaaatgttgtgagaaaaatgatgactaattcacaagacacaga

SEQ ID NO: 61571 - DNA, 60 bp, Artificial
  Synthetic oligonucleotide
aattcagacgaggaggtcattcgagctgaagaagttgtgggaacaaacccgctcaaaggc

SEQ ID NO: 61572 - DNA, 60 bp, Artificial
  Synthetic oligonucleotide
gagctctctttcacaatcactggagacaacaccaaatggaatgaaaatcagaaccctagg

SEQ ID NO: 61573 - DNA, 60 bp, Artificial
  Synthetic oligonucleotide
aagacacagagctttctttcacaatcactggagacaacaccaaatggaatgaaaatcaga

SEQ ID NO: 61574 - DNA, 60 bp, Artificial
  Synthetic oligonucleotide
tttcacaatcactggagacaacaccaaatggaatgaaaatcagaaccctagaatgtttct

SEQ ID NO: 61575 - DNA, 60 bp, Artificial
  Synthetic oligonucleotide
ctttcacaatcactggagacaacaccaaatggaatgaaaatcagaaccctaggatgttcc

SEQ ID NO: 61576 - DNA, 60 bp, Artificial
  Synthetic oligonucleotide
ctgttccaccattgaagagctcagacggcagaaatagtgaatttagcttgtcctcagaaa

SEQ ID NO: 61577 - DNA, 60 bp, Artificial
  Synthetic oligonucleotide
gtgagacacagactgaagataacagagaatagttttgagcaaataacatttatgcaagcc

SEQ ID NO: 61578 - DNA, 60 bp, Artificial
  Synthetic oligonucleotide
ccaaagctcagcaaatcctatgttaacaataaagggaaggaagtccttgtgctatggggt

SEQ ID NO: 61579 - DNA, 60 bp, Artificial
  Synthetic oligonucleotide
taagagtgcacgaggggtatgaagagttcacaatggttgggagaagagcaacagctattc

SEQ ID NO: 61580 - DNA, 60 bp, Artificial
  Synthetic oligonucleotide
ggcccatgttcctgtatgtgaggacaaatggaacctcaaaaattaaaatgaaatggggaa

SEQ ID NO: 61581 - DNA, 60 bp, Artificial
  Synthetic oligonucleotide
tatcacttcagatgcaccagtgcatgattgtaacacgaagtgtcaaacaccccagggtgc

SEQ ID NO: 61582 - DNA, 54 bp, Artificial
  Synthetic oligonucleotide
ggacgactgattcaaaatagcataacaatagagagaatggtgctctctgctttt

SEQ ID NO: 61583 - DNA, 60 bp, Artificial
  Synthetic oligonucleotide
cttactcatcgtcaatgatgtgggagattaatggccctgagtcagtgttggtcaatacct

SEQ ID NO: 61584 - DNA, 60 bp, Artificial
  Synthetic oligonucleotide
atgaggggtcttatttcttcggagacaatgcagaggagtatgacaattgaagaaaaatac

SEQ ID NO: 61585 - DNA, 60 bp, Artificial
  Synthetic oligonucleotide
acaatggttgggaaaagggcaacagctatactaagaaaagcaaccaggagattgattcaa

SEQ ID NO: 61586 - DNA, 60 bp, Artificial
  Synthetic oligonucleotide
acaatggttgggaaaagggcaacagctatactcaaaaaagcaaccaggagattgattcaa

SEQ ID NO: 61587 - DNA, 60 bp, Artificial
  Synthetic oligonucleotide
gattatgagggacggctgattcagaacagcttaacaatagagagaatggtgctctctgct

SEQ ID NO: 61588 - DNA, 60 bp, Artificial
  Synthetic oligonucleotide
gattatgagggacgactgattcaaaatagcataacaatagagagaatggtgctctctgct

SEQ ID NO: 61589 - DNA, 60 bp, Artificial
  Synthetic oligonucleotide
gcaagccttacaactattgcttgaagtagaacaagagatgagaactttctcgtttcagct

SEQ ID NO: 61590 - DNA, 60 bp, Artificial
  Synthetic oligonucleotide
tgcaagccttacaactattgcttgaagtagaacaagagatgagaactttctcgtttcagc

SEQ ID NO: 61591 - DNA, 56 bp, Artificial
  Synthetic oligonucleotide
gctcaccgtgcccagtgagcgaggactgcagcgtagacgctttgtccaaaatgcat

SEQ ID NO: 61592 - DNA, 60 bp, Artificial
  Synthetic oligonucleotide
catacttactgacagccagacagcgaccaaaagaattcgaatggccatcaattaatttcg

SEQ ID NO: 61593 - DNA, 60 bp, Artificial
  Synthetic oligonucleotide
gaaggataaagaaagaggagttcactgagatcatgaagatctgttccaccattgaagagc

SEQ ID NO: 61594 - DNA, 60 bp, Artificial
  Synthetic oligonucleotide
tagcggcaagacccaaggtgagaggtcaagcagggagaatgaactattactggacactaa

SEQ ID NO: 61595 - DNA, 60 bp, Artificial
  Synthetic oligonucleotide
gggattcatatccaaagctcagcaaatcctatgttaacaataaagggaaggaagtccttg

SEQ ID NO: 61596 - DNA, 60 bp, Artificial
  Synthetic oligonucleotide
aggaaattcatacccaaagctcagcaaatcctatgttaacaataaggagaaggaagtcct

SEQ ID NO: 61597 - DNA, 55 bp, Artificial
  Synthetic oligonucleotide
cccgtctattcaatctagaggtctgtttggagccattgctggctttattgagggg

SEQ ID NO: 61598 - DNA, 60 bp, Artificial
  Synthetic oligonucleotide
cccgtctattcaatctagaggtctgtttggagccattgctggctttattgaggggggatg

SEQ ID NO: 61599 - DNA, 60 bp, Artificial
  Synthetic oligonucleotide
gagcctggagacacaataacattcgaagcaactggaaatctagtggtaccaagatatgct

SEQ ID NO: 61600 - DNA, 52 bp, Artificial
  Synthetic oligonucleotide
atctattcaatctagaggtctgtttggagccattgctggttttattgagggg

SEQ ID NO: 61601 - DNA, 60 bp, Artificial
  Synthetic oligonucleotide
atctattcaatctagaggtctgtttggagccattgctggttttattgaggggggatggac

SEQ ID NO: 61602 - DNA, 60 bp, Artificial
  Synthetic oligonucleotide
ccccatcagtgggtgggctatatacagcaaagacaatggcataagaattggttccaaggg

SEQ ID NO: 61603 - DNA, 60 bp, Artificial
  Synthetic oligonucleotide
ataagaattggttccaaaggagacatttttgtcataagagagccgtttatttcatgctct

SEQ ID NO: 61604 - DNA, 60 bp, Artificial
  Synthetic oligonucleotide
ccccatcagtgggtgggctatatacagcaaagacaatggcataagaattggttccaaagg

SEQ ID NO: 61605 - DNA, 60 bp, Artificial
  Synthetic oligonucleotide
cccattccttgatcggctccgccgagatcaaaagtccctaataggaagaggcagcaccct

SEQ ID NO: 61606 - DNA, 56 bp, Artificial
  Synthetic oligonucleotide
tccttgatcggctccgccgagatcaaaagtccctaaaaggaagaggcagcaccctt

SEQ ID NO: 61607 - DNA, 60 bp, Artificial
  Synthetic oligonucleotide
attagtggaattggacgattctacatccaaatgtgcaccgaacttaaactcagtgattat

SEQ ID NO: 61608 - DNA, 60 bp, Artificial
  Synthetic oligonucleotide
attggtggaattggacgattctacatccaaatgtgcaccgaacttaaactcagtgattat

SEQ ID NO: 61609 - DNA, 60 bp, Artificial
  Synthetic oligonucleotide
gttggtggaattggacgattctacatccaaatgtgcaccgaacttaaactcagtgattat

SEQ ID NO: 61610 - DNA, 60 bp, Artificial
  Synthetic oligonucleotide
cagcagaatggacaaggatcaggctatgcagcggaccaaaagagcacacaaaatgccatt

SEQ ID NO: 61611 - DNA, 60 bp, Artificial
  Synthetic oligonucleotide
tgatcggcttcgccgagatcagaagtccctaaagggaagaggcagcactctcggtctgga

SEQ ID NO: 61612 - DNA, 60 bp, Artificial
  Synthetic oligonucleotide
agcctcattgagtcctggaatgatgatgggcatgttcaacatgctgagtacagtcctagg

SEQ ID NO: 61613 - DNA, 60 bp, Artificial
  Synthetic oligonucleotide
ggggacatgctcctgcggactgcaataggccaagtgtcaaggcccatgttcctgtatgtg

SEQ ID NO: 61614 - DNA, 60 bp, Artificial
  Synthetic oligonucleotide
gttcttgaaataggggacatgctcctgcggactgcaataggccaagtgtcaaggcccatg

SEQ ID NO: 61615 - DNA, 60 bp, Artificial
  Synthetic oligonucleotide
catggggccaaagaaatagcactcagttattctgctggtgcacttgccagttgcatgggc

SEQ ID NO: 61616 - DNA, 60 bp, Artificial
  Synthetic oligonucleotide
gatttcaacactgtgtcaagctttcaggtagactgctttctttggcatgtccgcaaacgg

SEQ ID NO: 61617 - DNA, 60 bp, Artificial
  Synthetic oligonucleotide
catggtggaggccatggtgtctagggcccgaattgatgcgcgaattgacttcgaatctgg

SEQ ID NO: 61618 - DNA, 60 bp, Artificial
  Synthetic oligonucleotide
aaaacatggaacctttggccctgtacactttagaaaccaagtcaaaatacgccgaagagt

SEQ ID NO: 61619 - DNA, 60 bp, Artificial
  Synthetic oligonucleotide
ctggtgcacttgccagttgtatgggcctcatatacaacagaatggggactgttaccactg

SEQ ID NO: 61620 - DNA, 60 bp, Artificial
  Synthetic oligonucleotide
gagcatccgtcgggaagatgattgatggaattggacgattctacatccaaatgtgcaccg

SEQ ID NO: 61621 - DNA, 60 bp, Artificial
  Synthetic oligonucleotide
tctcattgttcaggcacttagggacaacctggaacctgggaccttcgatcttggagggct

SEQ ID NO: 61622 - DNA, 60 bp, Artificial
  Synthetic oligonucleotide
ctgcaaattggtcttggccagacggtgccgagttgccattcaccattgacaagtagtccg

SEQ ID NO: 61623 - DNA, 50 bp, Artificial
  Synthetic oligonucleotide
gaacggctgcattgagggcaagctttctcaaatgtcaaaagaagtgaacg

SEQ ID NO: 61624 - DNA, 60 bp, Artificial
  Synthetic oligonucleotide
agatttgaaatcacaggaaccatgcgtaggcttgccgaccaaagtctcccaccgaacttc

SEQ ID NO: 61625 - DNA, 60 bp, Artificial
  Synthetic oligonucleotide
gcatacatgttagagagagaacttgtccgcaaaacgagatttctcccagttgctggtgga

SEQ ID NO: 61626 - DNA, 60 bp, Artificial
  Synthetic oligonucleotide
tggagttttccctcactgacccaagacttgagccacacaaatgggagaagtactgtgttc

SEQ ID NO: 61627 - DNA, 60 bp, Artificial
  Synthetic oligonucleotide
tgtgagcatggagttttccctcactgacccaagacttgagccacacaaatgggagaagta

SEQ ID NO: 61628 - DNA, 60 bp, Artificial
  Synthetic oligonucleotide
cgtggaatcaatgatcggaacttctggaggggtgaaaatggacgaaggacaagaattgcc

SEQ ID NO: 61629 - DNA, 60 bp, Artificial
  Synthetic oligonucleotide
gaacaacatgataaacaatgaccttggaccagcaacggcccaaatggctcttcagctgtt

SEQ ID NO: 61630 - DNA, 60 bp, Artificial
  Synthetic oligonucleotide
ggacgactgatccagaacagcttgacaatagagagaatggtgctctctgcttttgatgag

SEQ ID NO: 61631 - DNA, 60 bp, Artificial
  Synthetic oligonucleotide
tatatacagcaaagataatggcgtaagaattggttccaaaggagatgtttttgtcataag

SEQ ID NO: 61632 - DNA, 58 bp, Artificial
  Synthetic oligonucleotide
tagttttggggtgtctggggtcaatgaatctgcagacatgagtattggagtcactgtc

SEQ ID NO: 61633 - DNA, 60 bp, Artificial
  Synthetic oligonucleotide
agaaaccaagtcaaaatacgccgaagagttgacataaatcctggtcatgcagacctcagt

SEQ ID NO: 61634 - DNA, 60 bp, Artificial
  Synthetic oligonucleotide
cacagcagaggtgtctcattgcagagccacagaatacataatgaagggagtatacatcaa

SEQ ID NO: 61635 - DNA, 60 bp, Artificial
  Synthetic oligonucleotide
gagcttcctagttttggggtgtctggggtcaatgaatctgcagacatgagtattggagtc

SEQ ID NO: 61636 - DNA, 60 bp, Artificial
  Synthetic oligonucleotide
caggccactcttaatagatggaactgcatcattgagccctggaatgatgatgggcatgtt

SEQ ID NO: 61637 - DNA, 60 bp, Artificial
  Synthetic oligonucleotide
ttgaagaagtgagacacagactgaagataacagagaatagttttgagcaaataacgttta

SEQ ID NO: 61638 - DNA, 60 bp, Artificial
  Synthetic oligonucleotide
aagatgagccttctaaccgaggtcgaaacgtacgttctctctattgtcccatcaggcccc

SEQ ID NO: 61639 - DNA, 60 bp, Artificial
  Synthetic oligonucleotide
cgttaaggacagaagcccttatagggccttaatgagctgccctgttggtgaagctccgtc

SEQ ID NO: 61640 - DNA, 60 bp, Artificial
  Synthetic oligonucleotide
gacagaagcccttatagggccttaatgagctgccctgttggtgaagctccgtccccgtac

SEQ ID NO: 61641 - DNA, 60 bp, Artificial
  Synthetic oligonucleotide
tgcatgtcatgatggcatgggctggctaacaatcggaatttctggtccagataatggggc

SEQ ID NO: 61642 - DNA, 60 bp, Artificial
  Synthetic oligonucleotide
gatggcatgggctggctaacaatcggaatttctggtccagataatggggcagtggctgta

SEQ ID NO: 61643 - DNA, 60 bp, Artificial
  Synthetic oligonucleotide
gtaaattggtcttggccagacggtgccgagttgccattcaccattgacaagtagtccggt

SEQ ID NO: 61644 - DNA, 60 bp, Artificial
  Synthetic oligonucleotide
gtgttcctgttaccctgataccggcaaagtgatgtgtgtgtgcagagacaattggcacgg

SEQ ID NO: 61645 - DNA, 60 bp, Artificial
  Synthetic oligonucleotide
gggaccgttaaggacagaagcccttatagggccttaatgagctgccctgtcggtgaagct

SEQ ID NO: 61646 - DNA, 60 bp, Artificial
  Synthetic oligonucleotide
ctttgtcctatccgtgggtgggctatatacagcaaagacaacagcataagaattggttcc

SEQ ID NO: 61647 - DNA, 60 bp, Artificial
  Synthetic oligonucleotide
ttttttctgacccaaggcgccctgttgaatgacaagcattcaaatgggaccgttaaggac

SEQ ID NO: 61648 - DNA, 60 bp, Artificial
  Synthetic oligonucleotide
caaggcgctctgttaaatgacaagcattcaaatgggaccgttaaggacagaagcccttat

SEQ ID NO: 61649 - DNA, 60 bp, Artificial
  Synthetic oligonucleotide
gctctgttaaatgacaagcattcaaatgggaccgttaaggacagaagcccttatagggcc

SEQ ID NO: 61650 - DNA, 60 bp, Artificial
  Synthetic oligonucleotide
ttcaaatgggaccgttaaggacagaagcccttatagggccttaatgagctgtcctatcgg

SEQ ID NO: 61651 - DNA, 60 bp, Artificial
  Synthetic oligonucleotide
ctttaactgaagacccagatgaaggcacagctggagtggagtccgcagttctgagaggat

SEQ ID NO: 61652 - DNA, 60 bp, Artificial
  Synthetic oligonucleotide
ctttaactgaagacccagatgaaggcacagctggagtagagtccgctgttctaaggggat

SEQ ID NO: 61653 - DNA, 60 bp, Artificial
  Synthetic oligonucleotide
atggatgtcaatccgactttgcttttcctgaaagtgccagcgcaaaatgctataagtaca

SEQ ID NO: 61654 - DNA, 60 bp, Artificial
  Synthetic oligonucleotide
ctcatggagtggctaaagacaagaccaatcctgtcacctctgactaaggggattttagga

SEQ ID NO: 61655 - DNA, 60 bp, Artificial
  Synthetic oligonucleotide
tctcatggagtggctaaagacaagaccaatcctgtcacctctgactaaggggattttagg

SEQ ID NO: 61656 - DNA, 60 bp, Artificial
  Synthetic oligonucleotide
cccactcagtgaatttgctcgaagacagccataatgggaaactctgcagcctgaatggga

SEQ ID NO: 61657 - DNA, 60 bp, Artificial
  Synthetic oligonucleotide
ctgtgacccactcagtgaatttgctcgaagacagccataatgggaaactctgcagcctga

SEQ ID NO: 61658 - DNA, 60 bp, Artificial
  Synthetic oligonucleotide
ccaatcctgtcacctctgactaaggggattttagggtttgtgttcacgctcaccgtgccc

SEQ ID NO: 61659 - DNA, 60 bp, Artificial
  Synthetic oligonucleotide
ggctctcatggagtggctaaagacaagaccgatcctgtcacctctgactaaggggatttt

SEQ ID NO: 61660 - DNA, 60 bp, Artificial
  Synthetic oligonucleotide
gacaagaccgatcctgtcacctctgactaaggggattttagggtttgtgttcacgctcac

SEQ ID NO: 61661 - DNA, 60 bp, Artificial
  Synthetic oligonucleotide
ccacaagtgtgatgatgagtgcatggaaagtgtgaagaacggcacatatgactatcccaa

SEQ ID NO: 61662 - DNA, 60 bp, Artificial
  Synthetic oligonucleotide
cacaagtgtgatgatgagtgcatggaaagtgtgaagaacggcacatatgactatcccaag

SEQ ID NO: 61663 - DNA, 60 bp, Artificial
  Synthetic oligonucleotide
accttgcttctgggttgagctaatcaggggaagacccaaggagaatacaatctggaccag

SEQ ID NO: 61664 - DNA, 60 bp, Artificial
  Synthetic oligonucleotide
gcatatggggtaaaagggttttcatttaaatacggtaacggtgtttggataggaagaact

SEQ ID NO: 61665 - DNA, 60 bp, Artificial
  Synthetic oligonucleotide
tctagagtatcaaataggatacatatgcagcggagtttttggagacaatccacgccccaa

SEQ ID NO: 61666 - DNA, 60 bp, Artificial
  Synthetic oligonucleotide
atgaggagtgttcctgttatcctgatgctagcgaggtgatgtgtgtatgcagagacaact

SEQ ID NO: 61667 - DNA, 60 bp, Artificial
  Synthetic oligonucleotide
ggtagtcaaatcagtcgagttgaatgctcctaattaccactatgaggagtgttcctgtta

SEQ ID NO: 61668 - DNA, 60 bp, Artificial
  Synthetic oligonucleotide
cacaagagtctgaatgtgcctgcatgaatggttcttgctttaccataatgactgatggac

SEQ ID NO: 61669 - DNA, 60 bp, Artificial
  Synthetic oligonucleotide
agcaaggacaatagtataaggataggttccaagggagatgtatttgttatcagagagccg

SEQ ID NO: 61670 - DNA, 60 bp, Artificial
  Synthetic oligonucleotide
gaattaacaggactggactgcatgagaccttgcttctgggttgaactgatcaggggaaga

SEQ ID NO: 61671 - DNA, 60 bp, Artificial
  Synthetic oligonucleotide
gattatggataagaacatcatactgaaagcgaacttcagtgtgatattcgatcgactgga

SEQ ID NO: 61672 - DNA, 60 bp, Artificial
  Synthetic oligonucleotide
acatgactcttgaagagatgtcaagggactggttcatgctcatgcccaagcagaaagtag

SEQ ID NO: 61673 - DNA, 60 bp, Artificial
  Synthetic oligonucleotide
attcgtcatcaatgatgtgggagatcaatggtcctgagtcggtgttggtcaatacttatc

SEQ ID NO: 61674 - DNA, 60 bp, Artificial
  Synthetic oligonucleotide
catttctcgatcggcttcgccgagatcagaagtccctaagaggaagaggctgcactcttg

SEQ ID NO: 61675 - DNA, 60 bp, Artificial
  Synthetic oligonucleotide
cattcctcgatcggcttcgccgagatcagaagtccctaagaggaagaggcagcactcttg

SEQ ID NO: 61676 - DNA, 60 bp, Artificial
  Synthetic oligonucleotide
ttattctgctggtgcacttgccagttgtatgggcctcatatacaacagaatggggactgt

SEQ ID NO: 61677 - DNA, 60 bp, Artificial
  Synthetic oligonucleotide
cgcttggggaatccgtgatgagaatgggagacctccactccctccaaaacagaaacgcta

SEQ ID NO: 61678 - DNA, 60 bp, Artificial
  Synthetic oligonucleotide
gggtttgagatgatttgggatcctaatggatggacagaaactgatagtaggttctctgtg

SEQ ID NO: 61679 - DNA, 56 bp, Artificial
  Synthetic oligonucleotide
catggaaaagaacatcatactgaaagcgaacttcagtgtgatttttgaccggttgg

SEQ ID NO: 61680 - DNA, 60 bp, Artificial
  Synthetic oligonucleotide
atcgagaaggggaaggttactaaatcaatagagttggatgcacctaactctcactacgag

SEQ ID NO: 61681 - DNA, 50 bp, Artificial
  Synthetic oligonucleotide
atcgagaaggggaaggttactaaatcaatagagttggatgcacctaactc

SEQ ID NO: 61682 - DNA, 60 bp, Artificial
  Synthetic oligonucleotide
atcgggggacttgaatggaatgataacacagttcgagtctctgaaactatacagagattc

SEQ ID NO: 61683 - DNA, 60 bp, Artificial
  Synthetic oligonucleotide
tcgggggacttgaatggaatgataacacagttcgagtctctgaaactctacagagattcg

SEQ ID NO: 61684 - DNA, 56 bp, Artificial
  Synthetic oligonucleotide
ggggacttgaatggaatgataacacagttcgagtctctgaaactatacagagattc

SEQ ID NO: 61685 - DNA, 60 bp, Artificial
  Synthetic oligonucleotide
tcctcatcggaggacttgaatggaatgataacacagttcgagtctctaaaactctacaga

SEQ ID NO: 61686 - DNA, 60 bp, Artificial
  Synthetic oligonucleotide
gactggactctaaataggaaccagcctgctgcaacagcattggccaacacaatagaagtg

SEQ ID NO: 61687 - DNA, 60 bp, Artificial
  Synthetic oligonucleotide
tctagtcttgttagtctccctgggggcaatcagtttctggatgtgctctaatgggtcatt

SEQ ID NO: 61688 - DNA, 60 bp, Artificial
  Synthetic oligonucleotide
cttggttcaactccttcctcacacatgcactgaaatagttgtggcaatgctactgtttgc

SEQ ID NO: 61689 - DNA, 60 bp, Artificial
  Synthetic oligonucleotide
gggagcagcatttccttttgtggcgtgaatagtgatactgcaaattggtcttggccagac

SEQ ID NO: 61690 - DNA, 60 bp, Artificial
  Synthetic oligonucleotide
gtggagtaaaatgaatgatgccggatcagaccgagtgatggtatcacctctggctgtgac

SEQ ID NO: 61691 - DNA, 60 bp, Artificial
  Synthetic oligonucleotide
tttctttggcatgtccgcaaacggtttgcagacaataaattgggtgatgccccattcctt

SEQ ID NO: 61692 - DNA, 56 bp, Artificial
  Synthetic oligonucleotide
catacttactgacagccagacagcgaccaaaagaattcgaatggccatcaattaat

SEQ ID NO: 61693 - DNA, 60 bp, Artificial
  Synthetic oligonucleotide
ttggcatgcttcgaatcggccatgggtgtctttcgatcaaaatctggattatcaaatagg

SEQ ID NO: 61694 - DNA, 60 bp, Artificial
  Synthetic oligonucleotide
tcggccatgggtgtctttcgatcaaaatctggattatcaaatagggtacatctgcagtgg

SEQ ID NO: 61695 - DNA, 60 bp, Artificial
  Synthetic oligonucleotide
ggcacggttcgaaccgaccatgggtgtctttcgatcaaaatctggattatcaaatgggat

SEQ ID NO: 61696 - DNA, 60 bp, Artificial
  Synthetic oligonucleotide
ggccatgggtgtctttcgatcaaaatctggattatcaaatagggtacatctgcagtgggg

SEQ ID NO: 61697 - DNA, 60 bp, Artificial
  Synthetic oligonucleotide
ggggatggacaggaatgatagatggatggtatggttatcaccatcagaatggacagggat

SEQ ID NO: 61698 - DNA, 60 bp, Artificial
  Synthetic oligonucleotide
actgacaataacttactcatcgtcaatgatgtgggagattaatggccctgagtcagtgtt

SEQ ID NO: 61699 - DNA, 60 bp, Artificial
  Synthetic oligonucleotide
ggagaaaaatgtgactgtgacccattcagttaatttactagaaaacagccataatggaaa

SEQ ID NO: 61700 - DNA, 60 bp, Artificial
  Synthetic oligonucleotide
gtaactgtgactcattcagttaatttactagaaaacagccataatggaaaactctgcagc

SEQ ID NO: 61701 - DNA, 60 bp, Artificial
  Synthetic oligonucleotide
gagaggaagtagacggtgtgaaactagaatcaatgggagtttaccagattttggcgatct

SEQ ID NO: 61702 - DNA, 60 bp, Artificial
  Synthetic oligonucleotide
ataatggaaaactctgcagcctgaatggaatagcccccttacaactggggaagtgtaacg

SEQ ID NO: 61703 - DNA, 60 bp, Artificial
  Synthetic oligonucleotide
tcagttaatttactagaaaacagccataatggaaaactctgcagcctgaatggaatagcc

SEQ ID NO: 61704 - DNA, 60 bp, Artificial
  Synthetic oligonucleotide
ctgtgacccattcagttaatttactagaaaacagccataatggaaaactctgcagcctga

SEQ ID NO: 61705 - DNA, 60 bp, Artificial
  Synthetic oligonucleotide
ttccagcgcaaaatgccataagcaccacattcccttatactggagatcctccatacagcc

SEQ ID NO: 61706 - DNA, 60 bp, Artificial
  Synthetic oligonucleotide
tctaacagctaatgagtcgggaaggctaatagatttcctcaaggatgtgatggaatcaat

SEQ ID NO: 61707 - DNA, 60 bp, Artificial
  Synthetic oligonucleotide
cggtctgacagctaatgaatcaggaaggctgatagatttcctcaaggatgtgatggaatc

SEQ ID NO: 61708 - DNA, 60 bp, Artificial
  Synthetic oligonucleotide
ctagcagctcatacaggagaccagtcgggatttccagtatggtggaggccatggtttcta

SEQ ID NO: 61709 - DNA, 60 bp, Artificial
  Synthetic oligonucleotide
ggtaatgaaacggaaacgggactctagcatacttactgacagccagacagcgaccaaaag

SEQ ID NO: 61710 - DNA, 60 bp, Artificial
  Synthetic oligonucleotide
tccttcctcacacatgcattgagatagttgtggcaatgctactatttgctatccatactg

SEQ ID NO: 61711 - DNA, 60 bp, Artificial
  Synthetic oligonucleotide
tgcatggaaagtgtgaagaacggcacatatgattatcccaaatattcagaagagtctaaa

SEQ ID NO: 61712 - DNA, 60 bp, Artificial
  Synthetic oligonucleotide
acacggtttgaaaagagggccttctacggaaggagtaccagagtctatgagggaagaata

SEQ ID NO: 61713 - DNA, 60 bp, Artificial
  Synthetic oligonucleotide
taatgttctcaaacaaaatggcgagactaggtaaagggtacatgtttgaaagcaagagta

SEQ ID NO: 61714 - DNA, 60 bp, Artificial
  Synthetic oligonucleotide
gtgattttcgaccggttggagactttaatactactaagggctttcaccgaagagggagca

SEQ ID NO: 61715 - DNA, 60 bp, Artificial
  Synthetic oligonucleotide
gtcttggaggcaatggctttccttgaagaatcccatccagggatctttgaaaactcgtgt

SEQ ID NO: 61716 - DNA, 60 bp, Artificial
  Synthetic oligonucleotide
ctctggctgtgacatggtggaataggaatggaccaacgacaagtacagttcactatccaa

SEQ ID NO: 61717 - DNA, 60 bp, Artificial
  Synthetic oligonucleotide
ctctggctgtgacatggtggaataggaatggaccaacgacaagtactgttcactatccaa

SEQ ID NO: 61718 - DNA, 60 bp, Artificial
  Synthetic oligonucleotide
cagaccgagtgatggtatcacctctggctgtgacatggtggaataggaatggaccaacaa

SEQ ID NO: 61719 - DNA, 60 bp, Artificial
  Synthetic oligonucleotide
ctcagaccgagtgatggtatcacctctggctgtgacatggtggaataggaatggaccaac

SEQ ID NO: 61720 - DNA, 60 bp, Artificial
  Synthetic oligonucleotide
atttgaaatcacagggacaatgcgcaggcttgccgaccaaagtctcccaccgaatttctc

SEQ ID NO: 61721 - DNA, 60 bp, Artificial
  Synthetic oligonucleotide
cacagggacaatgcgcaggcttgccgaccaaagtctcccaccaaatttctccagtcttga

SEQ ID NO: 61722 - DNA, 60 bp, Artificial
  Synthetic oligonucleotide
cacaggaacaatgcgcaggcttgccgaccaaagtctcccaccaaacttctccagtcttga

SEQ ID NO: 61723 - DNA, 60 bp, Artificial
  Synthetic oligonucleotide
cacagggacaatgcgcaggcttgccgaccaaagtctcccaccgaatttctccagtcttga

SEQ ID NO: 61724 - DNA, 60 bp, Artificial
  Synthetic oligonucleotide
tgtgttcacgctcaccgtgcccagtgagcgaggactgcaacgtagacgctttgttcaaaa

SEQ ID NO: 61725 - DNA, 60 bp, Artificial
  Synthetic oligonucleotide
tgaaaaggttgaaaggttaaaacatggaacctttggccctgtacactttagaaatcaagt

SEQ ID NO: 61726 - DNA, 60 bp, Artificial
  Synthetic oligonucleotide
gggaagaacaccgaccttgaggctctcatggaatggctaaagacaagaccaatcctgtca

SEQ ID NO: 61727 - DNA, 60 bp, Artificial
  Synthetic oligonucleotide
cgtgacagtgacacactctgtcaacctacttgaggacagtcacaacggaaaactatgcag

SEQ ID NO: 61728 - DNA, 60 bp, Artificial
  Synthetic oligonucleotide
gacagtgacacactctgtcaacctacttgagggcagtcacaatggaaaactatgtctact

SEQ ID NO: 61729 - DNA, 60 bp, Artificial
  Synthetic oligonucleotide
gacagtgacacactctgtcaacctacttgaggacagtcacaatggaaaactatgtctgct

SEQ ID NO: 61730 - DNA, 60 bp, Artificial
  Synthetic oligonucleotide
gttgacacagtgctcgaaaagaacgtgacagtgacacactctgtcaacctacttgaggac

SEQ ID NO: 61731 - DNA, 60 bp, Artificial
  Synthetic oligonucleotide
aatgtgacagtgacacactctgtcaacctacttgagggcagtcacaatggaaaactatgt

SEQ ID NO: 61732 - DNA, 60 bp, Artificial
  Synthetic oligonucleotide
gttgacacagtactcgaaaagaacgtgacagtgacacactctgtcaacctacttgaggac

SEQ ID NO: 61733 - DNA, 60 bp, Artificial
  Synthetic oligonucleotide
acgtgacagtgacacactctgtcaacctacttgaggacagtcacaacggaaaactatgca

SEQ ID NO: 61734 - DNA, 60 bp, Artificial
  Synthetic oligonucleotide
gacactgttgacacagtgctcgaaaagaacgtgacagtgacacactctgtcaacctactt

SEQ ID NO: 61735 - DNA, 60 bp, Artificial
  Synthetic oligonucleotide
tgacagtgacacactctgtcaacctacttgaggacagtcacaatggaaaactatgtctac

SEQ ID NO: 61736 - DNA, 60 bp, Artificial
  Synthetic oligonucleotide
gacactgttgacacagtactcgaaaagaacgtgacagtgacacactctgtcaacctactt

SEQ ID NO: 61737 - DNA, 60 bp, Artificial
  Synthetic oligonucleotide
gttctgttatgtacatttacagctacatatgcagacacaatatgtataggctaccatgcc

SEQ ID NO: 61738 - DNA, 60 bp, Artificial
  Synthetic oligonucleotide
ggttctgttatgtacatttacagctacatatgcagacacaatatgtataggctaccatgc

SEQ ID NO: 61739 - DNA, 60 bp, Artificial
  Synthetic oligonucleotide
gttgacacagtacttgagaagaatgtgacagtgacacactctgtcaacctacttgaggac

SEQ ID NO: 61740 - DNA, 60 bp, Artificial
  Synthetic oligonucleotide
tgttgacacagtacttgagaagaacgtgacagtgacacactctgtcaacctacttgagga

SEQ ID NO: 61741 - DNA, 60 bp, Artificial
  Synthetic oligonucleotide
gaacgtgacagtgacacactctgtcaacctacttgaggacagtcacaacggaaaactatg

SEQ ID NO: 61742 - DNA, 58 bp, Artificial
  Synthetic oligonucleotide
gaatgtgacagtgacacactctgtcaacctacttgaggacagtcacaatggaaaacta

SEQ ID NO: 61743 - DNA, 60 bp, Artificial
  Synthetic oligonucleotide
cttgagaagaacgtgacagtgacacactctgtcaacctacttgaggacagtcacaacgga

SEQ ID NO: 61744 - DNA, 60 bp, Artificial
  Synthetic oligonucleotide
gtactcgaaaagaacgtgacagtgacacactctgtcaacctacttgaggacagtcacaac

SEQ ID NO: 61745 - DNA, 60 bp, Artificial
  Synthetic oligonucleotide
gtacttgagaagaacgtgacagtgacacactctgtcaacctacttgaggacagtcacaac

SEQ ID NO: 61746 - DNA, 60 bp, Artificial
  Synthetic oligonucleotide
gacacagtacttgagaagaatgtgacagtgacacactctgtcaacctacttgaggacagt

SEQ ID NO: 61747 - DNA, 60 bp, Artificial
  Synthetic oligonucleotide
acactgttgacacagtacttgagaagaatgtgacagtgacacactctgtcaacctacttg

SEQ ID NO: 61748 - DNA, 55 bp, Artificial
  Synthetic oligonucleotide
gaatgtgacagtgacacactctgtcaacctacttgaggacagtcacaatggaaaa

SEQ ID NO: 61749 - DNA, 60 bp, Artificial
  Synthetic oligonucleotide
ctggactagtgggagcagcatttccttttgtggcgttgatagtgatactgcaaactggtc

SEQ ID NO: 61750 - DNA, 60 bp, Artificial
  Synthetic oligonucleotide
attgcttatgagagaatgtgcaacattctcaaagggaaatttcaaacagctgcacaaaga

SEQ ID NO: 61751 - DNA, 60 bp, Artificial
  Synthetic oligonucleotide
gattgcttatgagagaatgtgcaacattctcaaagggaaatttcaaacagctgcacaaaa

SEQ ID NO: 61752 - DNA, 60 bp, Artificial
  Synthetic oligonucleotide
aattgcttatgagagaatgtgcaatattctcaaagggaaatttcaaacagctgcacaaaa

SEQ ID NO: 61753 - DNA, 60 bp, Artificial
  Synthetic oligonucleotide
gattgcttatgagagaatgtgcaacattctcaaagggaaatttcaaacagctgcacaaag

SEQ ID NO: 61754 - DNA, 60 bp, Artificial
  Synthetic oligonucleotide
gcagccttccttttcagaatgtacatcctatcactattggagaatgtcccaaatacgtca

SEQ ID NO: 61755 - DNA, 60 bp, Artificial
  Synthetic oligonucleotide
cttccttttcagaatgtacatcctatcactattggagaatgtcccaaatacgtcaagagc

SEQ ID NO: 61756 - DNA, 60 bp, Artificial
  Synthetic oligonucleotide
gctttgaacagtagtcttccttttcagaatgtacatcctatcactattggagaatgtccc

SEQ ID NO: 61757 - DNA, 57 bp, Artificial
  Synthetic oligonucleotide
ttttatcggaatttgctgtggataacaaagaagggaacgtcatatccaaaactcagc

SEQ ID NO: 61758 - DNA, 60 bp, Artificial
  Synthetic oligonucleotide
gagatctgatgtcacagtctcgcactcgcgagatactcacaaggaccaccgtggaccata

SEQ ID NO: 61759 - DNA, 60 bp, Artificial
  Synthetic oligonucleotide
ctgatgtcacagtctcgcactcgcgagatactcacaaggaccaccgtggaccatatggcc

SEQ ID NO: 61760 - DNA, 60 bp, Artificial
  Synthetic oligonucleotide
atgaaacggaaacgggactcaagcatacttactgacagccagacagcgaccaaaagaatt

SEQ ID NO: 61761 - DNA, 59 bp, Artificial
  Synthetic oligonucleotide
ctagcatacttactgacagccagacagcgaccaaaagaattcgaatggccatcaattaa

SEQ ID NO: 61762 - DNA, 54 bp, Artificial
  Synthetic oligonucleotide
ctagcatacttactgacagccagacagcgaccaaaagaattcgaatggccatca

SEQ ID NO: 61763 - DNA, 60 bp, Artificial
  Synthetic oligonucleotide
agtggatatgcacaaacagactgtgtcctggaagcaatggctttccttgaagagtcccac

SEQ ID NO: 61764 - DNA, 60 bp, Artificial
  Synthetic oligonucleotide
caggctccgaagagaccaaaaggcattaaagggaagaggcagcacacttgggctcgatct

SEQ ID NO: 61765 - DNA, 60 bp, Artificial
  Synthetic oligonucleotide
acaggctccgaagagaccaaaaggcattaaagggaagaggcagcacacttgggctcgatc

SEQ ID NO: 61766 - DNA, 60 bp, Artificial
  Synthetic oligonucleotide
gctgctcagtatgagagacatgtgtgatgctccctttgatgacaggctccgaagagacca

SEQ ID NO: 61767 - DNA, 60 bp, Artificial
  Synthetic oligonucleotide
acagataacattcttgcaagcattgcaactcttacttgaagttgagagtgagataagaac

SEQ ID NO: 61768 - DNA, 60 bp, Artificial
  Synthetic oligonucleotide
gcaagcattgcaactcttacttgaagttgagagtgagataagaactttctcttttcagct

SEQ ID NO: 61769 - DNA, 60 bp, Artificial
  Synthetic oligonucleotide
ataaccattgggacaatctgtctaatagttggaataattagtctattattgcagataggg

SEQ ID NO: 61770 - DNA, 60 bp, Artificial
  Synthetic oligonucleotide
aatgatgggaaaggcaactgtggcccagtactttctaatggagcaaatggagtaaaaggg

SEQ ID NO: 61771 - DNA, 55 bp, Artificial
  Synthetic oligonucleotide
cgtcaaggacaggagtccttatagaaccttaatgagctgccccattggtgaagct

SEQ ID NO: 61772 - DNA, 60 bp, Artificial
  Synthetic oligonucleotide
gactcaaggcgctttgctgaatgacaggcattcaaatggaaccgtcaaggacaggagtcc

SEQ ID NO: 61773 - DNA, 60 bp, Artificial
  Synthetic oligonucleotide
agaacacaagagtctgaatgtgtttgtataaacggttcgtgttttactataatgactgac

SEQ ID NO: 61774 - DNA, 60 bp, Artificial
  Synthetic oligonucleotide
cgtcaaggacaggagtccttatagaaccttaatgagctgccccattggtgaagctccatc

SEQ ID NO: 61775 - DNA, 60 bp, Artificial
  Synthetic oligonucleotide
ataaccattgggacaatctgtctaatagttggaatagttagtctattattgcagatagga

SEQ ID NO: 61776 - DNA, 60 bp, Artificial
  Synthetic oligonucleotide
caaggtgaattctgtaattgagaaaatgaacactcaattcacagctgtgggcaaagaatt

SEQ ID NO: 61777 - DNA, 60 bp, Artificial
  Synthetic oligonucleotide
gactagtgggagcagcatttctttttgtggcgtgaatagtgatactgtaaattggtcttg

SEQ ID NO: 61778 - DNA, 60 bp, Artificial
  Synthetic oligonucleotide
tggactagtgggagcagcatttctttttgtggcgtgaatagtgatactgtagactggtct

SEQ ID NO: 61779 - DNA, 60 bp, Artificial
  Synthetic oligonucleotide
ccatgccaacaactcaaccgacactgttgacacagtacttgagaagaatgtgacagtgac

SEQ ID NO: 61780 - DNA, 60 bp, Artificial
  Synthetic oligonucleotide
gtgatttttgaccaactggagactctaatattactaagggctttcaccgaagagggagca

SEQ ID NO: 61781 - DNA, 60 bp, Artificial
  Synthetic oligonucleotide
ggggagaacccgaagatcgaaacaaacaaatttgcagcaatatgcacccacatggaggta

SEQ ID NO: 61782 - DNA, 60 bp, Artificial
  Synthetic oligonucleotide
aatatggggagaacccgaagatcgaaacaaacaaatttgcagcaatatgcacccacatgg

SEQ ID NO: 61783 - DNA, 51 bp, Artificial
  Synthetic oligonucleotide
gcgagggatcaatgatcggaatttctggagaggcgaaaatgggcggaggac

SEQ ID NO: 61784 - DNA, 60 bp, Artificial
  Synthetic oligonucleotide
ggaaggactaaaagtaacagactaagaaagggatttgagatgatttgggatcctaatgga

SEQ ID NO: 61785 - DNA, 60 bp, Artificial
  Synthetic oligonucleotide
ctcatggccaaatcatgagacaaccaaaggtgccacagctgcatgctctcactctggagc

SEQ ID NO: 61786 - DNA, 60 bp, Artificial
  Synthetic oligonucleotide
ctcgagataggagatatgcttctaaggagtgcaataggccaagtgtcaaggcccatgttc

SEQ ID NO: 61787 - DNA, 53 bp, Artificial
  Synthetic oligonucleotide
cactcactgagtgacatcgaaatcatggcgtcccaaggcaccaaacggtctta

SEQ ID NO: 61788 - DNA, 57 bp, Artificial
  Synthetic oligonucleotide
aaaatacagatctagaggctctcatggaatggctaaagacaagaccaatcctgtcac

SEQ ID NO: 61789 - DNA, 60 bp, Artificial
  Synthetic oligonucleotide
atggattcaaacactgtgtcaagctttcaggtagactgctttctttggcatgtccgcaaa

SEQ ID NO: 61790 - DNA, 60 bp, Artificial
  Synthetic oligonucleotide
gtcgaaaggttaaaacatggaacctttggccctgtccactttagaaaccaagtcaaaata

SEQ ID NO: 61791 - DNA, 60 bp, Artificial
  Synthetic oligonucleotide
agtcgaaaggttaaaacatggaacctttggccctgtccattttaggaatcaagtcaagat

SEQ ID NO: 61792 - DNA, 60 bp, Artificial
  Synthetic oligonucleotide
gcatctccacaacttgagggattttcagctgaatcaaggaaattgcttctcattgttcag

SEQ ID NO: 61793 - DNA, 60 bp, Artificial
  Synthetic oligonucleotide
aatgaagggtcttatttcttcggagacaatgcagaggagtatgacaattaaagaaaaata

SEQ ID NO: 61794 - DNA, 60 bp, Artificial
  Synthetic oligonucleotide
cagagacaactggcatggttcgaaccgaccatgggtgtctttcgatcaaaatctggatta

SEQ ID NO: 61795 - DNA, 60 bp, Artificial
  Synthetic oligonucleotide
gtctctaaaactctacagagattcgcttggagaagcagtagtgagaatgggagacctcca

SEQ ID NO: 61796 - DNA, 60 bp, Artificial
  Synthetic oligonucleotide
tgatccctgggttttgcttaatgcgtcttggttcaactccttcctcacacatgcactgag

SEQ ID NO: 61797 - DNA, 60 bp, Artificial
  Synthetic oligonucleotide
aaatgccattaacgggattacaaacaaggtgaactctgttatcgagaagatgaacactca

SEQ ID NO: 61798 - DNA, 60 bp, Artificial
  Synthetic oligonucleotide
aaatgccattaacgggattacaaacaaggtgaactctgtaatcgagaaaatgaacactca

SEQ ID NO: 61799 - DNA, 60 bp, Artificial
  Synthetic oligonucleotide
aaatgccattaacgggattacaaacaaggtgaactctataatcgagaaaatgaacactca

SEQ ID NO: 61800 - DNA, 60 bp, Artificial
  Synthetic oligonucleotide
cagtgattatgagggacgactgattcaaaatagcataacaatagagagaatggtgctctc

SEQ ID NO: 61801 - DNA, 55 bp, Artificial
  Synthetic oligonucleotide
acgagggatcttatttcttcggagacaatgcagaggagtatgacaattaaagaaa

SEQ ID NO: 61802 - DNA, 54 bp, Artificial
  Synthetic oligonucleotide
cactcactgagtgacatccacaacatggcgtctcaaggcaccaaacgatcttat

SEQ ID NO: 61803 - DNA, 60 bp, Artificial
  Synthetic oligonucleotide
tcatcgtcaatgatgtgggagattaatggccctgagtcagtgttggtcaatacctatcag

SEQ ID NO: 61804 - DNA, 60 bp, Artificial
  Synthetic oligonucleotide
ttcatcaatgatgtgggagattaatggccctgagtcagtgttgatcaatacctatcagtg

SEQ ID NO: 61805 - DNA, 60 bp, Artificial
  Synthetic oligonucleotide
cgtcaatgatgtgggagattaatggccctgagtcagtgttggtcaatacctatcagtgga

SEQ ID NO: 61806 - DNA, 60 bp, Artificial
  Synthetic oligonucleotide
taacttattcttcgtcaatgatgtgggagattaatggccctgagtcagtgttggtcaata

SEQ ID NO: 61807 - DNA, 60 bp, Artificial
  Synthetic oligonucleotide
taacttactcttcgtcaatgatgtgggagattaatggccctgagtcagtgttggtcaata

SEQ ID NO: 61808 - DNA, 60 bp, Artificial
  Synthetic oligonucleotide
ctgacaataacttactcatcgtcaatgatgtgggagattaatggccctgagtcagtgttg

SEQ ID NO: 61809 - DNA, 60 bp, Artificial
  Synthetic oligonucleotide
aattggttccaaaggagatgtttttgtcataagagaaccttttatatcatgctctcactt

SEQ ID NO: 61810 - DNA, 60 bp, Artificial
  Synthetic oligonucleotide
gggtggtcccaagaggacaactgtccaccagaggagttcaaatagcttcaaatgagaaca

SEQ ID NO: 61811 - DNA, 60 bp, Artificial
  Synthetic oligonucleotide
caaaagtggtcccaagaggacaactgtccaccagaggagttcaaattgcttcaaatgaaa

SEQ ID NO: 61812 - DNA, 60 bp, Artificial
  Synthetic oligonucleotide
caagggtggtcccaagaggacaactgtccaccagaggagttcaaatagcttcaaatgaga

SEQ ID NO: 61813 - DNA, 60 bp, Artificial
  Synthetic oligonucleotide
cagaggaacaagagtagtcccaagaggacaactgtccaccagaggagttcagattgcttc

SEQ ID NO: 61814 - DNA, 60 bp, Artificial
  Synthetic oligonucleotide
acaagagtggtcccaagaggacaactgtccaccagaggagttcaaattgcttcaaatgag

SEQ ID NO: 61815 - DNA, 60 bp, Artificial
  Synthetic oligonucleotide
tcagagggacaagagtagtcccaagaggacaactgtccaccagaggagttcaaattgctt

SEQ ID NO: 61816 - DNA, 60 bp, Artificial
  Synthetic oligonucleotide
cagagggacaagagtagtcccaagaggacaactgtccaccagaggagttcaaattgcttc

SEQ ID NO: 61817 - DNA, 60 bp, Artificial
  Synthetic oligonucleotide
caaacagcagcacaacgagcaatgatggaccaggtgcgagaaagcaggaatcctgggaat

SEQ ID NO: 61818 - DNA, 60 bp, Artificial
  Synthetic oligonucleotide
ccagaaatagcagcaagacccaaggtgagaggtcaagcagggaggatgaactattactgg

SEQ ID NO: 61819 - DNA, 60 bp, Artificial
  Synthetic oligonucleotide
agggagataacattccatggggccaaagaaatagcactcagttattctgctggtgcactt

SEQ ID NO: 61820 - DNA, 60 bp, Artificial
  Synthetic oligonucleotide
taggaagattaagagggagataacattccatggggccaaagaaatagcactcagttattc

SEQ ID NO: 61821 - DNA, 60 bp, Artificial
  Synthetic oligonucleotide
agggagataacattccatggggccaaagaaatagcactcagttattctactggtgcactt

SEQ ID NO: 61822 - DNA, 60 bp, Artificial
  Synthetic oligonucleotide
agagagataacattccatggggccaaagaaatagcactcagttattctgctggtgcactt

SEQ ID NO: 61823 - DNA, 60 bp, Artificial
  Synthetic oligonucleotide
tagaaagcttaagagggagataacattccatggggccaaagaaatagcactcagttattc

SEQ ID NO: 61824 - DNA, 60 bp, Artificial
  Synthetic oligonucleotide
ccatggggccaaagaaatagcactcagttattctgctggtgcacttgccagttgtattgg

SEQ ID NO: 61825 - DNA, 60 bp, Artificial
  Synthetic oligonucleotide
gagcatttgtgagaagcttgaacagtctgggcttccagttggaggtaatgaaaagaaggc

SEQ ID NO: 61826 - DNA, 60 bp, Artificial
  Synthetic oligonucleotide
aaaagcagagagtgaacaagagaagctatctaataagagcattaacattgaacacaatga

SEQ ID NO: 61827 - DNA, 60 bp, Artificial
  Synthetic oligonucleotide
cccgggatgcaaatcagagggttcgtgtactttgttgaaactctagctaggagcatttgt

SEQ ID NO: 61828 - DNA, 60 bp, Artificial
  Synthetic oligonucleotide
gatgaggactatcagggaagactttgtaatcccctgaatccatttgtcagccataaagag

SEQ ID NO: 61829 - DNA, 60 bp, Artificial
  Synthetic oligonucleotide
atatccggaatcttcacatccctgaagtctgcttaaagtgggagttaatggatgaggact

SEQ ID NO: 61830 - DNA, 60 bp, Artificial
  Synthetic oligonucleotide
cgagctaaagaagctgtgggagcaaacccgatcaaaggcaggactattggtttcagatgg

SEQ ID NO: 61831 - DNA, 60 bp, Artificial
  Synthetic oligonucleotide
gtccagccaagagcatggaatatgacgctgttgcaaccacacactcctggattcccaaga

SEQ ID NO: 61832 - DNA, 60 bp, Artificial
  Synthetic oligonucleotide
ccataaagagattgagtctgtaaacaatgctgtggtaatgccagctcatggtccagccaa

SEQ ID NO: 61833 - DNA, 60 bp, Artificial
  Synthetic oligonucleotide
gggaaaggatacatgttcgaaagtaagagaatgaagctccgaacacaaataccagcagaa

SEQ ID NO: 61834 - DNA, 60 bp, Artificial
  Synthetic oligonucleotide
gaatgttcctggcgatgattacatatatcacaaaaaatcaacctgaatggttcagaaaca

SEQ ID NO: 61835 - DNA, 60 bp, Artificial
  Synthetic oligonucleotide
ggccaaactggcaaatgttgtgagaaagatgatgactaattcacaagacacagagctttc

SEQ ID NO: 61836 - DNA, 60 bp, Artificial
  Synthetic oligonucleotide
ctgagcatcgcacccataatgttctcaaacaaaatggcgagactagggaaaggatacatg

SEQ ID NO: 61837 - DNA, 60 bp, Artificial
  Synthetic oligonucleotide
cgaggatgaacagatgtatcagaagtgctgcaacctgttcgagaaatttttccccagtag

SEQ ID NO: 61838 - DNA, 60 bp, Artificial
  Synthetic oligonucleotide
agagactggggcgccccaacttaacccgattgatggaccactacctgaggataatgagcc

SEQ ID NO: 61839 - DNA, 60 bp, Artificial
  Synthetic oligonucleotide
gtggacaacaaacacagagactggggcgccccaacttaacccgattgatggaccactacc

SEQ ID NO: 61840 - DNA, 60 bp, Artificial
  Synthetic oligonucleotide
tacaccatggacacagtcaacagaacacatcaatattcagaaaaagggaagtggacaaca

SEQ ID NO: 61841 - DNA, 60 bp, Artificial
  Synthetic oligonucleotide
caatccgactctacttttcttaaaagttccagcgcaaaatgccataagcaccacattccc

SEQ ID NO: 61842 - DNA, 60 bp, Artificial
  Synthetic oligonucleotide
aaacaacatactggtgggatgggctccaatcctctgatgattttgctctcatagtgaatg

SEQ ID NO: 61843 - DNA, 60 bp, Artificial
  Synthetic oligonucleotide
ccggccgcaactgcattagccaacactatagaagttttcagatcgaatggtctaacagct

SEQ ID NO: 61844 - DNA, 60 bp, Artificial
  Synthetic oligonucleotide
gactgacccaaggtcgtcagacctatgattggacattaaatagaaatcaaccggccgcaa

SEQ ID NO: 61845 - DNA, 60 bp, Artificial
  Synthetic oligonucleotide
gaactcgtgccttgaaacaatggaagtcgttcaacaaacaagggtggacagactgaccca

SEQ ID NO: 61846 - DNA, 60 bp, Artificial
  Synthetic oligonucleotide
cctggaagctatggctttccttgaggaatcccacccagggatctttgaaaactcgtgcct

SEQ ID NO: 61847 - DNA, 60 bp, Artificial
  Synthetic oligonucleotide
cccaagaggaaccgctctattctcaacacaagccaaaggggaattctcgaggatgaacag

SEQ ID NO: 61848 - DNA, 60 bp, Artificial
  Synthetic oligonucleotide
tcggtgccacagaggagacacacaaattcagacgaggagatcattcgagctaaagaagct

SEQ ID NO: 61849 - DNA, 60 bp, Artificial
  Synthetic oligonucleotide
ctacagatatacatatcggtgccacagaggagacacacaaattcagacgaggagatcatt

SEQ ID NO: 61850 - DNA, 60 bp, Artificial
  Synthetic oligonucleotide
cgctatggatttgtggccaattttagcatggagctgcccagttttggagtgtctgggatt

SEQ ID NO: 61851 - DNA, 60 bp, Artificial
  Synthetic oligonucleotide
atagtgaatgcaccaaatcatgagggaatacaagcaggagtggatagattctacagaacc

SEQ ID NO: 61852 - DNA, 60 bp, Artificial
  Synthetic oligonucleotide
tgtcacctctgactaagggtattttagggtttgtgttcacgctcaccgtgcccagtgagc

SEQ ID NO: 61853 - DNA, 60 bp, Artificial
  Synthetic oligonucleotide
ttttaggatttgtgttcacgctcaccgtgcccagtgagcgaggactgcagcgtatacgct

SEQ ID NO: 61854 - DNA, 60 bp, Artificial
  Synthetic oligonucleotide
cctgtcacctctgactaaggggattttaggatttgtgttcacgctcaccgtgcccagtga

SEQ ID NO: 61855 - DNA, 58 bp, Artificial
  Synthetic oligonucleotide
agtgtctgattaatgatccctgggttttgcttaatgcttcttggttcaactccttcct

SEQ ID NO: 61856 - DNA, 55 bp, Artificial
  Synthetic oligonucleotide
ccccaaaggagtggaagaaggttccattgggaaggtctgcaggactttattagcc

SEQ ID NO: 61857 - DNA, 60 bp, Artificial
  Synthetic oligonucleotide
actaaacagagaggaaatagatggggtaaagctggaatcaacaaggatttaccagatctt

SEQ ID NO: 61858 - DNA, 57 bp, Artificial
  Synthetic oligonucleotide
gttgatgatggttttctggatatttggacttacaatgccgaactgttggttctattg

SEQ ID NO: 61859 - DNA, 53 bp, Artificial
  Synthetic oligonucleotide
ttactattcacagcaagctcatggtcttacattgtggaaacatctaactcaga

SEQ ID NO: 61860 - DNA, 60 bp, Artificial
  Synthetic oligonucleotide
ccccaaggcaagttcatggcccaatcatgaaacgaacagaggtgtgacggcagcatgccc

SEQ ID NO: 61861 - DNA, 60 bp, Artificial
  Synthetic oligonucleotide
caatgaaaagaggttctggatctggtattatcatttcagatacaccagtccacgattgta

SEQ ID NO: 61862 - DNA, 60 bp, Artificial
  Synthetic oligonucleotide
aataaaagcaaccaaaatgaaggcaatactattagtcttgctatatacatttacagccgc

SEQ ID NO: 61863 - DNA, 60 bp, Artificial
  Synthetic oligonucleotide
accagatcttggcgatctattcaactgtcgccagttcattggtactgttagtctccctgg

SEQ ID NO: 61864 - DNA, 59 bp, Artificial
  Synthetic oligonucleotide
catccacctaccagtactgaccaacaaagtctctaccagaatgcagatgcttatgtttt

SEQ ID NO: 61865 - DNA, 60 bp, Artificial
  Synthetic oligonucleotide
gaaaactatgtaaactaaggggggtagccccattgcatttgggtaaatgtaacattgctg

SEQ ID NO: 61866 - DNA, 60 bp, Artificial
  Synthetic oligonucleotide
tgtagtggcaatgactgattggtcagggtacagcggaagtttcgttcaacatcctgagct

SEQ ID NO: 61867 - DNA, 60 bp, Artificial
  Synthetic oligonucleotide
gtagtggcaatgactgattggtcagggtacagcggaagtttcgttcaacatcctgagcta

SEQ ID NO: 61868 - DNA, 60 bp, Artificial
  Synthetic oligonucleotide
ttacagccgcaaatgcagacacattatgtataggttaccatgcaaataattcaactgaca

SEQ ID NO: 61869 - DNA, 60 bp, Artificial
  Synthetic oligonucleotide
cagccacaaatgcagacacactatgtataggttaccatgcaaataattcaactgacactg

SEQ ID NO: 61870 - DNA, 60 bp, Artificial
  Synthetic oligonucleotide
gaatgtaacagtaacacactctgttaaccttcttgaagacagacataacggaaaactatg

SEQ ID NO: 61871 - DNA, 60 bp, Artificial
  Synthetic oligonucleotide
taacacactctgttaaccttcttgaagacagacataacggaaaactatgtaaactagggg

SEQ ID NO: 61872 - DNA, 60 bp, Artificial
  Synthetic oligonucleotide
aatcaaaactaaacagagaggaaatagatggagtaaagttggagtcaacaaggatttacc

SEQ ID NO: 61873 - DNA, 60 bp, Artificial
  Synthetic oligonucleotide
ctcagaagaatcaaaactaaacagagaggaaatagatggggtaaagctggaatcaacaag

SEQ ID NO: 61874 - DNA, 60 bp, Artificial
  Synthetic oligonucleotide
cccatttcagaatatacatccagtcacaattggagaatgtccaaagtatgtcaaaagcac

SEQ ID NO: 61875 - DNA, 60 bp, Artificial
  Synthetic oligonucleotide
cctcccatttcagaatatacatccagtcacaattggagaatgtccaaagtatgtcaaaag

SEQ ID NO: 61876 - DNA, 60 bp, Artificial
  Synthetic oligonucleotide
aaaattgagaatggctacaggactaaggaatatcccgtctattcaatctagaggtctgtt

SEQ ID NO: 61877 - DNA, 60 bp, Artificial
  Synthetic oligonucleotide
ggcatccaccatccacctaccagtactgatcaacaaagtctctaccagaatgcagatgcc

SEQ ID NO: 61878 - DNA, 60 bp, Artificial
  Synthetic oligonucleotide
tatccaaagctcagcaaatcctatgttaacaataaggggaaggaagtccttgtgctatgg

SEQ ID NO: 61879 - DNA, 60 bp, Artificial
  Synthetic oligonucleotide
tgacggcagcatgcccttatgctggagcaaacagcttctacagaaatttaatatggctgg

SEQ ID NO: 61880 - DNA, 60 bp, Artificial
  Synthetic oligonucleotide
gcaactggaaatctagtggtaccaagatatgctttcgcaatgaatagaggtcctggatct

SEQ ID NO: 61881 - DNA, 60 bp, Artificial
  Synthetic oligonucleotide
gttctcacttggaatgcagaaccttttttctgacccaaggcgctctattaaatgacaagc

SEQ ID NO: 61882 - DNA, 60 bp, Artificial
  Synthetic oligonucleotide
caaaagcagggtgacaaagacataatggatccaaacactatgtcaagctttcaggtagac

SEQ ID NO: 61883 - DNA, 60 bp, Artificial
  Synthetic oligonucleotide
gattctgaaagaagaatccaatgaggcacttaagatgaccattgcatctgtaccagcgcc

SEQ ID NO: 61884 - DNA, 60 bp, Artificial
  Synthetic oligonucleotide
accggctccgccgggatcaaaagtccctaaaaggaagaagcagtacccttagtctcaaca

SEQ ID NO: 61885 - DNA, 60 bp, Artificial
  Synthetic oligonucleotide
ggctccgccgggatcaaaagtccctaaaaggaagaagcagtacccttagtctcaacatcg

SEQ ID NO: 61886 - DNA, 57 bp, Artificial
  Synthetic oligonucleotide
tcaggtagactgctttctttggcatatccgcaaacgatttgctgacaatggattggg

SEQ ID NO: 61887 - DNA, 60 bp, Artificial
  Synthetic oligonucleotide
gcagggtgacaaagacataatggatccaaacactatgtcaagctttcaggtagactgctt

SEQ ID NO: 61888 - DNA, 59 bp, Artificial
  Synthetic oligonucleotide
tccaatgaggcacttaagatgaccattgcatctgtaccagcgccacgctatttagctga

SEQ ID NO: 61889 - DNA, 60 bp, Artificial
  Synthetic oligonucleotide
gtctcaacatcgagacagccactcttattggaaagcagattgtggaatggattctgaaag

SEQ ID NO: 61890 - DNA, 60 bp, Artificial
  Synthetic oligonucleotide
gttcatgctcatgcctatgcaaaaggtgaaaggctctctttgtgtgcgaatggaccaagc

SEQ ID NO: 61891 - DNA, 60 bp, Artificial
  Synthetic oligonucleotide
gattggttcatgctcatgcctatgcaaaaggtgaaaggctctctttgtgtgcgaatggac

SEQ ID NO: 61892 - DNA, 60 bp, Artificial
  Synthetic oligonucleotide
agtctcaacatcgagacagccactcttattggaaagcagattgtggaatggattctgaaa

SEQ ID NO: 61893 - DNA, 50 bp, Artificial
  Synthetic oligonucleotide
cggagaaatttcaccattactttctcttccaggacatactcatgagaatg

SEQ ID NO: 61894 - DNA, 52 bp, Artificial
  Synthetic oligonucleotide
cggagaaatttcaccattactttctcttccaggacatactcatgagaatgtc

SEQ ID NO: 61895 - DNA, 60 bp, Artificial
  Synthetic oligonucleotide
gcgaatggaccaagcaattatggaaaagaacatcatattgaaagcgaacttcagtgtggt

SEQ ID NO: 61896 - DNA, 53 bp, Artificial
  Synthetic oligonucleotide
tcagtgtggtttttaaccgattggagaatttgacactactaagggccttcacc

SEQ ID NO: 61897 - DNA, 60 bp, Artificial
  Synthetic oligonucleotide
cagttgggtcagaaatttgaggagataagatggctgattgaagaagtgcggcataagttg

SEQ ID NO: 61898 - DNA, 60 bp, Artificial
  Synthetic oligonucleotide
gcataagttgaagatgacagaaagtagctttgaacaaataacttttatgcaagccttaca

SEQ ID NO: 61899 - DNA, 60 bp, Artificial
  Synthetic oligonucleotide
ctacagagattcgcttggagaagctgtaatgagaatgggagacctccattaccttcagaa

SEQ ID NO: 61900 - DNA, 60 bp, Artificial
  Synthetic oligonucleotide
cagagattcgcttggagaagctgtaatgagaatgggagacctccattaccttcagaacag

SEQ ID NO: 61901 - DNA, 60 bp, Artificial
  Synthetic oligonucleotide
cacaaatgggagaagtactgtgttcttgagataggagatatgcttctaagaagtgcaata

SEQ ID NO: 61902 - DNA, 60 bp, Artificial
  Synthetic oligonucleotide
tcctgtcacctctgactaaggggattttaggttttgtgttcacgctcaccgtgcccagtg

SEQ ID NO: 61903 - DNA, 60 bp, Artificial
  Synthetic oligonucleotide
agcaaaagcagggtagataatcactcactgagtgacattcccatcatggcgtctcaaggc

SEQ ID NO: 61904 - DNA, 54 bp, Artificial
  Synthetic oligonucleotide
cactcactgagtgacattcccatcatggcgtctcaaggcaccaaacgatcttat

SEQ ID NO: 61905 - DNA, 54 bp, Artificial
  Synthetic oligonucleotide
gtctcaaggcaccaaacgatcttatgagcagatggaaaccggtggagaacgcca

SEQ ID NO: 61906 - DNA, 60 bp, Artificial
  Synthetic oligonucleotide
tacatacagatgtgcactgaactccaactcagtgattatgaagggaggctgatccagaac

SEQ ID NO: 61907 - DNA, 60 bp, Artificial
  Synthetic oligonucleotide
gatgtgcactgaactccaactcagtgattatgaagggaggctgatccagaacagcataac

SEQ ID NO: 61908 - DNA, 56 bp, Artificial
  Synthetic oligonucleotide
acaaatacctggaagaacatcccagtgcggggaaggatccaaagaaaactggaggt

SEQ ID NO: 61909 - DNA, 60 bp, Artificial
  Synthetic oligonucleotide
agacggaaagtggatgagagagctgattctgtatgacaaagacgagattaggagaatttg

SEQ ID NO: 61910 - DNA, 60 bp, Artificial
  Synthetic oligonucleotide
gtggatgagagagctgattctgtatgacaaagacgagattaggagaatttggcgccaagc

SEQ ID NO: 61911 - DNA, 60 bp, Artificial
  Synthetic oligonucleotide
ggagaatttggcgccaagcaaacaatggtgaagatgctactgctggtctcactcacctaa

SEQ ID NO: 61912 - DNA, 60 bp, Artificial
  Synthetic oligonucleotide
ggcgccaagcaaacaatggtgaagatgctactgctggtctcactcacctaatgatttggc

SEQ ID NO: 61913 - DNA, 60 bp, Artificial
  Synthetic oligonucleotide
agatcttatctttctagcacgatctgcactcattctgagaggatcagtggctcataaatc

SEQ ID NO: 61914 - DNA, 60 bp, Artificial
  Synthetic oligonucleotide
agcacgatctgcactcattctgagaggatcagtggctcataaatcctgcctgcctgcttg

SEQ ID NO: 61915 - DNA, 60 bp, Artificial
  Synthetic oligonucleotide
acaaaagtgatcccaagaggacaactttccaccagaggagttcaaattgcctcaaatgaa

SEQ ID NO: 61916 - DNA, 60 bp, Artificial
  Synthetic oligonucleotide
cccaagaggacaactttccaccagaggagttcaaattgcctcaaatgaaaacatggaaac

SEQ ID NO: 61917 - DNA, 60 bp, Artificial
  Synthetic oligonucleotide
agaccaaatgagaatccagcacataagagtcaactgatatggatggcatgccattctgca

SEQ ID NO: 61918 - DNA, 60 bp, Artificial
  Synthetic oligonucleotide
ccagcacataagagtcaactgatatggatggcatgccattctgcagcatatgaagacctg

SEQ ID NO: 61919 - DNA, 60 bp, Artificial
  Synthetic oligonucleotide
gggcatctgcagggcaaattagtgtacaacctactttctcagtacagagaaatcttcctt

SEQ ID NO: 61920 - DNA, 60 bp, Artificial
  Synthetic oligonucleotide
gaaaatgccaggccagaagatgtgtccttccaagggcggggggtcttcgagctctcggac

SEQ ID NO: 61921 - DNA, 51 bp, Artificial
  Synthetic oligonucleotide
gggcatctgcagggcaaattagtgtacaacctactttctcagtacagagaa

SEQ ID NO: 61922 - DNA, 60 bp, Artificial
  Synthetic oligonucleotide
ctgggctataagaaccaggagcggaggaaacaccaatcaacagagggcatctgcagggca

SEQ ID NO: 61923 - DNA, 50 bp, Artificial
  Synthetic oligonucleotide
ctcataaatcctgcctgcctgcttgtgtatatggacttgtggtggcaagt

SEQ ID NO: 61924 - DNA, 52 bp, Artificial
  Synthetic oligonucleotide
gaaggatactctctagtcggaatagatcctttccgtctgcttcagaacagcc

SEQ ID NO: 61925 - DNA, 60 bp, Artificial
  Synthetic oligonucleotide
ggtgcgagagagcagaaaccctgggaatgctgagattgaagatcttatctttctagcacg

SEQ ID NO: 61926 - DNA, 60 bp, Artificial
  Synthetic oligonucleotide
atgatggaccaggtgcgagagagcagaaaccctgggaatgctgagattgaagatcttatc

SEQ ID NO: 61927 - DNA, 60 bp, Artificial
  Synthetic oligonucleotide
tggcattctaacctgaatgatgccacatatcagagaacaagagctctagtgcgtactggg

SEQ ID NO: 61928 - DNA, 60 bp, Artificial
  Synthetic oligonucleotide
actcacctaatgatttggcattctaacctgaatgatgccacatatcagagaacaagagct

SEQ ID NO: 61929 - DNA, 60 bp, Artificial
  Synthetic oligonucleotide
ctctcccgaggagatctggagccgctggggcagcagtaaagggaattgggacgatggtaa

SEQ ID NO: 61930 - DNA, 60 bp, Artificial
  Synthetic oligonucleotide
tgatgcaaggatcaactctcccgaggagatctggagccgctggggcagcagtaaagggaa

SEQ ID NO: 61931 - DNA, 60 bp, Artificial
  Synthetic oligonucleotide
ggaattgggacgatggtaatggagctgattcggatgataaagcgagggatcaatgatcgg

SEQ ID NO: 61932 - DNA, 60 bp, Artificial
  Synthetic oligonucleotide
gtaaagggaattgggacgatggtaatggagctgattcggatgataaagcgagggatcaat

SEQ ID NO: 61933 - DNA, 60 bp, Artificial
  Synthetic oligonucleotide
cttaaaggaaaatttcagacagcagcgcaaagagcaatgatggaccaggtgcgagagagc

SEQ ID NO: 61934 - DNA, 60 bp, Artificial
  Synthetic oligonucleotide
gaatgtgcaacatccttaaaggaaaatttcagacagcagcgcaaagagcaatgatggacc

SEQ ID NO: 61935 - DNA, 60 bp, Artificial
  Synthetic oligonucleotide
ttttttctgacccaaggtgctttgctaaatgacaggcattctaatggaaccgtcaaggac

SEQ ID NO: 61936 - DNA, 60 bp, Artificial
  Synthetic oligonucleotide
atttagatatggcaatggtgtttggataggaagaactaaaagtatcagctctagaagtgg

SEQ ID NO: 61937 - DNA, 58 bp, Artificial
  Synthetic oligonucleotide
cttaatgagctgcccgatcggtgaagctccatctccgtacaattcaaggttcgaatca

SEQ ID NO: 61938 - DNA, 60 bp, Artificial
  Synthetic oligonucleotide
cgtcaaggacaggagcccttaccgaaccttaatgagctgcccgatcggtgaagctccatc

SEQ ID NO: 61939 - DNA, 60 bp, Artificial
  Synthetic oligonucleotide
gggaaaggcaattgtggcccagtactttctaatggagcaaatggagtgaaaggattctca

SEQ ID NO: 61940 - DNA, 60 bp, Artificial
  Synthetic oligonucleotide
agtgaaaggattctcatttagatatggcaatggtgtttggataggaagaactaaaagtat

SEQ ID NO: 61941 - DNA, 60 bp, Artificial
  Synthetic oligonucleotide
cagaatcttgattatcaaatagggtacatatgcagtggggttttcggtgataacccgcgt

SEQ ID NO: 61942 - DNA, 60 bp, Artificial
  Synthetic oligonucleotide
gacccaaggtgctttgctaaatgacaggcattctaatggaaccgtcaaggacaggagccc

SEQ ID NO: 61943 - DNA, 60 bp, Artificial
  Synthetic oligonucleotide
gctctcacttggagtgcagaaccttttttctgacccaaggcgctttgctgaatgacaggc

SEQ ID NO: 61944 - DNA, 60 bp, Artificial
  Synthetic oligonucleotide
aggatacagtggaagttttgtccaacatcctgaattaacaggaatgaactgcataaggcc

SEQ ID NO: 61945 - DNA, 60 bp, Artificial
  Synthetic oligonucleotide
cagctctagaagtggatttgagatgatttgggatccaaatggatggacggaaactgatag

SEQ ID NO: 61946 - DNA, 60 bp, Artificial
  Synthetic oligonucleotide
aatgatgggaaaggcaattgtggcccagtactttctaatggagcaaatggagtgaaagga

SEQ ID NO: 61947 - DNA, 60 bp, Artificial
  Synthetic oligonucleotide
tatgcagtggggttttcggtgataacccgcgttctaatgatgggaaaggcaattgtggcc

SEQ ID NO: 61948 - DNA, 60 bp, Artificial
  Synthetic oligonucleotide
atcagatagggtacatatgcagtggggttttcggtgataacccgcgttctaatgatggga

SEQ ID NO: 61949 - DNA, 60 bp, Artificial
  Synthetic oligonucleotide
taacaggaatgaactgcataaggccttgtttctgggtagagttaatcagaggacaaccca

SEQ ID NO: 61950 - DNA, 60 bp, Artificial
  Synthetic oligonucleotide
gaactgcataaggccttgtttctgggtagagttaatcagaggacaacccaaggagagcac

SEQ ID NO: 61951 - DNA, 51 bp, Artificial
  Synthetic oligonucleotide
agctgcccgatcggtgaagctccatctccgtacaattcaaggttcgaatca

SEQ ID NO: 61952 - DNA, 60 bp, Artificial
  Synthetic oligonucleotide
caaatagggtacatatgcagtggggttttcggtgataacccgcgttctaatgatgggaaa

SEQ ID NO: 61953 - DNA, 60 bp, Artificial
  Synthetic oligonucleotide
aatcgtctgatgattttgctctgattgtgaacgcacccaatcatgaagggattcaagcag

SEQ ID NO: 61954 - DNA, 60 bp, Artificial
  Synthetic oligonucleotide
ctcagcccgaatggttcagaaatgttctaagtattgctccaataatgttctcaaacaaaa

SEQ ID NO: 61955 - DNA, 60 bp, Artificial
  Synthetic oligonucleotide
caatccgactttgcttttcctgaaagtgccagcacaaaatgctataagcacaacgtttcc

SEQ ID NO: 61956 - DNA, 56 bp, Artificial
  Synthetic oligonucleotide
ttttctatcgttatgggtttgttgccaatttcagcatggagcttcctagttttggg

SEQ ID NO: 61957 - DNA, 60 bp, Artificial
  Synthetic oligonucleotide
ggaaagaacaccgatcttgaggctctcatggaatggctaaagacaagaccaatcctgtca

SEQ ID NO: 61958 - DNA, 60 bp, Artificial
  Synthetic oligonucleotide
agcgctcagttattctgctggtgcacttgccagttgcatgggcctcatatacaacagaat

SEQ ID NO: 61959 - DNA, 55 bp, Artificial
  Synthetic oligonucleotide
ttccatgactcaaatgtgaagaatctgtatgagaaagtaaaaagccaattaaaga

SEQ ID NO: 61960 - DNA, 60 bp, Artificial
  Synthetic oligonucleotide
ggcaacagctatactcagaaaagcaaccaggagattgattcaactaatagtgagtggaag

SEQ ID NO: 61961 - DNA, 60 bp, Artificial
  Synthetic oligonucleotide
tctccctgggggcaatcggtttctggatgtgctccaatgggtctttgcagtgcagaatat

SEQ ID NO: 61962 - DNA, 60 bp, Artificial
  Synthetic oligonucleotide
ggatggtcttcaatcgtctgatgattttgctctgattgtgaatgcacccaatcatgcggg

SEQ ID NO: 61963 - DNA, 60 bp, Artificial
  Synthetic oligonucleotide
gccgagatcagaagtccctaaagggaagaggcagcactctcggtctgaacatcgaagcgg

SEQ ID NO: 61964 - DNA, 60 bp, Artificial
  Synthetic oligonucleotide
cgagatcagaagtccctaaagggaagaggcagcactctcggtctgaacatcgaagcggcc

SEQ ID NO: 61965 - DNA, 60 bp, Artificial
  Synthetic oligonucleotide
tcaaaaatgcaattggggtcctcatcgggggacttgaatggaatgataacacagttcgag

SEQ ID NO: 61966 - DNA, 60 bp, Artificial
  Synthetic oligonucleotide
ggaagatcccacttaaggaatgacaccgatgtggtaaactttgtgagcatggagttttcc

SEQ ID NO: 61967 - DNA, 60 bp, Artificial
  Synthetic oligonucleotide
gaacatagtgagaagagctgcagtatcagcagatccactagcatctttattagaaatgtg

SEQ ID NO: 61968 - DNA, 60 bp, Artificial
  Synthetic oligonucleotide
ggaacatagtgagaagagctgcagtatcagcagatccactagcatctttattagaaatgt

SEQ ID NO: 61969 - DNA, 60 bp, Artificial
  Synthetic oligonucleotide
aggaacatagtgagaagagctgcagtatcagcagatccactagcatctttattagaaatg

SEQ ID NO: 61970 - DNA, 60 bp, Artificial
  Synthetic oligonucleotide
tctctcactgacccaagacttgaaccacacaaatgggagaagtactgtgttcttgagata

SEQ ID NO: 61971 - DNA, 60 bp, Artificial
  Synthetic oligonucleotide
tctctcactgatccaagacttgaaccacacaaatgggagaagtactgtgttcttgagata

SEQ ID NO: 61972 - DNA, 60 bp, Artificial
  Synthetic oligonucleotide
cactgacccaagacttgaaccacacaaatgggagaagtactgtgttcttgagataggaga

SEQ ID NO: 61973 - DNA, 60 bp, Artificial
  Synthetic oligonucleotide
cactgatccaagacttgaaccacacaaatgggagaagtactgtgttcttgagataggaga

SEQ ID NO: 61974 - DNA, 60 bp, Artificial
  Synthetic oligonucleotide
acccaagacttgaaccacacaaatgggagaagtactgtgttcttgagataggagatatgc

SEQ ID NO: 61975 - DNA, 60 bp, Artificial
  Synthetic oligonucleotide
aactcagtgattatgaagggcgattgatccagaacagcttaacaatagagagaatggtgc

SEQ ID NO: 61976 - DNA, 60 bp, Artificial
  Synthetic oligonucleotide
caatgattatgagggacggctgatccagaacagcttaacaatagagagaatggttctctc

SEQ ID NO: 61977 - DNA, 59 bp, Artificial
  Synthetic oligonucleotide
agtgcctgattaatgatccctgggttttgcttaacgcttcttggttcaactccttcctc

SEQ ID NO: 61978 - DNA, 60 bp, Artificial
  Synthetic oligonucleotide
cattttcaagctggatccagaatgagttcaacaaggcatgcgagctgaccgattcaatct

SEQ ID NO: 61979 - DNA, 60 bp, Artificial
  Synthetic oligonucleotide
actttcaagttggatccagaatgagttcaacaaggcatgcgagctgaccgattcaatctg

SEQ ID NO: 61980 - DNA, 60 bp, Artificial
  Synthetic oligonucleotide
gttggatccagaatgagttcaacaaggcatgcgagctgaccgattcaatctggatagagc

SEQ ID NO: 61981 - DNA, 60 bp, Artificial
  Synthetic oligonucleotide
acaatctggactagtgggagcagcatttctttttgtggcgtgaatagtgatactgcaaat

SEQ ID NO: 61982 - DNA, 60 bp, Artificial
  Synthetic oligonucleotide
actgttggtctccctgggggcaatcagtttctggatgtgctccaatgggtctttacagtg

SEQ ID NO: 61983 - DNA, 60 bp, Artificial
  Synthetic oligonucleotide
cgtgggatcaatgaccgaaacttctggaggggtgagaatggaaggaaaacaaggattgct

SEQ ID NO: 61984 - DNA, 60 bp, Artificial
  Synthetic oligonucleotide
cattgccggtttcattgaagggggatggactggaatgatagatggatggtatggttatca

SEQ ID NO: 61985 - DNA, 60 bp, Artificial
  Synthetic oligonucleotide
aaaagcacacaaaatgccattaacgggattacaaacaaggtgaactctgttatcgagaaa

SEQ ID NO: 61986 - DNA, 60 bp, Artificial
  Synthetic oligonucleotide
ttgggaaaagggcaacagctatactcagaaaagcaaccagaagattgattcaactgatag

SEQ ID NO: 61987 - DNA, 60 bp, Artificial
  Synthetic oligonucleotide
caatggtggggaaaagggcaacagctatactcagaaaagcaaccaggagattggttcagc

SEQ ID NO: 61988 - DNA, 60 bp, Artificial
  Synthetic oligonucleotide
aaagcagtttttacagaaatttgctatggctgacggagaagaatggctcgtacccaaatc

SEQ ID NO: 61989 - DNA, 60 bp, Artificial
  Synthetic oligonucleotide
cccaagacttgagccacacaaatgggagaagtactgtgttcttgagataggagatatgct

SEQ ID NO: 61990 - DNA, 60 bp, Artificial
  Synthetic oligonucleotide
tcttactgacccaagacttgagccacacaaatgggagaagtactgtgttcttgagatagg

SEQ ID NO: 61991 - DNA, 60 bp, Artificial
  Synthetic oligonucleotide
acgatctggactagtgggagcagcatttctttttgtggcgtgaatagtgatactgtaaat

SEQ ID NO: 61992 - DNA, 60 bp, Artificial
  Synthetic oligonucleotide
caagagtggacaaactgacacaaggcagacagacctatgactggactctaaatagaaacc

SEQ ID NO: 61993 - DNA, 60 bp, Artificial
  Synthetic oligonucleotide
aaacaagagtggacaaactgacacaaggcagacagacctatgactggactctaaatagaa

SEQ ID NO: 61994 - DNA, 60 bp, Artificial
  Synthetic oligonucleotide
aactaacacaaggcagacagacctatgactggactctaaatagaaaccagcctgctgcca

SEQ ID NO: 61995 - DNA, 60 bp, Artificial
  Synthetic oligonucleotide
tgacacaaggcagacagacctatgactggactctaaatagaaaccagcctgctgctacag

SEQ ID NO: 61996 - DNA, 60 bp, Artificial
  Synthetic oligonucleotide
gggtggacaaactgacacaaggcagacagacctatgactggactctaaatagaaaccagc

SEQ ID NO: 61997 - DNA, 60 bp, Artificial
  Synthetic oligonucleotide
gacaaactgacacaaggcagacagacctatgactggactctaaatagaaaccagcctgct

SEQ ID NO: 61998 - DNA, 60 bp, Artificial
  Synthetic oligonucleotide
caaactaacacaaggcagacagacctatgactggactctaaatagaaaccagcctgctgc

SEQ ID NO: 61999 - DNA, 60 bp, Artificial
  Synthetic oligonucleotide
tgacacaaggcagacagacctatgactggactctaaatagaaaccagcctgctgccacag

SEQ ID NO: 62000 - DNA, 60 bp, Artificial
  Synthetic oligonucleotide
aagagtggacaaactgacacaaggcagacagacctatgactggactctaaatagaaacca

SEQ ID NO: 62001 - DNA, 60 bp, Artificial
  Synthetic oligonucleotide
caaactgacacaaggcagacagacctatgactggactctaaatagaaaccagcctgctgc

SEQ ID NO: 62002 - DNA, 60 bp, Artificial
  Synthetic oligonucleotide
caaactgacacaaggcagacagacctatgactggactctaaatagaaaccagcctgcagc

SEQ ID NO: 62003 - DNA, 60 bp, Artificial
  Synthetic oligonucleotide
tctggaacctgggacctttgatcttgaggggctatatgaagcaattgaggagtgcctgat

SEQ ID NO: 62004 - DNA, 60 bp, Artificial
  Synthetic oligonucleotide
ctggaacctgggacctttgatcttgaggggctatatgaagcaattgaggagtgcctgatt

SEQ ID NO: 62005 - DNA, 60 bp, Artificial
  Synthetic oligonucleotide
tgggcacttggtgaaaatatggccccagaaaaggtggaatttgatgattgcaaagatgtg

SEQ ID NO: 62006 - DNA, 60 bp, Artificial
  Synthetic oligonucleotide
agcatggaagcaagtgctggcagaaatacaggactttgaggatgagaaaaaaattccgag

SEQ ID NO: 62007 - DNA, 60 bp, Artificial
  Synthetic oligonucleotide
ggagaaggccaataagataaagtctgaagagacgcacatccatattttctcatttacagg

SEQ ID NO: 62008 - DNA, 60 bp, Artificial
  Synthetic oligonucleotide
gcatcctgtgcagcaatggatgattttcaattgatcccaatgataagcaaatgtagaact

SEQ ID NO: 62009 - DNA, 60 bp, Artificial
  Synthetic oligonucleotide
agaagtactgcatccttgagataggagatatggttctaagaactgccataggtcaggtgg

SEQ ID NO: 62010 - DNA, 60 bp, Artificial
  Synthetic oligonucleotide
ggtcaggtggcaaggcccatgtttctatacgtgaggacaaacgggacctcaaaaattaaa

SEQ ID NO: 62011 - DNA, 60 bp, Artificial
  Synthetic oligonucleotide
ggaatttgatgattgcaaagatgtgagtgatctgaagcaatatgatagtgatgaaccaga

SEQ ID NO: 62012 - DNA, 60 bp, Artificial
  Synthetic oligonucleotide
cgttgcctcctccagtccctccagcagatcgagagtatgattgaagcagagtcttctatc

SEQ ID NO: 62013 - DNA, 60 bp, Artificial
  Synthetic oligonucleotide
caggagaagaaatggcaacaaaagccgactacacactagatgaagaaagtagagccagaa

SEQ ID NO: 62014 - DNA, 53 bp, Artificial
  Synthetic oligonucleotide
cattgagggcaagctttcccaaatgtctagagaagtaaatgctagaatcgagc

SEQ ID NO: 62015 - DNA, 60 bp, Artificial
  Synthetic oligonucleotide
caaacttctcaagtttcgacaactttagagcctatgtagatggattcgagccgaatggct

SEQ ID NO: 62016 - DNA, 60 bp, Artificial
  Synthetic oligonucleotide
ggctgccaagtgggcctccctgttttcaaaggtccaaatttcttttgatggatgctctga

SEQ ID NO: 62017 - DNA, 60 bp, Artificial
  Synthetic oligonucleotide
caaagatgtgagtgatctgaagcaatatgatagtgatgaaccagaacttagagcgcttgc

SEQ ID NO: 62018 - DNA, 60 bp, Artificial
  Synthetic oligonucleotide
ccgctttatgatgcggtcagatgcatgaagacgttctttgggtggaaggaacctaccatc

SEQ ID NO: 62019 - DNA, 57 bp, Artificial
  Synthetic oligonucleotide
caagagatggctagcagaggtctttgggattcctttcgtcagtccgaaagaggcgaa

SEQ ID NO: 62020 - DNA, 60 bp, Artificial
  Synthetic oligonucleotide
tattttctcatttacaggagaagaaatggcaacaaaagccgactacacactagatgaaga

SEQ ID NO: 62021 - DNA, 60 bp, Artificial
  Synthetic oligonucleotide
tactacctggagaaggccaataagataaagtctgaagagacgcacatccatattttctca

SEQ ID NO: 62022 - DNA, 60 bp, Artificial
  Synthetic oligonucleotide
aagaagatagattcattgagattggtgtgacaagaagagaagtccatatatactacctgg

SEQ ID NO: 62023 - DNA, 60 bp, Artificial
  Synthetic oligonucleotide
ccacgaccacttaggctgccaagtgggcctccctgttttcaaaggtccaaatttcttttg

SEQ ID NO: 62024 - DNA, 60 bp, Artificial
  Synthetic oligonucleotide
cactacaggggttgggaaaccaaggtatctcccagatctgtatgactacaaagaagatag

SEQ ID NO: 62025 - DNA, 60 bp, Artificial
  Synthetic oligonucleotide
acaagtccactaaaatgggcacttggtgaaaatatggccccagaaaaggtggaatttgat

SEQ ID NO: 62026 - DNA, 60 bp, Artificial
  Synthetic oligonucleotide
acgaaaaagggactctagcatacttactgacagccagacagcgaccaaaagaattcggat

SEQ ID NO: 62027 - DNA, 60 bp, Artificial
  Synthetic oligonucleotide
gaacattccatccattcaatccagaggtttgtttggagccattgccggtttcattgaagg

SEQ ID NO: 62028 - DNA, 60 bp, Artificial
  Synthetic oligonucleotide
acattccatccattcaatccagaggtttgtttggagccattgccggtttcattgaagggg

SEQ ID NO: 62029 - DNA, 60 bp, Artificial
  Synthetic oligonucleotide
gcagtggagtgttcggtgacaatccgcgtcccaaagatgggaagggcagctgtaatccag

SEQ ID NO: 62030 - DNA, 60 bp, Artificial
  Synthetic oligonucleotide
gaacctgaattaaggtcattttcaagttggatccagaatgagttcaacaaggcatgcgag

SEQ ID NO: 62031 - DNA, 60 bp, Artificial
  Synthetic oligonucleotide
cttactgacagccagacagcgaccaaaagaattcgaatggccatcaattagtgtcgaata

SEQ ID NO: 62032 - DNA, 60 bp, Artificial
  Synthetic oligonucleotide
gtgcacgaagggtacgaagaatttacaatggttgggaaaagggcaacagctatactcaga

SEQ ID NO: 62033 - DNA, 60 bp, Artificial
  Synthetic oligonucleotide
tcgataactttagagcctacgtggatggattcgagccgaatggctacattgagggcaagc

SEQ ID NO: 62034 - DNA, 60 bp, Artificial
  Synthetic oligonucleotide
gattcattgagattggtgtgacaagaagagaagtccatatatactacctggagaaggcca

SEQ ID NO: 62035 - DNA, 60 bp, Artificial
  Synthetic oligonucleotide
ggcaacaaaggccgactacacactagatgaagaaagtagagctagaataaagaccaggct

SEQ ID NO: 62036 - DNA, 60 bp, Artificial
  Synthetic oligonucleotide
agtacggggagaacccaaagatcgaaacaaacaaatttgcagcgatatgcacacacatgg

SEQ ID NO: 62037 - DNA, 60 bp, Artificial
  Synthetic oligonucleotide
cctcactgatccaagacttgaactgcataaatgggagaagtactgcatccttgagatagg

SEQ ID NO: 62038 - DNA, 60 bp, Artificial
  Synthetic oligonucleotide
caaagcatgtgaactgactgattcgagctggttagagcttgatgagattggagaggatgt

SEQ ID NO: 62039 - DNA, 60 bp, Artificial
  Synthetic oligonucleotide
aaggagaaggaataccgctttatgatgcggtcagatgcatgaaaacgttctttgggtgga

SEQ ID NO: 62040 - DNA, 60 bp, Artificial
  Synthetic oligonucleotide
cttggcccattggagagtcccccaaaggggtggaagaaggttccattggaaaggtctgtc

SEQ ID NO: 62041 - DNA, 60 bp, Artificial
  Synthetic oligonucleotide
ctggaaggataaagaaagaggagttcactgagatcatgaagatctgttccaccattgaag

SEQ ID NO: 62042 - DNA, 60 bp, Artificial
  Synthetic oligonucleotide
gaaggataaagaaagaagagttcactgagatcatgaagatctgttccaccattgaagagc

SEQ ID NO: 62043 - DNA, 60 bp, Artificial
  Synthetic oligonucleotide
gctgactcccagcataagtctcataggcaaatggtgacaacaaccaatccactaataaga

SEQ ID NO: 62044 - DNA, 60 bp, Artificial
  Synthetic oligonucleotide
ctgactcccagcataagtctcataggcaaatggtgacaacaaccaatccactaataagac

SEQ ID NO: 62045 - DNA, 60 bp, Artificial
  Synthetic oligonucleotide
gaaaatttacaggcctatcagaagcgaatgggggtgcagatgcaacgattcaagtgatcc

SEQ ID NO: 62046 - DNA, 60 bp, Artificial
  Synthetic oligonucleotide
ccgacatgactccaagcaccgaaatgtcaatgagaggagtgagagtcagcaaaatgggtg

SEQ ID NO: 62047 - DNA, 55 bp, Artificial
  Synthetic oligonucleotide
gtgatctgaagcaatatgatagtgatgaaccagaatttagatcgcttgcaagttg

SEQ ID NO: 62048 - DNA, 60 bp, Artificial
  Synthetic oligonucleotide
aatttgcaggcctatcagaaacgaatgggggtgcagatgcaacgattcaagtgatccgat

SEQ ID NO: 62049 - DNA, 54 bp, Artificial
  Synthetic oligonucleotide
aatttgcaggcctatcagaaacgaatgggggtgcagatgcaacgattcaagtga

SEQ ID NO: 62050 - DNA, 60 bp, Artificial
  Synthetic oligonucleotide
ataacgtttatgcaagccttacagctattgcttgaagtggaacaagagataagaactttc

SEQ ID NO: 62051 - DNA, 59 bp, Artificial
  Synthetic oligonucleotide
ggggtgcagatgcaacgattcaagtgatcctcttgttgttgccgcaaatataattggga

SEQ ID NO: 62052 - DNA, 60 bp, Artificial
  Synthetic oligonucleotide
gcccgacatgactccaagcatcgagatgtcaatgagaggagtgagagtcagcaaaatggg

SEQ ID NO: 62053 - DNA, 60 bp, Artificial
  Synthetic oligonucleotide
gagtaacggcagcatgctcccatgcgggaaaaagcagtttttacagaaatttgctatggc

SEQ ID NO: 62054 - DNA, 60 bp, Artificial
  Synthetic oligonucleotide
ccacacaaatgggagaagtactgtgttcttgagataggagatatgcttctaagaagtgcc

SEQ ID NO: 62055 - DNA, 60 bp, Artificial
  Synthetic oligonucleotide
cacaaatgggagaagtactgtgttcttgagataggagatatgcttctaagaagtgccata

SEQ ID NO: 62056 - DNA, 59 bp, Artificial
  Synthetic oligonucleotide
atgaaggatcttatttcttcggagacaatgcagaggagtacgacaattaagaaaaaaat

SEQ ID NO: 62057 - DNA, 60 bp, Artificial
  Synthetic oligonucleotide
caaatactgggctataagaaccaggagcggaggaaacaccaatcaacagagggcatctgc

SEQ ID NO: 62058 - DNA, 60 bp, Artificial
  Synthetic oligonucleotide
ccatggggccaaagaaatagcgctcagttattctgctggtgcacttgccagttgtatggg

SEQ ID NO: 62059 - DNA, 60 bp, Artificial
  Synthetic oligonucleotide
acgaaaacgggactctagcatacttactgacagccagacagcgaccaaaagaattcgaat

SEQ ID NO: 62060 - DNA, 60 bp, Artificial
  Synthetic oligonucleotide
ctgttgacacagtacttgagaagaatgtgacagtgacacactctgtcaacctacttgagg

SEQ ID NO: 62061 - DNA, 53 bp, Artificial
  Synthetic oligonucleotide
gaatgtgacagtgacacactctgtcaacctacttgaggacagtcacaatggaa

SEQ ID NO: 62062 - DNA, 60 bp, Artificial
  Synthetic oligonucleotide
gttcgagtctctgaaactctacagagattcgcttggagaagcagtaatgagaatgggaga

SEQ ID NO: 62063 - DNA, 60 bp, Artificial
  Synthetic oligonucleotide
ggaatgataacacagttcgagtctctaaaactctacagagattcgcttggagaagcagta

SEQ ID NO: 62064 - DNA, 60 bp, Artificial
  Synthetic oligonucleotide
ataacacagttcgagtctctaaaactctacagagattcgcttggagaagcagtaatgaga

SEQ ID NO: 62065 - DNA, 60 bp, Artificial
  Synthetic oligonucleotide
agggatttgagatgatttgggatcctaatggatggacagataccgatagtagtttcttag

SEQ ID NO: 62066 - DNA, 60 bp, Artificial
  Synthetic oligonucleotide
cccagttttggggtgtctgggatcaacgagtctgcagacatgagtattggagtcactgtc

SEQ ID NO: 62067 - DNA, 60 bp, Artificial
  Synthetic oligonucleotide
tggtttcatcataaaaggaagatctcacttaaggaatgacaccgacgtggtaaactttgt

SEQ ID NO: 62068 - DNA, 60 bp, Artificial
  Synthetic oligonucleotide
acaatggttgggaaaagggcaacagctatactcagaaaagcaaccaggagattggttcaa

SEQ ID NO: 62069 - DNA, 60 bp, Artificial
  Synthetic oligonucleotide
caatccgactttacttttcttaaaagtgccagcacaaaatgctataagcacaactttccc

SEQ ID NO: 62070 - DNA, 51 bp, Artificial
  Synthetic oligonucleotide
ctgattggtcagggtacagcggaagtttcgttcaacatcctgagttaacag

SEQ ID NO: 62071 - DNA, 55 bp, Artificial
  Synthetic oligonucleotide
aaaagtcgaaaggttaaaacatggaacctttggccctgtccattttagaaaccaa

SEQ ID NO: 62072 - DNA, 60 bp, Artificial
  Synthetic oligonucleotide
gtcgaaaggttaaaacatggaacctttggccctgtccattttagaaaccaagtcaaaata

SEQ ID NO: 62073 - DNA, 60 bp, Artificial
  Synthetic oligonucleotide
actgttgacacagtactcgaaaagaacgtgacagtgacacactctgtcaacctacttgag

SEQ ID NO: 62074 - DNA, 60 bp, Artificial
  Synthetic oligonucleotide
cgacactgttgacacagtacttgagaagaacgtgacagtgacacactctgtcaacctact

SEQ ID NO: 62075 - DNA, 52 bp, Artificial
  Synthetic oligonucleotide
gaatgtgacagtgacacactctgtcaacctactcgaagacagccacaacggg

SEQ ID NO: 62076 - DNA, 60 bp, Artificial
  Synthetic oligonucleotide
gacactgttgacacagtactcgaaaagaacgtgacagtgacacactctgtcaacctactc

SEQ ID NO: 62077 - DNA, 60 bp, Artificial
  Synthetic oligonucleotide
atggactctagtaccctggaactaaggagcaggtactgggccataaggaccagaagcggg

SEQ ID NO: 62078 - DNA, 57 bp, Artificial
  Synthetic oligonucleotide
aaaatgaaaggactttggatttccatgactcaaatgtgaagaatctgtatgagaaag

SEQ ID NO: 62079 - DNA, 60 bp, Artificial
  Synthetic oligonucleotide
atggaacctcaaaaattaaaatgaaatggggaatggagatgaggcgttgccttcttcagt

SEQ ID NO: 62080 - DNA, 60 bp, Artificial
  Synthetic oligonucleotide
cagcaaagacaacagcataagaattggttccaaaggagatgtttttgtcataagagaacc

SEQ ID NO: 62081 - DNA, 60 bp, Artificial
  Synthetic oligonucleotide
tgtgtgcgaatggaccaggcgatcatgggaaagaacatcatactgaaagcgaacttcagt

SEQ ID NO: 62082 - DNA, 60 bp, Artificial
  Synthetic oligonucleotide
tgggcctgaatcggtattggtgaatacctatcagtggatcatcagaaactgggagactgt

SEQ ID NO: 62083 - DNA, 60 bp, Artificial
  Synthetic oligonucleotide
caggagtaccaaattgaggatggttacaggactaaggaacatcccatccattcaatccag

SEQ ID NO: 62084 - DNA, 60 bp, Artificial
  Synthetic oligonucleotide
gagcatggaatatgacgctgttgcaaccacacactcctggattcccaagaggaaccgctc

SEQ ID NO: 62085 - DNA, 60 bp, Artificial
  Synthetic oligonucleotide
ctggactagtgggagcagcatttctttttgtggagtgaatggtgatactgcaaattggtc

SEQ ID NO: 62086 - DNA, 60 bp, Artificial
  Synthetic oligonucleotide
acaatctggactagtgggagcagcatttctttttgtggcgtaaatagtgatactgcaaat

SEQ ID NO: 62087 - DNA, 60 bp, Artificial
  Synthetic oligonucleotide
aacaatctggactagtgggagcagcatttctttttgtggcgttaatagtggtactgcaaa

SEQ ID NO: 62088 - DNA, 60 bp, Artificial
  Synthetic oligonucleotide
ggcttcatcataaaaggaagatcccacttaaggaatgacaccgatgtggtaaactttgtg

SEQ ID NO: 62089 - DNA, 60 bp, Artificial
  Synthetic oligonucleotide
gcagtggagtgttcggtgacaatccgcgtcccaaagatggaaagggcagctgtaatccag

SEQ ID NO: 62090 - DNA, 60 bp, Artificial
  Synthetic oligonucleotide
gatatgcagcggaccaaaagagcacacagaatgccatcgataggataactaacaaggtaa

SEQ ID NO: 62091 - DNA, 60 bp, Artificial
  Synthetic oligonucleotide
gggtggtacggttatcaccatcagaatggacaaggatcaggatatgcagcggaccaaaag

SEQ ID NO: 62092 - DNA, 60 bp, Artificial
  Synthetic oligonucleotide
agaggtctgtttggggctattgccggttttattgaaggaggatggacaggaatgatagat

SEQ ID NO: 62093 - DNA, 60 bp, Artificial
  Synthetic oligonucleotide
ccacaggattaagaaatatcccttctattcaatctagaggtctgtttggggctattgccg

SEQ ID NO: 62094 - DNA, 60 bp, Artificial
  Synthetic oligonucleotide
aatgatagatgggtggtacggttatcaccatcagaatggacaaggatcaggatatgcagc

SEQ ID NO: 62095 - DNA, 60 bp, Artificial
  Synthetic oligonucleotide
ggggctattgccggttttattgaaggaggatggacaggaatgatagatgggtggtacggt

SEQ ID NO: 62096 - DNA, 60 bp, Artificial
  Synthetic oligonucleotide
atcctggatcaggtatcataacatcggatgcaccaatccatgactgtaatgcgacttgtc

SEQ ID NO: 62097 - DNA, 60 bp, Artificial
  Synthetic oligonucleotide
ggaaatctagtggcaccaagatatgcttttgcaatgaatagagatcctggatcaggtatc

SEQ ID NO: 62098 - DNA, 60 bp, Artificial
  Synthetic oligonucleotide
caagactaagaatggccacaggattaagaaatatcccttctattcaatctagaggtctgt

SEQ ID NO: 62099 - DNA, 60 bp, Artificial
  Synthetic oligonucleotide
tcataacatcggatgcaccaatccatgactgtaatgcgacttgtcaaacacccaagggtg

SEQ ID NO: 62100 - DNA, 60 bp, Artificial
  Synthetic oligonucleotide
tgcagaatatgtattaaaaactaggatttcagagacatgagaaaaaacacccttgtttct

SEQ ID NO: 62101 - DNA, 60 bp, Artificial
  Synthetic oligonucleotide
gggaagccccactgcatttgggtaaatgtaacattgccggatggctcctaggaaacccag

SEQ ID NO: 62102 - DNA, 60 bp, Artificial
  Synthetic oligonucleotide
ctaaggggggaagccccactgcatttgggtaaatgtaacattgccggatggctcctagga

SEQ ID NO: 62103 - DNA, 58 bp, Artificial
  Synthetic oligonucleotide
cacactctgttaaccttctagaagacaggcacaatgggaagctatgtaacctaagggg

SEQ ID NO: 62104 - DNA, 60 bp, Artificial
  Synthetic oligonucleotide
cacactctgttaaccttctagaagacaggcacaatgggaagctatgtaacctaagggggg

SEQ ID NO: 62105 - DNA, 60 bp, Artificial
  Synthetic oligonucleotide
gtcttgctatgcacacttgcagcagcaaatgcagacacactgtgtataggttatcatgca

SEQ ID NO: 62106 - DNA, 60 bp, Artificial
  Synthetic oligonucleotide
agcaaaagcaggggaaaataaaagcaaccagaatgaaggcaatactactagtcttgctat

SEQ ID NO: 62107 - DNA, 56 bp, Artificial
  Synthetic oligonucleotide
agcaaaagcaggggaaaataaaagcaaccagaatgaaggcaatactactagtcttg

SEQ ID NO: 62108 - DNA, 60 bp, Artificial
  Synthetic oligonucleotide
gagaggaaatagatggagtacaactggagtcaacaaggctttaccagattttggcgatct

SEQ ID NO: 62109 - DNA, 60 bp, Artificial
  Synthetic oligonucleotide
ggggcaatcggtttctggatgtgctccaatgggtctttgcagtgcagaatatgtattaaa

SEQ ID NO: 62110 - DNA, 60 bp, Artificial
  Synthetic oligonucleotide
gaatggctgctttgaattctatcacaaatgtgatgacacatgcatggagagcatcaaaaa

SEQ ID NO: 62111 - DNA, 60 bp, Artificial
  Synthetic oligonucleotide
ctaaacagagaggaaatagatggagtacaactggagtcaacaaggctttaccagattttg

SEQ ID NO: 62112 - DNA, 60 bp, Artificial
  Synthetic oligonucleotide
aagacccagctaaggaacaatgccaaagaaattgggaatggctgctttgaattctatcac

SEQ ID NO: 62113 - DNA, 60 bp, Artificial
  Synthetic oligonucleotide
tattggaaaatgagagaactttggatttccatgattcaaatgtaaaaaccctatatgaaa

SEQ ID NO: 62114 - DNA, 60 bp, Artificial
  Synthetic oligonucleotide
ctatatgaaaaggtaaagacccagctaaggaacaatgccaaagaaattgggaatggctgc

SEQ ID NO: 62115 - DNA, 60 bp, Artificial
  Synthetic oligonucleotide
cagcggaccaaaagagcacacagaatgccatcgataggataactaacaaggtaaattctg

SEQ ID NO: 62116 - DNA, 60 bp, Artificial
  Synthetic oligonucleotide
tgatgatggatttttggatgtttggacatacaatgccgaattgttagtcctattggaaaa

SEQ ID NO: 62117 - DNA, 60 bp, Artificial
  Synthetic oligonucleotide
gctcctaggaaacccagaatgcgaattactatttgcagtaaactcatggtcttacattgt

SEQ ID NO: 62118 - DNA, 60 bp, Artificial
  Synthetic oligonucleotide
cctaggaaacccagaatgcgaattactatttgcagtaaactcatggtcttacattgtgga

SEQ ID NO: 62119 - DNA, 60 bp, Artificial
  Synthetic oligonucleotide
tcgagatattccccaaagcaagctcttggcccaaccatgaaacaaacagaggtgtaacgg

SEQ ID NO: 62120 - DNA, 60 bp, Artificial
  Synthetic oligonucleotide
ccccaaagcaagctcttggcccaaccatgaaacaaacagaggtgtaacggcagcatgccc

SEQ ID NO: 62121 - DNA, 60 bp, Artificial
  Synthetic oligonucleotide
ggtgtaacggcagcatgcccttatgctggaacaaacagcttctacaggaatttgatatgg

SEQ ID NO: 62122 - DNA, 60 bp, Artificial
  Synthetic oligonucleotide
gtgtaacggcagcatgcccttatgctggaacaaacagcttctacaggaatttgatatggc

SEQ ID NO: 62123 - DNA, 52 bp, Artificial
  Synthetic oligonucleotide
tttgatatggctagtaaaaaagggaaactcatatccaaagctcagtaaatcc

SEQ ID NO: 62124 - DNA, 60 bp, Artificial
  Synthetic oligonucleotide
caaagtctctaccagaatgcagatgcctatgtttttgtgggatcatcaaaatataacaag

SEQ ID NO: 62125 - DNA, 60 bp, Artificial
  Synthetic oligonucleotide
atataacaagaaattcaaaccagaaatagcaaaaagacccaaggtgaggggtcaagcagg

SEQ ID NO: 62126 - DNA, 60 bp, Artificial
  Synthetic oligonucleotide
agcaactggaaatctagtggcaccaagatatgcttttgcaatgaatagagatcctggatc

SEQ ID NO: 62127 - DNA, 54 bp, Artificial
  Synthetic oligonucleotide
gaggacccatatacaagagagtagatggaaagtggatgagggaactcgtccttt

SEQ ID NO: 62128 - DNA, 50 bp, Artificial
  Synthetic oligonucleotide
ttttctgacccaaggtgctctattaaatgacaagcattcaaatgggaccg

SEQ ID NO: 62129 - DNA, 60 bp, Artificial
  Synthetic oligonucleotide
aatgcagaaccttttttctgacccaaggtgctctattaaatgacaagcattcaaatggga

SEQ ID NO: 62130 - DNA, 60 bp, Artificial
  Synthetic oligonucleotide
ctggactagtgggagcagcatttctttttgtggcgtgaatagtgatactgtagattggtc

SEQ ID NO: 62131 - DNA, 60 bp, Artificial
  Synthetic oligonucleotide
agtgttcggtgacaatccgcgtcccaaagatggaaagggcagctgtaatccagtgactgt

SEQ ID NO: 62132 - DNA, 52 bp, Artificial
  Synthetic oligonucleotide
actaagatagttgtggcattgctactatttgctatccatactgtccaaaaaa

SEQ ID NO: 62133 - DNA, 60 bp, Artificial
  Synthetic oligonucleotide
agatgtctttgctgggaagaacacagatcttgaggctctcatggaatggctaaagacaag

SEQ ID NO: 62134 - DNA, 60 bp, Artificial
  Synthetic oligonucleotide
gcgctacctagctgacatgtcccttgaggaaatgtcaagagattggttcatgctcatgcc

SEQ ID NO: 62135 - DNA, 60 bp, Artificial
  Synthetic oligonucleotide
tgtacctacttcgcgctacctagctgacatgtcccttgaggaaatgtcaagagattggtt

SEQ ID NO: 62136 - DNA, 60 bp, Artificial
  Synthetic oligonucleotide
gaatcgaacgaaacacttaagatgaacattgcatctgtacctacttcgcgctacctagct

SEQ ID NO: 62137 - DNA, 60 bp, Artificial
  Synthetic oligonucleotide
tggattatgaaagaagaatcgaacgaaacacttaagatgaacattgcatctgtacctact

SEQ ID NO: 62138 - DNA, 52 bp, Artificial
  Synthetic oligonucleotide
ccgcaaacggtttgcagacaatggattgggtgatgccccattccttgatcgg

SEQ ID NO: 62139 - DNA, 60 bp, Artificial
  Synthetic oligonucleotide
gtttcctttggcatatccgcaaacggtttgcagacaatggattgggtgatgccccattcc

SEQ ID NO: 62140 - DNA, 60 bp, Artificial
  Synthetic oligonucleotide
tggcaaagacataatggattccaacactgtgtcaagctttcaggtagactgtttcctttg

SEQ ID NO: 62141 - DNA, 60 bp, Artificial
  Synthetic oligonucleotide
tcatgcctaggcaaaagataacaggctctctttgtgtgcgaatggaccaggcgatcatgg

SEQ ID NO: 62142 - DNA, 60 bp, Artificial
  Synthetic oligonucleotide
gagattggttcatgctcatgcctaggcaaaagataacaggctctctttgtgtgcgaatgg

SEQ ID NO: 62143 - DNA, 60 bp, Artificial
  Synthetic oligonucleotide
gggctttcaccgaagagggagcaatcgttggagagatttcaccattactttctcttccag

SEQ ID NO: 62144 - DNA, 60 bp, Artificial
  Synthetic oligonucleotide
ggctttcaccgaagagggagcaatcgttggagagatttcaccattactttctcttccagg

SEQ ID NO: 62145 - DNA, 60 bp, Artificial
  Synthetic oligonucleotide
agcaattgggtcagaaatttgaagaaataaggtggctgattgaagaagtgcggcacaaat

SEQ ID NO: 62146 - DNA, 60 bp, Artificial
  Synthetic oligonucleotide
caattgggtcagaaatttgaagaaataaggtggctgattgaagaagtgcggcacaaattg

SEQ ID NO: 62147 - DNA, 60 bp, Artificial
  Synthetic oligonucleotide
ggtttgagatgatttgggatcctaatggatggacagagactgatagtaagttctctgtga

SEQ ID NO: 62148 - DNA, 60 bp, Artificial
  Synthetic oligonucleotide
ataacgttcatgcaagccttacagctattgcttgaagtggagcaagagataagaactttc

SEQ ID NO: 62149 - DNA, 60 bp, Artificial
  Synthetic oligonucleotide
acaatctggactagtgggagcagcatttctttttgtggagtgaatagtgatactgcaaat

SEQ ID NO: 62150 - DNA, 60 bp, Artificial
  Synthetic oligonucleotide
gagaaccttttatatcatgttctcacttggaatgcagaaccttttttctgactcaaggtg

SEQ ID NO: 62151 - DNA, 60 bp, Artificial
  Synthetic oligonucleotide
tgtgtttgtcataagagagcctttcatatcatgttctcacttggaatgcagaaccttttt

SEQ ID NO: 62152 - DNA, 60 bp, Artificial
  Synthetic oligonucleotide
ggatccagaatgagttcaacaaggcatgcgagctgaccgattcaatctggatagagctcg

SEQ ID NO: 62153 - DNA, 60 bp, Artificial
  Synthetic oligonucleotide
actctacagagattcgcttggagaagcagtaatgagaatgggagacctccactcactcca

SEQ ID NO: 62154 - DNA, 60 bp, Artificial
  Synthetic oligonucleotide
tctctaaaactctacagagattcgcttggagaagcagtaatgagaatgggagacctccac

SEQ ID NO: 62155 - DNA, 60 bp, Artificial
  Synthetic oligonucleotide
gggtttgagatgatttgggatcctaatggatggacaaataccgacagtgatttctcagtg

SEQ ID NO: 62156 - DNA, 60 bp, Artificial
  Synthetic oligonucleotide
actgttgacacagtactcgaaaagaatgtgacagtgacacactctgtcaacctactcgaa

SEQ ID NO: 62157 - DNA, 60 bp, Artificial
  Synthetic oligonucleotide
gacactgttgacacagtactcgaaaagaatgtgacagtgacacactctgtcaacctactc

SEQ ID NO: 62158 - DNA, 60 bp, Artificial
  Synthetic oligonucleotide
taagagaaccttttatatcatgttctcacttggaatgcagaaccttttttctgacccaag

SEQ ID NO: 62159 - DNA, 60 bp, Artificial
  Synthetic oligonucleotide
gattggttccaaaggagatgtttttgtcataagagaaccttttatatcatgctctcactt

SEQ ID NO: 62160 - DNA, 60 bp, Artificial
  Synthetic oligonucleotide
ttgtatcagaatggaccaggcgatcatggataagaacatcatactgaaagcgaacttcag

SEQ ID NO: 62161 - DNA, 51 bp, Artificial
  Synthetic oligonucleotide
gacaatggagctgtggctgtactaaaatacaacggcataataactgaaacc

SEQ ID NO: 62162 - DNA, 60 bp, Artificial
  Synthetic oligonucleotide
ggatgtcaatccgaccttacttttcttaaaggtgccagcacaaaatgctataagcacaac

SEQ ID NO: 62163 - DNA, 60 bp, Artificial
  Synthetic oligonucleotide
gctctcacttggaatgcagaaccttttttctgacccaaggcgctctattaaatgacaagc

SEQ ID NO: 62164 - DNA, 60 bp, Artificial
  Synthetic oligonucleotide
cttcctagttttggagtatctggaattaatgagtctgcagacatgagtattggagttact

SEQ ID NO: 62165 - DNA, 58 bp, Artificial
  Synthetic oligonucleotide
cttcctagttttggagtatctggaattaatgagtctgcagacatgagtattggagtta

SEQ ID NO: 62166 - DNA, 54 bp, Artificial
  Synthetic oligonucleotide
agggggtatacattaatactgccttgcttaatgcatcctgtgcagcaatggatg

SEQ ID NO: 62167 - DNA, 60 bp, Artificial
  Synthetic oligonucleotide
gcgaatattaagaacacaagagtctgaatgtgtctgtatgaacggatcatgtttcaccat

SEQ ID NO: 62168 - DNA, 60 bp, Artificial
  Synthetic oligonucleotide
gcaaatattaagaacacaagagtctgaatgtgtctgtatgaacgggtcatgtttcaccat

SEQ ID NO: 62169 - DNA, 60 bp, Artificial
  Synthetic oligonucleotide
aggagttcacaatggtggggaaaagggcaacagctatactcagaaaagcaaccaggagat

SEQ ID NO: 62170 - DNA, 60 bp, Artificial
  Synthetic oligonucleotide
tctcattttcctggcacggtcagcacttattctaagggggtcagttgcacataagtcttg

SEQ ID NO: 62171 - DNA, 60 bp, Artificial
  Synthetic oligonucleotide
ggaaagctttccacaagagggattcagattgcttcaaatgagaatgtggaagctatggac

SEQ ID NO: 62172 - DNA, 60 bp, Artificial
  Synthetic oligonucleotide
ggatcccagaatgtgctccctaatgcaaggttcaacacttcccagaaggtctggagccgc

SEQ ID NO: 62173 - DNA, 60 bp, Artificial
  Synthetic oligonucleotide
gttcgcactggaatggatcccagaatgtgctccctaatgcaaggttcaacacttcccaga

SEQ ID NO: 62174 - DNA, 60 bp, Artificial
  Synthetic oligonucleotide
gcaaggttcaacacttcccagaaggtctggagccgcaggtgctgcagtaaaaggagttgg

SEQ ID NO: 62175 - DNA, 60 bp, Artificial
  Synthetic oligonucleotide
gaaggatattcactggtcgggatagaccccttcaaactacttcaaaacagccaagtgttc

SEQ ID NO: 62176 - DNA, 60 bp, Artificial
  Synthetic oligonucleotide
catgactttgaaagagaaggatattcactggtcgggatagaccccttcaaactacttcaa

SEQ ID NO: 62177 - DNA, 60 bp, Artificial
  Synthetic oligonucleotide
cgtggaatcaatgaccgaaatttctggaggggtgaaaatggacgaaggacaaggattgca

SEQ ID NO: 62178 - DNA, 60 bp, Artificial
  Synthetic oligonucleotide
cctgcctgcttgtgtgtatgggcttgcagtagctagtgggcatgactttgagagagaagg

SEQ ID NO: 62179 - DNA, 60 bp, Artificial
  Synthetic oligonucleotide
acaagtcttgcctgcctgcttgtgtgtatgggcttgcagtagctagtgggcatgactttg

SEQ ID NO: 62180 - DNA, 60 bp, Artificial
  Synthetic oligonucleotide
acgtggaatcaatgaccgaaatttctggaggggtgaaaatggacgaaggacaaggattgc

SEQ ID NO: 62181 - DNA, 60 bp, Artificial
  Synthetic oligonucleotide
aataaatacctagaagagcatcccagtgctgggaaggatcctaagaaaactggaggaccc

SEQ ID NO: 62182 - DNA, 60 bp, Artificial
  Synthetic oligonucleotide
caagaggaaagctttccacaagaggggttcagattgcttcaaatgagaatgtggaagcta

SEQ ID NO: 62183 - DNA, 60 bp, Artificial
  Synthetic oligonucleotide
gaacaagagctcttgttcgcactgggatggatcccagaatgtgctccctaatgcaaggtt

SEQ ID NO: 62184 - DNA, 60 bp, Artificial
  Synthetic oligonucleotide
aatgagaatgtggaagctatggactctagtaccctagaactaagaagcagatactgggcc

SEQ ID NO: 62185 - DNA, 60 bp, Artificial
  Synthetic oligonucleotide
gggacggacatcagacatgcgaacggaagttataaggatgatggaaagtgcaaagccaga

SEQ ID NO: 62186 - DNA, 60 bp, Artificial
  Synthetic oligonucleotide
cagctatactcagaaaagcaaccaggagattgattcagctgatagtgagtggaagagacg

SEQ ID NO: 62187 - DNA, 60 bp, Artificial
  Synthetic oligonucleotide
gtgtgcagagacaattggcatggttcgaatcgaccttgggtgtcttttaatcaaaacctg

SEQ ID NO: 62188 - DNA, 60 bp, Artificial
  Synthetic oligonucleotide
gtgtgcagggacaattggcacggttcaaatcgaccttgggtgtcttttaatcaaaacctg

SEQ ID NO: 62189 - DNA, 60 bp, Artificial
  Synthetic oligonucleotide
gtgtgtgtgcagggacaattggcacggttcaaatcgaccttgggtgtcttttaatcaaaa

SEQ ID NO: 62190 - DNA, 60 bp, Artificial
  Synthetic oligonucleotide
caagttggatccagaatgagttcaacaaggcatgcgaactgaccgattcaatctggatag

SEQ ID NO: 62191 - DNA, 60 bp, Artificial
  Synthetic oligonucleotide
ttgtgtactagaagcaatggctttccttgaggaatcccatcctggtatttttgaaaactc

SEQ ID NO: 62192 - DNA, 60 bp, Artificial
  Synthetic oligonucleotide
gcaagccttacagctattgcttgaagtggaacaagagataagaactttctcgtttcagct

SEQ ID NO: 62193 - DNA, 60 bp, Artificial
  Synthetic oligonucleotide
atgaaggacgactgatccagaacagcttaacaatagagagaatggtgctctctgcttttg

SEQ ID NO: 62194 - DNA, 60 bp, Artificial
  Synthetic oligonucleotide
ccttttatatcatgttctcacttggaatgcagaaccttttttctgacccaaggtgctcta

SEQ ID NO: 62195 - DNA, 60 bp, Artificial
  Synthetic oligonucleotide
atctacaaaacttattttgaaaaagtcgaaaggttaaaacatggaacctttggccctgtc

SEQ ID NO: 62196 - DNA, 60 bp, Artificial
  Synthetic oligonucleotide
atggattcatcataaaaggaagatctcacttaaggaatgacaccgatgtggtaaactttg

SEQ ID NO: 62197 - DNA, 60 bp, Artificial
  Synthetic oligonucleotide
cggcttcattataaaaggaagatctcacttaaggaatgacaccgatgtggtaaactttgt

SEQ ID NO: 62198 - DNA, 60 bp, Artificial
  Synthetic oligonucleotide
tgacaagcattcaaatgggaccgttaaggacagaagcccttatagggccttaatgagctg

SEQ ID NO: 62199 - DNA, 60 bp, Artificial
  Synthetic oligonucleotide
acaacagcataagaattggttccaaaggagatgtttttgtcataagagaaccttttatat

SEQ ID NO: 62200 - DNA, 60 bp, Artificial
  Synthetic oligonucleotide
aatattaagaacacaagagtctgaatgtgtctgtgtaaacggttcatgttttaccataat

SEQ ID NO: 62201 - DNA, 60 bp, Artificial
  Synthetic oligonucleotide
agtaagaggtcaagcagggaggatgaactattactggaccttgctaaaacccggagacac

SEQ ID NO: 62202 - DNA, 60 bp, Artificial
  Synthetic oligonucleotide
ggttgggaaaagggcaacagctatactcagaaaagcaaccaggagattgattcaactaat

SEQ ID NO: 62203 - DNA, 60 bp, Artificial
  Synthetic oligonucleotide
atttcttgatcggcttcgccgagatcagaagtccctaaagggaagaggcagcactctcgg

SEQ ID NO: 62204 - DNA, 60 bp, Artificial
  Synthetic oligonucleotide
agcaattgggtcagaaatttgaggaaataaggtggctgattgaagaattgcggcacaaat

SEQ ID NO: 62205 - DNA, 60 bp, Artificial
  Synthetic oligonucleotide
ggtcagaaatttgaggaaataaggtggctgattgaagaattgcggcacaaattgaagatg

SEQ ID NO: 62206 - DNA, 60 bp, Artificial
  Synthetic oligonucleotide
agggctttcaccgaagaggaagcaattgttggagaaatttcaccattactttctcttcca

SEQ ID NO: 62207 - DNA, 53 bp, Artificial
  Synthetic oligonucleotide
agggctttcaccgaagaggaagcaattgttggagaaatttcaccattactttc

SEQ ID NO: 62208 - DNA, 60 bp, Artificial
  Synthetic oligonucleotide
aagaatccaacgagatacttaagatgaccattgcatctgtaccttcttcgcgctacctag

SEQ ID NO: 62209 - DNA, 60 bp, Artificial
  Synthetic oligonucleotide
agtggattctgaaagaagaatccaacgagatacttaagatgaccattgcatctgtacctt

SEQ ID NO: 62210 - DNA, 60 bp, Artificial
  Synthetic oligonucleotide
gcaaacggtttgcggacaatggattgggtgatgccccatttcttgatcggctccgccgag

SEQ ID NO: 62211 - DNA, 60 bp, Artificial
  Synthetic oligonucleotide
ttggcatatccgcaaacggtttgcggacaatggattgggtgatgccccatttcttgatcg

SEQ ID NO: 62212 - DNA, 60 bp, Artificial
  Synthetic oligonucleotide
aggaagatctcacttaaggaatgacactgatgtggtaaactttgtgagcatggaattttc

SEQ ID NO: 62213 - DNA, 60 bp, Artificial
  Synthetic oligonucleotide
attgttggcgaaatttcaccattgccttctcttccaggacatactaatgaggatgtcaaa

SEQ ID NO: 62214 - DNA, 56 bp, Artificial
  Synthetic oligonucleotide
tggcgaaatttcaccattgccttctcttccaggacatactaatgaggatgtcaaaa

SEQ ID NO: 62215 - DNA, 60 bp, Artificial
  Synthetic oligonucleotide
tggcgaaatttcaccattgccttctcttccaggacatactaatgaggatgtcaaaaatgc

SEQ ID NO: 62216 - DNA, 60 bp, Artificial
  Synthetic oligonucleotide
ctcttccaggacatactaatgaggatgtcaaaaatgcaattgggatcctcatcgggggac

SEQ ID NO: 62217 - DNA, 60 bp, Artificial
  Synthetic oligonucleotide
cccttccaggacatactaatgaggatgtcaaaaatgcaattgggatcctcatcgggggac

SEQ ID NO: 62218 - DNA, 60 bp, Artificial
  Synthetic oligonucleotide
cgtggatgggctatatacacaaaagacaacagcataagaattggttccaaaggagatgtt

SEQ ID NO: 62219 - DNA, 60 bp, Artificial
  Synthetic oligonucleotide
ccacatacgcagacacaatatgtataggctaccatgccaacaactcaaccgacactgttg

SEQ ID NO: 62220 - DNA, 60 bp, Artificial
  Synthetic oligonucleotide
ggggtgcagatgcaacgattcaagtgatcctcttgttgttgccgcaagtataattgggat

SEQ ID NO: 62221 - DNA, 59 bp, Artificial
  Synthetic oligonucleotide
ggggtgcagatgcaacgattcaagtgatcctcttattgttgccgcaagtataattggga

SEQ ID NO: 62222 - DNA, 59 bp, Artificial
  Synthetic oligonucleotide
ggggtgcagatgcaacgattcaagtgatcctcttgttgttgccgcaagtataattgggg

SEQ ID NO: 62223 - DNA, 59 bp, Artificial
  Synthetic oligonucleotide
ggggtgcagatgcaacgattcaagtgatcctcttgttgttaccgcaagtataattggga

SEQ ID NO: 62224 - DNA, 60 bp, Artificial
  Synthetic oligonucleotide
cctgatatgactccaagtaccgagatgtcaatgagaggagtgagagtcagcaaaatgggt

SEQ ID NO: 62225 - DNA, 56 bp, Artificial
  Synthetic oligonucleotide
ttcttgatcggctccgccgagatcaaaagtccctaaaaggaagaggcagcaccctt

SEQ ID NO: 62226 - DNA, 60 bp, Artificial
  Synthetic oligonucleotide
aatctacagagattcgcttggagaagccgtaatgagaatgggagaccttcactatctcca

SEQ ID NO: 62227 - DNA, 60 bp, Artificial
  Synthetic oligonucleotide
ccccattccttgatcggctccgccgagatcaaaagtccctaaagggaagaggcagcactc

SEQ ID NO: 62228 - DNA, 60 bp, Artificial
  Synthetic oligonucleotide
gccccattccttgatcggctccgccgagatcaaaagtccctaaagggaagaggcagcact

SEQ ID NO: 62229 - DNA, 60 bp, Artificial
  Synthetic oligonucleotide
gaaagaagagttcactgagatcatgaagatctgttccaccattgaagagctcagacggca

SEQ ID NO: 62230 - DNA, 52 bp, Artificial
  Synthetic oligonucleotide
tcgtgttcacgctcaccgtgcccagtgagcgaggactgcagcgtagacgctt

SEQ ID NO: 62231 - DNA, 57 bp, Artificial
  Synthetic oligonucleotide
tgttcacgctcaccgtgcccagtgagcgaggactgcagcgtagacgctttgtccaaa

SEQ ID NO: 62232 - DNA, 60 bp, Artificial
  Synthetic oligonucleotide
ggggacgttgtgttggtaatgaaacgaaaacgggactctagcatacttactgacagccag

SEQ ID NO: 62233 - DNA, 60 bp, Artificial
  Synthetic oligonucleotide
cgtagtgttggtaatgaaacgaaaacgggactctagcatacttactgacagccagacagc

SEQ ID NO: 62234 - DNA, 60 bp, Artificial
  Synthetic oligonucleotide
cctcacacatgcactaagatagttgtggcattgctactatttgctatccatactgtccaa

SEQ ID NO: 62235 - DNA, 60 bp, Artificial
  Synthetic oligonucleotide
accgatcttgaggctctcatggagtggctaaagacaagaccaatcctgtcacctctgact

SEQ ID NO: 62236 - DNA, 60 bp, Artificial
  Synthetic oligonucleotide
gaagacagccacaacgggaaattatgtagattaaaaggaatagccccactacaattgggg

SEQ ID NO: 62237 - DNA, 60 bp, Artificial
  Synthetic oligonucleotide
gaagacagccacaacgggaaattatgcagattaaaaggaatagccccactacaattgggg

SEQ ID NO: 62238 - DNA, 60 bp, Artificial
  Synthetic oligonucleotide
caggagtacaaaattgaggatggttacaggactaaggaacatcccatccattcaatccag

SEQ ID NO: 62239 - DNA, 60 bp, Artificial
  Synthetic oligonucleotide
caggagtgccaaattgaggatggttacaggactaaggaacatcccatccattcaatccag

SEQ ID NO: 62240 - DNA, 60 bp, Artificial
  Synthetic oligonucleotide
gatggcatgcaattctgctgcatttgaagatctaagagtatcaagcttcatcagagggac

SEQ ID NO: 62241 - DNA, 60 bp, Artificial
  Synthetic oligonucleotide
gcgctacctagctgacatgacccttgaggaaatgtcaagggattggttcatgctcatgcc

SEQ ID NO: 62242 - DNA, 60 bp, Artificial
  Synthetic oligonucleotide
taccagcgccacgctatttagctgacatgacccttgaggaaatgtcaagggattggttca

SEQ ID NO: 62243 - DNA, 60 bp, Artificial
  Synthetic oligonucleotide
gcgccacgctatttagctgacatgacccttgaggaaatgtcaagggattggttcatgctc

SEQ ID NO: 62244 - DNA, 60 bp, Artificial
  Synthetic oligonucleotide
tctgtaccttcttcgcgctacctagctgacatgacccttgaggaaatgtcaagggattgg

SEQ ID NO: 62245 - DNA, 60 bp, Artificial
  Synthetic oligonucleotide
aaccagaaatcagcccgaatggttcagaaatattctaagtattgctccaataatgttctc

SEQ ID NO: 62246 - DNA, 60 bp, Artificial
  Synthetic oligonucleotide
agggagataacattccatggggccaaagaaatagcgctcagttattctgctggtgcactt

SEQ ID NO: 62247 - DNA, 60 bp, Artificial
  Synthetic oligonucleotide
cggccctgagtcagtgttggtcaatacctatcagtggatcatcagaaactgggagactgt

SEQ ID NO: 62248 - DNA, 60 bp, Artificial
  Synthetic oligonucleotide
ccctgagtcagtgttggtcaatacctatcagtggatcatcagaaactgggagactgttaa

SEQ ID NO: 62249 - DNA, 60 bp, Artificial
  Synthetic oligonucleotide
ctcaatgattatgagggacggctgatccagaacagcttaacaatagagagaatggtgctc

SEQ ID NO: 62250 - DNA, 60 bp, Artificial
  Synthetic oligonucleotide
caatgattatgagggacggctgatccagaacagcttaacaatagagagaatggtgctctc

SEQ ID NO: 62251 - DNA, 60 bp, Artificial
  Synthetic oligonucleotide
cagtgattacgagggacggctgatccagaacagcttaacaatagagagaatggtgctctc

SEQ ID NO: 62252 - DNA, 60 bp, Artificial
  Synthetic oligonucleotide
cagtgattatgagggacggctgatccagaacagcttaacaatagagagaatggtgctctc

SEQ ID NO: 62253 - DNA, 60 bp, Artificial
  Synthetic oligonucleotide
atgattatgagggacggctgatccagaacagcttaacaatagagagaatggtgctctctg

SEQ ID NO: 62254 - DNA, 60 bp, Artificial
  Synthetic oligonucleotide
cctcctttgacatgagtaatgaaggatcttatttctttggagacaatgcagaggagtacg

SEQ ID NO: 62255 - DNA, 60 bp, Artificial
  Synthetic oligonucleotide
gacccaaggcgccttactgaatgacaagcattcaaatgggaccgttaaggacagaagccc

SEQ ID NO: 62256 - DNA, 60 bp, Artificial
  Synthetic oligonucleotide
ttgagatgatttgggatcctaatggatggacggataccgatagtaatttcttagtgaaac

SEQ ID NO: 62257 - DNA, 60 bp, Artificial
  Synthetic oligonucleotide
gaggatttgagatgatttgggatcctaatggatggacagataccgatagtaaattcttag

SEQ ID NO: 62258 - DNA, 60 bp, Artificial
  Synthetic oligonucleotide
gatggcatgggctggctaacaatcggaatttctggtccagataatgaagcagtggctgta

SEQ ID NO: 62259 - DNA, 60 bp, Artificial
  Synthetic oligonucleotide
gaggaccgaaatcataaggatgatggaaagtgcaagaccagaagatgtgtctttccaggg

SEQ ID NO: 62260 - DNA, 60 bp, Artificial
  Synthetic oligonucleotide
gttctcacttggaatgcagaaccttttttctgacccaaggtgctctattaaatgacaagc

SEQ ID NO: 62261 - DNA, 60 bp, Artificial
  Synthetic oligonucleotide
ttcaatcgtctgatgattttgctctgattgtaaatgcacccaactatgcaggaattcaag

SEQ ID NO: 62262 - DNA, 55 bp, Artificial
  Synthetic oligonucleotide
ggacagaagcccttatagggccttaatgagctgtcctctaggtgaagctccgtct

SEQ ID NO: 62263 - DNA, 60 bp, Artificial
  Synthetic oligonucleotide
ggaacccggagacacaataatatttgaggcaaatggaaatctaatagcgccatggcatgc

SEQ ID NO: 62264 - DNA, 60 bp, Artificial
  Synthetic oligonucleotide
gggacacaataatatttgaggcaaatggaaatctaatagcgccatggtatgctttcgcat

SEQ ID NO: 62265 - DNA, 60 bp, Artificial
  Synthetic oligonucleotide
ctgactcccagcatcggtctcataggcaaatggtgacaacaaccaatccactaataagac

SEQ ID NO: 62266 - DNA, 60 bp, Artificial
  Synthetic oligonucleotide
ctgactcccagcatcggtctcataggcaaatggtgacaacaaccaatccactaatcagac

SEQ ID NO: 62267 - DNA, 60 bp, Artificial
  Synthetic oligonucleotide
gctgactcccagcatcggtctcataggcaaatggtgacaacaaccaatccactaataaga

SEQ ID NO: 62268 - DNA, 60 bp, Artificial
  Synthetic oligonucleotide
gagattaatggccctgaatcagtattggtcaatacctatcagtggatcatcagaaactgg

SEQ ID NO: 62269 - DNA, 58 bp, Artificial
  Synthetic oligonucleotide
aaaacaccgatcttgaggcactcatggaatggctaaagacaagaccaatcctgtcacc

SEQ ID NO: 62270 - DNA, 60 bp, Artificial
  Synthetic oligonucleotide
agagggaaggcgaaagaccaacttgtatggtttcatcataaaaggaagatcccacttaag

SEQ ID NO: 62271 - DNA, 60 bp, Artificial
  Synthetic oligonucleotide
gagggaaggcgaaagaccaacttgtatggtttcatcataaaaggaagatcccacttaagg

SEQ ID NO: 62272 - DNA, 60 bp, Artificial
  Synthetic oligonucleotide
ggagggaaggcgaaagaccaacttgtatggtttcatcataaaaggaagatcccacttaag

SEQ ID NO: 62273 - DNA, 60 bp, Artificial
  Synthetic oligonucleotide
cccttatactggagaccctccttacagccatgggacaggaacaggatacaccatggatac

SEQ ID NO: 62274 - DNA, 60 bp, Artificial
  Synthetic oligonucleotide
ctttcccttatactggagaccctccttacagccatgggacaggaacaggatacaccatgg

SEQ ID NO: 62275 - DNA, 55 bp, Artificial
  Synthetic oligonucleotide
accaggggcgtttatgcaacccattgaacccatttgtcagccataaagagattga

SEQ ID NO: 62276 - DNA, 60 bp, Artificial
  Synthetic oligonucleotide
gaccctgaacacaatgaccaaagatgctgagagagggaagctaaaacggagagcaattgc

SEQ ID NO: 62277 - DNA, 60 bp, Artificial
  Synthetic oligonucleotide
caatccgatcttacttttcttaaaagttccagcacaaaatgctataagcacaactttccc

SEQ ID NO: 62278 - DNA, 60 bp, Artificial
  Synthetic oligonucleotide
tcttgaaaatttgcaggcctatcagaaacgaatgggggtgcagatgcaacggttcaagtg

SEQ ID NO: 62279 - DNA, 60 bp, Artificial
  Synthetic oligonucleotide
aatttgcaggcctatcagaaacgaatgggggtgcagatgcaacggttcaagtgatcctct

SEQ ID NO: 62280 - DNA, 60 bp, Artificial
  Synthetic oligonucleotide
agtcgaaaggttaaaacatggaacctttggccctgtccactttagaaaccaagtaaaaat

SEQ ID NO: 62281 - DNA, 60 bp, Artificial
  Synthetic oligonucleotide
ttacaaggagaatagattcatcgagattggagtgacaaggagggaagttcacatatacta

SEQ ID NO: 62282 - DNA, 52 bp, Artificial
  Synthetic oligonucleotide
ttacaaggagaatagattcatcgagattggagtgacaaggagggaagttcac

SEQ ID NO: 62283 - DNA, 60 bp, Artificial
  Synthetic oligonucleotide
ctggaccagtgggagcagcatttctttttgtggcgtgaatagtgatactgtagattggtc

SEQ ID NO: 62284 - DNA, 60 bp, Artificial
  Synthetic oligonucleotide
cccacttaagaaatgacactgacgtggtaaactttgtgagcatggaattttccctcactg

SEQ ID NO: 62285 - DNA, 60 bp, Artificial
  Synthetic oligonucleotide
ttgggaaaagagcaacagctatactcagaaaagcaaccaggagattgattcaactgatag

SEQ ID NO: 62286 - DNA, 60 bp, Artificial
  Synthetic oligonucleotide
ctgacaataacttactcttcatcaatgatgtgggagattaatggccctgagtcagtattg

SEQ ID NO: 62287 - DNA, 60 bp, Artificial
  Synthetic oligonucleotide
acgaatattaagaacacaagagtctgaatgtgtctgtgtgaacgggtcatgtttcaccat

SEQ ID NO: 62288 - DNA, 60 bp, Artificial
  Synthetic oligonucleotide
gcgaatattaagaacacaagagtctgaatgtgtctgtgtgaatgggtcatgtttcaccat

SEQ ID NO: 62289 - DNA, 59 bp, Artificial
  Synthetic oligonucleotide
agatgagtcttctaaccgaggtcgaaacgtacgtactctctatcatcccgtcaggcccc

SEQ ID NO: 62290 - DNA, 60 bp, Artificial
  Synthetic oligonucleotide
agatgagtcttctaaccgaggtcgaaacgtacgtactctctatcatcccgtcaggccccc

SEQ ID NO: 62291 - DNA, 60 bp, Artificial
  Synthetic oligonucleotide
ctggactagtgggagcagcatttctttttgtggcgttaatagtgacactgcaaactggtc

SEQ ID NO: 62292 - DNA, 60 bp, Artificial
  Synthetic oligonucleotide
ataatggatcccaacactgtgtcaagctttcaggtagactgctttctttggcatgtccgc

SEQ ID NO: 62293 - DNA, 60 bp, Artificial
  Synthetic oligonucleotide
actcaaggtgctctattaaatgacaagcattcaaatgggaccgttaaggacagaagccct

SEQ ID NO: 62294 - DNA, 60 bp, Artificial
  Synthetic oligonucleotide
cacaatatgtataggctaccatgcaaacaactcaaccgacactgttgacacagtactcga

SEQ ID NO: 62295 - DNA, 60 bp, Artificial
  Synthetic oligonucleotide
gtgttcacgctcaccgtgcccagtgagcgaggactgcagcgtagacgctttgtccagaat

SEQ ID NO: 62296 - DNA, 60 bp, Artificial
  Synthetic oligonucleotide
gccctgtccattttagaaaccaagtcaaaatacgccgaagagtcgatataaatcctggcc

SEQ ID NO: 62297 - DNA, 55 bp, Artificial
  Synthetic oligonucleotide
ttttgcagggaagaacacagatcttgaggctctcatggaatggttaaagacaaga

SEQ ID NO: 62298 - DNA, 60 bp, Artificial
  Synthetic oligonucleotide
gcacagagactggaaggtgtttttgcagggaagaacacagatcttgaggctctcatggaa

SEQ ID NO: 62299 - DNA, 60 bp, Artificial
  Synthetic oligonucleotide
gaggacccaagtcatgaaggagagggaataccactatatgatgcaatcaagtgcatgaga

SEQ ID NO: 62300 - DNA, 51 bp, Artificial
  Synthetic oligonucleotide
atgaaggatcttatttcttcggagacaatgcagaggagtacgacaattaag

SEQ ID NO: 62301 - DNA, 60 bp, Artificial
  Synthetic oligonucleotide
ctgacaataacttactcttcatcaatgatgtgggagattaatggccctgagtcagtgttg

SEQ ID NO: 62302 - DNA, 60 bp, Artificial
  Synthetic oligonucleotide
ctatcagaaacgaatgggggtgcagatgcaacgattcaagtgatcctcttgttgttaccg

SEQ ID NO: 62303 - DNA, 60 bp, Artificial
  Synthetic oligonucleotide
tatcagaaacgaatgggggtgcagatgcaacgattcaagtgatcctcttgttgttgccgc

SEQ ID NO: 62304 - DNA, 60 bp, Artificial
  Synthetic oligonucleotide
ctatcagaaacgaatgggggtgcagatgcaacgattcaagtgatcctcttattgttgccg

SEQ ID NO: 62305 - DNA, 60 bp, Artificial
  Synthetic oligonucleotide
ctgaaaatctacagagattcgcttggagaagccgtaatgagaatgggagaccttcactat

SEQ ID NO: 62306 - DNA, 60 bp, Artificial
  Synthetic oligonucleotide
catcggagggcttgagtggaatggtaacacggttcgagtctctgaaaatctacagagatt

SEQ ID NO: 62307 - DNA, 57 bp, Artificial
  Synthetic oligonucleotide
ctgaaaatctacagagattcgcttggagaagccgtaatgagaatgggagacctccac

SEQ ID NO: 62308 - DNA, 60 bp, Artificial
  Synthetic oligonucleotide
gagcctttcatctcatgttctcacttggaatgcagaactttctttttgactcaaggtgcc

SEQ ID NO: 62309 - DNA, 60 bp, Artificial
  Synthetic oligonucleotide
tgaatccaaatcagaagataataaccattggttcggtctgtgtgacaattgggatagcca

SEQ ID NO: 62310 - DNA, 60 bp, Artificial
  Synthetic oligonucleotide
aattttgttgctgaacaggcagtagtttcagtgaaattagcgggcaattcctctctctgc

SEQ ID NO: 62311 - DNA, 60 bp, Artificial
  Synthetic oligonucleotide
cctgaaacatgcaaccaaagcgtcatcacttacgaaaacaacacttgggtaaatcagaca

SEQ ID NO: 62312 - DNA, 60 bp, Artificial
  Synthetic oligonucleotide
ggattagccactcaattcaaattggaaatcaaaacaagcctgaaacatgcaaccaaagcg

SEQ ID NO: 62313 - DNA, 60 bp, Artificial
  Synthetic oligonucleotide
ccaaatcagaagataataaccattggttcggtctgtgtgacaattgggatagccagcttg

SEQ ID NO: 62314 - DNA, 60 bp, Artificial
  Synthetic oligonucleotide
tgcagtggaattttcggagacaatccgcgccctaatgatagaacaggcagttgcggtcct

SEQ ID NO: 62315 - DNA, 60 bp, Artificial
  Synthetic oligonucleotide
caaataggatacatatgcagtggaattttcggagacaatccgcgccctaatgatagaaca

SEQ ID NO: 62316 - DNA, 60 bp, Artificial
  Synthetic oligonucleotide
gaacaggcagttgcggtcctgtatcttctaatggagcaaatggggtgaaaggattttcat

SEQ ID NO: 62317 - DNA, 60 bp, Artificial
  Synthetic oligonucleotide
tgatagaacaggcagttgcggtcctgtatcttctaatggagcaaatggggtgaaaggatt

SEQ ID NO: 62318 - DNA, 60 bp, Artificial
  Synthetic oligonucleotide
ctcctgttatcttgagtctggtgaaatcacatgtgtatgcagggataattggcatggctc

SEQ ID NO: 62319 - DNA, 60 bp, Artificial
  Synthetic oligonucleotide
gagttgaatgcccctaattatcactacgaggaatgctcctgttatcttgagtctggtgaa

SEQ ID NO: 62320 - DNA, 60 bp, Artificial
  Synthetic oligonucleotide
ggcatggctcgaatcgaccgtgggtgtctttcaatcagaatctggagtatcaaataggat

SEQ ID NO: 62321 - DNA, 60 bp, Artificial
  Synthetic oligonucleotide
gtctggtgaaatcacatgtgtatgcagggataattggcatggctcgaatcgaccgtgggt

SEQ ID NO: 62322 - DNA, 60 bp, Artificial
  Synthetic oligonucleotide
ttaaatacggcaatggtgtttggataggaagaaccaagagcactagtttaaggagcggtt

SEQ ID NO: 62323 - DNA, 60 bp, Artificial
  Synthetic oligonucleotide
tgaaaggattttcatttaaatacggcaatggtgtttggataggaagaaccaagagcacta

SEQ ID NO: 62324 - DNA, 53 bp, Artificial
  Synthetic oligonucleotide
ttactgtaatgaccgatgggcctagtaatgggcaggcatcatacaagattttc

SEQ ID NO: 62325 - DNA, 60 bp, Artificial
  Synthetic oligonucleotide
gtagtcaaatcagttgagttgaatgcccctaattatcactacgaggaatgctcctgttat

SEQ ID NO: 62326 - DNA, 60 bp, Artificial
  Synthetic oligonucleotide
tcagttggctgacaattggaatttctggcccagacaatggggcagtggctgtgctgaaat

SEQ ID NO: 62327 - DNA, 59 bp, Artificial
  Synthetic oligonucleotide
tcagttggctgacaattggaatttctggcccagacaatggggcagtggctgtgctgaaa

SEQ ID NO: 62328 - DNA, 60 bp, Artificial
  Synthetic oligonucleotide
catattaaggacacaagaatctgaatgtgcatgtgtgaatggttcttgctttactgtaat

SEQ ID NO: 62329 - DNA, 60 bp, Artificial
  Synthetic oligonucleotide
agaatctgaatgtgcatgtgtgaatggttcttgctttactgtaatgaccgatgggcctag

SEQ ID NO: 62330 - DNA, 60 bp, Artificial
  Synthetic oligonucleotide
tatagaaccttgatgagctgtcttgttggtgaggttccttctccatacaactcaaggttt

SEQ ID NO: 62331 - DNA, 60 bp, Artificial
  Synthetic oligonucleotide
agctgtcttgttggtgaggttccttctccatacaactcaaggtttgagtcagtcgcttgg

SEQ ID NO: 62332 - DNA, 60 bp, Artificial
  Synthetic oligonucleotide
ctcaaggtttgagtcagtcgcttggtcagcaagtgcttgccatgatggcatcagttggct

SEQ ID NO: 62333 - DNA, 56 bp, Artificial
  Synthetic oligonucleotide
ctcaaggtttgagtcagtcgcttggtcagcaagtgcttgccatgatggcatcagtt

SEQ ID NO: 62334 - DNA, 60 bp, Artificial
  Synthetic oligonucleotide
ttgtggtgtggatagcggcactgtgggttggtcttggccagacggtgctgagtttccatt

SEQ ID NO: 62335 - DNA, 60 bp, Artificial
  Synthetic oligonucleotide
ggtgtggatagcggcactgtgggttggtcttggccagacggtgctgagtttccatttaac

SEQ ID NO: 62336 - DNA, 60 bp, Artificial
  Synthetic oligonucleotide
ctggattgtatgagatcttgcttttgggttgaacttatcagagggcggcccaaagagaac

SEQ ID NO: 62337 - DNA, 60 bp, Artificial
  Synthetic oligonucleotide
gagatcttgcttttgggttgaacttatcagagggcggcccaaagagaacacaatctggac

SEQ ID NO: 62338 - DNA, 60 bp, Artificial
  Synthetic oligonucleotide
attggtcaggatacagcgggagttttgttcagcatccagaactaaccggactggattgta

SEQ ID NO: 62339 - DNA, 60 bp, Artificial
  Synthetic oligonucleotide
gtcaggatacagcgggagttttgttcagcatccagaactaaccggactggattgtatgag

SEQ ID NO: 62340 - DNA, 60 bp, Artificial
  Synthetic oligonucleotide
aagagcactagtttaaggagcggttttgagatgatttgggatccaaacgggtggacagga

SEQ ID NO: 62341 - DNA, 60 bp, Artificial
  Synthetic oligonucleotide
gcactagtttaaggagcggttttgagatgatttgggatccaaacgggtggacaggaactg

SEQ ID NO: 62342 - DNA, 60 bp, Artificial
  Synthetic oligonucleotide
cttgatcggcttcgccgagatcagaagtccctaaagggaagaggcagcactctcggtctg

SEQ ID NO: 62343 - DNA, 60 bp, Artificial
  Synthetic oligonucleotide
ggctttcaccgaagagggagcaattgttggcgaaatttcaccattgccttcccttccagg

SEQ ID NO: 62344 - DNA, 59 bp, Artificial
  Synthetic oligonucleotide
ttcaccgaagagggagcaattgttggcgaaatttcaccattgccttctcttccaggaca

SEQ ID NO: 62345 - DNA, 60 bp, Artificial
  Synthetic oligonucleotide
ttcaccgaagagggagcaattgttggcgaaatttcaccattgccttctcttccaggacat

SEQ ID NO: 62346 - DNA, 54 bp, Artificial
  Synthetic oligonucleotide
gaacggctacattgagggcaagctttctcaaatgtccaaagaagtaaatgctaa

SEQ ID NO: 62347 - DNA, 60 bp, Artificial
  Synthetic oligonucleotide
tctggagcccgggacctttgatcttggggggctatatgaagcaattgaggagtgcctgat

SEQ ID NO: 62348 - DNA, 60 bp, Artificial
  Synthetic oligonucleotide
cctggaacctgggacctttgatcttggggggctatatgaagcaattgaggagtgcctgat

SEQ ID NO: 62349 - DNA, 60 bp, Artificial
  Synthetic oligonucleotide
gcagtggagtgttcggtgacaatccgcgtcccaaagatggagagggcagctgtaatccag

SEQ ID NO: 62350 - DNA, 60 bp, Artificial
  Synthetic oligonucleotide
aaagacaagaccaatcctgtcacctctgactaaggggattttaggatttgtgttcacgct

SEQ ID NO: 62351 - DNA, 60 bp, Artificial
  Synthetic oligonucleotide
acatggaacctttggccctgtccactttagaaaccaagtcaaaatacgccgaagagtcga

SEQ ID NO: 62352 - DNA, 53 bp, Artificial
  Synthetic oligonucleotide
cagaaactgggaaactgttaaaattcagtggtcccagaaccctacaatgctat

SEQ ID NO: 62353 - DNA, 60 bp, Artificial
  Synthetic oligonucleotide
aggagatgtttttgtcataagagagccttttatatcatgttctcacttggaatgcagaac

SEQ ID NO: 62354 - DNA, 60 bp, Artificial
  Synthetic oligonucleotide
gccagatctgtatgattacaaagagaatagattcatcgagattggagtgacaaggagaga

SEQ ID NO: 62355 - DNA, 60 bp, Artificial
  Synthetic oligonucleotide
aggagtaacggcatcatgctcccataaggggaaaagcagtttttacagaaatttgctatg

SEQ ID NO: 62356 - DNA, 60 bp, Artificial
  Synthetic oligonucleotide
ttacaaagagaatagattcatcgagattggagtgacaaggagggaagttcacatatacta

SEQ ID NO: 62357 - DNA, 60 bp, Artificial
  Synthetic oligonucleotide
atacttactgacagccagacagcgaccaaaagaattcgaatggccatcaattagtgtcga

SEQ ID NO: 62358 - DNA, 60 bp, Artificial
  Synthetic oligonucleotide
tgggctatatacacaaaagacaacagcataagaattggttccaaaggagatgtgtttgtc

SEQ ID NO: 62359 - DNA, 60 bp, Artificial
  Synthetic oligonucleotide
ccggcaattcatctctttgtcccatccgtgggtgggctatatacagcaaagacaatagca

SEQ ID NO: 62360 - DNA, 60 bp, Artificial
  Synthetic oligonucleotide
ccggcaattcatctctttgtcccatccgtgggtgggctatatacagcaaagacaatggca

SEQ ID NO: 62361 - DNA, 60 bp, Artificial
  Synthetic oligonucleotide
cttaatgcatcctgtgcagcaatggatgattttcaattgatcccaatgataagcaaatgt

SEQ ID NO: 62362 - DNA, 53 bp, Artificial
  Synthetic oligonucleotide
cttaatgcatcctgtgcagcaatggatgattttcaattgatcccgatgataag

SEQ ID NO: 62363 - DNA, 60 bp, Artificial
  Synthetic oligonucleotide
gacacaataatgtttgaggcaaatggaaatctaatagcgccatggtatgctttcgcacta

SEQ ID NO: 62364 - DNA, 55 bp, Artificial
  Synthetic oligonucleotide
ttggtcaatacctatcagtggatcatcagaaactgggagactgttaaaattcaat

SEQ ID NO: 62365 - DNA, 55 bp, Artificial
  Synthetic oligonucleotide
ttggtcaatacctatcagtggatcatcagaaactgggagactgttaaaatccaat

SEQ ID NO: 62366 - DNA, 60 bp, Artificial
  Synthetic oligonucleotide
gccctgagtcagtgttgatcaatacctatcagtggatcatcagaaactgggagactgtta

SEQ ID NO: 62367 - DNA, 51 bp, Artificial
  Synthetic oligonucleotide
ggtcaatacctatcagtggatcatcagaaactgggagactgttaaaattca

SEQ ID NO: 62368 - DNA, 57 bp, Artificial
  Synthetic oligonucleotide
ggtccagacaatggagcagtggctgtactaaaatacaacggcataataactgaaacc

SEQ ID NO: 62369 - DNA, 60 bp, Artificial
  Synthetic oligonucleotide
ctgagagatctaatgtcgcagtctcgcactcgcgagatactgacaaaaaccactgtggac

SEQ ID NO: 62370 - DNA, 60 bp, Artificial
  Synthetic oligonucleotide
cctatgtttctatatgtgagaacaaacgggacctcaaaaattaaaatgaaatggggaatg

SEQ ID NO: 62371 - DNA, 50 bp, Artificial
  Synthetic oligonucleotide
atggaacctcaaaaattaaaatgaaatggggaatggagatgaggcgttgc

SEQ ID NO: 62372 - DNA, 60 bp, Artificial
  Synthetic oligonucleotide
ccgatcttgaggctctcatggaatggctaaagacaagaccaatcctgtcacctctgacta

SEQ ID NO: 62373 - DNA, 60 bp, Artificial
  Synthetic oligonucleotide
gaggagttcacaatggttgggaaaagggcaacagctatactcagaaaagcaaccaggaga

SEQ ID NO: 62374 - DNA, 60 bp, Artificial
  Synthetic oligonucleotide
ataagagtgcacgaagggtacgaagaatttacaatggttgggaaaagggcaacagctata

SEQ ID NO: 62375 - DNA, 60 bp, Artificial
  Synthetic oligonucleotide
agtggaggaaacaccaatcaacagagggcatctgcgggccaaatcagcatacaacctacg

SEQ ID NO: 62376 - DNA, 60 bp, Artificial
  Synthetic oligonucleotide
ggaggaaacaccaatcaacagagggcatctgcgggccaaatcagcatacaacctacgttc

SEQ ID NO: 62377 - DNA, 60 bp, Artificial
  Synthetic oligonucleotide
taatggatcccaacactgtgtcaagctttcaggtagattgcttcctttggcatgtccgca

SEQ ID NO: 62378 - DNA, 60 bp, Artificial
  Synthetic oligonucleotide
ggatcccaacactgtgtcaagctttcaggtagattgcttcctttggcatgtccgcaaaca

SEQ ID NO: 62379 - DNA, 60 bp, Artificial
  Synthetic oligonucleotide
cgacgtgtcaaacacccaagggtgccataaacaccagcctcccatttcagaatatacatc

SEQ ID NO: 62380 - DNA, 60 bp, Artificial
  Synthetic oligonucleotide
aatatacatccagtcacaattggagaatgtccaaaatatgtcaaaagcacaaaattgaga

SEQ ID NO: 62381 - DNA, 60 bp, Artificial
  Synthetic oligonucleotide
cgtgtcaaacacccaagggtgccataaacaccagcctcccatttcagaatatacatccag

SEQ ID NO: 62382 - DNA, 60 bp, Artificial
  Synthetic oligonucleotide
gcgacttgtcaaacacccaagggtgccataaacaccagcctcccatttcagaatattcat

SEQ ID NO: 62383 - DNA, 60 bp, Artificial
  Synthetic oligonucleotide
cgttaaggacagaagcccttatagggccttaatgagctgccctgtcggtgaagctccgtc

SEQ ID NO: 62384 - DNA, 60 bp, Artificial
  Synthetic oligonucleotide
caagtgggactgttaaggacagaagcccttatagggccttaatgagctgccctgtcggtg

SEQ ID NO: 62385 - DNA, 60 bp, Artificial
  Synthetic oligonucleotide
aatgacaagcattcaagtgggactgttaaggacagaagcccttatagggccttaatgagc

SEQ ID NO: 62386 - DNA, 60 bp, Artificial
  Synthetic oligonucleotide
ttaaatgacaagcattcaaacggaaccgttaaggacagaagcccttatagggccttaatg

SEQ ID NO: 62387 - DNA, 60 bp, Artificial
  Synthetic oligonucleotide
cactgggaatacggagggaagaacatcagacatgagggcagaaatcataaggatgatgga

SEQ ID NO: 62388 - DNA, 60 bp, Artificial
  Synthetic oligonucleotide
tcccataaggggaaaagcagtttttacagaaatttgctatggctgacggagaagaatggc

SEQ ID NO: 62389 - DNA, 60 bp, Artificial
  Synthetic oligonucleotide
ctaaggaatctaatgtcgcagtctcgcactcgcgagatactcacaaaaaccaccgtggac

SEQ ID NO: 62390 - DNA, 60 bp, Artificial
  Synthetic oligonucleotide
taatctcaatatggattagccactcaattcaaattggaaatcaaaacaagcctgaaacat

SEQ ID NO: 62391 - DNA, 60 bp, Artificial
  Synthetic oligonucleotide
ttcactgggaatgcggagggaagaacatcagacatgagggcagaaatcataaggatgatg

SEQ ID NO: 62392 - DNA, 60 bp, Artificial
  Synthetic oligonucleotide
gaggtcaagcagggagaatgaactattactggactttgctagaacccggagacaaaataa

SEQ ID NO: 62393 - DNA, 60 bp, Artificial
  Synthetic oligonucleotide
aagaggtcaagcagggagaatgaactattactggactttgctagaacccggagacaaaat

SEQ ID NO: 62394 - DNA, 60 bp, Artificial
  Synthetic oligonucleotide
catttatgcaagccttacagctattgtttgaagtggaacaagagataagaactttctcgt

SEQ ID NO: 62395 - DNA, 60 bp, Artificial
  Synthetic oligonucleotide
tttatgcaagccttacagctattgtttgaagtggaacaagagataagaactttctcgttt

SEQ ID NO: 62396 - DNA, 60 bp, Artificial
  Synthetic oligonucleotide
tgcatgtcatgatggcatgggctggctaacaatcggaatttctggtccagatgatggagc

SEQ ID NO: 62397 - DNA, 60 bp, Artificial
  Synthetic oligonucleotide
aagatgagtcttctaaccgaggtcgaaacgtatgttctctctatcgttccgtcaggcccc

SEQ ID NO: 62398 - DNA, 60 bp, Artificial
  Synthetic oligonucleotide
gaccactcttaatagatggaactgcatcactgagccctggaatgatgatgggcatgttca

SEQ ID NO: 62399 - DNA, 60 bp, Artificial
  Synthetic oligonucleotide
ataacgtttcatggggccaaagaggtgtcactaagctactcaactggtgcacttgccagt

SEQ ID NO: 62400 - DNA, 60 bp, Artificial
  Synthetic oligonucleotide
ctactcaactggtgcacttgccagttgcatgggactcatatacaacagaatgggaacagt

SEQ ID NO: 62401 - DNA, 50 bp, Artificial
  Synthetic oligonucleotide
agcaaaagcaggtagatattgaaagatgagccttctaaccgaggtcgaaa

SEQ ID NO: 62402 - DNA, 60 bp, Artificial
  Synthetic oligonucleotide
atggaaatggggatccgaataatatggatagagctgtcaaattatacaagaagctcaaaa

SEQ ID NO: 62403 - DNA, 60 bp, Artificial
  Synthetic oligonucleotide
gaaatggggatccgaataatatggatagagctgtcaaattatacaagaagctcaaaagag

SEQ ID NO: 62404 - DNA, 60 bp, Artificial
  Synthetic oligonucleotide
aagctcaaaagagaaataacgtttcatggggccaaagaggtgtcactaagctactcaact

SEQ ID NO: 62405 - DNA, 60 bp, Artificial
  Synthetic oligonucleotide
ccgtcaccttaaatacggtttgaaaagaggtccttctacggaaggagtgcctgagtccat

SEQ ID NO: 62406 - DNA, 60 bp, Artificial
  Synthetic oligonucleotide
tttcaaatgcatttaccgtcaccttaaatacggtttgaaaagaggtccttctacggaagg

SEQ ID NO: 62407 - DNA, 60 bp, Artificial
  Synthetic oligonucleotide
cttgaaaatttgcaggcttaccaaaaacggatgggagtgcagatacagcgattcaagtga

SEQ ID NO: 62408 - DNA, 60 bp, Artificial
  Synthetic oligonucleotide
tacagctaaggccatggaacagatggccggatcgagtgaacaggcagcggaggccatgga

SEQ ID NO: 62409 - DNA, 60 bp, Artificial
  Synthetic oligonucleotide
gtgctggctagcactacagctaaggccatggaacagatggccggatcgagtgaacaggca

SEQ ID NO: 62410 - DNA, 60 bp, Artificial
  Synthetic oligonucleotide
gaccacagaagcagcttttggtctagtgtgtgccacttgtgagcagattgctgactcaca

SEQ ID NO: 62411 - DNA, 60 bp, Artificial
  Synthetic oligonucleotide
tgggaacagtgaccacagaagcagcttttggtctagtgtgtgccacttgtgagcagattg

SEQ ID NO: 62412 - DNA, 60 bp, Artificial
  Synthetic oligonucleotide
ctggtgcacttgccagttgcatgggactcatatacaacagaatgggaacagtgaccacag

SEQ ID NO: 62413 - DNA, 60 bp, Artificial
  Synthetic oligonucleotide
cggaaggagtgcctgagtccatgagggaagaatatcaacaggaacagcagagtgctgtgg

SEQ ID NO: 62414 - DNA, 60 bp, Artificial
  Synthetic oligonucleotide
ctacggaaggagtgcctgagtccatgagggaagaatatcaacaggaacagcagagtgctg

SEQ ID NO: 62415 - DNA, 60 bp, Artificial
  Synthetic oligonucleotide
tctgcggtactgagagggtttctaattctaggaaaggaaaacaaaagatatggaccagca

SEQ ID NO: 62416 - DNA, 60 bp, Artificial
  Synthetic oligonucleotide
acgcaggtgcattaacagaagacccagaagaggggacggctggagtggaatctgcggtac

SEQ ID NO: 62417 - DNA, 60 bp, Artificial
  Synthetic oligonucleotide
tagggcaaggagacgtggtgttggtgatgaaacggaaacgggactctagcatacttactg

SEQ ID NO: 62418 - DNA, 60 bp, Artificial
  Synthetic oligonucleotide
gatgtgggagatcaacggtcctgagtcagtgctcgtcaacacatatcagtggatcattag

SEQ ID NO: 62419 - DNA, 60 bp, Artificial
  Synthetic oligonucleotide
cgcttcttgagagttcgagatcagcgggggaatgtactcctatctcctgaggaggttagc

SEQ ID NO: 62420 - DNA, 60 bp, Artificial
  Synthetic oligonucleotide
ctcgcaagaggattgcatgataaaggctgtccgaggtgatctgaattttgtaaacagagc

SEQ ID NO: 62421 - DNA, 60 bp, Artificial
  Synthetic oligonucleotide
cagagcaaaccaacgactgaaccctatgcatcaactcctgaggcacttccagaaggatgc

SEQ ID NO: 62422 - DNA, 60 bp, Artificial
  Synthetic oligonucleotide
cgtattcaactacaataaggtaaccaaaaggctaacagtcctcggaaaagacgcaggtgc

SEQ ID NO: 62423 - DNA, 60 bp, Artificial
  Synthetic oligonucleotide
aaggcatgggacatttggtcccgtctactttcgaaatcaagttaaaatacgccgaagagt

SEQ ID NO: 62424 - DNA, 60 bp, Artificial
  Synthetic oligonucleotide
gccgaagagttgacataaacccaggtcatgcagatctcagtgcaagggaggcacaagatg

SEQ ID NO: 62425 - DNA, 60 bp, Artificial
  Synthetic oligonucleotide
aggattgtaagattgcccctttaatggtggcatacatgttggaaagagaactggttcgca

SEQ ID NO: 62426 - DNA, 60 bp, Artificial
  Synthetic oligonucleotide
ggttcgcaaaaccagattcctaccggtagcaggaggaacaagcagtgtatacattgaagt

SEQ ID NO: 62427 - DNA, 60 bp, Artificial
  Synthetic oligonucleotide
gcacttgactcaaggaacctgctgggaacagatgtacactccaggtggaggggtgaagaa

SEQ ID NO: 62428 - DNA, 60 bp, Artificial
  Synthetic oligonucleotide
ttgatcattgctgccaggaacattgttaggagagctactgtatcggcagatccactggcg

SEQ ID NO: 62429 - DNA, 60 bp, Artificial
  Synthetic oligonucleotide
gtgagaacactgtttcagcaaatgcgtgatgtactagggacgtttgatactgcccaaata

SEQ ID NO: 62430 - DNA, 60 bp, Artificial
  Synthetic oligonucleotide
agccatttcagtctctagtacctaaagcagcccgaagtaaatatagtgggtttgtgagaa

SEQ ID NO: 62431 - DNA, 60 bp, Artificial
  Synthetic oligonucleotide
acgagtacatgaggggtatgaggaattcacaatggttgggaggagagcaacagctatatt

SEQ ID NO: 62432 - DNA, 60 bp, Artificial
  Synthetic oligonucleotide
gagtggaagggacgaacagtcaattgctgaagcgatcatagtagcaatggtgttctcgca

SEQ ID NO: 62433 - DNA, 60 bp, Artificial
  Synthetic oligonucleotide
acaagtgggtcatctgttaaaaaggaagaagaagtgctcacaggcaacctccaaacacta

SEQ ID NO: 62434 - DNA, 60 bp, Artificial
  Synthetic oligonucleotide
ctggcgtcactattggaaatgtgtcatagcacacaaattggtgggacaagaatggtcgac

SEQ ID NO: 62435 - DNA, 59 bp, Artificial
  Synthetic oligonucleotide
cgtggatatatgcaaagcagcaatgggtttgagaatcagctcctcctttagctttggag

SEQ ID NO: 62436 - DNA, 60 bp, Artificial
  Synthetic oligonucleotide
cccctagccataacttggtggaataggaatggaccgacaacaaatacagttcactatccg

SEQ ID NO: 62437 - DNA, 60 bp, Artificial
  Synthetic oligonucleotide
aggacaaacactttggagtaagacaaatgatgctgggtcggatagggtgatggtatcacc

SEQ ID NO: 62438 - DNA, 60 bp, Artificial
  Synthetic oligonucleotide
atcacagccgacaggaggataatggagatgattcctgagagaaatgaacaaggacaaaca

SEQ ID NO: 62439 - DNA, 60 bp, Artificial
  Synthetic oligonucleotide
cccgctctcagaatgaaatggatgatggcaatgaaatacccgatcacagccgacaggagg

SEQ ID NO: 62440 - DNA, 60 bp, Artificial
  Synthetic oligonucleotide
cactgtggaccatatggcaataatcagaaagtacacatcaggaagacaagagaagaaccc

SEQ ID NO: 62441 - DNA, 60 bp, Artificial
  Synthetic oligonucleotide
gccccattccttgatcggcttcgccgagatcagaagtccctaaagggaagaggtagcact

SEQ ID NO: 62442 - DNA, 60 bp, Artificial
  Synthetic oligonucleotide
cagtgattatgagggacggctgatccaaaacagcttaacaatagagagaatggtgctctc

SEQ ID NO: 62443 - DNA, 60 bp, Artificial
  Synthetic oligonucleotide
caatgattatgagggacgactgatccaaaacagcttaacaatagagagaatggtgctctc

SEQ ID NO: 62444 - DNA, 60 bp, Artificial
  Synthetic oligonucleotide
cagtgattatgagggacggttgatccaaaacagcttaacaatagagagaatggtgctctc

SEQ ID NO: 62445 - DNA, 60 bp, Artificial
  Synthetic oligonucleotide
cttagtgaaacaggatgtagtggcaatgactgattggtcagggtacagcggaagtttcgt

SEQ ID NO: 62446 - DNA, 60 bp, Artificial
  Synthetic oligonucleotide
ctcttccaggacatactaatgaggatgtcaaaaatgcaattgggattctcatcgggggac

SEQ ID NO: 62447 - DNA, 60 bp, Artificial
  Synthetic oligonucleotide
tccaggacatactaatgaggatgtcaaaaatgcaattggggtcctcatcggaggacttga

SEQ ID NO: 62448 - DNA, 60 bp, Artificial
  Synthetic oligonucleotide
tgccttctcttccaggacatactaatgaggatgtcaaaaatgcaattggggtcctcatcg

SEQ ID NO: 62449 - DNA, 60 bp, Artificial
  Synthetic oligonucleotide
gactctgctggaacccgaggacacaataatatttgaggcaaatggaaatctaatagcgcc

SEQ ID NO: 62450 - DNA, 60 bp, Artificial
  Synthetic oligonucleotide
gactctgctggaacccggggacacattaatatttgaggcaaatggaaatctaatagcgcc

SEQ ID NO: 62451 - DNA, 60 bp, Artificial
  Synthetic oligonucleotide
gactctgctggaacccggagatacaataatatttgaggcaaatggaaatctaatagcgcc

SEQ ID NO: 62452 - DNA, 60 bp, Artificial
  Synthetic oligonucleotide
ctgctggaacccgaggacacaataatatttgaggcaaatggaaatctaatagcgccatgg

SEQ ID NO: 62453 - DNA, 60 bp, Artificial
  Synthetic oligonucleotide
gactctgctggaacccggagacacaataatatttgaggcaaatggaaatctaatagcgcc

SEQ ID NO: 62454 - DNA, 60 bp, Artificial
  Synthetic oligonucleotide
gtgcgaatggaccaggcgatcatgggaaagaacatcatactgaaagcgaacttcagtgtg

SEQ ID NO: 62455 - DNA, 60 bp, Artificial
  Synthetic oligonucleotide
ttacaaggagaatagattcatcgagattggagtgacaaggagagaagttcacatatacta

SEQ ID NO: 62456 - DNA, 60 bp, Artificial
  Synthetic oligonucleotide
cccagacaccggcacagtgatgtgtgtgtgcagagacaattggcatggttcgaatcgacc

SEQ ID NO: 62457 - DNA, 60 bp, Artificial
  Synthetic oligonucleotide
tgaagcaatatgatagtgacgaacctgaattaaggtcactttcaagttggatccagaatg

SEQ ID NO: 62458 - DNA, 60 bp, Artificial
  Synthetic oligonucleotide
ggcacatttgaattcacgagctttttctatcgttatgggtttgttgccaatttcagcatg

SEQ ID NO: 62459 - DNA, 60 bp, Artificial
  Synthetic oligonucleotide
acctttgaattcacgagctttttctatcgttatgggtttgttgccaatttcagcatggag

SEQ ID NO: 62460 - DNA, 60 bp, Artificial
  Synthetic oligonucleotide
ttttttctatcgttatgggtttgttgccaatttcagcatggagcttcccagttttggggt

SEQ ID NO: 62461 - DNA, 60 bp, Artificial
  Synthetic oligonucleotide
tttctatcgttatgggtttgttgccaatttcagcatggagcttcccagttttggggtgtc

SEQ ID NO: 62462 - DNA, 60 bp, Artificial
  Synthetic oligonucleotide
agctacatacgcagacacaatatgtataggctaccatgccaacaactcaacagacactgt

SEQ ID NO: 62463 - DNA, 60 bp, Artificial
  Synthetic oligonucleotide
cagctacagatgcagacacaatatgtataggctaccatgcgaacaattcaaccgacactg

SEQ ID NO: 62464 - DNA, 60 bp, Artificial
  Synthetic oligonucleotide
ctacagatgcagacacaatatgtataggctaccatgcaaacaactcaaccgacactgttg

SEQ ID NO: 62465 - DNA, 60 bp, Artificial
  Synthetic oligonucleotide
gctacatatgcagacacaatatgtataggctaccatgcgaacaactcaaccgacactgtt

SEQ ID NO: 62466 - DNA, 60 bp, Artificial
  Synthetic oligonucleotide
ctacagatgcagacacaatatgtataggctaccatgcgaacaattcaaccgacactgttg

SEQ ID NO: 62467 - DNA, 60 bp, Artificial
  Synthetic oligonucleotide
ctacagacgcagacacaatatgtataggctaccatgcgaacaactcaaccgacactgttg

SEQ ID NO: 62468 - DNA, 60 bp, Artificial
  Synthetic oligonucleotide
tgcagatgcagacacaatatgtataggctaccatgcgaacaattcaaccgacactgttga

SEQ ID NO: 62469 - DNA, 60 bp, Artificial
  Synthetic oligonucleotide
gcagatgcagacacaatatgtataggctaccatgcgaacaattcaaccgacactgttgac

SEQ ID NO: 62470 - DNA, 55 bp, Artificial
  Synthetic oligonucleotide
ttggtcaatacctatcagtggatcatcagaaactgggagactgtcaaaattcagt

SEQ ID NO: 62471 - DNA, 60 bp, Artificial
  Synthetic oligonucleotide
ctggactagtgggagcagcatttctttttgtggcgttaatagtgatactgcagactggtc

SEQ ID NO: 62472 - DNA, 60 bp, Artificial
  Synthetic oligonucleotide
ctggactagtgggagcagcatttctttttgtggcgtgaatggtgatactgcaaattggtc

SEQ ID NO: 62473 - DNA, 60 bp, Artificial
  Synthetic oligonucleotide
gaacggctacattgagggcaagctttctcaaatgtctaaagaagtaaatgctagaattga

SEQ ID NO: 62474 - DNA, 60 bp, Artificial
  Synthetic oligonucleotide
catgctcatgcccaagcagaaagtggcaggccctctttgtgtcagaatggaccaggcgat

SEQ ID NO: 62475 - DNA, 60 bp, Artificial
  Synthetic oligonucleotide
ggagcagacggagtaaaggggttttcatacaggtatggtaatggtgtttggataggaagg

SEQ ID NO: 62476 - DNA, 60 bp, Artificial
  Synthetic oligonucleotide
tcatcggagggcttgagtggaatggtaacacggttcgagtctctgaaaatctacagagat

SEQ ID NO: 62477 - DNA, 65 bp, Artificial
  Synthetic oligonucleotide
gaagatgacagaaagtagctttgaacaaataacttttatgcaagccttacaactattgcttgaag

SEQ ID NO: 62478 - DNA, 60 bp, Artificial
  Synthetic oligonucleotide
cagattttggcgatctattcaactgccgccagttcactggtactgttggtctccctgggg

SEQ ID NO: 62479 - DNA, 60 bp, Artificial
  Synthetic oligonucleotide
gaatattcatccaatcactattggagaatgtccaaaatatgtcaaaagcacaagactaag

SEQ ID NO: 62480 - DNA, 60 bp, Artificial
  Synthetic oligonucleotide
gacttgtcaaacacccaagggtgccataaacaccagcctcccatttcagaatattcatcc

SEQ ID NO: 62481 - DNA, 60 bp, Artificial
  Synthetic oligonucleotide
aggatttaccagattttggcgatctattcaactgccgccagttcattggtactgttggtc

SEQ ID NO: 62482 - DNA, 60 bp, Artificial
  Synthetic oligonucleotide
cactattggagaatgtccaaaatatgtcaaaagcacaagactaagaatggccacaggatt

SEQ ID NO: 62483 - DNA, 60 bp, Artificial
  Synthetic oligonucleotide
cagattttggcgatctattcaactgccgccagttcattggtactgttggtctccctgggg

SEQ ID NO: 62484 - DNA, 60 bp, Artificial
  Synthetic oligonucleotide
ccagattttggcgatctattcaactgccgccagttcactggtactgttggtctccctggg

SEQ ID NO: 62485 - DNA, 60 bp, Artificial
  Synthetic oligonucleotide
gtatgcagggacaactggcatggttcaaatcgaccttgggtgtcttttaatcaaaacctg

SEQ ID NO: 62486 - DNA, 60 bp, Artificial
  Synthetic oligonucleotide
gtgtgcagggacaactggcatggttcaaatcgaccttgggtgtcttttaatcaaaacctg

SEQ ID NO: 62487 - DNA, 60 bp, Artificial
  Synthetic oligonucleotide
ccaaagtacgtaaggagtacaaaattaaggatggttacaggactaaggaacatcccatcc

SEQ ID NO: 62488 - DNA, 60 bp, Artificial
  Synthetic oligonucleotide
agggatttgagatgatttgggatcctaatggatggacggataccgatagtaatttcttag

SEQ ID NO: 62489 - DNA, 55 bp, Artificial
  Synthetic oligonucleotide
ggggatggactggaatgatagatggatggtatggttatcatcatcagaatgaaca

SEQ ID NO: 62490 - DNA, 60 bp, Artificial
  Synthetic oligonucleotide
gggatatgaggagttcacaatggttgggaaaagggcaacagctatactcagaaaagcaac

SEQ ID NO: 62491 - DNA, 60 bp, Artificial
  Synthetic oligonucleotide
aaaccgaagtttctgccagatttgtatgattacaaggagaatagattcatcgagattgga

SEQ ID NO: 62492 - DNA, 60 bp, Artificial
  Synthetic oligonucleotide
aaaccaaagtttctgccagatttgtatgattacaaggagaatagattcatcgagattgga

SEQ ID NO: 62493 - DNA, 60 bp, Artificial
  Synthetic oligonucleotide
atcgggggacttgaatggaatgataacacagttcgagtctctgaaactctacagaaattc

SEQ ID NO: 62494 - DNA, 60 bp, Artificial
  Synthetic oligonucleotide
atcgggggacttgaatggaatgataacacagttcgaatctctgaaactctacagagattc

SEQ ID NO: 62495 - DNA, 60 bp, Artificial
  Synthetic oligonucleotide
atgtagtggctatgactgattggtcagggtacagcggaagtttcgttcaacatcctgagc

SEQ ID NO: 62496 - DNA, 60 bp, Artificial
  Synthetic oligonucleotide
ctggaaagaataccgatcttgaggctctcatggaatggctaaagacaagaccaatcctgt

SEQ ID NO: 62497 - DNA, 60 bp, Artificial
  Synthetic oligonucleotide
gctggaaagaataccgatcttgaggctctcatggaatggctaaagacaagaccaatcctg

SEQ ID NO: 62498 - DNA, 60 bp, Artificial
  Synthetic oligonucleotide
gtcaagagactggttcatgctcatgcccaagcagaaagtggcaggccctctttgtgtcag

SEQ ID NO: 62499 - DNA, 60 bp, Artificial
  Synthetic oligonucleotide
agggaaggcgaaagaccaatttatacggattcatcataaaaggaagatcccacttaagaa

SEQ ID NO: 62500 - DNA, 60 bp, Artificial
  Synthetic oligonucleotide
gcagtggggttttcggtgacaatccgcgtcccaaagatggaacaggcagctgtggtccag

SEQ ID NO: 62501 - DNA, 60 bp, Artificial
  Synthetic oligonucleotide
gcagtggggtgttcggtgacaatccgcgtcccaaagatggaaaaggcagctgtgatccag

SEQ ID NO: 62502 - DNA, 60 bp, Artificial
  Synthetic oligonucleotide
gcagtggggttttcggtgacaatccgcgtcccaaagatggaaaaggcagctgtgatccag

SEQ ID NO: 62503 - DNA, 60 bp, Artificial
  Synthetic oligonucleotide
tcgtgtattgaaacgatggaggttgttcagcaaacaagagtggacaaactgacacaaggc

SEQ ID NO: 62504 - DNA, 60 bp, Artificial
  Synthetic oligonucleotide
gtaggtgatttgaagcaatatgatagtgatgaaccagaattgaggtcgcttgcaagttgg

SEQ ID NO: 62505 - DNA, 60 bp, Artificial
  Synthetic oligonucleotide
gatttgggatcctaatggatggacagataccgacagtgatttctcagtgaaacaggatgt

SEQ ID NO: 62506 - DNA, 60 bp, Artificial
  Synthetic oligonucleotide
tcccataaggggaaaagcagtttttacagaaatttgctatggctgacggagaaaaatggc

SEQ ID NO: 62507 - DNA, 60 bp, Artificial
  Synthetic oligonucleotide
cctgccgcaacagcattggccaacacaatagaagtgttcagatcaaatggcctcacggcc

SEQ ID NO: 62508 - DNA, 60 bp, Artificial
  Synthetic oligonucleotide
agcctgctgcaacagcattggccaacacaatagaagtgttcagattaaacggcctcacgg

SEQ ID NO: 62509 - DNA, 60 bp, Artificial
  Synthetic oligonucleotide
ccagcctgccgcaacagcattggccaacacaatagaagtgttcagatcaaatggcctcac

SEQ ID NO: 62510 - DNA, 60 bp, Artificial
  Synthetic oligonucleotide
ctctgaataggaaccagcctgctgcaacagcattggccaacacaatagaagtgttcagat

SEQ ID NO: 62511 - DNA, 60 bp, Artificial
  Synthetic oligonucleotide
ccaacctgctgcaacagcattggccaacacaatagaagtgttcagatcaaatggcctcac

SEQ ID NO: 62512 - DNA, 60 bp, Artificial
  Synthetic oligonucleotide
ggagataacattccatggggccaaagaaatagcgctcagttattctgctggtgcacttgc

SEQ ID NO: 62513 - DNA, 60 bp, Artificial
  Synthetic oligonucleotide
ctttgaaaaagtcgaaaggttaaaacatggaacctttggccctgtacactttagaaacca

SEQ ID NO: 62514 - DNA, 60 bp, Artificial
  Synthetic oligonucleotide
cataaggggaaaagcagtttttacagaaatttgctatggctgacggagaaaaatggctcg

SEQ ID NO: 62515 - DNA, 60 bp, Artificial
  Synthetic oligonucleotide
tcccataaggggaaaagcagtttttacagaaatttgctatggctgacggagaaagatggc

SEQ ID NO: 62516 - DNA, 60 bp, Artificial
  Synthetic oligonucleotide
gcatcatgctcccataaggggaaaagcagtttttacagaaatttgctatggctgacggag

SEQ ID NO: 62517 - DNA, 60 bp, Artificial
  Synthetic oligonucleotide
ggcttcatgctcccataaggggaaatgcagtttttacagaaatttgctatggctgacgga

SEQ ID NO: 62518 - DNA, 60 bp, Artificial
  Synthetic oligonucleotide
caattaattccaatgataagcaaatgtagaactaaagagggaaggcgaaagaccaacttg

SEQ ID NO: 62519 - DNA, 60 bp, Artificial
  Synthetic oligonucleotide
tgagtcagtattgatcaatacatatcagtggatcatcagaaactgggagactgttaaaat

SEQ ID NO: 62520 - DNA, 60 bp, Artificial
  Synthetic oligonucleotide
actctcagctacagatgcagacacaatatgtataggctaccatgcgaacaactcaaccga

SEQ ID NO: 62521 - DNA, 60 bp, Artificial
  Synthetic oligonucleotide
agggactggttcatgctcatgcccaagcagaaagtggcaggccctctttgtatcagaatg

SEQ ID NO: 62522 - DNA, 60 bp, Artificial
  Synthetic oligonucleotide
gaccttgctagaacccggagacacaataatatttgaggcaaatggaaatctaatagcacc

SEQ ID NO: 62523 - DNA, 60 bp, Artificial
  Synthetic oligonucleotide
gcagcaatatgcactcacttggaagtatgcttcatgtattcagattttcatttcatcaat

SEQ ID NO: 62524 - DNA, 60 bp, Artificial
  Synthetic oligonucleotide
caatatgcactcacttggaagtatgcttcatgtattcagattttcatttcatcaatgagc

SEQ ID NO: 62525 - DNA, 60 bp, Artificial
  Synthetic oligonucleotide
ggacggctgatccaaaacagcttaacaatagagagaatggtgctctctgcttttgacgag

SEQ ID NO: 62526 - DNA, 60 bp, Artificial
  Synthetic oligonucleotide
ggacgactgatccaaaacagcttaacaatagagagaatggtgctctctgcttttgacgag

SEQ ID NO: 62527 - DNA, 60 bp, Artificial
  Synthetic oligonucleotide
gggacggctgatccaaaacagcttaacaatagagagaatggtgctctctgcttttgacga

SEQ ID NO: 62528 - DNA, 60 bp, Artificial
  Synthetic oligonucleotide
ggaagaacactgatcttgaggctctcatggaatggctaaagacaagaccaatcctgtcac

SEQ ID NO: 62529 - DNA, 60 bp, Artificial
  Synthetic oligonucleotide
gtcctgttgtgtgcatttacagctacatatgcagacacaatatgtataggctaccatgcg

SEQ ID NO: 62530 - DNA, 60 bp, Artificial
  Synthetic oligonucleotide
ggtcctgctatgtacatttacagctacatatgcagacacaatatgtataggctaccatgc

SEQ ID NO: 62531 - DNA, 60 bp, Artificial
  Synthetic oligonucleotide
agatcaatggccctgagtcagtgttggtcaatacctatcagtggatcatcagaaactggg

SEQ ID NO: 62532 - DNA, 60 bp, Artificial
  Synthetic oligonucleotide
agattaacggccctgagtcagtgttggtcaatacctatcagtggatcatcagaaactggg

SEQ ID NO: 62533 - DNA, 52 bp, Artificial
  Synthetic oligonucleotide
ttttatcgttatgggtttgttgccaatttcagcatggagcttcccagttttg

SEQ ID NO: 62534 - DNA, 60 bp, Artificial
  Synthetic oligonucleotide
cgttatgggtttgttgccaatttcagcatggaacttcctagttttggggtgtctggggtc

SEQ ID NO: 62535 - DNA, 60 bp, Artificial
  Synthetic oligonucleotide
tatcgttatgggtttgttgccaatttcagcatggagctccccagttttggggtgtctggg

SEQ ID NO: 62536 - DNA, 60 bp, Artificial
  Synthetic oligonucleotide
ctatttgaatggatgtcaatccgaccttacttttcttaaaagtgccagcacaaaatgcta

SEQ ID NO: 62537 - DNA, 60 bp, Artificial
  Synthetic oligonucleotide
ggtacttttgaattcacgagctttttctaccgttatgggtttgttgccaatttcagcatg

SEQ ID NO: 62538 - DNA, 60 bp, Artificial
  Synthetic oligonucleotide
gtacttttgaattcacgagctttttttatcgttatgggtttgttgccaatttcagcatgg

SEQ ID NO: 62539 - DNA, 53 bp, Artificial
  Synthetic oligonucleotide
ttttctaccgttatgggtttgttgccaatttcagcatggagcttcccagtttt

SEQ ID NO: 62540 - DNA, 60 bp, Artificial
  Synthetic oligonucleotide
agcagaaagacccaaagtaagaggtcaagcagggaggatgaactattactggaccttgct

SEQ ID NO: 62541 - DNA, 60 bp, Artificial
  Synthetic oligonucleotide
gaacttcctagttttggggtgtctggggtcaatgagtctgcagacatgagtattggagtc

SEQ ID NO: 62542 - DNA, 60 bp, Artificial
  Synthetic oligonucleotide
aagaaagaagagttctccgagatcatgaagatctgttccaccattgaagagctcagacgg

SEQ ID NO: 62543 - DNA, 60 bp, Artificial
  Synthetic oligonucleotide
gatcctgtcacctctgactaaggggattttagggtttgtgttcacgctcaccgtgcccag

SEQ ID NO: 62544 - DNA, 60 bp, Artificial
  Synthetic oligonucleotide
ccgatcctgtcacctctgactaaggggattttagggtttgtgttcacgctcaccgtgccc

SEQ ID NO: 62545 - DNA, 60 bp, Artificial
  Synthetic oligonucleotide
ggttggtcttggccagacggtgctgagttgccattcaccattgacaagtaatttgttcaa

SEQ ID NO: 62546 - DNA, 60 bp, Artificial
  Synthetic oligonucleotide
agcgctcagttattctgctggtgcacttgccagttgcatgggcctaatatacaacagaat

SEQ ID NO: 62547 - DNA, 60 bp, Artificial
  Synthetic oligonucleotide
gctcagttattctgctggtgcacttgccagttgtatgggcctcatatacaacaggatggg

SEQ ID NO: 62548 - DNA, 60 bp, Artificial
  Synthetic oligonucleotide
tagcgagtgggcatgactttgaaagagaaggatattctctggtcgggatagaccccttca

SEQ ID NO: 62549 - DNA, 60 bp, Artificial
  Synthetic oligonucleotide
gcagtagcgagtgggcatgactttgaaagagaaggatattctctggtcgggatagacccc

SEQ ID NO: 62550 - DNA, 60 bp, Artificial
  Synthetic oligonucleotide
cgagtgggcatgactttgaaagagaaggatattctctggtcgggatagaccccttcaaac

SEQ ID NO: 62551 - DNA, 60 bp, Artificial
  Synthetic oligonucleotide
caactatgcaggaattcaagctggagttgacaggttttatcgaacctgtaagctgctcgg

SEQ ID NO: 62552 - DNA, 60 bp, Artificial
  Synthetic oligonucleotide
caatcatgcaggaattcaagctggagttgacaggttttatcgaacctgtaagctgctcgg

SEQ ID NO: 62553 - DNA, 60 bp, Artificial
  Synthetic oligonucleotide
ctggaaggataaagaaagaagatttcgctgagatcatgaagatctgttccaccattgaag

SEQ ID NO: 62554 - DNA, 60 bp, Artificial
  Synthetic oligonucleotide
cctgtcacctctgactaaggggattttagggtttgtgttcacgctcaccgtgcccagtga

SEQ ID NO: 62555 - DNA, 60 bp, Artificial
  Synthetic oligonucleotide
ggggccaaagaagtagcgctcagttattctgctggtgcacttgccagttgcatgggcctc

SEQ ID NO: 62556 - DNA, 60 bp, Artificial
  Synthetic oligonucleotide
atggggaacgccagaatgcaactgaaatcagagcatccgttggaaaaatgattggtggaa

SEQ ID NO: 62557 - DNA, 60 bp, Artificial
  Synthetic oligonucleotide
atggggaacgccagaatgcaactgaaatcagagcatctgtcggaagaatgattggtggaa

SEQ ID NO: 62558 - DNA, 60 bp, Artificial
  Synthetic oligonucleotide
tagcagcaagacccaaggtgagaggtcaagcagggagaatgaactattactggacactaa

SEQ ID NO: 62559 - DNA, 60 bp, Artificial
  Synthetic oligonucleotide
aatgaatgcatggaaagtgtgaaaaatggaacttatgactatccaaaatattccgaagaa

SEQ ID NO: 62560 - DNA, 60 bp, Artificial
  Synthetic oligonucleotide
gtggggaagtgaagaatgatgatgttgaccagagtttgatcattgctgccaggaacattg

SEQ ID NO: 62561 - DNA, 60 bp, Artificial
  Synthetic oligonucleotide
aagagtacatgaggggtatgaggaattcacaatggttgggaggagagcaacagctatctt

SEQ ID NO: 62562 - DNA, 60 bp, Artificial
  Synthetic oligonucleotide
cctaaggctgccagaggtcaatacagtggatttgtgagaacactattccagcaaatgcgt

SEQ ID NO: 62563 - DNA, 60 bp, Artificial
  Synthetic oligonucleotide
tccttagacaaaatccaacggaggagcaagccgtggatatatgcaaagcagcaatgggtt

SEQ ID NO: 62564 - DNA, 60 bp, Artificial
  Synthetic oligonucleotide
gatgtgggagatcaacggtcctgagtcagtgctcgttaacacatatcaatggatcatcaa

SEQ ID NO: 62565 - DNA, 60 bp, Artificial
  Synthetic oligonucleotide
gaagagcaacagtatcggcagatccactggcatcactattggagatgtgtcacagcacac

SEQ ID NO: 62566 - DNA, 60 bp, Artificial
  Synthetic oligonucleotide
cgtagcaatggtgttctcgcaagaggattgcatgataaaggctgtccgaggtgatctgaa

SEQ ID NO: 62567 - DNA, 60 bp, Artificial
  Synthetic oligonucleotide
aagattaaagcatgggacctttggtcccgtccattttcgaaatcaagttaaaatacgccg

SEQ ID NO: 62568 - DNA, 60 bp, Artificial
  Synthetic oligonucleotide
acaagtggatcatctgttaaaagggaagaagaagtgcttacaggcaatctccaaacactg

SEQ ID NO: 62569 - DNA, 60 bp, Artificial
  Synthetic oligonucleotide
gcaaatgcgtgatgtgctggggacatttgatacagtccaaataataaagctgctaccatt

SEQ ID NO: 62570 - DNA, 60 bp, Artificial
  Synthetic oligonucleotide
agtattgcatttgactcaaggaacctgctgggaacagatgtacactccaggtggggaagt

SEQ ID NO: 62571 - DNA, 60 bp, Artificial
  Synthetic oligonucleotide
ttgggagactgtgaagatccaatggtctcaagaccccacaatgctatacaataagatgga

SEQ ID NO: 62572 - DNA, 60 bp, Artificial
  Synthetic oligonucleotide
tgctaccatttgcagcagcaccaccggttcagagtagaatgcagttctcttctctaactg

SEQ ID NO: 62573 - DNA, 60 bp, Artificial
  Synthetic oligonucleotide
agaaccccgctctcagaatgaaatggatgatggcaatgaaatatccgatcacagcagaca

SEQ ID NO: 62574 - DNA, 60 bp, Artificial
  Synthetic oligonucleotide
taactcccccgtatttaactacaataaggtaaccaaaaggctaacagtcctcggaaagga

SEQ ID NO: 62575 - DNA, 60 bp, Artificial
  Synthetic oligonucleotide
cccctagccgtaacttggtggaacaggaatggaccgacaacaagtacagtccactatccg

SEQ ID NO: 62576 - DNA, 60 bp, Artificial
  Synthetic oligonucleotide
cccatgcatcaactcctgaggcacttccagaaggatgcaaaagtgctgactcaaaattgg

SEQ ID NO: 62577 - DNA, 60 bp, Artificial
  Synthetic oligonucleotide
gtcgcaattgacaataacaaaagagaagaaagaggagctccaggattgtaagattgcccc

SEQ ID NO: 62578 - DNA, 60 bp, Artificial
  Synthetic oligonucleotide
aatgaactgagtaatcttgcaaaaggggagaaagctaacgtgttgatagggcaaggagac

SEQ ID NO: 62579 - DNA, 60 bp, Artificial
  Synthetic oligonucleotide
gagatctaatgtcgcagtctcgcacccgcgagatactgacaaaaaccactgtggaccata

SEQ ID NO: 62580 - DNA, 60 bp, Artificial
  Synthetic oligonucleotide
ctgatatgactccaagcacagagatgtcactaagaggggtgagggtcagtaaagcgggag

SEQ ID NO: 62581 - DNA, 60 bp, Artificial
  Synthetic oligonucleotide
gcattaactgattggtcagggtacagtggaagttttgtccaacatcctgaattaacagga

SEQ ID NO: 62582 - DNA, 60 bp, Artificial
  Synthetic oligonucleotide
aaagacaagaccaatcctgtcacctctgactaaggggattttagggtttgtgttcacgct

SEQ ID NO: 62583 - DNA, 60 bp, Artificial
  Synthetic oligonucleotide
aaagacaagatcaatcctgtcacctctgactaaggggattttagggtttgtgttcacgct

SEQ ID NO: 62584 - DNA, 59 bp, Artificial
  Synthetic oligonucleotide
tagctgacatgacccttgaggaaatgtcaagggattggttcatgctcatgcctaggcaa

SEQ ID NO: 62585 - DNA, 60 bp, Artificial
  Synthetic oligonucleotide
cctatgtttctatacgtgagaacaaacgggacctcaaaaattaaaatgaaatggggaatg

SEQ ID NO: 62586 - DNA, 60 bp, Artificial
  Synthetic oligonucleotide
cctatgtttttatacgtgaggacaaacgggacctcaaaaattaaaatgaaatggggaatg

SEQ ID NO: 62587 - DNA, 60 bp, Artificial
  Synthetic oligonucleotide
cctatgtttctatatgtgagaacaaacggaacctcaaaaattaaaatgaaatggggaatg

SEQ ID NO: 62588 - DNA, 60 bp, Artificial
  Synthetic oligonucleotide
cctatgtttctatacgtgagaacaaacggaacctcaaaaattaaaatgaaatggggaatg

SEQ ID NO: 62589 - DNA, 60 bp, Artificial
  Synthetic oligonucleotide
ggagcaaatggggtgaaggggttttcatttagatatggcaatggtgtttggataggaaga

SEQ ID NO: 62590 - DNA, 60 bp, Artificial
  Synthetic oligonucleotide
atggagcaaatggggtgaaggggttctcatttagatatggcaatggtgtttggataggaa

SEQ ID NO: 62591 - DNA, 60 bp, Artificial
  Synthetic oligonucleotide
atggagcaaatggggtgaaggggttttcatttagatatggcaatggtgtttggataggaa

SEQ ID NO: 62592 - DNA, 60 bp, Artificial
  Synthetic oligonucleotide
ggagcaaatggagtaaaggggttttcatttagatatggcaatggtgtttggataggaaga

SEQ ID NO: 62593 - DNA, 60 bp, Artificial
  Synthetic oligonucleotide
ggagcaaatggggtgaaggggttctcatttagatatggcaatggtgtttggataggaaga

SEQ ID NO: 62594 - DNA, 60 bp, Artificial
  Synthetic oligonucleotide
ggagcaaatggagtaaaggggttttcatttagatatggcaatggtgtttggataggaagg

SEQ ID NO: 62595 - DNA, 60 bp, Artificial
  Synthetic oligonucleotide
gatgacagagaatagtttcgagcaaataacatttatgcaagccttacaactattgcttga

SEQ ID NO: 62596 - DNA, 60 bp, Artificial
  Synthetic oligonucleotide
aatggatgtcaatccgactttgcttttcctgaaagtgccagcacaaaatgctataagcac

SEQ ID NO: 62597 - DNA, 60 bp, Artificial
  Synthetic oligonucleotide
tcccgtcaggccccctcaaagccgagatcgcacagagacttgaagatgtatttgctggaa

SEQ ID NO: 62598 - DNA, 60 bp, Artificial
  Synthetic oligonucleotide
cttaatgcatcctgtgcagcaatggatgattttcaattgatcccaatgataagtaaatgt

SEQ ID NO: 62599 - DNA, 60 bp, Artificial
  Synthetic oligonucleotide
ggggcaatcagcttctggatgtgttccaatgggtctttgcagtgtagaatatgcatctaa

SEQ ID NO: 62600 - DNA, 60 bp, Artificial
  Synthetic oligonucleotide
caatcagcttctggatgtgttccaatgggtctttgcagtgtagaatatgcatctgagacc

SEQ ID NO: 62601 - DNA, 60 bp, Artificial
  Synthetic oligonucleotide
tggggaggaaatggccacaaaggcagactacactcttgatgaggaaagcagggctaggat

SEQ ID NO: 62602 - DNA, 60 bp, Artificial
  Synthetic oligonucleotide
ggggaggaaatggccacaaaggcagactacactcttgatgaggaaagcagggctaggatc

SEQ ID NO: 62603 - DNA, 60 bp, Artificial
  Synthetic oligonucleotide
catcaggcaggaaatggccattaggggcctatgggattcctttcgtcagtccgaaagagg

SEQ ID NO: 62604 - DNA, 60 bp, Artificial
  Synthetic oligonucleotide
ttttttctaccgttatgggtttgttgccaatttcagcatggagcttcctagctttggagt

SEQ ID NO: 62605 - DNA, 60 bp, Artificial
  Synthetic oligonucleotide
ctaccgttatgggtttgttgccaatttcagcatggagcttcctagctttggagtatctgg

SEQ ID NO: 62606 - DNA, 60 bp, Artificial
  Synthetic oligonucleotide
ctttttctaccgttatgggtttgttgccaatttcagcatggagcttcctagctttggagt

SEQ ID NO: 62607 - DNA, 60 bp, Artificial
  Synthetic oligonucleotide
ggcgccaagccaacaatggtgaagatgcaacagccggtcttacccatattatgatttggc

SEQ ID NO: 62608 - DNA, 60 bp, Artificial
  Synthetic oligonucleotide
gttcgcactgggatggatcccagaatgtgctccttaatgcaaggttcaacacttcccaga

SEQ ID NO: 62609 - DNA, 60 bp, Artificial
  Synthetic oligonucleotide
gttcgcactgggatggatcccagaatgtgctccttaatgcagggttcaactctgcccaga

SEQ ID NO: 62610 - DNA, 60 bp, Artificial
  Synthetic oligonucleotide
cgaagggtacgaagaatttacaatggttgggaaaagggcaacagctatactcagaaaagc

SEQ ID NO: 62611 - DNA, 60 bp, Artificial
  Synthetic oligonucleotide
gggtacgaagaatttacaatggttgggaaaagggcaacagctatactcagaaaagcaacc

SEQ ID NO: 62612 - DNA, 60 bp, Artificial
  Synthetic oligonucleotide
taaatatctggaagaacatcccagcgcggggaaagatcctaagaaaactggaggacccat

SEQ ID NO: 62613 - DNA, 60 bp, Artificial
  Synthetic oligonucleotide
caaatatctggaagaacatcccagcgcggggaaagatcctaagaaaactggaggacccat

SEQ ID NO: 62614 - DNA, 53 bp, Artificial
  Synthetic oligonucleotide
caatcatgcaggaattcaagctggagttgacaggttttatcgaacctgtaagc

SEQ ID NO: 62615 - DNA, 60 bp, Artificial
  Synthetic oligonucleotide
atccaatcaggagttgacaggttttatcgaacctgtaagctactcggaattaacatgagc

SEQ ID NO: 62616 - DNA, 60 bp, Artificial
  Synthetic oligonucleotide
aaggattggttccaaaggagacatttttgtcatgagagagccattcatttcatgctctca

SEQ ID NO: 62617 - DNA, 60 bp, Artificial
  Synthetic oligonucleotide
atacagcaaagacaatagcataaggattggttccaaaggagacatttttgtcatgagaga

SEQ ID NO: 62618 - DNA, 60 bp, Artificial
  Synthetic oligonucleotide
cgctacctagctgacatgacccttgaggaaatgtcaagggattggttcatgctcatgcct

SEQ ID NO: 62619 - DNA, 60 bp, Artificial
  Synthetic oligonucleotide
cccaacgcggggaaagatcctaagaaaactggaggacccatatacaagagagtagatgga

SEQ ID NO: 62620 - DNA, 60 bp, Artificial
  Synthetic oligonucleotide
ccccagcgcggggaaagatcctaagaaaactggaggacccatatacaagagagtagatgg

SEQ ID NO: 62621 - DNA, 60 bp, Artificial
  Synthetic oligonucleotide
acaattggggaatgtccaaaatatgtcaaaagcacaaaattgagaatggctacaggacta

SEQ ID NO: 62622 - DNA, 60 bp, Artificial
  Synthetic oligonucleotide
tggagaatgtccaaaatatgtcaaaagcacaaaattgagaatggctacaggactaaggaa

SEQ ID NO: 62623 - DNA, 60 bp, Artificial
  Synthetic oligonucleotide
caattgggtcagaaatttgaggaaataaggtggctgattgaagaagtgcggcacaaattg

SEQ ID NO: 62624 - DNA, 60 bp, Artificial
  Synthetic oligonucleotide
ctggaaagaacaccgatcttgaggctctcatggaatggctaaagacaagaccaatcctgt

SEQ ID NO: 62625 - DNA, 60 bp, Artificial
  Synthetic oligonucleotide
cctacattgtagaaacaccaaatcctgagaatggaacatgttacccagggtatttcgctg

SEQ ID NO: 62626 - DNA, 60 bp, Artificial
  Synthetic oligonucleotide
catttacagctacatatgcagacacaatatgtataggctaccatgccaacaactcgactg

SEQ ID NO: 62627 - DNA, 60 bp, Artificial
  Synthetic oligonucleotide
catttacagctacatatgcagacacaatatgtataggctaccatgccaacaactcgaccg

SEQ ID NO: 62628 - DNA, 60 bp, Artificial
  Synthetic oligonucleotide
ctcaaccgacactgttgacacagtacttgagaagaatgtgacagtgacacactctgtcaa

SEQ ID NO: 62629 - DNA, 54 bp, Artificial
  Synthetic oligonucleotide
ctcaaccgacactgttgacacagtacttgagaagaatgtgacagtgacacactc

SEQ ID NO: 62630 - DNA, 60 bp, Artificial
  Synthetic oligonucleotide
tcaaccgacactgttgacacagtacttgagaagaatgtgacagtgacacactctgtcaac

SEQ ID NO: 62631 - DNA, 53 bp, Artificial
  Synthetic oligonucleotide
tcaaccgacactgttgacacagtacttgagaagaatgtgacagtgacacactc

SEQ ID NO: 62632 - DNA, 60 bp, Artificial
  Synthetic oligonucleotide
cctacattgtagaaacaccaaatcctgagaatggaacatgttacccagggtatttcgccg

SEQ ID NO: 62633 - DNA, 60 bp, Artificial
  Synthetic oligonucleotide
cccagtgctgggaaagatcctaagaaaactggaggacccatatatagaagagtagacgga

SEQ ID NO: 62634 - DNA, 60 bp, Artificial
  Synthetic oligonucleotide
tctgtgcctacttcgcgctacctagctgacatgacccttgaggaaatgtcaagggattgg

SEQ ID NO: 62635 - DNA, 60 bp, Artificial
  Synthetic oligonucleotide
gcatgaagggtacgaagaatttacactggttgggaaaagggcaacagctatactcagaaa

SEQ ID NO: 62636 - DNA, 60 bp, Artificial
  Synthetic oligonucleotide
ggcctatgttcttgtatgtaagaacaaatggaacctcaaaaattaaaatgaaatggggaa

SEQ ID NO: 62637 - DNA, 60 bp, Artificial
  Synthetic oligonucleotide
ggcccatgttcttgtatgtaagaacaaatggaacctcaaaaattaaaatgaaatggggaa

SEQ ID NO: 62638 - DNA, 60 bp, Artificial
  Synthetic oligonucleotide
tagagacataagcgatttgaagcaatatgatagtgacgaacctgaattaaggtcactttc

SEQ ID NO: 62639 - DNA, 60 bp, Artificial
  Synthetic oligonucleotide
agatataagcgatttgaagcaatatgatagtgacgaacctgaattaaggtcattttcaag

SEQ ID NO: 62640 - DNA, 60 bp, Artificial
  Synthetic oligonucleotide
gaacatcccatccattcaatccagaggtttatttggagccattgccggtttcattgaagg

SEQ ID NO: 62641 - DNA, 60 bp, Artificial
  Synthetic oligonucleotide
caggagtgcaaaattaaggatggctacaggactaaggaacatcccatccattcaatccag

SEQ ID NO: 62642 - DNA, 60 bp, Artificial
  Synthetic oligonucleotide
caggagtacaaaattaagaatggttacaggactaaggaacatcccatccattcaatccag

SEQ ID NO: 62643 - DNA, 60 bp, Artificial
  Synthetic oligonucleotide
caggagtgcaaaattaagaatggttacaggactaaggaacatcccatccattcaatccag

SEQ ID NO: 62644 - DNA, 60 bp, Artificial
  Synthetic oligonucleotide
aggagtgcaaaattaagaatggttacaggactaaggaacatcccatccattcaatccaga

SEQ ID NO: 62645 - DNA, 60 bp, Artificial
  Synthetic oligonucleotide
tatgctgcagatcaaaaaagcacacaaaatgccattaacgggattacaaacaaggtgaat

SEQ ID NO: 62646 - DNA, 60 bp, Artificial
  Synthetic oligonucleotide
aaggatctgggtatgctgcagatcaaaaaagcacacaaaatgccattaacgggattacaa

SEQ ID NO: 62647 - DNA, 60 bp, Artificial
  Synthetic oligonucleotide
aggtttgtttggagccattgccggtttcattgaaggggggtggactggaatggtagatgg

SEQ ID NO: 62648 - DNA, 60 bp, Artificial
  Synthetic oligonucleotide
tcaatccagaggtttgtttggagccattgccggtttcattgaaggggggtggactggaat

SEQ ID NO: 62649 - DNA, 60 bp, Artificial
  Synthetic oligonucleotide
acatcccatccattcaatccagaggtttatttggagccattgccggtttcattgaagggg

SEQ ID NO: 62650 - DNA, 60 bp, Artificial
  Synthetic oligonucleotide
gattacaaataaggtgaactctgttatcgagaaaatgaacactcaattcacagctgtggg

SEQ ID NO: 62651 - DNA, 60 bp, Artificial
  Synthetic oligonucleotide
gggattacaaacaaggtgaattctgtaattgagaaaatgaacactcaattcacagctgtg

SEQ ID NO: 62652 - DNA, 55 bp, Artificial
  Synthetic oligonucleotide
tgcaatcaaagcgccattacttatgaaaacaacacttgggtaaatcagacatatg

SEQ ID NO: 62653 - DNA, 60 bp, Artificial
  Synthetic oligonucleotide
tggtattctcacaagaagattgcatgataaaagcagttagaggtgatctgaatttcgtta

SEQ ID NO: 62654 - DNA, 60 bp, Artificial
  Synthetic oligonucleotide
gacactgacgtggtaaattttgtgagcatggaattttccctcactgatccaagacttgaa

SEQ ID NO: 62655 - DNA, 60 bp, Artificial
  Synthetic oligonucleotide
gagcctggggacacaataacattcgaagcaactggaaatctagtggtaccaagatatgct

SEQ ID NO: 62656 - DNA, 60 bp, Artificial
  Synthetic oligonucleotide
tgtggcgtggacagtggcactgcaagctggtcatggccagacggagctgatctgccattc

SEQ ID NO: 62657 - DNA, 60 bp, Artificial
  Synthetic oligonucleotide
tggcgtggacagtggcactgcaagctggtcatggccagacggagctgatctgccattcac

SEQ ID NO: 62658 - DNA, 52 bp, Artificial
  Synthetic oligonucleotide
cggacaatggattgggtgatgccccattccttgatcggcttcgccgagatca

SEQ ID NO: 62659 - DNA, 60 bp, Artificial
  Synthetic oligonucleotide
caatggttgggaaaagggcaacagctatactcagaaaggcaactagaaggttggttcaac

SEQ ID NO: 62660 - DNA, 60 bp, Artificial
  Synthetic oligonucleotide
acaatggttgggaaaagggcaacagctatactcagaaaggcaactagaaggttggttcaa

SEQ ID NO: 62661 - DNA, 60 bp, Artificial
  Synthetic oligonucleotide
ccaaagcttaattatcgctgctaggagcatagtgagaagagctacagtatctgcagatcc

SEQ ID NO: 62662 - DNA, 60 bp, Artificial
  Synthetic oligonucleotide
tcgctgctaggagcatagtgagaagagctacagtatctgcagatccactggcatctctac

SEQ ID NO: 62663 - DNA, 60 bp, Artificial
  Synthetic oligonucleotide
tgctgctaggagcatagtgagaagagctacagtatctgcagatccactggcatctctatt

SEQ ID NO: 62664 - DNA, 60 bp, Artificial
  Synthetic oligonucleotide
ctattgcttgaagtagaacaagagatgagaactttctcgtttcagcttatttaataataa

SEQ ID NO: 62665 - DNA, 60 bp, Artificial
  Synthetic oligonucleotide
ttttcagggaaaaacaccgatcttgaggcactcatggaatggctaaagacaagaccaatc

SEQ ID NO: 62666 - DNA, 60 bp, Artificial
  Synthetic oligonucleotide
tttgcggggaaaaacaccgatcttgaggcactcatggaatggctaaagacaagaccaatc

SEQ ID NO: 62667 - DNA, 60 bp, Artificial
  Synthetic oligonucleotide
atgataagcaaatgtagaactaaagagggaaggcgaaagaccaatttgtatggtttcatc

SEQ ID NO: 62668 - DNA, 60 bp, Artificial
  Synthetic oligonucleotide
ccagaaatagcagcaagacccaaggtgagaggtcaagcagggagaatgaactattactgg

SEQ ID NO: 62669 - DNA, 60 bp, Artificial
  Synthetic oligonucleotide
ctatcgtcccgtcaggccccctcaaagccgagatcgcacagagacttgaagatgtatttg

SEQ ID NO: 62670 - DNA, 60 bp, Artificial
  Synthetic oligonucleotide
cccattccttgatcggctccgccgagatcaaaagtccctaaagggaagaggcagcactct

SEQ ID NO: 62671 - DNA, 54 bp, Artificial
  Synthetic oligonucleotide
gaacggatacattgagggcaagctttctcaaatgtccaaagaagtaaatgctaa

SEQ ID NO: 62672 - DNA, 60 bp, Artificial
  Synthetic oligonucleotide
gaacggctacattgagggcaagctttctcaaatgtccaaagaagtaaatgctaggattga

SEQ ID NO: 62673 - DNA, 60 bp, Artificial
  Synthetic oligonucleotide
atgtttaaagatgagtcttctaaccgaggtcgaaacgtatgttctctctatcgttccgtc

SEQ ID NO: 62674 - DNA, 60 bp, Artificial
  Synthetic oligonucleotide
ttttgtcataagagagcctttcatatcatgttctcacttggaatgcagaaccttttttct

SEQ ID NO: 62675 - DNA, 60 bp, Artificial
  Synthetic oligonucleotide
ctcacttggaatgcagaaccttttttctgactcaaggcgctttgctgaatgacaggcatt

SEQ ID NO: 62676 - DNA, 60 bp, Artificial
  Synthetic oligonucleotide
cgctcaccgtgcccagtgagcgaggactgcagcgtagacgctttgtccaaaatgccctca

SEQ ID NO: 62677 - DNA, 60 bp, Artificial
  Synthetic oligonucleotide
actctaaataggaaccagcctgctgcaacagcattggcaaacactatagaagtattcaga

SEQ ID NO: 62678 - DNA, 60 bp, Artificial
  Synthetic oligonucleotide
catgctctcacttggaatgcagaaccttttttctgacccaaggcgctttgctgaatgaca

SEQ ID NO: 62679 - DNA, 60 bp, Artificial
  Synthetic oligonucleotide
gaatgtaacagtaacacactctgttaaccttcttgaagacagacataacgggaaactatg

SEQ ID NO: 62680 - DNA, 60 bp, Artificial
  Synthetic oligonucleotide
cgacacaaattgaagatgacagagaatagtttcgagcaaataacatttatgcaagcctta

SEQ ID NO: 62681 - DNA, 60 bp, Artificial
  Synthetic oligonucleotide
cggcacaaattgaagatgacagagaatagtttcgagcaaataacatttatgcaagcctta

SEQ ID NO: 62682 - DNA, 60 bp, Artificial
  Synthetic oligonucleotide
gtgcggcacaaattgaagatgacagagaatagtttcgagcaaataacatttatgcaagcc

SEQ ID NO: 62683 - DNA, 60 bp, Artificial
  Synthetic oligonucleotide
gttcggcacaaattgaagatgacagagaatagtttcgagcaaataacatttatgcaagcc

SEQ ID NO: 62684 - DNA, 60 bp, Artificial
  Synthetic oligonucleotide
gacacaaattgaagatgacagagaatagtttcgagcaaataacatttatgcaagccttac

SEQ ID NO: 62685 - DNA, 60 bp, Artificial
  Synthetic oligonucleotide
gcaacaatctggactagtgggagcagcatttctttttgtggcgttgatagtgatactgca

SEQ ID NO: 62686 - DNA, 60 bp, Artificial
  Synthetic oligonucleotide
ggatcatcaggaactgggaaactgttaaaattcagtggtcgcaagaccctacaatgctgt

SEQ ID NO: 62687 - DNA, 60 bp, Artificial
  Synthetic oligonucleotide
ggatcatcagaaactgggaaactgttaaaattcagtggtcgcaagaccctacaatgctat

SEQ ID NO: 62688 - DNA, 60 bp, Artificial
  Synthetic oligonucleotide
ggatcatcagaaactgggaaactgttaaaattcagtggtcgcaagaccctacaatgctgt

SEQ ID NO: 62689 - DNA, 60 bp, Artificial
  Synthetic oligonucleotide
atcgttatgggtttgttgccaatttcagcatggagcttcctagttttggagtatctgggg

SEQ ID NO: 62690 - DNA, 60 bp, Artificial
  Synthetic oligonucleotide
ttgttggcgaaatttcaccattgccttcttttccaggacatactaatgaggatgtcaaaa

SEQ ID NO: 62691 - DNA, 60 bp, Artificial
  Synthetic oligonucleotide
ttgttggcgaaatttcaccattgccttatcttccaggacatactaatgaggatgtcaaaa

SEQ ID NO: 62692 - DNA, 60 bp, Artificial
  Synthetic oligonucleotide
gatgtcaaaaatgcaattggggtcctcatcgggggacttgaatggaatgataacacagtt

SEQ ID NO: 62693 - DNA, 60 bp, Artificial
  Synthetic oligonucleotide
actaatgaggatgtcaaaaatgcaattggggtcctcatcgggggacttgaatggaatgat

SEQ ID NO: 62694 - DNA, 60 bp, Artificial
  Synthetic oligonucleotide
ctcttccaggacatactaatgaggatgtcaaaaatgcaattggggtcctcatcggaggac

SEQ ID NO: 62695 - DNA, 60 bp, Artificial
  Synthetic oligonucleotide
gtagatattgaaagatgagccttctaaccgaggtcgaaacgtacgttctctctatcgtcc

SEQ ID NO: 62696 - DNA, 60 bp, Artificial
  Synthetic oligonucleotide
tatgtgcaaatggaccaggcgatcatggaaaagaacatcatactgaaagcgaacttcagt

SEQ ID NO: 62697 - DNA, 60 bp, Artificial
  Synthetic oligonucleotide
tatgtacgaatggaccaggcgatcatggaaaagaacatcatactgaaagcgaacttcagt

SEQ ID NO: 62698 - DNA, 60 bp, Artificial
  Synthetic oligonucleotide
ccccgcattgagaatgaaatggatgatggcaatgaaatacccaattacagcggacaagag

SEQ ID NO: 62699 - DNA, 60 bp, Artificial
  Synthetic oligonucleotide
gaccattgcatctgtgcctacttcgcgctacctagctgacatgacccttgaggaaatgtc

SEQ ID NO: 62700 - DNA, 60 bp, Artificial
  Synthetic oligonucleotide
gaccattgcatctgtacccacttcgcgctacctagctgacatgacccttgaggaaatggc

SEQ ID NO: 62701 - DNA, 60 bp, Artificial
  Synthetic oligonucleotide
tctgtaccttcttcgcgctacctagctgacatgacccttgaggaaatgtcaagagattgg

SEQ ID NO: 62702 - DNA, 60 bp, Artificial
  Synthetic oligonucleotide
agcatctgtaccttcttcgcgctacctagctgacatgacccttgaggaaatgtcaaggga

SEQ ID NO: 62703 - DNA, 60 bp, Artificial
  Synthetic oligonucleotide
tctgtgcctacttcacgctacctagctgacatgacccttgaggaaatgtcaagggattgg

SEQ ID NO: 62704 - DNA, 60 bp, Artificial
  Synthetic oligonucleotide
gcgctacctagctgacatgacccttgaggaaatgtcaagggattggtttatgctcatgcc

SEQ ID NO: 62705 - DNA, 60 bp, Artificial
  Synthetic oligonucleotide
tctgtaacttcttcgcgctacctagctgacatgacccttgaggaaatgtcaagggattgg

SEQ ID NO: 62706 - DNA, 59 bp, Artificial
  Synthetic oligonucleotide
ggggtgcagatgcaacgattcaagtgatcctcttgttgttgccgcaagcataattggga

SEQ ID NO: 62707 - DNA, 60 bp, Artificial
  Synthetic oligonucleotide
ctggaaggataaagaaagaggattttgttgagatcatgaagatctgttccaccattgaag

SEQ ID NO: 62708 - DNA, 60 bp, Artificial
  Synthetic oligonucleotide
agtagaaaggttaaaacatggaacctttggccctgtccattttaggaatcaagtcaagat

SEQ ID NO: 62709 - DNA, 60 bp, Artificial
  Synthetic oligonucleotide
ttttgaatctggaaggataaagaaagaggatttcgctgagatcatgaagatctgttccac

SEQ ID NO: 62710 - DNA, 60 bp, Artificial
  Synthetic oligonucleotide
ctttgaatctggaaggataaagaaagaggatttcgctgagatcatgaagatctgttccac

SEQ ID NO: 62711 - DNA, 60 bp, Artificial
  Synthetic oligonucleotide
tttgaatctggaaggataaagaaagaggatttcgctgagatcatgaagatctgttccacc

SEQ ID NO: 62712 - DNA, 53 bp, Artificial
  Synthetic oligonucleotide
tctccctgggggcaatcagtttctggatgtgttccaatgggtctttacagtgc

SEQ ID NO: 62713 - DNA, 58 bp, Artificial
  Synthetic oligonucleotide
gttggtctccctgggggcaatcagtttctggatgtgctctaatgggtctttacagtgc

SEQ ID NO: 62714 - DNA, 60 bp, Artificial
  Synthetic oligonucleotide
ttggtactgttggtctccctgggggcaatcagtttctggatgtgctctaatgggtctttg

SEQ ID NO: 62715 - DNA, 60 bp, Artificial
  Synthetic oligonucleotide
actgttggtctccctgggggcaatcagtttctggatgtgctctaatgggtctttacaatg

SEQ ID NO: 62716 - DNA, 60 bp, Artificial
  Synthetic oligonucleotide
cgccagttcattggtactgttggtctccctgggggcaatcagtttctggatgtgctctaa

SEQ ID NO: 62717 - DNA, 60 bp, Artificial
  Synthetic oligonucleotide
ataaagaaaatgcttatgtttctgtgttgtcttcacattatagcagaagattcaccccag

SEQ ID NO: 62718 - DNA, 60 bp, Artificial
  Synthetic oligonucleotide
tgtgtgcgaatggaccaggcgatcatggaaaagaacatcatactgaaagcgaacttcagt

SEQ ID NO: 62719 - DNA, 60 bp, Artificial
  Synthetic oligonucleotide
ccagattttggcgatctattcaactgccgccagttcattggtactgttggtctccctggg

SEQ ID NO: 62720 - DNA, 60 bp, Artificial
  Synthetic oligonucleotide
gcaacgagcaatgatggaccaggtgcgagaaagcagaaatcctgggaatgctgagattga

SEQ ID NO: 62721 - DNA, 60 bp, Artificial
  Synthetic oligonucleotide
tgcaacatcctcaaagggaaatttcagacagcagcgcaacgagcaatgatggaccaggtg

SEQ ID NO: 62722 - DNA, 60 bp, Artificial
  Synthetic oligonucleotide
ggagttgggacgatggtaatggaactgattcggatgataaagcgggggatcaatgatcgg

SEQ ID NO: 62723 - DNA, 60 bp, Artificial
  Synthetic oligonucleotide
caactctcccgaggagatctggagctgctggtgcagcagtaaagggagttgggacgatgg

SEQ ID NO: 62724 - DNA, 60 bp, Artificial
  Synthetic oligonucleotide
catctgatgatttggcattccaacctgaatgatgccacatatcagagaacaagagctctc

SEQ ID NO: 62725 - DNA, 60 bp, Artificial
  Synthetic oligonucleotide
ggtcccaagaggacagctgtccaccagaggagttcaaattgcttcaaatgaaaacatgga

SEQ ID NO: 62726 - DNA, 60 bp, Artificial
  Synthetic oligonucleotide
caaatactgggctataaggaccaggagcggaggaaacaccaaccaacagagagcatctgc

SEQ ID NO: 62727 - DNA, 60 bp, Artificial
  Synthetic oligonucleotide
gagcatctgcagggcaaatcagtgtacaacctactttctcggtacagagaaatcttcctt

SEQ ID NO: 62728 - DNA, 60 bp, Artificial
  Synthetic oligonucleotide
gccattctgcagcatttgaagatctgagagtgtcaagtttcatcagagggacaaaagtgg

SEQ ID NO: 62729 - DNA, 60 bp, Artificial
  Synthetic oligonucleotide
ttgaagatctgagagtgtcaagtttcatcagagggacaaaagtggtcccaagaggacagc

SEQ ID NO: 62730 - DNA, 60 bp, Artificial
  Synthetic oligonucleotide
gcactgaactcaaactcagtgactatgaagggaggctgatccagaacagcataacaatag

SEQ ID NO: 62731 - DNA, 60 bp, Artificial
  Synthetic oligonucleotide
aacaaatacctggaagaacatcccagtgcggggaaggatccaaagaaaactggaggtcca

SEQ ID NO: 62732 - DNA, 60 bp, Artificial
  Synthetic oligonucleotide
gagcatctgttgggggaatggttggtggaattggaagattctacatacagatgtgcactg

SEQ ID NO: 62733 - DNA, 60 bp, Artificial
  Synthetic oligonucleotide
ggatttggcgtcaagcaaacaatggtgaagatgctactgctggtctcactcatctgatga

SEQ ID NO: 62734 - DNA, 60 bp, Artificial
  Synthetic oligonucleotide
ggcgtcaagcaaacaatggtgaagatgctactgctggtctcactcatctgatgatttggc

SEQ ID NO: 62735 - DNA, 60 bp, Artificial
  Synthetic oligonucleotide
cctggaagaacatcccagtgcggggaaggatccaaagaaaactggaggtccaatctacag

SEQ ID NO: 62736 - DNA, 57 bp, Artificial
  Synthetic oligonucleotide
tggaggtccaatctacagaaagagagacggaaaatggatgagagagctgattctgta

SEQ ID NO: 62737 - DNA, 52 bp, Artificial
  Synthetic oligonucleotide
gaagggtactctctagtcggaatagatcctttccgtctgctccagaacagcc

SEQ ID NO: 62738 - DNA, 60 bp, Artificial
  Synthetic oligonucleotide
aatcttcctttcgagagagcgaccatcatggcagcatttacagggaacactgaaggcaga

SEQ ID NO: 62739 - DNA, 60 bp, Artificial
  Synthetic oligonucleotide
ctgggctataaggaccaggagcggaggaaacaccaaccaacagagagcatctgcagggca

SEQ ID NO: 62740 - DNA, 60 bp, Artificial
  Synthetic oligonucleotide
gagcaatgatggaccaggtgcgagaaagcagaaatcctgggaatgctgagattgaagacc

SEQ ID NO: 62741 - DNA, 60 bp, Artificial
  Synthetic oligonucleotide
ctgagattgaagaccttatctttctggcacgatctgcactcattctgagaggatcagtgg

SEQ ID NO: 62742 - DNA, 60 bp, Artificial
  Synthetic oligonucleotide
agagcgaccatcatggcagcatttacagggaacactgaaggcagaacatctgacatgagg

SEQ ID NO: 62743 - DNA, 60 bp, Artificial
  Synthetic oligonucleotide
ggatcagtggctcataaatcctgcctgcctgcttgtgtatatggacttgttgtggcaagt

SEQ ID NO: 62744 - DNA, 60 bp, Artificial
  Synthetic oligonucleotide
ttatctttctggcacgatctgcactcattctgagaggatcagtggctcataaatcctgcc

SEQ ID NO: 62745 - DNA, 60 bp, Artificial
  Synthetic oligonucleotide
gaggaagcaaatattaagaacacaagagtctgaatgtgtctgtgtaaacggttcatgttt

SEQ ID NO: 62746 - DNA, 60 bp, Artificial
  Synthetic oligonucleotide
ccagtcacaattggagaatgtccaaaatatgtcaaaagcacaaaattgagaatggctaca

SEQ ID NO: 62747 - DNA, 60 bp, Artificial
  Synthetic oligonucleotide
acatccagtcacaattggagaatgtccaaaatatgtcaaaagcacaaaattgagaatggc

SEQ ID NO: 62748 - DNA, 59 bp, Artificial
  Synthetic oligonucleotide
gaaaatttacaggcctatcagaaacgaatgggggtgcagatgcaacgattcaagtgatc

SEQ ID NO: 62749 - DNA, 60 bp, Artificial
  Synthetic oligonucleotide
ggagttggaacaatagcgatggagttaatcaggatgatcaaacgtgggatcaatgaccga

SEQ ID NO: 62750 - DNA, 60 bp, Artificial
  Synthetic oligonucleotide
cgctcaccgtgcccagtgagcgaggactgcagcgtagacgctttgttcagaatgctctca

SEQ ID NO: 62751 - DNA, 60 bp, Artificial
  Synthetic oligonucleotide
agtgcctgattaatgatccctgggttttgcttaatgcttcttggttcaactccttcataa

SEQ ID NO: 62752 - DNA, 60 bp, Artificial
  Synthetic oligonucleotide
gaggagtgcctgattaatgatccctgggttttgcttaacgcgtcttggttcaactccttc

SEQ ID NO: 62753 - DNA, 60 bp, Artificial
  Synthetic oligonucleotide
ttgaggagtgcctgattaatgatccctgggttttgcttaatgcgtcttggttcaactcct

SEQ ID NO: 62754 - DNA, 60 bp, Artificial
  Synthetic oligonucleotide
tacacatcaggaagacaggagaaaaacccatcacttaggatgaaatggatgatggcaatg

SEQ ID NO: 62755 - DNA, 60 bp, Artificial
  Synthetic oligonucleotide
acaaagacataatggattccaacactgtgtcaagctttcaggtagattgcttcctttggc

SEQ ID NO: 62756 - DNA, 60 bp, Artificial
  Synthetic oligonucleotide
gacgtcaatccgactttgcttttcctgagagtgccagcacaaaatgctataagcacaacg

SEQ ID NO: 62757 - DNA, 60 bp, Artificial
  Synthetic oligonucleotide
gattaatgatccctgggttttgcttaatgcgtcttggttcaactccttcctcacacatgc

SEQ ID NO: 62758 - DNA, 60 bp, Artificial
  Synthetic oligonucleotide
gtaatgaaacggaaacgggactcaagcatacttactgacagccagacagcgaccaaaaga

SEQ ID NO: 62759 - DNA, 51 bp, Artificial
  Synthetic oligonucleotide
taatgcatcctgtgcagcaatggatgattttcaattgatcccaatgataag

SEQ ID NO: 62760 - DNA, 53 bp, Artificial
  Synthetic oligonucleotide
cttaattcatcctgtgcagcaatggatgattttcaattgatcccaatgataag

SEQ ID NO: 62761 - DNA, 60 bp, Artificial
  Synthetic oligonucleotide
gatcccacttaagaaatgacaccgacgtggtaaattttgtgagcatggagttttctctca

SEQ ID NO: 62762 - DNA, 60 bp, Artificial
  Synthetic oligonucleotide
ttgatctggggggattatatgaatcaattgaggagtgcctgattaatgatccctgggttt

SEQ ID NO: 62763 - DNA, 57 bp, Artificial
  Synthetic oligonucleotide
atccaaaatggaagacttcgtacgacagtgcttcaatccgatgattgtcgaacttgc

SEQ ID NO: 62764 - DNA, 60 bp, Artificial
  Synthetic oligonucleotide
cagattttggcgatctattcaactgtcgccagttcattggtactgttggtctccctgggg

SEQ ID NO: 62765 - DNA, 60 bp, Artificial
  Synthetic oligonucleotide
accagattttggcgatctattcaactgtcgccagttcattggtactgttggtctccctgg

SEQ ID NO: 62766 - DNA, 60 bp, Artificial
  Synthetic oligonucleotide
cagattctggcgatctattcaactgtcgccagttcattggtactgttggtctccctgggg

SEQ ID NO: 62767 - DNA, 60 bp, Artificial
  Synthetic oligonucleotide
gaaaatttgcaggcctatcagaagcgaatgggggtgcagatgcaacgattcaagtgatcc

SEQ ID NO: 62768 - DNA, 60 bp, Artificial
  Synthetic oligonucleotide
agaatggttacaggactaaggaacatcccatccattcaatccagaggtttgtttggagcc

SEQ ID NO: 62769 - DNA, 60 bp, Artificial
  Synthetic oligonucleotide
cggcagcatgcccttatgctggagcaaacagcttctacagaaatttaatatggctggtaa

SEQ ID NO: 62770 - DNA, 60 bp, Artificial
  Synthetic oligonucleotide
tcagaatatacatccagtcacaattggagaatgtccaaaatatgtcaaaagcacaaaatt

SEQ ID NO: 62771 - DNA, 60 bp, Artificial
  Synthetic oligonucleotide
gtgttggtgatgaaacgaaaacgggactcaagcatacttactgacagccagacagcgacc

SEQ ID NO: 62772 - DNA, 60 bp, Artificial
  Synthetic oligonucleotide
gtgttggtaatgaaacggaaacgggactcgagcatacttactgacagccagacagcgacc

SEQ ID NO: 62773 - DNA, 60 bp, Artificial
  Synthetic oligonucleotide
tgttggtaatgaaacggaaacgggactcaagcatacttactgacagccagacagcgacca

SEQ ID NO: 62774 - DNA, 60 bp, Artificial
  Synthetic oligonucleotide
ttccaagaggaaagctttccacaagaggggttcagattgcttcaaatgagaatgtggaag

SEQ ID NO: 62775 - DNA, 60 bp, Artificial
  Synthetic oligonucleotide
accaagaggaaagctttccacaagaggggttcagattgcttcaaatgagaatgtggaagc

SEQ ID NO: 62776 - DNA, 60 bp, Artificial
  Synthetic oligonucleotide
cccaagaggaaagctttccacaagaggggttcagattgcttcaaatgagaatgtggaagc

SEQ ID NO: 62777 - DNA, 60 bp, Artificial
  Synthetic oligonucleotide
aggggggatggacaggaatgatagatggatggtatggttatcatcatcagaatggacagg

SEQ ID NO: 62778 - DNA, 60 bp, Artificial
  Synthetic oligonucleotide
gggtacgaagaatttacactggttgggaaaagggcaacagctatactcagaaaagcaact

SEQ ID NO: 62779 - DNA, 54 bp, Artificial
  Synthetic oligonucleotide
cagagtgctgtggatgttgacgatggtcattttgtcaacatagtgctagagtaa

SEQ ID NO: 62780 - DNA, 60 bp, Artificial
  Synthetic oligonucleotide
cctcctttgacatgagtaacgaaggatcttatttcttcggagacaatgcagaggagtacg

SEQ ID NO: 62781 - DNA, 60 bp, Artificial
  Synthetic oligonucleotide
gatgtatttgctggaaagaataccgatcttgaggctctcatggagtggctaaagacaaga

SEQ ID NO: 62782 - DNA, 60 bp, Artificial
  Synthetic oligonucleotide
agatgtatttgctggaaagaataccgatcttgaggctctcatggagtggctaaagacaag

SEQ ID NO: 62783 - DNA, 60 bp, Artificial
  Synthetic oligonucleotide
gctatatacacaaaagacaacagcataagaattggttccaaaggagatgtttttgtcata

SEQ ID NO: 62784 - DNA, 60 bp, Artificial
  Synthetic oligonucleotide
tgggctatatacacaaaagacaacagcataagaattggttccaaaggagatgttttcgtc

SEQ ID NO: 62785 - DNA, 60 bp, Artificial
  Synthetic oligonucleotide
gcgaatattgagaacacaagagtctgaatgtgtctgtgtgaacgggtcatgtttcactat

SEQ ID NO: 62786 - DNA, 60 bp, Artificial
  Synthetic oligonucleotide
atcagaaacgaatgggggtgcagatgcaacgattcaagtgatcctcttgttgttgccgca

SEQ ID NO: 62787 - DNA, 60 bp, Artificial
  Synthetic oligonucleotide
tgtgtgcgaatggaccaggcgatcatggaaaagaacatcatactgaaagcgaatttcagt

SEQ ID NO: 62788 - DNA, 60 bp, Artificial
  Synthetic oligonucleotide
gattggttccaaaggagacatttttgtcataagagagccattcatttcatgctctcactt

SEQ ID NO: 62789 - DNA, 60 bp, Artificial
  Synthetic oligonucleotide
ggcattaaccctgaacacaatgaccaaagatgctgagagagggaaactaaaacgcagagc

SEQ ID NO: 62790 - DNA, 60 bp, Artificial
  Synthetic oligonucleotide
gtactcagaaaggggaagatggacaaaaaacaccgaaactggagcaccgcaactcaaccc

SEQ ID NO: 62791 - DNA, 60 bp, Artificial
  Synthetic oligonucleotide
ggccctgagtcagttttgatcaatacctatcagtggatcatcagaaactgggagactgtt

SEQ ID NO: 62792 - DNA, 60 bp, Artificial
  Synthetic oligonucleotide
ggtcctgagtcagttttgatcaatacctatcagtggatcatcagaaactgggagactgtt

SEQ ID NO: 62793 - DNA, 60 bp, Artificial
  Synthetic oligonucleotide
tctgttccaccattgaagatctcagacggcaaaagtagtgaatttggcttgtccttcatg

SEQ ID NO: 62794 - DNA, 57 bp, Artificial
  Synthetic oligonucleotide
tctgttccaccattgaagatctcagacggcaaaagtagtgaatttggcttgtccttc

SEQ ID NO: 62795 - DNA, 60 bp, Artificial
  Synthetic oligonucleotide
tctgttccaccattgaagatctcagacggcaaaagtagtgaatttggcttgttcttcatg

SEQ ID NO: 62796 - DNA, 60 bp, Artificial
  Synthetic oligonucleotide
tctgttccaccattgaagatctcagacggcaaaagtagtgaatttggcttatccttcatg

SEQ ID NO: 62797 - DNA, 60 bp, Artificial
  Synthetic oligonucleotide
ctgttccaccattgaagatctcagacggcaaaagtagtgaatttggcttatccttcatga

SEQ ID NO: 62798 - DNA, 60 bp, Artificial
  Synthetic oligonucleotide
ctgttccaccattgaagatctcagacggcaaaagtagtgaatttggcttgttcttcatga

SEQ ID NO: 62799 - DNA, 54 bp, Artificial
  Synthetic oligonucleotide
ccaccattgaagatctcagacggcaaaagtagtgaatttagcttgtccttcatg

SEQ ID NO: 62800 - DNA, 52 bp, Artificial
  Synthetic oligonucleotide
ccaccattgaagatctcagacggcaaaagtagtgaatttagcttgtccttca

SEQ ID NO: 62801 - DNA, 60 bp, Artificial
  Synthetic oligonucleotide
cattccatggggccaaagaaatagcgctcagttattctgctggtgcacttgccagttgta

SEQ ID NO: 62802 - DNA, 60 bp, Artificial
  Synthetic oligonucleotide
ggggccaaagaaatagcgctcagttattctgctggtgcacttgccagttgtatgggcctc

SEQ ID NO: 62803 - DNA, 51 bp, Artificial
  Synthetic oligonucleotide
gaagtagaacaagagatgagaactttctcgtttcagcttatttaataataa

SEQ ID NO: 62804 - DNA, 60 bp, Artificial
  Synthetic oligonucleotide
cagccacaaatgcagacacactatgtataggttatcatgcaaataattcaactgacactg

SEQ ID NO: 62805 - DNA, 60 bp, Artificial
  Synthetic oligonucleotide
cagccacaaatgcagacacactatgtataggttatcatgcaaataattcaactgacacag

SEQ ID NO: 62806 - DNA, 56 bp, Artificial
  Synthetic oligonucleotide
tgggctatatacacaaaagacaacagcataagaattggctccaagggagatgtttt

SEQ ID NO: 62807 - DNA, 60 bp, Artificial
  Synthetic oligonucleotide
tgggctatatacacaaaagacaacagcataagaattggctctaaaggagatgtttttgtc

SEQ ID NO: 62808 - DNA, 51 bp, Artificial
  Synthetic oligonucleotide
gggctatatacacaaaagacaacagcataagaattggctctaaaggagatg

SEQ ID NO: 62809 - DNA, 60 bp, Artificial
  Synthetic oligonucleotide
ccttttttctgacccaaggtgctctattaaatgacaaacattcaaatgggaccgttaagg

SEQ ID NO: 62810 - DNA, 60 bp, Artificial
  Synthetic oligonucleotide
ctgcaaactggtcttggccagacggtgctgagttgccgttcaccattgacaaatagttcg

SEQ ID NO: 62811 - DNA, 60 bp, Artificial
  Synthetic oligonucleotide
tccctttgttctatcagtggatgggctatatacacaaaagacaacagcataagaattggt

SEQ ID NO: 62812 - DNA, 57 bp, Artificial
  Synthetic oligonucleotide
tcaaaaaataataaccattggatcaatcagtatagcaatcggaataattagtctaat

SEQ ID NO: 62813 - DNA, 60 bp, Artificial
  Synthetic oligonucleotide
tgggctatatacacaaaagacaacagcataagaattggctccaagggagatgtttttgtc

SEQ ID NO: 62814 - DNA, 60 bp, Artificial
  Synthetic oligonucleotide
cctatgtttctatacgtgaggacaaacggaacctcaaaaattaaaatgaaatggggaatg

SEQ ID NO: 62815 - DNA, 60 bp, Artificial
  Synthetic oligonucleotide
ggcgatcatggaaaagaacatcatactgaaagcgaacttcagtgtgatttttaaccgatt

SEQ ID NO: 62816 - DNA, 60 bp, Artificial
  Synthetic oligonucleotide
gggcaaggggacgtagtgttggtaatgaaacggaaacgggactcaagcatacttactgac

SEQ ID NO: 62817 - DNA, 55 bp, Artificial
  Synthetic oligonucleotide
ccaccattgaagatctcagacggcaaaagtagtgaatttagcttgtccttcatga

SEQ ID NO: 62818 - DNA, 60 bp, Artificial
  Synthetic oligonucleotide
ccccgagagaaatgagcaaggacaaaccctatggagcagaacgagcgatgccggatcaga

SEQ ID NO: 62819 - DNA, 60 bp, Artificial
  Synthetic oligonucleotide
ggctacaggactaaggaatatcccgtctattcaatccagaggtctgtttggagccattgc

SEQ ID NO: 62820 - DNA, 60 bp, Artificial
  Synthetic oligonucleotide
cctaactgacatgactgttgaagaaatgtcaagggactggttcatgctcatgcccaagca

SEQ ID NO: 62821 - DNA, 60 bp, Artificial
  Synthetic oligonucleotide
tattgaggaaatgtcaagggactggttcatgctcatgcccaagcagaaagtagcaggccc

SEQ ID NO: 62822 - DNA, 60 bp, Artificial
  Synthetic oligonucleotide
cggtacctaactgacatgactgttgaagaaatgtcaagggactggttcatgctcatgccc

SEQ ID NO: 62823 - DNA, 60 bp, Artificial
  Synthetic oligonucleotide
ctggactagtgggagcagcatttctttttgtggcgttgatagtgacactgcaaactggtc

SEQ ID NO: 62824 - DNA, 60 bp, Artificial
  Synthetic oligonucleotide
tatggtggaggccatggtttccagggcccgaatcgatgcacgaattgattctgaatctgg

SEQ ID NO: 62825 - DNA, 60 bp, Artificial
  Synthetic oligonucleotide
agtatggtggaggccatggtttccagggcccgaatcgatgcacgaattgactttgaatct

SEQ ID NO: 62826 - DNA, 60 bp, Artificial
  Synthetic oligonucleotide
gtatggtggaggccatggtttccagggcccgaatcgatgcacgaattgatttcgaatctg

SEQ ID NO: 62827 - DNA, 60 bp, Artificial
  Synthetic oligonucleotide
agcatggtggaggccatggtttccagggcccgaatcgatgcacgaattgattttgaatct

SEQ ID NO: 62828 - DNA, 60 bp, Artificial
  Synthetic oligonucleotide
agtatggtggaggccatggtttccagggcccgaattgatgcacgaattgattttgaatct

SEQ ID NO: 62829 - DNA, 60 bp, Artificial
  Synthetic oligonucleotide
agtatggtggaggccatggtttccagggcccgaatcgatgcacgaattgattttgagtct

SEQ ID NO: 62830 - DNA, 60 bp, Artificial
  Synthetic oligonucleotide
ctgaaaatctacagagattcgcttggagaagccgtaatgaggatgggagaccttcactat

SEQ ID NO: 62831 - DNA, 57 bp, Artificial
  Synthetic oligonucleotide
ctgaaaatctacagagattcgcttggagaagccgtaatgaggatgggagaccttcac

SEQ ID NO: 62832 - DNA, 60 bp, Artificial
  Synthetic oligonucleotide
tagatgtttaaagatgagtcttctaaccgaggtcgaaacgtatgttctctctatcgttcc

SEQ ID NO: 62833 - DNA, 60 bp, Artificial
  Synthetic oligonucleotide
gcgaatattgagaacacaagagtctgaatgtgtctgtgtgaacgggtcttgtttcaccat

SEQ ID NO: 62834 - DNA, 60 bp, Artificial
  Synthetic oligonucleotide
caacctgctgcaacagcattggccaacacaatagaagtgttcagattaaacggcctcacg

SEQ ID NO: 62835 - DNA, 60 bp, Artificial
  Synthetic oligonucleotide
ctgattcccagcatcgatctcatagacaaatggtgacaacaaccaatccactaatcaggc

SEQ ID NO: 62836 - DNA, 60 bp, Artificial
  Synthetic oligonucleotide
gaccttgatactactaagggctttcaccgaagagggagcaattgttggagaaatttcacc

SEQ ID NO: 62837 - DNA, 60 bp, Artificial
  Synthetic oligonucleotide
gagaccttgatactactaagggctttcaccgaagagggagcaattgttggagaaatttca

SEQ ID NO: 62838 - DNA, 51 bp, Artificial
  Synthetic oligonucleotide
gaagtagaacaagagataagaactttctcgtttcagcttatttaataataa

SEQ ID NO: 62839 - DNA, 60 bp, Artificial
  Synthetic oligonucleotide
actctgtcaacctacttgaggacagtcacaatggaaaactatgtctactaaaaggaatag

SEQ ID NO: 62840 - DNA, 60 bp, Artificial
  Synthetic oligonucleotide
gatctactcaacagtcgccagttccttggttcttttggtctccctgggggcaatcagctt

SEQ ID NO: 62841 - DNA, 60 bp, Artificial
  Synthetic oligonucleotide
tgttctgttatgtacatttacagctacatatgcagacacaatatgtataggctaccatgc

SEQ ID NO: 62842 - DNA, 60 bp, Artificial
  Synthetic oligonucleotide
acacagtacttgagaagaacgtgacagtgacacactctgtcaacctacttgaggacagtc

SEQ ID NO: 62843 - DNA, 60 bp, Artificial
  Synthetic oligonucleotide
cggctgcattgagggcaagctttctcaaatgtccaaagaagtgaatgccaggattgaccc

SEQ ID NO: 62844 - DNA, 60 bp, Artificial
  Synthetic oligonucleotide
agaaccccgcattgagaatgaaatggatgatggcaatgaaatacccaattacagcggaca

SEQ ID NO: 62845 - DNA, 60 bp, Artificial
  Synthetic oligonucleotide
caatcagcttctggatgtgttccaatgggtctttgcagtgtagaatatgcatctaagacc

SEQ ID NO: 62846 - DNA, 60 bp, Artificial
  Synthetic oligonucleotide
cagcttctggatgtgttccaatgggtctttgcagtgtagaatatgcatctaaggccagag

SEQ ID NO: 62847 - DNA, 60 bp, Artificial
  Synthetic oligonucleotide
cagcttctggatgtgttccaatgggtctttgcagtgtagaatatgcatctaaaaccagag

SEQ ID NO: 62848 - DNA, 60 bp, Artificial
  Synthetic oligonucleotide
caatcagcttctggatgtgttccaatgggtctttgcaatgcagaatatgcatctgagacc

SEQ ID NO: 62849 - DNA, 60 bp, Artificial
  Synthetic oligonucleotide
cagcttctggatgtgttccaatgggtctttgcagtgtagaatatgcatctaagaccagag

SEQ ID NO: 62850 - DNA, 60 bp, Artificial
  Synthetic oligonucleotide
caatcagcttctggatgtgttccaatgggtctttgcagtgtagaatatgcatctaaaacc

SEQ ID NO: 62851 - DNA, 60 bp, Artificial
  Synthetic oligonucleotide
caatcagcttctggatgtgttccaatgggtctttgcagtgtagaatatgcatctaaggcc

SEQ ID NO: 62852 - DNA, 60 bp, Artificial
  Synthetic oligonucleotide
ttcgaatctggaaggataaagaaagaggatttcgcagagatcataaagatctgttccacc

SEQ ID NO: 62853 - DNA, 60 bp, Artificial
  Synthetic oligonucleotide
ttcgaatctggaaggataaagaaagaggatttcgcagagatcatgaagatctgttccacc

SEQ ID NO: 62854 - DNA, 60 bp, Artificial
  Synthetic oligonucleotide
gacaggcattctaatggaaccgtcaaggacaggagtccttatagaaccttaatgagctgc

SEQ ID NO: 62855 - DNA, 60 bp, Artificial
  Synthetic oligonucleotide
cgcgttctaatgatgggaaaggcaattgtggcccagtactttctaatggagcaaatggag

SEQ ID NO: 62856 - DNA, 60 bp, Artificial
  Synthetic oligonucleotide
atggagcaaatggagtaaaggggttttcatttagatatggcaatggtgtttggataggaa

SEQ ID NO: 62857 - DNA, 60 bp, Artificial
  Synthetic oligonucleotide
tttctgacccaaggcgctttgctgaatgacaggcattctaatggaaccgtcaaggacagg

SEQ ID NO: 62858 - DNA, 55 bp, Artificial
  Synthetic oligonucleotide
gggctatatacagcaaagacaatagcataaggattggttccaaaggagacatttt

SEQ ID NO: 62859 - DNA, 60 bp, Artificial
  Synthetic oligonucleotide
gggctatatacagcaaagacaatagcataaggattggttccaaaggagacatttttgtca

SEQ ID NO: 62860 - DNA, 60 bp, Artificial
  Synthetic oligonucleotide
aatgaccggcattctaatggaaccgtcaaggacaggagtccttatagaaccttaatgagc

SEQ ID NO: 62861 - DNA, 60 bp, Artificial
  Synthetic oligonucleotide
aatgacagacattctaatggaaccgtcaaggacaggagtccttatagaaccttaatgagc

SEQ ID NO: 62862 - DNA, 60 bp, Artificial
  Synthetic oligonucleotide
taacccgcgttctaatgatgggaaaggcaattgtggcccagtactttccaatggagcaaa

SEQ ID NO: 62863 - DNA, 60 bp, Artificial
  Synthetic oligonucleotide
gatcaaacgtggaatcaatgaccgaaacttctggaggggtgaaaatggacgaagaacaag

SEQ ID NO: 62864 - DNA, 60 bp, Artificial
  Synthetic oligonucleotide
gcatatccgcaaacggtttgcagacaatggattgggtgatgccccattccttgatcggct

SEQ ID NO: 62865 - DNA, 60 bp, Artificial
  Synthetic oligonucleotide
ttggcatatccgcaaacgatttgcggacaatggattgggtgatgccccattccttgatcg

SEQ ID NO: 62866 - DNA, 50 bp, Artificial
  Synthetic oligonucleotide
gcaaacggtttgcggacaatggattgggtgatgccccattccttgatcgg

SEQ ID NO: 62867 - DNA, 55 bp, Artificial
  Synthetic oligonucleotide
gcaaacggtttgcggacaatggattgggtgatgccccattccttgatcgactccg

SEQ ID NO: 62868 - DNA, 60 bp, Artificial
  Synthetic oligonucleotide
gcatatccgcaaacggtttgcggacaatggattgggtgatgccccattccttgatcggct

SEQ ID NO: 62869 - DNA, 60 bp, Artificial
  Synthetic oligonucleotide
ctggagttgacaggttttatcgaacctgtaagctgctcggaattaatatgagcaaaaaga

SEQ ID NO: 62870 - DNA, 60 bp, Artificial
  Synthetic oligonucleotide
tcctcacacatgcactgagatagttgtggcattgctactatttgctatccatactgtcca

SEQ ID NO: 62871 - DNA, 57 bp, Artificial
  Synthetic oligonucleotide
tcacacatgcactgagatagttgtggcattgctactatttgctatccatactgtcca

SEQ ID NO: 62872 - DNA, 54 bp, Artificial
  Synthetic oligonucleotide
agcaattgggtcagaaatttgaggaaataaggtggctgattgaagaagtgcggc

SEQ ID NO: 62873 - DNA, 60 bp, Artificial
  Synthetic oligonucleotide
cctacattgtagagacaccaaatcctgagaatggaacatgttacccagggtatttcgccg

SEQ ID NO: 62874 - DNA, 58 bp, Artificial
  Synthetic oligonucleotide
cattgtagaagcaccaaatcctgagaatggaacatgttacccagggtatttcgccgac

SEQ ID NO: 62875 - DNA, 60 bp, Artificial
  Synthetic oligonucleotide
cccatattatgatttggcattccaatctgaatgatgccacctatcagagaacaagagctc

SEQ ID NO: 62876 - DNA, 60 bp, Artificial
  Synthetic oligonucleotide
tacccatattatgatttggcattccaatctgaatgatgccacctatcagagaacaagagc

SEQ ID NO: 62877 - DNA, 60 bp, Artificial
  Synthetic oligonucleotide
tggacaggaatgatagatggatggtatggttatcatcatcagaatggacagggatcagga

SEQ ID NO: 62878 - DNA, 60 bp, Artificial
  Synthetic oligonucleotide
tggacaggaatgatagatggatggtatggttatcaccatcagaatggacagggatcagga

SEQ ID NO: 62879 - DNA, 60 bp, Artificial
  Synthetic oligonucleotide
gggatggacaggaatgatagatggatggtatggttatcatcatcagaatggacagggatc

SEQ ID NO: 62880 - DNA, 60 bp, Artificial
  Synthetic oligonucleotide
gggatggacaggaatgatagatggatggtatggttatcaccatcagaatggacagggatc

SEQ ID NO: 62881 - DNA, 60 bp, Artificial
  Synthetic oligonucleotide
tggacaggaatgatagatggatggtatggttatcatcatcagaatgaacagggatcagga

SEQ ID NO: 62882 - DNA, 60 bp, Artificial
  Synthetic oligonucleotide
gccagcgcaaaatgctataagcactacattcccttatactggagatcctccatacagcca

SEQ ID NO: 62883 - DNA, 60 bp, Artificial
  Synthetic oligonucleotide
aagtgccagcgcaaaatgctataagcactacattcccttatactggagatcctccataca

SEQ ID NO: 62884 - DNA, 60 bp, Artificial
  Synthetic oligonucleotide
gattgagtctgtaaacaatgctgtggtaatgccagctcatggtccagccaagagcatgga

SEQ ID NO: 62885 - DNA, 60 bp, Artificial
  Synthetic oligonucleotide
ccacaaggaaattgagtccgtgaacagtgctgtggtaatgccagctcatggtccagccaa

SEQ ID NO: 62886 - DNA, 60 bp, Artificial
  Synthetic oligonucleotide
cctggaagctatggctttccttgaggaatcccacccagggatctttgagaactcgtgcct

SEQ ID NO: 62887 - DNA, 60 bp, Artificial
  Synthetic oligonucleotide
ggatctgttccaccattgaagagctcagacggcagaagtagtgaatttagcttgtccttc

SEQ ID NO: 62888 - DNA, 60 bp, Artificial
  Synthetic oligonucleotide
gtccgtgaacagtgctgtggtaatgccagctcatggtccagccaagagcatggaatatga

SEQ ID NO: 62889 - DNA, 60 bp, Artificial
  Synthetic oligonucleotide
gcacaaacagattgtgtcttggaggcaatggctttccttgaggaatcccacccagggata

SEQ ID NO: 62890 - DNA, 60 bp, Artificial
  Synthetic oligonucleotide
tccccagtagttcatacaggagaccggttggaatttccagcatggtggaggccatggtgt

SEQ ID NO: 62891 - DNA, 60 bp, Artificial
  Synthetic oligonucleotide
atcataaggatctgttccaccattgaagagctcagacggcagaagtagtgaatttagctt

SEQ ID NO: 62892 - DNA, 60 bp, Artificial
  Synthetic oligonucleotide
aggaaagctttccacaagaggggttcagattgcttcaaatgagaatgtggaagctatgga

SEQ ID NO: 62893 - DNA, 60 bp, Artificial
  Synthetic oligonucleotide
gggaagctttccacaagaggggttcagattgcttcaaatgagaatgtggaagctatggac

SEQ ID NO: 62894 - DNA, 60 bp, Artificial
  Synthetic oligonucleotide
ggaaagctttccacaagaggggttcagattgcttcaaatgagaatgtggaagctatggac

SEQ ID NO: 62895 - DNA, 60 bp, Artificial
  Synthetic oligonucleotide
gaaacaaacagaggtgtgacggcagcatgcccttatgctggagcaaacagcttctacaga

SEQ ID NO: 62896 - DNA, 60 bp, Artificial
  Synthetic oligonucleotide
ggcattcaccatccacctaccagtactgatcaacaaagtctctaccagaatgcagatgcc

SEQ ID NO: 62897 - DNA, 60 bp, Artificial
  Synthetic oligonucleotide
ggaaagaacactgatcttgaggctctcatggaatggctaaagacaagaccaatcctgtca

SEQ ID NO: 62898 - DNA, 53 bp, Artificial
  Synthetic oligonucleotide
gacgactaattcaaaatagcataacaatagagagaatggtgctctctgctttt

SEQ ID NO: 62899 - DNA, 53 bp, Artificial
  Synthetic oligonucleotide
gacgactgattcaaaatagcataacaatagagagaatggttctctctgctttt

SEQ ID NO: 62900 - DNA, 53 bp, Artificial
  Synthetic oligonucleotide
ggcgactgattcaaaatagcataacaatagagagaatggtgctctctgctttt

SEQ ID NO: 62901 - DNA, 60 bp, Artificial
  Synthetic oligonucleotide
ctgggaggataaagaaagaggatttcgctgagatcatgaagatctgttccaccattgaag

SEQ ID NO: 62902 - DNA, 60 bp, Artificial
  Synthetic oligonucleotide
tatctggaagaacatcccaacgcggggaaagatcctaagaaaactggaggacccatatac

SEQ ID NO: 62903 - DNA, 60 bp, Artificial
  Synthetic oligonucleotide
tatctggaagaacaccccagcgcggggaaagatcctaagaaaactggaggacccatatac

SEQ ID NO: 62904 - DNA, 60 bp, Artificial
  Synthetic oligonucleotide
gaaaggggtttgagatgatttgggatcctaatggatggacagataccgacagtgatttct

SEQ ID NO: 62905 - DNA, 60 bp, Artificial
  Synthetic oligonucleotide
atggatgtcaatccgactttgcttttcctgaaagtgccagcacaaaatgctataagcaca

SEQ ID NO: 62906 - DNA, 60 bp, Artificial
  Synthetic oligonucleotide
ggcagaaacagcagagtgctgtggatgttgacgatggtcattttgtcaacatagcgctag

SEQ ID NO: 62907 - DNA, 60 bp, Artificial
  Synthetic oligonucleotide
ggcagaaacagcagagtgctgtggatgttgacgatggtcattttgtcaacatagtgctag

SEQ ID NO: 62908 - DNA, 60 bp, Artificial
  Synthetic oligonucleotide
cagaaacagcagagtgctgtggatgttgacgatggtcattttgtcaacatagtgctagag

SEQ ID NO: 62909 - DNA, 60 bp, Artificial
  Synthetic oligonucleotide
gacagaaacagcagagtgctgtggatgttgacgatggtcattttgtcaacatagtgctag

SEQ ID NO: 62910 - DNA, 54 bp, Artificial
  Synthetic oligonucleotide
atgaggggtcttatttcttcggagacaatgcagaggagtatgacaattgaagaa

SEQ ID NO: 62911 - DNA, 60 bp, Artificial
  Synthetic oligonucleotide
ctagctgacatgacccttgaagagatgtcaagggattggttcatgctcatgcctaagcaa

SEQ ID NO: 62912 - DNA, 60 bp, Artificial
  Synthetic oligonucleotide
cctatgtttctatacatgagaacaaacgggacctcaaaaattaaaatgaaatggggaatg

SEQ ID NO: 62913 - DNA, 60 bp, Artificial
  Synthetic oligonucleotide
gccctgtccatttcagaaaccaagtcaaaatacgccgaagggttgacataaacccaggtc

SEQ ID NO: 62914 - DNA, 60 bp, Artificial
  Synthetic oligonucleotide
gaagggatcggaatatggcttggacggtggtaaacagtatttgtaacactacaggggttg

SEQ ID NO: 62915 - DNA, 60 bp, Artificial
  Synthetic oligonucleotide
ggacaaccttgaacctggaacctttgatcttgggggattatatgaatcaattgaggagtg

SEQ ID NO: 62916 - DNA, 60 bp, Artificial
  Synthetic oligonucleotide
acacacatggaggtatgcttcatgtattcagatttccacttcatcaatgagcggggcgaa

SEQ ID NO: 62917 - DNA, 60 bp, Artificial
  Synthetic oligonucleotide
gtgaactgactgattcgagctggttagagcttgatgagattggagaggatatagctccaa

SEQ ID NO: 62918 - DNA, 60 bp, Artificial
  Synthetic oligonucleotide
atggcttggacggtggtaaacagtatttgtaacactacaggggttgaaaaaccaaggttt

SEQ ID NO: 62919 - DNA, 60 bp, Artificial
  Synthetic oligonucleotide
gctgaatcaaggaaattgcttctcattgttcaagctcttagggacaaccttgaacctgga

SEQ ID NO: 62920 - DNA, 60 bp, Artificial
  Synthetic oligonucleotide
ctggttagagcttgatgagattggagaggatatagctccaattgaacatattgcaagcat

SEQ ID NO: 62921 - DNA, 60 bp, Artificial
  Synthetic oligonucleotide
gggatcggaatatggcttggacggtggtaaacagtatttgtaacactacaggggttggga

SEQ ID NO: 62922 - DNA, 60 bp, Artificial
  Synthetic oligonucleotide
aatcaaggaaattgcttctcattgttcaagctcttagggacaaccttgaacctggaacct

SEQ ID NO: 62923 - DNA, 60 bp, Artificial
  Synthetic oligonucleotide
tgaacctggaacctttgatcttgggggattatatgaatcaattgaggagtgcctgattaa

SEQ ID NO: 62924 - DNA, 60 bp, Artificial
  Synthetic oligonucleotide
gaaggaagggatcggagtatggcttggacggtggtaaacagtatttgtaacactacaggg

SEQ ID NO: 62925 - DNA, 60 bp, Artificial
  Synthetic oligonucleotide
taatccgcgttctaatgatgggaaaggcaattgtggcccagtgctttctaatggagcaaa

SEQ ID NO: 62926 - DNA, 60 bp, Artificial
  Synthetic oligonucleotide
cctttgatcttgagggattatatgaatcaattgaggagtgcctgattaatgatccctggg

SEQ ID NO: 62927 - DNA, 60 bp, Artificial
  Synthetic oligonucleotide
gccagttggtgtggatggcatgcaattctgctgcatttgaagatctaagggtgtcaagct

SEQ ID NO: 62928 - DNA, 60 bp, Artificial
  Synthetic oligonucleotide
caagagtcagttggtgtggatggcatgcaattctgctgcatttgaagacctaagagtgtc

SEQ ID NO: 62929 - DNA, 60 bp, Artificial
  Synthetic oligonucleotide
caacggctggtttgactcacattatgatctggcattccaatttgaatgatacaacttatc

SEQ ID NO: 62930 - DNA, 60 bp, Artificial
  Synthetic oligonucleotide
caacgatcatgagggaagactgatccagaacagcttaacaatagagagaatggtgctctc

SEQ ID NO: 62931 - DNA, 60 bp, Artificial
  Synthetic oligonucleotide
aactcagtgattatgaggggcggctgatccagaacagcttaacaatagagagaatggtgc

SEQ ID NO: 62932 - DNA, 60 bp, Artificial
  Synthetic oligonucleotide
atggggaacgccagaatgcaactgaaatcagagcatccgtcggaagaatgattggtggaa

SEQ ID NO: 62933 - DNA, 60 bp, Artificial
  Synthetic oligonucleotide
gtggatggcatgcaattctgctgcatttgaagacctaagagtgtcgagcttcatcagagg

SEQ ID NO: 62934 - DNA, 60 bp, Artificial
  Synthetic oligonucleotide
ggaaacgggactcaagcatacttactgacagccagacagcgaccaaaagaattcgaatgg

SEQ ID NO: 62935 - DNA, 60 bp, Artificial
  Synthetic oligonucleotide
gaaacgggactcaagcatacttactgacagccagacagcgaccaaaagaattcgaatggc

SEQ ID NO: 62936 - DNA, 60 bp, Artificial
  Synthetic oligonucleotide
cgggactcaagcatacttactgacagccagacagcgaccaaaagaattcgagtggccatc

SEQ ID NO: 62937 - DNA, 60 bp, Artificial
  Synthetic oligonucleotide
atgaaacgaaaacgggactcaagcatacttactgacagccagacagcgaccaaaagaatt

SEQ ID NO: 62938 - DNA, 57 bp, Artificial
  Synthetic oligonucleotide
agcatacttactgacagccagacagcgaccaaaagaattcgaatggccatcaattaa

SEQ ID NO: 62939 - DNA, 60 bp, Artificial
  Synthetic oligonucleotide
acggaaacgggactcaagcatacttactgacagccagacagcgaccaaaagaattcgaat

SEQ ID NO: 62940 - DNA, 60 bp, Artificial
  Synthetic oligonucleotide
attcaagcaggagttgacaggttttatcgaacctgtaagctactcgggattaatatgagc

SEQ ID NO: 62941 - DNA, 60 bp, Artificial
  Synthetic oligonucleotide
attcaagcaggagttgacaggttttatcgaacctgtaagctacttggaattaatatgagc

SEQ ID NO: 62942 - DNA, 60 bp, Artificial
  Synthetic oligonucleotide
atccaagcaggagttgacaggttttatcgaacctgtaagctactcggaattaacatgagc

SEQ ID NO: 62943 - DNA, 55 bp, Artificial
  Synthetic oligonucleotide
cggacaatggattgggtgatgccccattccttgatcggctccgccgagatcaaaa

SEQ ID NO: 62944 - DNA, 60 bp, Artificial
  Synthetic oligonucleotide
caatggattgggtgatgccccattccttgatcggctccgccgagatcaaaagtccctaaa

SEQ ID NO: 62945 - DNA, 55 bp, Artificial
  Synthetic oligonucleotide
cagacaatggattgggtgatgccccattccttgatcggctccgccgagatcaaaa

SEQ ID NO: 62946 - DNA, 60 bp, Artificial
  Synthetic oligonucleotide
tagatgtttaaagatgagccttctaaccgaggtcgaaacgtacgttctctctattgttcc

SEQ ID NO: 62947 - DNA, 60 bp, Artificial
  Synthetic oligonucleotide
tcatgagagagccattcatttcatgctctcacttggaatgcagaaccttttttctgaccc

SEQ ID NO: 62948 - DNA, 56 bp, Artificial
  Synthetic oligonucleotide
ttttgtcatgagagagccattcatttcatgctctcacttggaatgcagaacctttt

SEQ ID NO: 62949 - DNA, 54 bp, Artificial
  Synthetic oligonucleotide
ttttgtcataagagagccattcatttcatgctctcacttggaatgcagaacctt

SEQ ID NO: 62950 - DNA, 60 bp, Artificial
  Synthetic oligonucleotide
gccaatttcagcatggagcttcctagttttggagtatctggaattaatgaatctgcagac

SEQ ID NO: 62951 - DNA, 60 bp, Artificial
  Synthetic oligonucleotide
ttgccaatttcagcatggagcttcctagttttggagtatctggaattaatgaatctgcag

SEQ ID NO: 62952 - DNA, 60 bp, Artificial
  Synthetic oligonucleotide
tgactgttgatggagcagacggagtaaaggggttttcatacagatatggtaatggtgttt

SEQ ID NO: 62953 - DNA, 60 bp, Artificial
  Synthetic oligonucleotide
ggagcagacggagtaaaggggttttcatacagatatggtaatggtgtttggataggaagg

SEQ ID NO: 62954 - DNA, 60 bp, Artificial
  Synthetic oligonucleotide
accgatcttgaggcactcatggaatggctaaagacaagaccaatcctgtcacctctgacc

SEQ ID NO: 62955 - DNA, 60 bp, Artificial
  Synthetic oligonucleotide
caccgatcttgaagcactcatggagtggctaaagacaagaccaatcctgtcacctctgac

SEQ ID NO: 62956 - DNA, 60 bp, Artificial
  Synthetic oligonucleotide
aacattccacggggccaaagaagtagcgctcagttattctgctggtgcacttgccagttg

SEQ ID NO: 62957 - DNA, 60 bp, Artificial
  Synthetic oligonucleotide
gaaagaagagttctccgagatcatgaagatctgttccaccattgaagagctcagacggca

SEQ ID NO: 62958 - DNA, 60 bp, Artificial
  Synthetic oligonucleotide
gcacgaagggtacgaagaatttacaatggttgggaaaagggcaacagctatactcagaaa

SEQ ID NO: 62959 - DNA, 60 bp, Artificial
  Synthetic oligonucleotide
catgaagggtacgaagaatttacaatggttgggaaaagggcaacagctatactcagaaaa

SEQ ID NO: 62960 - DNA, 60 bp, Artificial
  Synthetic oligonucleotide
gattccaacactgtgtcaagctttcaggtagattgcttcctttggcatatccgcaaacgg

SEQ ID NO: 62961 - DNA, 56 bp, Artificial
  Synthetic oligonucleotide
tactcttcctcattgatgtgggagattaatggccctgagtcagtgttgatcaatac

SEQ ID NO: 62962 - DNA, 60 bp, Artificial
  Synthetic oligonucleotide
tagataatcactcactgagtgacattcacatcatggcgtctcaaggcaccaaacgatctt

SEQ ID NO: 62963 - DNA, 53 bp, Artificial
  Synthetic oligonucleotide
ttggcatatccgcaaacggtttgcggacaatggattgggtgatgccccatttc

SEQ ID NO: 62964 - DNA, 60 bp, Artificial
  Synthetic oligonucleotide
tctccttgaaaatttacaggcctatcagaagcgaatgggggtgcagatgcaacgattcaa

SEQ ID NO: 62965 - DNA, 60 bp, Artificial
  Synthetic oligonucleotide
aagtgagacacaaattgaagataacagagaatagttttgagcaaataacatttatgcaag

SEQ ID NO: 62966 - DNA, 60 bp, Artificial
  Synthetic oligonucleotide
atggatgtcaatccgactttacttttcctgaaagtgccagcacaaaatgctataagcaca

SEQ ID NO: 62967 - DNA, 60 bp, Artificial
  Synthetic oligonucleotide
ttttgaccggttggagactttgacactattaagggctttcaccgaagagggagcaattgt

SEQ ID NO: 62968 - DNA, 60 bp, Artificial
  Synthetic oligonucleotide
ccggttggagaatctgacattactaagggctttcaccgaagagggagcaattgttggcga

SEQ ID NO: 62969 - DNA, 60 bp, Artificial
  Synthetic oligonucleotide
ttttgatcggttggagacgttgatactgctaagggctttcaccgaagagggagcaattgt

SEQ ID NO: 62970 - DNA, 60 bp, Artificial
  Synthetic oligonucleotide
tgattgaagaagtgcggcacaaattgaagatgacagagaatagtttcgagcaaataacat

SEQ ID NO: 62971 - DNA, 55 bp, Artificial
  Synthetic oligonucleotide
ggggacttgaatggaatgataacacagttcgagtctctgaaactctacagagatt

SEQ ID NO: 62972 - DNA, 60 bp, Artificial
  Synthetic oligonucleotide
gcagctgtaatccagtgactgttgatggagcagacggagtaaaggggttttcatacaaat

SEQ ID NO: 62973 - DNA, 60 bp, Artificial
  Synthetic oligonucleotide
gctatggggcattcaccatccacctaccagtactgatcaacaaagtctctaccagaatgc

SEQ ID NO: 62974 - DNA, 60 bp, Artificial
  Synthetic oligonucleotide
tgtgctatggggcattcaccatccacctaccagtactgatcaacaaagtctctaccagaa

SEQ ID NO: 62975 - DNA, 60 bp, Artificial
  Synthetic oligonucleotide
gctcaccgtgcccagtgagcgaggactgcagcgtagacgctttgtccagaatgccctcaa

SEQ ID NO: 62976 - DNA, 60 bp, Artificial
  Synthetic oligonucleotide
gcccagtgagcgaggactgcagcgtagacgctttgttcagaatgctctcaatgggaacgg

SEQ ID NO: 62977 - DNA, 60 bp, Artificial
  Synthetic oligonucleotide
ccgtgcccagtgagcgaggactgcagcgtagacgctttgtccaaaatgccctcaatggga

SEQ ID NO: 62978 - DNA, 60 bp, Artificial
  Synthetic oligonucleotide
caccgtgcccagtgagcgaggactgcagcgtagacgctttgtccaaaatgccctcaatgg

SEQ ID NO: 62979 - DNA, 60 bp, Artificial
  Synthetic oligonucleotide
acaatggttgggaaaagggcaacagctatactcagaaaagcaactagaaggttgattcaa

SEQ ID NO: 62980 - DNA, 60 bp, Artificial
  Synthetic oligonucleotide
tacaatggttgggaaaagggcaacagctatactcagaaaagcaactagaaggttggttca

SEQ ID NO: 62981 - DNA, 60 bp, Artificial
  Synthetic oligonucleotide
gcgctacctagctgacatgacccttgaggaaatgtcaagagattggttcatgctcatgcc

SEQ ID NO: 62982 - DNA, 60 bp, Artificial
  Synthetic oligonucleotide
gtcaaaatggaccaggcgataatggataagaacatcatactgaaagcgaatttcagtgtg

SEQ ID NO: 62983 - DNA, 60 bp, Artificial
  Synthetic oligonucleotide
atcagaatggaccaggcgataatggataagaacatcatactgaaagcgaatttcagtgtg

SEQ ID NO: 62984 - DNA, 60 bp, Artificial
  Synthetic oligonucleotide
gtcagaatggaccaggcgataatggataagaacatcatactgaaagcgaatttcagtgtg

SEQ ID NO: 62985 - DNA, 60 bp, Artificial
  Synthetic oligonucleotide
gaccaggcaataatggataagaacatcatactgaaagcgaatttcagtgtgatttttgac

SEQ ID NO: 62986 - DNA, 51 bp, Artificial
  Synthetic oligonucleotide
gaccaggcaataatggataagaacatcatactgaaagcgaatttcagtgtg

SEQ ID NO: 62987 - DNA, 55 bp, Artificial
  Synthetic oligonucleotide
aaaagaacatcatactgaaagcgaacttcagtgtgatttttgaccggttggagac

SEQ ID NO: 62988 - DNA, 60 bp, Artificial
  Synthetic oligonucleotide
gacgactgattcaaaatagcataacaatagagagaatggtgctctctgcttttgatgaga

SEQ ID NO: 62989 - DNA, 60 bp, Artificial
  Synthetic oligonucleotide
gatcaaacgtgggatcaatgaccgaaacttctggaggggtgaaaatggacgaagaacaag

SEQ ID NO: 62990 - DNA, 60 bp, Artificial
  Synthetic oligonucleotide
cgtgggatcaatgaccgaaacttctggaggggtgaaaatggacgaagaacaaggattgca

SEQ ID NO: 62991 - DNA, 60 bp, Artificial
  Synthetic oligonucleotide
acgtgggatcaatgaccgaaacttctggaggggtgaaaatggacgaagaacaaggattgc

SEQ ID NO: 62992 - DNA, 60 bp, Artificial
  Synthetic oligonucleotide
cgtggaatcaatgaccgaaacttctggaggggtgaaaatggacgaagaacaaggattgca

SEQ ID NO: 62993 - DNA, 60 bp, Artificial
  Synthetic oligonucleotide
cgcactgggatggatcccagaatgtgctccctaatgcaaggttcaacacttcccagaagg

SEQ ID NO: 62994 - DNA, 60 bp, Artificial
  Synthetic oligonucleotide
aagattctacatccaaatgtgcactgaactcaaactcagtgactatgaggggcgactgat

SEQ ID NO: 62995 - DNA, 60 bp, Artificial
  Synthetic oligonucleotide
gagattctacatccaaatgtgcactgaactcaaactcagtgactatgagggacgactgat

SEQ ID NO: 62996 - DNA, 60 bp, Artificial
  Synthetic oligonucleotide
aaggttctacatccaaatgtgcactgaactcaaactcagtgactatgagggacgactgat

SEQ ID NO: 62997 - DNA, 60 bp, Artificial
  Synthetic oligonucleotide
gattctacatccaaatgtgcactgaactcaaactcagtgactatgaggggcgactgattc

SEQ ID NO: 62998 - DNA, 60 bp, Artificial
  Synthetic oligonucleotide
ggttctacatccaaatgtgcactgaactcaaactcagtgactatgagggacgactgattc

SEQ ID NO: 62999 - DNA, 60 bp, Artificial
  Synthetic oligonucleotide
ggaagattctacatccaaatgtgcactgaactcaaactcagtgactatgagggacgactg

SEQ ID NO: 63000 - DNA, 60 bp, Artificial
  Synthetic oligonucleotide
ctggaaggataaagaaagaggatttcgcagagatcatgaagatctgttccaccattgaag

SEQ ID NO: 63001 - DNA, 60 bp, Artificial
  Synthetic oligonucleotide
tcccagtgctgggaaagatcctaagaaaactggaggacctatatatagaagagtagacgg

SEQ ID NO: 63002 - DNA, 57 bp, Artificial
  Synthetic oligonucleotide
atccaaaatggaggacttcgtacgacagtgcttcaatccgatgattgtcgaacttgc

SEQ ID NO: 63003 - DNA, 50 bp, Artificial
  Synthetic oligonucleotide
atggaggacttcgtacgacagtgcttcaatccgatgattgtcgaacttgc

SEQ ID NO: 63004 - DNA, 60 bp, Artificial
  Synthetic oligonucleotide
ggttgaaaggttaaaacatggaacctttggccctgtacaatttagaaaccaagtcaaaat

SEQ ID NO: 63005 - DNA, 60 bp, Artificial
  Synthetic oligonucleotide
cgaagatctgttccaccattgaagatctcagacggcaaaagtagtgaatttggcttgtcc

SEQ ID NO: 63006 - DNA, 60 bp, Artificial
  Synthetic oligonucleotide
tgctccaataatgttctcgaacaagatggctagattgggtaaaggatacatgtttgagag

SEQ ID NO: 63007 - DNA, 60 bp, Artificial
  Synthetic oligonucleotide
cctagcagctcatataggagaccggttgggatttccagtatggtggaggccatggtttcc

SEQ ID NO: 63008 - DNA, 54 bp, Artificial
  Synthetic oligonucleotide
agtcacaattggagaatgtccaaaatatgtcaaaagcacaaaattgagaatggc

SEQ ID NO: 63009 - DNA, 60 bp, Artificial
  Synthetic oligonucleotide
caagccagaaatagcagcaagacccaaggtgagaggtcaagcagggagaatgaactatta

SEQ ID NO: 63010 - DNA, 60 bp, Artificial
  Synthetic oligonucleotide
catccagttacaattggagaatgtccaaaatatgtcaaaagcacaaaattgagaatggct

SEQ ID NO: 63011 - DNA, 60 bp, Artificial
  Synthetic oligonucleotide
ctatcgtcccgtcaggccccctcaaagccgagatcgcgcagagactggaagatgtctttg

SEQ ID NO: 63012 - DNA, 60 bp, Artificial
  Synthetic oligonucleotide
ttgggcaaggggacgtagtgttggtgatgaaacgaaaacgggactctagcatacttactg

SEQ ID NO: 63013 - DNA, 60 bp, Artificial
  Synthetic oligonucleotide
tgtacccacttcgcgctacctagctgacatgacccttgaggaaatgtcaagagattggtt

SEQ ID NO: 63014 - DNA, 60 bp, Artificial
  Synthetic oligonucleotide
aagatgagccttctaaccgaggtcgaaacgtacgttctctctatcgtcccgtcaggcccc

SEQ ID NO: 63015 - DNA, 60 bp, Artificial
  Synthetic oligonucleotide
aagatgagccttctaaccgaggtcgaaacgtacgttctctctattgttccgtcaggcccc

SEQ ID NO: 63016 - DNA, 60 bp, Artificial
  Synthetic oligonucleotide
aatcgtctgatgattttgctctgattgtgaacgctcccaatcatgaagggattcaagcag

SEQ ID NO: 63017 - DNA, 60 bp, Artificial
  Synthetic oligonucleotide
cacgatagcatgcccttatgctggagcaaacagcttctacagaaatttaatatggctggt

SEQ ID NO: 63018 - DNA, 60 bp, Artificial
  Synthetic oligonucleotide
ggtgtcacgatagcatgcccttatgctggagcaaacagcttctacagaaatttaatatgg

SEQ ID NO: 63019 - DNA, 60 bp, Artificial
  Synthetic oligonucleotide
tagcgctcagttattctgctggtgcacttgccagttgcatgggcctcatatacaacagaa

SEQ ID NO: 63020 - DNA, 60 bp, Artificial
  Synthetic oligonucleotide
gcgctcagttattctgctggtgcacttgccagttgcatgggcctcatatacaacagaatg

SEQ ID NO: 63021 - DNA, 60 bp, Artificial
  Synthetic oligonucleotide
cggctacattgagggcaagctttctcaaatgtccaaagaagtaaatgctaggattgaacc

SEQ ID NO: 63022 - DNA, 60 bp, Artificial
  Synthetic oligonucleotide
caacaaagggaaggaagtccttgtgctatggggcattcaccatccacctaccagtaatga

SEQ ID NO: 63023 - DNA, 60 bp, Artificial
  Synthetic oligonucleotide
atgtgcactgaactcaaactcagtgactatgaagggaggctgatccagaacagcataaca

SEQ ID NO: 63024 - DNA, 60 bp, Artificial
  Synthetic oligonucleotide
ggctaatgtactgattgggcaaggagacgtagtgttggtaatgaaacgaaaacgggactc

SEQ ID NO: 63025 - DNA, 60 bp, Artificial
  Synthetic oligonucleotide
gtcagaatggaccaggcgataacggataagaacatcatactgaaagcgaatttcagtgtg

SEQ ID NO: 63026 - DNA, 60 bp, Artificial
  Synthetic oligonucleotide
tttgaatctggaaggataaagaaagaggatttcgccgagatcatgaagatctgttccacc

SEQ ID NO: 63027 - DNA, 60 bp, Artificial
  Synthetic oligonucleotide
ggatcatcagaaactgggagactgttaaaattcagtggtcgcaagaccctacaatgctgt

SEQ ID NO: 63028 - DNA, 60 bp, Artificial
  Synthetic oligonucleotide
ggatcatcaggaactgggagactgttaaaattcagtggtcgcaagaccctacaatgctgt

SEQ ID NO: 63029 - DNA, 60 bp, Artificial
  Synthetic oligonucleotide
gaaagaataccgatcttgaggctctcatggagtggctaaagacaagaccaatcctgtcac

SEQ ID NO: 63030 - DNA, 60 bp, Artificial
  Synthetic oligonucleotide
tttgctggaaagaataccgatcttgaggctctcatggagtggctaaagacaagaccaatc

SEQ ID NO: 63031 - DNA, 60 bp, Artificial
  Synthetic oligonucleotide
ggaaagaataccgatcttgaggctctcatggagtggctaaagacaagaccaatcctgtca

SEQ ID NO: 63032 - DNA, 60 bp, Artificial
  Synthetic oligonucleotide
gtccgcactgggatggatcccagaatgtgctccctaatgcaaggttcaacacttcccaga

SEQ ID NO: 63033 - DNA, 60 bp, Artificial
  Synthetic oligonucleotide
gttcgcactgggatggatcccagaatgtgctccctaatgcaaggttcaactctccccaga

SEQ ID NO: 63034 - DNA, 60 bp, Artificial
  Synthetic oligonucleotide
gttcgcactgggatggatcccagaatgtgctccctaatgcaaggttcaacacttcccaga

SEQ ID NO: 63035 - DNA, 60 bp, Artificial
  Synthetic oligonucleotide
tcttgttcgcactgggatggatcccagaatgtgctccctaatgcaaggttcaacacttcc

SEQ ID NO: 63036 - DNA, 60 bp, Artificial
  Synthetic oligonucleotide
acaagagctcttgttcgcactgggatggatcccagaatgtgctccctaatgcaaggttca

SEQ ID NO: 63037 - DNA, 60 bp, Artificial
  Synthetic oligonucleotide
aatcagagaagacacacatccacattttctcgttcactggagaagaaatggccacaaagg

SEQ ID NO: 63038 - DNA, 60 bp, Artificial
  Synthetic oligonucleotide
gggaggatgtcgccccaatcgagcatattgcgagtatgaggaggaactacttcacagcag

SEQ ID NO: 63039 - DNA, 60 bp, Artificial
  Synthetic oligonucleotide
gatggacctccctgttctcaacggtcaaaattcctgctgatggatgccttaaaattaagc

SEQ ID NO: 63040 - DNA, 60 bp, Artificial
  Synthetic oligonucleotide
tcttgagggaaacgccacgctctctccgattacctgatggacctccctgttctcaacggt

SEQ ID NO: 63041 - DNA, 60 bp, Artificial
  Synthetic oligonucleotide
gaccagactattcaccatcaggcaggaaatggccattaggggcctatgggattcctttcg

SEQ ID NO: 63042 - DNA, 60 bp, Artificial
  Synthetic oligonucleotide
ccaatgataagcaagtgcaggaccaaagaaggaaggcggaagacaaatctatatgggttc

SEQ ID NO: 63043 - DNA, 60 bp, Artificial
  Synthetic oligonucleotide
attgtcaaaccacatgagaagggcataaatcccaactacctcctagcttggaaacaggtg

SEQ ID NO: 63044 - DNA, 60 bp, Artificial
  Synthetic oligonucleotide
tgacgtggtaaattttgtgagcatggagttttctcttaccgatccgaggctggagccaca

SEQ ID NO: 63045 - DNA, 60 bp, Artificial
  Synthetic oligonucleotide
gcaagctggattcagagtgaattcaacaaggcatgtgagctgactgattctagttggata

SEQ ID NO: 63046 - DNA, 60 bp, Artificial
  Synthetic oligonucleotide
cggaggttgagaagcccaagtttcttccggatctgtatgactataaggagaaccgattca

SEQ ID NO: 63047 - DNA, 60 bp, Artificial
  Synthetic oligonucleotide
aaaactgaaacatggcccattggagaatcacccaaaggggtggaagaaggctccatcggg

SEQ ID NO: 63048 - DNA, 60 bp, Artificial
  Synthetic oligonucleotide
cgggaaagtatgcaggaccttactggcaaagtctgtattcaatagcctgtacgcatcccc

SEQ ID NO: 63049 - DNA, 55 bp, Artificial
  Synthetic oligonucleotide
gaaccaatggaacctctaaaatcaaaatgaagtggggtatggaaatgagacgttg

SEQ ID NO: 63050 - DNA, 60 bp, Artificial
  Synthetic oligonucleotide
caaacaaatttgctgcaatatgtacacacctggaagtttgtttcatgtattcggatttcc

SEQ ID NO: 63051 - DNA, 60 bp, Artificial
  Synthetic oligonucleotide
gccacaaaggcagactacactcttgacgaggagagcagagcaagaatcaagaccagacta

SEQ ID NO: 63052 - DNA, 60 bp, Artificial
  Synthetic oligonucleotide
aaaattaagcattgaggatccgagtcacgagggggaggggataccgctatatgatgcaat

SEQ ID NO: 63053 - DNA, 60 bp, Artificial
  Synthetic oligonucleotide
taacgcgtcttggttcaactccttccttgtgcatgcactgaaatagttgtggcaatgcta

SEQ ID NO: 63054 - DNA, 60 bp, Artificial
  Synthetic oligonucleotide
gcctgtacgcatccccacaactcgagggattttcagctgaatcaagaaagttacttctaa

SEQ ID NO: 63055 - DNA, 60 bp, Artificial
  Synthetic oligonucleotide
ataatggatcccaacactgtgtcaagctttcaggtagattgcttcctttggcatgtccgc

SEQ ID NO: 63056 - DNA, 60 bp, Artificial
  Synthetic oligonucleotide
cccaaggtgctctattaaatgacaaacattcaaatgggaccgttaaggacagaagcccct

SEQ ID NO: 63057 - DNA, 60 bp, Artificial
  Synthetic oligonucleotide
cgggaaggcaagagaagaaccccgcattgagaatgaaatggatgatggcaatgaaatatc

SEQ ID NO: 63058 - DNA, 60 bp, Artificial
  Synthetic oligonucleotide
gggaaggcaagagaagaaccccgcattgagaatgaaatggatgatggcaatgaaatatcc

SEQ ID NO: 63059 - DNA, 60 bp, Artificial
  Synthetic oligonucleotide
ttggacaaggggacgtagtgttggtaatgaaacgaaaacgggactctagcatacttactg

SEQ ID NO: 63060 - DNA, 60 bp, Artificial
  Synthetic oligonucleotide
cgagcaaataacatttatgcaagccttacaactattgcttgaagtagaacaagagatgag

SEQ ID NO: 63061 - DNA, 60 bp, Artificial
  Synthetic oligonucleotide
aaataacatttatgcaagccttacaactattgcttgaagtagaacaagagatgagaactt

SEQ ID NO: 63062 - DNA, 55 bp, Artificial
  Synthetic oligonucleotide
tccttgatcggcttcgccgagatcagaagtctctaaagggaagaggcagcactct

SEQ ID NO: 63063 - DNA, 60 bp, Artificial
  Synthetic oligonucleotide
agggagcaattgttggcgaaatttcaccattgccttcttttccaggacatactaatgagg

SEQ ID NO: 63064 - DNA, 60 bp, Artificial
  Synthetic oligonucleotide
gggagcaattgttggcgaaatttcaccattgccttcttttccaggacatactaatgagga

SEQ ID NO: 63065 - DNA, 60 bp, Artificial
  Synthetic oligonucleotide
gcaagcgttacagctattgtttgaagtggaacaagagattagaacgttttcgtttcagct

SEQ ID NO: 63066 - DNA, 60 bp, Artificial
  Synthetic oligonucleotide
aactttttttctgacccaaggcgctttgctgaatgacaggcattctaatggaaccgtcaa

SEQ ID NO: 63067 - DNA, 60 bp, Artificial
  Synthetic oligonucleotide
taatccgcgtcctaatgatgggaaaggcaattgtggcccagtactttctaatggagcaaa

SEQ ID NO: 63068 - DNA, 60 bp, Artificial
  Synthetic oligonucleotide
cgcgtcctaatgatgggaaaggcaattgtggcccagtactttctaatggagcaaatggag

SEQ ID NO: 63069 - DNA, 60 bp, Artificial
  Synthetic oligonucleotide
gtgatgggaaaggcaattgtggcccagtactttctaatggagcaaatggagtgaaggggt

SEQ ID NO: 63070 - DNA, 60 bp, Artificial
  Synthetic oligonucleotide
ctcaaggaacctgctgggaacagatgtacactccaggtggggaagtgaagaatgatgatg

SEQ ID NO: 63071 - DNA, 60 bp, Artificial
  Synthetic oligonucleotide
agggctttcaccgaagagggagcaattgttggagaaatttcaccattactttctcttcca

SEQ ID NO: 63072 - DNA, 53 bp, Artificial
  Synthetic oligonucleotide
agggctttcaccgaagagggagcaattgttggagaaatttcaccattactttc

SEQ ID NO: 63073 - DNA, 60 bp, Artificial
  Synthetic oligonucleotide
tggtattctcacaagaagattgcatggtaaaagcagttagaggtgatctgaatttcgtta

SEQ ID NO: 63074 - DNA, 60 bp, Artificial
  Synthetic oligonucleotide
tggtattctcacaagaagattgcatggtaaaagcagttagaggtgatctgaatttcgtca

SEQ ID NO: 63075 - DNA, 60 bp, Artificial
  Synthetic oligonucleotide
tttctttggcatatccgcaaacggtttgcggacaatggattgggtgatgccccattcctt

SEQ ID NO: 63076 - DNA, 60 bp, Artificial
  Synthetic oligonucleotide
ttcctttggcatatccgcaaacggtttgcggacaatggattgggtgatgccccattcctt

SEQ ID NO: 63077 - DNA, 60 bp, Artificial
  Synthetic oligonucleotide
tcatcggagggcttgaatggaatggtaacacggttcgagtctctgaaaatctacagagat

SEQ ID NO: 63078 - DNA, 60 bp, Artificial
  Synthetic oligonucleotide
tggggtcctcatcggagggcttgaatggaatggtaacacggttcgagtccctgaaaatct

SEQ ID NO: 63079 - DNA, 60 bp, Artificial
  Synthetic oligonucleotide
gggtcctcatcggagggcttgaatggaatggtaacacggttcgagtccctgaaaatctac

SEQ ID NO: 63080 - DNA, 60 bp, Artificial
  Synthetic oligonucleotide
catcggagggcttgaatggaatggtaacacggttcgagtctctgaaaatctacagagatt

SEQ ID NO: 63081 - DNA, 60 bp, Artificial
  Synthetic oligonucleotide
cagcttctggatgtgttccaatgggtctttgcaatgcagaatatgcatctgagaccagaa

SEQ ID NO: 63082 - DNA, 60 bp, Artificial
  Synthetic oligonucleotide
gacggcagcatgtccttatgctggagcaaacagcttctacagaaatttaatatggctggt

SEQ ID NO: 63083 - DNA, 60 bp, Artificial
  Synthetic oligonucleotide
tggacactaatagaacctggagacacaataacattcgaagcaactggaaatctagtggta

SEQ ID NO: 63084 - DNA, 60 bp, Artificial
  Synthetic oligonucleotide
ggtgtgacggcagcatgtccttatgctggagcaaacagcttctacagaaatttaatatgg

SEQ ID NO: 63085 - DNA, 50 bp, Artificial
  Synthetic oligonucleotide
gatcggcttcgccgagatcagaagtccctaaggggaagaggcagcactct

SEQ ID NO: 63086 - DNA, 60 bp, Artificial
  Synthetic oligonucleotide
caggagttgacaggttttatcgaacctgtaagctactcggaattaacatgagcaaaaaga

SEQ ID NO: 63087 - DNA, 60 bp, Artificial
  Synthetic oligonucleotide
gtgcgaatggaccaggcgatcatggaaaagaacatcatactgaaagcgaatttcagtgtg

SEQ ID NO: 63088 - DNA, 60 bp, Artificial
  Synthetic oligonucleotide
gctctcacttggaatgcagaaccttttttctgacccaaggcgctttgctgaatgacagac

SEQ ID NO: 63089 - DNA, 60 bp, Artificial
  Synthetic oligonucleotide
ggatcatcaggaactgggaaactgttaaaattcagtggtcacaagacccgacaatgctgt

SEQ ID NO: 63090 - DNA, 60 bp, Artificial
  Synthetic oligonucleotide
ggatcatcagaaactgggaaactgttaaaattcagtggtcacaagaccccacaatgctgt

SEQ ID NO: 63091 - DNA, 60 bp, Artificial
  Synthetic oligonucleotide
attcaagctggagttgacaggttttatcgaacctgtaagctactcggaattaatatgagt

SEQ ID NO: 63092 - DNA, 60 bp, Artificial
  Synthetic oligonucleotide
tacctagaagagcatcccagtgctgggaaagatcctaagaaaactggaggacccatatat

SEQ ID NO: 63093 - DNA, 60 bp, Artificial
  Synthetic oligonucleotide
atacctagaagaacatcccagtgctgggaaagatcctaagaaaactggaggacccatata

SEQ ID NO: 63094 - DNA, 60 bp, Artificial
  Synthetic oligonucleotide
tcatcataaaaggaagatcccacttaagaaatgacaccgacgtggtaaactttgtgagca

SEQ ID NO: 63095 - DNA, 60 bp, Artificial
  Synthetic oligonucleotide
caggaacaggatacaccatggatactgtgaacaggacacatcagtactcagaaagaggga

SEQ ID NO: 63096 - DNA, 60 bp, Artificial
  Synthetic oligonucleotide
gacaggaacaggatacaccatggatactgtgaacaggacacatcagtactcagaaagagg

SEQ ID NO: 63097 - DNA, 60 bp, Artificial
  Synthetic oligonucleotide
acttaagatgaccatagcatctgtaccttcttcgcgctacctagctgacatgacccttga

SEQ ID NO: 63098 - DNA, 60 bp, Artificial
  Synthetic oligonucleotide
attgaataagggctctggttccggaattataatgtcggatgctccggttcacaattgtga

SEQ ID NO: 63099 - DNA, 60 bp, Artificial
  Synthetic oligonucleotide
atacacaaataacaaaaggaaagaagtgcttgtaatctggggagtgcaccaccctccaac

SEQ ID NO: 63100 - DNA, 60 bp, Artificial
  Synthetic oligonucleotide
tgatagatgggtggtatgggtatcaccatcaaaatgagcagggatctggttacgcagctg

SEQ ID NO: 63101 - DNA, 60 bp, Artificial
  Synthetic oligonucleotide
gatgggtggtatgggtatcaccatcaaaatgagcagggatctggttacgcagctgatcag

SEQ ID NO: 63102 - DNA, 60 bp, Artificial
  Synthetic oligonucleotide
gctctggttccggaattataatgtcggatgctccggttcacaattgtgatacaaagtgcc

SEQ ID NO: 63103 - DNA, 60 bp, Artificial
  Synthetic oligonucleotide
acaattgtgatacaaagtgccaaacccctcatggggcattgaacagtagtcttccttttc

SEQ ID NO: 63104 - DNA, 61 bp, Artificial
  Synthetic oligonucleotide
ggcacatataattatcccaaatattcagaagaatccaaattgaatagagaggaagtagacg

SEQ ID NO: 63105 - DNA, 51 bp, Artificial
  Synthetic oligonucleotide
caaccaagatggaagcaaaactgtttgtattattctgtacattcactgcgc

SEQ ID NO: 63106 - DNA, 60 bp, Artificial
  Synthetic oligonucleotide
caactgagaatggcaacaggattaaggaacgtcccctctattcaatccagaggacttttc

SEQ ID NO: 63107 - DNA, 60 bp, Artificial
  Synthetic oligonucleotide
aatttatatgaaaaggtcaaatcacaattgaggaacaatgccaaagaagtcgggaatggt

SEQ ID NO: 63108 - DNA, 60 bp, Artificial
  Synthetic oligonucleotide
agtgccaaacccctcatggggcattgaacagtagtcttccttttcagaacgtacatccca

SEQ ID NO: 63109 - DNA, 60 bp, Artificial
  Synthetic oligonucleotide
caaattcagaaaatggaacatgctaccccggagaattcgctgattatgaagaattaaggg

SEQ ID NO: 63110 - DNA, 60 bp, Artificial
  Synthetic oligonucleotide
ggcaggatgaattattattggacactgttagatcaaggagacaccataacttttgaagcc

SEQ ID NO: 63111 - DNA, 60 bp, Artificial
  Synthetic oligonucleotide
cgggaatggttgttttgagttctatcacaaatgtgatgatgaatgcatggagagcgtaaa

SEQ ID NO: 63112 - DNA, 60 bp, Artificial
  Synthetic oligonucleotide
aagcaggcaggatgaattattattggacactgttagatcaaggagacaccataacttttg

SEQ ID NO: 63113 - DNA, 60 bp, Artificial
  Synthetic oligonucleotide
ctatggatagtaaagaagggaaactcctatcctaaactcagcaaatcatacacaaataac

SEQ ID NO: 63114 - DNA, 60 bp, Artificial
  Synthetic oligonucleotide
ggtcaaatcacaattgaggaacaatgccaaagaagtcgggaatggttgttttgagttcta

SEQ ID NO: 63115 - DNA, 60 bp, Artificial
  Synthetic oligonucleotide
ggttgttttgagttctatcacaaatgtgatgatgaatgcatggagagcgtaaagaatggc

SEQ ID NO: 63116 - DNA, 60 bp, Artificial
  Synthetic oligonucleotide
cgcagctgatcagaaaagcacacaaaatgcaattgacgggatcagcaacaaagtgaactc

SEQ ID NO: 63117 - DNA, 60 bp, Artificial
  Synthetic oligonucleotide
tacgcagctgatcagaaaagcacacaaaatgcaattgacgggatcagcaacaaagtgaac

SEQ ID NO: 63118 - DNA, 60 bp, Artificial
  Synthetic oligonucleotide
tttggatgtttggacatataatgctgagttgctcattttgctcgagaacgaaaggactct

SEQ ID NO: 63119 - DNA, 61 bp, Artificial
  Synthetic oligonucleotide
cgagaacgaaaggactctagatttccatgactttaacgtaagaaatttatatgaaaaggtc

SEQ ID NO: 63120 - DNA, 60 bp, Artificial
  Synthetic oligonucleotide
ttgctatggatagtaaagaagggaaactcctatcctaaactcagcaaatcatacacaaat

SEQ ID NO: 63121 - DNA, 60 bp, Artificial
  Synthetic oligonucleotide
gaattaagggagcagctgagttcagtttcttcatttgaaaggtttgaaattttcccaaaa

SEQ ID NO: 63122 - DNA, 60 bp, Artificial
  Synthetic oligonucleotide
taacaaaaggaaagaagtgcttgtaatctggggagtgcaccaccctccaactaccaatga

SEQ ID NO: 63123 - DNA, 60 bp, Artificial
  Synthetic oligonucleotide
atgtgacttgttgctcacagcgaattcatggtcttacataatagagacttcaaattcaga

SEQ ID NO: 63124 - DNA, 60 bp, Artificial
  Synthetic oligonucleotide
cagtaattgagaaaatgaacactcaatttacttcagtgggcaaggagttcaatgatctag

SEQ ID NO: 63125 - DNA, 60 bp, Artificial
  Synthetic oligonucleotide
ttttgctcgagaacgaaaggactctagatttccatgactttaacgtaagaaatttatatg

SEQ ID NO: 63126 - DNA, 60 bp, Artificial
  Synthetic oligonucleotide
agagcgtaaagaatggcacatataattatcccaaatattcagaagaatccaaattgaata

SEQ ID NO: 63127 - DNA, 60 bp, Artificial
  Synthetic oligonucleotide
cctggagacacaataacattcgaagcaactggaaatctagtggtaccaagatatgctttc

SEQ ID NO: 63128 - DNA, 60 bp, Artificial
  Synthetic oligonucleotide
acgaagaatttacaatggttgggaaaagggcaacagctatactcagaaaggcaactagaa

SEQ ID NO: 63129 - DNA, 60 bp, Artificial
  Synthetic oligonucleotide
ctgattaatgatccctgggttttgcttaatgcgtcttggttcaactccttcctcacacat

SEQ ID NO: 63130 - DNA, 60 bp, Artificial
  Synthetic oligonucleotide
ctcagtgaaacaggatgttgtggcaataactgattggtcagggtacagtggaagtttcgt

SEQ ID NO: 63131 - DNA, 60 bp, Artificial
  Synthetic oligonucleotide
cccaagaggaaccgctctattctcaacacaagccaaaggggaattcttgaggatgaacag

SEQ ID NO: 63132 - DNA, 60 bp, Artificial
  Synthetic oligonucleotide
aaaagcagagagtgaacaaaagaagctatctaataagagcattaacattgaacacaatga

SEQ ID NO: 63133 - DNA, 60 bp, Artificial
  Synthetic oligonucleotide
gagcatttgtgagaagcttgaacagtctggacttccagttggaggtaatgaaaagaaggc

SEQ ID NO: 63134 - DNA, 60 bp, Artificial
  Synthetic oligonucleotide
gtccagccaagagcatggaatatgacgctgttgcaactacacactcctggattcccaaga

SEQ ID NO: 63135 - DNA, 60 bp, Artificial
  Synthetic oligonucleotide
ccaaggtgagaggtcaagcagggagaatgaactattactggacgctagtagagcctggag

SEQ ID NO: 63136 - DNA, 60 bp, Artificial
  Synthetic oligonucleotide
ccgaatggctacattgagggcaagctttcccaaatgtctagagaagtaaatgctagaatc

SEQ ID NO: 63137 - DNA, 60 bp, Artificial
  Synthetic oligonucleotide
caaagcatgtgaactgactgattcgagctggttggagcttgatgagattggagaggatat

SEQ ID NO: 63138 - DNA, 60 bp, Artificial
  Synthetic oligonucleotide
ccaaagaaggaaggcgaaagaccaatttatacggattcatcataaaaggaagatcccact

SEQ ID NO: 63139 - DNA, 60 bp, Artificial
  Synthetic oligonucleotide
agggaaggcgaaagaccaatttatacggattcatcataaagggaagatcccacttaagaa

SEQ ID NO: 63140 - DNA, 60 bp, Artificial
  Synthetic oligonucleotide
ccgaatggctacattgagggcaagctttcccaaatgtctagagaagtaaatgctagaatt

SEQ ID NO: 63141 - DNA, 51 bp, Artificial
  Synthetic oligonucleotide
ttgttcaagctcttagggacaaccttgaacctggaacctttgatcttgggg

SEQ ID NO: 63142 - DNA, 60 bp, Artificial
  Synthetic oligonucleotide
ttgttcaagctcttagggacaaccttgaacctggaacctttgatcttggggggttatatg

SEQ ID NO: 63143 - DNA, 60 bp, Artificial
  Synthetic oligonucleotide
gcttctcattgttcaagctcttagggacaaccttgaacctggaacctttgatcttgaggg

SEQ ID NO: 63144 - DNA, 60 bp, Artificial
  Synthetic oligonucleotide
ccgaatggctacattgagggcaagctttcccaaatgtctagagaagtaaatgctagaata

SEQ ID NO: 63145 - DNA, 60 bp, Artificial
  Synthetic oligonucleotide
ccaggcgatcatggaaaagaacatcatactgaaagcgaacttcagtgtgatttttgaccg

SEQ ID NO: 63146 - DNA, 60 bp, Artificial
  Synthetic oligonucleotide
gaacggaaaatggcgagaacaattgggccagaagtttgaagagataagatggttaattga

SEQ ID NO: 63147 - DNA, 60 bp, Artificial
  Synthetic oligonucleotide
ggcgagaacaattgggccagaagtttgaagagataagatggttaattgaagaagtgcgac

SEQ ID NO: 63148 - DNA, 60 bp, Artificial
  Synthetic oligonucleotide
cttggagaagcattaatgaggatgggggacctccattccctccaaaacaggaacggaaaa

SEQ ID NO: 63149 - DNA, 51 bp, Artificial
  Synthetic oligonucleotide
ggggacctccattccctccaaaacaggaacggaaaatggcgagaacaattg

SEQ ID NO: 63150 - DNA, 54 bp, Artificial
  Synthetic oligonucleotide
atactccttagagctttcacggaagaaggggcaattgtgggcgaaatctcaccg

SEQ ID NO: 63151 - DNA, 51 bp, Artificial
  Synthetic oligonucleotide
agtctctgaagctctacagagattcgcttggagaagcattaatgaggatgg

SEQ ID NO: 63152 - DNA, 60 bp, Artificial
  Synthetic oligonucleotide
gactattgcttctgtgcctgcttcacgctatctaactgacatgacccttgaagagatgtc

SEQ ID NO: 63153 - DNA, 60 bp, Artificial
  Synthetic oligonucleotide
ggcacttaaaatgactattgcttctgtgcctgcttcacgctatctaactgacatgaccct

SEQ ID NO: 63154 - DNA, 60 bp, Artificial
  Synthetic oligonucleotide
gcactcttggtctggaaatcgaaacagccactcgtgcgggaaagctaatagtgaagcgta

SEQ ID NO: 63155 - DNA, 60 bp, Artificial
  Synthetic oligonucleotide
tgcactcttggtctggaaatcgaaacagccactcgtgcgggaaagctaatagtgaagcgt

SEQ ID NO: 63156 - DNA, 55 bp, Artificial
  Synthetic oligonucleotide
cagaaagtagcaggttccctttgcatcagaatggaccaggcaataatgaataaaa

SEQ ID NO: 63157 - DNA, 60 bp, Artificial
  Synthetic oligonucleotide
cagaaagtagcaggttccctttgcatcagaatggaccaggcaataatgaataaaaacatc

SEQ ID NO: 63158 - DNA, 60 bp, Artificial
  Synthetic oligonucleotide
aatcgtctgatgattttgctctgattgtgaatgcacccaatcatgaagggattcaagcag

SEQ ID NO: 63159 - DNA, 60 bp, Artificial
  Synthetic oligonucleotide
atcggtggaatcggaagattctacatccaaatgtgcactgaactcaaactcagtgactat

SEQ ID NO: 63160 - DNA, 54 bp, Artificial
  Synthetic oligonucleotide
ggggattatatgaatcaattgaggagtgcctgattaatgatccctgggttttgc

SEQ ID NO: 63161 - DNA, 58 bp, Artificial
  Synthetic oligonucleotide
gggttatatgaatcaattgaggagtgcctgattaatgatccctgggttttgcttaatg

SEQ ID NO: 63162 - DNA, 52 bp, Artificial
  Synthetic oligonucleotide
ggggattatatgaatcaattgaggagtgcctgattaatgatccctgggtttt

SEQ ID NO: 63163 - DNA, 60 bp, Artificial
  Synthetic oligonucleotide
ctatatgaagcaattgaggagtgcctgattaatgatccctgggttttgcttaacgcgtct

SEQ ID NO: 63164 - DNA, 60 bp, Artificial
  Synthetic oligonucleotide
gtccagccaagagcatggaatatgatgctgttgcaactacacactcttggactcctaaga

SEQ ID NO: 63165 - DNA, 60 bp, Artificial
  Synthetic oligonucleotide
cggggtagactgtgtaatcctctgaacccatttgtcagccacaaggaaattgagtccgtg

SEQ ID NO: 63166 - DNA, 60 bp, Artificial
  Synthetic oligonucleotide
aatgctgcaatctattcgaaaaattcttccctagcagttcatacaggaggccagttggaa

SEQ ID NO: 63167 - DNA, 60 bp, Artificial
  Synthetic oligonucleotide
gatgaagattatcggggtagactgtgtaatcctctgaacccatttgtcagccacaaggaa

SEQ ID NO: 63168 - DNA, 60 bp, Artificial
  Synthetic oligonucleotide
cctccacattccggaggtctgcttgaagtgggagctaatggatgaagattatcggggtag

SEQ ID NO: 63169 - DNA, 56 bp, Artificial
  Synthetic oligonucleotide
aaaattcttccctagcagttcatacaggaggccagttggaatttccagcatggtgg

SEQ ID NO: 63170 - DNA, 60 bp, Artificial
  Synthetic oligonucleotide
caaatccaaacgagaagatcatttgagctgaagaagctatgggagcaaacccattcaaaa

SEQ ID NO: 63171 - DNA, 60 bp, Artificial
  Synthetic oligonucleotide
ccattcaaaaacaggactgctggtttcagatggaggaccaaatctatacaatatccggaa

SEQ ID NO: 63172 - DNA, 60 bp, Artificial
  Synthetic oligonucleotide
aacatttgaattcacaagctttttctaccgctatgggtttgtatccaatttcagtatgga

SEQ ID NO: 63173 - DNA, 60 bp, Artificial
  Synthetic oligonucleotide
atggagctgcccagctttggggtgtctggagttaatgaatcggctgatatgagcattgga

SEQ ID NO: 63174 - DNA, 60 bp, Artificial
  Synthetic oligonucleotide
catgataaacaatgatcttggaccagcgactgcccaaatggctcttcaactattcatcaa

SEQ ID NO: 63175 - DNA, 60 bp, Artificial
  Synthetic oligonucleotide
tcttggaccagcgactgcccaaatggctcttcaactattcatcaaggactacaggtacac

SEQ ID NO: 63176 - DNA, 60 bp, Artificial
  Synthetic oligonucleotide
tattcatcaaggactacaggtacacataccggtgccacagaggtgacacgcaaatccaaa

SEQ ID NO: 63177 - DNA, 60 bp, Artificial
  Synthetic oligonucleotide
ggactacaggtacacataccggtgccacagaggtgacacgcaaatccaaacgagaagatc

SEQ ID NO: 63178 - DNA, 60 bp, Artificial
  Synthetic oligonucleotide
ggacaaattgactcaaggtcgtcagacctatgactggacattaaacagaaaccaaccggc

SEQ ID NO: 63179 - DNA, 60 bp, Artificial
  Synthetic oligonucleotide
gaaccaagcggatatgcacaaacagattgtgtcttggaggcaatggctttccttgaggaa

SEQ ID NO: 63180 - DNA, 60 bp, Artificial
  Synthetic oligonucleotide
cagggatgcagatcagagggttcgtgtacttcgtagagacactggcgaggagcatctgtg

SEQ ID NO: 63181 - DNA, 60 bp, Artificial
  Synthetic oligonucleotide
cgaacggtctaacagctaatgaatcgggaaggctaatagattttctcaaggatgtgatgg

SEQ ID NO: 63182 - DNA, 60 bp, Artificial
  Synthetic oligonucleotide
aaaaacagagattggacaagaggagttatctaataagagcattgacattgaatacaatga

SEQ ID NO: 63183 - DNA, 60 bp, Artificial
  Synthetic oligonucleotide
agctaaattggcaaatgttgtgagaaaaatgatgactaactcacaagatacagaactctc

SEQ ID NO: 63184 - DNA, 60 bp, Artificial
  Synthetic oligonucleotide
ccctcgggtgtttctggcgatgataacgtacatcacaagaaatcaacctgaatggttcag

SEQ ID NO: 63185 - DNA, 60 bp, Artificial
  Synthetic oligonucleotide
cctccatacagccatggaacagggacaggatacaccatggacacagtcaacaggacacat

SEQ ID NO: 63186 - DNA, 60 bp, Artificial
  Synthetic oligonucleotide
ctggcgatgataacgtacatcacaagaaatcaacctgaatggttcagaaatgttttgagc

SEQ ID NO: 63187 - DNA, 60 bp, Artificial
  Synthetic oligonucleotide
aatcgagaagataaggccactcctaatagatggcacggcctcattgagtcctggaatgat

SEQ ID NO: 63188 - DNA, 60 bp, Artificial
  Synthetic oligonucleotide
gacttgaaatacttcaatgaatcaacgaggaagaaaatcgagaagataaggccactccta

SEQ ID NO: 63189 - DNA, 60 bp, Artificial
  Synthetic oligonucleotide
atgctcgcaaatattgacttgaaatacttcaatgaatcaacgaggaagaaaatcgagaag

SEQ ID NO: 63190 - DNA, 60 bp, Artificial
  Synthetic oligonucleotide
catgttcgaaagtaagagcatgaagctacggacacaaataccagcagaaatgctcgcaaa

SEQ ID NO: 63191 - DNA, 60 bp, Artificial
  Synthetic oligonucleotide
ttcagaaaggggaagatggacaacaaacacagagactggagcaccccagcttaacccgat

SEQ ID NO: 63192 - DNA, 60 bp, Artificial
  Synthetic oligonucleotide
caggacacatcaatattcagaaaggggaagatggacaacaaacacagagactggagcacc

SEQ ID NO: 63193 - DNA, 60 bp, Artificial
  Synthetic oligonucleotide
ctggagcaccccagcttaacccgattgatggaccactacccgaggacaatgaaccaagcg

SEQ ID NO: 63194 - DNA, 60 bp, Artificial
  Synthetic oligonucleotide
ctggttggaatcaatatgagcaaaaagaaatcttatataaataggacaggaacatttgaa

SEQ ID NO: 63195 - DNA, 60 bp, Artificial
  Synthetic oligonucleotide
ttgggaaaagggcaacagctatactcagaaaagcaaccaggagattgattcagctgatag

SEQ ID NO: 63196 - DNA, 60 bp, Artificial
  Synthetic oligonucleotide
ggggcgactgattcaaaatagcataacaatagagagaatggtgctctctgcttttgacga

SEQ ID NO: 63197 - DNA, 60 bp, Artificial
  Synthetic oligonucleotide
caataaagggaaggaagtccttgtgctatggggcattcaccatccacctaccagtactga

SEQ ID NO: 63198 - DNA, 60 bp, Artificial
  Synthetic oligonucleotide
catccgcctaccagtactgatcaacaaagtctctaccagaatgcagatgcctatgttttt

SEQ ID NO: 63199 - DNA, 59 bp, Artificial
  Synthetic oligonucleotide
catccgcctaccagtactgatcaacaaagtctctaccagaatgcagatgcctatgtttt

SEQ ID NO: 63200 - DNA, 60 bp, Artificial
  Synthetic oligonucleotide
ctaagagtatcagctctagaagtggatttgagatgatttgggatcctaatggatggacag

SEQ ID NO: 63201 - DNA, 60 bp, Artificial
  Synthetic oligonucleotide
ggtgtgacggcagcatgccctcatgctggagcaaacagcttctacagaaatttaatatgg

SEQ ID NO: 63202 - DNA, 60 bp, Artificial
  Synthetic oligonucleotide
cggcagcatgccctcatgctggagcaaacagcttctacagaaatttaatatggctggtga

SEQ ID NO: 63203 - DNA, 60 bp, Artificial
  Synthetic oligonucleotide
cggcagcatgcccttatgctggaacaaacagcttctacagaaatttaatatggctggtga

SEQ ID NO: 63204 - DNA, 56 bp, Artificial
  Synthetic oligonucleotide
gctttggagtatctggaattaatgagtctgcagacatgagtattggagtcactgtc

SEQ ID NO: 63205 - DNA, 60 bp, Artificial
  Synthetic oligonucleotide
ggaacaggcagttgtagtccagtgtcttctaatggagcgaatggggtaaaagggttttcg

SEQ ID NO: 63206 - DNA, 60 bp, Artificial
  Synthetic oligonucleotide
aggatggaacaggcagttgtagtccagtgtcttctaatggagcgaatggggtaaaagggt

SEQ ID NO: 63207 - DNA, 60 bp, Artificial
  Synthetic oligonucleotide
gacaggactggattgtatgagaccttgcttctgggttgaactaatcagagggcgacccaa

SEQ ID NO: 63208 - DNA, 60 bp, Artificial
  Synthetic oligonucleotide
ttacagaaccttgatgagctgtcctattggtgaagttccctctccatacaactcaaggtt

SEQ ID NO: 63209 - DNA, 60 bp, Artificial
  Synthetic oligonucleotide
ttcatgctcccacttggaatgcagaaccttctttctgactcaaggggccctgctgaatga

SEQ ID NO: 63210 - DNA, 60 bp, Artificial
  Synthetic oligonucleotide
aagagagccattcatttcatgctcccacttggaatgcagaaccttctttctgactcaagg

SEQ ID NO: 63211 - DNA, 60 bp, Artificial
  Synthetic oligonucleotide
ctctgccctattagtgggtgggctatatacagtaaagataatggtgtaagaattggttcc

SEQ ID NO: 63212 - DNA, 60 bp, Artificial
  Synthetic oligonucleotide
ctctctctgccctattagtgggtgggctatatacagtaaagataatggtgtaagaattgg

SEQ ID NO: 63213 - DNA, 60 bp, Artificial
  Synthetic oligonucleotide
caggcagtagtgtcagtgacattagcgggcaattcctctctctgccctattagtgggtgg

SEQ ID NO: 63214 - DNA, 60 bp, Artificial
  Synthetic oligonucleotide
caggcagtagtgtcagtgacattggcgggcaattcctctctctgccctattagtgggtgg

SEQ ID NO: 63215 - DNA, 60 bp, Artificial
  Synthetic oligonucleotide
aattttgttactgaacaggcagtagtgtcagtgacattagcgggcaattcctctctctgc

SEQ ID NO: 63216 - DNA, 60 bp, Artificial
  Synthetic oligonucleotide
atgcagtgggattttcggagacaatccgcgccctaaggatggaacaggcagttgtagtcc

SEQ ID NO: 63217 - DNA, 60 bp, Artificial
  Synthetic oligonucleotide
aactgattggtcaggatatagcggaagttttgttcagcatccagaactgacaggactgga

SEQ ID NO: 63218 - DNA, 57 bp, Artificial
  Synthetic oligonucleotide
ggcgacccaaagagaacacaatctggactagtgggagcagcatatctttctgtggtg

SEQ ID NO: 63219 - DNA, 60 bp, Artificial
  Synthetic oligonucleotide
ggactggattgtatgagaccttgcttctgggttgaactaatcagagggcgacccaaagag

SEQ ID NO: 63220 - DNA, 60 bp, Artificial
  Synthetic oligonucleotide
gtgcatgcgtgaatggctcttgctttactgtaatgaccgatggaccaagtaatggacaag

SEQ ID NO: 63221 - DNA, 60 bp, Artificial
  Synthetic oligonucleotide
ggcatggctcgaatcgaccgtggatgtctttcaatcagaatctggagtatcaaataggat

SEQ ID NO: 63222 - DNA, 51 bp, Artificial
  Synthetic oligonucleotide
acaatggggctgtggctgtgttgaaatacaatggcataataacagacacta

SEQ ID NO: 63223 - DNA, 60 bp, Artificial
  Synthetic oligonucleotide
ggcatcagttggctgacaattggaatttccggcccagacaatggggctgtggctgtgttg

SEQ ID NO: 63224 - DNA, 60 bp, Artificial
  Synthetic oligonucleotide
tggcatggctcgaatcgaccgtggatgtctttcaatcagaatctggagtatcaaatagga

SEQ ID NO: 63225 - DNA, 60 bp, Artificial
  Synthetic oligonucleotide
tgcttgtcatgatggcatcagttggctgacaattggaatttccggcccagacaatggggc

SEQ ID NO: 63226 - DNA, 60 bp, Artificial
  Synthetic oligonucleotide
accttgatgagctgtcctattggtgaagttccctctccatacaactcaaggtttgagtca

SEQ ID NO: 63227 - DNA, 60 bp, Artificial
  Synthetic oligonucleotide
gttagccatttaattcaaattgggaatcagaatcagcctgaaacatgcaatcaaagcgcc

SEQ ID NO: 63228 - DNA, 60 bp, Artificial
  Synthetic oligonucleotide
aattttgttactgaacaggcagtagtgtcagtgacattggcgggcaattcctctctctgc

SEQ ID NO: 63229 - DNA, 60 bp, Artificial
  Synthetic oligonucleotide
ttccaaatgaatccaaatcagaagataataaccattgggtcgatctgtatgataattgga

SEQ ID NO: 63230 - DNA, 60 bp, Artificial
  Synthetic oligonucleotide
ccaaatcagaagataataaccattgggtcgatctgtatgataattggaatagccagcttg

SEQ ID NO: 63231 - DNA, 60 bp, Artificial
  Synthetic oligonucleotide
gataattggaatagccagcttgatattacaaattggaaacataatctcaatatgggttag

SEQ ID NO: 63232 - DNA, 60 bp, Artificial
  Synthetic oligonucleotide
tatgggttagccatttaattcaaattgggaatcagaatcagcctgaaacatgcaatcaaa

SEQ ID NO: 63233 - DNA, 60 bp, Artificial
  Synthetic oligonucleotide
tatgggttagccatttaattcaaattgggaatcaaaatcagcctgaaacatgcaatcaaa

SEQ ID NO: 63234 - DNA, 60 bp, Artificial
  Synthetic oligonucleotide
gttagccatttaattcaaattgggaatcaaaatcagcctgaaacatgcaatcaaagcgcc

SEQ ID NO: 63235 - DNA, 60 bp, Artificial
  Synthetic oligonucleotide
tcaaataggatacatatgcagtgggattttcggagacaatccgcgccctaaggatggaac

SEQ ID NO: 63236 - DNA, 60 bp, Artificial
  Synthetic oligonucleotide
tttaaatacggcaatggtgtttggatagggagaactaaaagcactagttcaaggaacggc

SEQ ID NO: 63237 - DNA, 60 bp, Artificial
  Synthetic oligonucleotide
tttaaatacggcaatggtgtttggatagggagaactaaaagcactagttcaaggagcggc

SEQ ID NO: 63238 - DNA, 60 bp, Artificial
  Synthetic oligonucleotide
taaaagcactagttcaaggaacggctttgagatgatttgggatccaaacggatggaccga

SEQ ID NO: 63239 - DNA, 60 bp, Artificial
  Synthetic oligonucleotide
taaaagcactagttcaaggagcggctttgagatgatttgggatccaaacggatggaccga

SEQ ID NO: 63240 - DNA, 60 bp, Artificial
  Synthetic oligonucleotide
caaggagcggctttgagatgatttgggatccaaacggatggaccgaaacagacagtagct

SEQ ID NO: 63241 - DNA, 60 bp, Artificial
  Synthetic oligonucleotide
caaggaacggctttgagatgatttgggatccaaacggatggaccgaaacagacagtagct

SEQ ID NO: 63242 - DNA, 60 bp, Artificial
  Synthetic oligonucleotide
gatggaccgaaacagacagtagcttctcagtaaagcaagatatcgtaggaataactgatt

SEQ ID NO: 63243 - DNA, 60 bp, Artificial
  Synthetic oligonucleotide
cgaaacagacagtagcttctcagtaaagcaagatatcgtaggaataactgattggtcagg

SEQ ID NO: 63244 - DNA, 60 bp, Artificial
  Synthetic oligonucleotide
ataactgattggtcaggatatagcggaagttttgttcagcatccagaactgacaggactg

SEQ ID NO: 63245 - DNA, 60 bp, Artificial
  Synthetic oligonucleotide
gtaaaagggttttcgtttaaatacggcaatggtgtttggatagggagaactaaaagcact

SEQ ID NO: 63246 - DNA, 60 bp, Artificial
  Synthetic oligonucleotide
tgcccaatcagtgggtgggctatatacagcaaagacaatagcataaggattggttccaaa

SEQ ID NO: 63247 - DNA, 60 bp, Artificial
  Synthetic oligonucleotide
ccccgcattgagaatgaaatggatgatggcaatgaaatatccaattacagcggacaagag

SEQ ID NO: 63248 - DNA, 60 bp, Artificial
  Synthetic oligonucleotide
ctcacaagaagattgcatgataaaagcagttagaggtgatctgaatttcgttaatagagc

SEQ ID NO: 63249 - DNA, 60 bp, Artificial
  Synthetic oligonucleotide
tttgcagggaaaaacaccgatcttgaagcactcatggaatggctaaagacaagaccaatc

SEQ ID NO: 63250 - DNA, 60 bp, Artificial
  Synthetic oligonucleotide
cgttttcaagttggatccagaatgagttcaacaaggcatgcgagctgaccgattcaatct

SEQ ID NO: 63251 - DNA, 60 bp, Artificial
  Synthetic oligonucleotide
aggagcatagtgagaagagctacagtatctgcagatccactggcatctctattggaaatg

SEQ ID NO: 63252 - DNA, 60 bp, Artificial
  Synthetic oligonucleotide
gtgttacatttaactcagggagcgtgctgggaacagctatacactccaggaggggaagtg

SEQ ID NO: 63253 - DNA, 60 bp, Artificial
  Synthetic oligonucleotide
ggtattacatttaactcagggagcgtgctgggaacagctatacactccaggaggggaagt

SEQ ID NO: 63254 - DNA, 56 bp, Artificial
  Synthetic oligonucleotide
ggtgttacatttaactcagggagcgtgctgggaacagctatacactccaggagggg

SEQ ID NO: 63255 - DNA, 60 bp, Artificial
  Synthetic oligonucleotide
ggtgttacatttaactcagggagcgtgctgggaacagctatacactccaggaggggaagt

SEQ ID NO: 63256 - DNA, 60 bp, Artificial
  Synthetic oligonucleotide
atcagctcatcatttagttttggcgggttcacattcaaaagaacaagtggctcatcaacc

SEQ ID NO: 63257 - DNA, 60 bp, Artificial
  Synthetic oligonucleotide
tctgtacctacttcgcgctacctagctgacatgacccttgaggaaatgtcaagggattgg

SEQ ID NO: 63258 - DNA, 60 bp, Artificial
  Synthetic oligonucleotide
tgtacctacttcgcgctacctagctgacatgacccttgaggaaatgtcaagagattggtt

SEQ ID NO: 63259 - DNA, 60 bp, Artificial
  Synthetic oligonucleotide
tgcacagagagcaatgatggatcaagtgagagaaagccggaacccaggaaacgccgaaat

SEQ ID NO: 63260 - DNA, 60 bp, Artificial
  Synthetic oligonucleotide
cacagagagcaatgatggatcaagtgagagaaagccggaacccaggaaacgccgaaattg

SEQ ID NO: 63261 - DNA, 60 bp, Artificial
  Synthetic oligonucleotide
gcaatgatggatcaagtgagagaaagccggaacccaggaaatgctgagatcgaagatctc

SEQ ID NO: 63262 - DNA, 60 bp, Artificial
  Synthetic oligonucleotide
cccgtctattcaatctagaggtctgtttggagccattgctggttttattgaggggggatg

SEQ ID NO: 63263 - DNA, 60 bp, Artificial
  Synthetic oligonucleotide
tcatgaaacaaacagaggtgtgacggcagcatgcccttatgctggagcaaacagcttcta

SEQ ID NO: 63264 - DNA, 55 bp, Artificial
  Synthetic oligonucleotide
cccgtctattcaatctagaggtctgtttggagccattgctggttttattgagggg

SEQ ID NO: 63265 - DNA, 60 bp, Artificial
  Synthetic oligonucleotide
cccgtcaattcaatctagaggtctgtttggagccattgctggttttattgaggggggatg

SEQ ID NO: 63266 - DNA, 55 bp, Artificial
  Synthetic oligonucleotide
cccgtccattcaatctagaggtctgtttggagccattgctggttttattgagggg

SEQ ID NO: 63267 - DNA, 60 bp, Artificial
  Synthetic oligonucleotide
tctattcaatctagaggtctgtttggagccattgctggttttattgaggggggatggaca

SEQ ID NO: 63268 - DNA, 60 bp, Artificial
  Synthetic oligonucleotide
cccgtccattcaatctagaggtctgtttggagccattgctggttttattgaggggggatg

SEQ ID NO: 63269 - DNA, 60 bp, Artificial
  Synthetic oligonucleotide
atcgttatggatttgttgccaatttcagcatggagcttcctagttttggagtatctggaa

SEQ ID NO: 63270 - DNA, 60 bp, Artificial
  Synthetic oligonucleotide
ggccactcctaatagatggcacggcctcattgagtcctggaatgatgatgggcatgttta

SEQ ID NO: 63271 - DNA, 60 bp, Artificial
  Synthetic oligonucleotide
agaatagtttcgagcaaataacatttatgcaagccttacaactattgcttgaagtagaac

SEQ ID NO: 63272 - DNA, 60 bp, Artificial
  Synthetic oligonucleotide
aaaatagtttcgagcaaataacatttatgcaagccttacaactattgcttgaagtagaac

SEQ ID NO: 63273 - DNA, 60 bp, Artificial
  Synthetic oligonucleotide
tagataatcactcaatgagtgacttcgaaatcatggcgtctcaaggcaccaaacgatcat

SEQ ID NO: 63274 - DNA, 60 bp, Artificial
  Synthetic oligonucleotide
ctgttaccctgatacaggcaaagtgatgtgtgtgtgcagagacaattggcatgcttcgaa

SEQ ID NO: 63275 - DNA, 60 bp, Artificial
  Synthetic oligonucleotide
accctgatacaggcaaagtgatgtgtgtgtgcagagacaattggcatgcttcgaatcgac

SEQ ID NO: 63276 - DNA, 60 bp, Artificial
  Synthetic oligonucleotide
aatgctataagcacaacgtttccttacactggagaccccccttacagccatgggacagga

SEQ ID NO: 63277 - DNA, 60 bp, Artificial
  Synthetic oligonucleotide
gacgtcaatccgactttgcttttcctgaaagtgccagcacaaaatgctataagcacaacg

SEQ ID NO: 63278 - DNA, 60 bp, Artificial
  Synthetic oligonucleotide
gggtaaatcaaacatatgttaatattaacaacactaatgttgttgctggaaaggacaaaa

SEQ ID NO: 63279 - DNA, 60 bp, Artificial
  Synthetic oligonucleotide
ggcatctttgaaaactcatgtcttgaaacgatggaggttgttcagcaaacacgggtggac

SEQ ID NO: 63280 - DNA, 60 bp, Artificial
  Synthetic oligonucleotide
tgagatcatgaagatctgttccaccattgaagatctcagacggcaaaagtagtgaatttg

SEQ ID NO: 63281 - DNA, 60 bp, Artificial
  Synthetic oligonucleotide
cgagatcatgaagatctgttccaccattgaagatctcagacggcaaaagtagtgaattta

SEQ ID NO: 63282 - DNA, 60 bp, Artificial
  Synthetic oligonucleotide
agatcatgaagatctgttccaccattgaagatctcagacggcaaaagtagtgaatttagc

SEQ ID NO: 63283 - DNA, 60 bp, Artificial
  Synthetic oligonucleotide
agcctgctgcaacagcattggccaacacaatagaagtgttcagattgaacggcctcacgg

SEQ ID NO: 63284 - DNA, 60 bp, Artificial
  Synthetic oligonucleotide
ggatactatgggatcaagtactcttgaactgagaagcaggtactgggccataaggaccag

SEQ ID NO: 63285 - DNA, 60 bp, Artificial
  Synthetic oligonucleotide
ggatactatggaatcaagtactcttgaactgagaagcaggtactgggccataaggaccag

SEQ ID NO: 63286 - DNA, 60 bp, Artificial
  Synthetic oligonucleotide
taggaaacgggtgttttgaattctatcacaagtgtaacaatgaatgcatggagagtgtga

SEQ ID NO: 63287 - DNA, 60 bp, Artificial
  Synthetic oligonucleotide
ggaaacgggtgttttgaattctatcacaagtgtaacaatgaatgcatggagagtgtgaaa

SEQ ID NO: 63288 - DNA, 60 bp, Artificial
  Synthetic oligonucleotide
agacaagagatggctagcagaggtctttgggattcctttcgtcagtccgaaagaggcgaa

SEQ ID NO: 63289 - DNA, 60 bp, Artificial
  Synthetic oligonucleotide
cagtgactatgagggacgactgattcaaaatagcataacaatagagagaatggttctctc

SEQ ID NO: 63290 - DNA, 60 bp, Artificial
  Synthetic oligonucleotide
ggtgttcggtgacaatccgcgtcccaaagatggagagggcagctgtaatccagtgactgt

SEQ ID NO: 63291 - DNA, 60 bp, Artificial
  Synthetic oligonucleotide
gggaaaagggcaacagctatactcagaaaagcaactagaaggttggttcaattgatagtg

SEQ ID NO: 63292 - DNA, 60 bp, Artificial
  Synthetic oligonucleotide
ggaaccagcctgctgcaacagcattggccaacacaatagaagtgttcagattaaacggcc

SEQ ID NO: 63293 - DNA, 60 bp, Artificial
  Synthetic oligonucleotide
agtggattctgaaagaagaatccaacgagacacttaagatgaccattgcatctgtacctt

SEQ ID NO: 63294 - DNA, 60 bp, Artificial
  Synthetic oligonucleotide
gatttttgaccggttggagaatctgacattactaagggctttcaccgaagagggagcaat

SEQ ID NO: 63295 - DNA, 60 bp, Artificial
  Synthetic oligonucleotide
caggatacagtggaagttttgtccaacatcctgaattaacaggaatgaactgcataaggc

SEQ ID NO: 63296 - DNA, 60 bp, Artificial
  Synthetic oligonucleotide
gttttgtccaacatcctgaattaacaggaatgaactgcataaggccttgtttctgggtag

SEQ ID NO: 63297 - DNA, 60 bp, Artificial
  Synthetic oligonucleotide
ttggcatgtccgcaaacaagttgcagaccaagatctaggcgatgcccccttccttgatcg

SEQ ID NO: 63298 - DNA, 60 bp, Artificial
  Synthetic oligonucleotide
tttggcatgtccgcaaacaagttgcagaccaagatctaggcgatgcccccttccttgatc

SEQ ID NO: 63299 - DNA, 60 bp, Artificial
  Synthetic oligonucleotide
gcttcctttggcatgtccgcaaacaagttgcagaccaagatctaggcgatgcccccttcc

SEQ ID NO: 63300 - DNA, 55 bp, Artificial
  Synthetic oligonucleotide
gcttcctttggcatgtccgcaaacaagttgcagaccaagatctaggcgatgcccc

SEQ ID NO: 63301 - DNA, 60 bp, Artificial
  Synthetic oligonucleotide
gatctactcaacagtcgccagttctctggttcttttggtctccctgggggcaatcagctt

SEQ ID NO: 63302 - DNA, 60 bp, Artificial
  Synthetic oligonucleotide
gttaacaatcggaatttctggtccagacaatggagctgtggctgtactaaaatacaacgg

SEQ ID NO: 63303 - DNA, 56 bp, Artificial
  Synthetic oligonucleotide
gtccagacaatggagctgtggctgtactaaaatacaacggaataataactgaaacc

SEQ ID NO: 63304 - DNA, 57 bp, Artificial
  Synthetic oligonucleotide
ggtccagacaatggagctgtggctgtactaaaatacaacggaataataactgaaacc

SEQ ID NO: 63305 - DNA, 57 bp, Artificial
  Synthetic oligonucleotide
ggtccagacaatggagctgtggctgtactaaaatacaacggaataataactggaacc

SEQ ID NO: 63306 - DNA, 57 bp, Artificial
  Synthetic oligonucleotide
ggtccagacaatggagctgtggctgtactaaaatacaacggaataataactgaaact

SEQ ID NO: 63307 - DNA, 60 bp, Artificial
  Synthetic oligonucleotide
tctggtccagacaatggagctgtggctgtactaaaatacaacggaataataactgaaacc

SEQ ID NO: 63308 - DNA, 60 bp, Artificial
  Synthetic oligonucleotide
tttctggtccagacaatggagctgtggctgtactaaaatacaacggaataataactgaaa

SEQ ID NO: 63309 - DNA, 60 bp, Artificial
  Synthetic oligonucleotide
caactactactggactctgcttgaacccggggatacaataatatttgaggcaaatggaaa

SEQ ID NO: 63310 - DNA, 60 bp, Artificial
  Synthetic oligonucleotide
gactctgcttgaacccggggatacaataatatttgaggcaaatggaaatctaatagcgcc

SEQ ID NO: 63311 - DNA, 60 bp, Artificial
  Synthetic oligonucleotide
gactctgcttgaacccggggatacaataatatttgaggcaaatggaaatctaatagcacc

SEQ ID NO: 63312 - DNA, 60 bp, Artificial
  Synthetic oligonucleotide
caactactactggactctgctggaacccggggatacaataatatttgaggcaaatggaaa

SEQ ID NO: 63313 - DNA, 60 bp, Artificial
  Synthetic oligonucleotide
tctacttgaacccggggatacaataatatttgaggcaaatggaaatctaatagcgccaag

SEQ ID NO: 63314 - DNA, 60 bp, Artificial
  Synthetic oligonucleotide
gattttgttatgtacatttacagctacatatgcagacacaatatgtataggctaccatgc

SEQ ID NO: 63315 - DNA, 60 bp, Artificial
  Synthetic oligonucleotide
catttacagctacatatgcagacacaatatgtataggctaccatgccaacaattcaaccg

SEQ ID NO: 63316 - DNA, 60 bp, Artificial
  Synthetic oligonucleotide
ggtcctgttatgcacatttacagctacatatgcagacacaatatgtataggctaccatgc

SEQ ID NO: 63317 - DNA, 60 bp, Artificial
  Synthetic oligonucleotide
ggtcctattatgcacatttacagctacatatgcagacacaatatgtatcggctaccatgc

SEQ ID NO: 63318 - DNA, 60 bp, Artificial
  Synthetic oligonucleotide
ccaaagagagctcatggcccaaccacaccgtaaccggagtatcagcatcatgctcccata

SEQ ID NO: 63319 - DNA, 60 bp, Artificial
  Synthetic oligonucleotide
gttatgtacatttacagctacatatgcagacacaatatgtataggctaccatgccaacaa

SEQ ID NO: 63320 - DNA, 60 bp, Artificial
  Synthetic oligonucleotide
attctgttatgtacatttacagctacatatgcagacacaatatgtataggctaccatgcc

SEQ ID NO: 63321 - DNA, 60 bp, Artificial
  Synthetic oligonucleotide
catttacagctacatatgcagacacaatatgtatcggctaccatgccaacaactcaaccg

SEQ ID NO: 63322 - DNA, 60 bp, Artificial
  Synthetic oligonucleotide
catttacagctacatatgcagacacaatatgtataggctaccatgctaacaactcgaccg

SEQ ID NO: 63323 - DNA, 60 bp, Artificial
  Synthetic oligonucleotide
ttacagctacatatgcagacacaatatgtataggctaccatgccaacaactcgaccgaca

SEQ ID NO: 63324 - DNA, 60 bp, Artificial
  Synthetic oligonucleotide
gagagctcatggcccaaccacaccgtaaccggagtatcagcatcatgctcccataacggg

SEQ ID NO: 63325 - DNA, 60 bp, Artificial
  Synthetic oligonucleotide
gaagtgaggcataaattgaagacgacagagaatagttttgaacaaataacatttatgcaa

SEQ ID NO: 63326 - DNA, 60 bp, Artificial
  Synthetic oligonucleotide
gtgaggcataaattgaagacgacagagaatagttttgaacaaataacatttatgcaagcg

SEQ ID NO: 63327 - DNA, 60 bp, Artificial
  Synthetic oligonucleotide
gatggctgattgaagaagtgaggcataaattgaagacgacagagaatagttttgagcaaa

SEQ ID NO: 63328 - DNA, 60 bp, Artificial
  Synthetic oligonucleotide
agaaataagatggctgattgaagaagtgaggcataaattgaagacgacagagaatagttt

SEQ ID NO: 63329 - DNA, 60 bp, Artificial
  Synthetic oligonucleotide
acaagagtctgaatgtgtctgtgtgaacgggtcatgtttcaccataatgaccgatggtcc

SEQ ID NO: 63330 - DNA, 60 bp, Artificial
  Synthetic oligonucleotide
acaggagtctgaatgtgtctgtgtgaacgggtcatgtttcaccataatgaccgatggccc

SEQ ID NO: 63331 - DNA, 60 bp, Artificial
  Synthetic oligonucleotide
agagtctgaatgtgtctgtgtgaacgggtcatgtttcaccataatgaccgatggcccgag

SEQ ID NO: 63332 - DNA, 55 bp, Artificial
  Synthetic oligonucleotide
tcctagatcggcttcgccgagatcagaagtctctaaagggaagaggcagcactct

SEQ ID NO: 63333 - DNA, 60 bp, Artificial
  Synthetic oligonucleotide
cttccttgatcggcttcgccgagatcagaagtctctaaagggaagaggcagcactctcgg

SEQ ID NO: 63334 - DNA, 52 bp, Artificial
  Synthetic oligonucleotide
tagatcggcttcgccgagatcagaagtctctaaagggaagaggcagcactct

SEQ ID NO: 63335 - DNA, 52 bp, Artificial
  Synthetic oligonucleotide
ttgatcggcttcgccgagatcagaagtctctaaagggaagaggcagcactct

SEQ ID NO: 63336 - DNA, 50 bp, Artificial
  Synthetic oligonucleotide
gatcggcttcgccgagatcagaagtctctaaagggaagaggcagcactct

SEQ ID NO: 63337 - DNA, 60 bp, Artificial
  Synthetic oligonucleotide
ggagatgtttttgtcataagagaacctttcatatcatgttctcatttggaatgcaggacc

SEQ ID NO: 63338 - DNA, 60 bp, Artificial
  Synthetic oligonucleotide
tgggctatatacacaaaagacaacagcataagaatcggctccaaaggagatgtttttgtc

SEQ ID NO: 63339 - DNA, 60 bp, Artificial
  Synthetic oligonucleotide
tgggctatatacacaaaagacaacagcataagaattggctccaaaggagatatttttgtc

SEQ ID NO: 63340 - DNA, 51 bp, Artificial
  Synthetic oligonucleotide
gggctatatacacaaaagacaacagcataagaattggctccaaaggagata

SEQ ID NO: 63341 - DNA, 60 bp, Artificial
  Synthetic oligonucleotide
ggccggcaattcatccctttgttctatcagtggatgggctatatacacaaaagacaacag

SEQ ID NO: 63342 - DNA, 60 bp, Artificial
  Synthetic oligonucleotide
gtggatgggctatatacacaaaagacaacagcataagaattggctccaaaggagatgttt

SEQ ID NO: 63343 - DNA, 60 bp, Artificial
  Synthetic oligonucleotide
gggctatatacacaaaagacaacagcataagaattggctccaaaggagatgtttttgtca

SEQ ID NO: 63344 - DNA, 60 bp, Artificial
  Synthetic oligonucleotide
gacccaaggtgctctattaaatgacaaacattcaaatggaaccgttaaggaccgaagtcc

SEQ ID NO: 63345 - DNA, 60 bp, Artificial
  Synthetic oligonucleotide
caaatggaaccgttaaggaccgaagtccttatagggccttaatgagctgtcctctaggtg

SEQ ID NO: 63346 - DNA, 60 bp, Artificial
  Synthetic oligonucleotide
gacccaaggcgctctattaaatgacaaacattcaaatgggaccgtaaaggacagaagtcc

SEQ ID NO: 63347 - DNA, 60 bp, Artificial
  Synthetic oligonucleotide
gacccaaggtgctctattaaatgacaaacattcaaatggaaccgttaaggacagaagtcc

SEQ ID NO: 63348 - DNA, 60 bp, Artificial
  Synthetic oligonucleotide
gaaccttttttctgacccaaggtgctctattaaatgacaaacattcaaatgggaccgtaa

SEQ ID NO: 63349 - DNA, 60 bp, Artificial
  Synthetic oligonucleotide
gacccaaggtgctctattaaatgacaaacattcaaatgggaccgtaaaggacagaagtcc

SEQ ID NO: 63350 - DNA, 60 bp, Artificial
  Synthetic oligonucleotide
gtttttgtcataagagaacctttcatatcatgttctcatttggaatgcaggacctttttt

SEQ ID NO: 63351 - DNA, 60 bp, Artificial
  Synthetic oligonucleotide
atgcaggaccttttttctgacccaaggtgctctattaaatgacaaacattcaaatggaac

SEQ ID NO: 63352 - DNA, 60 bp, Artificial
  Synthetic oligonucleotide
tgggctatatacacaaaagacaacagcataagaattggctccaaaggagatgtttttatc

SEQ ID NO: 63353 - DNA, 60 bp, Artificial
  Synthetic oligonucleotide
ggaaccgttaaggaccgaagtccttatagggccttaatgagctgtcctctaggtgaagcc

SEQ ID NO: 63354 - DNA, 60 bp, Artificial
  Synthetic oligonucleotide
ggaaccgttaaggaccgaagtccttatagggccttaatgagctgtcctctaggtgaagct

SEQ ID NO: 63355 - DNA, 55 bp, Artificial
  Synthetic oligonucleotide
gggctatatacacaaaagacaacagcataagaattggctccaaaggagatgtttt

SEQ ID NO: 63356 - DNA, 60 bp, Artificial
  Synthetic oligonucleotide
tgtttttgtcataagagaacctttcatatcatgttctcatttggaatgcaggaccttttt

SEQ ID NO: 63357 - DNA, 60 bp, Artificial
  Synthetic oligonucleotide
tgtttttatcataagagaacctttcatatcatgttctcatttggaatgcaggaccttttt

SEQ ID NO: 63358 - DNA, 60 bp, Artificial
  Synthetic oligonucleotide
tgcacccaattttcattatgaggaatgttcctgttacccagacactggcacagtgatgtg

SEQ ID NO: 63359 - DNA, 60 bp, Artificial
  Synthetic oligonucleotide
gctggttaacaatcggaatttctggtccagacaatggagctgtggctgtactaaaataca

SEQ ID NO: 63360 - DNA, 60 bp, Artificial
  Synthetic oligonucleotide
acccaattttcattatgaggaatgttcctgttacccagacactggcacagtgatgtgtgt

SEQ ID NO: 63361 - DNA, 60 bp, Artificial
  Synthetic oligonucleotide
cacccaattttcattatgaggaatgttcctgttacccagacactggcacagtgatgtgtg

SEQ ID NO: 63362 - DNA, 60 bp, Artificial
  Synthetic oligonucleotide
tcattatgaggaatgttcctgttacccagacactggcacagtgatgtgtgtatgcagaga

SEQ ID NO: 63363 - DNA, 60 bp, Artificial
  Synthetic oligonucleotide
ttttcattatgaggaatgttcctgttacccagacactggcacagtgatgtgtgtatgcag

SEQ ID NO: 63364 - DNA, 56 bp, Artificial
  Synthetic oligonucleotide
tgggctatatacacaaaagacaacagcataagaatcggctccaaaggagatgtttt

SEQ ID NO: 63365 - DNA, 60 bp, Artificial
  Synthetic oligonucleotide
cattatgaggaatgttcctgttacccagacactggcacagtgatgtgtgtatgcagagac

SEQ ID NO: 63366 - DNA, 60 bp, Artificial
  Synthetic oligonucleotide
ctaaaaggaacagccccactacaattgggtaattgcagcgttgccggatggatcttagga

SEQ ID NO: 63367 - DNA, 60 bp, Artificial
  Synthetic oligonucleotide
tccctcactgacccaagacttgagccacacaaatgggagagatactgtgttcttgagata

SEQ ID NO: 63368 - DNA, 60 bp, Artificial
  Synthetic oligonucleotide
cataagacaagaaatggcaagcagaggtctttgggactcctttcgtcagtccgaaagagg

SEQ ID NO: 63369 - DNA, 60 bp, Artificial
  Synthetic oligonucleotide
ctcacttaaggaatgacaccgatgtggtaaactttgtgagcatggagttttccctcactg

SEQ ID NO: 63370 - DNA, 60 bp, Artificial
  Synthetic oligonucleotide
aaacaacacctcgaccaattagacttccgaatgggcctccttgttttcagcggtcaaaat

SEQ ID NO: 63371 - DNA, 60 bp, Artificial
  Synthetic oligonucleotide
gcatggagttttccctcactgacccaagacttgagccacacaaatgggagaagtactgcg

SEQ ID NO: 63372 - DNA, 60 bp, Artificial
  Synthetic oligonucleotide
agtgcctgattaatgatccctgggttttgcttaatgcttcttggttcaactccttcctga

SEQ ID NO: 63373 - DNA, 60 bp, Artificial
  Synthetic oligonucleotide
ctcctccaatccctccaacaaatagagagcatgattgaagctgagtcctctgtcaaggag

SEQ ID NO: 63374 - DNA, 60 bp, Artificial
  Synthetic oligonucleotide
gcctcctccaatccctccaacaaatagagagcatgattgaagctgagtcctctgtcaagg

SEQ ID NO: 63375 - DNA, 60 bp, Artificial
  Synthetic oligonucleotide
gcgttgcctcctccaatccctccaacaaatagagagcatgattgaagctgagtcctctgt

SEQ ID NO: 63376 - DNA, 60 bp, Artificial
  Synthetic oligonucleotide
cagcaatatgcacccacttggaagtatgcttcatgtattcagattttcatttcatcaatg

SEQ ID NO: 63377 - DNA, 60 bp, Artificial
  Synthetic oligonucleotide
atttgcagcaatatgcacccacttggaagtgtgcttcatgtattcagattttcatttcat

SEQ ID NO: 63378 - DNA, 60 bp, Artificial
  Synthetic oligonucleotide
gagggaaggagaaagaccaatttgtacggcttcattataaaaggaaggtctcacttaagg

SEQ ID NO: 63379 - DNA, 60 bp, Artificial
  Synthetic oligonucleotide
agaactaaggagggaaggagaaagaccaatttgtacggcttcattataaaaggaagatct

SEQ ID NO: 63380 - DNA, 60 bp, Artificial
  Synthetic oligonucleotide
agagggaaggagaaagaccaatttgtacggcttcattataaaaggaaggtctcacttaag

SEQ ID NO: 63381 - DNA, 60 bp, Artificial
  Synthetic oligonucleotide
cctcgaccaattagacttccgaatgggcctccttgttttcagcggtcaaaattcctactg

SEQ ID NO: 63382 - DNA, 60 bp, Artificial
  Synthetic oligonucleotide
cctcggccaattagacttccgaatgggcctccttgttttcagcggtcaaaattcctgctg

SEQ ID NO: 63383 - DNA, 60 bp, Artificial
  Synthetic oligonucleotide
aaacgacacctcgaccaattagacttccgaatgggcctccttgttttcagcggtcaaaat

SEQ ID NO: 63384 - DNA, 60 bp, Artificial
  Synthetic oligonucleotide
aaacaacacctcggccaattagacttccgaatgggcctccttgttttcagcggtcaaaat

SEQ ID NO: 63385 - DNA, 60 bp, Artificial
  Synthetic oligonucleotide
aaacaacacctcgtccaattagacttccgaatgggcctccttgttttcagcggtcaaaat

SEQ ID NO: 63386 - DNA, 60 bp, Artificial
  Synthetic oligonucleotide
atgaggcgttgcctcctccaatccctccaacaaatagagagcatgattgaagctgagtcc

SEQ ID NO: 63387 - DNA, 60 bp, Artificial
  Synthetic oligonucleotide
ggggaatggagatgaggcgttgcctcctccaatccctccaacaaatagagagcatgattg

SEQ ID NO: 63388 - DNA, 60 bp, Artificial
  Synthetic oligonucleotide
aaatggggaatggagatgaggcgttgcctcctccaatccctccaacaaatagagagcatg

SEQ ID NO: 63389 - DNA, 60 bp, Artificial
  Synthetic oligonucleotide
agaacaaatggaacctcaaaaattaaaatgaaatggggaatggagatgaggcgttgcctc

SEQ ID NO: 63390 - DNA, 60 bp, Artificial
  Synthetic oligonucleotide
gatccctgggttttgcttaatgcttcttggttcaactccttcctaacgcatgcattgaga

SEQ ID NO: 63391 - DNA, 60 bp, Artificial
  Synthetic oligonucleotide
cctcgaccaattagacttccgaatgggcctccttgttttcagcggtcaaaattcctgctg

SEQ ID NO: 63392 - DNA, 60 bp, Artificial
  Synthetic oligonucleotide
cctcgtccaattagacttccgaatgggcctccttgttttcagcggtcaaaattcctgctg

SEQ ID NO: 63393 - DNA, 60 bp, Artificial
  Synthetic oligonucleotide
ggtcgttttcaagttggatccagaatgagttcaacaaggcatgcgagctgaccgattcaa

SEQ ID NO: 63394 - DNA, 60 bp, Artificial
  Synthetic oligonucleotide
aggcaagaaatggcaagcagaggtctttgggactcctttcgtcagtccgaaagaggcgaa

SEQ ID NO: 63395 - DNA, 60 bp, Artificial
  Synthetic oligonucleotide
ggattcagaatgagttcaacaaggcatgcgagctgaccgattcaatctggatagagctcg

SEQ ID NO: 63396 - DNA, 60 bp, Artificial
  Synthetic oligonucleotide
tcaccataagacaagaaatggcaagcagaggtctttgggactcctttcgtcagtccgaaa

SEQ ID NO: 63397 - DNA, 60 bp, Artificial
  Synthetic oligonucleotide
atgataagcaaatgtagaactaaagaggggaggagaaagaccaatttgtacggcttcatt

SEQ ID NO: 63398 - DNA, 60 bp, Artificial
  Synthetic oligonucleotide
gcacccacttggaagtatgcttcatgtattcagattttcatttcatcaatgagcaaggcg

SEQ ID NO: 63399 - DNA, 60 bp, Artificial
  Synthetic oligonucleotide
gtttctgccagatctgtatgattacaaagagaatagattcatcgagattggagtgacaag

SEQ ID NO: 63400 - DNA, 60 bp, Artificial
  Synthetic oligonucleotide
tgccagatctgtatgattacaaagagaatagattcatcgagattggagtgacaaggagag

SEQ ID NO: 63401 - DNA, 60 bp, Artificial
  Synthetic oligonucleotide
tgcaagaccagaagacgtgtccttccaggggcggggagtctttgagctctcggacgaaag

SEQ ID NO: 63402 - DNA, 60 bp, Artificial
  Synthetic oligonucleotide
atggggaacgccagaatgcaactgaaatcagagcatccgtcggaagaatgattgggggaa

SEQ ID NO: 63403 - DNA, 60 bp, Artificial
  Synthetic oligonucleotide
tttgacatgagtaacgaaggatcttatttcttcggagacaatgcagaggagtacgacaat

SEQ ID NO: 63404 - DNA, 60 bp, Artificial
  Synthetic oligonucleotide
tgcaagaccagaggaagtgtccttccaggggcggggagtctttgagctctcggacgaaag

SEQ ID NO: 63405 - DNA, 60 bp, Artificial
  Synthetic oligonucleotide
tgcaagaccagaagaagtgtccttccagggacggggagtctttgagctctcggacgaaag

SEQ ID NO: 63406 - DNA, 60 bp, Artificial
  Synthetic oligonucleotide
caaagggcctctgcgggccaaatcagcacacaacctacgttttctgtgcagagaaacctc

SEQ ID NO: 63407 - DNA, 60 bp, Artificial
  Synthetic oligonucleotide
ggagcatcccagcgcggggaaagatcctaagaaaactggaggacccatatacaagagagt

SEQ ID NO: 63408 - DNA, 60 bp, Artificial
  Synthetic oligonucleotide
ctgggccataagaaccagaagtggagggaacactaatcaacaaagggcctctgcgggcca

SEQ ID NO: 63409 - DNA, 60 bp, Artificial
  Synthetic oligonucleotide
aacactaatcaacaaagggcctctgcgggccaaatcagcacacaacctacgttttctgtg

SEQ ID NO: 63410 - DNA, 60 bp, Artificial
  Synthetic oligonucleotide
cagatactgggccataagaaccagaagtggagggaacactaatcaacaaagggcctctgc

SEQ ID NO: 63411 - DNA, 60 bp, Artificial
  Synthetic oligonucleotide
catccgtcggaagaatgattggtggaattgggcgattctacatccaaatgtgcaccgagc

SEQ ID NO: 63412 - DNA, 60 bp, Artificial
  Synthetic oligonucleotide
gcagatactgggccataagaaccagaagcggagggaacactaatcaacaaagggcctctg

SEQ ID NO: 63413 - DNA, 60 bp, Artificial
  Synthetic oligonucleotide
gcagatattgggccataagaaccagaagtggagggaacactaatcaacaaagggcctctg

SEQ ID NO: 63414 - DNA, 60 bp, Artificial
  Synthetic oligonucleotide
catctgtcggaagaatgattggtggaattgggcgattctacatccaaatgtgcaccgagc

SEQ ID NO: 63415 - DNA, 60 bp, Artificial
  Synthetic oligonucleotide
tctggaagaacaccccagcgcggggaaagatcctaagaaaactggaggacccatatacaa

SEQ ID NO: 63416 - DNA, 60 bp, Artificial
  Synthetic oligonucleotide
tgcaagaccagaggaagtatccttccaggggcggggagtctttgagctctcggacgaaag

SEQ ID NO: 63417 - DNA, 60 bp, Artificial
  Synthetic oligonucleotide
gggcctctgcgggccaaatcagcacacaacctacgttttctgtgcagagaaacctcccat

SEQ ID NO: 63418 - DNA, 60 bp, Artificial
  Synthetic oligonucleotide
ggctggcttgactcacattatgatctggcattctaatttgaatgatacaacttaccagag

SEQ ID NO: 63419 - DNA, 60 bp, Artificial
  Synthetic oligonucleotide
tatctagaggagcatcccagcgcggggaaagatcctaagaaaactggaggacccatatac

SEQ ID NO: 63420 - DNA, 60 bp, Artificial
  Synthetic oligonucleotide
agctcaatgattatgagggacggctgatccagaacagcttaacaatagagagaatggtgc

SEQ ID NO: 63421 - DNA, 60 bp, Artificial
  Synthetic oligonucleotide
caacggctggcttgactcacattatgatctggcattctaatttgaatgatacaacttacc

SEQ ID NO: 63422 - DNA, 60 bp, Artificial
  Synthetic oligonucleotide
agcatccgtcggaagaatgattggtggaattgggcgattctacatccaaatgtgcaccga

SEQ ID NO: 63423 - DNA, 60 bp, Artificial
  Synthetic oligonucleotide
agcatctgtcggaagaatgattggtggaattgggcgattctacatccaaatgtgcaccga

SEQ ID NO: 63424 - DNA, 60 bp, Artificial
  Synthetic oligonucleotide
cattcactgggaatacagagggaagaacatcagacatgagggcagaaatcataaagatga

SEQ ID NO: 63425 - DNA, 59 bp, Artificial
  Synthetic oligonucleotide
caagagctcttgtccgcaccggaatggatcccaggatgtgctctttgatgcaaggttca

SEQ ID NO: 63426 - DNA, 60 bp, Artificial
  Synthetic oligonucleotide
cagagggaagaacatcagacatgagggcagaaatcataaagatgatggaaagtgcaagac

SEQ ID NO: 63427 - DNA, 60 bp, Artificial
  Synthetic oligonucleotide
cgccagactgcaactgaaatcagagcatccgtcggaagaatgattggtggaattgggcga

SEQ ID NO: 63428 - DNA, 60 bp, Artificial
  Synthetic oligonucleotide
agtgcaagaccagaagaagtgtccttccaggggcggggagtctttgagctctcggacgaa

SEQ ID NO: 63429 - DNA, 60 bp, Artificial
  Synthetic oligonucleotide
gagggaagaacatcagacatgagggcagaaatcataaagatgatggaaagtgcaagacca

SEQ ID NO: 63430 - DNA, 60 bp, Artificial
  Synthetic oligonucleotide
acgacttaccagaggacaagagctcttgtccgcaccggaatggatcccaggatgtgctct

SEQ ID NO: 63431 - DNA, 60 bp, Artificial
  Synthetic oligonucleotide
ctcacattatgatctggcattctaatttgaatgatacaacttaccagaggacaagagctc

SEQ ID NO: 63432 - DNA, 60 bp, Artificial
  Synthetic oligonucleotide
gctggcttgactcacattatgatctggcattctaatttgaatgatacaacttaccagagg

SEQ ID NO: 63433 - DNA, 60 bp, Artificial
  Synthetic oligonucleotide
gtagatactgggccataagaaccagaagtggagggaacactaatcaacaaagggcctctg

SEQ ID NO: 63434 - DNA, 60 bp, Artificial
  Synthetic oligonucleotide
agggcctctgcgggccaaatcagcacacaacctacgttttctgtgcagagaaacctccca

SEQ ID NO: 63435 - DNA, 60 bp, Artificial
  Synthetic oligonucleotide
gcaccgagcttaagctcaatgattatgagggacggctgatccagaacagcttaacaatag

SEQ ID NO: 63436 - DNA, 60 bp, Artificial
  Synthetic oligonucleotide
tgtgcaccgagcttaagctcaatgattatgagggacggctgatccagaacagcttaacaa

SEQ ID NO: 63437 - DNA, 60 bp, Artificial
  Synthetic oligonucleotide
attgggggaattgggcgattctacatccaaatgtgcaccgagcttaagctcaatgattat

SEQ ID NO: 63438 - DNA, 60 bp, Artificial
  Synthetic oligonucleotide
ttggtggaattgggcgattctacatccaaatgtgcaccgagcttaagctcaatgattatg

SEQ ID NO: 63439 - DNA, 60 bp, Artificial
  Synthetic oligonucleotide
gggcgattctacatccaaatgtgcaccgagcttaagctcaatgattatgagggacggctg

SEQ ID NO: 63440 - DNA, 60 bp, Artificial
  Synthetic oligonucleotide
cccagcgcggggaaagatcctaagaaaactggaggaccaatatacaagagagtagatgga

SEQ ID NO: 63441 - DNA, 60 bp, Artificial
  Synthetic oligonucleotide
gcagatactgggccataagaaccagaagtggagggaacactaatcaacaaagggcctctg

SEQ ID NO: 63442 - DNA, 60 bp, Artificial
  Synthetic oligonucleotide
acaagggtggacaaactgacacaaggcagacagacctatgactggactctaaataggaac

SEQ ID NO: 63443 - DNA, 60 bp, Artificial
  Synthetic oligonucleotide
acgcccaaacagattgtgtattagaagcaatggctttccttgaagaatcccatcctggta

SEQ ID NO: 63444 - DNA, 60 bp, Artificial
  Synthetic oligonucleotide
caatccgacattacttttcttaaaagtgccagcacaaaatgctataagcacaacctttcc

SEQ ID NO: 63445 - DNA, 60 bp, Artificial
  Synthetic oligonucleotide
gaagtttgcttgaaatgggagttgatggatgaggattaccaggggcggttatgcaaccca

SEQ ID NO: 63446 - DNA, 60 bp, Artificial
  Synthetic oligonucleotide
tcaagagcccgaattgatgcacggattgatttcgaatctggaaggataaagagggaggaa

SEQ ID NO: 63447 - DNA, 60 bp, Artificial
  Synthetic oligonucleotide
tgataatgccggcacatggcccagccaaaaatatggagtatgacgctgttgcaacaacac

SEQ ID NO: 63448 - DNA, 60 bp, Artificial
  Synthetic oligonucleotide
caaacaagggtggacaaactgacacaaggcagacagacctatgactggactctaaatagg

SEQ ID NO: 63449 - DNA, 60 bp, Artificial
  Synthetic oligonucleotide
agcaaacaagggtggacaaactgacacaaggcagacagacctatgactggactctaaata

SEQ ID NO: 63450 - DNA, 60 bp, Artificial
  Synthetic oligonucleotide
ttgttcagcaaacaagggtggacaaactgacacaaggcagacagacctatgactggactc

SEQ ID NO: 63451 - DNA, 60 bp, Artificial
  Synthetic oligonucleotide
tcttgtattgaaacaatggaggttgttcagcaaacaagggtggacaaactgacacaaggc

SEQ ID NO: 63452 - DNA, 60 bp, Artificial
  Synthetic oligonucleotide
ctatgcccaaacagattgtgtattagaagcaatggctttccttgaagaatcccatcctgg

SEQ ID NO: 63453 - DNA, 60 bp, Artificial
  Synthetic oligonucleotide
tgtaagctgctcggaattaatatgagcaaaaagaagtcttacataaacagaacaggaacc

SEQ ID NO: 63454 - DNA, 60 bp, Artificial
  Synthetic oligonucleotide
gccatggaacaggaacagggtacaccatggatacagtcaacaggacacatcagtactcag

SEQ ID NO: 63455 - DNA, 60 bp, Artificial
  Synthetic oligonucleotide
tacagccatggaacaggaacagggtacaccatggatacagtcaacaggacacatcagtac

SEQ ID NO: 63456 - DNA, 60 bp, Artificial
  Synthetic oligonucleotide
cttttccttatactggtgaccctccttacagccatgggacaggaacagggtacaccatgg

SEQ ID NO: 63457 - DNA, 60 bp, Artificial
  Synthetic oligonucleotide
ggaacaggaacagggtacaccatggatacagtcaacaggacacatcagtactcagaaaga

SEQ ID NO: 63458 - DNA, 60 bp, Artificial
  Synthetic oligonucleotide
acaccagtactcagaaagaggaagatggacaaaaaataccgaaactggagcaccgcaact

SEQ ID NO: 63459 - DNA, 60 bp, Artificial
  Synthetic oligonucleotide
ccgaccattattaatcgatggaactgcatcattgagtcctggaatgatgatgggcatgtt

SEQ ID NO: 63460 - DNA, 60 bp, Artificial
  Synthetic oligonucleotide
tgacacaaggcagacagacctatgactggactctaaataggaaccagcctgctgcaacag

SEQ ID NO: 63461 - DNA, 60 bp, Artificial
  Synthetic oligonucleotide
aggaaccagcctgctgcaacagcattggcaaacactatagaagtattcagatcaaacggc

SEQ ID NO: 63462 - DNA, 60 bp, Artificial
  Synthetic oligonucleotide
ccagcctgctgcaacagcattggcaaacactatagaagtattcagatcaaacggcctcat

SEQ ID NO: 63463 - DNA, 60 bp, Artificial
  Synthetic oligonucleotide
ggggtacatgtttgaaagcaagagtatgaaactgagaactcaaatacctgcagagatgct

SEQ ID NO: 63464 - DNA, 60 bp, Artificial
  Synthetic oligonucleotide
caaaatggcgagactaggtaaggggtacatgtttgaaagcaagagtatgaaactgagaac

SEQ ID NO: 63465 - DNA, 60 bp, Artificial
  Synthetic oligonucleotide
ccaatttcagcatggagcttcctagttttggggtgtctggggtcaacgaatctgctgaca

SEQ ID NO: 63466 - DNA, 60 bp, Artificial
  Synthetic oligonucleotide
ctcagaaagaggaagatggacaaaaaataccgaaactggagcaccgcaactcaacccaat

SEQ ID NO: 63467 - DNA, 60 bp, Artificial
  Synthetic oligonucleotide
cagcatggagcttcctagttttggggtgtctggggtcaatgaatctgcagacatgagtat

SEQ ID NO: 63468 - DNA, 60 bp, Artificial
  Synthetic oligonucleotide
tgaaaactcttgtattgaaacaatggaggttgttcagcaaacaagggtggacaaactgac

SEQ ID NO: 63469 - DNA, 60 bp, Artificial
  Synthetic oligonucleotide
tgggtttgttgccaatttcagcatggagcttcctagttttggggtgtctggggtcaatga

SEQ ID NO: 63470 - DNA, 60 bp, Artificial
  Synthetic oligonucleotide
cagaaagaggaagatggacaaaaaataccgaaactggagcaccgcaactcaacccaattg

SEQ ID NO: 63471 - DNA, 56 bp, Artificial
  Synthetic oligonucleotide
ggcaaaagaggtacaccaagactacttactggtgggatggtcttcaatcgtctgat

SEQ ID NO: 63472 - DNA, 60 bp, Artificial
  Synthetic oligonucleotide
ccggtatctttgaaaactcttgtattgaaacaatggaggttgttcagcaaacaagggtgg

SEQ ID NO: 63473 - DNA, 60 bp, Artificial
  Synthetic oligonucleotide
tctccatattcctgaagtttgcttgaaatgggagttgatggatgaggattaccaggggcg

SEQ ID NO: 63474 - DNA, 60 bp, Artificial
  Synthetic oligonucleotide
atcctggtatctttgaaaactcttgtattgaaacaatggaggttgttcagcaaacaaggg

SEQ ID NO: 63475 - DNA, 60 bp, Artificial
  Synthetic oligonucleotide
cagcacaaaatgctataagcacaacttttccttatactggtgaccctccttacagccatg

SEQ ID NO: 63476 - DNA, 60 bp, Artificial
  Synthetic oligonucleotide
aatgctataagcacaacttttccttatactggtgaccctccttacagccatgggacagga

SEQ ID NO: 63477 - DNA, 60 bp, Artificial
  Synthetic oligonucleotide
gctataagcacaacttttccttatactggtgaccctccttacagccatgggacaggaaca

SEQ ID NO: 63478 - DNA, 60 bp, Artificial
  Synthetic oligonucleotide
taagcacaacttttccttatactggtgaccctccttacagccatgggacaggaacagggt

SEQ ID NO: 63479 - DNA, 60 bp, Artificial
  Synthetic oligonucleotide
cacaacttttccttatactggtgaccctccttacagccatgggacaggaacagggtacac

SEQ ID NO: 63480 - DNA, 60 bp, Artificial
  Synthetic oligonucleotide
tagaagcaatggctttccttgaagaatcccatcctggtatctttgaaaactcttgtattg

SEQ ID NO: 63481 - DNA, 60 bp, Artificial
  Synthetic oligonucleotide
ccataatcaagaaatacacatcaggaagacaggagaaaaacccatcacttaggatgaaat

SEQ ID NO: 63482 - DNA, 60 bp, Artificial
  Synthetic oligonucleotide
cactagcatctttattagaaatgtgccatagcacacagattggtggaacaaggatggtgg

SEQ ID NO: 63483 - DNA, 60 bp, Artificial
  Synthetic oligonucleotide
ccaaaaccactgtagaccacatggccataatcaagaaatacacatcaggaagacaggaga

SEQ ID NO: 63484 - DNA, 60 bp, Artificial
  Synthetic oligonucleotide
acttaccaaaactactgtagaccacatggccataatcaagaaatacacatcaggaagaca

SEQ ID NO: 63485 - DNA, 60 bp, Artificial
  Synthetic oligonucleotide
aaaacccatcactcaggatgaaatggatgatggcaatgaaatacccaattacagctgata

SEQ ID NO: 63486 - DNA, 60 bp, Artificial
  Synthetic oligonucleotide
aagacccagatgaaggcacagctggagtggaatctgctgttttaagggggttcctcattc

SEQ ID NO: 63487 - DNA, 60 bp, Artificial
  Synthetic oligonucleotide
ttagaagccaagtcaaaatacgccgaagagtcgacataaatcctggtcatgcagacctca

SEQ ID NO: 63488 - DNA, 60 bp, Artificial
  Synthetic oligonucleotide
ccagatgaaggcacagctggagtggaatctgctgttttaaggggattcctcattctaggc

SEQ ID NO: 63489 - DNA, 60 bp, Artificial
  Synthetic oligonucleotide
ccgggattgcaaaatttcccctttgatggttgcatacatgttagagagggaacttgtccg

SEQ ID NO: 63490 - DNA, 60 bp, Artificial
  Synthetic oligonucleotide
ggtggaacaaggatggtggatattctcaggcaaaatccaacagaagaacaagctgtgggc

SEQ ID NO: 63491 - DNA, 60 bp, Artificial
  Synthetic oligonucleotide
atagcacacagattggtggaacaaggatggtggatattctcaggcaaaatccaacagaag

SEQ ID NO: 63492 - DNA, 60 bp, Artificial
  Synthetic oligonucleotide
gggctgagaatcagttcatccttcagttttggcggattcacatttaagagaacaagtggg

SEQ ID NO: 63493 - DNA, 60 bp, Artificial
  Synthetic oligonucleotide
aatcagttcatccttcagttttggcggattcacatttaagagaacaagtggatcatcagt

SEQ ID NO: 63494 - DNA, 60 bp, Artificial
  Synthetic oligonucleotide
aaaaagcaaccaggagattgattcaactaatagtgagtggaagagacgaacagtcaatag

SEQ ID NO: 63495 - DNA, 60 bp, Artificial
  Synthetic oligonucleotide
cacacagattggtggaacaaggatggtggatattctcaggcaaaatccaacagaagaaca

SEQ ID NO: 63496 - DNA, 60 bp, Artificial
  Synthetic oligonucleotide
gccacagcacacagattggtggaacaaggatggtggatattctcaggcaaaatccaacag

SEQ ID NO: 63497 - DNA, 60 bp, Artificial
  Synthetic oligonucleotide
ctttaactgaagacccagatgaaggcacagctggagtggaatctgcggttctaaggggat

SEQ ID NO: 63498 - DNA, 60 bp, Artificial
  Synthetic oligonucleotide
ctgaagacccagatgaaggcacagctggagtggaatctgcggttctaaggggattcctca

SEQ ID NO: 63499 - DNA, 60 bp, Artificial
  Synthetic oligonucleotide
ccaaggccattagaggccaatacagtgggtttgttagaactctatttcaacaaatgaggg

SEQ ID NO: 63500 - DNA, 60 bp, Artificial
  Synthetic oligonucleotide
gctggcactttaactgaagacccagatgaaggcacagctggagtggaatctgctgtttta

SEQ ID NO: 63501 - DNA, 60 bp, Artificial
  Synthetic oligonucleotide
gaagagtcgacataaatcctggtcatgcagacctcagcgccaaggaggcacaggatgtaa

SEQ ID NO: 63502 - DNA, 60 bp, Artificial
  Synthetic oligonucleotide
gccgaagagtcgacataaatcctggtcatgcagacctcagcgccaaggaggcacaggatg

SEQ ID NO: 63503 - DNA, 60 bp, Artificial
  Synthetic oligonucleotide
aaatacgccgaagggtcgacataaatcctggtcatgcagacctcagcgccaaggaggcac

SEQ ID NO: 63504 - DNA, 60 bp, Artificial
  Synthetic oligonucleotide
ttctcaggcaaaatccaacagaagaacaagctgtgggcatatgcaaagcagcaatggggc

SEQ ID NO: 63505 - DNA, 60 bp, Artificial
  Synthetic oligonucleotide
cagaagaacaagctgtgggcatatgcaaagcagcaatggggctgagaatcagttcatcct

SEQ ID NO: 63506 - DNA, 60 bp, Artificial
  Synthetic oligonucleotide
cctgacatgaccccaagtaccgagatgtcaatgagaggagtgagagtcagcaaaatgggt

SEQ ID NO: 63507 - DNA, 60 bp, Artificial
  Synthetic oligonucleotide
gcagatccactagcatctttattagaaatgtgccatagcacacagattggtggaacaagg

SEQ ID NO: 63508 - DNA, 60 bp, Artificial
  Synthetic oligonucleotide
gtgggcatatgcaaagcagcaatggggctgagaatcagttcatccttcagttttggcgga

SEQ ID NO: 63509 - DNA, 60 bp, Artificial
  Synthetic oligonucleotide
ggtggatattctcaggcaaaatccaacagaagaacaagctgtgggcatatgcaaagcagc

SEQ ID NO: 63510 - DNA, 60 bp, Artificial
  Synthetic oligonucleotide
gcaatggggctgagaatcagttcatccttcagttttggcggattcacatttaagagaaca

SEQ ID NO: 63511 - DNA, 60 bp, Artificial
  Synthetic oligonucleotide
ctcacaagaagattgcatggtaaaagcagttagaggtgatctgaatttcgttaatagagc

SEQ ID NO: 63512 - DNA, 60 bp, Artificial
  Synthetic oligonucleotide
aatacacatcaggaagacaggagaaaaacccatcactcaggatgaaatggatgatggcaa

SEQ ID NO: 63513 - DNA, 60 bp, Artificial
  Synthetic oligonucleotide
acacatcaggaagacaggagaaaaacccatcactcaggatgaaatggatgatggcaatga

SEQ ID NO: 63514 - DNA, 60 bp, Artificial
  Synthetic oligonucleotide
attagaaatgtgccatagcacccagattggtggaacaaggatggtggatattctcaggca

SEQ ID NO: 63515 - DNA, 60 bp, Artificial
  Synthetic oligonucleotide
gcgagatacttaccaaaactactgtagaccacatggccataatcaagaaatacacgtcag

SEQ ID NO: 63516 - DNA, 60 bp, Artificial
  Synthetic oligonucleotide
aagattgcatggtaaaagcagttagaggtgatctgaatttcgttaatagagcgaatcagc

SEQ ID NO: 63517 - DNA, 60 bp, Artificial
  Synthetic oligonucleotide
caggaagacaggagaaaaacccatcactcaggatgaaatggatgatggcaatgaaatacc

SEQ ID NO: 63518 - DNA, 60 bp, Artificial
  Synthetic oligonucleotide
gcactcgcgagatacttaccaaaactactgtagaccacatggccataatcaagaaataca

SEQ ID NO: 63519 - DNA, 60 bp, Artificial
  Synthetic oligonucleotide
agagctgcagtatcagcagatccactagcatctttattagaaatgtgccatagcacccag

SEQ ID NO: 63520 - DNA, 60 bp, Artificial
  Synthetic oligonucleotide
ctctagtccccaaggccattagaggccaatacagtgggtttgttagaactctatttcaac

SEQ ID NO: 63521 - DNA, 60 bp, Artificial
  Synthetic oligonucleotide
agccatttcaatctctagtccccaaggccattagaggccaatacagtgggtttgttagaa

SEQ ID NO: 63522 - DNA, 60 bp, Artificial
  Synthetic oligonucleotide
tctatcatcccgtcaggccccctcaaagccgagatcgcacagagacttgaagatgtattt

SEQ ID NO: 63523 - DNA, 60 bp, Artificial
  Synthetic oligonucleotide
ggaaggagtaccagagtctatgagggaagaatatcgagaggaacagcagaatgctgtgga

SEQ ID NO: 63524 - DNA, 60 bp, Artificial
  Synthetic oligonucleotide
ccagagtctatgagggaagaatatcgagaggaacagcagaatgctgtggatgctgacgat

SEQ ID NO: 63525 - DNA, 60 bp, Artificial
  Synthetic oligonucleotide
catggggccaaagaaatagcactcagttattctgctggtgcacttgccagttgtatggga

SEQ ID NO: 63526 - DNA, 60 bp, Artificial
  Synthetic oligonucleotide
gggatccaaataatatggacagagcagtcaaactgtatcgaaagcttaagagggagataa

SEQ ID NO: 63527 - DNA, 60 bp, Artificial
  Synthetic oligonucleotide
ataccgatcttgaggctctcatggagtggctaaagacaagaccaatcctgtcacctctga

SEQ ID NO: 63528 - DNA, 60 bp, Artificial
  Synthetic oligonucleotide
tggacagggcagtcaaactgtatcgaaagcttaagagggagataacattccatggggcca

SEQ ID NO: 63529 - DNA, 60 bp, Artificial
  Synthetic oligonucleotide
cttctaaccgaggtcgaaacgtacgttctctctatcgtcccgtcaggccccctcaaagcc

SEQ ID NO: 63530 - DNA, 60 bp, Artificial
  Synthetic oligonucleotide
tacggaaggagtaccggagtctatgagggaagaatatcgagaggaacagcagaatgctgt

SEQ ID NO: 63531 - DNA, 60 bp, Artificial
  Synthetic oligonucleotide
gtatttgctggaaagaataccgatcttgaggctctcatggagtggctaaagacaagacca

SEQ ID NO: 63532 - DNA, 60 bp, Artificial
  Synthetic oligonucleotide
ctcaaagccgagatcgcacagagacttgaagatgtatttgctggaaagaataccgatctt

SEQ ID NO: 63533 - DNA, 60 bp, Artificial
  Synthetic oligonucleotide
agccgagatcgcacagagacttgaagatgtatttgctggaaagaataccgatcttgaggc

SEQ ID NO: 63534 - DNA, 60 bp, Artificial
  Synthetic oligonucleotide
gccgagatcgcacagagacttgaagatgtatttgctggaaagaataccgatcttgaggct

SEQ ID NO: 63535 - DNA, 60 bp, Artificial
  Synthetic oligonucleotide
ccgagatcgcacagagacttgaagatgtatttgctggaaagagtaccgatcttgaggctc

SEQ ID NO: 63536 - DNA, 57 bp, Artificial
  Synthetic oligonucleotide
cccctcaaagccgagatcgcacagagacttgaagatgtatttgctggaaagaatacc

SEQ ID NO: 63537 - DNA, 60 bp, Artificial
  Synthetic oligonucleotide
ccctcaaagccgagatcgcacagagacttgaagatgtatttgctggaaagaataccgatc

SEQ ID NO: 63538 - DNA, 60 bp, Artificial
  Synthetic oligonucleotide
cctcaaagccgagatcgcacagagacttgaagatgtatttgctggaaagaataccgatct

SEQ ID NO: 63539 - DNA, 60 bp, Artificial
  Synthetic oligonucleotide
agggagataacattccatggggccaaagaaatagcactcagttattctgctggagcactt

SEQ ID NO: 63540 - DNA, 60 bp, Artificial
  Synthetic oligonucleotide
gatgagtcttctaaccgaggtcgaaacgtacgttctctctattgtcccgtcaggccccct

SEQ ID NO: 63541 - DNA, 60 bp, Artificial
  Synthetic oligonucleotide
gatgagccttctaaccgaggtcgaaacgtacgttctctctatcgtcccgtcaggccccct

SEQ ID NO: 63542 - DNA, 60 bp, Artificial
  Synthetic oligonucleotide
tggtgcacttgccagttgtatgggactcatatataacaggatgggggctgtgaccaccga

SEQ ID NO: 63543 - DNA, 60 bp, Artificial
  Synthetic oligonucleotide
gggccttctacggaaggagtaccggagtctatgagggaagaatatcgagaggaacagcag

SEQ ID NO: 63544 - DNA, 60 bp, Artificial
  Synthetic oligonucleotide
taccgatcttgaggctctcatggagtggctaaagacaagaccaatcctgtcacctctgac

SEQ ID NO: 63545 - DNA, 60 bp, Artificial
  Synthetic oligonucleotide
tgaccaccgaatcagcatttggccttatatgtgcaacctgtgagcagattgccgactccc

SEQ ID NO: 63546 - DNA, 60 bp, Artificial
  Synthetic oligonucleotide
cggaaggagtaccggagtctatgagggaagaatatcgagaggaacagcagaatgctgtgg

SEQ ID NO: 63547 - DNA, 60 bp, Artificial
  Synthetic oligonucleotide
aataccgatcttgaggctctcatggagtggctaaagacaagaccaatcctgtcacctctg

SEQ ID NO: 63548 - DNA, 60 bp, Artificial
  Synthetic oligonucleotide
ctggaaagaataccgatcttgaggctctcatggagtggctaaagacaagaccaatcctgt

SEQ ID NO: 63549 - DNA, 60 bp, Artificial
  Synthetic oligonucleotide
ggaaagagtaccgatcttgaggctctcatggagtggctaaagacaagaccaatcctgtca

SEQ ID NO: 63550 - DNA, 60 bp, Artificial
  Synthetic oligonucleotide
tggaaagaataccgatcttgaggctctcatggagtggctaaagacaagaccaatcctgtc

SEQ ID NO: 63551 - DNA, 60 bp, Artificial
  Synthetic oligonucleotide
aggccccctcaaagccgagatcgcacagagacttgaagatgtatttgctggaaagaatac

SEQ ID NO: 63552 - DNA, 60 bp, Artificial
  Synthetic oligonucleotide
caggccccctcaaagccgagatcgcacagagacttgaagatgtatttgctggaaagagta

SEQ ID NO: 63553 - DNA, 60 bp, Artificial
  Synthetic oligonucleotide
caggccccctcaaagccgagatcgcacagagacttgaagatgtatttgctggaaagaata

SEQ ID NO: 63554 - DNA, 60 bp, Artificial
  Synthetic oligonucleotide
tcaggccccctcaaagccgagatcgcacagagacttgaagatgtatttgctggaaagaat

SEQ ID NO: 63555 - DNA, 60 bp, Artificial
  Synthetic oligonucleotide
gtcaggccccctcaaagccgagatcgcacagagacttgaagatgtatttgctggaaagaa

SEQ ID NO: 63556 - DNA, 60 bp, Artificial
  Synthetic oligonucleotide
tcgtcccgtcaggccccctcaaagccgagatcgcacagagacttgaagatgtatttgctg

SEQ ID NO: 63557 - DNA, 60 bp, Artificial
  Synthetic oligonucleotide
cagagtctatgagggaagaatatcgagaggaacagcagaatgctgtggatgctgacgatg

SEQ ID NO: 63558 - DNA, 60 bp, Artificial
  Synthetic oligonucleotide
ttctaaccgaggtcgaaacgtacgttctctctatcgtcccgtcaggccccctcaaagccg

SEQ ID NO: 63559 - DNA, 60 bp, Artificial
  Synthetic oligonucleotide
aaatgcttatgtctctgtagtgtcttcacattatagcagaagattcaccccagaaatagc

SEQ ID NO: 63560 - DNA, 60 bp, Artificial
  Synthetic oligonucleotide
atgcttatgtctctgtagtgtcttcacattatagcagaagattcaccccagaaatagcca

SEQ ID NO: 63561 - DNA, 60 bp, Artificial
  Synthetic oligonucleotide
gcttatgtctctgtagtgtcttcacattatagcagaagattcaccccagaaatagccaaa

SEQ ID NO: 63562 - DNA, 60 bp, Artificial
  Synthetic oligonucleotide
gttacaggactaaggaacatcccatccattcaatccagaggtttgtttggagccattgcc

SEQ ID NO: 63563 - DNA, 60 bp, Artificial
  Synthetic oligonucleotide
agccattgccggtttcattgaaggggggtggactggaatggtagatggttggtatggtta

SEQ ID NO: 63564 - DNA, 60 bp, Artificial
  Synthetic oligonucleotide
cctctatcatacagaaaatgcttatgtctctgtagtgtcttcacattatagcagaagatt

SEQ ID NO: 63565 - DNA, 60 bp, Artificial
  Synthetic oligonucleotide
cctctatcatacagaaaatgcctatgtctctgtagtgtcttcacattatagcagaagatt

SEQ ID NO: 63566 - DNA, 60 bp, Artificial
  Synthetic oligonucleotide
tctatcatacagaaaatgcttatgtctctgtagtgtcttcacattatagcagaagattca

SEQ ID NO: 63567 - DNA, 60 bp, Artificial
  Synthetic oligonucleotide
tcatacagaaaatgcttatgtctctgtagtgtcttcacattatagcagaagattcacccc

SEQ ID NO: 63568 - DNA, 60 bp, Artificial
  Synthetic oligonucleotide
accaaagggccctctatcatacagaaaatgcttatgtctctgtagtgtcttcacattata

SEQ ID NO: 63569 - DNA, 60 bp, Artificial
  Synthetic oligonucleotide
ccaaagggccctctatcatacagaaaatgcttatgtctctgtagtgtcttcacattatag

SEQ ID NO: 63570 - DNA, 60 bp, Artificial
  Synthetic oligonucleotide
ccaaaaggccctctatcatacagaaaatgcttatgtctctgtagtgtcttcacattatag

SEQ ID NO: 63571 - DNA, 60 bp, Artificial
  Synthetic oligonucleotide
aaatgcttatgtctctgtagtgtcttcacattatagcagaagattcaccccagaagtagc

SEQ ID NO: 63572 - DNA, 60 bp, Artificial
  Synthetic oligonucleotide
aaatgcctatgtctctgtagtgtcttcacattatagcagaagattcaccccagaaatagc

SEQ ID NO: 63573 - DNA, 50 bp, Artificial
  Synthetic oligonucleotide
tgggggcaatcagcttctggatgtgttccaatgggtctttgcagtgtaga

SEQ ID NO: 63574 - DNA, 60 bp, Artificial
  Synthetic oligonucleotide
gatttactcaacagtcgccagttccctggttcttttggtctccctgggggcaatcagctt

SEQ ID NO: 63575 - DNA, 60 bp, Artificial
  Synthetic oligonucleotide
gatctactcaacagtcgccagttccctggttcttttggtctccctgggggcaatcagctt

SEQ ID NO: 63576 - DNA, 60 bp, Artificial
  Synthetic oligonucleotide
attccgaagaatcaaagttgaacagggagaaaattgatggagtgaaattggaatcaatgg

SEQ ID NO: 63577 - DNA, 64 bp, Artificial
  Synthetic oligonucleotide
gactatccaaaatattccgaagaatcaaagttaaacagggagaaaattgatggagtgaaattgg

SEQ ID NO: 63578 - DNA, 60 bp, Artificial
  Synthetic oligonucleotide
gactatccaaaatattccgaagaatcaaagttgaacagggagaaaattgatggagtgaaa

SEQ ID NO: 63579 - DNA, 60 bp, Artificial
  Synthetic oligonucleotide
atgactatccaaaatattccgaagaatcaaagttgaacagggagaaaattgatggagtga

SEQ ID NO: 63580 - DNA, 60 bp, Artificial
  Synthetic oligonucleotide
ttatgactatccaaaatattccgaagaatcaaagttaaacagggagaaaattgatggagt

SEQ ID NO: 63581 - DNA, 60 bp, Artificial
  Synthetic oligonucleotide
cttatgactatccaaaatattccgaagaatcaaagttgaacagggagaaaattgatggag

SEQ ID NO: 63582 - DNA, 60 bp, Artificial
  Synthetic oligonucleotide
ggtgaccaaagggccctctatcatacagaaaatgcttatgtctctgtagtgtcttcacat

SEQ ID NO: 63583 - DNA, 60 bp, Artificial
  Synthetic oligonucleotide
ggggaccaaagggccctctatcatacagaaaatgcttatgtctctgtagtgtcttcacat

SEQ ID NO: 63584 - DNA, 60 bp, Artificial
  Synthetic oligonucleotide
caaactggtcttggccagacggtgctgagttgccgttcaccattgacaagtagttcattg

SEQ ID NO: 63585 - DNA, 60 bp, Artificial
  Synthetic oligonucleotide
ctgcaaattggtcttggccagacggtgctgagttgccgttcaccattgacaaatagttcg

SEQ ID NO: 63586 - DNA, 60 bp, Artificial
  Synthetic oligonucleotide
tgtccgcaaacaagttgcagaccaagatctaggcgatgcccccttccttgatcggcttcg

SEQ ID NO: 63587 - DNA, 60 bp, Artificial
  Synthetic oligonucleotide
cgaagagggagcaattgttggcgaaatttcaccattgccttcttttccaggacatactaa

SEQ ID NO: 63588 - DNA, 60 bp, Artificial
  Synthetic oligonucleotide
ggctttcaccgaagagggagcaattgttggcgaaattttaccattgccttcttttccagg

SEQ ID NO: 63589 - DNA, 58 bp, Artificial
  Synthetic oligonucleotide
ttttgaccgattggagaatctgacattactaagggctttcaccgaagagggagcaatt

SEQ ID NO: 63590 - DNA, 58 bp, Artificial
  Synthetic oligonucleotide
ttttgaccggttggagaacctgacattactaagggctttcaccgaagagggagcaatt

SEQ ID NO: 63591 - DNA, 58 bp, Artificial
  Synthetic oligonucleotide
ttttgaccggttggagaatttgacattactaagggctttcaccgaagagggagcaatt

SEQ ID NO: 63592 - DNA, 60 bp, Artificial
  Synthetic oligonucleotide
ttcgcggtacctaactgacatgactgttgaagaaatgtcaagggactggttcatgctcat

SEQ ID NO: 63593 - DNA, 60 bp, Artificial
  Synthetic oligonucleotide
gcaaatttcagtgtgatttttgaccggttggagaatctgacattactaagggctttcacc

SEQ ID NO: 63594 - DNA, 60 bp, Artificial
  Synthetic oligonucleotide
gcgaatttcagtgtgatttttgaccggttggagaatctgacattactaagggctttcacc

SEQ ID NO: 63595 - DNA, 56 bp, Artificial
  Synthetic oligonucleotide
ggggacttaaatggaatgataacacagttcgagtctctgaaactctacagagattc

SEQ ID NO: 63596 - DNA, 60 bp, Artificial
  Synthetic oligonucleotide
agtgtgatttttgaccggttggagaatctgacattactaagggctttcaccgaagaggga

SEQ ID NO: 63597 - DNA, 60 bp, Artificial
  Synthetic oligonucleotide
gagtctctgaaactctacagagattcgcttggagaagcagtaatgagactgggggacctc

SEQ ID NO: 63598 - DNA, 60 bp, Artificial
  Synthetic oligonucleotide
gaccgaagtccttatagggccttaatgagctgtcctctaggtgaagctccgtccccatac

SEQ ID NO: 63599 - DNA, 60 bp, Artificial
  Synthetic oligonucleotide
atgtccgcaaacaagttgcagaccaagatctaggcgatgcccccttccttgatcggcttc

SEQ ID NO: 63600 - DNA, 60 bp, Artificial
  Synthetic oligonucleotide
catgtccgcaaacaagttgcagaccaagatctaggcgatgcccccttccttgatcggctt

SEQ ID NO: 63601 - DNA, 60 bp, Artificial
  Synthetic oligonucleotide
gcatgtccgtaaacaagttgcagaccaagatctaggcgatgcccccttccttgatcggct

SEQ ID NO: 63602 - DNA, 60 bp, Artificial
  Synthetic oligonucleotide
ggggaaggttactaaatcaatggagttgaatgcacccaattttcattatgaggaatgttc

SEQ ID NO: 63603 - DNA, 60 bp, Artificial
  Synthetic oligonucleotide
gggaaggttaccaaaacaatagagttgaatgcacccaattttcattatgaggaatgttcc

SEQ ID NO: 63604 - DNA, 60 bp, Artificial
  Synthetic oligonucleotide
gggaaggttactaaatcaatagagttgaatgcacccaattttcattatgaggaatgttcc

SEQ ID NO: 63605 - DNA, 60 bp, Artificial
  Synthetic oligonucleotide
gtcaagggactggttcatgctcatgcccaagcagaaagtggctggccctctttgcgtcag

SEQ ID NO: 63606 - DNA, 60 bp, Artificial
  Synthetic oligonucleotide
gcccccttccttgatcggcttcgccgggatcagaagtctctaaagggaagaggcagcact

SEQ ID NO: 63607 - DNA, 60 bp, Artificial
  Synthetic oligonucleotide
ccacactgtgtcaagctttcaggtagattgcttcctttggcatgtccgtaaacaagttgc

SEQ ID NO: 63608 - DNA, 60 bp, Artificial
  Synthetic oligonucleotide
ggactcccacactgtgtcaagctttcaggtagattgcttcctttggcatgtccgcaaaca

SEQ ID NO: 63609 - DNA, 60 bp, Artificial
  Synthetic oligonucleotide
ggattcccacactgtgtcaagctttcaggtagattgcttcctttggcacgtccgcaaaca

SEQ ID NO: 63610 - DNA, 60 bp, Artificial
  Synthetic oligonucleotide
atcgggggacttaaatggaatgataacacagttcgagtctctgaaactctacagagattc

SEQ ID NO: 63611 - DNA, 60 bp, Artificial
  Synthetic oligonucleotide
gtcaagggactggttcatgctcatgcccaagcaaaaaatggctggccctctttgtgtcag

SEQ ID NO: 63612 - DNA, 60 bp, Artificial
  Synthetic oligonucleotide
aatggattcccacactgtgtcaagctttcaggtagattgcttcctttggcatgtccgcaa

SEQ ID NO: 63613 - DNA, 60 bp, Artificial
  Synthetic oligonucleotide
aatggactcccacactgtgtcaagctttcaggtagattgcttcctttggcatgtccgcaa

SEQ ID NO: 63614 - DNA, 60 bp, Artificial
  Synthetic oligonucleotide
ggattcccacactgtgtcaagctttcaggtagattgctttctttggcatgtccgcaaaca

SEQ ID NO: 63615 - DNA, 60 bp, Artificial
  Synthetic oligonucleotide
taatggattcccacactgtgtcaagctttcaggtagattgcttcctttggcatgtccgca

SEQ ID NO: 63616 - DNA, 60 bp, Artificial
  Synthetic oligonucleotide
ccccttccttgatcggcttcgccgggatcagaagtctctaaagggaagaggcagcactct

SEQ ID NO: 63617 - DNA, 60 bp, Artificial
  Synthetic oligonucleotide
gtctctgtagtgtcttcacattatagcagaaaattcaccccagaaatagccaaaagaccc

SEQ ID NO: 63618 - DNA, 60 bp, Artificial
  Synthetic oligonucleotide
ggccctctatcatacagaaaatgcttatgtctctgtagtgtcttcacattatagcagaaa

SEQ ID NO: 63619 - DNA, 60 bp, Artificial
  Synthetic oligonucleotide
atgtctctgtagtgtcttcacattatagcagaaaattcaccccagaaatagccaaaagac

SEQ ID NO: 63620 - DNA, 60 bp, Artificial
  Synthetic oligonucleotide
ctccgtccccatacaattcaaagttcgaatcagttgcatggtcagcaagcgcatgccatg

SEQ ID NO: 63621 - DNA, 60 bp, Artificial
  Synthetic oligonucleotide
cagtgacattggccggcaattcatctctttgtcctatcagtggatgggctatatacacaa

SEQ ID NO: 63622 - DNA, 60 bp, Artificial
  Synthetic oligonucleotide
aaacttcagtgacattggccggcaattcatctctttgtcctatcagtggatgggctatat

SEQ ID NO: 63623 - DNA, 60 bp, Artificial
  Synthetic oligonucleotide
aggtgaagctccgtccccatacaattcaaagttcgaatcagttgcatggtcagcaagcgc

SEQ ID NO: 63624 - DNA, 60 bp, Artificial
  Synthetic oligonucleotide
ggaacctgggacctttgatcttgggggactatatgaagcaattgaggagtgcctgattaa

SEQ ID NO: 63625 - DNA, 60 bp, Artificial
  Synthetic oligonucleotide
gcctgatctgtatgattacaaagagaatagattcatcgagattggagtgacaaggagaga

SEQ ID NO: 63626 - DNA, 60 bp, Artificial
  Synthetic oligonucleotide
cctcaccgacccaagacttgagccacacaaatgggagaagtactgtgttcttgagatagg

SEQ ID NO: 63627 - DNA, 60 bp, Artificial
  Synthetic oligonucleotide
tgccagacctgtatgattacaaagagaatagattcatcgagattggagtgacaaggagag

SEQ ID NO: 63628 - DNA, 60 bp, Artificial
  Synthetic oligonucleotide
caacacctcgaccaattagacttccgaatgggcctccttgttttcagcggtcaaaattcc

SEQ ID NO: 63629 - DNA, 60 bp, Artificial
  Synthetic oligonucleotide
aaaccgaagtttctgccagatctgtatgattacaaagagaatagattcatcgagattgga

SEQ ID NO: 63630 - DNA, 60 bp, Artificial
  Synthetic oligonucleotide
ccgatgtggtaaactttgtgagcatggagttttccctcactgacccaagacttgagccac

SEQ ID NO: 63631 - DNA, 60 bp, Artificial
  Synthetic oligonucleotide
tccctcaccgacccaagacttgagccacacaaatgggagaagtactgtgttcttgagata

SEQ ID NO: 63632 - DNA, 60 bp, Artificial
  Synthetic oligonucleotide
ccagatctgtatgattacaaagagaatagattcatcgagattggagtgacaaggagagag

SEQ ID NO: 63633 - DNA, 60 bp, Artificial
  Synthetic oligonucleotide
catttcatcaatgagcaaggcgaatcaataatagtagagcctgaggacccaaatgcactt

SEQ ID NO: 63634 - DNA, 60 bp, Artificial
  Synthetic oligonucleotide
gaacaaatggaacctcaaaaattaaaatgaaatggggaatggagatgaggcgttgcctcc

SEQ ID NO: 63635 - DNA, 51 bp, Artificial
  Synthetic oligonucleotide
cggctacattgagggcaagctttctcaaatgtccaaagaagtaaatgctaa

SEQ ID NO: 63636 - DNA, 60 bp, Artificial
  Synthetic oligonucleotide
ataagacaggaaatggcaagcagaggtctttgggactcctttcgtcagtccgaaagaggc

SEQ ID NO: 63637 - DNA, 60 bp, Artificial
  Synthetic oligonucleotide
aaacaacacctcgaccaattagactcccgaatgggcctccttgttttcagcggtcaaaat

SEQ ID NO: 63638 - DNA, 60 bp, Artificial
  Synthetic oligonucleotide
tccttcctaacacatgcattgagatagctgaggcaatgctactatttgttatccatactg

SEQ ID NO: 63639 - DNA, 60 bp, Artificial
  Synthetic oligonucleotide
ggagatgaggcgttgtctcctccaatccctccaacaaatagagagcatgattgaagctga

SEQ ID NO: 63640 - DNA, 60 bp, Artificial
  Synthetic oligonucleotide
ggcgttgtctcctccaatccctccaacaaatagagagcatgattgaagctgagtcctctg

SEQ ID NO: 63641 - DNA, 55 bp, Artificial
  Synthetic oligonucleotide
aaaattaaaatgaaatggggaatggagatgaggcgttgcctcctccaatccctcc

SEQ ID NO: 63642 - DNA, 60 bp, Artificial
  Synthetic oligonucleotide
ttaaaatgaaatggggaatggagatgaggcgttgtctcctccaatccctccaacaaatag

SEQ ID NO: 63643 - DNA, 60 bp, Artificial
  Synthetic oligonucleotide
gccacacaaatgggagaagtactgtgttcttgagataggagatatgcttctaaggagtgc

SEQ ID NO: 63644 - DNA, 60 bp, Artificial
  Synthetic oligonucleotide
gggagaagtactgtgttcttgagataggagatatgcttctaaggagtgcaataggccaag

SEQ ID NO: 63645 - DNA, 60 bp, Artificial
  Synthetic oligonucleotide
ttcatttcatcaatgagcaaggcgaatcaataatagtagaacctgaggacccaaatgcac

SEQ ID NO: 63646 - DNA, 60 bp, Artificial
  Synthetic oligonucleotide
agaaaccgaagtttctgccagatctgtatgattacaaagagaatagattcatcgagattg

SEQ ID NO: 63647 - DNA, 60 bp, Artificial
  Synthetic oligonucleotide
gttcaccataagacaagaaatggcaagcagaggtctttgggactcctttcgtcagtccga

SEQ ID NO: 63648 - DNA, 60 bp, Artificial
  Synthetic oligonucleotide
aatgacaccgatgtggtaaactttgtgagcatggagttttccctcactgacccaagactt

SEQ ID NO: 63649 - DNA, 60 bp, Artificial
  Synthetic oligonucleotide
gagcaaggcgaatcaataatagtagagcctgaggacccaaatgcacttttaaaacacaga

SEQ ID NO: 63650 - DNA, 60 bp, Artificial
  Synthetic oligonucleotide
ccaatttgtacggcttcattataaaaggaagatctcacttaaggaatgacaccgatgtgg

SEQ ID NO: 63651 - DNA, 60 bp, Artificial
  Synthetic oligonucleotide
ctcacttaaggaatgacaccgatgtggtaaactttgtgagcatggagttttccctcaccg

SEQ ID NO: 63652 - DNA, 60 bp, Artificial
  Synthetic oligonucleotide
attgcagagccactgaatatataatgaagggggtatacattaatactgctttgcttaatg

SEQ ID NO: 63653 - DNA, 60 bp, Artificial
  Synthetic oligonucleotide
gaaagaccaatttgtacggcttcattataaaaggaagatctcacttaaggaatgacaccg

SEQ ID NO: 63654 - DNA, 60 bp, Artificial
  Synthetic oligonucleotide
cctcgaccaattagactcccgaatgggcctccttgttttcagcggtcaaaattcctgctg

SEQ ID NO: 63655 - DNA, 60 bp, Artificial
  Synthetic oligonucleotide
cttcacagctgaggtgtcccattgcagagccactgaatatataatgaagggggtatacat

SEQ ID NO: 63656 - DNA, 60 bp, Artificial
  Synthetic oligonucleotide
atcgtatctttaaacacggtttaaaaagagggccttctacggaaggagtaccagagtcta

SEQ ID NO: 63657 - DNA, 60 bp, Artificial
  Synthetic oligonucleotide
tgatctccttgaaaatttacaggcctatcagaaacgaatgggggtgcagatgcaacgatt

SEQ ID NO: 63658 - DNA, 60 bp, Artificial
  Synthetic oligonucleotide
taattgggattgtgcacttgatattgtggattattgatcgccttttttccaaaagcattt

SEQ ID NO: 63659 - DNA, 60 bp, Artificial
  Synthetic oligonucleotide
gatattgtggattattgatcgccttttctccaaaagcatttatcgtatctttaaacacgg

SEQ ID NO: 63660 - DNA, 60 bp, Artificial
  Synthetic oligonucleotide
gcaatgagagccattgggactcatcctagctctagcactggtctgaaaaatgatctcctt

SEQ ID NO: 63661 - DNA, 60 bp, Artificial
  Synthetic oligonucleotide
gggctgtgaccaccgaatcagcatttggccttatatgtgcaacctgtgaacagattgccg

SEQ ID NO: 63662 - DNA, 60 bp, Artificial
  Synthetic oligonucleotide
aggccccctcaaagccgagatcgcacagagacttgaagatgtatttgctgggaagaatac

SEQ ID NO: 63663 - DNA, 60 bp, Artificial
  Synthetic oligonucleotide
gagataacattccatggggccaaagaaatagcactcagttattctgctggtgcacttgcc

SEQ ID NO: 63664 - DNA, 60 bp, Artificial
  Synthetic oligonucleotide
cgagaggaacagcagaatgctgtggatgctgacgatgatcattttgtcagcatagagctg

SEQ ID NO: 63665 - DNA, 60 bp, Artificial
  Synthetic oligonucleotide
ggaagaataccgatcttgaggctctcatggagtggctaaagacaagaccaatcctgtcac

SEQ ID NO: 63666 - DNA, 60 bp, Artificial
  Synthetic oligonucleotide
cccgtcaggccccctcaaagccgagatcgcacagagacttgaagatgtatttgctggaaa

SEQ ID NO: 63667 - DNA, 60 bp, Artificial
  Synthetic oligonucleotide
ccgagatcgcacagagacttgaagatgtatttgctgggaagaataccgatcttgaggctc

SEQ ID NO: 63668 - DNA, 60 bp, Artificial
  Synthetic oligonucleotide
tgaccaccgaatcagcatttggccttatatgtgcaacctgtgaacagattgccgactccc

SEQ ID NO: 63669 - DNA, 60 bp, Artificial
  Synthetic oligonucleotide
aggatgggggctgtgaccaccgaatcagcatttggccttatatgtgcaacctgtgaacag

SEQ ID NO: 63670 - DNA, 60 bp, Artificial
  Synthetic oligonucleotide
tggtgcacttgccagttgtatgggactcatatacaacaggatgggggctgtgaccaccga

SEQ ID NO: 63671 - DNA, 60 bp, Artificial
  Synthetic oligonucleotide
aaaagcatttatcgtatctttaaacacggtttaaaaagagggccttctacggaaggagta

SEQ ID NO: 63672 - DNA, 60 bp, Artificial
  Synthetic oligonucleotide
cgtcccgtcaggccccctcaaagccgagatcgcacagagacttgaagatgtatttgctgg

SEQ ID NO: 63673 - DNA, 60 bp, Artificial
  Synthetic oligonucleotide
cggaaggagtaccagagtctatgagggaagaatatcgagaggaacagcagaatgctgggg

SEQ ID NO: 63674 - DNA, 60 bp, Artificial
  Synthetic oligonucleotide
gggccttctacggaaggagtaccagagtctatgagggaagaatatcgagaggaacagcag

SEQ ID NO: 63675 - DNA, 60 bp, Artificial
  Synthetic oligonucleotide
ccaccgaatcagcatttggccttatatgtgcaacctgtgaacagattgccgactcccagc

SEQ ID NO: 63676 - DNA, 60 bp, Artificial
  Synthetic oligonucleotide
tatttgctggaaagaataccgatcttgaggctctcatggagtggctaaagacaagaccaa

SEQ ID NO: 63677 - DNA, 60 bp, Artificial
  Synthetic oligonucleotide
ttgctggaaagaataccgatcttgaggctctcatggagtggctaaagacaagaccaatcc

SEQ ID NO: 63678 - DNA, 60 bp, Artificial
  Synthetic oligonucleotide
tagctctagcactggtctgaaaaatgatctccttgaaaatttacaggcctatcagaaacg

SEQ ID NO: 63679 - DNA, 60 bp, Artificial
  Synthetic oligonucleotide
aaagagggccttctacggaaggagtaccagagtctatgagggaagaatatcgagaggaac

SEQ ID NO: 63680 - DNA, 60 bp, Artificial
  Synthetic oligonucleotide
cagttattctgctggtgcacttgccagttgtatgggactcatatacaacaggatgggggc

SEQ ID NO: 63681 - DNA, 60 bp, Artificial
  Synthetic oligonucleotide
tggacagagcagtcaaactgtatcgaaagcttaagagggagataacattccatggggcca

SEQ ID NO: 63682 - DNA, 60 bp, Artificial
  Synthetic oligonucleotide
tcgaaagcttaagagggagataacattccatggggccaaagaaatagcactcagttattc

SEQ ID NO: 63683 - DNA, 60 bp, Artificial
  Synthetic oligonucleotide
ggaatggggatccaaataatatggacagagcagtcaaactgtatcgaaagcttaagaggg

SEQ ID NO: 63684 - DNA, 60 bp, Artificial
  Synthetic oligonucleotide
tcattatgaggaatgttcctgttacccagacactggcatagtgatgtgtgtatgcaggga

SEQ ID NO: 63685 - DNA, 59 bp, Artificial
  Synthetic oligonucleotide
ttttattatgaggaatgttcctgttacccagacactggcacagtgatgtgtgtatgcag

SEQ ID NO: 63686 - DNA, 60 bp, Artificial
  Synthetic oligonucleotide
cgcacccaattttcattatgaggaatgttcctgttacccagacactggcacagtgatgtg

SEQ ID NO: 63687 - DNA, 60 bp, Artificial
  Synthetic oligonucleotide
tgtttttgtcataagagaacctttcatatcatgttctcatttggaatgcagaaccttttt

SEQ ID NO: 63688 - DNA, 60 bp, Artificial
  Synthetic oligonucleotide
gatgtttttgtcataagagaacctttcatatcatgttctcatttggaatgcaggaccttt

SEQ ID NO: 63689 - DNA, 60 bp, Artificial
  Synthetic oligonucleotide
gctatatacacaaaagacaacagcataagaattggctccaaaggagatgtttttgtcata

SEQ ID NO: 63690 - DNA, 57 bp, Artificial
  Synthetic oligonucleotide
tcaaaaaataataaccattggatcaatcagtatagcaattggaataattagtctaat

SEQ ID NO: 63691 - DNA, 60 bp, Artificial
  Synthetic oligonucleotide
caaaacttcagtgacattggccggcaattcatctctttgttctatcagtggatgggctat

SEQ ID NO: 63692 - DNA, 58 bp, Artificial
  Synthetic oligonucleotide
gatgggctatatacacaaaagacaacagcataagaattggctccaaaggagatgtttt

SEQ ID NO: 63693 - DNA, 60 bp, Artificial
  Synthetic oligonucleotide
gatgggctatatacacaaaagacaacagcataagaattggctccaaaggagatgtttttg

SEQ ID NO: 63694 - DNA, 60 bp, Artificial
  Synthetic oligonucleotide
gtcagcaagcgcatgccatgatggcatgggctggttaacaatcggaatttctggtccaga

SEQ ID NO: 63695 - DNA, 60 bp, Artificial
  Synthetic oligonucleotide
cttcagtgacattggccggcaattcatctctttgttctatcagtggatgggctatataca

SEQ ID NO: 63696 - DNA, 60 bp, Artificial
  Synthetic oligonucleotide
caaactggtcttggccagacggtgctgagttgccgttcactattgacaagtagttcgttg

SEQ ID NO: 63697 - DNA, 60 bp, Artificial
  Synthetic oligonucleotide
caaactggtcttggccagacggtgctgagttgccgttcaccattgacaagtagttctttg

SEQ ID NO: 63698 - DNA, 60 bp, Artificial
  Synthetic oligonucleotide
cgggatttctggtccagacaatggagctgtggctgtactaaaatacaacggaataataac

SEQ ID NO: 63699 - DNA, 59 bp, Artificial
  Synthetic oligonucleotide
ctggtccagacaatggagctgtggctgtactaaaatacaacggaataataactgaaacc

SEQ ID NO: 63700 - DNA, 54 bp, Artificial
  Synthetic oligonucleotide
ccagacaatggagctgtggctgtactaaaatacaacggaataataactgaaacc

SEQ ID NO: 63701 - DNA, 60 bp, Artificial
  Synthetic oligonucleotide
caagcgcatgccatgatggcatgggctggttaacaatcggaatttctggtccagacaatg

SEQ ID NO: 63702 - DNA, 60 bp, Artificial
  Synthetic oligonucleotide
cagcaagcgcatgccatgatggcatgggctggttaacaatcggaatttctggtccagaca

SEQ ID NO: 63703 - DNA, 60 bp, Artificial
  Synthetic oligonucleotide
ccatgatggcatgggctggttaacaatcggaatttctggtccagacaatggagctgtggc

SEQ ID NO: 63704 - DNA, 54 bp, Artificial
  Synthetic oligonucleotide
tgccatgatggcatgggctggttaacaatcgggatttctggtccagacaatgga

SEQ ID NO: 63705 - DNA, 60 bp, Artificial
  Synthetic oligonucleotide
gccggcaattcatctctttgttctatcagtggatgggctatatacacaaaagacaacagc

SEQ ID NO: 63706 - DNA, 60 bp, Artificial
  Synthetic oligonucleotide
ttttgtcataagagaacctttcatatcatgttctcatttggaatgcaggaccttttttct

SEQ ID NO: 63707 - DNA, 60 bp, Artificial
  Synthetic oligonucleotide
ccaatttcagcatggagcttcctagttttggggtgtctggggtcaacgaatctgcagaca

SEQ ID NO: 63708 - DNA, 60 bp, Artificial
  Synthetic oligonucleotide
tgttgccaatttcagcatggagcttcctagttttggggtgtctggggtcaatgaatctgc

SEQ ID NO: 63709 - DNA, 60 bp, Artificial
  Synthetic oligonucleotide
agcaaacaagggtggacaaactgacacagggcagacagacctatgactggactctaaata

SEQ ID NO: 63710 - DNA, 60 bp, Artificial
  Synthetic oligonucleotide
gggtggacaaactgacacagggcagacagacctatgactggactctaaataggaaccagc

SEQ ID NO: 63711 - DNA, 60 bp, Artificial
  Synthetic oligonucleotide
caagagcccgaattgatgcacggattgatttcgaatctggaaggataaagagggaggagt

SEQ ID NO: 63712 - DNA, 60 bp, Artificial
  Synthetic oligonucleotide
gggtacaccatggatacagtcaacaggacacaccagtactcagaaagaggaagatggaca

SEQ ID NO: 63713 - DNA, 60 bp, Artificial
  Synthetic oligonucleotide
tcttgtattgagacaatggaggttgttcagcaaacaagggtggacaaactgacacagggc

SEQ ID NO: 63714 - DNA, 60 bp, Artificial
  Synthetic oligonucleotide
gccaaaaatatggagtatgacgctgttgcaacaacacactcctgggtccccaaaagaaat

SEQ ID NO: 63715 - DNA, 60 bp, Artificial
  Synthetic oligonucleotide
gaagtttgcttgaaatgggagttgatggatgaggattaccaggggcgtttatgcaaccca

SEQ ID NO: 63716 - DNA, 60 bp, Artificial
  Synthetic oligonucleotide
gaaaatcaaaaccctagaatgttcttggccatgatcacatatataaccaaaaatcagcct

SEQ ID NO: 63717 - DNA, 60 bp, Artificial
  Synthetic oligonucleotide
tattgctccaataatgttttcaaacaagatggcgagactaggtaaggggtacatgtttga

SEQ ID NO: 63718 - DNA, 60 bp, Artificial
  Synthetic oligonucleotide
ggaaccagcctgctgccacagcattggcaaacactatagaagtattcagatcaaacggcc

SEQ ID NO: 63719 - DNA, 56 bp, Artificial
  Synthetic oligonucleotide
aaaataccgaaactggagcaccgcaactcaacccaattgatgggccactaccagaa

SEQ ID NO: 63720 - DNA, 60 bp, Artificial
  Synthetic oligonucleotide
cgcaactcaacccaattgatgggccactaccagaagacaatgaaccgagtggctatgccc

SEQ ID NO: 63721 - DNA, 60 bp, Artificial
  Synthetic oligonucleotide
gactggactctaaataggaaccagcctgctgccacagcattggcaaacactatagaagta

SEQ ID NO: 63722 - DNA, 56 bp, Artificial
  Synthetic oligonucleotide
ggcaaaagagatacaccaagactacttactggtgggatggtctccaatcgtctgat

SEQ ID NO: 63723 - DNA, 60 bp, Artificial
  Synthetic oligonucleotide
caaactgacacagggcagacagacctatgactggactctaaataggaaccagcctgctgc

SEQ ID NO: 63724 - DNA, 60 bp, Artificial
  Synthetic oligonucleotide
agcaaaaagaagtcttacataaacagaacaggtacctttgaattcacgagctttttctat

SEQ ID NO: 63725 - DNA, 60 bp, Artificial
  Synthetic oligonucleotide
agatggcgagactaggtaaagggtacatgtttgaaagcaagagtatgaaactgagaactc

SEQ ID NO: 63726 - DNA, 60 bp, Artificial
  Synthetic oligonucleotide
aacagaacaggtacctttgaattcacgagctttttctatcgttatgggtttgttgccaat

SEQ ID NO: 63727 - DNA, 60 bp, Artificial
  Synthetic oligonucleotide
tgtaagctgctaggaattaatatgagcaaaaagaagtcttacataaacagaacaggtacc

SEQ ID NO: 63728 - DNA, 60 bp, Artificial
  Synthetic oligonucleotide
catgggacaggaacagggtacaccatggatacagtcaacaggacacaccagtactcagaa

SEQ ID NO: 63729 - DNA, 60 bp, Artificial
  Synthetic oligonucleotide
gacaggaacagggcacaccatggatacagtcaacaggacacaccagtactcagaaagagg

SEQ ID NO: 63730 - DNA, 60 bp, Artificial
  Synthetic oligonucleotide
gcaacaacacactcctgggtccccaaaagaaatcgatccattttgaacacgagccaacgg

SEQ ID NO: 63731 - DNA, 60 bp, Artificial
  Synthetic oligonucleotide
cccaattgatgggccactaccagaagacaatgaaccaagtggctatgcccaaacagattg

SEQ ID NO: 63732 - DNA, 60 bp, Artificial
  Synthetic oligonucleotide
cgctgttgcaacaacacactcctgggtccccaaaagaaatcgatccattttgaacacgag

SEQ ID NO: 63733 - DNA, 60 bp, Artificial
  Synthetic oligonucleotide
tacagccatgggacaggaacagggtacaccatggatacagtcaacaggacacaccagtac

SEQ ID NO: 63734 - DNA, 60 bp, Artificial
  Synthetic oligonucleotide
caaaagaaatcgatccattttgaacacgagccaaagggggatacttgaagatgagcaaat

SEQ ID NO: 63735 - DNA, 60 bp, Artificial
  Synthetic oligonucleotide
cctttccttatactggtgaccctccttacagccatgggacaggaacagggtacaccatgg

SEQ ID NO: 63736 - DNA, 56 bp, Artificial
  Synthetic oligonucleotide
aaacaatgaccttggcccagcaacagctcaaatggcccttcagttatttataaaag

SEQ ID NO: 63737 - DNA, 60 bp, Artificial
  Synthetic oligonucleotide
gagcttcctagttttggggtgtctggggtcaacgaatctgcagacatgagtattggagtc

SEQ ID NO: 63738 - DNA, 60 bp, Artificial
  Synthetic oligonucleotide
gagtatgacgctgttgcaacaacacactcctgggtccccaaaagaaatcgatccattttg

SEQ ID NO: 63739 - DNA, 60 bp, Artificial
  Synthetic oligonucleotide
tcctggtatctttgaaaactcttgtattgagacaatggaggttgttcagcaaacaagggt

SEQ ID NO: 63740 - DNA, 60 bp, Artificial
  Synthetic oligonucleotide
taatgttttcaaacaagatggcgagactaggtaaggggtacatgtttgaaagcaagagta

SEQ ID NO: 63741 - DNA, 60 bp, Artificial
  Synthetic oligonucleotide
cgatgccaccgaggtgacacacaaatacaaacccggagatcatttgagataaagaaacta

SEQ ID NO: 63742 - DNA, 60 bp, Artificial
  Synthetic oligonucleotide
ttttcagaaggatgctaaagtacttttcttaaattggggaattgaacatattgacaatgt

SEQ ID NO: 63743 - DNA, 60 bp, Artificial
  Synthetic oligonucleotide
tgagagtcagcaaaatgggtgtagatgaatactccaatgctgaaagggtagtggtgagca

SEQ ID NO: 63744 - DNA, 60 bp, Artificial
  Synthetic oligonucleotide
agttttgcatttaacacaggggacatgctgggagcagatgtacactccaggtggggaagt

SEQ ID NO: 63745 - DNA, 60 bp, Artificial
  Synthetic oligonucleotide
tgatggcaatgaaatacccaattacagctgataaaaggataacggaaatgattcctgaaa

SEQ ID NO: 63746 - DNA, 60 bp, Artificial
  Synthetic oligonucleotide
aacatagtgagaagagctgcagtatcagcagatccactagcatctttattagaaatgtgc

SEQ ID NO: 63747 - DNA, 60 bp, Artificial
  Synthetic oligonucleotide
ggatgatggcaatgaaatacccaattacagctgataaaaggataacggaaatgattcctg

SEQ ID NO: 63748 - DNA, 60 bp, Artificial
  Synthetic oligonucleotide
ggcaaagaagatagaagatatgggccagcattaagcatcaatgaattgagcaaccttgcg

SEQ ID NO: 63749 - DNA, 60 bp, Artificial
  Synthetic oligonucleotide
ccaaaactactgtagaccacatggccataatcaagaaatacacatcaggaagacaggaga

SEQ ID NO: 63750 - DNA, 60 bp, Artificial
  Synthetic oligonucleotide
ccatagtcaagaaatacacatcaggaagacaggagaaaaacccatcacttaggatgaaat

SEQ ID NO: 63751 - DNA, 60 bp, Artificial
  Synthetic oligonucleotide
cgagatacttaccaaaactactgtagaccacatggccataatcaagaaatacacatcagg

SEQ ID NO: 63752 - DNA, 60 bp, Artificial
  Synthetic oligonucleotide
tcgcgagatacttaccaaaactactgtagaccacatggccataatcaagaaatacacatc

SEQ ID NO: 63753 - DNA, 60 bp, Artificial
  Synthetic oligonucleotide
cgcgagatacttaccaaaactactgtagaccacatggccataatcaagaaatacacatca

SEQ ID NO: 63754 - DNA, 60 bp, Artificial
  Synthetic oligonucleotide
acaatctcgcactcgcgagatacttaccaaaactactgtagaccacatggccataatcaa

SEQ ID NO: 63755 - DNA, 60 bp, Artificial
  Synthetic oligonucleotide
caaaatgggtgtagatgaatactccaatgctgaaagggtagtggtgagcattgaccggtt

SEQ ID NO: 63756 - DNA, 60 bp, Artificial
  Synthetic oligonucleotide
ccaaagcaaagtagaatgcaattctcgtcattaactgtgaatgtgaggggatcaggaatg

SEQ ID NO: 63757 - DNA, 60 bp, Artificial
  Synthetic oligonucleotide
aaccatttcaatctctagtccccaaggccattagaggccaatacagtgggtttgttagaa

SEQ ID NO: 63758 - DNA, 60 bp, Artificial
  Synthetic oligonucleotide
ccatttcaatctctagtccccaaggccattagaggccaatacagtgggtttgttagaact

SEQ ID NO: 63759 - DNA, 60 bp, Artificial
  Synthetic oligonucleotide
agctatactcaaaaaagcaaccaggagattgattcaactaatagtgagtggaagagacga

SEQ ID NO: 63760 - DNA, 60 bp, Artificial
  Synthetic oligonucleotide
caaaaaagcaaccaggagattgattcaactaatagtgagtggaagagacgaacagtcaat

SEQ ID NO: 63761 - DNA, 60 bp, Artificial
  Synthetic oligonucleotide
atgcaattttcgtcattaactgtgaatgtgaggggatcaggaatgagaatacttgtgagg

SEQ ID NO: 63762 - DNA, 60 bp, Artificial
  Synthetic oligonucleotide
aactgtgaatgtgaggggatcaggaatgagaatacttgtgaggggtaattctccagtatt

SEQ ID NO: 63763 - DNA, 60 bp, Artificial
  Synthetic oligonucleotide
agaattcacaatggttgggaaaagggcaacagctatactcaaaaaagcaaccaggagatt

SEQ ID NO: 63764 - DNA, 60 bp, Artificial
  Synthetic oligonucleotide
atggttgggaaaagggcaacagctatactcaaaaaagcaaccaggagattgattcaacta

SEQ ID NO: 63765 - DNA, 60 bp, Artificial
  Synthetic oligonucleotide
aaatacgccgaagagtcgacataaatcctggtcatgcagacctcagcaccaaggaggcac

SEQ ID NO: 63766 - DNA, 60 bp, Artificial
  Synthetic oligonucleotide
atgaaatacccaattacagctgataaaaggataacggaaatgattcctgaaagaaatgag

SEQ ID NO: 63767 - DNA, 60 bp, Artificial
  Synthetic oligonucleotide
atggcaatgaaatacccaattacagctgataaaaggataacggaaatgattcctgaaaga

SEQ ID NO: 63768 - DNA, 60 bp, Artificial
  Synthetic oligonucleotide
aatgattatgagggacggctgatccagaacagcttaacagtagagagaatggtgctctct

SEQ ID NO: 63769 - DNA, 60 bp, Artificial
  Synthetic oligonucleotide
aacactaatcaacaaagggcctctgcgggccaaatcagcacacaacccacgttttctgtg

SEQ ID NO: 63770 - DNA, 60 bp, Artificial
  Synthetic oligonucleotide
gattatgagggacggctgatccagaacagcttaacagtagagagaatggtgctctctgct

SEQ ID NO: 63771 - DNA, 60 bp, Artificial
  Synthetic oligonucleotide
caggtatacagtctaattagaccaaacgagaatcccgcacacaagagccagttggtgtgg

SEQ ID NO: 63772 - DNA, 60 bp, Artificial
  Synthetic oligonucleotide
caacggctggtttgactcacattatgatctggcattctaatttgaatgatacaacttacc

SEQ ID NO: 63773 - DNA, 60 bp, Artificial
  Synthetic oligonucleotide
gtctaattagaccaaacgagaatcccgcacacaagagccagttggtgtggatggcatgca

SEQ ID NO: 63774 - DNA, 60 bp, Artificial
  Synthetic oligonucleotide
tacagtctaattagaccaaacgagaatcccgcacacaagagccagttggtgtggatggca

SEQ ID NO: 63775 - DNA, 60 bp, Artificial
  Synthetic oligonucleotide
ccaaacgagaatcccgcacacaagagccagttagtgtggatggcatgcaattctgctgca

SEQ ID NO: 63776 - DNA, 60 bp, Artificial
  Synthetic oligonucleotide
taattagaccaaacgagaatcccgcacacaagagccagttagtgtggatggcatgcaatt

SEQ ID NO: 63777 - DNA, 60 bp, Artificial
  Synthetic oligonucleotide
cactgggaatacagagggaagaacatcagacatgagggcagaaatcataaagatgatgga

SEQ ID NO: 63778 - DNA, 60 bp, Artificial
  Synthetic oligonucleotide
aaatgtgcaccgagcttaagctcaatgattatgagggacggctgatccagaacagcttaa

SEQ ID NO: 63779 - DNA, 60 bp, Artificial
  Synthetic oligonucleotide
cagaggacaagagctcttgtccgcaccggaatggatcccaggatgtgctctttgatgcaa

SEQ ID NO: 63780 - DNA, 60 bp, Artificial
  Synthetic oligonucleotide
caagagccagttggtgtggatggcatgcaattctgctgcatttgaagatctaagagtgtc

SEQ ID NO: 63781 - DNA, 60 bp, Artificial
  Synthetic oligonucleotide
ttcactgggaatacagagggaagaacatcagacatgagggcagaaatcataaagatgatg

SEQ ID NO: 63782 - DNA, 60 bp, Artificial
  Synthetic oligonucleotide
caactctccccagaagatctggagcagcaggcgctgcagtcaaaggagttgggacaatgg

SEQ ID NO: 63783 - DNA, 60 bp, Artificial
  Synthetic oligonucleotide
gactcacattatgatctggcattctaatttgaatgatacaacttaccagaggacaagagc

SEQ ID NO: 63784 - DNA, 60 bp, Artificial
  Synthetic oligonucleotide
gcatgcaattctgctgcatttgaagatctaagagtgtcaagcttcatcagagggacaaga

SEQ ID NO: 63785 - DNA, 60 bp, Artificial
  Synthetic oligonucleotide
aaagatgatggaaagtgcaagaccagaggaagtgtccttccaggggcggggagtctttga

SEQ ID NO: 63786 - DNA, 60 bp, Artificial
  Synthetic oligonucleotide
tgcatttgaagatctaagagtgtcaagcttcatcagagggacaagagtacttccaagggg

SEQ ID NO: 63787 - DNA, 60 bp, Artificial
  Synthetic oligonucleotide
ggcatgcaattctgctgcatttgaagatctaagagtgtcaagcttcatcagagggacaag

SEQ ID NO: 63788 - DNA, 60 bp, Artificial
  Synthetic oligonucleotide
gttggtgtggatggcatgcaattctgctgcatttgaagatctaagagtgtcaagcttcat

SEQ ID NO: 63789 - DNA, 60 bp, Artificial
  Synthetic oligonucleotide
gtggatggcatgcaattctgctgcatttgaagatctaagagtgtcaagcttcatcagagg

SEQ ID NO: 63790 - DNA, 60 bp, Artificial
  Synthetic oligonucleotide
ggacaagagctcttgtccgcaccggaatggatcccaggatgtgctctttgatgcaaggtt

SEQ ID NO: 63791 - DNA, 60 bp, Artificial
  Synthetic oligonucleotide
cctagaagatctggagcagcaggcgctgcagtcaaaggagttgggacaatggtattggag

SEQ ID NO: 63792 - DNA, 60 bp, Artificial
  Synthetic oligonucleotide
tacaagaccagaagaagtgtccttccaggggcggggagtctttgagctctcggacgaaag

SEQ ID NO: 63793 - DNA, 60 bp, Artificial
  Synthetic oligonucleotide
aacactaatcaacaaagggcctctgcgggccaaatcagcacacaacctacgttttctgtt

SEQ ID NO: 63794 - DNA, 60 bp, Artificial
  Synthetic oligonucleotide
gtttgactcacattatgatctggcattctaatttgaatgatacaacttaccagaggacaa

SEQ ID NO: 63795 - DNA, 60 bp, Artificial
  Synthetic oligonucleotide
caaaccagtcaggtatacagtctaattagaccaaacgagaatcccgcacacaagagccag

SEQ ID NO: 63796 - DNA, 60 bp, Artificial
  Synthetic oligonucleotide
gctgttatttgaagtggaacaagagattagaacgttttcgtttcagcttatttagtgata

SEQ ID NO: 63797 - DNA, 60 bp, Artificial
  Synthetic oligonucleotide
caagcattacagctgttatttgaagtggaacaagagattagaacgttttcgtttcagctt

SEQ ID NO: 63798 - DNA, 60 bp, Artificial
  Synthetic oligonucleotide
aagtgaggcataaattgaagacgacagagaatagttttgagcaaataacatttatgcaag

SEQ ID NO: 63799 - DNA, 63 bp, Artificial
  Synthetic oligonucleotide
ggcataaattgaagacgacagagaatagttttgagcaaataacatttatgcaagcattacagc

SEQ ID NO: 63800 - DNA, 60 bp, Artificial
  Synthetic oligonucleotide
gcaagcattacagctgttatttgaagtggaacaagagattagaacgttttcgtttcagct

SEQ ID NO: 63801 - DNA, 60 bp, Artificial
  Synthetic oligonucleotide
tttatgcaagcattacagctgttatttgaagtggaacaagagattagaacgttttcgttt

SEQ ID NO: 63802 - DNA, 60 bp, Artificial
  Synthetic oligonucleotide
aatggattctcacactgtgtcaagctttcaggtagattgcttcctttggcatgtccgcaa

SEQ ID NO: 63803 - DNA, 60 bp, Artificial
  Synthetic oligonucleotide
cctttggcatgtccgcaaacaagttgcagaccaagatctaggcgatgcccccttccttga

SEQ ID NO: 63804 - DNA, 60 bp, Artificial
  Synthetic oligonucleotide
aaagacataatggattcccacactgtgtcaagctttcaggtagattgcttcctttggcat

SEQ ID NO: 63805 - DNA, 60 bp, Artificial
  Synthetic oligonucleotide
ataatggattcccacactgtgtcaagctttcaggtagattgcttcctttggcatgtccgc

SEQ ID NO: 63806 - DNA, 60 bp, Artificial
  Synthetic oligonucleotide
gtgatctttgaccggttggagaatctgacattactaagggctttcaccgaagagggagca

SEQ ID NO: 63807 - DNA, 60 bp, Artificial
  Synthetic oligonucleotide
gcgaatttcagtgtgatctttgaccggttggagaatctgacattactaagggctttcacc

SEQ ID NO: 63808 - DNA, 60 bp, Artificial
  Synthetic oligonucleotide
catactgaaagcgaatttcagtgtgatttttgaccggttggagaatctgacattactaag

SEQ ID NO: 63809 - DNA, 60 bp, Artificial
  Synthetic oligonucleotide
ataatggataagaacatcatactgaaagcgaatttcagtgtgatttttgaccggttggag

SEQ ID NO: 63810 - DNA, 60 bp, Artificial
  Synthetic oligonucleotide
ggccctctttgtgtcagaatggaccaggcaataatggataagaacatcatactgaaagcg

SEQ ID NO: 63811 - DNA, 60 bp, Artificial
  Synthetic oligonucleotide
ttgaagaaatgtcaagggactggttcatgctcatgcccaagcaaaaagtggctggccctc

SEQ ID NO: 63812 - DNA, 60 bp, Artificial
  Synthetic oligonucleotide
gtggctggccctctttgtgtcagaatggaccaggcaataatggataagaacatcatactg

SEQ ID NO: 63813 - DNA, 60 bp, Artificial
  Synthetic oligonucleotide
gctggccctctttgtgtcagaatggaccaggcaataatggataagaacatcatactgaaa

SEQ ID NO: 63814 - DNA, 60 bp, Artificial
  Synthetic oligonucleotide
tcatgctcatgcccaagcaaaaagtggctggccctctttgtgtcagaatggaccaggcaa

SEQ ID NO: 63815 - DNA, 56 bp, Artificial
  Synthetic oligonucleotide
aaaagtggctggccctctttgtgtcagaatggaccaggcaataatggataagaaca

SEQ ID NO: 63816 - DNA, 60 bp, Artificial
  Synthetic oligonucleotide
cataatggattcccacactgtgtcaagctttcaggtagattgcttcctttggcatgtccg

SEQ ID NO: 63817 - DNA, 60 bp, Artificial
  Synthetic oligonucleotide
cattactaagggctttcaccgaagagggagcaattgttggcgaaatttcaccattgcctt

SEQ ID NO: 63818 - DNA, 60 bp, Artificial
  Synthetic oligonucleotide
agacataatggattcccacactgtgtcaagctttcaggtagattgcttcctttggcatgt

SEQ ID NO: 63819 - DNA, 60 bp, Artificial
  Synthetic oligonucleotide
catttaccgctacatatgcagacacaatatgtataggctaccatgccaacaactcgaccg

SEQ ID NO: 63820 - DNA, 60 bp, Artificial
  Synthetic oligonucleotide
tgggggcaatcagcttctggatgtgttccaatgggtcgttgcagtgtagaatatgcatct

SEQ ID NO: 63821 - DNA, 60 bp, Artificial
  Synthetic oligonucleotide
tactcaacagtcgccagttccctggttcttttggtctccctgggggcaatcagcttctgg

SEQ ID NO: 63822 - DNA, 60 bp, Artificial
  Synthetic oligonucleotide
ttccgaagaatcaaagttgaacagggagaaaattgatggagtgaaattggaatcaatggg

SEQ ID NO: 63823 - DNA, 60 bp, Artificial
  Synthetic oligonucleotide
tccgaagaatcaaagttgaacagggagaaaattgatggagtgaaattggaatcaatggga

SEQ ID NO: 63824 - DNA, 60 bp, Artificial
  Synthetic oligonucleotide
gaataatgccaaagaaataggaaacgggtgttttgaattctatcacaagtgtaacgatga

SEQ ID NO: 63825 - DNA, 60 bp, Artificial
  Synthetic oligonucleotide
ccaaaatattccgaagaatcaaagttgaacagggagaaaattgatggagtgaaattggaa

SEQ ID NO: 63826 - DNA, 60 bp, Artificial
  Synthetic oligonucleotide
aaagccaattaaagaataatgccaaagaaataggaaacgggtgttttgaattctatcaca

SEQ ID NO: 63827 - DNA, 60 bp, Artificial
  Synthetic oligonucleotide
atgagcaaggatctgggtatgctgcagatcaaaaaagcacacaaaatgccattaacggga

SEQ ID NO: 63828 - DNA, 60 bp, Artificial
  Synthetic oligonucleotide
caaggatctgggtatgctgcagatcaaaaaagcacacaaaatgccattaacgggattaca

SEQ ID NO: 63829 - DNA, 60 bp, Artificial
  Synthetic oligonucleotide
tctgtagtgtcttcacattatagcagaagattcaccccagaaatagccaaaagacccaag

SEQ ID NO: 63830 - DNA, 60 bp, Artificial
  Synthetic oligonucleotide
gtagtgtcttcacattatagcagaagattcaccccagaaatagccaaaagacccaaggtg

SEQ ID NO: 63831 - DNA, 60 bp, Artificial
  Synthetic oligonucleotide
tgtccaaagtatgtcaggagtgcaaaattaagaatggttacaggactaaggaacatccca

SEQ ID NO: 63832 - DNA, 60 bp, Artificial
  Synthetic oligonucleotide
tttacagctacatatgcagacacaatatgtataggctaccatgccaacaactcgaccgac

SEQ ID NO: 63833 - DNA, 60 bp, Artificial
  Synthetic oligonucleotide
gggcaatcagcttctggatgtgttccaatgggtctttgcagtgtagaatatgcatctaag

SEQ ID NO: 63834 - DNA, 60 bp, Artificial
  Synthetic oligonucleotide
cctacattgtagaaacaccaaatcctgagaatggaacatgttacccaggatatttcgccg

SEQ ID NO: 63835 - DNA, 60 bp, Artificial
  Synthetic oligonucleotide
gttcagtatcttcatttaagaggttcgaaatattccccaaagagagctcatggcccaacc

SEQ ID NO: 63836 - DNA, 60 bp, Artificial
  Synthetic oligonucleotide
aaggaatcatggtcctacattgtagaaacaccaaatcctgagaatggaacatgttaccca

SEQ ID NO: 63837 - DNA, 60 bp, Artificial
  Synthetic oligonucleotide
aaggaatagccccactacaattgggtaattgcagcgttgccggatggatcttaggaaacc

SEQ ID NO: 63838 - DNA, 60 bp, Artificial
  Synthetic oligonucleotide
aggaatagccccactacaattgggtaattgcagcgttgccggatggatcttaggaaaccc

SEQ ID NO: 63839 - DNA, 60 bp, Artificial
  Synthetic oligonucleotide
ctaaaaggaatagccccactacaattgggtaattgcagcgttgccggatggatcttagga

SEQ ID NO: 63840 - DNA, 60 bp, Artificial
  Synthetic oligonucleotide
aaaggaatagccccactacaattgggtaattgcagcgttgccggatggatcttaggaaac

SEQ ID NO: 63841 - DNA, 60 bp, Artificial
  Synthetic oligonucleotide
gtctactaaaaggaatagccccactacaattgggtaattgcagcgttgccggatggatct

SEQ ID NO: 63842 - DNA, 60 bp, Artificial
  Synthetic oligonucleotide
ctaaaaggaatagccccactacaattgggtaattgcagcgttgccggatggatcttaggg

SEQ ID NO: 63843 - DNA, 60 bp, Artificial
  Synthetic oligonucleotide
aaaagcagtttttacagaaatttgctatggctgacggggaagaatggtttgtatccaaac

SEQ ID NO: 63844 - DNA, 60 bp, Artificial
  Synthetic oligonucleotide
gagaagcagtttttacagaaatttgctatggctgacggggaagaatggtttgtatccaaa

SEQ ID NO: 63845 - DNA, 60 bp, Artificial
  Synthetic oligonucleotide
aaagagagctcatggcccaaccacaccgtaaccggagtatcagcatcatgctcccataac

SEQ ID NO: 63846 - DNA, 60 bp, Artificial
  Synthetic oligonucleotide
agaggttcgaaatattccccaaagagagctcatggcccaaccacaccgtaaccggagtat

SEQ ID NO: 63847 - DNA, 60 bp, Artificial
  Synthetic oligonucleotide
gagaggttcgaaatattccccaaagagagctcatggcccaaccacaccgtaaccggagta

SEQ ID NO: 63848 - DNA, 60 bp, Artificial
  Synthetic oligonucleotide
tgagaggttcgaaatattccccaaagagagctcatggcccaaccacaccgtaaccggagt

SEQ ID NO: 63849 - DNA, 60 bp, Artificial
  Synthetic oligonucleotide
ttaagaggttcgaaatattccccaaagagagctcatggcccaaccacaccgtaaccggag

SEQ ID NO: 63850 - DNA, 60 bp, Artificial
  Synthetic oligonucleotide
ttgagaggttcgaaatattccccaaagagagctcatggcccaaccacaccgtaaccggag

SEQ ID NO: 63851 - DNA, 60 bp, Artificial
  Synthetic oligonucleotide
ggaccttttttctgacccaaggtgctctcttaaatgacaaacattcaaatggaaccgtta

SEQ ID NO: 63852 - DNA, 60 bp, Artificial
  Synthetic oligonucleotide
ccttttttctgacccaaggtgctctattaaatgacaaacattcaaatggaaccgttaagg

SEQ ID NO: 63853 - DNA, 60 bp, Artificial
  Synthetic oligonucleotide
gacccaaggtgctctcttaaatgacaaacattcaaatggaaccgttaaggaccgaagtcc

SEQ ID NO: 63854 - DNA, 60 bp, Artificial
  Synthetic oligonucleotide
agtgatttctcagtgaaacaggatgttgtggcaataactgattggtcagggtacagtgga

SEQ ID NO: 63855 - DNA, 60 bp, Artificial
  Synthetic oligonucleotide
ttgggatttccagcatggtggaggccatggtgtctagggcccgaattgatgcgcgaattg

SEQ ID NO: 63856 - DNA, 60 bp, Artificial
  Synthetic oligonucleotide
gggatttccagcatggtggaggccatggtgtctagggcccgaattgatgcgcggattgac

SEQ ID NO: 63857 - DNA, 60 bp, Artificial
  Synthetic oligonucleotide
gcccaaagatagatggacacagcatacaacaactggaggttcacgggcttgcgcagtatc

SEQ ID NO: 63858 - DNA, 60 bp, Artificial
  Synthetic oligonucleotide
gcccaaagatagatggacacagcatacaacaactggaggttcacgggcctgcgcggtgtc

SEQ ID NO: 63859 - DNA, 60 bp, Artificial
  Synthetic oligonucleotide
tcttgcaaaaggagagaaagctaatgtactgattgggcaaggagacgtagtgttggtaat

SEQ ID NO: 63860 - DNA, 60 bp, Artificial
  Synthetic oligonucleotide
caatgggaggcttgtagatagtataggttcatggtccaaaaaaatcctcaggacccagga

SEQ ID NO: 63861 - DNA, 60 bp, Artificial
  Synthetic oligonucleotide
aaggtggtcatggagtgaaagggtgggcctttgatgatggaaatgacgtgtggatgggaa

SEQ ID NO: 63862 - DNA, 60 bp, Artificial
  Synthetic oligonucleotide
caacactaaacaacgggcattcaaatgacacagtacatgataggaccccttatcggaccc

SEQ ID NO: 63863 - DNA, 60 bp, Artificial
  Synthetic oligonucleotide
gtggcacctcaggtacatatggaacaggctcatggcctgatggggcggacatcaatctca

SEQ ID NO: 63864 - DNA, 60 bp, Artificial
  Synthetic oligonucleotide
tgaggaggggaaaatcgttcatactagcctattgtcagggagtgctcagcatgtcgagga

SEQ ID NO: 63865 - DNA, 60 bp, Artificial
  Synthetic oligonucleotide
gcatttcaagcaatatgaatgcaactcccccccaaacaaccaagtgatgctgtgtgaacc

SEQ ID NO: 63866 - DNA, 60 bp, Artificial
  Synthetic oligonucleotide
ggctggtccaaacctaactccaaactgcagataaataggcaagtcatagttgacagaggt

SEQ ID NO: 63867 - DNA, 60 bp, Artificial
  Synthetic oligonucleotide
tagcactcagttactctgctggtgcacttgccagttgcatgggcctcatatacaacagga

SEQ ID NO: 63868 - DNA, 60 bp, Artificial
  Synthetic oligonucleotide
tgaccggctagagaccctaatattgctaagggctttcaccgaagagggagcaattgttgg

SEQ ID NO: 63869 - DNA, 54 bp, Artificial
  Synthetic oligonucleotide
agaacaacatgataaacaatgaccttggaccagcaacagcccagatggctcttc

SEQ ID NO: 63870 - DNA, 51 bp, Artificial
  Synthetic oligonucleotide
gaacaacatgataaacaatgaccttggaccagcaacggctcaaatggctct

SEQ ID NO: 63871 - DNA, 60 bp, Artificial
  Synthetic oligonucleotide
cgctacctaactgacatgactcttgaggagatgtcaagggactggttcatgctcatgccc

SEQ ID NO: 63872 - DNA, 60 bp, Artificial
  Synthetic oligonucleotide
gaatgcaccaaatcatgagggaatacaagcaggggtgaatagattctacagaacctgcaa

SEQ ID NO: 63873 - DNA, 60 bp, Artificial
  Synthetic oligonucleotide
atggattccaacactgtgtcaagctttcaggtagactgtttcctttggcatatacgcaag

SEQ ID NO: 63874 - DNA, 60 bp, Artificial
  Synthetic oligonucleotide
aatggattccaacactgtgtcaagctttcaggtagactgtttcctttggcatatccgcaa

SEQ ID NO: 63875 - DNA, 60 bp, Artificial
  Synthetic oligonucleotide
gactccaacactgtgtcaagctttcaggtagactgtttcctttggcatatacgcaaacgg

SEQ ID NO: 63876 - DNA, 60 bp, Artificial
  Synthetic oligonucleotide
gactccaacactgtgtcaagctttcaggtagactgtttcctttggcacatccgcaaacgg

SEQ ID NO: 63877 - DNA, 60 bp, Artificial
  Synthetic oligonucleotide
atggactccaacactgtgtcaagctttcaggtagactgtttcctttggcatatacgcaaa

SEQ ID NO: 63878 - DNA, 60 bp, Artificial
  Synthetic oligonucleotide
gactccaacactgtgtcaagctttcaggtagactgtttcctctggcatatccgcaaacgg

SEQ ID NO: 63879 - DNA, 60 bp, Artificial
  Synthetic oligonucleotide
tcctcaggccagatcagtgtgcaacctacattctcagtgcaacgaaatctcccttttgag

SEQ ID NO: 63880 - DNA, 60 bp, Artificial
  Synthetic oligonucleotide
gggcttgcagtagcaagtgggcatgactttgaaagggaagggtattcactggtcgggata

SEQ ID NO: 63881 - DNA, 60 bp, Artificial
  Synthetic oligonucleotide
actccaaaacagtcaagtgttcagcctgataagaccaaatgaaaacccagctcacaagag

SEQ ID NO: 63882 - DNA, 60 bp, Artificial
  Synthetic oligonucleotide
ggaccaaaagagcacacaaaatgccattgacgggatcactaacaaagtaaattctgttat

SEQ ID NO: 63883 - DNA, 60 bp, Artificial
  Synthetic oligonucleotide
cctcatcggaggacttgaatggaatgataacacagttcgagtctctaaaactctacagag

SEQ ID NO: 63884 - DNA, 60 bp, Artificial
  Synthetic oligonucleotide
ggtcctcatcggaggacttgaatggaatgataacacagttcgagtctctaaaactctaca

SEQ ID NO: 63885 - DNA, 60 bp, Artificial
  Synthetic oligonucleotide
ggggccaaagaggtagcactcagttattccactggtgcacttgccagttgcatgggcctc

SEQ ID NO: 63886 - DNA, 60 bp, Artificial
  Synthetic oligonucleotide
caccaatggatgaatgtgatgcgaagtgtcaaacacctcagggagctataaacagcagtc

SEQ ID NO: 63887 - DNA, 60 bp, Artificial
  Synthetic oligonucleotide
gaacatcccatccattcactccagaggtttgtttggagccattgccggtttcattgaagg

SEQ ID NO: 63888 - DNA, 60 bp, Artificial
  Synthetic oligonucleotide
acatcccatccattcactccagaggtttgtttggagccattgccggtttcattgaagggg

SEQ ID NO: 63889 - DNA, 60 bp, Artificial
  Synthetic oligonucleotide
ggaaggcaagagaagaatcccgcactcaggatgaaatggatgatggcaatgaaatatcca

SEQ ID NO: 63890 - DNA, 60 bp, Artificial
  Synthetic oligonucleotide
aaggagagaaggctaatgtactgattgggcaaggagacgtagtgttggtaatgaaacgga

SEQ ID NO: 63891 - DNA, 60 bp, Artificial
  Synthetic oligonucleotide
tgatgggaaagcatggttgcatgtttgtgtcactggggatgatagaaatgcgactgctag

SEQ ID NO: 63892 - DNA, 60 bp, Artificial
  Synthetic oligonucleotide
gggaaagcatggttgcatgtttgtgtcactggggatgatagaaatgcgactgctagtttc

SEQ ID NO: 63893 - DNA, 60 bp, Artificial
  Synthetic oligonucleotide
tgagcgaggactgcagcgtagacgctttgtccagaatgccctcaatgggaacggtgaccc

SEQ ID NO: 63894 - DNA, 60 bp, Artificial
  Synthetic oligonucleotide
gagcgaggactgcagcgtagacgctttgtccaaaatgccctcaatgggaatggggatcca

SEQ ID NO: 63895 - DNA, 60 bp, Artificial
  Synthetic oligonucleotide
agaggattgtttggggcaatagctggttttatagaaggaggatggcaaggaatgattgat

SEQ ID NO: 63896 - DNA, 60 bp, Artificial
  Synthetic oligonucleotide
ggggcaatagctggttttatagaaggaggatggcaaggaatgattgatggttggtatgga

SEQ ID NO: 63897 - DNA, 60 bp, Artificial
  Synthetic oligonucleotide
ataaataggacaggaacatttgaattcacgagctttttctatcgctatggatttgtagcc

SEQ ID NO: 63898 - DNA, 59 bp, Artificial
  Synthetic oligonucleotide
tgctttgaattttaccacaaatgtgatgacacgtgcatggagagcgtcaaaaatgggac

SEQ ID NO: 63899 - DNA, 60 bp, Artificial
  Synthetic oligonucleotide
ttgctttgaattttaccacaaatgtgatgacacgtgcatggagagcgtcaaaaatgggac

SEQ ID NO: 63900 - DNA, 60 bp, Artificial
  Synthetic oligonucleotide
tatgcagtggggttttcggtgataatccgcgttctaatgatgggaaaggcaattgtggcc

SEQ ID NO: 63901 - DNA, 60 bp, Artificial
  Synthetic oligonucleotide
caaatagggtacatatgcagtggggttttcggtgataatccgcgttcaagtgatgggaaa

SEQ ID NO: 63902 - DNA, 60 bp, Artificial
  Synthetic oligonucleotide
cagaatcttgattatcaaatagggtacatatgcagtggggttttcggtgacaacccgcgt

SEQ ID NO: 63903 - DNA, 60 bp, Artificial
  Synthetic oligonucleotide
atcaaatagggtacatatgcagtggggttttcggtgataatccgcgttctaatgatggga

SEQ ID NO: 63904 - DNA, 60 bp, Artificial
  Synthetic oligonucleotide
ggaaaatgaaaggacacttgactttcatgattctaatgtcaagaatctgtatgatagagt

SEQ ID NO: 63905 - DNA, 60 bp, Artificial
  Synthetic oligonucleotide
gcggggaaggatcctaagaaaactggaggacccatatacaagagagtagatggaaagtgg

SEQ ID NO: 63906 - DNA, 60 bp, Artificial
  Synthetic oligonucleotide
atggtgaaaatggatcaggccattatgaacaagaggataatattcaaagcaaacttctct

SEQ ID NO: 63907 - DNA, 60 bp, Artificial
  Synthetic oligonucleotide
ggatcaggccattatgaacaagaggataatattcaaagcaaacttctctgtcctatttga

SEQ ID NO: 63908 - DNA, 60 bp, Artificial
  Synthetic oligonucleotide
gagtgaaacggatgaaaatctcagaattgcaattgcatccagccctgcacctcggtacat

SEQ ID NO: 63909 - DNA, 60 bp, Artificial
  Synthetic oligonucleotide
gcagggattggtacatgctcatgccaaggcagaagatgatagggggtctgatggtgaaaa

SEQ ID NO: 63910 - DNA, 60 bp, Artificial
  Synthetic oligonucleotide
tttcaggtagattgttatctatggcacataagaaagctactcagcatgagagacatgtgt

SEQ ID NO: 63911 - DNA, 60 bp, Artificial
  Synthetic oligonucleotide
gaagacatcctaaagagtgaaacggatgaaaatctcagaattgcaattgcatccagccct

SEQ ID NO: 63912 - DNA, 58 bp, Artificial
  Synthetic oligonucleotide
gactttcatgattctaatgtcaagaatctgtatgataaagtcagaatgcagctgagag

SEQ ID NO: 63913 - DNA, 60 bp, Artificial
  Synthetic oligonucleotide
gatcaagtgagagaaagtcggaacccaggaaacgctgagattgaagatctcattttcctg

SEQ ID NO: 63914 - DNA, 60 bp, Artificial
  Synthetic oligonucleotide
tgaacctggaacctttgatcttggggggctatatgaagcaattgaggagtgcctgattaa

SEQ ID NO: 63915 - DNA, 60 bp, Artificial
  Synthetic oligonucleotide
aatgcaccaaatcatgagggaatacaagcaggagtggatagattctacaggacctgcaag

SEQ ID NO: 63916 - DNA, 60 bp, Artificial
  Synthetic oligonucleotide
aagattatagcattgtttccagttatgtgtgctcaggacttgttggcgacacacccaggg

SEQ ID NO: 63917 - DNA, 60 bp, Artificial
  Synthetic oligonucleotide
cggctgcattgagggcaagctttctcaaatgtccaaagaagtgaatgccaggattgagcc

SEQ ID NO: 63918 - DNA, 57 bp, Artificial
  Synthetic oligonucleotide
ctgaaaatctacagagattcgcttggagaagccgtaatgaggatgggagacctccac

SEQ ID NO: 63919 - DNA, 60 bp, Artificial
  Synthetic oligonucleotide
ggggtggactggaatggtagatgggtggtatggttatcatcatcagaatgagcaaggatc

SEQ ID NO: 63920 - DNA, 52 bp, Artificial
  Synthetic oligonucleotide
cagacaatggattgggtgatgccccattccttgatcggctccgccgagatca

SEQ ID NO: 63921 - DNA, 53 bp, Artificial
  Synthetic oligonucleotide
cagacaatggattgggtgatgccccattccttgatcggctccgccgagatcaa

SEQ ID NO: 63922 - DNA, 54 bp, Artificial
  Synthetic oligonucleotide
cagacaatggattgggtgatgccccattccttgatcggctccgccgagatcaaa

SEQ ID NO: 63923 - DNA, 60 bp, Artificial
  Synthetic oligonucleotide
cttttggtcctgtccatttcagaaaccaagtcaagatacggcgcagggttgacataaacc

SEQ ID NO: 63924 - DNA, 60 bp, Artificial
  Synthetic oligonucleotide
aagacgaatgatgcaggatctgacagggtgatggtatcacctctagctgtaacatggtgg

SEQ ID NO: 63925 - DNA, 60 bp, Artificial
  Synthetic oligonucleotide
tgcacaaagagcaatgatggatcaagtgagagaaagtcggaacccaggaaatgctgagat

SEQ ID NO: 63926 - DNA, 60 bp, Artificial
  Synthetic oligonucleotide
aaacgccattaacgggattacaaacaaggtgaattctgtaattgagaaaatgaacactca

SEQ ID NO: 63927 - DNA, 60 bp, Artificial
  Synthetic oligonucleotide
cgtcagatgtatttgcagagacaactggaaaggctctaataggcccgttatagacataaa

SEQ ID NO: 63928 - DNA, 60 bp, Artificial
  Synthetic oligonucleotide
cgtcagatgtatctgcagagacaactggaaaggctctaataggcccgttatagacataaa

SEQ ID NO: 63929 - DNA, 60 bp, Artificial
  Synthetic oligonucleotide
cgtaagatgtatctgcagagacaactggaaaggctctaataggcccgttatagacataaa

SEQ ID NO: 63930 - DNA, 60 bp, Artificial
  Synthetic oligonucleotide
gtatctgcagagacaactggaaaggctctaataggcccgttatagacataaatatggaag

SEQ ID NO: 63931 - DNA, 60 bp, Artificial
  Synthetic oligonucleotide
acaaatgtgacgatgaatgcatgaatagtgtgaaaaacgggacgtatgattatcccaagt

SEQ ID NO: 63932 - DNA, 60 bp, Artificial
  Synthetic oligonucleotide
cctcaggacccaggagtcggaatgcgtttgtatcaatgggacttgcacagtagtaatgac

SEQ ID NO: 63933 - DNA, 60 bp, Artificial
  Synthetic oligonucleotide
tgtgcatagcatggtccagctcaagttgtcacgatggaaaagcatggctacatgtttgtg

SEQ ID NO: 63934 - DNA, 60 bp, Artificial
  Synthetic oligonucleotide
gaggtagttcagggatcatgaaaacagaaggaacacttgaaaactgcgagaccaagtgcc

SEQ ID NO: 63935 - DNA, 60 bp, Artificial
  Synthetic oligonucleotide
tcatctttctggcacgatctgcactcattctgagaggatcagtggctcataaatcctgtc

SEQ ID NO: 63936 - DNA, 60 bp, Artificial
  Synthetic oligonucleotide
aacaaggtaaattctgtgattgaaaagatgaacacccaatttgaagctgttgggaaggaa

SEQ ID NO: 63937 - DNA, 53 bp, Artificial
  Synthetic oligonucleotide
aacaaggaaaattctgtgattgaaaagatgaacacccaatttgaagctgttgg

SEQ ID NO: 63938 - DNA, 53 bp, Artificial
  Synthetic oligonucleotide
aacaaggtaaattctgtgattgaaaagatgaacacccaatttgaagctgttgg

SEQ ID NO: 63939 - DNA, 60 bp, Artificial
  Synthetic oligonucleotide
agccgaagcaataatcgtggccatggtgttttcacaagaggattgcatgataaaagcagt

SEQ ID NO: 63940 - DNA, 60 bp, Artificial
  Synthetic oligonucleotide
tatccgcaaacggtttgcagacaatggattgggtgatgccccattccttgatcggctccg

SEQ ID NO: 63941 - DNA, 60 bp, Artificial
  Synthetic oligonucleotide
tatacgcaaacggtttgcagacaatggattgggtgatgccccattccttgatcggctccg

SEQ ID NO: 63942 - DNA, 60 bp, Artificial
  Synthetic oligonucleotide
catccgcaaacggtttgcagacaatggattgggtgatgccccattccttgatcggctccg

SEQ ID NO: 63943 - DNA, 60 bp, Artificial
  Synthetic oligonucleotide
gtggcacttcaggtacctatggaacaggctcatggcctgatggggcgaacatcaatttta

SEQ ID NO: 63944 - DNA, 60 bp, Artificial
  Synthetic oligonucleotide
ggctctgtctctctcactattgcaacaatatgcttcctcatgcagattgctatcctggca

SEQ ID NO: 63945 - DNA, 60 bp, Artificial
  Synthetic oligonucleotide
tatagacataaatatggcagattatagcattgattccagttatgtatgctcagggctcgt

SEQ ID NO: 63946 - DNA, 60 bp, Artificial
  Synthetic oligonucleotide
ttgtggcacttcaggtacctatggaacaggctcatggcctgatggggcaaatatcaactt

SEQ ID NO: 63947 - DNA, 60 bp, Artificial
  Synthetic oligonucleotide
taaatatggcagattacagcattgattccagttatgtatgctcagggctcgttggtgata

SEQ ID NO: 63948 - DNA, 60 bp, Artificial
  Synthetic oligonucleotide
ataacaattggctctgtctctctcactattgcaacaatatgcttcctcatgcagattgct

SEQ ID NO: 63949 - DNA, 60 bp, Artificial
  Synthetic oligonucleotide
ataacaattggctctgtctccctcaccattgcaacaatatgcttcctcatgcagattgct

SEQ ID NO: 63950 - DNA, 60 bp, Artificial
  Synthetic oligonucleotide
ggctctgtctccctcaccattgcaacaatatgcttcctcatgcagattgctatcctggca

SEQ ID NO: 63951 - DNA, 60 bp, Artificial
  Synthetic oligonucleotide
atacattactagaaaagaatgtaacagtaacacactctgttaatcttctggaagacaaac

SEQ ID NO: 63952 - DNA, 60 bp, Artificial
  Synthetic oligonucleotide
acagggtacaccatggacacagtcaacagaacacaccaatattcagaaaaggggaagtgg

SEQ ID NO: 63953 - DNA, 60 bp, Artificial
  Synthetic oligonucleotide
ctccatacagccatggaacaggaacagggtacaccatggacacagtcaacagaacacacc

SEQ ID NO: 63954 - DNA, 60 bp, Artificial
  Synthetic oligonucleotide
ctccatacagccatgggacggggacaggatacaccatggacacagtcaacagaacacatc

SEQ ID NO: 63955 - DNA, 60 bp, Artificial
  Synthetic oligonucleotide
caggaacagggtacaccatggacacagtcaacagaacacaccaatattcagaaaagggga

SEQ ID NO: 63956 - DNA, 60 bp, Artificial
  Synthetic oligonucleotide
caggaacaggatacaccatggacacagtcaacagaacacatcaatattcagaaaagggga

SEQ ID NO: 63957 - DNA, 60 bp, Artificial
  Synthetic oligonucleotide
tcctccatacagccatggaacaggaacagggtacaccatggacacagtcaacagaacaca

SEQ ID NO: 63958 - DNA, 60 bp, Artificial
  Synthetic oligonucleotide
ggcacaatacatgatagaatccctcatcggacccttttgatgaacgaattgggtgttcca

SEQ ID NO: 63959 - DNA, 60 bp, Artificial
  Synthetic oligonucleotide
acagggtaaattctgtgattgaaaagatgaacacccagtttgaagctgttggaaaagaat

SEQ ID NO: 63960 - DNA, 60 bp, Artificial
  Synthetic oligonucleotide
atccaaatgtgcactgaacttaaactcagtgattatgaggggcgactgatccagaacagc

SEQ ID NO: 63961 - DNA, 60 bp, Artificial
  Synthetic oligonucleotide
aaaatgagaggacacttgactttcatgattctaatgtcaagaacctgtatgataaagtca

SEQ ID NO: 63962 - DNA, 60 bp, Artificial
  Synthetic oligonucleotide
gttctgatggaaaatgagaggacacttgactttcatgattctaatgtcaagaatctgtat

SEQ ID NO: 63963 - DNA, 60 bp, Artificial
  Synthetic oligonucleotide
ataaatgtgatgatgaatgcatgaatagtgtcaggaatgggacatatgattatcccaaat

SEQ ID NO: 63964 - DNA, 55 bp, Artificial
  Synthetic oligonucleotide
tccaatgagacacttaagatgaccattgcatctgtaccttcttcgcgctacctag

SEQ ID NO: 63965 - DNA, 60 bp, Artificial
  Synthetic oligonucleotide
caacgagacacttaagatgaccattgcatctgtaccttcttcgcgctacctagctgacat

SEQ ID NO: 63966 - DNA, 52 bp, Artificial
  Synthetic oligonucleotide
ttgtgttcacactcaccgtgcccagtgagcgaggactgcagcgtagacgctt

SEQ ID NO: 63967 - DNA, 60 bp, Artificial
  Synthetic oligonucleotide
cggctacattgagggcaagctttctcaaatgtccaaagaagtaaatgctaaaattgagcc

SEQ ID NO: 63968 - DNA, 60 bp, Artificial
  Synthetic oligonucleotide
cggctacattgagggcaagctttctcaaatgtccaaagaagtaaatgctaaaattgaacc

SEQ ID NO: 63969 - DNA, 60 bp, Artificial
  Synthetic oligonucleotide
gaaactatgtaaactaagaggggtagccccattgcatttgggtaaatgtaacattgctgg

SEQ ID NO: 63970 - DNA, 60 bp, Artificial
  Synthetic oligonucleotide
gtgccagcgcaaaatgctataagcactacattcccttatactggagatcctccatacagt

SEQ ID NO: 63971 - DNA, 60 bp, Artificial
  Synthetic oligonucleotide
tgccagcgcaaaatgctataagtactacattcccttatactggagatcctccatacagcc

SEQ ID NO: 63972 - DNA, 60 bp, Artificial
  Synthetic oligonucleotide
cttttggtcctgtccatttcagaaaccaagtcaaaatacgccgaagggttgacataaacc

SEQ ID NO: 63973 - DNA, 60 bp, Artificial
  Synthetic oligonucleotide
ttggtcctgtccatttcagaaaccaagtcaaaatacgccgaagggttgacataaacccag

SEQ ID NO: 63974 - DNA, 60 bp, Artificial
  Synthetic oligonucleotide
aacagagaggaaatagatggggtaaagctggagtcaacaaggatttaccagattttggcg

SEQ ID NO: 63975 - DNA, 60 bp, Artificial
  Synthetic oligonucleotide
cagttattctgctggtgcacttgccagttgcatgggcctcatatacaacaggatgggagc

SEQ ID NO: 63976 - DNA, 53 bp, Artificial
  Synthetic oligonucleotide
atcggcttcgccgagatcagaagtccctaagaggaagaggcagcactcttggt

SEQ ID NO: 63977 - DNA, 60 bp, Artificial
  Synthetic oligonucleotide
aatgtgacagtgacacactctgtcaacctacttgaggacagtcacaatggaaaactgtgc

SEQ ID NO: 63978 - DNA, 60 bp, Artificial
  Synthetic oligonucleotide
gacagtgacacactctgtcaacctacttgaggacagtcacaatggaaaactgtgcctact

SEQ ID NO: 63979 - DNA, 60 bp, Artificial
  Synthetic oligonucleotide
gacacactctgtcaacctacttgaggacagtcacaatgggaaactatgcagactgaaagg

SEQ ID NO: 63980 - DNA, 60 bp, Artificial
  Synthetic oligonucleotide
ccaacactgtgtcaagctttcaggtagactgtttcctttggcatatccgcaaacggtttg

SEQ ID NO: 63981 - DNA, 60 bp, Artificial
  Synthetic oligonucleotide
gtaatgaggatgggagacctccactcactccaaaacagaaacggaaaatggcgagaacaa

SEQ ID NO: 63982 - DNA, 60 bp, Artificial
  Synthetic oligonucleotide
aggttgaaaataacagagaatagtttcgaacaaataacatttatgcaagccttacaacta

SEQ ID NO: 63983 - DNA, 55 bp, Artificial
  Synthetic oligonucleotide
gtttgtatcaatggaacttgcacagtagtaatgactgatggaagtgcatcaggaa

SEQ ID NO: 63984 - DNA, 60 bp, Artificial
  Synthetic oligonucleotide
gagcgcttgtccgcactgggatggatcccagaatgtgctccctaatgcaaggttcaactc

SEQ ID NO: 63985 - DNA, 60 bp, Artificial
  Synthetic oligonucleotide
gaacaagagctcttgttcgcactgggatggatcccagaatgtgctccctaatgcagggtt

SEQ ID NO: 63986 - DNA, 57 bp, Artificial
  Synthetic oligonucleotide
caagagctcttgttcgcactgggatggatcccagaatgtgctccctaatgcaaggtt

SEQ ID NO: 63987 - DNA, 60 bp, Artificial
  Synthetic oligonucleotide
gaacaagagcgcttgtccgcactgggatggatcccagaatgtgctccctaatgcaaggtt

SEQ ID NO: 63988 - DNA, 60 bp, Artificial
  Synthetic oligonucleotide
cttgccagttgcatgggcctcatatacaacagaatggggactgtcaccactgaagtggcc

SEQ ID NO: 63989 - DNA, 60 bp, Artificial
  Synthetic oligonucleotide
ctagcatctttattggagatgtgccacagcacacagattggcgggacaaggatggtggac

SEQ ID NO: 63990 - DNA, 55 bp, Artificial
  Synthetic oligonucleotide
agacagcgaccaaaagaattcggatggccatcaattagtgtcgaattgtttaaaa

SEQ ID NO: 63991 - DNA, 60 bp, Artificial
  Synthetic oligonucleotide
agacagcgaccaaaagaattcggatggccatcaattagtgtcgaattgtttaaaaacgac

SEQ ID NO: 63992 - DNA, 60 bp, Artificial
  Synthetic oligonucleotide
caccataaattttgagagcactggtaatctaattgcaccagaatatggattcaaaatatc

SEQ ID NO: 63993 - DNA, 60 bp, Artificial
  Synthetic oligonucleotide
gagcactggtaatctaattgcaccagaatatggattcaaaatatcaaggagaggcaattc

SEQ ID NO: 63994 - DNA, 60 bp, Artificial
  Synthetic oligonucleotide
acatattgatgaggatgtcaaaaatgcaattggggtcctcatcaaaggatttgaatggaa

SEQ ID NO: 63995 - DNA, 60 bp, Artificial
  Synthetic oligonucleotide
tttggcatatccgcaaacggtttgcggacaatggattgggtgatgccccattccttgatc

SEQ ID NO: 63996 - DNA, 59 bp, Artificial
  Synthetic oligonucleotide
ggcatatccgcaaacggttagcagacaatggattgggtgatgccccattccttgatcgg

SEQ ID NO: 63997 - DNA, 60 bp, Artificial
  Synthetic oligonucleotide
ggcatatccgcaaacggttagcagacaatggattgggtgatgccccattccttgatcggc

SEQ ID NO: 63998 - DNA, 60 bp, Artificial
  Synthetic oligonucleotide
cgagggattttcggctgaatcgaggaaattgcttctcattgttcaggcacttagggacaa

SEQ ID NO: 63999 - DNA, 60 bp, Artificial
  Synthetic oligonucleotide
ccaaggaggtgtcactcagctactcaactggtgcacttgccagttgcatgggcctcatat

SEQ ID NO: 64000 - DNA, 57 bp, Artificial
  Synthetic oligonucleotide
tctgggattaatgaatcggctgacatgagcattggagtaacagtgataaagaacaac

SEQ ID NO: 64001 - DNA, 60 bp, Artificial
  Synthetic oligonucleotide
gccacacaaatgggagaagtactgtgttcttgaaataggagaaatgctcctgagaactgc

SEQ ID NO: 64002 - DNA, 60 bp, Artificial
  Synthetic oligonucleotide
caacggctacattgagggcaagctttctcaaatgtccaaagaagtaaatgctaaaattga

SEQ ID NO: 64003 - DNA, 60 bp, Artificial
  Synthetic oligonucleotide
gaacggctacattgagggcaagctttctcaaatgtccaaagaagtaaatgctaaaattga

SEQ ID NO: 64004 - DNA, 60 bp, Artificial
  Synthetic oligonucleotide
gaaactggttcatgctaatgcccaagcagaaagtggaaggacctctttgcatcaggatgg

SEQ ID NO: 64005 - DNA, 60 bp, Artificial
  Synthetic oligonucleotide
gaaactggttcatgctaatgcccaagcagaaagtggaaggacctctttgcatcagaatgg

SEQ ID NO: 64006 - DNA, 60 bp, Artificial
  Synthetic oligonucleotide
gggactggttcatgctaatgcccaagcagaaagtggaaggccctctttgcatcagattag

SEQ ID NO: 64007 - DNA, 60 bp, Artificial
  Synthetic oligonucleotide
gactggttcatgctaatgcccaagcagaaagtggaaggccctctttgtatcagaatagac

SEQ ID NO: 64008 - DNA, 60 bp, Artificial
  Synthetic oligonucleotide
gggactggttcatgctaatgcccaagcagaaagtggaaggtcctctttgcatcagaatag

SEQ ID NO: 64009 - DNA, 60 bp, Artificial
  Synthetic oligonucleotide
gccagaatgctactgagatcagagcatctgttgggagaatggtcggtggaattgggagat

SEQ ID NO: 64010 - DNA, 60 bp, Artificial
  Synthetic oligonucleotide
gccagaatgctactgagatcagagcatctgttgggagaatggtcggtggaataggaagat

SEQ ID NO: 64011 - DNA, 60 bp, Artificial
  Synthetic oligonucleotide
cattgaagggggatggaccgggatgatagatggatggtatggttatcatcatcagaatga

SEQ ID NO: 64012 - DNA, 60 bp, Artificial
  Synthetic oligonucleotide
aaaataacagagaatagttttgagcaaataacatttatgcaagccttacaactattgctt

SEQ ID NO: 64013 - DNA, 60 bp, Artificial
  Synthetic oligonucleotide
ttcacgctcaccgtgcccagtgagcgaggactgcagcgtagacgctttgttcagaatgcc

SEQ ID NO: 64014 - DNA, 60 bp, Artificial
  Synthetic oligonucleotide
atcacctctagctgtaacatggtggaacaggaatggaccgacaacaagtacagtccatta

SEQ ID NO: 64015 - DNA, 60 bp, Artificial
  Synthetic oligonucleotide
gagcacggtctgaaaagagggccttctacggaaggagtacctgagtctatgagggaagaa

SEQ ID NO: 64016 - DNA, 60 bp, Artificial
  Synthetic oligonucleotide
tgaacacggtctgaaaagagggccttctacggaaggagtacctgagtctatgagggaaga

SEQ ID NO: 64017 - DNA, 60 bp, Artificial
  Synthetic oligonucleotide
cggcctgaaaagagggccttctacggaaggagtacctgagtctatgagggaagaatatcg

SEQ ID NO: 64018 - DNA, 60 bp, Artificial
  Synthetic oligonucleotide
cggtctgaaaagagggccttctacggaaggagtacctgagtctatgagggaagaatatcg

SEQ ID NO: 64019 - DNA, 60 bp, Artificial
  Synthetic oligonucleotide
ggcctgaaaagagggccttctacggaaggagtacctgagtctatgagggaagaatatcgg

SEQ ID NO: 64020 - DNA, 60 bp, Artificial
  Synthetic oligonucleotide
ggcctgaaaagagggccttctacggaaggagtacctgagtctatgagggaagaatatcga

SEQ ID NO: 64021 - DNA, 60 bp, Artificial
  Synthetic oligonucleotide
gatgtgggagattaatggccctgagtcagtgttggtcaatacctatcagtggatcatcag

SEQ ID NO: 64022 - DNA, 60 bp, Artificial
  Synthetic oligonucleotide
ttgagaaagtcgaaaggttaaaacatggaacctttggccctgttcattttagaaaccaag

SEQ ID NO: 64023 - DNA, 60 bp, Artificial
  Synthetic oligonucleotide
tctacaagacttattttgagaaagtcgaaaggttaaaacatggaacctttggccctgtcc

SEQ ID NO: 64024 - DNA, 60 bp, Artificial
  Synthetic oligonucleotide
ttgagaaagtcgaaaggttaaaacatggaacctttggccctgtccattttagaaaccaag

SEQ ID NO: 64025 - DNA, 60 bp, Artificial
  Synthetic oligonucleotide
atgggacaccataaatttcgagagcactggtaatctaattgcaccagaatatggtttcag

SEQ ID NO: 64026 - DNA, 60 bp, Artificial
  Synthetic oligonucleotide
tggatgtgtgggacaccataagtttcgagagcactggtaatctaattgcaccagaatatg

SEQ ID NO: 64027 - DNA, 60 bp, Artificial
  Synthetic oligonucleotide
cggcggcatgtcctcatgctggagcaaatagcttctacagaaatttaatatggctggtca

SEQ ID NO: 64028 - DNA, 60 bp, Artificial
  Synthetic oligonucleotide
cggcggcatgtcctcatgctggaacaaatagcttctacagaaatttaatatggctggtca

SEQ ID NO: 64029 - DNA, 60 bp, Artificial
  Synthetic oligonucleotide
gagagcactggtaatttaattgcaccagaatatggattcaaaatatcaaagagaggaagc

SEQ ID NO: 64030 - DNA, 60 bp, Artificial
  Synthetic oligonucleotide
gctctctgcttttgacgagaggaggaacaaatatctggaagaacatcccagcgcggggaa

SEQ ID NO: 64031 - DNA, 60 bp, Artificial
  Synthetic oligonucleotide
ccctgggttttgcttaatgcatcttggttcaactccttcctcacacatgcactaaaatag

SEQ ID NO: 64032 - DNA, 60 bp, Artificial
  Synthetic oligonucleotide
atccctgggttttgcttaatgcatcttggttcaactccttcctcacacatgcactaaaat

SEQ ID NO: 64033 - DNA, 60 bp, Artificial
  Synthetic oligonucleotide
aggatgaaatggatgatggcaatgaaatatccgattacagctgacaagaggataacagaa

SEQ ID NO: 64034 - DNA, 55 bp, Artificial
  Synthetic oligonucleotide
agaatgaaatggatgatggcaatgaaatatccgattacagctgacaagaggataa

SEQ ID NO: 64035 - DNA, 55 bp, Artificial
  Synthetic oligonucleotide
aggatgaaatggatgatggcaatgaaatatccgattacagctgacaagaggataa

SEQ ID NO: 64036 - DNA, 60 bp, Artificial
  Synthetic oligonucleotide
agaagaaggccaaactggcaaatgttgtgagaaaaatgatgactaattcacaagacacag

SEQ ID NO: 64037 - DNA, 60 bp, Artificial
  Synthetic oligonucleotide
accaaggtttctcccagatctgtatgactacaaggaagatagattcattgagattggtgt

SEQ ID NO: 64038 - DNA, 60 bp, Artificial
  Synthetic oligonucleotide
gagacgttgcctcctccagtccctccagcagattgagagtatgattgaagcagagtcatc

SEQ ID NO: 64039 - DNA, 60 bp, Artificial
  Synthetic oligonucleotide
aggaagatagattcattgagattggtgtaacaaggagagaagtccatatatactacctgg

SEQ ID NO: 64040 - DNA, 55 bp, Artificial
  Synthetic oligonucleotide
tcccccaaaggggtggaagaaggttccattggaaaggtctgcaggactttgttgg

SEQ ID NO: 64041 - DNA, 60 bp, Artificial
  Synthetic oligonucleotide
acacacatggaggtatgcttcatgtattcagatttccacttcatcaatgaacggggcgaa

SEQ ID NO: 64042 - DNA, 59 bp, Artificial
  Synthetic oligonucleotide
cattgagggcaagctttcccaaatgtctagagaagtaaatgctagaatcgagcctttct

SEQ ID NO: 64043 - DNA, 60 bp, Artificial
  Synthetic oligonucleotide
tgcttgtatgcgtctccacaattagaaggattctcagctgaatcaaggaaattgcttctc

SEQ ID NO: 64044 - DNA, 60 bp, Artificial
  Synthetic oligonucleotide
aaaatgaaatggggaatggaaatgagacgttgcctcctccagtccctccagcagatcgag

SEQ ID NO: 64045 - DNA, 60 bp, Artificial
  Synthetic oligonucleotide
ctgcatccttgagataggagacatggttctaaaaactgccataggtcaaatggcaaggcc

SEQ ID NO: 64046 - DNA, 60 bp, Artificial
  Synthetic oligonucleotide
aaggagaagggataccgctttatgatgcggtcagatgcatgaaaacgttctttgggtgga

SEQ ID NO: 64047 - DNA, 60 bp, Artificial
  Synthetic oligonucleotide
caaagcatgtgaactgactgattcgagctggttagagcttgatgagattggagaggatat

SEQ ID NO: 64048 - DNA, 60 bp, Artificial
  Synthetic oligonucleotide
ctagcaatagcaattgccaaaatcctaacaatgagaaagggaatcacggggtgaaaggct

SEQ ID NO: 64049 - DNA, 60 bp, Artificial
  Synthetic oligonucleotide
gcccgtcgtagacataagtgttaaagattatagtattgattccagttatgtgtgctcagg

SEQ ID NO: 64050 - DNA, 60 bp, Artificial
  Synthetic oligonucleotide
cggaaagcttgtagacagcattagttcatggtctcaaaacatactccggacccaggagtc

SEQ ID NO: 64051 - DNA, 60 bp, Artificial
  Synthetic oligonucleotide
ttcatttacgacggaaagcttgtagacagcattagttcatggtctcaaaacatactccgg

SEQ ID NO: 64052 - DNA, 60 bp, Artificial
  Synthetic oligonucleotide
atactccggacccaggagtcagagtgtgtttgtatcaatggtacctgcacagtggtaatg

SEQ ID NO: 64053 - DNA, 60 bp, Artificial
  Synthetic oligonucleotide
catactccggacccaggagtcagagtgtgtttgtatcaatggtacctgcacagtggtaat

SEQ ID NO: 64054 - DNA, 56 bp, Artificial
  Synthetic oligonucleotide
atattagtcccttatcgggaagtgctcagcatgtggaggaatgttcctgttacccc

SEQ ID NO: 64055 - DNA, 60 bp, Artificial
  Synthetic oligonucleotide
taaaatactattcattgaagaagggaagatcattcatattagtcccttatcgggaagtgc

SEQ ID NO: 64056 - DNA, 60 bp, Artificial
  Synthetic oligonucleotide
ctctaataggcccgtcgtagacataagtgttaaagattatagtattgattccagttatgt

SEQ ID NO: 64057 - DNA, 60 bp, Artificial
  Synthetic oligonucleotide
atattagtcccttatcgggaagtgctcagcatgtggaggaatgttcctgttacccccgat

SEQ ID NO: 64058 - DNA, 60 bp, Artificial
  Synthetic oligonucleotide
gacacaatacatgatagaaccccttatcgaaccctattgatgaatgaattgggtgtcccg

SEQ ID NO: 64059 - DNA, 60 bp, Artificial
  Synthetic oligonucleotide
ggacaggggaccacactagacaacagacattccaatgacacaatacatgatagaacccct

SEQ ID NO: 64060 - DNA, 60 bp, Artificial
  Synthetic oligonucleotide
atcagtttgcactaggacaggggaccacactagacaacagacattccaatgacacaatac

SEQ ID NO: 64061 - DNA, 60 bp, Artificial
  Synthetic oligonucleotide
agaaccttatgtgtcatgcgaccctgacaagtgttatcagtttgcactaggacaggggac

SEQ ID NO: 64062 - DNA, 60 bp, Artificial
  Synthetic oligonucleotide
catttgggttactagagaaccttatgtgtcatgcgaccctgacaagtgttatcagtttgc

SEQ ID NO: 64063 - DNA, 60 bp, Artificial
  Synthetic oligonucleotide
ggtatgccccaaattagtggaatacagaaattggtcaaagccacaatgcaaaatcacagg

SEQ ID NO: 64064 - DNA, 60 bp, Artificial
  Synthetic oligonucleotide
aggtatgccccaaattagtggaatacagaaattggtcaaagccacaatgcaaaatcacag

SEQ ID NO: 64065 - DNA, 60 bp, Artificial
  Synthetic oligonucleotide
aaaataataacaattggttctgtttccctcaccattgcaacaatgtgctttctcatgcag

SEQ ID NO: 64066 - DNA, 60 bp, Artificial
  Synthetic oligonucleotide
gggtgtcccgtttcatttgggaaccaggcaagtatgtatagcatggtccagttcaagttg

SEQ ID NO: 64067 - DNA, 60 bp, Artificial
  Synthetic oligonucleotide
agaaccccttatcgaaccctattgatgaatgaattgggtgtcccgtttcatttgggaacc

SEQ ID NO: 64068 - DNA, 60 bp, Artificial
  Synthetic oligonucleotide
gggcctttgacgaaggaaatgacatatggatgggaagaactatcagcaaggattcacgct

SEQ ID NO: 64069 - DNA, 60 bp, Artificial
  Synthetic oligonucleotide
acccaattccaaatttcagacaaataggcaagtcatagtagacagcgataatagatcagg

SEQ ID NO: 64070 - DNA, 60 bp, Artificial
  Synthetic oligonucleotide
gccaaaatcctaacaatgagaaagggaatcacggggtgaaaggctgggcctttgacgaag

SEQ ID NO: 64071 - DNA, 60 bp, Artificial
  Synthetic oligonucleotide
gtgaaaggctgggcctttgacgaaggaaatgacatatggatgggaagaactatcagcaag

SEQ ID NO: 64072 - DNA, 60 bp, Artificial
  Synthetic oligonucleotide
ctggtattttctctgttgaggggaaagcctgcatcaataggtgcttttatgtggagctaa

SEQ ID NO: 64073 - DNA, 60 bp, Artificial
  Synthetic oligonucleotide
cccaattccaaatttcagacaaataggcaagtcatagtagacagcgataatagatcaggt

SEQ ID NO: 64074 - DNA, 60 bp, Artificial
  Synthetic oligonucleotide
atagatcaggttattctggtattttctctgttgaggggaaagcctgcatcaataggtgct

SEQ ID NO: 64075 - DNA, 60 bp, Artificial
  Synthetic oligonucleotide
atgaatccacaaccaaaaataataacaattggttctgtttccctcaccattgcaacaatg

SEQ ID NO: 64076 - DNA, 60 bp, Artificial
  Synthetic oligonucleotide
tggggtcctcatcggaggacttgaatggaatggtaacacggttcgagtctctgaaagtct

SEQ ID NO: 64077 - DNA, 60 bp, Artificial
  Synthetic oligonucleotide
ggaggacaaggattgcatatgaaagaatgtgcaatattctcaaaggaaagtttcagacag

SEQ ID NO: 64078 - DNA, 60 bp, Artificial
  Synthetic oligonucleotide
gaatgtagcatccccgcgaataatactgtcatagagaaagagatttgtcctaaagcagta

SEQ ID NO: 64079 - DNA, 60 bp, Artificial
  Synthetic oligonucleotide
taccaatttgcacttgggcagggaaccacgctggacaacaaacattcaaatggcacaata

SEQ ID NO: 64080 - DNA, 60 bp, Artificial
  Synthetic oligonucleotide
acagtatcggttcgtggtctcaaaatatcctcagaactcaagagtcagagtgcgtttgca

SEQ ID NO: 64081 - DNA, 60 bp, Artificial
  Synthetic oligonucleotide
ggaaatgatgtttggatgggaagaacaatcagtaaagactcgcgttcaggctatgagacc

SEQ ID NO: 64082 - DNA, 60 bp, Artificial
  Synthetic oligonucleotide
gttgtgttagtaatgaaacgaaaacgggactctagcatacttactgacagccagacagcg

SEQ ID NO: 64083 - DNA, 60 bp, Artificial
  Synthetic oligonucleotide
cggaactctagcatacttactgacagccagacagcgaccaaaaggattcggatggccatc

SEQ ID NO: 64084 - DNA, 60 bp, Artificial
  Synthetic oligonucleotide
acgaaaacggaactctagcatacttactgacagccagacagcgaccaaaaggattcggat

SEQ ID NO: 64085 - DNA, 50 bp, Artificial
  Synthetic oligonucleotide
atacttactgacagccagacagcgaccaaaagaattcggatggccatcaa

SEQ ID NO: 64086 - DNA, 56 bp, Artificial
  Synthetic oligonucleotide
atacttactgacagccagacagcgaccaaaagaattcggatggccatcaattaatg

SEQ ID NO: 64087 - DNA, 57 bp, Artificial
  Synthetic oligonucleotide
atacttactgacagccagacagcgaccaaaagaattcggatggccatcaattaatgt

SEQ ID NO: 64088 - DNA, 60 bp, Artificial
  Synthetic oligonucleotide
aaaaacaaggagtgcttacgaaagaatgtgcaacattctcaaagggaaatttcaaacagc

SEQ ID NO: 64089 - DNA, 60 bp, Artificial
  Synthetic oligonucleotide
acactgtgtcaagttttcaggtagactgctttctttggcatgtccgcaaacggtttgcag

SEQ ID NO: 64090 - DNA, 60 bp, Artificial
  Synthetic oligonucleotide
ggcaggaacagcagagtgctgtggatgttgacgatggtcattttgtcaacatagagctga

SEQ ID NO: 64091 - DNA, 60 bp, Artificial
  Synthetic oligonucleotide
gatgtcatcaattttgagagcactggtaatttaattgcaccagaatatggattcaaaata

SEQ ID NO: 64092 - DNA, 60 bp, Artificial
  Synthetic oligonucleotide
gatgtcataaattttgagagcactggtaatttaattgcaccagaatatggattcaaaata

SEQ ID NO: 64093 - DNA, 60 bp, Artificial
  Synthetic oligonucleotide
gcaatgatggatcaagtgagagaaagtcggaacccaggaaatgctgagatcgaagatctc

SEQ ID NO: 64094 - DNA, 60 bp, Artificial
  Synthetic oligonucleotide
gggcaatgatggatcaagtgagagaaagtcggaacccaggaaatgctgagatcgaagatc

SEQ ID NO: 64095 - DNA, 60 bp, Artificial
  Synthetic oligonucleotide
gcaatggtggatcaagtgagagaaagtcggaacccaggaaatgctgagatcgaagatctc

SEQ ID NO: 64096 - DNA, 60 bp, Artificial
  Synthetic oligonucleotide
ccctgggttttgcttaatgcgtcttggttcaactccttcctcacacatgcactaagatag

SEQ ID NO: 64097 - DNA, 60 bp, Artificial
  Synthetic oligonucleotide
ggatcagatcgggtgatggtatcacctctagctgtaacatggtggaataggaatgggcca

SEQ ID NO: 64098 - DNA, 60 bp, Artificial
  Synthetic oligonucleotide
gaacgagcgatgccggatcagatcgggtgatggtatcacctctagctgtaacatggtgga

SEQ ID NO: 64099 - DNA, 60 bp, Artificial
  Synthetic oligonucleotide
cgggtgatggtatcacctctagctgtaacatggtggaataggaatgggccaacagcaagc

SEQ ID NO: 64100 - DNA, 60 bp, Artificial
  Synthetic oligonucleotide
ggtcactttcaagctggatccagaatgagttcaacaaggcatgcgagctgaccgattcaa

SEQ ID NO: 64101 - DNA, 60 bp, Artificial
  Synthetic oligonucleotide
gccagatttgtatgattacaaggagaatagattcatcgagattggagtgacaaggagaga

SEQ ID NO: 64102 - DNA, 60 bp, Artificial
  Synthetic oligonucleotide
tgctggtgcacttgccagttgcatgggcctcatatacaacagaatggggactgtcaccac

SEQ ID NO: 64103 - DNA, 60 bp, Artificial
  Synthetic oligonucleotide
ctgggttttgcttaatgcgtcttggttcaactccttccttatgcatgcactgaaatagtt

SEQ ID NO: 64104 - DNA, 60 bp, Artificial
  Synthetic oligonucleotide
tggacactaatagagcctggagacacaataacattcgaagcaactggaaatctagtggta

SEQ ID NO: 64105 - DNA, 60 bp, Artificial
  Synthetic oligonucleotide
actggacactagtagagcctggagacacaataacattcgaagcaactggaaatctagtgg

SEQ ID NO: 64106 - DNA, 60 bp, Artificial
  Synthetic oligonucleotide
tactggacactaatagagcctggagacacaataacattcgaagcaactggaaatctagtg

SEQ ID NO: 64107 - DNA, 60 bp, Artificial
  Synthetic oligonucleotide
ggagacacaataacattcgaagcaactggaaatctagtggtaccaagatatgccttcgca

SEQ ID NO: 64108 - DNA, 60 bp, Artificial
  Synthetic oligonucleotide
ccttaaacgcggtctgaaaagagggccttctacggaaggagtaccagagtctatgaggga

SEQ ID NO: 64109 - DNA, 60 bp, Artificial
  Synthetic oligonucleotide
agacagcgaccaaaagaattcggatggccatcaattagtgtcgaagtgtttaaaaacgac

SEQ ID NO: 64110 - DNA, 55 bp, Artificial
  Synthetic oligonucleotide
agacagcgaccaaaagaattcggatggccatcaattagtgtcgaagtgtttaaaa

SEQ ID NO: 64111 - DNA, 60 bp, Artificial
  Synthetic oligonucleotide
tcagttggtgtggatggcatgccattctgctgcatttgaagatttaagattgttaagctt

SEQ ID NO: 64112 - DNA, 60 bp, Artificial
  Synthetic oligonucleotide
cagctggtgtggatggcatgccattctgctgcatttgaagatttaagattgttaagcttc

SEQ ID NO: 64113 - DNA, 60 bp, Artificial
  Synthetic oligonucleotide
tcagctggtgtggatggcatgccattctgctgcatttgaagatttaagattgttaagctt

SEQ ID NO: 64114 - DNA, 60 bp, Artificial
  Synthetic oligonucleotide
caattggtgtggatggcatgccattctgctgcatttgaagatttgagagtatcaagcttc

SEQ ID NO: 64115 - DNA, 60 bp, Artificial
  Synthetic oligonucleotide
ccagcgcaaaatgccataagcaccacattcccttatactggagatcctccatacagccat

SEQ ID NO: 64116 - DNA, 60 bp, Artificial
  Synthetic oligonucleotide
cttcttttgacatgagtaatgaaggatcttatttcttcggagacaatgcagaggagtacg

SEQ ID NO: 64117 - DNA, 60 bp, Artificial
  Synthetic oligonucleotide
tcccagcgcggggaaggatcctaagaaaactggaggacccatatacaagagagtaggtgg

SEQ ID NO: 64118 - DNA, 60 bp, Artificial
  Synthetic oligonucleotide
tcccagcgcggggaaggatcctaagaaaactggaggacccatatacaagagagtagatgg

SEQ ID NO: 64119 - DNA, 60 bp, Artificial
  Synthetic oligonucleotide
gcgcggggaaggatcctaagaaaactggaggacccatatacaagagagtaggtgggaagt

SEQ ID NO: 64120 - DNA, 60 bp, Artificial
  Synthetic oligonucleotide
cccagcgcggggaaggatcctaagaaaactggaggacccatatacaagagagtagatgga

SEQ ID NO: 64121 - DNA, 60 bp, Artificial
  Synthetic oligonucleotide
agaacatcccagcgcggggaaggatcctaagaaaactggaggacccatatacaagagagt

SEQ ID NO: 64122 - DNA, 60 bp, Artificial
  Synthetic oligonucleotide
cagtggcaggctccttgtcactggcaatcatgatagctgggatttctttctggatgtgtt

SEQ ID NO: 64123 - DNA, 60 bp, Artificial
  Synthetic oligonucleotide
gtggcaggctccttgtcactggcaatcatgatagctgggatttctttctggatgtgttct

SEQ ID NO: 64124 - DNA, 60 bp, Artificial
  Synthetic oligonucleotide
ctcctattcacaatagtgaaaggggaccaaatatgtatcgggtaccatgccaacaattcc

SEQ ID NO: 64125 - DNA, 60 bp, Artificial
  Synthetic oligonucleotide
tcacttttctcatcctcctattcacaatagtgaaaggggaccaaatatgtatcgggtacc

SEQ ID NO: 64126 - DNA, 60 bp, Artificial
  Synthetic oligonucleotide
gcagacaaagaatccactcaaaaggcaattgatgggataactaacaaagtaaattctgtg

SEQ ID NO: 64127 - DNA, 60 bp, Artificial
  Synthetic oligonucleotide
gacaataggtgaatgtcccaaatatgtaaagtcagatagattggttttggctacagggct

SEQ ID NO: 64128 - DNA, 60 bp, Artificial
  Synthetic oligonucleotide
cccattgacaataggtgaatgtcccaaatatgtaaagtcagatagattggttttggctac

SEQ ID NO: 64129 - DNA, 60 bp, Artificial
  Synthetic oligonucleotide
cattgacaataggtgagtgtcccaaatatgtaaagtcagatagattggttttggcaacag

SEQ ID NO: 64130 - DNA, 60 bp, Artificial
  Synthetic oligonucleotide
ggactcagcacacaacaactggtggttctcgggcctgtgcagtacttggcaatccgtcat

SEQ ID NO: 64131 - DNA, 60 bp, Artificial
  Synthetic oligonucleotide
acggacaaggggggagaatggaattctcttggactctattgaagacatgggatgtcatca

SEQ ID NO: 64132 - DNA, 60 bp, Artificial
  Synthetic oligonucleotide
cctattcacaatagtgaaaggggaccaaatatgtatcgggtatcatgccaacaattccac

SEQ ID NO: 64133 - DNA, 54 bp, Artificial
  Synthetic oligonucleotide
ggggtttatcaaatacttgctatatacgctacagtggcgggctccttgtcactg

SEQ ID NO: 64134 - DNA, 60 bp, Artificial
  Synthetic oligonucleotide
aggagtgaaattgagcaatatggggatttaccaaatacttgctatatacgctacagtggc

SEQ ID NO: 64135 - DNA, 57 bp, Artificial
  Synthetic oligonucleotide
acagtgtcaggaatgggacatatgattatcccaaatatgaagaagaatccaagctga

SEQ ID NO: 64136 - DNA, 60 bp, Artificial
  Synthetic oligonucleotide
gcatgaacagtgtcaggaatgggacatatgattatcccaaatatgaagaagaatccaagc

SEQ ID NO: 64137 - DNA, 60 bp, Artificial
  Synthetic oligonucleotide
gaatgcatgaatagtgtcaggaatgggacatatgattatcccaaatatgaagaagaatcc

SEQ ID NO: 64138 - DNA, 60 bp, Artificial
  Synthetic oligonucleotide
atgatgaatgcatgaacagtgtcaggaatgggacatatgattatcccaaatatgaagaag

SEQ ID NO: 64139 - DNA, 60 bp, Artificial
  Synthetic oligonucleotide
gggaacggatgctttgagttttatcataaatgtgatgatgagtgcatgaacagtgtcagg

SEQ ID NO: 64140 - DNA, 60 bp, Artificial
  Synthetic oligonucleotide
agggaacgggtgctttgagttttatcataaatgtgatgatgaatgcatgaacagtgtcag

SEQ ID NO: 64141 - DNA, 60 bp, Artificial
  Synthetic oligonucleotide
gatggaagatggatttcttgatgtatggacatataatgccgaactcctagttttgatgga

SEQ ID NO: 64142 - DNA, 60 bp, Artificial
  Synthetic oligonucleotide
tcttgatgtatggacatataatgccgaactcctagttttgatggaaaatgagaggacact

SEQ ID NO: 64143 - DNA, 60 bp, Artificial
  Synthetic oligonucleotide
gggaaagagttcaacaatctagagagaagactggaaaacctaaataaaaagatggaagat

SEQ ID NO: 64144 - DNA, 60 bp, Artificial
  Synthetic oligonucleotide
ggtggaagatggatttcttgatgtatggacatataatgccgaactcctagttttgatgga

SEQ ID NO: 64145 - DNA, 60 bp, Artificial
  Synthetic oligonucleotide
gacacaataacattcgaagcaactggaaatctagtggtaccaagatatgccttcgcaatg

SEQ ID NO: 64146 - DNA, 60 bp, Artificial
  Synthetic oligonucleotide
actggacactagtagagcctggagatacaataacattcgaagcaactggaaatctagtgg

SEQ ID NO: 64147 - DNA, 60 bp, Artificial
  Synthetic oligonucleotide
tcaccgaagagggagcaattgttggcgaaatttcaccattgccttctcttccaggacata

SEQ ID NO: 64148 - DNA, 60 bp, Artificial
  Synthetic oligonucleotide
gaatgtatgaacagtgtgaagaatgggacatatgattatcccaagtatgaagaggagtct

SEQ ID NO: 64149 - DNA, 60 bp, Artificial
  Synthetic oligonucleotide
ccccattccttgatcggcttcgccgagatcaaaagtccctaaaaggaagaggcagcactc

SEQ ID NO: 64150 - DNA, 60 bp, Artificial
  Synthetic oligonucleotide
atataacagtaacacactctgttaaccttctagaggacagacataacgggaaactatgta

SEQ ID NO: 64151 - DNA, 53 bp, Artificial
  Synthetic oligonucleotide
gagtctctgaaactctacagagattcgcttggagaagcagtaatgagaatggg

SEQ ID NO: 64152 - DNA, 60 bp, Artificial
  Synthetic oligonucleotide
cacttaagatgaccattgcatctgtacctacttcgcgctacctagctgacatgaccctcg

SEQ ID NO: 64153 - DNA, 60 bp, Artificial
  Synthetic oligonucleotide
aacatcctcaaggggaaattccaaacagcagcacaacgagcaatgatggaccaggtgcga

SEQ ID NO: 64154 - DNA, 60 bp, Artificial
  Synthetic oligonucleotide
tgcaacatcctcaaggggaaatttcagacagcagcacaacgagcaatgatggaccaggtg

SEQ ID NO: 64155 - DNA, 60 bp, Artificial
  Synthetic oligonucleotide
ggattttggggtttgtgttcacgctcaccgtgcccagtgagcgaggactgcagcgtagac

SEQ ID NO: 64156 - DNA, 60 bp, Artificial
  Synthetic oligonucleotide
agtgttacacttgactcaaggaacatgttgggaacagatgtacaccccaggtggagaagt

SEQ ID NO: 64157 - DNA, 60 bp, Artificial
  Synthetic oligonucleotide
ggagttttctctcactgacccgagacttgagccacacaaatgggagaagtactgtgtcct

SEQ ID NO: 64158 - DNA, 60 bp, Artificial
  Synthetic oligonucleotide
tagcgccatggtatgctttcgcactgagtagaggttttggatcaggaatcatcacctcaa

SEQ ID NO: 64159 - DNA, 60 bp, Artificial
  Synthetic oligonucleotide
caggaaggcaagagaagaatcccgcactcaggatgaaatggatgatggcaatgaaatatc

SEQ ID NO: 64160 - DNA, 60 bp, Artificial
  Synthetic oligonucleotide
cagatgtgcactgaactcaaactcagcgactatgaagggaggctgatccagaacagcatc

SEQ ID NO: 64161 - DNA, 60 bp, Artificial
  Synthetic oligonucleotide
atgtgcactgaactccaactcagcgactatgaagggaggctgatccagaacagcataaca

SEQ ID NO: 64162 - DNA, 60 bp, Artificial
  Synthetic oligonucleotide
gcactgaactccaactcagcgactatgaagggaggctgatccagaacagcataacaatag

SEQ ID NO: 64163 - DNA, 60 bp, Artificial
  Synthetic oligonucleotide
ctgggctataagaaccagaagcggagggaacaccaatcaacagagagcatctgcagggca

SEQ ID NO: 64164 - DNA, 60 bp, Artificial
  Synthetic oligonucleotide
ggggaaaagggcaacagctatactcagaaaagtaaccaggagattggttcagctgatagt

SEQ ID NO: 64165 - DNA, 60 bp, Artificial
  Synthetic oligonucleotide
aagaatccaacgagacacttaagatgaccattgcatctgtacctacttcgcgctacctag

SEQ ID NO: 64166 - DNA, 60 bp, Artificial
  Synthetic oligonucleotide
ggaatccagcgagacacttaagatgaccattgcatctgtacctacttcgcgctacctagc

SEQ ID NO: 64167 - DNA, 60 bp, Artificial
  Synthetic oligonucleotide
ggacacagcatacaacaactggaggttcacgggcttgcgcagtatctggtaatccgtcat

SEQ ID NO: 64168 - DNA, 60 bp, Artificial
  Synthetic oligonucleotide
gcccaaagatagttggacacagcatacaacaactggaggttcacgggcttgcgcagtatc

SEQ ID NO: 64169 - DNA, 60 bp, Artificial
  Synthetic oligonucleotide
aacaccagccttccatttcagaatatacatccagtcacaattggagaatgtccaaaatat

SEQ ID NO: 64170 - DNA, 60 bp, Artificial
  Synthetic oligonucleotide
caccagcctcccatttcagaacatacatccagtcacaattggagaatgtccaaaatatgt

SEQ ID NO: 64171 - DNA, 60 bp, Artificial
  Synthetic oligonucleotide
tataaacaccagccttccatttcagaatatacatccagtcacaattggagaatgtccaaa

SEQ ID NO: 64172 - DNA, 60 bp, Artificial
  Synthetic oligonucleotide
accagccttccatttcagaatatacacccagtcacaattggagaatgtccaaaatatgtc

SEQ ID NO: 64173 - DNA, 60 bp, Artificial
  Synthetic oligonucleotide
ccagccttccatttcagaatatacatccagtcacaattggagaatgtccaaaatatgtga

SEQ ID NO: 64174 - DNA, 60 bp, Artificial
  Synthetic oligonucleotide
cacgtttgtgtcactggggatgatagaaatgcgactgctagtttcatttatgatgggatg

SEQ ID NO: 64175 - DNA, 60 bp, Artificial
  Synthetic oligonucleotide
agcaaaagcaggagtgaaaatgaatccaaatcagaagataataacaattggttccgtctc

SEQ ID NO: 64176 - DNA, 60 bp, Artificial
  Synthetic oligonucleotide
gcaggagtgaaaatgaatccaaatcagaagataataacaattggctccgtctctctaact

SEQ ID NO: 64177 - DNA, 52 bp, Artificial
  Synthetic oligonucleotide
ggggaacccaggagtgaaagggtgggcctttgacaatgggaatgatgtttgg

SEQ ID NO: 64178 - DNA, 60 bp, Artificial
  Synthetic oligonucleotide
gaggggaaacccaggagtgaaagggtgggcctttgacgatggaaatgatgtttggatggg

SEQ ID NO: 64179 - DNA, 60 bp, Artificial
  Synthetic oligonucleotide
gaggggaaacccaggagtgaaagggtgggcctttgacagtggagatgatgtttggatggg

SEQ ID NO: 64180 - DNA, 60 bp, Artificial
  Synthetic oligonucleotide
cgtctctctaactattgcaacagtatgtttcctcatgcagattgccatcctagcaacgac

SEQ ID NO: 64181 - DNA, 60 bp, Artificial
  Synthetic oligonucleotide
cgtctctctaaccattgcaacagtatgtttcctcatgcagattgccattctagcaacgac

SEQ ID NO: 64182 - DNA, 60 bp, Artificial
  Synthetic oligonucleotide
gctccgtctctctaaccattgcaacagtatgtttcctcatgcagattgccattctagcaa

SEQ ID NO: 64183 - DNA, 60 bp, Artificial
  Synthetic oligonucleotide
gttccgtctctctaaccattgcaacagtatgtttcctcatgcagattgccattctagcaa

SEQ ID NO: 64184 - DNA, 60 bp, Artificial
  Synthetic oligonucleotide
gctccgtctctctaactattgcaacagtatgtttcctcatgcagattgccatcctagcaa

SEQ ID NO: 64185 - DNA, 60 bp, Artificial
  Synthetic oligonucleotide
gcaggagtgaaaatgaatccaaatcagaagataataacaattggttccgtctctctaacc

SEQ ID NO: 64186 - DNA, 60 bp, Artificial
  Synthetic oligonucleotide
atgaaggcgacactagtagtcttgctatatacatttacaaccgcaaatgcagacacctta

SEQ ID NO: 64187 - DNA, 60 bp, Artificial
  Synthetic oligonucleotide
gaaggcgacactagtagtcttgctatatacatttacaaccgcaaatgcagacaccttatg

SEQ ID NO: 64188 - DNA, 53 bp, Artificial
  Synthetic oligonucleotide
gatgtatctgcagagacaactggaaaggctctaataggcccgtcgtagacata

SEQ ID NO: 64189 - DNA, 60 bp, Artificial
  Synthetic oligonucleotide
tggaaaggctctaataggcccgtcgtagacataaatatggaagattatagcattgattcc

SEQ ID NO: 64190 - DNA, 60 bp, Artificial
  Synthetic oligonucleotide
gcaattggggtcctcatcggagggcttgaatggaatgataacacagttcgagtctctaaa

SEQ ID NO: 64191 - DNA, 60 bp, Artificial
  Synthetic oligonucleotide
acctaactgacatgactcttgaagaaatgtcaagggactggttcatgctcatgcccaagc

SEQ ID NO: 64192 - DNA, 60 bp, Artificial
  Synthetic oligonucleotide
gctgattcccagcatcgatctcatagacaaatggtgacaacaaccaatccactaatcagg

SEQ ID NO: 64193 - DNA, 60 bp, Artificial
  Synthetic oligonucleotide
aaaatgcaattggggtcctcatcaaaggacttgaatggaatgataacacagttcgagtct

SEQ ID NO: 64194 - DNA, 60 bp, Artificial
  Synthetic oligonucleotide
ctctaaaactctacagagattcgcttggagaagcagtgatgagaatgggagacctccact

SEQ ID NO: 64195 - DNA, 60 bp, Artificial
  Synthetic oligonucleotide
cgtcaccgtgactcatgccaaggacattcttgagaaaacgcataatgggaagttgtgcag

SEQ ID NO: 64196 - DNA, 60 bp, Artificial
  Synthetic oligonucleotide
ctccatacagccatgggacaggaacaggatacaccatggacacagtcaacagaacacatc

SEQ ID NO: 64197 - DNA, 60 bp, Artificial
  Synthetic oligonucleotide
tcgatggatgaatgtgatgcgaagtgtcaaacaccccagggagctataaacagtagtctt

SEQ ID NO: 64198 - DNA, 57 bp, Artificial
  Synthetic oligonucleotide
ctgaaaatctacagagattcgcttggagaagctgtaatgagaatgggagacctccac

SEQ ID NO: 64199 - DNA, 60 bp, Artificial
  Synthetic oligonucleotide
ctgaaaatctacagagattcgcttggagaagctgtaatgagaatgggcgaccttcactat

SEQ ID NO: 64200 - DNA, 60 bp, Artificial
  Synthetic oligonucleotide
gacacaatacatgatagaatccctcatcgaaccctattaatgaatgagttgggtgttcca

SEQ ID NO: 64201 - DNA, 60 bp, Artificial
  Synthetic oligonucleotide
ggcacaatacatgatagaatccctcatcgaaccctattaatgaatgagttgggtgttcca

SEQ ID NO: 64202 - DNA, 60 bp, Artificial
  Synthetic oligonucleotide
tgacacaatacatgatagaatccctcatcgaaccctattaatgaatgagttgggtgttcc

SEQ ID NO: 64203 - DNA, 60 bp, Artificial
  Synthetic oligonucleotide
tggcacaatacatgatagaatccctcatcgaaccctattaatgaatgagttgggtgttcc

SEQ ID NO: 64204 - DNA, 60 bp, Artificial
  Synthetic oligonucleotide
ttttgggatttgtgtttacgctcaccgtgcccagtgagcgaggactgcagcgtagacgct

SEQ ID NO: 64205 - DNA, 60 bp, Artificial
  Synthetic oligonucleotide
ccagccctcaggatgaaatggatgatggcaatgaaatacccaataacggcagacaagagg

SEQ ID NO: 64206 - DNA, 60 bp, Artificial
  Synthetic oligonucleotide
gaacccagccctcaggatgaaatggatgatggcaatgaaatacccaataacggcagacaa

SEQ ID NO: 64207 - DNA, 60 bp, Artificial
  Synthetic oligonucleotide
gcaattgggatcctcatcggaggacttgaatggaatgataacacagttcgagtctctaaa

SEQ ID NO: 64208 - DNA, 60 bp, Artificial
  Synthetic oligonucleotide
ccagtgagcgaggactgcagcgtagacgctttgtccagaatgctcttaatgggaatggag

SEQ ID NO: 64209 - DNA, 60 bp, Artificial
  Synthetic oligonucleotide
ccagtgagcgaggactgcagcgtagacgctttgtccaaaatgccctcaatgggaatgggg

SEQ ID NO: 64210 - DNA, 56 bp, Artificial
  Synthetic oligonucleotide
gcaatgatggatcaagtgagagaaagtcggaacccaggaaacgctgagattgaaga

SEQ ID NO: 64211 - DNA, 60 bp, Artificial
  Synthetic oligonucleotide
ggtcatgcagacctcagtgccaaggaggcacaggatgtaatcatggaagttgttttccct

SEQ ID NO: 64212 - DNA, 60 bp, Artificial
  Synthetic oligonucleotide
aaatcctggtcatgcagacctcagtgccaaggaggcacaggatgtaatcatggaagttgt

SEQ ID NO: 64213 - DNA, 60 bp, Artificial
  Synthetic oligonucleotide
cttgaggctctcatggaatggctaaagacaagaccaatcctgtcacctctgaccaagggg

SEQ ID NO: 64214 - DNA, 60 bp, Artificial
  Synthetic oligonucleotide
cacttcaggtacctatggaacaggctcatggcctgatggggcaaatatcaacttcatgcc

SEQ ID NO: 64215 - DNA, 60 bp, Artificial
  Synthetic oligonucleotide
cccagtgctgggaaggatcctaagaaaactggaggacccatatatagaagagtagacgga

SEQ ID NO: 64216 - DNA, 60 bp, Artificial
  Synthetic oligonucleotide
gttactctgctggtgcacttgccagttgcatgggcctcatatacaacagaatggggactg

SEQ ID NO: 64217 - DNA, 60 bp, Artificial
  Synthetic oligonucleotide
atgttgtgagaaaaatgatgactaattcacaagacacagagctctctttcacaattactg

SEQ ID NO: 64218 - DNA, 60 bp, Artificial
  Synthetic oligonucleotide
atgttgttagaaaaatgatgactaattcacaagacacagagctctctttcacaattactg

SEQ ID NO: 64219 - DNA, 60 bp, Artificial
  Synthetic oligonucleotide
gacgactaatccaaaatagcataacaatagagagaatggtgctctctgcttttgatgaga

SEQ ID NO: 64220 - DNA, 60 bp, Artificial
  Synthetic oligonucleotide
atcaaatcatggcgtcccaaggcaccaaacggtcttatgaacaaatggaaactgatgggg

SEQ ID NO: 64221 - DNA, 60 bp, Artificial
  Synthetic oligonucleotide
ccagtgaacgaggactgcagcgtagacgctttgtccaaaatgccctcaatgggaatgggg

SEQ ID NO: 64222 - DNA, 60 bp, Artificial
  Synthetic oligonucleotide
tggcacaatacatgatagaatccctcatcgaacccttttgatgaatgagttgggtgttcc

SEQ ID NO: 64223 - DNA, 60 bp, Artificial
  Synthetic oligonucleotide
cgtgcccagtgagcgaggactgcagcgtagacgctttgtccaaaatgccctcaatgggaa

SEQ ID NO: 64224 - DNA, 60 bp, Artificial
  Synthetic oligonucleotide
tggggtcctcatcggaggacttgaatggaatggtaacacggttcgaggctctgaaagtct

SEQ ID NO: 64225 - DNA, 60 bp, Artificial
  Synthetic oligonucleotide
tggggtcctcatcggaggacttgaatggaatggtaacacggttcgagtctccgaaagtct

SEQ ID NO: 64226 - DNA, 60 bp, Artificial
  Synthetic oligonucleotide
tggggtcctcatcggaggacttgaatggaatggtaacacggttcgagtccctgaaaatct

SEQ ID NO: 64227 - DNA, 60 bp, Artificial
  Synthetic oligonucleotide
tggggtcctcatcggaggacttgaatggaatggtaacacggttcgagtctccgaaaatct

SEQ ID NO: 64228 - DNA, 60 bp, Artificial
  Synthetic oligonucleotide
tggggtcctcatcggaggacttgaatggaatggtaacacggttcgaggctctgaaaatct

SEQ ID NO: 64229 - DNA, 60 bp, Artificial
  Synthetic oligonucleotide
tggggtcctcatcggaggacttgaatggaatggtaacacggttcgaatctctgaagatct

SEQ ID NO: 64230 - DNA, 60 bp, Artificial
  Synthetic oligonucleotide
tgggaaaagcagtttttacagaaatttgctgtggctgacggggaagaatggtttgtaccc

SEQ ID NO: 64231 - DNA, 60 bp, Artificial
  Synthetic oligonucleotide
ttttgaacaaataacatttatgcaagccttacagctactatttgaagtggaacaagagat

SEQ ID NO: 64232 - DNA, 60 bp, Artificial
  Synthetic oligonucleotide
cataaacagaacaggaacatttgaattcacaagctttttctatcgctatggatttgtagc

SEQ ID NO: 64233 - DNA, 60 bp, Artificial
  Synthetic oligonucleotide
cctaagaggaaccgctccattctcaacacaagccaaaggggaattcttgaggatgaacag

SEQ ID NO: 64234 - DNA, 58 bp, Artificial
  Synthetic oligonucleotide
atacttactgacagccagacagcgaccaaaagaattcggatggccatcaattaatgtt

SEQ ID NO: 64235 - DNA, 60 bp, Artificial
  Synthetic oligonucleotide
acattccatccattcaatccagaggtctgtttggagccattgccggtttcattgaagggg

SEQ ID NO: 64236 - DNA, 60 bp, Artificial
  Synthetic oligonucleotide
aacattccatccattcaatccagaggtctgtttggagccattgccggtttcattgaaggg

SEQ ID NO: 64237 - DNA, 60 bp, Artificial
  Synthetic oligonucleotide
caccgatcttgaggctctaatggaatggctaaagacaagaccaatcctgtcacctctgac

SEQ ID NO: 64238 - DNA, 60 bp, Artificial
  Synthetic oligonucleotide
ctctattggagatgtgccacagcacacagattggtggaataaggatggtagacatcctta

SEQ ID NO: 64239 - DNA, 60 bp, Artificial
  Synthetic oligonucleotide
acacagtattagaaaagaatgtaacagtaacacactctgttaaccttctagaaaacaagc

SEQ ID NO: 64240 - DNA, 60 bp, Artificial
  Synthetic oligonucleotide
ttccagcgcaaaatgccataagtactacattcccttatactggagatcctccatacagcc

SEQ ID NO: 64241 - DNA, 60 bp, Artificial
  Synthetic oligonucleotide
actgaactcaaactcagtgaccatgaagggagactgatccaaaacagcataacaatagag

SEQ ID NO: 64242 - DNA, 60 bp, Artificial
  Synthetic oligonucleotide
atcaaacgtgggatcaatgatcggaacttctggagaggtgagaatgggcggaaaacaagg

SEQ ID NO: 64243 - DNA, 60 bp, Artificial
  Synthetic oligonucleotide
tcaaacgtgggatcaatgatcggaacttctggagaggtgagaatgggcggaaaacaagga

SEQ ID NO: 64244 - DNA, 50 bp, Artificial
  Synthetic oligonucleotide
aagaccctaatattactaagggctttcaccgaagagggagcaattgttgg

SEQ ID NO: 64245 - DNA, 60 bp, Artificial
  Synthetic oligonucleotide
cctcttttgaaatgagtaatgaaggatcttatttcttcggagacaatgcagaggagtacg

SEQ ID NO: 64246 - DNA, 60 bp, Artificial
  Synthetic oligonucleotide
atatctggaagaacatcccagcgcggggaaggatcctaagaaaactggaggacccatata

SEQ ID NO: 64247 - DNA, 60 bp, Artificial
  Synthetic oligonucleotide
ggtccagctcaagttgtcatgatgggaaagcatggttgcacgtttgtgtcactggggatg

SEQ ID NO: 64248 - DNA, 60 bp, Artificial
  Synthetic oligonucleotide
agctcaagttgccatgatgggaaggcatggttgcacgtttgtgtcactggggatgataga

SEQ ID NO: 64249 - DNA, 60 bp, Artificial
  Synthetic oligonucleotide
ccatgatgggaaggcatggttgcacgtttgtgtcactggggatgatagaaatgcgaccgc

SEQ ID NO: 64250 - DNA, 60 bp, Artificial
  Synthetic oligonucleotide
gcgaccgctagtttcatttatgatgggatgcttgtcgacagtatcggttcgtggtctcaa

SEQ ID NO: 64251 - DNA, 58 bp, Artificial
  Synthetic oligonucleotide
ctttgacaatgggaatgatgtttggatgggaagaacaatcagtaaagattcgcgttca

SEQ ID NO: 64252 - DNA, 60 bp, Artificial
  Synthetic oligonucleotide
tactaagggctttcaccgaagagggagcaattgttggcgaaatttcaccattgccttctc

SEQ ID NO: 64253 - DNA, 60 bp, Artificial
  Synthetic oligonucleotide
tgaccggctagagaccctaatattactaagggctttcaccgaagagggagcaattgttgg

SEQ ID NO: 64254 - DNA, 60 bp, Artificial
  Synthetic oligonucleotide
ccggctagagaccctaatattactaagggctttcaccgaagagggagcaattgttggcga

SEQ ID NO: 64255 - DNA, 60 bp, Artificial
  Synthetic oligonucleotide
cacagtactagaaaagaatgtaacagtaacacactctgttaaccttctagaagacaggca

SEQ ID NO: 64256 - DNA, 60 bp, Artificial
  Synthetic oligonucleotide
acacagtactagaaaagaatgtaacagtaacacactctgttaaccttctagaaaacaagc

SEQ ID NO: 64257 - DNA, 60 bp, Artificial
  Synthetic oligonucleotide
agacttctaactgtgccagaatggtcatatataatggagaaagaaaatccaaggaacggt

SEQ ID NO: 64258 - DNA, 60 bp, Artificial
  Synthetic oligonucleotide
ccagagtggtcatatataatggagaaagaaaatccaaggaatggtttgtgctacccaggc

SEQ ID NO: 64259 - DNA, 60 bp, Artificial
  Synthetic oligonucleotide
agacttctaactgtgccagaatggtcatatataatggagaaagaaaatccaaggaatggt

SEQ ID NO: 64260 - DNA, 60 bp, Artificial
  Synthetic oligonucleotide
ccagaatggtcatatataatggagaaagaaaatccaagaaatggtttgtgctacccaggc

SEQ ID NO: 64261 - DNA, 60 bp, Artificial
  Synthetic oligonucleotide
ccagaatggtcatatataatggagaaagaaaatccaaggaacggtttgtgctacccaggc

SEQ ID NO: 64262 - DNA, 60 bp, Artificial
  Synthetic oligonucleotide
ccagaatggtcatatataatggagaaagaaaatccaaggaatggtttgtgctacccaggc

SEQ ID NO: 64263 - DNA, 60 bp, Artificial
  Synthetic oligonucleotide
acaatatccacccactgaccattggtgagtgccccaaatatgtaaaatcggaaagattag

SEQ ID NO: 64264 - DNA, 60 bp, Artificial
  Synthetic oligonucleotide
caatatccacccactgaccattggtgagtgccccaaatatgtaaaatcggaaagattagt

SEQ ID NO: 64265 - DNA, 60 bp, Artificial
  Synthetic oligonucleotide
ccacccattgaccattggtgagtgccccaaatatgtaaaatcggagaggttagtcttggc

SEQ ID NO: 64266 - DNA, 60 bp, Artificial
  Synthetic oligonucleotide
cgaaacttctggaggggtgaaaatggacgaagaacaaggattgcatatgaaagaatgtgc

SEQ ID NO: 64267 - DNA, 60 bp, Artificial
  Synthetic oligonucleotide
tggaatcaatgaccgaaacttctggaggggtgaaaatggacgaagaacaaggattgcata

SEQ ID NO: 64268 - DNA, 60 bp, Artificial
  Synthetic oligonucleotide
acgtggaatcaatgaccgaaacttctggaggggtgaaaatggacgaagaacaaggattgc

SEQ ID NO: 64269 - DNA, 60 bp, Artificial
  Synthetic oligonucleotide
atatacatccagtcacaattggagaatgtccaaaatatgtcaaaagcacaaaattgagaa

SEQ ID NO: 64270 - DNA, 60 bp, Artificial
  Synthetic oligonucleotide
gagcactggtaatctaattgcaccagaatatggattcaaaatatcaaagagaggcagttc

SEQ ID NO: 64271 - DNA, 60 bp, Artificial
  Synthetic oligonucleotide
cggtctgaaaagagggccttctacggaaggagtaccggagtctatgagggaagaatatcg

SEQ ID NO: 64272 - DNA, 60 bp, Artificial
  Synthetic oligonucleotide
cgctatctaactgacatgactctagaagagatgtcaagggactggttcatgctcatgccc

SEQ ID NO: 64273 - DNA, 60 bp, Artificial
  Synthetic oligonucleotide
tatgctacagtagcaggctccctgtcactggcaatcatgatagctgggatctccttatgg

SEQ ID NO: 64274 - DNA, 60 bp, Artificial
  Synthetic oligonucleotide
ggggcgactgatccagaacagcttaacaatagagagaatggtgctctctgcttttgacga

SEQ ID NO: 64275 - DNA, 60 bp, Artificial
  Synthetic oligonucleotide
gggactggttcatgctaatgcccaagcagaaagtagaaggccctctttgcatcagaatag

SEQ ID NO: 64276 - DNA, 60 bp, Artificial
  Synthetic oligonucleotide
tcaaaggagtaaaattgagcaacatgggggtttatcaaatccttgcaatttatgctacag

SEQ ID NO: 64277 - DNA, 60 bp, Artificial
  Synthetic oligonucleotide
aacaaggatttaccagattttggcgatttattcaactgtcgccagttcattggtactgtt

SEQ ID NO: 64278 - DNA, 52 bp, Artificial
  Synthetic oligonucleotide
ggaccaggcgatcatggaaaagaacatcatactgaaagcgaacttcagtgtg

SEQ ID NO: 64279 - DNA, 60 bp, Artificial
  Synthetic oligonucleotide
aggaatcaatgatcggaatttctggagaggcgaaaatggacggagaacaagaattgctta

SEQ ID NO: 64280 - DNA, 60 bp, Artificial
  Synthetic oligonucleotide
agggatcaatgatcggaatttctggagaggcgaaaatggacggagaacaagaattgctta

SEQ ID NO: 64281 - DNA, 60 bp, Artificial
  Synthetic oligonucleotide
cggaatttctggagaggcgaaaatggacggagaacaagaattgcttacgaaagaatgtgc

SEQ ID NO: 64282 - DNA, 60 bp, Artificial
  Synthetic oligonucleotide
caatgatcgtaacttttggagaggcgaaaatggacggagaacaagaattgcttacgagag

SEQ ID NO: 64283 - DNA, 60 bp, Artificial
  Synthetic oligonucleotide
caaatcagcgtacagcccacattctctgtgcagagaaacctcccattcgagagagcaacc

SEQ ID NO: 64284 - DNA, 60 bp, Artificial
  Synthetic oligonucleotide
ttggagaggcgaaaatggacggagaacaagaattgcttacgagagaatgtgcaacatcct

SEQ ID NO: 64285 - DNA, 60 bp, Artificial
  Synthetic oligonucleotide
atggcgtcccaaggcaccaaacggtcttatgaacagatggaaactgatggggatcgccag

SEQ ID NO: 64286 - DNA, 60 bp, Artificial
  Synthetic oligonucleotide
ggcgtcccaaggcaccaaacggtcttatgaacagatggaaactgatggggaacgccagaa

SEQ ID NO: 64287 - DNA, 60 bp, Artificial
  Synthetic oligonucleotide
ggcgtcccaaggcaccaaacggtcttatgaacagatggaaactgatggagaacgccagaa

SEQ ID NO: 64288 - DNA, 60 bp, Artificial
  Synthetic oligonucleotide
atggcgtcccaaggcaccaaacggtcttatgaacagatggaaactgatggagaacgccag

SEQ ID NO: 64289 - DNA, 60 bp, Artificial
  Synthetic oligonucleotide
atggcgtcccaaggcaccaaacggtcttatgaacagatggaaactgatggggaacgccag

SEQ ID NO: 64290 - DNA, 60 bp, Artificial
  Synthetic oligonucleotide
gtcccaaggcaccaaacggtcttatgaacagatggaaactgatggggatcgccagaatgc

SEQ ID NO: 64291 - DNA, 60 bp, Artificial
  Synthetic oligonucleotide
atggcatcccaaggcaccaaacggtcttatgaacagatggaaactgatggggaacgccag

SEQ ID NO: 64292 - DNA, 60 bp, Artificial
  Synthetic oligonucleotide
ggcgtcccaaggcaccaaacggtcttatgaacagatggaaactgatggggatcgccagaa

SEQ ID NO: 64293 - DNA, 60 bp, Artificial
  Synthetic oligonucleotide
ggcatcccaaggcaccaaacggtcttatgaacagatggaaactgatggggaacgccagaa

SEQ ID NO: 64294 - DNA, 60 bp, Artificial
  Synthetic oligonucleotide
ggggattatatgaagcaattgaggagtgcctgattaacgatccctgggttttgcttaatg

SEQ ID NO: 64295 - DNA, 60 bp, Artificial
  Synthetic oligonucleotide
agtctctaaaaatctacagagattcgcttggagaagcagtaatgagaatgggggacctcc

SEQ ID NO: 64296 - DNA, 60 bp, Artificial
  Synthetic oligonucleotide
cgggcaggggaccacactagacaacaaacattcaaatggcacaatacatgatagaatccc

SEQ ID NO: 64297 - DNA, 60 bp, Artificial
  Synthetic oligonucleotide
tatcctcaggacccaggagtcggaatgcgtttgtatcaatgggacttgcacagtagtaat

SEQ ID NO: 64298 - DNA, 60 bp, Artificial
  Synthetic oligonucleotide
atcctcaggacccaggagtcggaatgcgtttgtatcaatgggacttgcacagtagtaatg

SEQ ID NO: 64299 - DNA, 60 bp, Artificial
  Synthetic oligonucleotide
ggaacaggctcatggcctgatggggcgaacatcaatttcatgcctatataagctttcgca

SEQ ID NO: 64300 - DNA, 60 bp, Artificial
  Synthetic oligonucleotide
ccgtgcccagtgagcgaggactgcagcgtagacgttttgtccagaatgccctcaatggga

SEQ ID NO: 64301 - DNA, 60 bp, Artificial
  Synthetic oligonucleotide
gctcaccgtgcccagtgagcgaggactgcagcgtagacgttttgtccagaatgccctcaa

SEQ ID NO: 64302 - DNA, 60 bp, Artificial
  Synthetic oligonucleotide
aattttaccacaaatgtgatgatgaatgcatgaatagcgtaaagaatgggacatatgatt

SEQ ID NO: 64303 - DNA, 60 bp, Artificial
  Synthetic oligonucleotide
atgttttgaattttaccacaaatgtgatgatgaatgcatgaatagtgtgaaaaacgggac

SEQ ID NO: 64304 - DNA, 60 bp, Artificial
  Synthetic oligonucleotide
gggacaatgcaaaagaactagggaatggatgttttgaattttaccacaaatgtgatgatg

SEQ ID NO: 64305 - DNA, 60 bp, Artificial
  Synthetic oligonucleotide
actgaactcaaactcagtgactatgaagggagactgatccaaaacagcataacaatagag

SEQ ID NO: 64306 - DNA, 60 bp, Artificial
  Synthetic oligonucleotide
acacagtcctcgagaagaatgtgacagtaacacactctgtcaacctacttgaggacagtc

SEQ ID NO: 64307 - DNA, 60 bp, Artificial
  Synthetic oligonucleotide
acagtcctcgagaagaatgtgacagtaacacactctgtcaacctacttgaggacagccac

SEQ ID NO: 64308 - DNA, 60 bp, Artificial
  Synthetic oligonucleotide
ataaaacagggacatttgaattcacaagctttttttatcgctatggatttgtggctaatt

SEQ ID NO: 64309 - DNA, 60 bp, Artificial
  Synthetic oligonucleotide
catgagggaatacaagcaggagtggatagattctacagaacctgcaagctagtcggaatc

SEQ ID NO: 64310 - DNA, 60 bp, Artificial
  Synthetic oligonucleotide
aggacacttgactttcatgattctaatgtcaagaatctatatgataaagtcagaatgcaa

SEQ ID NO: 64311 - DNA, 60 bp, Artificial
  Synthetic oligonucleotide
aaggacacttgactttcatgattctaatgtcaagaatctgtatgatagagtcagaatgca

SEQ ID NO: 64312 - DNA, 60 bp, Artificial
  Synthetic oligonucleotide
ggacacttgactttcatgattctaatgtcaagaatctgtacgataaagtcagaatgcagt

SEQ ID NO: 64313 - DNA, 60 bp, Artificial
  Synthetic oligonucleotide
gacacttgactttcatgattctaatgtcaagaatctgtacgataaagtcagaatgcagtt

SEQ ID NO: 64314 - DNA, 60 bp, Artificial
  Synthetic oligonucleotide
ggcacaatacatgatagaatccctcatcggacccttttgatgaatgagttgggtgttccg

SEQ ID NO: 64315 - DNA, 60 bp, Artificial
  Synthetic oligonucleotide
gcgggatggctccttggcaacccagaatgtgaccttctactcactgcaaactcatggtcc

SEQ ID NO: 64316 - DNA, 60 bp, Artificial
  Synthetic oligonucleotide
ctcatggtcctatataatagagacttccaattcagaaaacgggacatgctatcccggtga

SEQ ID NO: 64317 - DNA, 60 bp, Artificial
  Synthetic oligonucleotide
ccgcatgctcttactctggggccagcagtttttatcggaatttgctgtggataacaaaga

SEQ ID NO: 64318 - DNA, 60 bp, Artificial
  Synthetic oligonucleotide
ataacaaagaagggaacttcatatccaaaactcagcaaatcatacacgaacaataaaggg

SEQ ID NO: 64319 - DNA, 60 bp, Artificial
  Synthetic oligonucleotide
acttcatatccaaaactcagcaaatcatacacgaacaataaagggaaagaagtgctcgtg

SEQ ID NO: 64320 - DNA, 60 bp, Artificial
  Synthetic oligonucleotide
caataaagggaaagaagtgctcgtgctctggggagtgcatcaccctccaactaccagtga

SEQ ID NO: 64321 - DNA, 60 bp, Artificial
  Synthetic oligonucleotide
gggaaagaagtgctcgtgctctggggagtgcatcaccctccaactaccagtgagcaacaa

SEQ ID NO: 64322 - DNA, 60 bp, Artificial
  Synthetic oligonucleotide
ggatcatcaaaatacaaccgaagattcactccagagatagcagctagacctaaagttaga

SEQ ID NO: 64323 - DNA, 60 bp, Artificial
  Synthetic oligonucleotide
attgaggaataatgccagagaacttgggaatggttgttttgagttctatcacaagtgtga

SEQ ID NO: 64324 - DNA, 60 bp, Artificial
  Synthetic oligonucleotide
tatcccaaatattcagaagagtccaaattgaatcgagaagaaatagacggagtgaaacta

SEQ ID NO: 64325 - DNA, 60 bp, Artificial
  Synthetic oligonucleotide
cagaagagtccaaattgaatcgagaagaaatagacggagtgaaactagaatcaatgggag

SEQ ID NO: 64326 - DNA, 60 bp, Artificial
  Synthetic oligonucleotide
ccagagaacttgggaatggttgttttgagttctatcacaagtgtgatgatgagtgcatgg

SEQ ID NO: 64327 - DNA, 60 bp, Artificial
  Synthetic oligonucleotide
acaagtgtgatgatgagtgcatggaaagtgtgaagaacggcacatatgactatcccaaat

SEQ ID NO: 64328 - DNA, 60 bp, Artificial
  Synthetic oligonucleotide
gactttcatgattccaatgtgagaaatttatatgagaaggtcaaatcacaattgaggaat

SEQ ID NO: 64329 - DNA, 60 bp, Artificial
  Synthetic oligonucleotide
ccaatgtgagaaatttatatgagaaggtcaaatcacaattgaggaataatgccagagaac

SEQ ID NO: 64330 - DNA, 60 bp, Artificial
  Synthetic oligonucleotide
gcacacagaatgcgattgacggaatcacaaataaggtgaattcggtgattgaaaagatga

SEQ ID NO: 64331 - DNA, 60 bp, Artificial
  Synthetic oligonucleotide
gagtgcatggaaagtgtgaagaacggcacatatgactatcccaaatattcagaagagtcc

SEQ ID NO: 64332 - DNA, 60 bp, Artificial
  Synthetic oligonucleotide
ggtgccaaacccctcatggggctttgaacagtagccttccttttcagaatgtacatccta

SEQ ID NO: 64333 - DNA, 53 bp, Artificial
  Synthetic oligonucleotide
tttgcactgaataaggggtctgactctggaattataacatcagatgctccagt

SEQ ID NO: 64334 - DNA, 60 bp, Artificial
  Synthetic oligonucleotide
gaagccactgggaatttgatagcaccatggtatgcttttgcactgaataaggggtctgac

SEQ ID NO: 64335 - DNA, 60 bp, Artificial
  Synthetic oligonucleotide
acaccataacatttgaagccactgggaatttgatagcaccatggtatgcttttgcactga

SEQ ID NO: 64336 - DNA, 60 bp, Artificial
  Synthetic oligonucleotide
ggcaacaggactaagaaatgtcccatccgttcaatccagaggactatttggagcaattgc

SEQ ID NO: 64337 - DNA, 60 bp, Artificial
  Synthetic oligonucleotide
gctaagaatggcaacaggactaagaaatgtcccatccgttcaatccagaggactatttgg

SEQ ID NO: 64338 - DNA, 60 bp, Artificial
  Synthetic oligonucleotide
aagcacacagaatgcgattgacggaatcacaaataaggtgaattcggtgattgaaaagat

SEQ ID NO: 64339 - DNA, 60 bp, Artificial
  Synthetic oligonucleotide
gggtaccatcaccagaatgagcagggatcaggatatgctgctgatcagaaaagcacacag

SEQ ID NO: 64340 - DNA, 60 bp, Artificial
  Synthetic oligonucleotide
tctgcagcctgaacgggatagctcccctacaattggggaagtgcaatgtagcgggatggc

SEQ ID NO: 64341 - DNA, 60 bp, Artificial
  Synthetic oligonucleotide
atacttactgacagccagacagcgaccaaaagaattcggatggccatcaattaatgttga

SEQ ID NO: 64342 - DNA, 60 bp, Artificial
  Synthetic oligonucleotide
gcccaaagataggtggacacagcatacaacaactggaggttcacgggcttgcgcagtatc

SEQ ID NO: 64343 - DNA, 60 bp, Artificial
  Synthetic oligonucleotide
cccaaagataggtggacacagcatacaacaactggaggttcacgggcctgcgcagtatct

SEQ ID NO: 64344 - DNA, 60 bp, Artificial
  Synthetic oligonucleotide
atgagaagaaggccaaactggcaaatgttgtgagaaaaatgatgactaattcacaagaca

SEQ ID NO: 64345 - DNA, 60 bp, Artificial
  Synthetic oligonucleotide
gtaatgagaagaaggccaaactggcaaatgttgtgagaaaaatgatgactaattcacaag

SEQ ID NO: 64346 - DNA, 60 bp, Artificial
  Synthetic oligonucleotide
aaggttccagcgcaaaatgccataagcaccacattcccttatactggagatcctccatac

SEQ ID NO: 64347 - DNA, 60 bp, Artificial
  Synthetic oligonucleotide
atgcatcttggttcaactccctcctcacacatgcactgaaatagttgtggcaatgctact

SEQ ID NO: 64348 - DNA, 60 bp, Artificial
  Synthetic oligonucleotide
ggctgaatcgaggaaattgcttctcattgttcaggcacttagggacaacctggaacctgg

SEQ ID NO: 64349 - DNA, 60 bp, Artificial
  Synthetic oligonucleotide
caccgatcttgaggctctcatggaatggctaaagacaagaccaatcccgtcacctctgac

SEQ ID NO: 64350 - DNA, 60 bp, Artificial
  Synthetic oligonucleotide
aataacattcgaagcaactggaaatctagtggtaccaagatatgctttcgcaatgaatag

SEQ ID NO: 64351 - DNA, 60 bp, Artificial
  Synthetic oligonucleotide
atgggtcattgcaatgcagaatatgcatttaaagctggaatttcagaatgtatggaaaaa

SEQ ID NO: 64352 - DNA, 53 bp, Artificial
  Synthetic oligonucleotide
ggggcaatcagtttctggatgtgttccaatgggtcattgcaatgcagaatatg

SEQ ID NO: 64353 - DNA, 60 bp, Artificial
  Synthetic oligonucleotide
cctaatctggttagtctccctgggggcaatcagtttctggatgtgttccaatgggtcatt

SEQ ID NO: 64354 - DNA, 50 bp, Artificial
  Synthetic oligonucleotide
atggagtgaagctagaatcaatgggagtttaccaaattttggcgatctat

SEQ ID NO: 64355 - DNA, 60 bp, Artificial
  Synthetic oligonucleotide
ttcagaagagtccaaactgaatcgagaagaaatagatggagtgaagctagaatcaatggg

SEQ ID NO: 64356 - DNA, 60 bp, Artificial
  Synthetic oligonucleotide
cgactatcccaagtattcagaagagtccaaactgaatcgagaagaaatagatggagtgaa

SEQ ID NO: 64357 - DNA, 60 bp, Artificial
  Synthetic oligonucleotide
cacaagtgtgacgatgaatgcatggaaagtgtgaagaatggcacatacgactatcccaag

SEQ ID NO: 64358 - DNA, 60 bp, Artificial
  Synthetic oligonucleotide
ccaaacccctcatggggctctgaacagcagcctcccttttcagaatgtacatcccatcac

SEQ ID NO: 64359 - DNA, 60 bp, Artificial
  Synthetic oligonucleotide
agaatggcaacaggactaagaaacgtcccatccattcaatcccgaggactgttcggggca

SEQ ID NO: 64360 - DNA, 60 bp, Artificial
  Synthetic oligonucleotide
ctggaatcatcacatcagataccccagtccataattgtgacacaaaatgccaaacccctc

SEQ ID NO: 64361 - DNA, 60 bp, Artificial
  Synthetic oligonucleotide
tgacacaaaatgccaaacccctcatggggctctgaacagcagcctcccttttcagaatgt

SEQ ID NO: 64362 - DNA, 60 bp, Artificial
  Synthetic oligonucleotide
ggccactggaaacttgatagcaccatggtacgctttcgcactgaataaaggttctggctc

SEQ ID NO: 64363 - DNA, 60 bp, Artificial
  Synthetic oligonucleotide
aaaggttctggctctggaatcatcacatcagataccccagtccataattgtgacacaaaa

SEQ ID NO: 64364 - DNA, 60 bp, Artificial
  Synthetic oligonucleotide
ttggaccctgttagatcaaggagacaacataacatttgaggccactggaaacttgatagc

SEQ ID NO: 64365 - DNA, 60 bp, Artificial
  Synthetic oligonucleotide
ttgaggccactggaaacttgatagcaccatggtacgctttcgcactgaataaaggttctg

SEQ ID NO: 64366 - DNA, 60 bp, Artificial
  Synthetic oligonucleotide
ggcaacaggactaagaaacgtcccatccattcaatcccgaggactgttcggggcaattgc

SEQ ID NO: 64367 - DNA, 60 bp, Artificial
  Synthetic oligonucleotide
gttcggggcaattgctggattcattgaggggggatggacaggcatgatagatgggtggta

SEQ ID NO: 64368 - DNA, 60 bp, Artificial
  Synthetic oligonucleotide
aggttcactccagaactagcagccagacctaaagtaagaggacaagcaggcagaattaac

SEQ ID NO: 64369 - DNA, 60 bp, Artificial
  Synthetic oligonucleotide
gcatacgtttcagttgggtcgtcaaaatacaaccggaggttcactccagaactagcagcc

SEQ ID NO: 64370 - DNA, 60 bp, Artificial
  Synthetic oligonucleotide
accagaatactaatgcatacgtttcagttgggtcgtcaaaatacaaccggaggttcactc

SEQ ID NO: 64371 - DNA, 60 bp, Artificial
  Synthetic oligonucleotide
cgaacaataaggggaaagaagtgcttgtgctctggggagttcaccaccctccaaatgtcg

SEQ ID NO: 64372 - DNA, 60 bp, Artificial
  Synthetic oligonucleotide
aaaacatacacgaacaataaggggaaagaagtgcttgtgctctggggagttcaccaccct

SEQ ID NO: 64373 - DNA, 58 bp, Artificial
  Synthetic oligonucleotide
tatcacgggggaagcagtttttatcggaatttgctgtggataataaagaagggaaatt

SEQ ID NO: 64374 - DNA, 60 bp, Artificial
  Synthetic oligonucleotide
gctcatggccaggtcacgagacaactaaaggtgttaccgctgcatgctcttatcacgggg

SEQ ID NO: 64375 - DNA, 51 bp, Artificial
  Synthetic oligonucleotide
aaaatttgtaattttcccaaaagaaagctcatggccaggtcacgagacaac

SEQ ID NO: 64376 - DNA, 60 bp, Artificial
  Synthetic oligonucleotide
cagaattaactactattggaccctgttagatcaaggagacaacataacatttgaggccac

SEQ ID NO: 64377 - DNA, 60 bp, Artificial
  Synthetic oligonucleotide
ctagcagccagacctaaagtaagaggacaagcaggcagaattaactactattggaccctg

SEQ ID NO: 64378 - DNA, 55 bp, Artificial
  Synthetic oligonucleotide
ttctacttgaaaatgaaaggactctagacctccatgactccaatgtgagaaattt

SEQ ID NO: 64379 - DNA, 60 bp, Artificial
  Synthetic oligonucleotide
ggtcgatgatggattcctagatgtctggacatataatgctgaactgctcgttctacttga

SEQ ID NO: 64380 - DNA, 60 bp, Artificial
  Synthetic oligonucleotide
cgcagttgaggaacaatgccaaagaaattgggaatggttgctttgagttctaccacaagt

SEQ ID NO: 64381 - DNA, 60 bp, Artificial
  Synthetic oligonucleotide
gggtggtacgggtaccatcaccagaatgagcagggatctggctatgctgctgatcagaaa

SEQ ID NO: 64382 - DNA, 60 bp, Artificial
  Synthetic oligonucleotide
atgggtggtacgggtaccatcaccagaatgagcagggatctggctatgctgctgatcaga

SEQ ID NO: 64383 - DNA, 56 bp, Artificial
  Synthetic oligonucleotide
tgaacactcaattcactgcagtgggcaaagaattcaataatctagaaaaaagaatt

SEQ ID NO: 64384 - DNA, 52 bp, Artificial
  Synthetic oligonucleotide
gctgatcagaaaagcacacagaaagcaatcgatgggatcacaaacaaggtaa

SEQ ID NO: 64385 - DNA, 60 bp, Artificial
  Synthetic oligonucleotide
taccacaagtgtgacgatgaatgcatggaaagtgtgaagaatggcacatacgactatccc

SEQ ID NO: 64386 - DNA, 60 bp, Artificial
  Synthetic oligonucleotide
ggaacaatgccaaagaaattgggaatggttgctttgagttctaccacaagtgtgacgatg

SEQ ID NO: 64387 - DNA, 60 bp, Artificial
  Synthetic oligonucleotide
ctcatggtcatacataatagaaactacaaattcagagaacgggacatgctaccccggtga

SEQ ID NO: 64388 - DNA, 60 bp, Artificial
  Synthetic oligonucleotide
gctaagttcagtttcttcatttgaaaaatttgtaattttcccaaaagaaagctcatggcc

SEQ ID NO: 64389 - DNA, 60 bp, Artificial
  Synthetic oligonucleotide
tctgcagcctaaacggaatagctcccctgcaactagggaaatgcaatgtagcaggatggc

SEQ ID NO: 64390 - DNA, 60 bp, Artificial
  Synthetic oligonucleotide
gaatagctcccctgcaactagggaaatgcaatgtagcaggatggcttcttggcaatccgg

SEQ ID NO: 64391 - DNA, 60 bp, Artificial
  Synthetic oligonucleotide
gcaggatggcttcttggcaatccggagtgtgatcttctactgactgcaaactcatggtca

SEQ ID NO: 64392 - DNA, 60 bp, Artificial
  Synthetic oligonucleotide
agagcaggatgcagttttcttctctaactgtgaatgtaagaggctcagggatgagaatac

SEQ ID NO: 64393 - DNA, 60 bp, Artificial
  Synthetic oligonucleotide
ccaggaggggaggtgagaaatgatgatgttgaccagagtctaatcattgctgctagaaac

SEQ ID NO: 64394 - DNA, 60 bp, Artificial
  Synthetic oligonucleotide
cctccagacattgaaaataagagtacatgaaggatatgaggagttcacaatggttgggcg

SEQ ID NO: 64395 - DNA, 60 bp, Artificial
  Synthetic oligonucleotide
tgtcacagtctcgcactcgcgagatactgacaaaaaccactgtggaccacatggccataa

SEQ ID NO: 64396 - DNA, 60 bp, Artificial
  Synthetic oligonucleotide
caggactgtaagattgctcccttaatggtggcatacatgctggaaagagaactggtgcgc

SEQ ID NO: 64397 - DNA, 60 bp, Artificial
  Synthetic oligonucleotide
acttccggaatcaagttaaaatacgccgcagggttgacataaacccgggccatgcagatc

SEQ ID NO: 64398 - DNA, 60 bp, Artificial
  Synthetic oligonucleotide
ctgattctaggcaaagaagacaaaagatatgggccagcacttagcatcaatgagctgagc

SEQ ID NO: 64399 - DNA, 60 bp, Artificial
  Synthetic oligonucleotide
gtaattcagggatcatgaaaacagaaggaacacttgagaactgtgagaccaaatgccaaa

SEQ ID NO: 64400 - DNA, 58 bp, Artificial
  Synthetic oligonucleotide
cagacaatggattgggtgatgccccattccttgatcggctccgccgagatcaaaagtc

SEQ ID NO: 64401 - DNA, 60 bp, Artificial
  Synthetic oligonucleotide
gtgtcaagctttcaggtagactgctttctttggcatgttcgcaaacggtttgcagactgt

SEQ ID NO: 64402 - DNA, 60 bp, Artificial
  Synthetic oligonucleotide
ttgtgtttacgctcaccgtgcccagtgagcgaggactgcagcgtagacgctttgtccaaa

SEQ ID NO: 64403 - DNA, 60 bp, Artificial
  Synthetic oligonucleotide
ctctagctgtaacatggtggaacaggaatgggccaacagcaagcacaattcactacccaa

SEQ ID NO: 64404 - DNA, 60 bp, Artificial
  Synthetic oligonucleotide
gagtacacagagtgccattgacgggatcactaacaaagtaaattctgttattgaaaagat

SEQ ID NO: 64405 - DNA, 60 bp, Artificial
  Synthetic oligonucleotide
cgcacttggacaggggaccacactagacaacaaacattcgaatggtacaatacacgatag

SEQ ID NO: 64406 - DNA, 60 bp, Artificial
  Synthetic oligonucleotide
cgggcaggggaccacactagacaacaaacattcaaatgacacagtacatgatagaatccc

SEQ ID NO: 64407 - DNA, 60 bp, Artificial
  Synthetic oligonucleotide
cgggcaggggaccacactagacaacaaacattcaaatggcacagtacatgatagaatccc

SEQ ID NO: 64408 - DNA, 60 bp, Artificial
  Synthetic oligonucleotide
ggggatcaatgatcggaatttctggagaggtgaaaatggacgaagaacaaggattgcata

SEQ ID NO: 64409 - DNA, 60 bp, Artificial
  Synthetic oligonucleotide
tggattgggtgatgccccattccttgatcggcttcgccgagatcaaaagtccctaaaagg

SEQ ID NO: 64410 - DNA, 60 bp, Artificial
  Synthetic oligonucleotide
agaatgtgctccctaatgcaaggttcaacacttcccagaaggtctggagccgcaggtgct

SEQ ID NO: 64411 - DNA, 60 bp, Artificial
  Synthetic oligonucleotide
gcaagccttacaactactacttgaagtagaacaagagataagaactttctcgtttcagct

SEQ ID NO: 64412 - DNA, 60 bp, Artificial
  Synthetic oligonucleotide
tgagagggtcagttgctcacaaatcttgtctacctgcctgtgtgtatgggcctgcagtat

SEQ ID NO: 64413 - DNA, 60 bp, Artificial
  Synthetic oligonucleotide
tatgagcattggggtaacagtgataaagaacaacatgataaacaatgaccttgggccagc

SEQ ID NO: 64414 - DNA, 60 bp, Artificial
  Synthetic oligonucleotide
gagcattggagtaacagtgataaagaacaacatgataaacaatgaccttggaccagcaac

SEQ ID NO: 64415 - DNA, 60 bp, Artificial
  Synthetic oligonucleotide
gtcagctgatatgagcattggagtaacagtgataaagaacaacatgataaacaatgacct

SEQ ID NO: 64416 - DNA, 57 bp, Artificial
  Synthetic oligonucleotide
gctcaccgtgcccagtgagcgaggactgcagcgtagacgctttgtccagaatgcccc

SEQ ID NO: 64417 - DNA, 60 bp, Artificial
  Synthetic oligonucleotide
aaaatgagaggacacttgactttcatgattctaatgtcaagaatctgtatgataaagtca

SEQ ID NO: 64418 - DNA, 60 bp, Artificial
  Synthetic oligonucleotide
tttgcagggaagaacacagatcttgaggctctcatggagtggctaaagacaagaccaatc

SEQ ID NO: 64419 - DNA, 60 bp, Artificial
  Synthetic oligonucleotide
gagattctacatccaaatgtgcactgaactcaaactcagtgactatgagggacggctaat

SEQ ID NO: 64420 - DNA, 60 bp, Artificial
  Synthetic oligonucleotide
aagattctacatccaaatgtgcactgaactcaaactcagtgactatgagggacgactaat

SEQ ID NO: 64421 - DNA, 60 bp, Artificial
  Synthetic oligonucleotide
gattctacatccaaatgtgcactgaactcaaactcagtgactatgagggacgactaattc

SEQ ID NO: 64422 - DNA, 60 bp, Artificial
  Synthetic oligonucleotide
gattctacatccaaatgtgcactgaactcaaactcagtgactatgagggacggctaatcc

SEQ ID NO: 64423 - DNA, 58 bp, Artificial
  Synthetic oligonucleotide
taatagattttctcaaggatgtgatggaatcaatggataaagaggaaatggagataac

SEQ ID NO: 64424 - DNA, 53 bp, Artificial
  Synthetic oligonucleotide
ttgctttgaattttaccacaaatgtgatgacacgtgcatggagagcgtcaaaa

SEQ ID NO: 64425 - DNA, 52 bp, Artificial
  Synthetic oligonucleotide
tgctttgaattttaccacaaatgtgatgacacgtgcatggagagcgtcaaaa

SEQ ID NO: 64426 - DNA, 60 bp, Artificial
  Synthetic oligonucleotide
gagaaagtaaaaggccaattaaagaataatgccaaagaaataggaaatgggtgttttgaa

SEQ ID NO: 64427 - DNA, 60 bp, Artificial
  Synthetic oligonucleotide
gagaaagtaaaaagccaattaaagaataatgccaaagaaataggaaatgggtgttttgaa

SEQ ID NO: 64428 - DNA, 60 bp, Artificial
  Synthetic oligonucleotide
agtaaagatgaatccaaatcaaaaaataataacgattggctctgtttctctcaccattgc

SEQ ID NO: 64429 - DNA, 60 bp, Artificial
  Synthetic oligonucleotide
ggagtgaagatgaatccaaatcaaaaaataataacgattggctctgtttctctcaccatt

SEQ ID NO: 64430 - DNA, 60 bp, Artificial
  Synthetic oligonucleotide
taatgaatcggctgatatgagcattggggtaacagtgataaagaacaacatgataaacaa

SEQ ID NO: 64431 - DNA, 60 bp, Artificial
  Synthetic oligonucleotide
agttcaagttgtcacgatgggaaagcatggctgcatgtctgtattactgggcacgataga

SEQ ID NO: 64432 - DNA, 60 bp, Artificial
  Synthetic oligonucleotide
ggcacatccgcaaacgatttgcagacaatggattgggtgatgccccattccttgatcggc

SEQ ID NO: 64433 - DNA, 59 bp, Artificial
  Synthetic oligonucleotide
ggcacatccgcaaacgatttgcagacaatggattgggtgatgccccattccttgatcgg

SEQ ID NO: 64434 - DNA, 60 bp, Artificial
  Synthetic oligonucleotide
atgacacttgactttcatgattctaatgtcaagaatctatatgataaagtcagaatgcag

SEQ ID NO: 64435 - DNA, 60 bp, Artificial
  Synthetic oligonucleotide
atgttgtgcgaaaaatgatgactaattcacaagacacagagctctctttcacaattactg

SEQ ID NO: 64436 - DNA, 60 bp, Artificial
  Synthetic oligonucleotide
atcactaatgagaacgggagacctccatttcctccaaaacagaaacggaaaatggcgaga

SEQ ID NO: 64437 - DNA, 60 bp, Artificial
  Synthetic oligonucleotide
cagttattctgctggtgcacttgccagttgcatgggcctcatatacaacaggatgggggc

SEQ ID NO: 64438 - DNA, 60 bp, Artificial
  Synthetic oligonucleotide
aacaaggtaaattctgtgattgaaaagatgaacacccaatttgaagctgttgagaaagaa

SEQ ID NO: 64439 - DNA, 60 bp, Artificial
  Synthetic oligonucleotide
ggcgtcccaaggcaccaaacggtcttatgaacaaatggaaactgatggggatcgccagaa

SEQ ID NO: 64440 - DNA, 60 bp, Artificial
  Synthetic oligonucleotide
ctccaaatcgcaggtcaatagacaggtcatagttgacaacaacaactggtctggttactc

SEQ ID NO: 64441 - DNA, 60 bp, Artificial
  Synthetic oligonucleotide
ggggcaatagctggctttatagaaggaggatggcaaggaatggttgatggttggtatgga

SEQ ID NO: 64442 - DNA, 60 bp, Artificial
  Synthetic oligonucleotide
gtgatttttgaccggctagagaccctaatattactaagggctttcaccgaagagggagca

SEQ ID NO: 64443 - DNA, 60 bp, Artificial
  Synthetic oligonucleotide
accggctagagaccctaatattactaagggctttcaccgaagagggagcaattgttggcg

SEQ ID NO: 64444 - DNA, 60 bp, Artificial
  Synthetic oligonucleotide
tcagaggaacaagagtggttccaagaggacaactgtccaccagaggagtccaagttgctt

SEQ ID NO: 64445 - DNA, 50 bp, Artificial
  Synthetic oligonucleotide
atgaagggtcttatttcttcggagacaatgcagaggagtatgacagttaa

SEQ ID NO: 64446 - DNA, 50 bp, Artificial
  Synthetic oligonucleotide
atgaagggtcttatttcttcggagacaatgcagaggagtatgacaattga

SEQ ID NO: 64447 - DNA, 60 bp, Artificial
  Synthetic oligonucleotide
gtgaatggacaaggaggtagaatggaattctcgtggactatcttggatatatgggacacc

SEQ ID NO: 64448 - DNA, 60 bp, Artificial
  Synthetic oligonucleotide
gggacaatgcgcaggcttgccgaccaaagtctcccgccgaacttctcctgccttgagaat

SEQ ID NO: 64449 - DNA, 60 bp, Artificial
  Synthetic oligonucleotide
caagcttcatcagaggaacaagagtggttccaagaggacaactgtccaccagaggagtcc

SEQ ID NO: 64450 - DNA, 55 bp, Artificial
  Synthetic oligonucleotide
caaatgcagacacactatgtataggttatcatgcaaataattcaactgacactgt

SEQ ID NO: 64451 - DNA, 60 bp, Artificial
  Synthetic oligonucleotide
gtgatgatgaatgcatgaatagcgtaaagaatgggacatatgattatcccaagtatgaag

SEQ ID NO: 64452 - DNA, 60 bp, Artificial
  Synthetic oligonucleotide
aggcttctaactgtgccagaatggtcatatataatggagaaagaaaatccaagaaatggt

SEQ ID NO: 64453 - DNA, 60 bp, Artificial
  Synthetic oligonucleotide
gaatgcatgaacagtgtgaagaatgggacatatgattatcccaagtatgaagaggagtct

SEQ ID NO: 64454 - DNA, 60 bp, Artificial
  Synthetic oligonucleotide
acaaggtaaattctgtgattgaaaagatgaacacccaattcgaagctgttggaaaagaat

SEQ ID NO: 64455 - DNA, 60 bp, Artificial
  Synthetic oligonucleotide
ccttgctatttacgctacagtagcaggttccctgtcactggcaatcatgatggctgggat

SEQ ID NO: 64456 - DNA, 60 bp, Artificial
  Synthetic oligonucleotide
agtgaaattgagcaacatgggggtttatcaaatacttgctatatacgctacagtggcagg

SEQ ID NO: 64457 - DNA, 60 bp, Artificial
  Synthetic oligonucleotide
agcgcaaaatgccataagcaccacatttccttatactggagatcctccatacagccatgg

SEQ ID NO: 64458 - DNA, 60 bp, Artificial
  Synthetic oligonucleotide
gcgcaaaatgccataagcacaacattcccatatactggagatcctccatacagccatggg

SEQ ID NO: 64459 - DNA, 60 bp, Artificial
  Synthetic oligonucleotide
aaaatgccataagcaccacattcccttatactggagatcctccatacagccatggaacag

SEQ ID NO: 64460 - DNA, 60 bp, Artificial
  Synthetic oligonucleotide
ttcccttatactggagatcctccatacagccatggaacaggaacagggtacaccatggac

SEQ ID NO: 64461 - DNA, 60 bp, Artificial
  Synthetic oligonucleotide
cccttatactggagatcctccatacagccatggaacaggaacagggtacaccatggacac

SEQ ID NO: 64462 - DNA, 60 bp, Artificial
  Synthetic oligonucleotide
gaaagctaatgtactgattgggcaaggagacgtagtgttggtaatgaaacggaaacggga

SEQ ID NO: 64463 - DNA, 60 bp, Artificial
  Synthetic oligonucleotide
ggctaatgtgctaattgggcagggagacgtagtgttggtaatgaaacggaaacgggactc

SEQ ID NO: 64464 - DNA, 60 bp, Artificial
  Synthetic oligonucleotide
gattatgaggggcgactgatccagaacagcttaacaatagagagaatggtgctctctgct

SEQ ID NO: 64465 - DNA, 60 bp, Artificial
  Synthetic oligonucleotide
tgaggggcgactgatccagaacagcttaacaatagagagaatggtgctctctgcttttga

SEQ ID NO: 64466 - DNA, 58 bp, Artificial
  Synthetic oligonucleotide
tgaggggcgactgatccagaacagcttaacaatagagagaatggtgctctctgctttt

SEQ ID NO: 64467 - DNA, 60 bp, Artificial
  Synthetic oligonucleotide
ccgcaaacaagttgcagaccaagaactaggtgatgccccattccttgatcggcttcgccg

SEQ ID NO: 64468 - DNA, 60 bp, Artificial
  Synthetic oligonucleotide
ccccgaagcagtggaatacagaaattggtcaaagccacagtgtcaaattacagggtttgc

SEQ ID NO: 64469 - DNA, 60 bp, Artificial
  Synthetic oligonucleotide
gatctcatctttctggcacggtctgcactcatattgagagggtcagttgctcacaaatcc

SEQ ID NO: 64470 - DNA, 60 bp, Artificial
  Synthetic oligonucleotide
gaacacaggagtcagaatgtgtttgtatcaatgggacttgcacagtagtaatgactgatg

SEQ ID NO: 64471 - DNA, 60 bp, Artificial
  Synthetic oligonucleotide
gtatctgcagagacaactggaagggctctaataggcccgttatagacataaatatggcag

SEQ ID NO: 64472 - DNA, 60 bp, Artificial
  Synthetic oligonucleotide
cgcgcagagactggaagatgtctttgcagggaagaacacagatcttgaggctctcatgga

SEQ ID NO: 64473 - DNA, 60 bp, Artificial
  Synthetic oligonucleotide
gcgcagagactggaagatgtctttgcagggaagaacacagatcttgaggctctcatggag

SEQ ID NO: 64474 - DNA, 60 bp, Artificial
  Synthetic oligonucleotide
tacccccgataccctggtgtcagatgtatttgcagagacaactggaaaggctctaatagg

SEQ ID NO: 64475 - DNA, 60 bp, Artificial
  Synthetic oligonucleotide
tatcctcgatatcctggcgtcagatgtatctgcagagacaactggaaaggctctaatagg

SEQ ID NO: 64476 - DNA, 60 bp, Artificial
  Synthetic oligonucleotide
cccgataccctggtgtcagatgtatttgcagagacaactggaaaggctctaataggcccg

SEQ ID NO: 64477 - DNA, 60 bp, Artificial
  Synthetic oligonucleotide
gcgaatgggccaggcgatcatggaaaagaacatcatactgaaagcgaacttcagtgtgat

SEQ ID NO: 64478 - DNA, 60 bp, Artificial
  Synthetic oligonucleotide
cgaatgggccaggcgatcatggaaaagaacatcatactgaaagcgaacttcagtgtgatc

SEQ ID NO: 64479 - DNA, 60 bp, Artificial
  Synthetic oligonucleotide
cgggcaagggaccacgctagacaacaggcattcaaatgacacaatacatgataggacccc

SEQ ID NO: 64480 - DNA, 60 bp, Artificial
  Synthetic oligonucleotide
tgacacaatacatgataggacccctcatcgaactctattaatgaatgagctgggtgtccc

SEQ ID NO: 64481 - DNA, 60 bp, Artificial
  Synthetic oligonucleotide
taggacccctcatcgaactctattaatgaatgagctgggtgtcccgtttcatttgggaac

SEQ ID NO: 64482 - DNA, 60 bp, Artificial
  Synthetic oligonucleotide
tgggtgtcccgtttcatttgggaaccagacaagtatgtatagcatggtctagttcaagtt

SEQ ID NO: 64483 - DNA, 60 bp, Artificial
  Synthetic oligonucleotide
gggtgtcccgtttcatttgggaaccagacaagtatgtatagcatggtctagttcaagttg

SEQ ID NO: 64484 - DNA, 60 bp, Artificial
  Synthetic oligonucleotide
gatgggaaagcatggctgcatgtctgtattactgggcacgatagaaatgcaaccgctagc

SEQ ID NO: 64485 - DNA, 60 bp, Artificial
  Synthetic oligonucleotide
gcacgatagaaatgcaaccgctagcttcatttacaatgggaggcttgtagacagtattag

SEQ ID NO: 64486 - DNA, 51 bp, Artificial
  Synthetic oligonucleotide
acagtattagttcatggtccaaaaacatcctaaggacacaggagtcggaat

SEQ ID NO: 64487 - DNA, 59 bp, Artificial
  Synthetic oligonucleotide
acacccagggagaatgacagatctagcagtagtgattgccggaatcctaacaatgaaaa

SEQ ID NO: 64488 - DNA, 60 bp, Artificial
  Synthetic oligonucleotide
acacccagggagaatgacagatctagcagtagtgattgccggaatcctaacaatgaaaaa

SEQ ID NO: 64489 - DNA, 60 bp, Artificial
  Synthetic oligonucleotide
acatttgggtgacgagagaaccttatgcgtcatgtgataatagcaagtgttatcagtttg

SEQ ID NO: 64490 - DNA, 60 bp, Artificial
  Synthetic oligonucleotide
gcacccttttccaaggacaattcaattcgactttctgctggtggggacatttgggtgacg

SEQ ID NO: 64491 - DNA, 60 bp, Artificial
  Synthetic oligonucleotide
gtttgcacccttttccaaggacaattcaattcgactttctgctggtggggacatttgggt

SEQ ID NO: 64492 - DNA, 60 bp, Artificial
  Synthetic oligonucleotide
accactatagagaaagagatatgccctaaattggtggaatacagaaattggtcaaagccg

SEQ ID NO: 64493 - DNA, 60 bp, Artificial
  Synthetic oligonucleotide
actaacaccactatagagaaagagatatgccctaaattggtggaatacagaaattggtca

SEQ ID NO: 64494 - DNA, 60 bp, Artificial
  Synthetic oligonucleotide
catgtgaaccaatgataatagaaaggaacataacagaaatagtgtatgtgactaacacca

SEQ ID NO: 64495 - DNA, 61 bp, Artificial
  Synthetic oligonucleotide
catgtgaaccaatgataatagaaaggaacataacagaaatagtgtatgtgactaacaccac

SEQ ID NO: 64496 - DNA, 60 bp, Artificial
  Synthetic oligonucleotide
gcattttaagcaacatgagtgcagttcccccccaaacaatcaagtaatgccatgtgaacc

SEQ ID NO: 64497 - DNA, 60 bp, Artificial
  Synthetic oligonucleotide
tatcagtttgcactcgggcaagggaccacgctagacaacaggcattcaaatgacacaata

SEQ ID NO: 64498 - DNA, 60 bp, Artificial
  Synthetic oligonucleotide
gagaaccttatgcgtcatgtgataatagcaagtgttatcagtttgcactcgggcaaggga

SEQ ID NO: 64499 - DNA, 60 bp, Artificial
  Synthetic oligonucleotide
ttcaggtacctatggaacaggctcatggcccgatggagcagacatcaatctcatgccaat

SEQ ID NO: 64500 - DNA, 60 bp, Artificial
  Synthetic oligonucleotide
ggaacaggctcatggcccgatggagcagacatcaatctcatgccaatataagctttcgca

SEQ ID NO: 64501 - DNA, 60 bp, Artificial
  Synthetic oligonucleotide
tattctggcattttttctgttgaaggtaaaagctgcatcaatagatgcttttatgtggag

SEQ ID NO: 64502 - DNA, 60 bp, Artificial
  Synthetic oligonucleotide
tctgttgaaggtaaaagctgcatcaatagatgcttttatgtggagttaataagagggagg

SEQ ID NO: 64503 - DNA, 60 bp, Artificial
  Synthetic oligonucleotide
ttcaaagtcattggcggttggtccatacctaactccaaatcgcagataaatagacaagtc

SEQ ID NO: 64504 - DNA, 60 bp, Artificial
  Synthetic oligonucleotide
cattggcggttggtccatacctaactccaaatcgcagataaatagacaagtcatagttga

SEQ ID NO: 64505 - DNA, 60 bp, Artificial
  Synthetic oligonucleotide
tatggatgggaagaacgatcatcgaggattcacgctcaggttatgaaacattcaaagtca

SEQ ID NO: 64506 - DNA, 60 bp, Artificial
  Synthetic oligonucleotide
cgatcatcgaggattcacgctcaggttatgaaacattcaaagtcattggcggttggtcca

SEQ ID NO: 64507 - DNA, 56 bp, Artificial
  Synthetic oligonucleotide
gcagaaagtagcaggttccctttgcatcagaatggaccaggcaataatggataaaa

SEQ ID NO: 64508 - DNA, 60 bp, Artificial
  Synthetic oligonucleotide
cccaagcagaaagtggcaggctccctttgcatcagaatggaccaggcaataatggataag

SEQ ID NO: 64509 - DNA, 55 bp, Artificial
  Synthetic oligonucleotide
cagaaagtggcaggttccctttgcatcagaatggaccaggcaataatggataaaa

SEQ ID NO: 64510 - DNA, 60 bp, Artificial
  Synthetic oligonucleotide
gagaggggaccagatatgcattggataccatgccaataattccacagagatggtcgacac

SEQ ID NO: 64511 - DNA, 60 bp, Artificial
  Synthetic oligonucleotide
gtgagaggggaccagatatgcattggataccatgccaataattccacagagatggtcgac

SEQ ID NO: 64512 - DNA, 60 bp, Artificial
  Synthetic oligonucleotide
agaggatcagttgcacacaagtcttgcctgcctgcttgtgtgtatgggcttgcagtagcg

SEQ ID NO: 64513 - DNA, 60 bp, Artificial
  Synthetic oligonucleotide
ccaaatgtgcactgaactcaaactcagtgactatgagggacgactaatccaaaatagcat

SEQ ID NO: 64514 - DNA, 60 bp, Artificial
  Synthetic oligonucleotide
gattctacatccagatgtgcactgaactcaaactcagtgactatgagggacgactgattc

SEQ ID NO: 64515 - DNA, 60 bp, Artificial
  Synthetic oligonucleotide
aagattctacatccagatgtgcactgaactcaaactcagtgactatgagggacgactgat

SEQ ID NO: 64516 - DNA, 60 bp, Artificial
  Synthetic oligonucleotide
tgagattagggcatccgtcgggaagatgattgatggaattgggagattctacatccagat

SEQ ID NO: 64517 - DNA, 60 bp, Artificial
  Synthetic oligonucleotide
ctgagattagggcatccgtcgggaagatgattgatggaattgggagattctacatccaga

SEQ ID NO: 64518 - DNA, 60 bp, Artificial
  Synthetic oligonucleotide
ggatcgccagaatgcaactgagattagggcatccgtcgggaagatgattgatggaattgg

SEQ ID NO: 64519 - DNA, 60 bp, Artificial
  Synthetic oligonucleotide
gggcatccgtcgggaagatgattgatggaattgggagattctacatccagatgtgcactg

SEQ ID NO: 64520 - DNA, 60 bp, Artificial
  Synthetic oligonucleotide
cgccagaatgcaactgagattagggcatccgtcgggaagatgattgatggaattgggaga

SEQ ID NO: 64521 - DNA, 60 bp, Artificial
  Synthetic oligonucleotide
catccgtcgggaagatgattgatggaattgggagattctacatccagatgtgcactgaac

SEQ ID NO: 64522 - DNA, 60 bp, Artificial
  Synthetic oligonucleotide
agaacgccagaatgcaactgagatcagagcatccgtcgggaagatgattgatggaattgg

SEQ ID NO: 64523 - DNA, 60 bp, Artificial
  Synthetic oligonucleotide
gccagaatgcaactgaaatcagagcatccgtcgggaagatgattgatggaattggacgat

SEQ ID NO: 64524 - DNA, 60 bp, Artificial
  Synthetic oligonucleotide
ggcgattaattcaaaatagcataacaatagagagaatggtgctctctgcttttgatgaga

SEQ ID NO: 64525 - DNA, 60 bp, Artificial
  Synthetic oligonucleotide
atttaccagattttggcgatctattcaactgccgccagttcattggtactgttggtctcc

SEQ ID NO: 64526 - DNA, 60 bp, Artificial
  Synthetic oligonucleotide
gagataacattccatggggccaaagaaatagcgctcagttactctgctggtgcacttgcc

SEQ ID NO: 64527 - DNA, 54 bp, Artificial
  Synthetic oligonucleotide
ttttgtcatgagagagccattcatttcatgctctcacttggagtgcagaacctt

SEQ ID NO: 64528 - DNA, 60 bp, Artificial
  Synthetic oligonucleotide
acaggaatgaactgcatgaggccttgtttctgggtagagttaatcagagggcaacccaag

SEQ ID NO: 64529 - DNA, 60 bp, Artificial
  Synthetic oligonucleotide
tggataggaagaactaaaagtatcagctctagaagtggttttgagatgatttgggatcct

SEQ ID NO: 64530 - DNA, 60 bp, Artificial
  Synthetic oligonucleotide
gtacatttgcagccacaaatgcagacacattatgtataggttatcatgcaaataattcaa

SEQ ID NO: 64531 - DNA, 60 bp, Artificial
  Synthetic oligonucleotide
ttcagctacagatgcagacacaatatgtataggctaccatgcgaacaattcaaccgacac

SEQ ID NO: 64532 - DNA, 60 bp, Artificial
  Synthetic oligonucleotide
ctaatcctgttatgtgcactttcagctacagatgcagacacaatatgtataggctaccat

SEQ ID NO: 64533 - DNA, 60 bp, Artificial
  Synthetic oligonucleotide
aatcctgttatgtgcactttcagctacagatgcagacacaatatgtataggctaccatgc

SEQ ID NO: 64534 - DNA, 60 bp, Artificial
  Synthetic oligonucleotide
aataagtacctagaagagcatcccagtgctgggaaggatcctaagaaaactggaggaccc

SEQ ID NO: 64535 - DNA, 60 bp, Artificial
  Synthetic oligonucleotide
gtggccatggtattttcacaagaggattgcatgatcaaagcagtccgaggcgatctaaac

SEQ ID NO: 64536 - DNA, 60 bp, Artificial
  Synthetic oligonucleotide
cgtggccatggtattttcacaagaggattgcatgatcaaagcagtccgaggcgatctaaa

SEQ ID NO: 64537 - DNA, 60 bp, Artificial
  Synthetic oligonucleotide
atgtgcactgaactccaactcagtgactatgaagggagactgatccagaacagcataaca

SEQ ID NO: 64538 - DNA, 60 bp, Artificial
  Synthetic oligonucleotide
ccctgtcactggcaatcatgatagctgggatctctttatggatgtgctccaacgggtctc

SEQ ID NO: 64539 - DNA, 60 bp, Artificial
  Synthetic oligonucleotide
cttttggtcctgtccatttcagaaaccaagtcaaaatacgccgaagggttgatataaacc

SEQ ID NO: 64540 - DNA, 60 bp, Artificial
  Synthetic oligonucleotide
ggagataagaactttctcatttcagcttatttaatgataaaaaacacccttgtttctact

SEQ ID NO: 64541 - DNA, 60 bp, Artificial
  Synthetic oligonucleotide
gcgaacaattcaactgacactgtagacacagtactagaaaagaatgtaacagtaacacac

SEQ ID NO: 64542 - DNA, 60 bp, Artificial
  Synthetic oligonucleotide
tattcatcaaagaggggaaaattgttcacattagtccattgtcagggagtgctcaacaca

SEQ ID NO: 64543 - DNA, 60 bp, Artificial
  Synthetic oligonucleotide
gattcacgtttaggttatgagaccttcaaggtcattggtggctggtccacacctaactcc

SEQ ID NO: 64544 - DNA, 60 bp, Artificial
  Synthetic oligonucleotide
ggtccggttactctggtatcttctctgttgagagcaaaagctgcgtcaataggtgtttct

SEQ ID NO: 64545 - DNA, 60 bp, Artificial
  Synthetic oligonucleotide
gcgtcaataggtgtttctatgtggagttgataagggggagaccacaggagactagggtat

SEQ ID NO: 64546 - DNA, 60 bp, Artificial
  Synthetic oligonucleotide
gttggtgatacacccagaaatgacgacagctctagcagtagcaattgcagagatcctaat

SEQ ID NO: 64547 - DNA, 59 bp, Artificial
  Synthetic oligonucleotide
agatcctaataatgaaagagggaacccaggagtgaagggttgggcctttgacaatggaa

SEQ ID NO: 64548 - DNA, 60 bp, Artificial
  Synthetic oligonucleotide
ctcaaaatattctcagaacacaggagtcggaatgtgtttgtatcaatggaacttgcacag

SEQ ID NO: 64549 - DNA, 60 bp, Artificial
  Synthetic oligonucleotide
gcaactgctagtttcatttatgacggaaagcttgctgacagcattggttcgtggtctcaa

SEQ ID NO: 64550 - DNA, 60 bp, Artificial
  Synthetic oligonucleotide
cccctgcaatcaaccaagtgaccccatgtgagccaatcataatagagaggaacatgacag

SEQ ID NO: 64551 - DNA, 60 bp, Artificial
  Synthetic oligonucleotide
ggtcaaagccgcagtgtcaaatcacaggatttgcacctttctctaaggacaattcaattc

SEQ ID NO: 64552 - DNA, 60 bp, Artificial
  Synthetic oligonucleotide
ccatttaggaaccaaacaagtatgcatagcatggtctagctcaagttgccacgatggaag

SEQ ID NO: 64553 - DNA, 60 bp, Artificial
  Synthetic oligonucleotide
gctcaacacatagaggagtgttcctgttaccctcaataccctgatgtcaggtgtgtctgc

SEQ ID NO: 64554 - DNA, 60 bp, Artificial
  Synthetic oligonucleotide
agcttcgagcagataacgttcttgcaagcattgcaactcttacttgaagttgagagtgag

SEQ ID NO: 64555 - DNA, 60 bp, Artificial
  Synthetic oligonucleotide
aaactgaaaacagcttcgagcagataacgttcttgcaagcattgcaactcttacttgaag

SEQ ID NO: 64556 - DNA, 60 bp, Artificial
  Synthetic oligonucleotide
ggataatgctcaaagcaaacttctctgtcctatttgatcaactggaaacactagtctcac

SEQ ID NO: 64557 - DNA, 60 bp, Artificial
  Synthetic oligonucleotide
aaacttctctgtcctatttgatcaactggaaacactagtctcactgagggctttcacaga

SEQ ID NO: 64558 - DNA, 60 bp, Artificial
  Synthetic oligonucleotide
ctccctttgatgatagactcagaagagatcaaaaggcattaaagggaagaagcagcacac

SEQ ID NO: 64559 - DNA, 53 bp, Artificial
  Synthetic oligonucleotide
cattaaagggaagaagcagcacacttgggctcgacctgcgagtggccacaatg

SEQ ID NO: 64560 - DNA, 53 bp, Artificial
  Synthetic oligonucleotide
cattaaagggaagaagcagcacacttgggctcgatctgcgagtggccacaatg

SEQ ID NO: 64561 - DNA, 60 bp, Artificial
  Synthetic oligonucleotide
ctcaaaattgcaattgcatccagccctgcacctcggtacattactgatatgagcattgag

SEQ ID NO: 64562 - DNA, 60 bp, Artificial
  Synthetic oligonucleotide
gcatccagccctgcacctcggtacattactgatatgagcattgaggaaataagcagggaa

SEQ ID NO: 64563 - DNA, 60 bp, Artificial
  Synthetic oligonucleotide
atccagccctgcacctcggtacattactgatatgagcatagaggaaataagcagggattg

SEQ ID NO: 64564 - DNA, 60 bp, Artificial
  Synthetic oligonucleotide
ccagccctgcacctcggtacattactgatatgagcatagaggaaataagcagggattggt

SEQ ID NO: 64565 - DNA, 60 bp, Artificial
  Synthetic oligonucleotide
attatggacaagaggataatgctcaaagcaaacttctctgtcctatttgatcaactggaa

SEQ ID NO: 64566 - DNA, 60 bp, Artificial
  Synthetic oligonucleotide
gttatctatggcacataagaaagctactcagcatgagagacatgtgtgatgctccctttg

SEQ ID NO: 64567 - DNA, 60 bp, Artificial
  Synthetic oligonucleotide
gcagggtgacaaatacataatggattccaacacgataacctcgtttcaggtagattgcta

SEQ ID NO: 64568 - DNA, 60 bp, Artificial
  Synthetic oligonucleotide
aaatatacagagattcgcttggggagttcgtgatgagaatgggggacctccactccctcc

SEQ ID NO: 64569 - DNA, 60 bp, Artificial
  Synthetic oligonucleotide
cacagacgatggcgccattgtagctgaaatatctcccattccttctatgccaggacattc

SEQ ID NO: 64570 - DNA, 60 bp, Artificial
  Synthetic oligonucleotide
ctttcacagacgatggcgccattgtagctgaaatatctcccattccttctatgccaggac

SEQ ID NO: 64571 - DNA, 60 bp, Artificial
  Synthetic oligonucleotide
tcaactggaaacactagtctcactgagggctttcacagacgatggcgccattgtagctga

SEQ ID NO: 64572 - DNA, 60 bp, Artificial
  Synthetic oligonucleotide
gtcctatttgatcaactggaaacactagtctcactgagggctttcacagacgatggcgcc

SEQ ID NO: 64573 - DNA, 60 bp, Artificial
  Synthetic oligonucleotide
atcctcatcagtggacttgaatggaatgataactcaattcgagcgtctgaaaatatacag

SEQ ID NO: 64574 - DNA, 60 bp, Artificial
  Synthetic oligonucleotide
gagataacattccatggggccaaagaaatagcgctcagttattctgctggtgcacttgcc

SEQ ID NO: 64575 - DNA, 60 bp, Artificial
  Synthetic oligonucleotide
gccagaatgctactgagatcagagcatctgttgggagaatggttggtggaatcggaaggt

SEQ ID NO: 64576 - DNA, 57 bp, Artificial
  Synthetic oligonucleotide
agaatgccactgagatcagagcatctgttgggagaatggttggtggaatcgggagat

SEQ ID NO: 64577 - DNA, 60 bp, Artificial
  Synthetic oligonucleotide
ccactcactccaaaacagaaacggaaaatggcgagaacaattaggtcaaaagttcgaaga

SEQ ID NO: 64578 - DNA, 60 bp, Artificial
  Synthetic oligonucleotide
gattatgaggggcgattgatccagaacagcttaacaatagagagaatggtgctctctgct

SEQ ID NO: 64579 - DNA, 60 bp, Artificial
  Synthetic oligonucleotide
gattatgaggggcggctgatccagaacagcttaacaatagagagaatggtgctctctgct

SEQ ID NO: 64580 - DNA, 60 bp, Artificial
  Synthetic oligonucleotide
gtgaaagggtgggcctttgatgatggaaatgacgtgtggatgggaagaacgatcagcgag

SEQ ID NO: 64581 - DNA, 60 bp, Artificial
  Synthetic oligonucleotide
gtaaaaggctgggcctttgatgatggaaatgacgtgtggatgggaagaacgatcagcgag

SEQ ID NO: 64582 - DNA, 60 bp, Artificial
  Synthetic oligonucleotide
gtgaaaggctgggcctttgatgatggaaatgacgtgtggatgggaagaacgatcagcgag

SEQ ID NO: 64583 - DNA, 60 bp, Artificial
  Synthetic oligonucleotide
gcggggaaggatcctaagaaaactggaggacccatatacaagagagtaggtggaaagtgg

SEQ ID NO: 64584 - DNA, 60 bp, Artificial
  Synthetic oligonucleotide
gcggggaaggatcctaagaaaactggaggacccatatacaagagagtaggtgggaagtgg

SEQ ID NO: 64585 - DNA, 60 bp, Artificial
  Synthetic oligonucleotide
gcggggaaggatcctaagaaaactggaggacccatatacaagagagtaaatggaaagtgg

SEQ ID NO: 64586 - DNA, 60 bp, Artificial
  Synthetic oligonucleotide
ctggtttcattgaagggggatggaccggaatgatagatggatggtatggttatcatcatc

SEQ ID NO: 64587 - DNA, 60 bp, Artificial
  Synthetic oligonucleotide
ggggatggaccggaatgatagatggatggtatggttatcatcatcagaatgaacagggat

SEQ ID NO: 64588 - DNA, 60 bp, Artificial
  Synthetic oligonucleotide
ggatggactggaatgatagatggatggtatggttatcatcatcagaatgaacagggatca

SEQ ID NO: 64589 - DNA, 60 bp, Artificial
  Synthetic oligonucleotide
gagatttaatgtcacagtctcgcactcgcgagatactgacaaaaaccactgtggaccata

SEQ ID NO: 64590 - DNA, 60 bp, Artificial
  Synthetic oligonucleotide
gagatctgatgtcacagtctcgcactcgcgagatactcacaaggaccacagtggaccata

SEQ ID NO: 64591 - DNA, 60 bp, Artificial
  Synthetic oligonucleotide
tgcttctcattgttcaggcacttagggacaacctggaacctggaaccttcgatcttgggg

SEQ ID NO: 64592 - DNA, 60 bp, Artificial
  Synthetic oligonucleotide
gaacggctgcattgagggcaagctttctcaaatgtcaaaggaagtgaacgccagaatcga

SEQ ID NO: 64593 - DNA, 60 bp, Artificial
  Synthetic oligonucleotide
gggtatgaagaattcacaatggttgggagaagagcaacagctattctcaggaaggcaacc

SEQ ID NO: 64594 - DNA, 60 bp, Artificial
  Synthetic oligonucleotide
ggcaaaccctctggagcaaaacaaatgatgccggctcagaccgagtgatggtatcacctc

SEQ ID NO: 64595 - DNA, 60 bp, Artificial
  Synthetic oligonucleotide
gcagaacgtcactgtgactcatgccaaggacattcttgagaagacccataacggaaagtt

SEQ ID NO: 64596 - DNA, 52 bp, Artificial
  Synthetic oligonucleotide
caggcgatcatggaaaagaacatcatactgaaagcgaacttcagtgtgatct

SEQ ID NO: 64597 - DNA, 50 bp, Artificial
  Synthetic oligonucleotide
ggcgattatggaaaagaacatcatactgaaagcgaacttcagtgtgatct

SEQ ID NO: 64598 - DNA, 60 bp, Artificial
  Synthetic oligonucleotide
gatggaccggaatgatagatgggtggtatggttatcatcatcagaatgaacagggatctg

SEQ ID NO: 64599 - DNA, 60 bp, Artificial
  Synthetic oligonucleotide
aagaagagccgcagtatcagcagatccactagcatctttattggagatgtgccacagcac

SEQ ID NO: 64600 - DNA, 60 bp, Artificial
  Synthetic oligonucleotide
aagaagagccgcagtatcagcagatccactagcatctttattggagatgtgtcacagcac

SEQ ID NO: 64601 - DNA, 60 bp, Artificial
  Synthetic oligonucleotide
ttgggcaaggagacgttgtgttagtaatgaaacgaaaacgggactctagcatacttactg

SEQ ID NO: 64602 - DNA, 60 bp, Artificial
  Synthetic oligonucleotide
ccagcctcccatttcagaacatacatccagtcacaattggagaatgtccaaaatatgtca

SEQ ID NO: 64603 - DNA, 60 bp, Artificial
  Synthetic oligonucleotide
ccagccttccatttcagaatatacacccagtcacaattggagaatgtccaaaatatgtca

SEQ ID NO: 64604 - DNA, 60 bp, Artificial
  Synthetic oligonucleotide
ccagccttccatttcagaatatacatccagtcacaattggagaatgtccaaaatatgtca

SEQ ID NO: 64605 - DNA, 60 bp, Artificial
  Synthetic oligonucleotide
cttcgatcttggagggctatatgaagcaatcgaggagtgcctgattaatgatccctgggt

SEQ ID NO: 64606 - DNA, 60 bp, Artificial
  Synthetic oligonucleotide
ggaaccttcgatcttggagggctatatgaagcaattgaggagtgcctgattaatgatccc

SEQ ID NO: 64607 - DNA, 60 bp, Artificial
  Synthetic oligonucleotide
ggctcataaatcctgcctgcctgcttgtgtgtatggacttgctgtggccagtggatacga

SEQ ID NO: 64608 - DNA, 60 bp, Artificial
  Synthetic oligonucleotide
cagagggacaagagtggttccaagaggacaactgtccaccagaggagtccaaattgcttc

SEQ ID NO: 64609 - DNA, 60 bp, Artificial
  Synthetic oligonucleotide
tcagagggacaagagtggttccaagaggacaactgtccaccagaggagtccaaattgctt

SEQ ID NO: 64610 - DNA, 60 bp, Artificial
  Synthetic oligonucleotide
gcatggtccagctcaagttgtcacgatggaaaagcatggctacatgtttgtgtaacgggg

SEQ ID NO: 64611 - DNA, 60 bp, Artificial
  Synthetic oligonucleotide
cctggaatgatgatgggcatgttcaacatgctaagtacggttttaggagtctcgatactg

SEQ ID NO: 64612 - DNA, 60 bp, Artificial
  Synthetic oligonucleotide
cctgggatgatgatgggcatgttcaacatgctaagtacggttttaggagtctcgatactg

SEQ ID NO: 64613 - DNA, 60 bp, Artificial
  Synthetic oligonucleotide
gccaagcaaacaatggtgaagatgctactgctggtctcactcacctgatgatttggcatt

SEQ ID NO: 64614 - DNA, 60 bp, Artificial
  Synthetic oligonucleotide
gtgaagatgctactgctggtctcactcacctgatgatttggcattccaacctgaatgatg

SEQ ID NO: 64615 - DNA, 60 bp, Artificial
  Synthetic oligonucleotide
atgatggaccaggtgcgagaaagcagaaatcctgggaatgctgagattgaagatcttatc

SEQ ID NO: 64616 - DNA, 60 bp, Artificial
  Synthetic oligonucleotide
ggagaatttggcgccaagcaaacaatggtgaagatgctactgctggtctcactcacttga

SEQ ID NO: 64617 - DNA, 60 bp, Artificial
  Synthetic oligonucleotide
ggagaatttggcgccaagcaaacaatggtgaagatgctactgctggtctcactcacctga

SEQ ID NO: 64618 - DNA, 60 bp, Artificial
  Synthetic oligonucleotide
gaatttggcgccaagcaaacaatggtgaagatgctactgccggtctcactcacctgatga

SEQ ID NO: 64619 - DNA, 60 bp, Artificial
  Synthetic oligonucleotide
ggcgccaagcaaacaatggtgaagatgctactgccggtctcactcacctgatgatttggc

SEQ ID NO: 64620 - DNA, 60 bp, Artificial
  Synthetic oligonucleotide
ggcgccaagcaaacaatggtgaagatgctactgctggtctcactcacttgatgatttggc

SEQ ID NO: 64621 - DNA, 60 bp, Artificial
  Synthetic oligonucleotide
caggagaatttggcgccaagcaaacaatggtgaagatgctactgctggtctcactcacct

SEQ ID NO: 64622 - DNA, 60 bp, Artificial
  Synthetic oligonucleotide
gattctacatacagatgtgcactgaactccaactcagtgactatgaagggaggctgatcc

SEQ ID NO: 64623 - DNA, 60 bp, Artificial
  Synthetic oligonucleotide
gatggcatgtcattctgcagcatttgaagatctgagagtgtcaagtttcatcaaagggac

SEQ ID NO: 64624 - DNA, 60 bp, Artificial
  Synthetic oligonucleotide
gcaatgatggaccaggtgcgagaaagcagaaatcccggaaatgctgagattgaagacctc

SEQ ID NO: 64625 - DNA, 60 bp, Artificial
  Synthetic oligonucleotide
ccaccagaggggttcaaattgcttcaaatgaaaacatggaaacaatggactccattactc

SEQ ID NO: 64626 - DNA, 60 bp, Artificial
  Synthetic oligonucleotide
gagcatctgcagggcaaatcagtgtacaacctactttctcagtacagagaaatcttcctt

SEQ ID NO: 64627 - DNA, 58 bp, Artificial
  Synthetic oligonucleotide
agctcaagttgtcacgatggaaaagcatggctgcatgtttgtgtcactgggtatgaaa

SEQ ID NO: 64628 - DNA, 60 bp, Artificial
  Synthetic oligonucleotide
agctcaagttgtcacgatggaaaagcatggctgcatgtttgtatcactggggatgataga

SEQ ID NO: 64629 - DNA, 60 bp, Artificial
  Synthetic oligonucleotide
tgagggatacgaggagttcacaatggttgggaaaagggcaacagctatactcagaaaagc

SEQ ID NO: 64630 - DNA, 60 bp, Artificial
  Synthetic oligonucleotide
gagggatacgaggagttcacaatggttgggaaaagggcaacagctatactcagaaaagca

SEQ ID NO: 64631 - DNA, 60 bp, Artificial
  Synthetic oligonucleotide
tcacgctcaccgtgccaagtgagcgaggactgcagcgtagacgctttgtccaaaatgccc

SEQ ID NO: 64632 - DNA, 60 bp, Artificial
  Synthetic oligonucleotide
acattcgaagcaactggaaatctagtggtaccgagatatgccttcgcaatgaaaagaggt

SEQ ID NO: 64633 - DNA, 60 bp, Artificial
  Synthetic oligonucleotide
gtctttgcagggaagaacacagatctcgatgctctcatggaatggctaaagacaagacca

SEQ ID NO: 64634 - DNA, 60 bp, Artificial
  Synthetic oligonucleotide
ggctccctgtcactggcaatcatgatagctgggatctccttatggatgtgctctaacggg

SEQ ID NO: 64635 - DNA, 60 bp, Artificial
  Synthetic oligonucleotide
agtggatatgcacaaacagactgcgtcctggaagcaatggctttccttgaagaatcccac

SEQ ID NO: 64636 - DNA, 60 bp, Artificial
  Synthetic oligonucleotide
gtgaggaaaatgatgactaattcacaagacacagaactctctttcacaataactggagac

SEQ ID NO: 64637 - DNA, 60 bp, Artificial
  Synthetic oligonucleotide
agaaggctaaactggcaaatgttgtgaggaaaatgatgactaattcacaagacacagaac

SEQ ID NO: 64638 - DNA, 60 bp, Artificial
  Synthetic oligonucleotide
ttgtgaggaaaatgatgactaattcacaagacacagaactctctttcacaataactggag

SEQ ID NO: 64639 - DNA, 56 bp, Artificial
  Synthetic oligonucleotide
gctcaccgtgcccagtgagcgaggactgcagcgtagacgctttgtccaaaacgccc

SEQ ID NO: 64640 - DNA, 60 bp, Artificial
  Synthetic oligonucleotide
tataggacctgcaagctagttggaatcaatatgagcaaaaagaagtcttacataaatagg

SEQ ID NO: 64641 - DNA, 60 bp, Artificial
  Synthetic oligonucleotide
cggtctgaaaagagggccttctacggaaggagtgccggaatccatgagggaagaatatcg

SEQ ID NO: 64642 - DNA, 60 bp, Artificial
  Synthetic oligonucleotide
tacctagaagagcatcccagtgctggaaaggatcctaagaaaactggaggacccatatat

SEQ ID NO: 64643 - DNA, 60 bp, Artificial
  Synthetic oligonucleotide
aaaatgagaggacacttgactttcatgattctaatgtcaggaatctgtacgataaagtca

SEQ ID NO: 64644 - DNA, 60 bp, Artificial
  Synthetic oligonucleotide
aaaatgagaggacacttgactttcatgattctaatgtcaagaatctgtataataaagtca

SEQ ID NO: 64645 - DNA, 60 bp, Artificial
  Synthetic oligonucleotide
ctgatggaaaatgagaggacacttgactttcatgattctaatgtcaagaatctgtatgat

SEQ ID NO: 64646 - DNA, 60 bp, Artificial
  Synthetic oligonucleotide
aaaatgagaggacacttgactttcatgattctaatgtcaagaatctgtacgataaagtca

SEQ ID NO: 64647 - DNA, 60 bp, Artificial
  Synthetic oligonucleotide
gcaaccgctagcttcatttacaatgggaggcttgtagacagtattagttcatggtccaaa

SEQ ID NO: 64648 - DNA, 51 bp, Artificial
  Synthetic oligonucleotide
cgctgagatcatgaagatctgttccaccattgaagagctcagacggcaaaa

SEQ ID NO: 64649 - DNA, 60 bp, Artificial
  Synthetic oligonucleotide
ggagttcgctgagatcatgaagatctgttccaccattgaagagctcagacggcagaaata

SEQ ID NO: 64650 - DNA, 59 bp, Artificial
  Synthetic oligonucleotide
gaacaacatgataaacaatgaccttggaccagcaacagctcaaatggctcttcagctgt

SEQ ID NO: 64651 - DNA, 60 bp, Artificial
  Synthetic oligonucleotide
gaacaacatgataaacaatgaccttggaccagcaacagctcaaatggctcttcagctgtt

SEQ ID NO: 64652 - DNA, 60 bp, Artificial
  Synthetic oligonucleotide
ggggtttatcaaatccttgccatttatgctacagtagcaggttccctgtcattggcaatc

SEQ ID NO: 64653 - DNA, 60 bp, Artificial
  Synthetic oligonucleotide
gcaatgatggatcaagtaagagaaagccggaacccaggaaatgctgagatcgaagatctc

SEQ ID NO: 64654 - DNA, 60 bp, Artificial
  Synthetic oligonucleotide
agggaaagctgatactaaaatactattcattgaagaagggaagatcattcatattagtcc

SEQ ID NO: 64655 - DNA, 60 bp, Artificial
  Synthetic oligonucleotide
gagtacacagaatgccattgacgggatcactaacaaagtaaattctgttgttgaaaagat

SEQ ID NO: 64656 - DNA, 60 bp, Artificial
  Synthetic oligonucleotide
cttgaaagttccagcgcaaaatgccataagtactacattcccttatactggagatcctcc

SEQ ID NO: 64657 - DNA, 60 bp, Artificial
  Synthetic oligonucleotide
ctcacttgcgaaatgatactgatgtggtaaactttgtgagcatggagttttctctcactg

SEQ ID NO: 64658 - DNA, 60 bp, Artificial
  Synthetic oligonucleotide
tgtgcatagcatggtccagctcaagttgtcacgatggaaaagcatggctgcatgtttgtg

SEQ ID NO: 64659 - DNA, 60 bp, Artificial
  Synthetic oligonucleotide
gtagttcagggatcatgaaaacagaaggaacacttgggaactgtgagaccaaatgccaaa

SEQ ID NO: 64660 - DNA, 60 bp, Artificial
  Synthetic oligonucleotide
ggatacaccatggacacagtcaacagaacacatcaatattcagaaaaggggaagtggaca

SEQ ID NO: 64661 - DNA, 60 bp, Artificial
  Synthetic oligonucleotide
caccgaagagggagcaattgttggcgaaatctcaccattgccttctcttccaggacatac

SEQ ID NO: 64662 - DNA, 60 bp, Artificial
  Synthetic oligonucleotide
ctgaaatagttgtggcaatgctactatttgctatccatactgtccaaaaaagtaccttgt

SEQ ID NO: 64663 - DNA, 59 bp, Artificial
  Synthetic oligonucleotide
gttgtggcaatgctactatttgctatccatattgtccaaaaaagtaccttgtttctact

SEQ ID NO: 64664 - DNA, 60 bp, Artificial
  Synthetic oligonucleotide
gtgatgcgaagtgtcaaacaccccagggagctataaacagtagtcttcctttccagaatg

SEQ ID NO: 64665 - DNA, 60 bp, Artificial
  Synthetic oligonucleotide
gcaagccttacagctgctatttgaagtggaacaagagataagaactttctcgtttcagct

SEQ ID NO: 64666 - DNA, 60 bp, Artificial
  Synthetic oligonucleotide
cgactaatccaaaatagcataacaatagagagaatggtgctctctgcttttgatgagaga

SEQ ID NO: 64667 - DNA, 53 bp, Artificial
  Synthetic oligonucleotide
atcaacaaggatttaccagattttggcgatctattcaactgtcgccagttcaa

SEQ ID NO: 64668 - DNA, 60 bp, Artificial
  Synthetic oligonucleotide
cccttatactggagatcctccatacagccatgggacaggaacaggatacaccatggacac

SEQ ID NO: 64669 - DNA, 60 bp, Artificial
  Synthetic oligonucleotide
gagcacacagaatgccattgatgggatcactaacaaagtaaattctgttattgaaaagat

SEQ ID NO: 64670 - DNA, 60 bp, Artificial
  Synthetic oligonucleotide
tacccatattatgatttggcactccaatctgaatgatgccacctatcagagaacaagagc

SEQ ID NO: 64671 - DNA, 56 bp, Artificial
  Synthetic oligonucleotide
ggaccaggcgatcatggaaaagaacatcatactgaaagcgaacttcagtgtgatct

SEQ ID NO: 64672 - DNA, 60 bp, Artificial
  Synthetic oligonucleotide
gtaaactaagaggggtagccccattgcatttgggtaaatgtaacattgctggatggctct

SEQ ID NO: 64673 - DNA, 60 bp, Artificial
  Synthetic oligonucleotide
cagagacttgaagatgtctttgcagggaagaacacagatcttgaggctctcatggaatgg

SEQ ID NO: 64674 - DNA, 60 bp, Artificial
  Synthetic oligonucleotide
atgactcttgaagaaatgtcaagggactggttcatgctcatgcccaagcagaaagtggca

SEQ ID NO: 64675 - DNA, 60 bp, Artificial
  Synthetic oligonucleotide
tgactcttgaagaaatgtcaagggactggttcatgctcatgcccaagcagaaagtggcag

SEQ ID NO: 64676 - DNA, 60 bp, Artificial
  Synthetic oligonucleotide
ctcttgaagaaatgtcaagggactggttcatgctcatgcccaagcagaaagtggcaggct

SEQ ID NO: 64677 - DNA, 60 bp, Artificial
  Synthetic oligonucleotide
aatggttgatggttggtatggataccatcacagcaatgaccagggatcagggtatgcagc

SEQ ID NO: 64678 - DNA, 60 bp, Artificial
  Synthetic oligonucleotide
aatggttgatggttggtatggataccatcacagcaatgaccaaggatcagggtatgcagc

SEQ ID NO: 64679 - DNA, 60 bp, Artificial
  Synthetic oligonucleotide
aatgattgatggttggtatggataccatcacagcaatgaccagggatcagggtatgcagc

SEQ ID NO: 64680 - DNA, 60 bp, Artificial
  Synthetic oligonucleotide
tgctggtgcacttgccagttgcatgggcctcatatacaacaggatggggactgtcaccac

SEQ ID NO: 64681 - DNA, 60 bp, Artificial
  Synthetic oligonucleotide
ctgctggtgcacttgccagttgcatgggcctcatatataacagaatggggactgtcacca

SEQ ID NO: 64682 - DNA, 60 bp, Artificial
  Synthetic oligonucleotide
tgctggtgcacttgccagttgcatgggcctcatttacaacagaatggggactgtcaccac

SEQ ID NO: 64683 - DNA, 58 bp, Artificial
  Synthetic oligonucleotide
cagttactctgctggtgcacttgccagttgcatgggcctcatatacaacaggatgggg

SEQ ID NO: 64684 - DNA, 60 bp, Artificial
  Synthetic oligonucleotide
atcatgagggaatacaagcaggagtggatagattctacagaacctgcaagctagtcggaa

SEQ ID NO: 64685 - DNA, 60 bp, Artificial
  Synthetic oligonucleotide
gggaaggatcctaagaaaactggaggacccatatacaagagagtaaatggaaagtggatg

SEQ ID NO: 64686 - DNA, 60 bp, Artificial
  Synthetic oligonucleotide
caacagaagagcaagctgtggatatatgcaaggcagcaatgggtttaagaatcagttcat

SEQ ID NO: 64687 - DNA, 60 bp, Artificial
  Synthetic oligonucleotide
cattggagtgacagtgataaagaacaacatgataaacaatgatctcgggccagcaactgc

SEQ ID NO: 64688 - DNA, 60 bp, Artificial
  Synthetic oligonucleotide
ggctgatatgagcattggagtgacagtgataaagaacaacatgataaacaatgaccttgg

SEQ ID NO: 64689 - DNA, 60 bp, Artificial
  Synthetic oligonucleotide
tgagtcagctgatatgagcattggagtaacagtgataaagaacaacatgataaacaatga

SEQ ID NO: 64690 - DNA, 60 bp, Artificial
  Synthetic oligonucleotide
tcggatgatatgagcattggggtaacagtgataaagaacaacatgataaacaatgacctt

SEQ ID NO: 64691 - DNA, 60 bp, Artificial
  Synthetic oligonucleotide
tcggctgatatgagcattggggtaacagtgataaagaacaacatgataaacaatgacctt

SEQ ID NO: 64692 - DNA, 56 bp, Artificial
  Synthetic oligonucleotide
aaacaatgaccttggcccagcaactgctcaaatggcccttcagttatttataaaag

SEQ ID NO: 64693 - DNA, 60 bp, Artificial
  Synthetic oligonucleotide
gcccaaacagattgtgtattagaagcaatggctttccttgaagaatcccatcctggtatc

SEQ ID NO: 64694 - DNA, 60 bp, Artificial
  Synthetic oligonucleotide
tcaacccaattgatgggccactaccagaagacaatgaaccgagtggctatgcccaaacag

SEQ ID NO: 64695 - DNA, 60 bp, Artificial
  Synthetic oligonucleotide
aactgacacagggcagacagacctatgactggactctaaataggaaccagcctgctgcca

SEQ ID NO: 64696 - DNA, 60 bp, Artificial
  Synthetic oligonucleotide
aaacaagggtggacaaactgacacagggcagacagacctatgactggactctaaatagga

SEQ ID NO: 64697 - DNA, 60 bp, Artificial
  Synthetic oligonucleotide
tctccatattcctgaagtttgcttgaaatgggagttgatggatgaggattatcaggggcg

SEQ ID NO: 64698 - DNA, 55 bp, Artificial
  Synthetic oligonucleotide
atcaggggcgtttatgcaacccattaaacccgtttgtcagccataaagagattga

SEQ ID NO: 64699 - DNA, 60 bp, Artificial
  Synthetic oligonucleotide
tgataatgccggcacatggtccagccaaaaatatggagtatgacgctgttgcaacaacac

SEQ ID NO: 64700 - DNA, 60 bp, Artificial
  Synthetic oligonucleotide
atctgttccaccattgaagacctcagacggcaaaaatagggaatttggcttgtccttcat

SEQ ID NO: 64701 - DNA, 60 bp, Artificial
  Synthetic oligonucleotide
gggacaggaacagggtacaccatggatacagtcaacaggacacaccagtactcagaaaga

SEQ ID NO: 64702 - DNA, 60 bp, Artificial
  Synthetic oligonucleotide
atgctataagcacaacttttccttatactggtgaccctccttacagccatgggacaggaa

SEQ ID NO: 64703 - DNA, 60 bp, Artificial
  Synthetic oligonucleotide
ccagttggaggaaatgagaagaaagcaaagttagcaaatgttgtaaggaagatgatgacc

SEQ ID NO: 64704 - DNA, 60 bp, Artificial
  Synthetic oligonucleotide
aagaggagagtgagagacaatgtaactaaaaaaatggtgacccaaagaacaataggcaaa

SEQ ID NO: 64705 - DNA, 60 bp, Artificial
  Synthetic oligonucleotide
tggaacgaaaatcaaaaccctagaatgttcttggccatgatcacatatataaccaaaaat

SEQ ID NO: 64706 - DNA, 60 bp, Artificial
  Synthetic oligonucleotide
aagaccaatcctgtcacctctgactaaggggattttgggatttgtattcacgctcaccgt

SEQ ID NO: 64707 - DNA, 60 bp, Artificial
  Synthetic oligonucleotide
gcgggggatcaatgatcggaatttctggagaggtgaaaatggacgaagaacaaggattgc

SEQ ID NO: 64708 - DNA, 60 bp, Artificial
  Synthetic oligonucleotide
aggcgatttgaagcaatatgatagtgatgaacctgaattaaggtcactttcaagctggat

SEQ ID NO: 64709 - DNA, 60 bp, Artificial
  Synthetic oligonucleotide
gagcatggagttttctctcactgacccgagacttgagccacataaatgggagaaatactg

SEQ ID NO: 64710 - DNA, 60 bp, Artificial
  Synthetic oligonucleotide
aaatttgaaatctcaggaactatgcgcaggcttgccgaccaaagtctcccgccgaacttc

SEQ ID NO: 64711 - DNA, 60 bp, Artificial
  Synthetic oligonucleotide
ccaggctatttaccataagacaagaaatggccaacagaggcctctgggattcctttcgtc

SEQ ID NO: 64712 - DNA, 60 bp, Artificial
  Synthetic oligonucleotide
gggctaggattaagaccaggctatttaccataagacaagaaatggccaacagaggcctct

SEQ ID NO: 64713 - DNA, 60 bp, Artificial
  Synthetic oligonucleotide
gcagggctaggatcaaaaccagactattcaccataagacaagaaatggccaacagaggcc

SEQ ID NO: 64714 - DNA, 54 bp, Artificial
  Synthetic oligonucleotide
tgatctggcattccaatttgaatgatacaacataccagagaacaagagctcttg

SEQ ID NO: 64715 - DNA, 54 bp, Artificial
  Synthetic oligonucleotide
tgatctggcattccaatttgaatgatacaacataccagaggacaagagctcttg

SEQ ID NO: 64716 - DNA, 60 bp, Artificial
  Synthetic oligonucleotide
ctcacatgatgatctggcattccaatttgaatgatacaacataccagagaacaagagctc

SEQ ID NO: 64717 - DNA, 60 bp, Artificial
  Synthetic oligonucleotide
gactcacatgatgatctggcattccaatttgaatgatacaacataccagaggacaagagc

SEQ ID NO: 64718 - DNA, 60 bp, Artificial
  Synthetic oligonucleotide
ctcacatgatgatctggcattccaatttgaatgatacaacataccagaggacaagagctc

SEQ ID NO: 64719 - DNA, 60 bp, Artificial
  Synthetic oligonucleotide
atggaattggacgattctacatccaaatgtgcactgaacttaaactcagtgattatgagg

SEQ ID NO: 64720 - DNA, 60 bp, Artificial
  Synthetic oligonucleotide
aaacggtcttatgaacagatggaaactgatggggatcgccagaatgcaactgagattagg

SEQ ID NO: 64721 - DNA, 60 bp, Artificial
  Synthetic oligonucleotide
caaacggtcttatgaacagatggaaactgatggggatcgccagaatgcaactgagattag

SEQ ID NO: 64722 - DNA, 60 bp, Artificial
  Synthetic oligonucleotide
caaaatcatggcgtcccaaggcaccaaacggtcttatgaacagatggaaactgatgggga

SEQ ID NO: 64723 - DNA, 60 bp, Artificial
  Synthetic oligonucleotide
ttttttctgactcaaggcgctttgctgaatgacaggcattctaatggaaccgtcaaggac

SEQ ID NO: 64724 - DNA, 60 bp, Artificial
  Synthetic oligonucleotide
gacccaaggcgccttgctgaatgacaggcattctaatggaaccgtcaaggacaggagtcc

SEQ ID NO: 64725 - DNA, 60 bp, Artificial
  Synthetic oligonucleotide
ttttttctgacccaaggcgccttgctgaatgacaggcattctaatggaaccgtcaaggac

SEQ ID NO: 64726 - DNA, 60 bp, Artificial
  Synthetic oligonucleotide
ctgaatgacaggcattctaatggaaccgtcaaggacaggagcccttatagaaccttaatg

SEQ ID NO: 64727 - DNA, 60 bp, Artificial
  Synthetic oligonucleotide
gactcaaggcgctttgctgaatgacaggcattctaatggaaccgtcaaggacaggagtcc

SEQ ID NO: 64728 - DNA, 60 bp, Artificial
  Synthetic oligonucleotide
aaccttaatgagctgccccatcggtgaagctccatctccgtacaattcaaggttcgaatc

SEQ ID NO: 64729 - DNA, 60 bp, Artificial
  Synthetic oligonucleotide
accttaatgagctgccccatcggtgaagctccatctccgtacaattcaaggttcgaatca

SEQ ID NO: 64730 - DNA, 60 bp, Artificial
  Synthetic oligonucleotide
gcagataggaaatataatctcgttatggataagccattcaattcagactggagaaaaaag

SEQ ID NO: 64731 - DNA, 60 bp, Artificial
  Synthetic oligonucleotide
tctctttgcccaatcagtgggtgggctatatacagcaaagacaatagcataaggattggt

SEQ ID NO: 64732 - DNA, 60 bp, Artificial
  Synthetic oligonucleotide
tatatatagcaaagacaatagcataaggattggttccagaggagacatttttgtcatgag

SEQ ID NO: 64733 - DNA, 60 bp, Artificial
  Synthetic oligonucleotide
ggagtgaaaggctgggcctttgacaatggagatgacgtgtggatgggaagaacgatcagc

SEQ ID NO: 64734 - DNA, 60 bp, Artificial
  Synthetic oligonucleotide
atggattcaaacactgtgtcaagctttcaggtagactgctttctttggtatgtccgcaaa

SEQ ID NO: 64735 - DNA, 60 bp, Artificial
  Synthetic oligonucleotide
atggattcaaacactgtgtcaagctttcaggtagactgctttctttggcatgttcgcaaa

SEQ ID NO: 64736 - DNA, 60 bp, Artificial
  Synthetic oligonucleotide
ccatgcaaataattcaaccgacactgttgacacagtactagaaaagaatgtaacagtaac

SEQ ID NO: 64737 - DNA, 60 bp, Artificial
  Synthetic oligonucleotide
gtgcgattggaccaggcgatcatggaaaagaacatcatactgaaagcgaacttcagtgtg

SEQ ID NO: 64738 - DNA, 60 bp, Artificial
  Synthetic oligonucleotide
gaatgggagacctccactcactccaaaacagaaacggaaaatggcgagaacaattaggtc

SEQ ID NO: 64739 - DNA, 60 bp, Artificial
  Synthetic oligonucleotide
gactccaacactgtgtcaagctttcaggtagattgtttcctttggcatatccgcaaacgg

SEQ ID NO: 64740 - DNA, 60 bp, Artificial
  Synthetic oligonucleotide
ttgaaaactcatgtcttgaaacgatggaagttgttcaacaaacacgagtggacaaactaa

SEQ ID NO: 64741 - DNA, 60 bp, Artificial
  Synthetic oligonucleotide
gggccaaagaagtagcgctcagttactctgctggtgcacttgccagttgcatgggcctcg

SEQ ID NO: 64742 - DNA, 60 bp, Artificial
  Synthetic oligonucleotide
gacggatcaagaaggaggagttcgctgagatcatgaagatctgttccaccattgaagagc

SEQ ID NO: 64743 - DNA, 55 bp, Artificial
  Synthetic oligonucleotide
caaatgcagacacactatgtgtaggttatcatgcaaataattcaactgacactgt

SEQ ID NO: 64744 - DNA, 60 bp, Artificial
  Synthetic oligonucleotide
tctctgttgagggcaaaagctgcatcaataggtgcttttatgtggagttgataaggggaa

SEQ ID NO: 64745 - DNA, 60 bp, Artificial
  Synthetic oligonucleotide
tgttgagggcaaaagctgcatcaataggtgcttttatgtggagttgataaggggaaggaa

SEQ ID NO: 64746 - DNA, 60 bp, Artificial
  Synthetic oligonucleotide
gtgcttttatgtggagttgataaggggaaggaaacaggagactagagtatggtggacctc

SEQ ID NO: 64747 - DNA, 60 bp, Artificial
  Synthetic oligonucleotide
ggcaaaagctgcatcaataggtgcttttatgtggagttgataaggggaaggaaacaggag

SEQ ID NO: 64748 - DNA, 60 bp, Artificial
  Synthetic oligonucleotide
gttgagggcaaaagctgcatcaataggtgcttttatgtggagttgataaggggaaggaaa

SEQ ID NO: 64749 - DNA, 60 bp, Artificial
  Synthetic oligonucleotide
tgttgagggcaaaagctgcatcaataggtgcttttatgtggagttgataaggggaaggca

SEQ ID NO: 64750 - DNA, 60 bp, Artificial
  Synthetic oligonucleotide
tgttgagggcaaaagatgcatcaataggtgcttttatgtggagttgataaggggaaggca

SEQ ID NO: 64751 - DNA, 60 bp, Artificial
  Synthetic oligonucleotide
gtgcttttatgtggagttgataaggggaaggccacaggagactagagtatggtggacctc

SEQ ID NO: 64752 - DNA, 60 bp, Artificial
  Synthetic oligonucleotide
aggtgcttttatgtggagttgataaggggaaggccacaggagactagagtatggtggacc

SEQ ID NO: 64753 - DNA, 60 bp, Artificial
  Synthetic oligonucleotide
aggtgcttttatgtggagttgataaggggaaggaaacaggagactagagtatggtggacc

SEQ ID NO: 64754 - DNA, 60 bp, Artificial
  Synthetic oligonucleotide
gctgcatcaataggtgcttttatgtggagttgataaggggaaggaaacaggagactagag

SEQ ID NO: 64755 - DNA, 60 bp, Artificial
  Synthetic oligonucleotide
gaggctctgaaaatctacagagattcgcttggagaaaccgtaatgaggatgggagacctt

SEQ ID NO: 64756 - DNA, 60 bp, Artificial
  Synthetic oligonucleotide
attcaactgacactgttgacacagtactagaaaagaatgtaacagtaacacactctgtta

SEQ ID NO: 64757 - DNA, 60 bp, Artificial
  Synthetic oligonucleotide
accagattttggcgatctattcaactgtcgccagttcattggtactggtagtctccctgg

SEQ ID NO: 64758 - DNA, 60 bp, Artificial
  Synthetic oligonucleotide
ggttctacatacagatgtgcactgaactcaaactcagtgactatgaaggaaggctgatcc

SEQ ID NO: 64759 - DNA, 60 bp, Artificial
  Synthetic oligonucleotide
cccaaaggagtggaagaaggttccattgggaaagtctgtaggactctgttggctaagtcg

SEQ ID NO: 64760 - DNA, 60 bp, Artificial
  Synthetic oligonucleotide
ccgcctgcttcaaaacagtcaagtcttcagtcttatcaggccaaacgaaaatccagcaca

SEQ ID NO: 64761 - DNA, 57 bp, Artificial
  Synthetic oligonucleotide
cagcataacaatagagagaatggttctctctgcatttgacgagaggagaaacaaata

SEQ ID NO: 64762 - DNA, 60 bp, Artificial
  Synthetic oligonucleotide
cagcataacaatagagagaatggttctctctgcatttgacgagaggagaaacaaatacct

SEQ ID NO: 64763 - DNA, 55 bp, Artificial
  Synthetic oligonucleotide
aaaatgcagttggggtcctcatcggaggacttgaatggaatggtaacacggttcg

SEQ ID NO: 64764 - DNA, 60 bp, Artificial
  Synthetic oligonucleotide
gcagcatgcccttatgctggagcaaacagcttctacagaaatttaatatggctgacaaag

SEQ ID NO: 64765 - DNA, 60 bp, Artificial
  Synthetic oligonucleotide
ggcagattatagcattgattccagttatgtatgctcagggctcgttggtgatacacccag

SEQ ID NO: 64766 - DNA, 60 bp, Artificial
  Synthetic oligonucleotide
ggcagattacagcattgattccagttatgtatgctcagggctcgttggtgatacacccag

SEQ ID NO: 64767 - DNA, 60 bp, Artificial
  Synthetic oligonucleotide
gcagagtatagcattgattccagttatgtatgctcaggacttgttggtgacacaccaagg

SEQ ID NO: 64768 - DNA, 60 bp, Artificial
  Synthetic oligonucleotide
tagcagagtatagcattgattccagttatgtatgctcaggacttgttggtgacacaccaa

SEQ ID NO: 64769 - DNA, 60 bp, Artificial
  Synthetic oligonucleotide
atggacgtcaatccgactttgcttttcctgaaagtgccagcacaaaatgctataagcaca

SEQ ID NO: 64770 - DNA, 60 bp, Artificial
  Synthetic oligonucleotide
ttgccaatttcagcatggagcttcctagttttggagtatctgggattaatgagtctgcag

SEQ ID NO: 64771 - DNA, 60 bp, Artificial
  Synthetic oligonucleotide
atcgttatgggtttgttgccaatttcagcatggagcttcctagttttggagtatctggga

SEQ ID NO: 64772 - DNA, 60 bp, Artificial
  Synthetic oligonucleotide
aaaataacattcgaagcaactggaaatctagtggtaccgagatatgccttcgcaatgaaa

SEQ ID NO: 64773 - DNA, 60 bp, Artificial
  Synthetic oligonucleotide
atatccgcaaacggtttgcggacaatggattgggtgatgccccattccttgatcggctcc

SEQ ID NO: 64774 - DNA, 60 bp, Artificial
  Synthetic oligonucleotide
tatccgcaaacggtttgcagacgatggattgggtgatgccccattccttgatcggctccg

SEQ ID NO: 64775 - DNA, 60 bp, Artificial
  Synthetic oligonucleotide
gcgatttgaagcaatatgatagtgacgaacctgaattaaggtcactttcaagctggatcc

SEQ ID NO: 64776 - DNA, 60 bp, Artificial
  Synthetic oligonucleotide
gcgatttgaagcaatatgatagtgacgaacctgaattaaggtcactttcaagctggatac

SEQ ID NO: 64777 - DNA, 60 bp, Artificial
  Synthetic oligonucleotide
gatttgaagcaatatgatagtgacgaacctgaattaaggtcactttcaagctggatacag

SEQ ID NO: 64778 - DNA, 60 bp, Artificial
  Synthetic oligonucleotide
gtgagcatggagttttctctcactgacccgagacttgagccacacaaatgggagaagtac

SEQ ID NO: 64779 - DNA, 60 bp, Artificial
  Synthetic oligonucleotide
agatgtggtaaactttgtgagcatggagttttctctcactgacccgagacttgagccaca

SEQ ID NO: 64780 - DNA, 60 bp, Artificial
  Synthetic oligonucleotide
gcccttccataatatccacccattgaccattggtgagtgccccaaatatgtaaaatcgga

SEQ ID NO: 64781 - DNA, 60 bp, Artificial
  Synthetic oligonucleotide
ttctaccacaagtgtaacaatgaatgcatggaaagtgtaaaaaatggaacttatgactat

SEQ ID NO: 64782 - DNA, 60 bp, Artificial
  Synthetic oligonucleotide
tgaattctaccacaagtgtaacaatgaatgcatggacagtgtaaaaaatggaacttacga

SEQ ID NO: 64783 - DNA, 60 bp, Artificial
  Synthetic oligonucleotide
ctaccatgcgaacaattcaaccgacactgttgacacagtactcgaaaagaacgtgacagt

SEQ ID NO: 64784 - DNA, 60 bp, Artificial
  Synthetic oligonucleotide
gctaccatgcgaacaattcaaccgacactgttgacacagtcctcgagaagaatgtgacag

SEQ ID NO: 64785 - DNA, 60 bp, Artificial
  Synthetic oligonucleotide
aggctaccatgcgaacaattcaaccgacactgttgacacagtcctcgagaagaatgtgac

SEQ ID NO: 64786 - DNA, 60 bp, Artificial
  Synthetic oligonucleotide
ctctgagaatggaatatgttacccagggtatttctccgactatgaggagctgagggagca

SEQ ID NO: 64787 - DNA, 60 bp, Artificial
  Synthetic oligonucleotide
gtctttgctgggaagaacacagatcttgaggctctcatggaatggctaaagacaagacca

SEQ ID NO: 64788 - DNA, 60 bp, Artificial
  Synthetic oligonucleotide
ccatgagggaagaatatcgacagaaacagcagagtgctgtggatgttgacgatggtcatt

SEQ ID NO: 64789 - DNA, 60 bp, Artificial
  Synthetic oligonucleotide
tccatgagggaagaatatcgacagaaacagcagagtgctgtggatgttgacgatggtcat

SEQ ID NO: 64790 - DNA, 60 bp, Artificial
  Synthetic oligonucleotide
taaagagcacacagaatgccattgacgggatcactaacaaagtaaattctgttattgaaa

SEQ ID NO: 64791 - DNA, 60 bp, Artificial
  Synthetic oligonucleotide
gccatggtatgctttcgcactgagtagaggctttgggtcaggaatcatcgtctcaaatgc

SEQ ID NO: 64792 - DNA, 52 bp, Artificial
  Synthetic oligonucleotide
atctgttccaccattgaagagctcagacggcaaaaacagtgaatttagcttg

SEQ ID NO: 64793 - DNA, 60 bp, Artificial
  Synthetic oligonucleotide
gcacctaatcatgagggaatacaagcaggagtggataggttctacaggacctgcaaactg

SEQ ID NO: 64794 - DNA, 60 bp, Artificial
  Synthetic oligonucleotide
accggctagaaaccctaatattactaagggctttcaccgaagagggagcaattgttggcg

SEQ ID NO: 64795 - DNA, 60 bp, Artificial
  Synthetic oligonucleotide
gactgatccaaaacagcataacaatagagagaatggttctctctgcttttgacgagagga

SEQ ID NO: 64796 - DNA, 60 bp, Artificial
  Synthetic oligonucleotide
gggcagggaaccacgctggacaacaaacattcaaatggcacaatacatgatagaatccct

SEQ ID NO: 64797 - DNA, 60 bp, Artificial
  Synthetic oligonucleotide
atcctgtcacctctgactaaggggattttgggatttgtgttcacgctcaccgtgcccagt

SEQ ID NO: 64798 - DNA, 60 bp, Artificial
  Synthetic oligonucleotide
aacccaggaaatgctgagatcgaagatctcatctttctggcacggtctgcactcgtattg

SEQ ID NO: 64799 - DNA, 60 bp, Artificial
  Synthetic oligonucleotide
aacccaggaaatgctgagatcgaagatctcatctttctggcacggtctgcgctcgtattg

SEQ ID NO: 64800 - DNA, 60 bp, Artificial
  Synthetic oligonucleotide
gggaggccacaggagactagagtatggtggacctcaaacagtattgtcgtattttgcggc

SEQ ID NO: 64801 - DNA, 60 bp, Artificial
  Synthetic oligonucleotide
gttgataagaggaaggccgcaagaaactagagtatggtggacctcaaacagtattgtcgt

SEQ ID NO: 64802 - DNA, 60 bp, Artificial
  Synthetic oligonucleotide
ccaaacaagtttgcatagcatggtccagctcaagttgccatgatgggaaagcatggttgc

SEQ ID NO: 64803 - DNA, 60 bp, Artificial
  Synthetic oligonucleotide
acttgggaaccaaacaagtgtgcatagcatggtccagctcaagttgccatgatgggaagg

SEQ ID NO: 64804 - DNA, 60 bp, Artificial
  Synthetic oligonucleotide
taataacgagaggggaaacccaggagtgaaagggtgggcctttgacagtggagatgatgt

SEQ ID NO: 64805 - DNA, 60 bp, Artificial
  Synthetic oligonucleotide
ctaataatgagaggggaaacccaggagtgaaagggtgggcctttgacgatggaaatgatg

SEQ ID NO: 64806 - DNA, 60 bp, Artificial
  Synthetic oligonucleotide
cccatcggacccttttgatgaatgaactgggtgttccgtttcacttgggaaccaaacaag

SEQ ID NO: 64807 - DNA, 60 bp, Artificial
  Synthetic oligonucleotide
cacttgggaaccaaacaagtttgcatagcatggtccagctcaagttgccatgatgggaaa

SEQ ID NO: 64808 - DNA, 57 bp, Artificial
  Synthetic oligonucleotide
cctcttttgacatgagtaatgaaggatcttatttcttcggagacaatgcagaagagt

SEQ ID NO: 64809 - DNA, 60 bp, Artificial
  Synthetic oligonucleotide
cagttgcatgggcctcatatacaacagaatggggactgttaccactgaagtggcatttgg

SEQ ID NO: 64810 - DNA, 60 bp, Artificial
  Synthetic oligonucleotide
agttgcatgggcctcatatacaacagaatggggactgtgaccaccgaagtggcatttggc

SEQ ID NO: 64811 - DNA, 60 bp, Artificial
  Synthetic oligonucleotide
accagattttggcgatctattcaactgtcgccagctcattggtactgttagtctctcttg

SEQ ID NO: 64812 - DNA, 60 bp, Artificial
  Synthetic oligonucleotide
accagattttggcgatctattcaactgtcgccagctcattggtactgttagtctctctgg

SEQ ID NO: 64813 - DNA, 60 bp, Artificial
  Synthetic oligonucleotide
actggacactaatagaacctggagacacaataacattcgaagcaactggaaatctagtgg

SEQ ID NO: 64814 - DNA, 60 bp, Artificial
  Synthetic oligonucleotide
tactggacactaatagaacctggagacacaataacattcgaagcaactggaaatctagtg

SEQ ID NO: 64815 - DNA, 60 bp, Artificial
  Synthetic oligonucleotide
caaatggaaatctaatagcgccatggtatgctttcgcactgagtagaggctttggatcag

SEQ ID NO: 64816 - DNA, 60 bp, Artificial
  Synthetic oligonucleotide
caaatggaaatctaatagcgccatggtatgctttcgcactgagtagaggttttggatcag

SEQ ID NO: 64817 - DNA, 60 bp, Artificial
  Synthetic oligonucleotide
aatggaaatctaatagcgccatggtatgctttcgcactgagtagaggctttggatcagga

SEQ ID NO: 64818 - DNA, 50 bp, Artificial
  Synthetic oligonucleotide
ggttatcaccatcaaaatgagcagggatcaggatatgcagccgaccaaaa

SEQ ID NO: 64819 - DNA, 60 bp, Artificial
  Synthetic oligonucleotide
ggttatcaccatcaaaatgagcagggatcaggatatgcagcagacctaaagagcacacag

SEQ ID NO: 64820 - DNA, 60 bp, Artificial
  Synthetic oligonucleotide
ggttatcaccatcaaaatgagcagggatcaggatatgcagccgaccaaaaaagtacacag

SEQ ID NO: 64821 - DNA, 60 bp, Artificial
  Synthetic oligonucleotide
ggttatcatcatcaaaatgagcagggatcaggatatgcagccgaccgaaagagcacacaa

SEQ ID NO: 64822 - DNA, 60 bp, Artificial
  Synthetic oligonucleotide
gggtatcaccatcaaaatgagcagggatcaggatatgcagccgaccaaaagagtacacag

SEQ ID NO: 64823 - DNA, 60 bp, Artificial
  Synthetic oligonucleotide
ggttatcaccatcaaaatgagcagggatcaggatatgcagccgaccaaaagagtacacag

SEQ ID NO: 64824 - DNA, 50 bp, Artificial
  Synthetic oligonucleotide
ggttatcaccatcaaaatgagcagggatcaggatatgcagctgatcaaaa

SEQ ID NO: 64825 - DNA, 60 bp, Artificial
  Synthetic oligonucleotide
ggttatcaccatcaaaatgagcagggatcaggatatgcagctgatcaaaaaagcacacag

SEQ ID NO: 64826 - DNA, 60 bp, Artificial
  Synthetic oligonucleotide
ggttatcaccatcaaaatgagcagggatcaggatatgcagccgacctgaagagcacacag

SEQ ID NO: 64827 - DNA, 60 bp, Artificial
  Synthetic oligonucleotide
ggttatcaccatcaaaatgagcagggatcaggatatgcagccgaccaaaagagcacacag

SEQ ID NO: 64828 - DNA, 60 bp, Artificial
  Synthetic oligonucleotide
aatgtgaggggatcagggatgagaatacttgtaaggggcaattctcctgtattcaactac

SEQ ID NO: 64829 - DNA, 60 bp, Artificial
  Synthetic oligonucleotide
cacggtctgctctcattttgaggggatcagtggctcataagtcctgcctgcctgcttgtg

SEQ ID NO: 64830 - DNA, 60 bp, Artificial
  Synthetic oligonucleotide
gaaccctgccctcagaatgaaatggatgatggcaatgaagtacccaatcacagcagacaa

SEQ ID NO: 64831 - DNA, 60 bp, Artificial
  Synthetic oligonucleotide
gttgagagggtttctaattttgggcaaggaagacaaaagatatggaccagcattgagcat

SEQ ID NO: 64832 - DNA, 60 bp, Artificial
  Synthetic oligonucleotide
aaatacacatcaggaagacaggaaaagaatcctgccctcagaatgaaatggatgatggcg

SEQ ID NO: 64833 - DNA, 60 bp, Artificial
  Synthetic oligonucleotide
gtgttgatagggcaaggagacgtagtgttggtgatgaaacggaaacgggactctagcata

SEQ ID NO: 64834 - DNA, 60 bp, Artificial
  Synthetic oligonucleotide
aatcttgctaagggggagaaagctaatgtgttgatagggcaaggagacgtagtgttggta

SEQ ID NO: 64835 - DNA, 60 bp, Artificial
  Synthetic oligonucleotide
cgaattgagcaatcttgcgaaaggggagaaagctaatgtgttgatagggcaaggagacgt

SEQ ID NO: 64836 - DNA, 60 bp, Artificial
  Synthetic oligonucleotide
gaagacaaaagatatggaccagcattgagcatcaacgaattgagcaatcttgctaagggg

SEQ ID NO: 64837 - DNA, 60 bp, Artificial
  Synthetic oligonucleotide
gtaatacgacttgtcaaacacccaaaggtgctataaacaccagccttccatttcagaata

SEQ ID NO: 64838 - DNA, 60 bp, Artificial
  Synthetic oligonucleotide
gtagtacgacttgtcaaacacccaaaggtgctataaacaccagccttccatttcagaata

SEQ ID NO: 64839 - DNA, 60 bp, Artificial
  Synthetic oligonucleotide
tgtaatacgacttgtcaaacacccaaaggtgctataaacaccagccttccatttcagaat

SEQ ID NO: 64840 - DNA, 60 bp, Artificial
  Synthetic oligonucleotide
acatgactcttgaagagatgtcaagggactggttcatgctcatgcccaagcagaaagtgg

SEQ ID NO: 64841 - DNA, 60 bp, Artificial
  Synthetic oligonucleotide
ccgtgcccagtgagcgaggactgcagcgtagacgctttgttcagaatgccctcaatggga

SEQ ID NO: 64842 - DNA, 60 bp, Artificial
  Synthetic oligonucleotide
gcacaaacagactgcgtcctggaagcaatggctttccttgaagaatcccacccaggaatc

SEQ ID NO: 64843 - DNA, 60 bp, Artificial
  Synthetic oligonucleotide
cgacttgtcaaacacccaaaggtgctataaacaccagccttccatttcagaatatacatc

SEQ ID NO: 64844 - DNA, 60 bp, Artificial
  Synthetic oligonucleotide
caaacacccaaaggtgctataaacaccagccttccatttcagaatatacatccagtcaca

SEQ ID NO: 64845 - DNA, 60 bp, Artificial
  Synthetic oligonucleotide
caaacacccaaaggtgctataaacaccagccttccatttcagaatatccatccagtcaca

SEQ ID NO: 64846 - DNA, 60 bp, Artificial
  Synthetic oligonucleotide
caaacacccaaaggtgctataaacaccagccttccatttcagaatatacatccggtcaca

SEQ ID NO: 64847 - DNA, 60 bp, Artificial
  Synthetic oligonucleotide
gacttgtcaaacacccaaaggtgctataaacaccagccttccatttcagaatatacatcc

SEQ ID NO: 64848 - DNA, 60 bp, Artificial
  Synthetic oligonucleotide
aagaatatcgacagaaacagcagaatgctgtggatgttgacgatggtcattttgtcaaca

SEQ ID NO: 64849 - DNA, 60 bp, Artificial
  Synthetic oligonucleotide
cagaaacagcagaatgctgtggatgttgacgatggtcattttgtcaacatagtgctagag

SEQ ID NO: 64850 - DNA, 60 bp, Artificial
  Synthetic oligonucleotide
cttcttttgacatgagtaatgaagggtcttatttcttcggagacaatgcagaggagtatg

SEQ ID NO: 64851 - DNA, 60 bp, Artificial
  Synthetic oligonucleotide
catggagtggctaaagacaagaccaatcctgtcacctctgactaaggggattttgggatt

SEQ ID NO: 64852 - DNA, 60 bp, Artificial
  Synthetic oligonucleotide
tggagtgaagttggaatcaacaaggatttaccagattttggcgatctattcaactgtcgc

SEQ ID NO: 64853 - DNA, 60 bp, Artificial
  Synthetic oligonucleotide
ccaatttgtatggattcatcataaaaggaagatcccacttaagaaatgacactgacgtgg

SEQ ID NO: 64854 - DNA, 60 bp, Artificial
  Synthetic oligonucleotide
agggaagacgaaagaccaatttgtatggattcatcataaaaggaagatcccacttaagaa

SEQ ID NO: 64855 - DNA, 60 bp, Artificial
  Synthetic oligonucleotide
cagatcagtgtgcaacctacattctcagtgcaacggaatctcccttttgagagagcgacc

SEQ ID NO: 64856 - DNA, 60 bp, Artificial
  Synthetic oligonucleotide
cggcagcatgtccttatgctggagcaaacagcttctacagaaatttaatatggctggtga

SEQ ID NO: 64857 - DNA, 60 bp, Artificial
  Synthetic oligonucleotide
gcgatttgaagcaatatgatagcgacgaacctgaattaaggtcactttcaagctggatac

SEQ ID NO: 64858 - DNA, 60 bp, Artificial
  Synthetic oligonucleotide
aagcgatttgaagcaatatgatagtgatgaacctgaattaaggtcactttcaagctggat

SEQ ID NO: 64859 - DNA, 60 bp, Artificial
  Synthetic oligonucleotide
gtaagcgatttgaagcaatatgatagtgatgaacctgaattaaggtcactttcaagctgg

SEQ ID NO: 64860 - DNA, 60 bp, Artificial
  Synthetic oligonucleotide
tgaaatcacagggacaatgcgcaggctcgccgaccaaagtctcccgccgaacttctcctg

SEQ ID NO: 64861 - DNA, 60 bp, Artificial
  Synthetic oligonucleotide
agatttgaaatcacagggacaatgcgcaggcttgccgaccaaagtctcccgccgaacttc

SEQ ID NO: 64862 - DNA, 60 bp, Artificial
  Synthetic oligonucleotide
gtggtaaactttgtgagcatggagttttctctcactgacccgagacttgagccacataaa

SEQ ID NO: 64863 - DNA, 60 bp, Artificial
  Synthetic oligonucleotide
gcgatttgaagcaatatgacagcgacgaacctgaattaaggtcactttcaagctggatac

SEQ ID NO: 64864 - DNA, 60 bp, Artificial
  Synthetic oligonucleotide
gcgatttgaagcaatatgatagcgacgaacctgaattaaggtcactttcaagctgggtac

SEQ ID NO: 64865 - DNA, 60 bp, Artificial
  Synthetic oligonucleotide
gccagatttgtatgattacaaggagaatagattcatcgaaattggagtgacaaggagaga

SEQ ID NO: 64866 - DNA, 60 bp, Artificial
  Synthetic oligonucleotide
ctttgtgagcatggagttttctctcactgacccgagacttgagccacataaatgggagaa

SEQ ID NO: 64867 - DNA, 60 bp, Artificial
  Synthetic oligonucleotide
gagaggggaccagatatgcattggataccattccaacaattccacagaaaaggtcgacac

SEQ ID NO: 64868 - DNA, 60 bp, Artificial
  Synthetic oligonucleotide
ctctacagagattcgcttggagaagcagtaatgagaatgggagacctccactcactccaa

SEQ ID NO: 64869 - DNA, 60 bp, Artificial
  Synthetic oligonucleotide
taacacagttcgagtctctaaaactctacagagattcgcttggagaagcagtaatgagga

SEQ ID NO: 64870 - DNA, 60 bp, Artificial
  Synthetic oligonucleotide
taacacagctcgagtctctaaaactctacagagattcgcttggagaagcagtaatgagaa

SEQ ID NO: 64871 - DNA, 60 bp, Artificial
  Synthetic oligonucleotide
tgtgcatagcatggtccagctcaagttgtcacgatgggaaagcatggctgcatgtttgtg

SEQ ID NO: 64872 - DNA, 60 bp, Artificial
  Synthetic oligonucleotide
gaactcaggagtcagaatgcgtttgcatcaatgggacttgcacagtagtaatgactgatg

SEQ ID NO: 64873 - DNA, 60 bp, Artificial
  Synthetic oligonucleotide
taaagaggggaagattgtccatgttagtccattgtcaggaagtgctcagcatatagagga

SEQ ID NO: 64874 - DNA, 52 bp, Artificial
  Synthetic oligonucleotide
tccatattggcccattgtcaggaagtgctcagcatatagaggagtgttcttg

SEQ ID NO: 64875 - DNA, 60 bp, Artificial
  Synthetic oligonucleotide
cctgggttttgcttaatgcatcttggttcaactccctcctcacacatgcactgaaatagt

SEQ ID NO: 64876 - DNA, 60 bp, Artificial
  Synthetic oligonucleotide
aaattgcttctcattgttcaggcacttagggataacctggaacctggaaccttcgatctt

SEQ ID NO: 64877 - DNA, 60 bp, Artificial
  Synthetic oligonucleotide
gaggggttttcagctgaatcaagaaaattgcttctcattgttcaggcacttagggacaac

SEQ ID NO: 64878 - DNA, 60 bp, Artificial
  Synthetic oligonucleotide
gatttgaaatcacaggaaccatgcgcaggcttgccgaccaaagtctcccaccgaatttct

SEQ ID NO: 64879 - DNA, 60 bp, Artificial
  Synthetic oligonucleotide
aatcctcaggacccaggagtcggaatgcgtttgtatcgatggaacttgtacagtagtaat

SEQ ID NO: 64880 - DNA, 60 bp, Artificial
  Synthetic oligonucleotide
cctcaggacccaggagtcggaatgcgtttgtatcgatggaacttgtacagtagtaatgac

SEQ ID NO: 64881 - DNA, 60 bp, Artificial
  Synthetic oligonucleotide
ggacccaggagtcggaatgcgtttgtatcaatggaacttgtacagtagtaatgactgatg

SEQ ID NO: 64882 - DNA, 60 bp, Artificial
  Synthetic oligonucleotide
gggtcctcatcggagggcttgaatggaatgataacacagttcgagtctctaaaactctac

SEQ ID NO: 64883 - DNA, 60 bp, Artificial
  Synthetic oligonucleotide
ggtatgcagcagacaaagaatccactcaaaaggcatttgatggaatcaccaacaaggaaa

SEQ ID NO: 64884 - DNA, 60 bp, Artificial
  Synthetic oligonucleotide
gcaccaaatcatgagggaatacaagcaggagtggatagattctacaggacctgcaagttg

SEQ ID NO: 64885 - DNA, 60 bp, Artificial
  Synthetic oligonucleotide
ccagcatggtggaggccatggtgtctagggcccggattgatgcacggattgacttcgagt

SEQ ID NO: 64886 - DNA, 60 bp, Artificial
  Synthetic oligonucleotide
ggttgggatttccagcatggtggaggccatggtgtctagggcccgaattgatgcgcggat

SEQ ID NO: 64887 - DNA, 60 bp, Artificial
  Synthetic oligonucleotide
gtctcaaggcaccaaacggtcttatgaacagatggagactggtggagaacgccagaatgc

SEQ ID NO: 64888 - DNA, 60 bp, Artificial
  Synthetic oligonucleotide
atggcgttccaaggcaccaaacggtcttatgaacagatggaaactgatggggaacgccag

SEQ ID NO: 64889 - DNA, 60 bp, Artificial
  Synthetic oligonucleotide
ggcgttccaaggcaccaaacggtcttatgaacagatggaaactgatggggaacgccagaa

SEQ ID NO: 64890 - DNA, 60 bp, Artificial
  Synthetic oligonucleotide
gtcccaaggcaccaaacggtcttatgaacagatggaaactgatggggaacgcccgaatgc

SEQ ID NO: 64891 - DNA, 60 bp, Artificial
  Synthetic oligonucleotide
gtcccaaggcaccaaacggtcttatgaacagatggaaactgatggggaacgccagaatgc

SEQ ID NO: 64892 - DNA, 60 bp, Artificial
  Synthetic oligonucleotide
ggagaggcgagaatggacgaaggacaaggattgcatatgagagaatgtgcaacatcctca

SEQ ID NO: 64893 - DNA, 60 bp, Artificial
  Synthetic oligonucleotide
ccgcaaacaagttgtagaccaagaactaggtgatgccccattccttgatcggctccgccg

SEQ ID NO: 64894 - DNA, 60 bp, Artificial
  Synthetic oligonucleotide
agtaacacactctgtcaacctacttgaggacagtcacaatggaaaactgtgcctactaaa

SEQ ID NO: 64895 - DNA, 53 bp, Artificial
  Synthetic oligonucleotide
tgaagggaggctgatccagaacagcataacaatagagagaatggttctctctg

SEQ ID NO: 64896 - DNA, 60 bp, Artificial
  Synthetic oligonucleotide
tgaaggaaggctgatccagaacagcataacaatagagagaatggttctctctgcatttga

SEQ ID NO: 64897 - DNA, 60 bp, Artificial
  Synthetic oligonucleotide
ttgcagggaaaaacaccgatcttgaggcactcatggaatggctaaagacaagaccaatcc

SEQ ID NO: 64898 - DNA, 60 bp, Artificial
  Synthetic oligonucleotide
ttcgcagggaaaaacacagatcttgaggcactcatggaatggctaaagacaagaccaatc

SEQ ID NO: 64899 - DNA, 60 bp, Artificial
  Synthetic oligonucleotide
gcgaacaattcaaccgacactgttgacacagtactcgaaaagaacgtgacagtgacacac

SEQ ID NO: 64900 - DNA, 60 bp, Artificial
  Synthetic oligonucleotide
gcgaacaattcaaccgacactgttgacacagtactcgaaaagaatgtgacagtgacacac

SEQ ID NO: 64901 - DNA, 60 bp, Artificial
  Synthetic oligonucleotide
accatgcgaacaattcaaccgacactgttgacacagtactcgaaaagaacgttacagtga

SEQ ID NO: 64902 - DNA, 60 bp, Artificial
  Synthetic oligonucleotide
ggagtcagaatgcgtttgcatcaatgggacttgcacagtagtaatgactgatggaagcgc

SEQ ID NO: 64903 - DNA, 60 bp, Artificial
  Synthetic oligonucleotide
tgcgtttgtatcaatgggacttgcacagtagtaatgactgatggaagtgcatcaggaaga

SEQ ID NO: 64904 - DNA, 60 bp, Artificial
  Synthetic oligonucleotide
cttcctttgacatgagtaacgaaggatcttatttcttcggagacaatgccgaggagtatg

SEQ ID NO: 64905 - DNA, 60 bp, Artificial
  Synthetic oligonucleotide
cctttgacatgagtaacgaaggatcttatttcttcggagacaatgccgaggagtatgaca

SEQ ID NO: 64906 - DNA, 64 bp, Artificial
  Synthetic oligonucleotide
cacaaattgaagataacagagaatagttttgagcaaataacatttatgcaagccttacagctgc

SEQ ID NO: 64907 - DNA, 60 bp, Artificial
  Synthetic oligonucleotide
gcccaaagatagatggacacagcatacaacaactggaggttcacaggcctgcgcggtgtc

SEQ ID NO: 64908 - DNA, 60 bp, Artificial
  Synthetic oligonucleotide
gcccaaagatagatggacacagcatacaacaactggaggttcacaggcctgcgcagtgtc

SEQ ID NO: 64909 - DNA, 60 bp, Artificial
  Synthetic oligonucleotide
ccagcgagacacttaagatgaccattgcatctgtacctacttcgcgctacctagctgaca

SEQ ID NO: 64910 - DNA, 60 bp, Artificial
  Synthetic oligonucleotide
gggaaggatcctaagaaaactggaggacccatatacaagagagtagatggaaagtggatg

SEQ ID NO: 64911 - DNA, 60 bp, Artificial
  Synthetic oligonucleotide
atgctggagcaaacagcttctacagaaatttaatatggctggtcaaaaaaggaaattcat

SEQ ID NO: 64912 - DNA, 57 bp, Artificial
  Synthetic oligonucleotide
aaaatgcaattggggtcctcatcggaggacttgaatggaatgataacacagttcgag

SEQ ID NO: 64913 - DNA, 51 bp, Artificial
  Synthetic oligonucleotide
gttcgagtctctgaaactctacagagattcgcttggagaagcagtaatgag

SEQ ID NO: 64914 - DNA, 60 bp, Artificial
  Synthetic oligonucleotide
agattctggcgatctattcaactgtcgccagttcattggtactggtggtctccctggggg

SEQ ID NO: 64915 - DNA, 59 bp, Artificial
  Synthetic oligonucleotide
agattctggcgatctattcaactgtcgccagttcattggtactggtggtctccctgggg

SEQ ID NO: 64916 - DNA, 60 bp, Artificial
  Synthetic oligonucleotide
ctcagttattctgctggtgcacttgccagttgcatgggcctcatatacaacaggatgggg

SEQ ID NO: 64917 - DNA, 60 bp, Artificial
  Synthetic oligonucleotide
cgtgccaagtgagcgaggactgcagcgtagacgctttgtccaaaatgccctcaatgggaa

SEQ ID NO: 64918 - DNA, 60 bp, Artificial
  Synthetic oligonucleotide
cctggcacggtcagcacttattctaaggggatcagttgcacataagtcttgcctgcctgc

SEQ ID NO: 64919 - DNA, 60 bp, Artificial
  Synthetic oligonucleotide
taatagcgccatggtatgctttcgcactgagtagaggctttgggtcaggaatcatcgtct

SEQ ID NO: 64920 - DNA, 60 bp, Artificial
  Synthetic oligonucleotide
ccatttcagaatatacatccagtcacaattggagaatgtccaaaatatgtcaagagcaca

SEQ ID NO: 64921 - DNA, 60 bp, Artificial
  Synthetic oligonucleotide
ggcaaaccatttgaatggatgtcaacccgactctacttttcctaaaggttccagcgcaaa

SEQ ID NO: 64922 - DNA, 60 bp, Artificial
  Synthetic oligonucleotide
cgatctgctctcattctgagaggatcagtggctcataaatcctgcctacctgcttgtgtg

SEQ ID NO: 64923 - DNA, 57 bp, Artificial
  Synthetic oligonucleotide
gttcaagttgtcacgatggaaaagcatggctgcatgtttgtatcactgggcatgata

SEQ ID NO: 64924 - DNA, 60 bp, Artificial
  Synthetic oligonucleotide
cgagcccgatcgtgccttcctttgacatgagtaatgaagggtcttatttcttcggagaca

SEQ ID NO: 64925 - DNA, 60 bp, Artificial
  Synthetic oligonucleotide
ctcggacgaaaaggcgacgaacccgatcgtgccttcctttgacatgagtaatgagggatc

SEQ ID NO: 64926 - DNA, 60 bp, Artificial
  Synthetic oligonucleotide
gcaacgagcccgatcgtgccttcctttgacatgagtaatgaagggtcttatttcttcgga

SEQ ID NO: 64927 - DNA, 60 bp, Artificial
  Synthetic oligonucleotide
aatcaacaaggatttaccagattttggcgatctattcaactgtcgccagctcattggtac

SEQ ID NO: 64928 - DNA, 60 bp, Artificial
  Synthetic oligonucleotide
acagatcttgaggcactcatggaatggctaaagacaagaccaatcctgtcacctctgacc

SEQ ID NO: 64929 - DNA, 60 bp, Artificial
  Synthetic oligonucleotide
actggacactagtagagcctggagacaaaataacattcgaagcaactggaaatctagtgg

SEQ ID NO: 64930 - DNA, 52 bp, Artificial
  Synthetic oligonucleotide
aaaccatcattcttcaggaacatggtctggctgacacgtaaaggatcaaatt

SEQ ID NO: 64931 - DNA, 52 bp, Artificial
  Synthetic oligonucleotide
aaaccatcattcttcaggaacatggtctggctgacagagaaaggaacaaatt

SEQ ID NO: 64932 - DNA, 60 bp, Artificial
  Synthetic oligonucleotide
caactgacactgttgatacaatactagaaaagaatgtaacagtaacacactctgttaacc

SEQ ID NO: 64933 - DNA, 60 bp, Artificial
  Synthetic oligonucleotide
acacagtattagaaaagaatgtaacagtaacacactctgttaaccttctagaaaacaaac

SEQ ID NO: 64934 - DNA, 60 bp, Artificial
  Synthetic oligonucleotide
ctgacactgttgatacaatactagaaaagaatgtaacagtaacacactctgttaaccttc

SEQ ID NO: 64935 - DNA, 60 bp, Artificial
  Synthetic oligonucleotide
ctagaaaagaatgtaacagtaacacactctgttaaccttctagaaaacaaacacaacggg

SEQ ID NO: 64936 - DNA, 60 bp, Artificial
  Synthetic oligonucleotide
ctagaaaagaatgtaacagtaacacactctgttaaccttctagaagacaggcataacggg

SEQ ID NO: 64937 - DNA, 60 bp, Artificial
  Synthetic oligonucleotide
ctagaaaagaatgtaacagtaacacactctgttaaccttctagaaaacaagcataacggg

SEQ ID NO: 64938 - DNA, 60 bp, Artificial
  Synthetic oligonucleotide
ctagaaaagaatgtaacagtaacacactctgttaaccttctagaagacaggcataatggg

SEQ ID NO: 64939 - DNA, 60 bp, Artificial
  Synthetic oligonucleotide
ctagaaaagaatgtaacagtaacacactctgttaatcttctggaagacaaacataacgga

SEQ ID NO: 64940 - DNA, 60 bp, Artificial
  Synthetic oligonucleotide
agtctctaaaactctacagagattcgcttggagaagcagtactgagaatgggagacctcc

SEQ ID NO: 64941 - DNA, 60 bp, Artificial
  Synthetic oligonucleotide
agaatgaaatggatgatggcaatgaaatatccaattacagcggacaagagaataattgaa

SEQ ID NO: 64942 - DNA, 60 bp, Artificial
  Synthetic oligonucleotide
tgtttacagcagtgagaggggaccagatatgcattggataccattccaacaattccacag

SEQ ID NO: 64943 - DNA, 60 bp, Artificial
  Synthetic oligonucleotide
aaaagggaaataacattccatggggccaaagaaatagcgcttagttactctgctggtgca

SEQ ID NO: 64944 - DNA, 60 bp, Artificial
  Synthetic oligonucleotide
gcgcaaaatgccataagtactacattcccttatactggagatcctccatacagccatggg

SEQ ID NO: 64945 - DNA, 60 bp, Artificial
  Synthetic oligonucleotide
gctccctaatgcaaggttcaacacttcccagaaggtctggagccgcaggtgctgcagtga

SEQ ID NO: 64946 - DNA, 60 bp, Artificial
  Synthetic oligonucleotide
attctacatacagatgtgcactgaactccaactcagcgactatgaagggagactgatcca

SEQ ID NO: 64947 - DNA, 60 bp, Artificial
  Synthetic oligonucleotide
agcaaaagcagggtgacaaatacataatggattccaacactgtgtcaagctttcaggtag

SEQ ID NO: 64948 - DNA, 60 bp, Artificial
  Synthetic oligonucleotide
ttgcagagaaaaacaccgatcttgaggctctcatggaatggctaaagacaagaccaatcc

SEQ ID NO: 64949 - DNA, 51 bp, Artificial
  Synthetic oligonucleotide
agcaaaagcaggagtgaaaatgaatccaaatcaaaagacaataacaattgg

SEQ ID NO: 64950 - DNA, 60 bp, Artificial
  Synthetic oligonucleotide
ggtgtaacagcagcatgcccttatgctggagcaaacagcttctacagaaatttaatatgg

SEQ ID NO: 64951 - DNA, 58 bp, Artificial
  Synthetic oligonucleotide
tgttcacagcagtgagaggggaccagatatgcattggataccattccaacaattccac

SEQ ID NO: 64952 - DNA, 60 bp, Artificial
  Synthetic oligonucleotide
cttacaactattgcttgaagtagaacaagagataagaactttctcgtttcagcttattta

SEQ ID NO: 64953 - DNA, 60 bp, Artificial
  Synthetic oligonucleotide
acatttgggtgacgagagaaccttatgtgtcatgcgatcctggcaagtgttatcaatttg

SEQ ID NO: 64954 - DNA, 60 bp, Artificial
  Synthetic oligonucleotide
acatttgggtgacgagagaaccttatgtgtcatgcgaccctggcaagtgttatcaatttg

SEQ ID NO: 64955 - DNA, 60 bp, Artificial
  Synthetic oligonucleotide
gacagcaataattggtcaggttactctggtattttctctgttgagggcaaaagctgcatc

SEQ ID NO: 64956 - DNA, 60 bp, Artificial
  Synthetic oligonucleotide
acatttgggtgacgagagaaccttatgtgtcatgcgatcctggtaagtgctaccaattcg

SEQ ID NO: 64957 - DNA, 60 bp, Artificial
  Synthetic oligonucleotide
acatttgggtgacgagagaaccttatgtgtcatgcgatcctgtcaagtgttatcaatttg

SEQ ID NO: 64958 - DNA, 60 bp, Artificial
  Synthetic oligonucleotide
gacagcaataatcggtcaggttactctggtattttctctgttgagggcaaaggctgcatc

SEQ ID NO: 64959 - DNA, 60 bp, Artificial
  Synthetic oligonucleotide
tggtctggttactctggtattttctctgttgagggcaaaagctgcattaataggtgtttt

SEQ ID NO: 64960 - DNA, 60 bp, Artificial
  Synthetic oligonucleotide
gtcgacaacaataattggtctggttactctggtattttctctgttgagggcaaaagctgc

SEQ ID NO: 64961 - DNA, 60 bp, Artificial
  Synthetic oligonucleotide
atttgggtgacgagagaaccttatgtgtcatgcgatcctgtcaagtgttatcaatttgca

SEQ ID NO: 64962 - DNA, 60 bp, Artificial
  Synthetic oligonucleotide
gggatcctaacaatgagagagggaatccaggagtgaaaggctgggcctttgacaatggag

SEQ ID NO: 64963 - DNA, 60 bp, Artificial
  Synthetic oligonucleotide
caggtcatagttgacagcaataattggtcaggttactctggtattttctctgttgagggc

SEQ ID NO: 64964 - DNA, 60 bp, Artificial
  Synthetic oligonucleotide
caggtcatagtcgacaacaataattggtctggttactctggtattttctctgttgagggc

SEQ ID NO: 64965 - DNA, 60 bp, Artificial
  Synthetic oligonucleotide
tcatagttgacagcaataatcggtcaggttactctggtattttctctgttgagggcaaag

SEQ ID NO: 64966 - DNA, 60 bp, Artificial
  Synthetic oligonucleotide
gttgacagtgataatcggtcaggttactctggtattttctctgttgagggcaaaagctgc

SEQ ID NO: 64967 - DNA, 60 bp, Artificial
  Synthetic oligonucleotide
ggtctggttactctggtattttctctgttgagggcaaaagctgcatcaataggtgctttt

SEQ ID NO: 64968 - DNA, 60 bp, Artificial
  Synthetic oligonucleotide
tggtctggttactctggtattttctctgttgagggcaaaagctgcatcaataggtgcttt

SEQ ID NO: 64969 - DNA, 60 bp, Artificial
  Synthetic oligonucleotide
gcgcggggaaggatcctaagaaaactggaggacccatatacaagagagtaaatggaaagt

SEQ ID NO: 64970 - DNA, 60 bp, Artificial
  Synthetic oligonucleotide
gcgcggggaaggatcctaagaaaactggaggacccatatacaagagagtaggtggaaagt

SEQ ID NO: 64971 - DNA, 60 bp, Artificial
  Synthetic oligonucleotide
gcgcggggaaggatcctaagaaaactggaggacccatatacaagagagtagatggaaagt

SEQ ID NO: 64972 - DNA, 60 bp, Artificial
  Synthetic oligonucleotide
gcgcggggaaggatcctaagaaaactggaggacccatatacaagagagtagatagaaagt

SEQ ID NO: 64973 - DNA, 57 bp, Artificial
  Synthetic oligonucleotide
agcatggtccagctcaagttgtcacgatggaaaagcatggctgcatgtttgtatcac

SEQ ID NO: 64974 - DNA, 60 bp, Artificial
  Synthetic oligonucleotide
cataaataggacagggacatttgaattcacaagctttttctatcgctatggatttgtagc

SEQ ID NO: 64975 - DNA, 60 bp, Artificial
  Synthetic oligonucleotide
taaataggacagggacatttgaattcacaagctttttctatcgctatggatttgtagcca

SEQ ID NO: 64976 - DNA, 60 bp, Artificial
  Synthetic oligonucleotide
caaataggacagggacatttgaattcacaagctttttctatcgctatggatttgtagcca

SEQ ID NO: 64977 - DNA, 60 bp, Artificial
  Synthetic oligonucleotide
aataggacagggacatttgaattcacaagctttttctatcgctatggatttgtagccaat

SEQ ID NO: 64978 - DNA, 60 bp, Artificial
  Synthetic oligonucleotide
cctgtctgcctgcttgtgtgtatgggcttgcagtagcaagtgggcatgactttgagaggg

SEQ ID NO: 64979 - DNA, 60 bp, Artificial
  Synthetic oligonucleotide
ctgcctgcttgtgtgtatgggcttgcagtagcaagtgggcatgactttgaaagggaaggg

SEQ ID NO: 64980 - DNA, 60 bp, Artificial
  Synthetic oligonucleotide
ataagtcctgtctgcctgcttgtgtgtatgggcttgcagtagcaagtgggcatgactttg

SEQ ID NO: 64981 - DNA, 60 bp, Artificial
  Synthetic oligonucleotide
agtcttgcctgcctgcttgtgtgtatgggcttgcagtagcaagtgggcatgactttgaaa

SEQ ID NO: 64982 - DNA, 60 bp, Artificial
  Synthetic oligonucleotide
ggtatttctccgactatgaggagctgagggagcaattgagttcagtatcatcattcgaga

SEQ ID NO: 64983 - DNA, 60 bp, Artificial
  Synthetic oligonucleotide
gcactgagtagaggcttcgggtcaggaatcatcgtctcaaatgcatcgatggatgagtgt

SEQ ID NO: 64984 - DNA, 60 bp, Artificial
  Synthetic oligonucleotide
gctgagaatggaatatgttacccagggtacttctccgactatgaggagctgagggagcaa

SEQ ID NO: 64985 - DNA, 53 bp, Artificial
  Synthetic oligonucleotide
ggagataagaactttctcatttcagcttatttaatgataaaaaacacccttgt

SEQ ID NO: 64986 - DNA, 60 bp, Artificial
  Synthetic oligonucleotide
aatgaaaggactttggatttccacgactccaatgtgaagaatctgtacgagaaagtaaaa

SEQ ID NO: 64987 - DNA, 60 bp, Artificial
  Synthetic oligonucleotide
cccaaaggagtggaagaaggttccattgggaaggtctgcaggactttattagccaagtcg

SEQ ID NO: 64988 - DNA, 60 bp, Artificial
  Synthetic oligonucleotide
cctcttttgacatgagtaatgaaggatcttatttcttcggagacaatgcagaggaatacg

SEQ ID NO: 64989 - DNA, 60 bp, Artificial
  Synthetic oligonucleotide
atatctggaagaacatcccagcgcggggaaagatcctaagaaaactggaggacccatata

SEQ ID NO: 64990 - DNA, 55 bp, Artificial
  Synthetic oligonucleotide
ggaatcaaagttaaacagggaaaaaattgatggagtggaattgaaatcaatggga

SEQ ID NO: 64991 - DNA, 60 bp, Artificial
  Synthetic oligonucleotide
actcccagaaatagcaacaagacctaaagtgaatggacaaggaggtagaatggaattctc

SEQ ID NO: 64992 - DNA, 60 bp, Artificial
  Synthetic oligonucleotide
gatgtgcactgaactccaactcagcgactatgaagggagactgatccaaaacagcataac

SEQ ID NO: 64993 - DNA, 60 bp, Artificial
  Synthetic oligonucleotide
cacttcagggacctatggaacaggctcatggcctgatggggcgaatatcaatttcatgcc

SEQ ID NO: 64994 - DNA, 60 bp, Artificial
  Synthetic oligonucleotide
cataatggactccaacactgtgtcaagctttcaggtagactgtttcctttggcatatccg

SEQ ID NO: 64995 - DNA, 60 bp, Artificial
  Synthetic oligonucleotide
catgatggactccaacactgtgtcaagctttcaggtagactgtttcctttggcatatccg

SEQ ID NO: 64996 - DNA, 60 bp, Artificial
  Synthetic oligonucleotide
ctcattctcctgttcacagcagtgagaggggaccagatatgcattggataccatgccaat

SEQ ID NO: 64997 - DNA, 60 bp, Artificial
  Synthetic oligonucleotide
tcatttatctaatccttctgttcacagcagtgagaggggaccagatatgcgttgggtacc

SEQ ID NO: 64998 - DNA, 60 bp, Artificial
  Synthetic oligonucleotide
tggccatcatttatctcattctcctgttcacagcagtgagaggggaccagatatgcattg

SEQ ID NO: 64999 - DNA, 60 bp, Artificial
  Synthetic oligonucleotide
gccatcatttatctaatccttctgttcacagcagtgagaggggaccagatatgcgttggg

SEQ ID NO: 65000 - DNA, 60 bp, Artificial
  Synthetic oligonucleotide
atggccatcatttatctcattctcctgttcacagcagtgagaggggaccagatatgcatt

SEQ ID NO: 65001 - DNA, 60 bp, Artificial
  Synthetic oligonucleotide
ggcatatccgcaaacggtttgcagacaatggattgggtgatgccccattccttgatcggc

SEQ ID NO: 65002 - DNA, 60 bp, Artificial
  Synthetic oligonucleotide
tggcatatccgcaaacggtttgcagacaatggattgggtgatgccccattccttgatcgg

SEQ ID NO: 65003 - DNA, 60 bp, Artificial
  Synthetic oligonucleotide
ttggcatatccgcaaacggtttgcagacaatggattgggtgatgccccattccttgatcg

SEQ ID NO: 65004 - DNA, 60 bp, Artificial
  Synthetic oligonucleotide
ggcacatccgcaaacggtttgcagacaatggattgggtgatgccccattccttgatcggc

SEQ ID NO: 65005 - DNA, 60 bp, Artificial
  Synthetic oligonucleotide
gcagttggggtcctcatcggaggacttgaatggaatagtaacacggttcgaggctctgaa

SEQ ID NO: 65006 - DNA, 60 bp, Artificial
  Synthetic oligonucleotide
tgataagaccaaatgaaaacccagctcacaagagtcaattagtgtggatggcatgccact

SEQ ID NO: 65007 - DNA, 60 bp, Artificial
  Synthetic oligonucleotide
tcaagtgttcagcctgatcagaccaaatgaaaacccagctcacaagagtcaattggtgtg

SEQ ID NO: 65008 - DNA, 60 bp, Artificial
  Synthetic oligonucleotide
gtcaagtgttcagcctgatcagaccaaatgaaaacccagctcacaagagtcaattggtgt

SEQ ID NO: 65009 - DNA, 60 bp, Artificial
  Synthetic oligonucleotide
gggtgtcccgttccatttggggaccaaacaagtgtgcatagcatggtccagctcaagttg

SEQ ID NO: 65010 - DNA, 60 bp, Artificial
  Synthetic oligonucleotide
tgggtgtcccgttccatttggggaccaaacaagtgtgcatagcatggtccagctcaagtt

SEQ ID NO: 65011 - DNA, 60 bp, Artificial
  Synthetic oligonucleotide
tcccttgggagcaataaatacaacattgccctttcacaatatccacccactgaccattgg

SEQ ID NO: 65012 - DNA, 60 bp, Artificial
  Synthetic oligonucleotide
cgaggtagttcagggatcatgaaaacggaaggaacacttgaaaactgcgagaccaaatgc

SEQ ID NO: 65013 - DNA, 55 bp, Artificial
  Synthetic oligonucleotide
atgatttggcactccaatctgaatgatgccacctatcagagaacaagagctcttg

SEQ ID NO: 65014 - DNA, 60 bp, Artificial
  Synthetic oligonucleotide
atttggcattccaacctgaatgatgccacctatcagagaacaagagctctcgtgcgtact

SEQ ID NO: 65015 - DNA, 60 bp, Artificial
  Synthetic oligonucleotide
atgatttggcactccaatctgaatgatgccacctatcagagaacaagagctcttgttcgc

SEQ ID NO: 65016 - DNA, 60 bp, Artificial
  Synthetic oligonucleotide
tgcaacattctcaaggggaaatttcaaacagcagcacaacgagcaatgatggaccaggtg

SEQ ID NO: 65017 - DNA, 60 bp, Artificial
  Synthetic oligonucleotide
gcgccatggtatgctttcgcactgagtagaggctttggatcaggaatcatcacctcaaat

SEQ ID NO: 65018 - DNA, 60 bp, Artificial
  Synthetic oligonucleotide
tagcgccatggtatgctttcgcactgagtagaggctttggatcaggaatcatcacctcaa

SEQ ID NO: 65019 - DNA, 60 bp, Artificial
  Synthetic oligonucleotide
tagcgccatggtatgctttcgcactgagtagaggctttggatcaggaatcatcatctcaa

SEQ ID NO: 65020 - DNA, 60 bp, Artificial
  Synthetic oligonucleotide
agagacataagcgatttgaagcaatatgatagtgacgaacctgaattaaggtcactttca

SEQ ID NO: 65021 - DNA, 54 bp, Artificial
  Synthetic oligonucleotide
gacgactaatccaaaatagcataacaatagagagaatggtactctctgcttttg

SEQ ID NO: 65022 - DNA, 60 bp, Artificial
  Synthetic oligonucleotide
gactctgctgaaacccggtgacacaataatatttgaggcaaatggaaatctaatagcgcc

SEQ ID NO: 65023 - DNA, 60 bp, Artificial
  Synthetic oligonucleotide
gactctgctagaacccggggacacaataatatttgaggcaaatggaaatctaatagcgcc

SEQ ID NO: 65024 - DNA, 60 bp, Artificial
  Synthetic oligonucleotide
ctgctgaaacccggtgacacaataatatttgaggcaaatggaaatctaatagcgccatgg

SEQ ID NO: 65025 - DNA, 60 bp, Artificial
  Synthetic oligonucleotide
ctgctagaacccggggacacaataatatttgaggcaaatggaaatctaatagcgccatgg

SEQ ID NO: 65026 - DNA, 60 bp, Artificial
  Synthetic oligonucleotide
aatggttgatggttggtatggatatcatcacagcaatgatcaaggatccgggtatgcagc

SEQ ID NO: 65027 - DNA, 60 bp, Artificial
  Synthetic oligonucleotide
acactgtgtcaagctttcaggtagactgctttctttggtatgtccgcaaacggtttgcag

SEQ ID NO: 65028 - DNA, 60 bp, Artificial
  Synthetic oligonucleotide
caacactgtgtcaagctttcaggtagactgctttctttggcatatccgcaaacggtttgc

SEQ ID NO: 65029 - DNA, 56 bp, Artificial
  Synthetic oligonucleotide
gctcaccgtgcccagtgagcgaggactgcagcgtagacgctttgtccaaaatgctc

SEQ ID NO: 65030 - DNA, 56 bp, Artificial
  Synthetic oligonucleotide
gctcaccgtgcccagtgagcgaggactgcagcgtagacgctttgtccaaaatgcac

SEQ ID NO: 65031 - DNA, 60 bp, Artificial
  Synthetic oligonucleotide
attggcaaatgttgtgagaaaaatgatgactaattcacaagacacagaactctctttcac

SEQ ID NO: 65032 - DNA, 60 bp, Artificial
  Synthetic oligonucleotide
cagctcacaagagtcaattggtgtggatggcatgccattctgctgcatttgaagatttga

SEQ ID NO: 65033 - DNA, 60 bp, Artificial
  Synthetic oligonucleotide
ataaatgtaaaggattatagcattgtttccagttatgtgtgctcaggacttgttggagac

SEQ ID NO: 65034 - DNA, 54 bp, Artificial
  Synthetic oligonucleotide
ttcgggtacctatgggtcaggctcatggcctgatggggcggacatcaatctcat

SEQ ID NO: 65035 - DNA, 60 bp, Artificial
  Synthetic oligonucleotide
ctccgtacagccatggaacgggaacaggatacaccatggacacagtcaacagaacacatc

SEQ ID NO: 65036 - DNA, 60 bp, Artificial
  Synthetic oligonucleotide
gcatggtccagctcaagttgtcacgatgggaaagcatggctgcatgtttgtgtaacgggg

SEQ ID NO: 65037 - DNA, 60 bp, Artificial
  Synthetic oligonucleotide
tagatgggtggtatggttatcatcatcagaatgaacagggatctggctatgctgcggacc

SEQ ID NO: 65038 - DNA, 60 bp, Artificial
  Synthetic oligonucleotide
gtttggggcaatagctggttttatagaaggaggatggcaaggaatggttgatggttggta

SEQ ID NO: 65039 - DNA, 60 bp, Artificial
  Synthetic oligonucleotide
ctggtgcacttgccagttgcatgggcctcatatacaacagaatgggaacagtgaccacag

SEQ ID NO: 65040 - DNA, 60 bp, Artificial
  Synthetic oligonucleotide
tcattggtactggtagtctccctgggggcaatcagtttctggatgtgctctaatgggtct

SEQ ID NO: 65041 - DNA, 60 bp, Artificial
  Synthetic oligonucleotide
gagcaatgatggatcaagtgagagaaagccggaacccaggaaatgctgagatcgaagatc

SEQ ID NO: 65042 - DNA, 60 bp, Artificial
  Synthetic oligonucleotide
tggtgcacttgccagttgcatgggcctcatatacaacagaatggggactgtcaccactga

SEQ ID NO: 65043 - DNA, 60 bp, Artificial
  Synthetic oligonucleotide
ggccaattaaagaataatgccaaagaaataggaaacgggtgttttgaattctaccacaag

SEQ ID NO: 65044 - DNA, 60 bp, Artificial
  Synthetic oligonucleotide
gactccaacactgtgtcaagctttcaggtagactgttccctttggcacatccgcaaacgg

SEQ ID NO: 65045 - DNA, 60 bp, Artificial
  Synthetic oligonucleotide
atctgttccaccattgaagagctcagacggcagaaataatgaatttagcttgtccttcat

SEQ ID NO: 65046 - DNA, 59 bp, Artificial
  Synthetic oligonucleotide
tgctttgaattttaccacaaatgtgatgacacatgcatggagagcgtcaaaaatgggac

SEQ ID NO: 65047 - DNA, 60 bp, Artificial
  Synthetic oligonucleotide
tgctttgaattttaccacaaatgtgatgacacatgcatggagagcgtcaaaaatgggact

SEQ ID NO: 65048 - DNA, 60 bp, Artificial
  Synthetic oligonucleotide
agaggattgtttggggcaatagctggctttatagaaggaggatggcaaggaatggttgat

SEQ ID NO: 65049 - DNA, 60 bp, Artificial
  Synthetic oligonucleotide
tgggtgttccgtttcacttgggaaccaaacaagtgtgcatagcatggtccagctcaagtt

SEQ ID NO: 65050 - DNA, 60 bp, Artificial
  Synthetic oligonucleotide
tgcagttggggtcctcatcggaggacttgaatggaatagtaacacggttcgaggctctga

SEQ ID NO: 65051 - DNA, 60 bp, Artificial
  Synthetic oligonucleotide
gagaaagctaatgtgttgatagggcaaggagacgtagtgttggtaatgaaacggaaacgg

SEQ ID NO: 65052 - DNA, 57 bp, Artificial
  Synthetic oligonucleotide
ccacaagtgtaacaatgaatgcatggaaagtgtaaaaaatggaacttatgactatcc

SEQ ID NO: 65053 - DNA, 54 bp, Artificial
  Synthetic oligonucleotide
gacggctaatccaaaatagcataacaatagagagaatggtgctctctgcttttg

SEQ ID NO: 65054 - DNA, 60 bp, Artificial
  Synthetic oligonucleotide
taatatgagcaaaaagaaatcttacataaatagaacaggcacctttgaattcacaagctt

SEQ ID NO: 65055 - DNA, 60 bp, Artificial
  Synthetic oligonucleotide
taacatgagcaaaaagaaatcttacataaatagaacaggcacctttgaattcacaagctt

SEQ ID NO: 65056 - DNA, 60 bp, Artificial
  Synthetic oligonucleotide
gatcttgttatgtacatttacagctacatatgcagacacaatatgtataggctaccatgc

SEQ ID NO: 65057 - DNA, 54 bp, Artificial
  Synthetic oligonucleotide
gagtctctgaaactctacagagattcgcttggagaagctgtaatgaggatgggg

SEQ ID NO: 65058 - DNA, 60 bp, Artificial
  Synthetic oligonucleotide
agagttggtccgcaaaacgaggttcctcccagtggctggtgggacaagcagtgtctatat

SEQ ID NO: 65059 - DNA, 60 bp, Artificial
  Synthetic oligonucleotide
tgtaaaattgcccccttgatggtagcatacatgctagaaagagagttagtccgcaaaacg

SEQ ID NO: 65060 - DNA, 60 bp, Artificial
  Synthetic oligonucleotide
cgctgccaggaacatagtaagaagagcaacggtatcagcagacccattagcatctctgtt

SEQ ID NO: 65061 - DNA, 60 bp, Artificial
  Synthetic oligonucleotide
ggcagaatccaacagaggaacaagccgtggacatatgcaaggcagcaatgggactgagga

SEQ ID NO: 65062 - DNA, 60 bp, Artificial
  Synthetic oligonucleotide
tgagagtgcatgaggggtatgaagaattcacaatggttgggagaagagcaacagctattc

SEQ ID NO: 65063 - DNA, 60 bp, Artificial
  Synthetic oligonucleotide
gtagacatccttaggcagaatccaacagaggaacaagccgtggacatatgcaaagcagca

SEQ ID NO: 65064 - DNA, 60 bp, Artificial
  Synthetic oligonucleotide
tacctatcagtggatcatcagaaactgggaaactgttaaaattcagtggtcgcaagaccc

SEQ ID NO: 65065 - DNA, 60 bp, Artificial
  Synthetic oligonucleotide
gcatacgagagaatgtgcaacattctcaaggggaaatttcaaacagcagcacaacgagca

SEQ ID NO: 65066 - DNA, 55 bp, Artificial
  Synthetic oligonucleotide
cttgtacagtagtaatgactgatggaagtgcatcaggacgagctgacactaaaat

SEQ ID NO: 65067 - DNA, 52 bp, Artificial
  Synthetic oligonucleotide
ttggaatttctagcatggtggaggccatggtgtctagggcccggattgatgc

SEQ ID NO: 65068 - DNA, 60 bp, Artificial
  Synthetic oligonucleotide
gtggacacagcatacaacaactggaggttcacgggcctgcgcagtatctggtaacccgtc

SEQ ID NO: 65069 - DNA, 60 bp, Artificial
  Synthetic oligonucleotide
catccagtcacaattggagaatgtccaaaatatgtcaagagcacaaaattgagaatggct

SEQ ID NO: 65070 - DNA, 57 bp, Artificial
  Synthetic oligonucleotide
cggacaatggattgggtgatgccccattccttgatcggctccgccgagatcaaaagt

SEQ ID NO: 65071 - DNA, 60 bp, Artificial
  Synthetic oligonucleotide
ccataatcaagaaatacacatcgggaaggcaagagaagaaccccgcattgagaatgaaat

SEQ ID NO: 65072 - DNA, 60 bp, Artificial
  Synthetic oligonucleotide
ccatatggccataatcaagaaatacacatcgggaaggcaagagaagaaccctgccctcag

SEQ ID NO: 65073 - DNA, 60 bp, Artificial
  Synthetic oligonucleotide
gtggaccatatggccataatcaagaaatacacatcgggaaggcaagagaagaaccctgcc

SEQ ID NO: 65074 - DNA, 60 bp, Artificial
  Synthetic oligonucleotide
atccctaagaggaaccgctccattctcaacacaagccaaaggggaattcttgaggatgaa

SEQ ID NO: 65075 - DNA, 60 bp, Artificial
  Synthetic oligonucleotide
gtagcaggttccctgtcactggcaatcatgatagctgggatctctttctggatgtgctcc

SEQ ID NO: 65076 - DNA, 60 bp, Artificial
  Synthetic oligonucleotide
atgaaggatcttatttcttcggagacaatgcagaggagtacgacaattaaggaaaaatta

SEQ ID NO: 65077 - DNA, 60 bp, Artificial
  Synthetic oligonucleotide
gagcgaggactgcagcgtagacgctttgtccagaatgccctcaatgggaatggtgacccg

SEQ ID NO: 65078 - DNA, 60 bp, Artificial
  Synthetic oligonucleotide
gcccaaagataggtggacacagcatacaacaactggaggttcacagggctgtgcagtatt

SEQ ID NO: 65079 - DNA, 60 bp, Artificial
  Synthetic oligonucleotide
ctcaggtacatatggaacaggctcatggcctgatggggcggacatcaatctcatgcctat

SEQ ID NO: 65080 - DNA, 60 bp, Artificial
  Synthetic oligonucleotide
ttcaggtacttatggaacaggctcatggcctgatggggcgaacatcaatttcatgcctat

SEQ ID NO: 65081 - DNA, 60 bp, Artificial
  Synthetic oligonucleotide
ttcaggtacctatggaacaggctcatggcctgatggggcgaacatcaatttcatgcctat

SEQ ID NO: 65082 - DNA, 60 bp, Artificial
  Synthetic oligonucleotide
ggccagatcagtgtgcaacctacattctcagtgcaacgaaatctcccttttgagaggtca

SEQ ID NO: 65083 - DNA, 60 bp, Artificial
  Synthetic oligonucleotide
atgtgacagtgacacactctgtcaacctacttgaggacagtcacaatgggaaactatgca

SEQ ID NO: 65084 - DNA, 60 bp, Artificial
  Synthetic oligonucleotide
atgtgacagtgacacactctgtcaacctacttgaggacagtcacaatggaaaactgtgcc

SEQ ID NO: 65085 - DNA, 60 bp, Artificial
  Synthetic oligonucleotide
aataatggataagaacatcatattgaaagcaaacttcagtgtgatttttgatcgactgga

SEQ ID NO: 65086 - DNA, 60 bp, Artificial
  Synthetic oligonucleotide
taaaaacatcacattgaaagcaaacttcagtgtgatttttgatcgactggaaactctgat

SEQ ID NO: 65087 - DNA, 60 bp, Artificial
  Synthetic oligonucleotide
tgaaagcaaacttcagtgtgatttttgatcgactggaaactctgatactccttagagctt

SEQ ID NO: 65088 - DNA, 60 bp, Artificial
  Synthetic oligonucleotide
ttcagtgtgatttttgatcgactggaaactctgatactccttagagctttcacggaagaa

SEQ ID NO: 65089 - DNA, 60 bp, Artificial
  Synthetic oligonucleotide
atggttggtatggataccatcacagcaatgatcaaggatcaggatatgcagcagacaaag

SEQ ID NO: 65090 - DNA, 60 bp, Artificial
  Synthetic oligonucleotide
aggaatggttgatggttggtatggataccatcacagcaatgatcaaggatcaggatatgc

SEQ ID NO: 65091 - DNA, 60 bp, Artificial
  Synthetic oligonucleotide
aaaatgagaggacacttgactttcatgattctagtgtcaagaatctgtatgataaagtca

SEQ ID NO: 65092 - DNA, 60 bp, Artificial
  Synthetic oligonucleotide
ggaaaaacacagatcttgaggctctcatggaatggctaaagacaagaccaatcctgtcac

SEQ ID NO: 65093 - DNA, 60 bp, Artificial
  Synthetic oligonucleotide
agcgctcagttactctgctggtgcacttgccagttgcatgggcctcatatacaacagaat

SEQ ID NO: 65094 - DNA, 60 bp, Artificial
  Synthetic oligonucleotide
ctcagttactctgctggtgcacttgccagttgcatgggcctcatatacaacaggatgggg

SEQ ID NO: 65095 - DNA, 60 bp, Artificial
  Synthetic oligonucleotide
agcgcttagttactctgctggtgcacttgccagttgcatgggcctcatatacaacaggat

SEQ ID NO: 65096 - DNA, 60 bp, Artificial
  Synthetic oligonucleotide
agcgcttagttactctgctggtgcacttgccagttgcatgggcctcatatacaacagaat

SEQ ID NO: 65097 - DNA, 60 bp, Artificial
  Synthetic oligonucleotide
aagatgagccttctaaccgaggtcgaaacgtatgttctctctatcgttccgtcaggcccc

SEQ ID NO: 65098 - DNA, 56 bp, Artificial
  Synthetic oligonucleotide
aagatgagccttctaaccgaggtcgaaacgtatgttctctctatcgttccatcagg

SEQ ID NO: 65099 - DNA, 60 bp, Artificial
  Synthetic oligonucleotide
tcttgaggctctcatggaatggctaaagacaagaccaatcctgtcacctctgactagggg

SEQ ID NO: 65100 - DNA, 60 bp, Artificial
  Synthetic oligonucleotide
ggagttaataagagggaggccacaggagactagagtatggtggacctcaaacagtattgt

SEQ ID NO: 65101 - DNA, 60 bp, Artificial
  Synthetic oligonucleotide
ctgattcaaaatagcataacaatagagagaatggtgctctctgcttttgatgagagaagg

SEQ ID NO: 65102 - DNA, 60 bp, Artificial
  Synthetic oligonucleotide
gtatcagaagtgttgcaatctattcgagaaattcttccctagcagttcgtacaggagacc

SEQ ID NO: 65103 - DNA, 60 bp, Artificial
  Synthetic oligonucleotide
atgtatcagaagtgttgcaatctattcgagaaattcttccctagcagttcgtacaggaga

SEQ ID NO: 65104 - DNA, 60 bp, Artificial
  Synthetic oligonucleotide
agttgcatgggcctcatatacaacagaatgggaactgtgaccaccgaagtggcatttggc

SEQ ID NO: 65105 - DNA, 60 bp, Artificial
  Synthetic oligonucleotide
agttgcatgggcctcatatacaacagaatgggaactgtgactactgaagtggcatttggc

SEQ ID NO: 65106 - DNA, 60 bp, Artificial
  Synthetic oligonucleotide
gcccagccaagagcatggaatatgatgctgttgctactacgcactcctggatccctaaga

SEQ ID NO: 65107 - DNA, 60 bp, Artificial
  Synthetic oligonucleotide
aatgctgtggtaatgccagctcacggtccagccaagagcatggaatatgatgctgttgct

SEQ ID NO: 65108 - DNA, 60 bp, Artificial
  Synthetic oligonucleotide
aaaatgcaattgggatcctcatcaaagggcttgaatggaatgataacacagttcgagtct

SEQ ID NO: 65109 - DNA, 60 bp, Artificial
  Synthetic oligonucleotide
aagggtgcatgagggatacgaggagttcacaatggttgggaaaagggcaacagctatact

SEQ ID NO: 65110 - DNA, 60 bp, Artificial
  Synthetic oligonucleotide
accatcacagcaatgatcaaggatcaggatatgcagcagacaaagaatccactcaaaagg

SEQ ID NO: 65111 - DNA, 60 bp, Artificial
  Synthetic oligonucleotide
ccgagatcgcacagagacttgaagatgtctttgcagggaagaacacagatcttgaggctc

SEQ ID NO: 65112 - DNA, 60 bp, Artificial
  Synthetic oligonucleotide
ttttaccataaatgtgatgatgaatgcatgaatagtgtgagaaacgggacatataattat

SEQ ID NO: 65113 - DNA, 66 bp, Artificial
  Synthetic oligonucleotide
gagaatagttttgagcaaataacatttatgcaagccttacaactattgcttgaagtagaacaagag

SEQ ID NO: 65114 - DNA, 60 bp, Artificial
  Synthetic oligonucleotide
gcaaacggtttgcagacgatggattgggtgatgccccattccttgatcggctccgccgag

SEQ ID NO: 65115 - DNA, 51 bp, Artificial
  Synthetic oligonucleotide
cggacaatggattgggtgatgccccattccttgatcggctccgccgagatc

SEQ ID NO: 65116 - DNA, 60 bp, Artificial
  Synthetic oligonucleotide
ggacacttgactttcatgattctaatgtcaagaacctgtatgataaagtcagaatgcagc

SEQ ID NO: 65117 - DNA, 60 bp, Artificial
  Synthetic oligonucleotide
agtgaccatgaagggagactgatccaaaacagcataacaatagagagaatggttctctcg

SEQ ID NO: 65118 - DNA, 60 bp, Artificial
  Synthetic oligonucleotide
aagacaggcataacgggaaactatgtaaactaagaggggtagccccattgcatttgggta

SEQ ID NO: 65119 - DNA, 60 bp, Artificial
  Synthetic oligonucleotide
gaagacaggcataacgggaaactatgtaaactaagaggggtagccccattgcatttgggt

SEQ ID NO: 65120 - DNA, 60 bp, Artificial
  Synthetic oligonucleotide
gaagacaggcataacgggaaactatgtaaactaagaggggtagccccattgcatatgggt

SEQ ID NO: 65121 - DNA, 60 bp, Artificial
  Synthetic oligonucleotide
caggcataacgggaaactatgtaaactaagaggggtagccccattgcatttgggtaaatg

SEQ ID NO: 65122 - DNA, 60 bp, Artificial
  Synthetic oligonucleotide
aattccacagaaaaggtcgacacaattctagagaggaatgtcactgtgactcacgctcag

SEQ ID NO: 65123 - DNA, 60 bp, Artificial
  Synthetic oligonucleotide
cagccacaaatgcagacacattatgtataggttatcatgcaaataattcaactgacactg

SEQ ID NO: 65124 - DNA, 60 bp, Artificial
  Synthetic oligonucleotide
ggatcaggatatgcagcagacaaagaatccactcaaaaggcaattgatgggataactaac

SEQ ID NO: 65125 - DNA, 60 bp, Artificial
  Synthetic oligonucleotide
gatatgcagcagacaaagaatccactcaaaaggcaattgatgggataactaacaaagtaa

SEQ ID NO: 65126 - DNA, 60 bp, Artificial
  Synthetic oligonucleotide
atgatcaaggatcaggatatgcagcagacaaagaatccactcaaaaggcaattgatggga

SEQ ID NO: 65127 - DNA, 60 bp, Artificial
  Synthetic oligonucleotide
cagggatcaggatatgcagcagacaaagaatccactcaaaaggcaattgacgggataact

SEQ ID NO: 65128 - DNA, 60 bp, Artificial
  Synthetic oligonucleotide
caggatatgcagcagacaaagaatccactcaaaaggcggttgacggaatcactaacaagg

SEQ ID NO: 65129 - DNA, 60 bp, Artificial
  Synthetic oligonucleotide
caggatatgcagcagacaaagaatccactcaaaaggcaattgatgggataactaacaaag

SEQ ID NO: 65130 - DNA, 60 bp, Artificial
  Synthetic oligonucleotide
tcaggatatgcagcagacaaagaatccactcaaaaggcaattgatgggataactaacaaa

SEQ ID NO: 65131 - DNA, 60 bp, Artificial
  Synthetic oligonucleotide
atgatcagggatcaggatatgcagcagacaaagaatccactcaaaaggcaattgacggga

SEQ ID NO: 65132 - DNA, 60 bp, Artificial
  Synthetic oligonucleotide
ggtatgcagcagacaaagaatccactcaaaaggcatttgacggaatcaccaacaaggtaa

SEQ ID NO: 65133 - DNA, 60 bp, Artificial
  Synthetic oligonucleotide
ggtatgcagcagacaaagaatccactcaaaaggcatttgatggaatcaccaacaaggtaa

SEQ ID NO: 65134 - DNA, 60 bp, Artificial
  Synthetic oligonucleotide
ggtatgcagcagacaaagaatccactcaaaaggcatttaatggaatcaccaacaaggtaa

SEQ ID NO: 65135 - DNA, 60 bp, Artificial
  Synthetic oligonucleotide
ggatatgcagcagacaaagaatccactcaaaaggcggttgacggaatcactaacaaggtg

SEQ ID NO: 65136 - DNA, 60 bp, Artificial
  Synthetic oligonucleotide
gtctttgctgggaagaacaccgatcttgaggctctcatggaatggctaaagacaagacca

SEQ ID NO: 65137 - DNA, 60 bp, Artificial
  Synthetic oligonucleotide
cctgaatgatgccacctatcagagaacaagagctctcgtgcgtactgggatggatccaag

SEQ ID NO: 65138 - DNA, 60 bp, Artificial
  Synthetic oligonucleotide
tggcattccaacctgaatgatgccacctatcagagaacaagagctctcgtgcgtactggg

SEQ ID NO: 65139 - DNA, 60 bp, Artificial
  Synthetic oligonucleotide
agacacaatatgtataggctaccatgcgaacaattcaaccgacactgttgacacagtcct

SEQ ID NO: 65140 - DNA, 60 bp, Artificial
  Synthetic oligonucleotide
acacaatatgtataggctaccatgcgaacaattcaaccgacactgttgacacagtcctcg

SEQ ID NO: 65141 - DNA, 60 bp, Artificial
  Synthetic oligonucleotide
cccctttgcatcagaatggaccaggcaataatggataaaaacatcacattgaaagcaaac

SEQ ID NO: 65142 - DNA, 60 bp, Artificial
  Synthetic oligonucleotide
tccctttgcatcagaatggaccaggcaataatggataaaaacatcacattgaaagcaaac

SEQ ID NO: 65143 - DNA, 60 bp, Artificial
  Synthetic oligonucleotide
ccaaagaaataggaaacgggtgttttgaattctaccacaagtgtaacaatgaatgcatgg

SEQ ID NO: 65144 - DNA, 60 bp, Artificial
  Synthetic oligonucleotide
aacaatgccaaagaaataggaaacgggtgttttgaattctaccacaagtgtaacaatgaa

SEQ ID NO: 65145 - DNA, 60 bp, Artificial
  Synthetic oligonucleotide
gccaaagaaataggaaacgggtgttttgaattctaccacaagtgtaacaatgaatgcatg

SEQ ID NO: 65146 - DNA, 60 bp, Artificial
  Synthetic oligonucleotide
gaacaatgccaaagaaataggaaacgggtgttttgaattctaccacaagtgtaacaatga

SEQ ID NO: 65147 - DNA, 60 bp, Artificial
  Synthetic oligonucleotide
caattaaagaacaatgccaaagaaataggaaacgggtgttttgaattctaccacaagtgt

SEQ ID NO: 65148 - DNA, 60 bp, Artificial
  Synthetic oligonucleotide
cttgccagttgcatgggcctcatatacaacagaatggggactgtcaccactgaggtggcc

SEQ ID NO: 65149 - DNA, 60 bp, Artificial
  Synthetic oligonucleotide
cacttgccagttgcatgggcctcatatacaacagaatggggactgtcaccactgaggtgg

SEQ ID NO: 65150 - DNA, 60 bp, Artificial
  Synthetic oligonucleotide
tagcaacaaggcctaaagtgaatggacaaggaggtagaatggaattctcttggaccctat

SEQ ID NO: 65151 - DNA, 60 bp, Artificial
  Synthetic oligonucleotide
atagcaacaaggcttaaagtgaatggacaaggaggtagaatggaattctcttggaccctc

SEQ ID NO: 65152 - DNA, 60 bp, Artificial
  Synthetic oligonucleotide
gcaaaagcagggtgacaaatacataatggattccaacacgataacctcgtttcaggtaga

SEQ ID NO: 65153 - DNA, 60 bp, Artificial
  Synthetic oligonucleotide
agcaaaagcagggtgacaaatacataatggattccaacacgataacctcgtttcaggtag

SEQ ID NO: 65154 - DNA, 57 bp, Artificial
  Synthetic oligonucleotide
taaagagcacacagaatgccattgacgggatcactaacaaagtaaattctgttattg

SEQ ID NO: 65155 - DNA, 60 bp, Artificial
  Synthetic oligonucleotide
gagcacacagaatgccattgacgggatcactaacaaagtaaattctgttattgacaagat

SEQ ID NO: 65156 - DNA, 60 bp, Artificial
  Synthetic oligonucleotide
gtacaggagaccagttggaatttccagcatggtggaggccatggtgtctagggcccggat

SEQ ID NO: 65157 - DNA, 52 bp, Artificial
  Synthetic oligonucleotide
ccagttggaatttccagcatggtggaggccatggtgtctagggcccggattg

SEQ ID NO: 65158 - DNA, 60 bp, Artificial
  Synthetic oligonucleotide
ccagttggaatttccagcatggtggaggccatggtgtctagggcccggattgatgcacgg

SEQ ID NO: 65159 - DNA, 60 bp, Artificial
  Synthetic oligonucleotide
gaccagttggaatttccagcatggtggaggccatggtgtctagggcccggattgatgcac

SEQ ID NO: 65160 - DNA, 60 bp, Artificial
  Synthetic oligonucleotide
gcattgaggaaataagcagggaatggtacatgctcatgccaaggcagaagattacagggg

SEQ ID NO: 65161 - DNA, 60 bp, Artificial
  Synthetic oligonucleotide
gagcattgaggaaataagcagggaatggtacatgctcatgccaaggcagaagattacagg

SEQ ID NO: 65162 - DNA, 54 bp, Artificial
  Synthetic oligonucleotide
ttgtagctgaaatatatcccattccttctatgccaggacattctactgaggatg

SEQ ID NO: 65163 - DNA, 60 bp, Artificial
  Synthetic oligonucleotide
gtttgaagagatcagatggctgattgcagaatgcagaaacatattaactaaaactgaaaa

SEQ ID NO: 65164 - DNA, 60 bp, Artificial
  Synthetic oligonucleotide
gatggctgattgcagaatgcagaaacatattaactaaaactgaaaacagcttcgagcaga

SEQ ID NO: 65165 - DNA, 60 bp, Artificial
  Synthetic oligonucleotide
attgggagattctacatacagatgtgcactgaactcaaactcagcgactatgaagggagg

SEQ ID NO: 65166 - DNA, 60 bp, Artificial
  Synthetic oligonucleotide
gtggacatacaatgctgagcttctagttctgatggaaaatgagaggacacttgacttcca

SEQ ID NO: 65167 - DNA, 60 bp, Artificial
  Synthetic oligonucleotide
gatgtgtggacatacaatgcagagcttctagttctgatggaaaatgagaggacacttgac

SEQ ID NO: 65168 - DNA, 60 bp, Artificial
  Synthetic oligonucleotide
gttgtttggggcaatagctggttttatagaaggaggatggcaaggaatggttgatggttg

SEQ ID NO: 65169 - DNA, 60 bp, Artificial
  Synthetic oligonucleotide
tcaagagggttgtttggggcaatagctggttttatagaaggaggatggcaaggaatggtt

SEQ ID NO: 65170 - DNA, 60 bp, Artificial
  Synthetic oligonucleotide
gatgtgtggacatacaatgctgagctcttagttctgatggaaaatgagaggacacttgac

SEQ ID NO: 65171 - DNA, 60 bp, Artificial
  Synthetic oligonucleotide
gcatggtccagctcaagttgtcacgatggaaaagcatggctgcatgtttgtgtaacgggg

SEQ ID NO: 65172 - DNA, 60 bp, Artificial
  Synthetic oligonucleotide
tattgaatgcaccaaatcatgagggaatacaagcaggagtggatagattctacagaacct

SEQ ID NO: 65173 - DNA, 60 bp, Artificial
  Synthetic oligonucleotide
gtgaatgcaccaaatcatgagggaatacaagcaggagtggatagattctacagaacctgc

SEQ ID NO: 65174 - DNA, 60 bp, Artificial
  Synthetic oligonucleotide
gtgaatgcaccaaatcatgagggaatacaagcaggggtggatagattctacagaacctgc

SEQ ID NO: 65175 - DNA, 60 bp, Artificial
  Synthetic oligonucleotide
ttgggaaaagggcaacagctatactcagaaaagcaaccaggagattaattcagctgatag

SEQ ID NO: 65176 - DNA, 60 bp, Artificial
  Synthetic oligonucleotide
ggggaaaagggcaacagctatactcagaaaagcaaccaggagattggttcagctgatagt

SEQ ID NO: 65177 - DNA, 60 bp, Artificial
  Synthetic oligonucleotide
aacccgactctacttttcctaaaggttccagcgcaaaatgccataagcaccacattccct

SEQ ID NO: 65178 - DNA, 60 bp, Artificial
  Synthetic oligonucleotide
cccgactctacttttcctaaaggttccagcgcaaaatgccataagcaccacattccctta

SEQ ID NO: 65179 - DNA, 60 bp, Artificial
  Synthetic oligonucleotide
ggatgtcaacccgactctgcttttcctaaaggttccagcgcaaaatgccataagcaccac

SEQ ID NO: 65180 - DNA, 60 bp, Artificial
  Synthetic oligonucleotide
atttcagaatatacatccagtcacaattggagaatgtccaaaatatgtcaaaagcacaaa

SEQ ID NO: 65181 - DNA, 60 bp, Artificial
  Synthetic oligonucleotide
acagtattggttcatggtctcaaaatatcctcaggacccaggagtcggaatgcgtttgta

SEQ ID NO: 65182 - DNA, 60 bp, Artificial
  Synthetic oligonucleotide
cctagaagagcatcccagtgctgggaaggatcctaagaaaactggaggacccatatatag

SEQ ID NO: 65183 - DNA, 60 bp, Artificial
  Synthetic oligonucleotide
gcaacaaggcctaaagtgaatggacaaggaggtagaatggaattctcgtggactatcttg

SEQ ID NO: 65184 - DNA, 60 bp, Artificial
  Synthetic oligonucleotide
gagagcactggtaatttaatagcaccagaatatggattcaaaatatcaaagagaggaggc

SEQ ID NO: 65185 - DNA, 60 bp, Artificial
  Synthetic oligonucleotide
cccagcgagacacttaagatgaccattgcatctgtacctacttcgcgctacctaactgac

SEQ ID NO: 65186 - DNA, 60 bp, Artificial
  Synthetic oligonucleotide
ggaatccagcgagacacttaagatgaccattgcatctgtacctacttcgcgctacttagc

SEQ ID NO: 65187 - DNA, 60 bp, Artificial
  Synthetic oligonucleotide
tatcaatttgcactcgggcaggggaccacactagacaacaaacattcaaatggcacagta

SEQ ID NO: 65188 - DNA, 60 bp, Artificial
  Synthetic oligonucleotide
tatcaatttgcactcgggcaggggaccacactagacaacaaacattcaaatgacacagta

SEQ ID NO: 65189 - DNA, 60 bp, Artificial
  Synthetic oligonucleotide
tatcaatttgcactcgggcaggggaccacactagacaacaaacattcaaatgacacaata

SEQ ID NO: 65190 - DNA, 60 bp, Artificial
  Synthetic oligonucleotide
tatcaatttgcactcgggcaggggaccacactagacaacaaacattcaaatggcacaata

SEQ ID NO: 65191 - DNA, 60 bp, Artificial
  Synthetic oligonucleotide
ttatcagtttgcactcgggcaggggaccacactagacaacaaacattcaaatggcacaat

SEQ ID NO: 65192 - DNA, 60 bp, Artificial
  Synthetic oligonucleotide
catgagtaatgaagggtcttatttcttcggagacaatgcagaggagtatgacaattgaag

SEQ ID NO: 65193 - DNA, 60 bp, Artificial
  Synthetic oligonucleotide
cataatggactccaacactgtgtcaagctttcaggtagattgtttcctttggcatatccg

SEQ ID NO: 65194 - DNA, 60 bp, Artificial
  Synthetic oligonucleotide
ggaacaggctcatggcctgatggggcgaacatcaatttcatgcctatataacgtttcgca

SEQ ID NO: 65195 - DNA, 60 bp, Artificial
  Synthetic oligonucleotide
gcaattggggtcctcatcggaggacttgaatggaatgataacaaagttcgagtctctaaa

SEQ ID NO: 65196 - DNA, 60 bp, Artificial
  Synthetic oligonucleotide
gcaattggggtcctcatcggaggacttgaatggaatgataacacagctcgagtctctaaa

SEQ ID NO: 65197 - DNA, 55 bp, Artificial
  Synthetic oligonucleotide
ctcaggtacatatggaacaggctcatggcctgatggggcggacatcaatctcatg

SEQ ID NO: 65198 - DNA, 55 bp, Artificial
  Synthetic oligonucleotide
gcctgattaatgatccctgggttttgcttaatgcgtcttggttcaactccttcct

SEQ ID NO: 65199 - DNA, 60 bp, Artificial
  Synthetic oligonucleotide
atcgtcccgtcaggccccctcaaagccgagatcgcgcagagacttgaagatgtctttgca

SEQ ID NO: 65200 - DNA, 60 bp, Artificial
  Synthetic oligonucleotide
cagattgctgactcccagcataggtctcatagacaaatggtgacaacaaccaatccacta

SEQ ID NO: 65201 - DNA, 60 bp, Artificial
  Synthetic oligonucleotide
tccttgatcggctccgccgagatcaaaagtccctaaaaggaagaggcaacacccttggcc

SEQ ID NO: 65202 - DNA, 60 bp, Artificial
  Synthetic oligonucleotide
attgatcggctccgccgagatcaaaagtccctaaaaggaagaggcaacacccttggcatc

SEQ ID NO: 65203 - DNA, 60 bp, Artificial
  Synthetic oligonucleotide
tgaaggaaggctgatccaaaacagcataacaatagagagaatggttctttctgcattcga

SEQ ID NO: 65204 - DNA, 60 bp, Artificial
  Synthetic oligonucleotide
agggagactgatccaaaacagcataacaatagagagaatggttctctcggcatttgatga

SEQ ID NO: 65205 - DNA, 60 bp, Artificial
  Synthetic oligonucleotide
gggagactgatccaaaacagcataacaatagagagaatggttctctcggcatttgatgag

SEQ ID NO: 65206 - DNA, 60 bp, Artificial
  Synthetic oligonucleotide
ggaaggctgatccaaaacagcataacaatagagagaatggttctttctgcattcgatgaa

SEQ ID NO: 65207 - DNA, 60 bp, Artificial
  Synthetic oligonucleotide
actcacttgatgatttggcattccaacctgaatgatgccacctatcagagaacaagagct

SEQ ID NO: 65208 - DNA, 60 bp, Artificial
  Synthetic oligonucleotide
actcacctgatgatttggcattccaacctgaatgatgccacctatcagagaacaagagct

SEQ ID NO: 65209 - DNA, 60 bp, Artificial
  Synthetic oligonucleotide
cagttattctgctggtgcacttgccagttgcatgggcctcatatacaacaggatggggac

SEQ ID NO: 65210 - DNA, 58 bp, Artificial
  Synthetic oligonucleotide
cagttattctgctggtgcacttgccagttgcatgggcctcatatacaacaggatgggg

SEQ ID NO: 65211 - DNA, 60 bp, Artificial
  Synthetic oligonucleotide
gaggaaagctgtccacaagaggggttcagattgcttcaaatgagaatgtggaagccatgg

SEQ ID NO: 65212 - DNA, 60 bp, Artificial
  Synthetic oligonucleotide
gaggaaagccttccacaagaggggttcagattgcttcaaatgagaatgtggaagccatgg

SEQ ID NO: 65213 - DNA, 60 bp, Artificial
  Synthetic oligonucleotide
caagaggaaagccttccacaagaggggttcagattgcttcaaatgagaatgtggaagcca

SEQ ID NO: 65214 - DNA, 60 bp, Artificial
  Synthetic oligonucleotide
caagaggaaagctttccacaagaggggttcagattgcttcaaatgagaatgtggaagcca

SEQ ID NO: 65215 - DNA, 60 bp, Artificial
  Synthetic oligonucleotide
gcacataagtcttgcctgcctgcttgtgtgtatgggcttgcagtagcaagtgggcatgac

SEQ ID NO: 65216 - DNA, 60 bp, Artificial
  Synthetic oligonucleotide
cagttgcacataagtcttgcctgcctgcttgtgtgtatgggcttgcagtagcaagtgggc

SEQ ID NO: 65217 - DNA, 60 bp, Artificial
  Synthetic oligonucleotide
tggctcataagtcctgcctgcctgcttgtgtgtatggacttgctgtggccagtggatacg

SEQ ID NO: 65218 - DNA, 60 bp, Artificial
  Synthetic oligonucleotide
tctgttgaaggcaaaagctgcatcaatcggtgcttttatgtggagttgataaggggaagg

SEQ ID NO: 65219 - DNA, 60 bp, Artificial
  Synthetic oligonucleotide
cctcatcggaggacttgaatggaatggtaacacggttcgagtctctgaaaatctacagag

SEQ ID NO: 65220 - DNA, 60 bp, Artificial
  Synthetic oligonucleotide
gggtcctcgtcggaggacttgaatggaatggtaacacggttcgagtctctgaaaatctac

SEQ ID NO: 65221 - DNA, 60 bp, Artificial
  Synthetic oligonucleotide
aaaaacaccgatcttgaggctctcatggaatggctaaagacaagaccaatcctgtcacct

SEQ ID NO: 65222 - DNA, 60 bp, Artificial
  Synthetic oligonucleotide
aagcggtttgcagactacggactgggtgatgccccattccttgatcggctccgccgagat

SEQ ID NO: 65223 - DNA, 60 bp, Artificial
  Synthetic oligonucleotide
tatacgcaagcggtttgcagactacggactgggtgatgccccattccttgatcggctccg

SEQ ID NO: 65224 - DNA, 60 bp, Artificial
  Synthetic oligonucleotide
gtctttgctgggaagaacaccgatcttgaggctctcatggagtggctaaagacaagacca

SEQ ID NO: 65225 - DNA, 60 bp, Artificial
  Synthetic oligonucleotide
gaccgtgactcactcaattaatttgcttgaagacagccataatgggaaactctgcagcct

SEQ ID NO: 65226 - DNA, 60 bp, Artificial
  Synthetic oligonucleotide
cgaactgctcgttctacttgaaaatgaaaggactctggactttcatgattccaatgtgag

SEQ ID NO: 65227 - DNA, 60 bp, Artificial
  Synthetic oligonucleotide
ggacatacaatgtcgaactgctcgttctacttgaaaatgaaaggactctggactttcatg

SEQ ID NO: 65228 - DNA, 55 bp, Artificial
  Synthetic oligonucleotide
aaatggaagattttgtgcgacaatgcttcaacccgatgattgtcgaacttgcaga

SEQ ID NO: 65229 - DNA, 60 bp, Artificial
  Synthetic oligonucleotide
cagttactctgctggtgcacttgccagttgcatgggcctcatatacaacaggatgggggc

SEQ ID NO: 65230 - DNA, 60 bp, Artificial
  Synthetic oligonucleotide
aagatgagccttctaaccgaggtcgaaacgtacgttctctctattgttccatcaggcccc

SEQ ID NO: 65231 - DNA, 60 bp, Artificial
  Synthetic oligonucleotide
aaggggaaagaagtccttgtgctatggggcattcaccatccatctaccagtaatgatcaa

SEQ ID NO: 65232 - DNA, 60 bp, Artificial
  Synthetic oligonucleotide
gtaaaaggccaattaaagaataatgccaaagaaataggaaacgggtgttttgaattctac

SEQ ID NO: 65233 - DNA, 60 bp, Artificial
  Synthetic oligonucleotide
gtaaagggccaattaaagaataatgccaaagaaataggaaacgggtgttttgaattctac

SEQ ID NO: 65234 - DNA, 60 bp, Artificial
  Synthetic oligonucleotide
ctcgagaagaatgtgacagtaacacactctgtcaacctacttgaggacagtcacaatggg

SEQ ID NO: 65235 - DNA, 60 bp, Artificial
  Synthetic oligonucleotide
cacttcaggtacctatggaacaggctcatggcctgatggggcgaacatcaattttatgcc

SEQ ID NO: 65236 - DNA, 60 bp, Artificial
  Synthetic oligonucleotide
ttcaggtacttatggaacaggctcatggcctgatggggcgaacaccaatttcatgcctat

SEQ ID NO: 65237 - DNA, 60 bp, Artificial
  Synthetic oligonucleotide
caggtacttatggaacaggctcatggcctgatggggcgaacatcaatttcatgcctatat

SEQ ID NO: 65238 - DNA, 60 bp, Artificial
  Synthetic oligonucleotide
caggtacttatggaacaggctcatggcctgatggggcgaacaccaatttcatgcctatat

SEQ ID NO: 65239 - DNA, 60 bp, Artificial
  Synthetic oligonucleotide
atcagaatagaccaggcaatcatggataagaacatcatgttgaaagcgaatttcagtgtg

SEQ ID NO: 65240 - DNA, 60 bp, Artificial
  Synthetic oligonucleotide
tcacagcagtgagaggggaccagatatgcattggataccatgccaataattccacagaga

SEQ ID NO: 65241 - DNA, 60 bp, Artificial
  Synthetic oligonucleotide
cggtttgcagactacggactgggtgatgccccattccttgatcggctccgccgagatcaa

SEQ ID NO: 65242 - DNA, 60 bp, Artificial
  Synthetic oligonucleotide
ggttctctgtcactggcaatcatgatagctgggatctctttctggatgtgctccaacggg

SEQ ID NO: 65243 - DNA, 60 bp, Artificial
  Synthetic oligonucleotide
tcccagcgcggggaaagatcctaagaaaactggaggacccatatacaagagagtagatgg

SEQ ID NO: 65244 - DNA, 60 bp, Artificial
  Synthetic oligonucleotide
tgatgcaaggatcaactctcccgaggagatctggagcagctggtgcagcagtaaagggaa

SEQ ID NO: 65245 - DNA, 60 bp, Artificial
  Synthetic oligonucleotide
ggagaggcgaaaatgggcgaagaacaaggattgcatatgagagaatgtgcaacatcctca

SEQ ID NO: 65246 - DNA, 60 bp, Artificial
  Synthetic oligonucleotide
cctcgaacctgggacctttgatcttggagggctatatgaagcaattgaggagtgcctgat

SEQ ID NO: 65247 - DNA, 60 bp, Artificial
  Synthetic oligonucleotide
tcttgaacctggaacctttgatcttggggggctatatgaagcaattgaggagtgcctgat

SEQ ID NO: 65248 - DNA, 60 bp, Artificial
  Synthetic oligonucleotide
tcttgaacctgggacctttgatcttggggggctatatgaagcaattgaggagtgcctgat

SEQ ID NO: 65249 - DNA, 60 bp, Artificial
  Synthetic oligonucleotide
ctcagtgccaaagaggcacaggatgtaatcatggaagttgttttcccaaatgaagtgggg

SEQ ID NO: 65250 - DNA, 60 bp, Artificial
  Synthetic oligonucleotide
gacctcagtgccaaagaggcacaggatgtaatcatggaagttgttttcccaaatgaagtg

SEQ ID NO: 65251 - DNA, 60 bp, Artificial
  Synthetic oligonucleotide
gcagggaaaaacaccgatcttgaggctctcatggaatggctaaagacaagaccaatcctg

SEQ ID NO: 65252 - DNA, 60 bp, Artificial
  Synthetic oligonucleotide
ttgcagggaaaaacaccgatcttgaggctctcatggaatggctaaagacaagaccaatcc

SEQ ID NO: 65253 - DNA, 60 bp, Artificial
  Synthetic oligonucleotide
tgagaggatcagtggctcataaatcctgcctgcctgcttgtgtgtatggacttgctgtgg

SEQ ID NO: 65254 - DNA, 60 bp, Artificial
  Synthetic oligonucleotide
acggtctgaaaagagggccttctacggaaggagtaccagagtctatgagggaagaatatc

SEQ ID NO: 65255 - DNA, 60 bp, Artificial
  Synthetic oligonucleotide
cggtctgaaaagagggccttctacggaaggagtaccagagtctatgagggaagaatatcg

SEQ ID NO: 65256 - DNA, 60 bp, Artificial
  Synthetic oligonucleotide
gggcaatgatggatcaagtgagagaaagtcggaacccagggaatgctgagatcgaagatc

SEQ ID NO: 65257 - DNA, 60 bp, Artificial
  Synthetic oligonucleotide
taaagtgaatggacaaggaggtagaatggaattctcttggaccctcttggatatgtggga

SEQ ID NO: 65258 - DNA, 60 bp, Artificial
  Synthetic oligonucleotide
gtgaatggacaaggaggtagaatggaattctcttggaccctcttggatatgtgggacacc

SEQ ID NO: 65259 - DNA, 60 bp, Artificial
  Synthetic oligonucleotide
aaagtgaatggacaaggaggtagaatggaattctcttggaccctcttggatatgtgggac

SEQ ID NO: 65260 - DNA, 60 bp, Artificial
  Synthetic oligonucleotide
aaaggattatagcattgtttccagttatgtgtgctcaggacttgttggagacacacccag

SEQ ID NO: 65261 - DNA, 60 bp, Artificial
  Synthetic oligonucleotide
aaggattatagcattgtttccagttatgtgtgctcaggacttgttggagacacacccaga

SEQ ID NO: 65262 - DNA, 60 bp, Artificial
  Synthetic oligonucleotide
tcaccgtgcccagtgagcgaggactgcagcgtagacgctttgtccagaatgccctcaatg

SEQ ID NO: 65263 - DNA, 60 bp, Artificial
  Synthetic oligonucleotide
ccgtgcccagtgagcgaggactgcagcgtagacgctttgtccaaactgccctaaatggga

SEQ ID NO: 65264 - DNA, 60 bp, Artificial
  Synthetic oligonucleotide
gctcaccgtgcccagtgagcgaggactgcagcgtagacgctttgtccagaatgcccccaa

SEQ ID NO: 65265 - DNA, 60 bp, Artificial
  Synthetic oligonucleotide
cctgttatgtgcactttcagctacagatgcagacacaatatgtataggctaccatgcgaa

SEQ ID NO: 65266 - DNA, 60 bp, Artificial
  Synthetic oligonucleotide
ggagacctccactcactccaaaacagaaacggaaaatggcgagaacaattaggtcaaaag

SEQ ID NO: 65267 - DNA, 60 bp, Artificial
  Synthetic oligonucleotide
ggagatctccactcactccaaaacagaaacggaaaatggcgagaacaattaggtcaaaag

SEQ ID NO: 65268 - DNA, 60 bp, Artificial
  Synthetic oligonucleotide
aaagcaggcaaaccatttgaatggatgtcaacccgactctacttttcctaaaggttccag

SEQ ID NO: 65269 - DNA, 60 bp, Artificial
  Synthetic oligonucleotide
atactaatgaggatgtcaaaaatgcaattggggtcctcatcggaggacttgaatggaatg

SEQ ID NO: 65270 - DNA, 60 bp, Artificial
  Synthetic oligonucleotide
cacattctgttaaccttctagaagacagacataacgggaaactatgtaaactaagaggga

SEQ ID NO: 65271 - DNA, 60 bp, Artificial
  Synthetic oligonucleotide
cgggaaactatgtaaactaagaggagtagccccattgcatttgggtaaatgtaacattgc

SEQ ID NO: 65272 - DNA, 60 bp, Artificial
  Synthetic oligonucleotide
gcggggaaggatcctaagaaaactggaggacccatatacaagagagtagatagaaagtgg

SEQ ID NO: 65273 - DNA, 60 bp, Artificial
  Synthetic oligonucleotide
gggtcctcatcaaaggacttgaatggaatgataacacagttcgagtctctaaagctctac

SEQ ID NO: 65274 - DNA, 60 bp, Artificial
  Synthetic oligonucleotide
cgaatggaccaggcgatcatggaaaagaacatcatactgaaagcgaacttcagtgtgatc

SEQ ID NO: 65275 - DNA, 60 bp, Artificial
  Synthetic oligonucleotide
ggaccaggcgatcatggaaaagaacatcatactgaaagcgaacttcagtgtgatctttaa

SEQ ID NO: 65276 - DNA, 60 bp, Artificial
  Synthetic oligonucleotide
gcgaatggaccaggcgatcatggaaaagaacatcatactgaaagcgaacttcagtgtgat

SEQ ID NO: 65277 - DNA, 60 bp, Artificial
  Synthetic oligonucleotide
tgcagcaatatgcactcacttggaggtatgtttcatgtattcagattttcatttcatcaa

SEQ ID NO: 65278 - DNA, 60 bp, Artificial
  Synthetic oligonucleotide
cagcaatatgcactcacttggaggtatgtttcatgtattcagattttcatttcatcaatg

SEQ ID NO: 65279 - DNA, 60 bp, Artificial
  Synthetic oligonucleotide
cagaaaggagatagatggagtgaagttggaatcaacaaggatttaccagattttggcgat

SEQ ID NO: 65280 - DNA, 60 bp, Artificial
  Synthetic oligonucleotide
ataagtcttgcctgcctgcttgtgtgtatggacttgcagtagcgagtgggcatgactttg

SEQ ID NO: 65281 - DNA, 60 bp, Artificial
  Synthetic oligonucleotide
gggcggctgatccagaacagcttaacaatagagagaatggtgctctctgcttttgatgag

SEQ ID NO: 65282 - DNA, 60 bp, Artificial
  Synthetic oligonucleotide
tcttggagggctatatgaagcaattgaggagtgcctgattaatgatccctgggttttgct

SEQ ID NO: 65283 - DNA, 60 bp, Artificial
  Synthetic oligonucleotide
gggcctatatgaagcaattgaggagtgcctgattaatgatccctgggttttgcttaatgc

SEQ ID NO: 65284 - DNA, 60 bp, Artificial
  Synthetic oligonucleotide
gggctatatgaagcaattgaggagtgcctgattaatgatccctgggttttgctcaatgcg

SEQ ID NO: 65285 - DNA, 60 bp, Artificial
  Synthetic oligonucleotide
gcgagcgaggactgcagcgtagacgctttgtccagaatgccctcaatgggaatggtgacc

SEQ ID NO: 65286 - DNA, 60 bp, Artificial
  Synthetic oligonucleotide
ggcacctcaggtacatatggaacaggctcatggcctgatggggcggacatcaatctcatg

SEQ ID NO: 65287 - DNA, 60 bp, Artificial
  Synthetic oligonucleotide
catccacctaccagtactgatcaacaaagcctctaccagaatgcagatgcctatgttttt

SEQ ID NO: 65288 - DNA, 59 bp, Artificial
  Synthetic oligonucleotide
catccacctaccagtactgatcaacaaagcctctaccagaatgcagatgcctatgtttt

SEQ ID NO: 65289 - DNA, 60 bp, Artificial
  Synthetic oligonucleotide
ctctaaaactctacagagattcgcttggagaagcagtaatgaggatgggagacctccact

SEQ ID NO: 65290 - DNA, 54 bp, Artificial
  Synthetic oligonucleotide
gaagaacaaggattgcatatgaaagaatgtgcaacattctcaaagggaaatttc

SEQ ID NO: 65291 - DNA, 60 bp, Artificial
  Synthetic oligonucleotide
tcattgaaggggggtggactggaatggtagatgggtggtatggttatcatcatcagaatg

SEQ ID NO: 65292 - DNA, 60 bp, Artificial
  Synthetic oligonucleotide
ggagaatgcccaaagtacgtcaggagtacaaaattaaggatggttacaggactaagaaac

SEQ ID NO: 65293 - DNA, 60 bp, Artificial
  Synthetic oligonucleotide
cagccagcttttggatgtgttctaatgggtctttgcagtgcagaatatgcatctgagacc

SEQ ID NO: 65294 - DNA, 60 bp, Artificial
  Synthetic oligonucleotide
ccagcttttggatgtgttctaatgggtctttgcagtgcagaatatgcatctgagaccaga

SEQ ID NO: 65295 - DNA, 60 bp, Artificial
  Synthetic oligonucleotide
gccagcttttggatgtgttctaatgggtctttgcagtgcagaatatgcatctgagaccag

SEQ ID NO: 65296 - DNA, 60 bp, Artificial
  Synthetic oligonucleotide
accagcttttggatgtgttctaatgggtctttgcagtgcagaatatgcatctgagaccag

SEQ ID NO: 65297 - DNA, 60 bp, Artificial
  Synthetic oligonucleotide
gatctactcaactgtcgccagttcactggtgcttttagtctccctgggggcaaccagctt

SEQ ID NO: 65298 - DNA, 60 bp, Artificial
  Synthetic oligonucleotide
gatctactcaactgtcgccagttcactggtgcttttagtctccctgggggcagccagctt

SEQ ID NO: 65299 - DNA, 60 bp, Artificial
  Synthetic oligonucleotide
tctactcaactgtcgccagttcactggtgcttttagtctccctgggggcaaccagctttt

SEQ ID NO: 65300 - DNA, 60 bp, Artificial
  Synthetic oligonucleotide
gatctactcaactgtcgccagttcactggtgcttttagtctccctgggggcaatcagctt

SEQ ID NO: 65301 - DNA, 56 bp, Artificial
  Synthetic oligonucleotide
caaccagcttttggatgtgttctaatgggtctttgcagtgcagaatatgcatctga

SEQ ID NO: 65302 - DNA, 60 bp, Artificial
  Synthetic oligonucleotide
caatcagcttttggatgtgttctaatgggtctttgcagtgcaaaatatgcatctgaggcc

SEQ ID NO: 65303 - DNA, 60 bp, Artificial
  Synthetic oligonucleotide
tactgacagccagacagcgaccaaaagaattcggatggccatcaattaatgttgaatagt

SEQ ID NO: 65304 - DNA, 60 bp, Artificial
  Synthetic oligonucleotide
aggagtgaaattgagcaatatgggggtttatcaaatacttgctatatacgctacagtggc

SEQ ID NO: 65305 - DNA, 60 bp, Artificial
  Synthetic oligonucleotide
ggagtgaaattgagcaatatgggggtttatcaaatacttgctatatacgctacagtggcg

SEQ ID NO: 65306 - DNA, 60 bp, Artificial
  Synthetic oligonucleotide
cataagtactacattcccttatactggagatcctccatacagccatgggacaggaacagg

SEQ ID NO: 65307 - DNA, 60 bp, Artificial
  Synthetic oligonucleotide
cagaccaagaactgggtgatgccccattcctcgatcggcttcgccgagatcagaagtccc

SEQ ID NO: 65308 - DNA, 60 bp, Artificial
  Synthetic oligonucleotide
ggatcctcatcaaagggcttgaatggaatgataacacagttcgagtctctgaagctctac

SEQ ID NO: 65309 - DNA, 60 bp, Artificial
  Synthetic oligonucleotide
gggcgactgatccagaacagcttaacaatagagagaatggtgctctctgcttttgacgag

SEQ ID NO: 65310 - DNA, 60 bp, Artificial
  Synthetic oligonucleotide
gaatggacgtcaatccgactttgcttttcctgaaagtgccagcacaaaatgctataagca

SEQ ID NO: 65311 - DNA, 60 bp, Artificial
  Synthetic oligonucleotide
aaaggagagtgagggacaatatgactaagaaaatggtgacgcaaagaacaataggtaaaa

SEQ ID NO: 65312 - DNA, 60 bp, Artificial
  Synthetic oligonucleotide
ccaattctcaggacactgaactctcctttaccatcactggagataataccaaatggaatg

SEQ ID NO: 65313 - DNA, 60 bp, Artificial
  Synthetic oligonucleotide
caggaacaggatacaccatggatactgtgaacagaacacatcagtactcagaaagaggga

SEQ ID NO: 65314 - DNA, 60 bp, Artificial
  Synthetic oligonucleotide
ggatacaccatggatactgtgaacagaacacatcagtactcagaaagaggaagatggaca

SEQ ID NO: 65315 - DNA, 60 bp, Artificial
  Synthetic oligonucleotide
ccgactttgcttttcctgaaagtgccagcacaaaatgctataagcacaacgttcccttac

SEQ ID NO: 65316 - DNA, 60 bp, Artificial
  Synthetic oligonucleotide
gctataagcacaacgtttccttacactggagaccccccttacagccatgggacaggaaca

SEQ ID NO: 65317 - DNA, 60 bp, Artificial
  Synthetic oligonucleotide
tataagcacaacgtttccttacactggagaccccccttacagccatgggacaggaacagg

SEQ ID NO: 65318 - DNA, 60 bp, Artificial
  Synthetic oligonucleotide
gacaggaacaggatacaccatggatactgtgaacagaacacatcagtactcagaaagagg

SEQ ID NO: 65319 - DNA, 60 bp, Artificial
  Synthetic oligonucleotide
aggagaccggttgggatttccagtatggtggaggccatggtttccagggcccgaatcgat

SEQ ID NO: 65320 - DNA, 60 bp, Artificial
  Synthetic oligonucleotide
aagaaatcttacataaatagaacaggcacttttgaattcacaagctttttctatcgttat

SEQ ID NO: 65321 - DNA, 60 bp, Artificial
  Synthetic oligonucleotide
attgggtaaaggatacatgtttgagagtaaaaacatgaagcttaggactcagatacctgc

SEQ ID NO: 65322 - DNA, 60 bp, Artificial
  Synthetic oligonucleotide
cctagcagctcatataggagaccggtcgggatttccagtatggtggaggccatggtttcc

SEQ ID NO: 65323 - DNA, 60 bp, Artificial
  Synthetic oligonucleotide
catcacatggtccagccaaaaccatggaatacgacgctgttgccacaacgcactcctggg

SEQ ID NO: 65324 - DNA, 60 bp, Artificial
  Synthetic oligonucleotide
caataatgttctcgaacaagatggctagattgggtaaaggatacatgtttgagagtaaaa

SEQ ID NO: 65325 - DNA, 60 bp, Artificial
  Synthetic oligonucleotide
gctccaataatgttctcgaacaagatggctagattgggtaaaggatacatgtttgagagt

SEQ ID NO: 65326 - DNA, 60 bp, Artificial
  Synthetic oligonucleotide
cagaaacgtcctaagtattgctccaataatgttctcgaacaagatggctagattgggtaa

SEQ ID NO: 65327 - DNA, 60 bp, Artificial
  Synthetic oligonucleotide
gataataccaaatggaatgaaaatcagaatcctcggatgtttttagctatgataacatac

SEQ ID NO: 65328 - DNA, 60 bp, Artificial
  Synthetic oligonucleotide
taccatcactggagataataccaaatggaatgaaaatcagaatcctcgaatgtttttagc

SEQ ID NO: 65329 - DNA, 60 bp, Artificial
  Synthetic oligonucleotide
gttgccccaataatgttctcgaacaagatggctagattgggtaaaggatacatgtttgag

SEQ ID NO: 65330 - DNA, 60 bp, Artificial
  Synthetic oligonucleotide
gtattgctccaataatgttctcgaacaagatggctagattgggtaaaggatacatgtttg

SEQ ID NO: 65331 - DNA, 60 bp, Artificial
  Synthetic oligonucleotide
gtcctaagtattgctccaataatgttctcgaacaagatggctagattgggtaaaggatac

SEQ ID NO: 65332 - DNA, 60 bp, Artificial
  Synthetic oligonucleotide
gggatttccagtatggtggaggccatggtttccagggcccgaatcgatgcacgaattgat

SEQ ID NO: 65333 - DNA, 60 bp, Artificial
  Synthetic oligonucleotide
gttgggatttccagtatggtggaggccatggtttccagggcccgaatcgatgcacgaatt

SEQ ID NO: 65334 - DNA, 60 bp, Artificial
  Synthetic oligonucleotide
agtatggtggaggccatggtttccagggcccgaatcgatgcacgaattgattttgaatct

SEQ ID NO: 65335 - DNA, 60 bp, Artificial
  Synthetic oligonucleotide
atttccagtatggtggaggccatggtttccagggcccgaattgatgcacgaattgatttt

SEQ ID NO: 65336 - DNA, 60 bp, Artificial
  Synthetic oligonucleotide
gtggaggccatggtttccagggcccgaattgatgcacgaattgattttgaatctggaagg

SEQ ID NO: 65337 - DNA, 60 bp, Artificial
  Synthetic oligonucleotide
ggtttccagggcccgaatcgatgcacgaattgattttgaatctggaaggataaagaaaga

SEQ ID NO: 65338 - DNA, 60 bp, Artificial
  Synthetic oligonucleotide
catggtttccagggcccgaatcgatgcacgaattgattttgaatctggaaggataaagaa

SEQ ID NO: 65339 - DNA, 60 bp, Artificial
  Synthetic oligonucleotide
gctatcatgcaaataattcaactgacactgttgacacagtactagaaaagaatgtaacag

SEQ ID NO: 65340 - DNA, 60 bp, Artificial
  Synthetic oligonucleotide
gatggatggtatggttatcatcatcagaatgagcagggatcgggttacgctgcggatcaa

SEQ ID NO: 65341 - DNA, 60 bp, Artificial
  Synthetic oligonucleotide
gaggccagttggaatttccagcatggtggaggccatggtatctagggccagaattgatgc

SEQ ID NO: 65342 - DNA, 60 bp, Artificial
  Synthetic oligonucleotide
tccctagcagttcgtacaggagaccagttggaatttccagcatggtggaggccatggtgt

SEQ ID NO: 65343 - DNA, 60 bp, Artificial
  Synthetic oligonucleotide
ttccctagcagttcatacaggaggccggttggaatttccagcatggtggaggccatggtg

SEQ ID NO: 65344 - DNA, 60 bp, Artificial
  Synthetic oligonucleotide
gcaacgagcaatgatggaccaggtgcgagaaagcagaaatcccggaaatgctgagattga

SEQ ID NO: 65345 - DNA, 60 bp, Artificial
  Synthetic oligonucleotide
gcagcgcaacgagcaatgatggaccaggtgcgagaaagcagaaatcctgggaatgctgag

SEQ ID NO: 65346 - DNA, 60 bp, Artificial
  Synthetic oligonucleotide
ctcaaaggaaaatttcagacagcagcgcaacgagcaatgatggaccaggtgcgagaaagc

SEQ ID NO: 65347 - DNA, 60 bp, Artificial
  Synthetic oligonucleotide
cacctgatgatttggcattccaacctgaatgatgccacatatcagagaactagagctctc

SEQ ID NO: 65348 - DNA, 60 bp, Artificial
  Synthetic oligonucleotide
acaacgagcaatgatggaccaggtgcgagaaagcagaaatcctgggaatgctgagattga

SEQ ID NO: 65349 - DNA, 60 bp, Artificial
  Synthetic oligonucleotide
aacctactttctcagtacagagaaatcttcctttcgagagagcgaccatcatggcagcat

SEQ ID NO: 65350 - DNA, 60 bp, Artificial
  Synthetic oligonucleotide
ataagtcctgcctgcctgcttgtgtgtatggacttgcagtggctagtgggcatgactttg

SEQ ID NO: 65351 - DNA, 60 bp, Artificial
  Synthetic oligonucleotide
gatcctgttatatacatttacagctacatatgcagacacaatatgtataggctaccatgc

SEQ ID NO: 65352 - DNA, 60 bp, Artificial
  Synthetic oligonucleotide
gatcctgttatgtacatttacagctacatatgcagacacaatatgtataggctaccatgc

SEQ ID NO: 65353 - DNA, 60 bp, Artificial
  Synthetic oligonucleotide
atcctgttatgtacatttacagctacatatgcagacacaatatgtataggctaccatgcc

SEQ ID NO: 65354 - DNA, 60 bp, Artificial
  Synthetic oligonucleotide
gtcctgttatgtgcacttgcagctacagatgcagacacaatatgtataggctaccatgcg

SEQ ID NO: 65355 - DNA, 60 bp, Artificial
  Synthetic oligonucleotide
gtcttggaagcaatggctttccttgaagaatcccacccagggatctttgaaaactcatgt

SEQ ID NO: 65356 - DNA, 60 bp, Artificial
  Synthetic oligonucleotide
aagtggttccaagaggaaagctttccacaagaggggttcagattgcttcaaatgagaatg

SEQ ID NO: 65357 - DNA, 60 bp, Artificial
  Synthetic oligonucleotide
ggaagaacacagatcttgaggctctcatggagtggctaaagacaagaccaatcctgtcac

SEQ ID NO: 65358 - DNA, 60 bp, Artificial
  Synthetic oligonucleotide
atggcacaatacatgatagaatccctcatcggacccttttgatgaacgaattgggtgttc

SEQ ID NO: 65359 - DNA, 60 bp, Artificial
  Synthetic oligonucleotide
cttctgttcacagcagtgagaggggaccagatatgcgttgggtaccattccaacaattcc

SEQ ID NO: 65360 - DNA, 58 bp, Artificial
  Synthetic oligonucleotide
tgttcacagcagtgagaggggaccagatatgcgttggataccattccaacaactccac

SEQ ID NO: 65361 - DNA, 60 bp, Artificial
  Synthetic oligonucleotide
gaatctgtatgataaagtcagaatgcagctgagagacaacgtcaaagaactaggaaatgg

SEQ ID NO: 65362 - DNA, 60 bp, Artificial
  Synthetic oligonucleotide
ggacccagcatacaacaactggtggttctcgggcctgtgcagtgtctggcaatccgtcat

SEQ ID NO: 65363 - DNA, 60 bp, Artificial
  Synthetic oligonucleotide
gtggcaggctccttgtcactggcaatcatgatggctgggatttctttctggatgtgttct

SEQ ID NO: 65364 - DNA, 60 bp, Artificial
  Synthetic oligonucleotide
gccaaggaaatagggaacgggtgctttgagttttatcataaatgtgatgatgaatgcatg

SEQ ID NO: 65365 - DNA, 60 bp, Artificial
  Synthetic oligonucleotide
gagagcactggtaatttaattgcaccagaatacggattcaaaatatcgaagagaggaagc

SEQ ID NO: 65366 - DNA, 60 bp, Artificial
  Synthetic oligonucleotide
agaatgtaacagtaacacactctgttaaccttctagaaaacaagcataacgggaaactat

SEQ ID NO: 65367 - DNA, 60 bp, Artificial
  Synthetic oligonucleotide
gaatgtaacagtaacacactctgttaaccttctagaaggcaggcataatgggaaactatg

SEQ ID NO: 65368 - DNA, 60 bp, Artificial
  Synthetic oligonucleotide
aatgtaacagtaacacactctgttaaccttctagaaaacaagcataacgggaaactatgt

SEQ ID NO: 65369 - DNA, 60 bp, Artificial
  Synthetic oligonucleotide
gaatgtaacagtaacacactctgttaaccttctagaagacaggcataacgggaaactatg

SEQ ID NO: 65370 - DNA, 60 bp, Artificial
  Synthetic oligonucleotide
aatgtaacagtaacacactctgttaaccttctagaagacaggcataacgggaaactatgt

SEQ ID NO: 65371 - DNA, 60 bp, Artificial
  Synthetic oligonucleotide
gtacaggagaccagttggaatttccagcatggtggaggccatggtgtctagggctcggat

SEQ ID NO: 65372 - DNA, 60 bp, Artificial
  Synthetic oligonucleotide
ccagttggaatttccagcatggtggaggccatggtgtctagggctcggattgatgcacgg

SEQ ID NO: 65373 - DNA, 60 bp, Artificial
  Synthetic oligonucleotide
ggggccaaagaagtagcgctcagttactctgctggtgcacttgccagttgcatgggcctc

SEQ ID NO: 65374 - DNA, 60 bp, Artificial
  Synthetic oligonucleotide
gcgcaaaatgccataagcaccacattcccttatactggagatcctccatacagccatgga

SEQ ID NO: 65375 - DNA, 60 bp, Artificial
  Synthetic oligonucleotide
cgcaaaatgccataagcaccacattcccttatactggagatcctccatacagccatggaa

SEQ ID NO: 65376 - DNA, 60 bp, Artificial
  Synthetic oligonucleotide
agcgcaaaatgccataagcaccacattcccttatactggagatcctccatacagccatgg

SEQ ID NO: 65377 - DNA, 60 bp, Artificial
  Synthetic oligonucleotide
ttgaaaactcatgtcttgaaacgatggaagttgttcagcaaacacgagtggacaaactaa

SEQ ID NO: 65378 - DNA, 60 bp, Artificial
  Synthetic oligonucleotide
gaaaactcatgtcttgaaacgatggaagttgtccagcaaacacgagtggacaaactaacg

SEQ ID NO: 65379 - DNA, 60 bp, Artificial
  Synthetic oligonucleotide
catcccggcatttttgaaaactcatgtcttgaaacgatggaagttgtccagcaaacacga

SEQ ID NO: 65380 - DNA, 60 bp, Artificial
  Synthetic oligonucleotide
atgtcttgaaacgatggaagttgttcagcaaacacgagtggacaaactaacgcaaggccg

SEQ ID NO: 65381 - DNA, 60 bp, Artificial
  Synthetic oligonucleotide
ccgcgggccagatcagtgtgcaacctacattctcagtgcaacggaatctcccttttgaaa

SEQ ID NO: 65382 - DNA, 60 bp, Artificial
  Synthetic oligonucleotide
cgtccgcaggccagatcagtgtgcaacctacattctcagtgcaacggaatctcccttttg

SEQ ID NO: 65383 - DNA, 60 bp, Artificial
  Synthetic oligonucleotide
aatcctcaggacccaggagtcggaatgcgtttgtatcaatggaacttgtacagtagtaat

SEQ ID NO: 65384 - DNA, 60 bp, Artificial
  Synthetic oligonucleotide
agtcctcaggacccaggagtcggaatgcgtttgtatcaatggaacttgtacagtagtaat

SEQ ID NO: 65385 - DNA, 60 bp, Artificial
  Synthetic oligonucleotide
cctcaggacccaggagtcggaatgcgtttgtatcaatggaacttgtacagtagtaatgac

SEQ ID NO: 65386 - DNA, 60 bp, Artificial
  Synthetic oligonucleotide
ggtctcaaaatatcctcaggacccaggagtcggaatgcgtttgtatcaatgggacttgca

SEQ ID NO: 65387 - DNA, 60 bp, Artificial
  Synthetic oligonucleotide
ttcatttatgacgggaggcttatggacagtattggttcatggtctcaaaatatcctcagg

SEQ ID NO: 65388 - DNA, 60 bp, Artificial
  Synthetic oligonucleotide
ggaggcttgtggacagtattggttcatggtctcaaaatatcctcagaacccaggagtcgg

SEQ ID NO: 65389 - DNA, 60 bp, Artificial
  Synthetic oligonucleotide
ggaggcttgtggacagtattggttcatggtctcaaaatatcctcaggacccaggagtcgg

SEQ ID NO: 65390 - DNA, 60 bp, Artificial
  Synthetic oligonucleotide
tttacaatggaatgcttgttgacagtattggttcatggtctcaaaatatcctcagaaccc

SEQ ID NO: 65391 - DNA, 60 bp, Artificial
  Synthetic oligonucleotide
ggaggcttatggacagtattggttcatggtctcaaaatatcctcaggacccaggagtcgg

SEQ ID NO: 65392 - DNA, 60 bp, Artificial
  Synthetic oligonucleotide
ttcatttatgacgggaggcttgtggacagtattggttcatggtctcaaaatatcctcaga

SEQ ID NO: 65393 - DNA, 60 bp, Artificial
  Synthetic oligonucleotide
ttcatttatgacgggaggcttgtggacagtattggttcatggtctcaaaatatcctcagg

SEQ ID NO: 65394 - DNA, 60 bp, Artificial
  Synthetic oligonucleotide
ccagaaatagcaacaagacctaaagtgaatggacaaggaggtagaatggaattctcgtgg

SEQ ID NO: 65395 - DNA, 60 bp, Artificial
  Synthetic oligonucleotide
cataagcaccacattcccttatactggagatcctccatacagccatggaacaggaacagg

SEQ ID NO: 65396 - DNA, 60 bp, Artificial
  Synthetic oligonucleotide
aagcaccacattcccttatactggagatcctccatacagccatggaacaggaacagggta

SEQ ID NO: 65397 - DNA, 60 bp, Artificial
  Synthetic oligonucleotide
ataagcaccacattcccttatactggagatcctccatacagccatggaacaggaacaggg

SEQ ID NO: 65398 - DNA, 60 bp, Artificial
  Synthetic oligonucleotide
gcaccacattcccttatactggagatcctccatacagccatggaacaggaacagggtaca

SEQ ID NO: 65399 - DNA, 60 bp, Artificial
  Synthetic oligonucleotide
gcagaaagtagcaggttccctttgcatcagaatggaccaggcaataatggataaaaacat

SEQ ID NO: 65400 - DNA, 60 bp, Artificial
  Synthetic oligonucleotide
cagaaagtggcaggttccctttgcatcagaatggaccaggcaataatggataaaaacatc

SEQ ID NO: 65401 - DNA, 53 bp, Artificial
  Synthetic oligonucleotide
gaaagtggcaggttccctttgcatcagaatggaccaggcaataatggataaaa

SEQ ID NO: 65402 - DNA, 60 bp, Artificial
  Synthetic oligonucleotide
gaaagtggcaggttccctttgcatcagaatggaccaggcaataatggataaaaacatcat

SEQ ID NO: 65403 - DNA, 60 bp, Artificial
  Synthetic oligonucleotide
cgatcttgggggcctatatgaagcaattgaggagtgcctgattaatgatccctgggtttt

SEQ ID NO: 65404 - DNA, 60 bp, Artificial
  Synthetic oligonucleotide
gtttccagttatgtgtgctcaggacttgttggcgacacacccagggagaatgacagatct

SEQ ID NO: 65405 - DNA, 60 bp, Artificial
  Synthetic oligonucleotide
ggggcggctgatccagaacagcttaacaatagagagaatggtgctctctgcttttgacga

SEQ ID NO: 65406 - DNA, 60 bp, Artificial
  Synthetic oligonucleotide
agcgaaagcaggcaaaccatttgaatggatgtcaatccgaccttacttttcttgaaagtt

SEQ ID NO: 65407 - DNA, 60 bp, Artificial
  Synthetic oligonucleotide
gcaggcaaaccatttgaatggatgtcaatccgactttactcttcttgaaagttccagcgc

SEQ ID NO: 65408 - DNA, 60 bp, Artificial
  Synthetic oligonucleotide
gcaggcaaaccatttgaatggatgtcaatccgaccttacttttcttgaaagttccagcac

SEQ ID NO: 65409 - DNA, 60 bp, Artificial
  Synthetic oligonucleotide
gcaggcaaaccatttgaatggatgtcaatccgaccttacttttcttgaaagttccagcgc

SEQ ID NO: 65410 - DNA, 60 bp, Artificial
  Synthetic oligonucleotide
agcaaaagcaggcaaaccatttgaatggatgtcaatccgaccttacttttcttgaaagtt

SEQ ID NO: 65411 - DNA, 60 bp, Artificial
  Synthetic oligonucleotide
agcgaaagcaggcaaaccatttgaatggatgtcaatccgactttactcttcttgaaagtt

SEQ ID NO: 65412 - DNA, 60 bp, Artificial
  Synthetic oligonucleotide
catacaggagaccagttggaatctccagcatggtggaggccatggtgtctagggcccgaa

SEQ ID NO: 65413 - DNA, 60 bp, Artificial
  Synthetic oligonucleotide
tgtcacctctgactaaggggattttgggatttgtgttcacgctcaccgtgcccagtgagc

SEQ ID NO: 65414 - DNA, 59 bp, Artificial
  Synthetic oligonucleotide
ccagtaatgatcaacaaagtctctaccagaatgcagatgcctatgtttttgtagggtca

SEQ ID NO: 65415 - DNA, 60 bp, Artificial
  Synthetic oligonucleotide
cagaggtctgtttggagccattgccggtttcattgaaggggggtggaccggaatgataga

SEQ ID NO: 65416 - DNA, 60 bp, Artificial
  Synthetic oligonucleotide
ccaaaggagtggaagaaggttccattgggaaagtctgtaggactctgttggctaagtcgg

SEQ ID NO: 65417 - DNA, 55 bp, Artificial
  Synthetic oligonucleotide
agaatgctgtggatgttgacgatggtcattttgtcaacatagagctggagtaaaa

SEQ ID NO: 65418 - DNA, 55 bp, Artificial
  Synthetic oligonucleotide
agagtgctgtggatgttgacgatggtcattttgtcaacatagagctggagtaaaa

SEQ ID NO: 65419 - DNA, 60 bp, Artificial
  Synthetic oligonucleotide
ccacattcccttatactggagatcctccatacagccatggaacaggaacagggtacacca

SEQ ID NO: 65420 - DNA, 60 bp, Artificial
  Synthetic oligonucleotide
cacattcccttatactggagatcctccatacagccatggaacaggaacagggtacaccat

SEQ ID NO: 65421 - DNA, 60 bp, Artificial
  Synthetic oligonucleotide
atcaacaaggatttaccagattttggcgatctattcaactgtcgccagttcaatgatact

SEQ ID NO: 65422 - DNA, 60 bp, Artificial
  Synthetic oligonucleotide
gaacttacgactatccaagatactcagaggaatcaaagttaaacagggaaaaaattgatg

SEQ ID NO: 65423 - DNA, 60 bp, Artificial
  Synthetic oligonucleotide
cctcaaggggaaattccaaacagcagcacaacgagcaatgatggaccaggtgcgagaaag

SEQ ID NO: 65424 - DNA, 60 bp, Artificial
  Synthetic oligonucleotide
gccttgctcaatgcatcctgtgcagcaatggacgattttcaactaattcccatgataagc

SEQ ID NO: 65425 - DNA, 60 bp, Artificial
  Synthetic oligonucleotide
actgccttgctcaatgcatcctgtgcagcaatggacgattttcaactaattcccatgata

SEQ ID NO: 65426 - DNA, 60 bp, Artificial
  Synthetic oligonucleotide
gtgctgcaatctattcgagaaattcttccctagcagttcatacaggagaccggttgggat

SEQ ID NO: 65427 - DNA, 60 bp, Artificial
  Synthetic oligonucleotide
tgttgcaatctattcgagaaattcttccctagcagttcatacaggagaccggttgggatt

SEQ ID NO: 65428 - DNA, 60 bp, Artificial
  Synthetic oligonucleotide
ctgcaatctattcgagaaattcttccctagcagttcatacaggagaccggttgggatttc

SEQ ID NO: 65429 - DNA, 60 bp, Artificial
  Synthetic oligonucleotide
caggcgatcatggaaaagaacatcatactgaaagcgaacttcagtgtgatctttaaccga

SEQ ID NO: 65430 - DNA, 60 bp, Artificial
  Synthetic oligonucleotide
cttttgacatgagtaatgaaggatcttatttcttcggagacaatgcagaggagtacgaca

SEQ ID NO: 65431 - DNA, 60 bp, Artificial
  Synthetic oligonucleotide
gcagtctcgcactcgcgaaatactaacaaaaaccacagtggaccatatggccataattaa

SEQ ID NO: 65432 - DNA, 60 bp, Artificial
  Synthetic oligonucleotide
ttactatctcctgaggaggtcagtgaaacacagggaacagagagactgacaataacttac

SEQ ID NO: 65433 - DNA, 60 bp, Artificial
  Synthetic oligonucleotide
ccagaggaggtcagtgaaacacagggaacagagaaactgacaataacttactcatcgtca

SEQ ID NO: 65434 - DNA, 60 bp, Artificial
  Synthetic oligonucleotide
ggaggtcagtgaaacacagggaacagagaaactgacaataacttactcatcgtcaatgat

SEQ ID NO: 65435 - DNA, 60 bp, Artificial
  Synthetic oligonucleotide
cagatccactagcatctttattggagatgtgccacagcacacagattggcgggacaagga

SEQ ID NO: 65436 - DNA, 60 bp, Artificial
  Synthetic oligonucleotide
gcatgataaaagcagttagaggtgacctgaatttcgttaatagggcaaatcagcgattga

SEQ ID NO: 65437 - DNA, 60 bp, Artificial
  Synthetic oligonucleotide
ggaccatatggccataattaagaagtacacatcagggagacaggaaaagaacccgtcact

SEQ ID NO: 65438 - DNA, 60 bp, Artificial
  Synthetic oligonucleotide
atgtactactatctcctgaggaggtcagtgaaacacagggaacagagaaactgacaataa

SEQ ID NO: 65439 - DNA, 60 bp, Artificial
  Synthetic oligonucleotide
cacagtggaccatatggccataattaagaagtacacatcagggagacaggaaaagaaccc

SEQ ID NO: 65440 - DNA, 60 bp, Artificial
  Synthetic oligonucleotide
gagactgacaataacttactcatcgtcaatgatgtgggagattaacggtcctgagtcagt

SEQ ID NO: 65441 - DNA, 60 bp, Artificial
  Synthetic oligonucleotide
cagatccactagcatctttattggagatgtgccacagcacactgattcgcgggacaagga

SEQ ID NO: 65442 - DNA, 60 bp, Artificial
  Synthetic oligonucleotide
ccataattaagaagtacacatcagggagacaggagaagaacccgttacttaggatgaaat

SEQ ID NO: 65443 - DNA, 60 bp, Artificial
  Synthetic oligonucleotide
gtgaaacacagggaacagagaaactgacaataacttactcatcgtcaatgatgtgggaga

SEQ ID NO: 65444 - DNA, 60 bp, Artificial
  Synthetic oligonucleotide
aacagagagactgacaataacttactcatcgtcaatgatgtgggagattaacggtcctga

SEQ ID NO: 65445 - DNA, 60 bp, Artificial
  Synthetic oligonucleotide
gagactgacaataacttactcatcgtcaatgatgtgggagattaacggtcctgagtcggt

SEQ ID NO: 65446 - DNA, 60 bp, Artificial
  Synthetic oligonucleotide
gagactgacaataacttactcatcgtcaatgatgtgggaaattaacggtcctgagtcggt

SEQ ID NO: 65447 - DNA, 60 bp, Artificial
  Synthetic oligonucleotide
aacagagagactgacaataacttactcatcgtcaatgatgtgggaaattaacggtcctga

SEQ ID NO: 65448 - DNA, 60 bp, Artificial
  Synthetic oligonucleotide
ccataattaagaagtacacatcagggagacaggaaaagaacccgtcacttaggatgaaat

SEQ ID NO: 65449 - DNA, 60 bp, Artificial
  Synthetic oligonucleotide
cctgaggaggtcagtgaaacacagggaacagagaaactgacaataacttactcatcgtca

SEQ ID NO: 65450 - DNA, 60 bp, Artificial
  Synthetic oligonucleotide
ccataattaagaagtacacatcagggagacaggaaaagaacccgtcacttagaatgaaat

SEQ ID NO: 65451 - DNA, 60 bp, Artificial
  Synthetic oligonucleotide
gcagcacaacgagcaatgatggaccaggtgagggaaagccggaatcctgggaatgctgaa

SEQ ID NO: 65452 - DNA, 60 bp, Artificial
  Synthetic oligonucleotide
ataatcactcactgagtgacatcaacatcatggcgtctcaaggcaccaaacgatcttatg

SEQ ID NO: 65453 - DNA, 60 bp, Artificial
  Synthetic oligonucleotide
cactgagtgacatcaacatcatggcgtctcaaggcaccaaacgatcttatgaacagatgg

SEQ ID NO: 65454 - DNA, 60 bp, Artificial
  Synthetic oligonucleotide
agtctctaaaactctacagagattcgcttggagaagcagtaatgagaatgggagacctcc

SEQ ID NO: 65455 - DNA, 60 bp, Artificial
  Synthetic oligonucleotide
agtctctaaaactctacagagattcgcttggagaagcagtaatgagaatgggagatctcc

SEQ ID NO: 65456 - DNA, 60 bp, Artificial
  Synthetic oligonucleotide
agtctctaaaactctacagagattcgcttggagaagcagtaatgagagtgggagacctcc

SEQ ID NO: 65457 - DNA, 60 bp, Artificial
  Synthetic oligonucleotide
agtctctaaaactctacagagattcgcttggagaagcagtaatgagaatgggagacatcc

SEQ ID NO: 65458 - DNA, 60 bp, Artificial
  Synthetic oligonucleotide
aagggatgattgatggctggtatggatatcatcacagcaatgatcaaggatcaggatatg

SEQ ID NO: 65459 - DNA, 60 bp, Artificial
  Synthetic oligonucleotide
gatggttgatggctggtatggatatcatcacagcaatgatcaaggatcaggatatgcagc

SEQ ID NO: 65460 - DNA, 60 bp, Artificial
  Synthetic oligonucleotide
ggctggtatggatatcatcacagcaatgatcaaggatcaggatatgcagcagacaaagaa

SEQ ID NO: 65461 - DNA, 60 bp, Artificial
  Synthetic oligonucleotide
gttgatggctggtatggatatcatcacagcaatgatcaaggatcaggatatgcagcagac

SEQ ID NO: 65462 - DNA, 60 bp, Artificial
  Synthetic oligonucleotide
gctgcagtcaaaggagttgggacaatggtgatggagttgatcagaatgatcaaacgtggg

SEQ ID NO: 65463 - DNA, 60 bp, Artificial
  Synthetic oligonucleotide
gaagtgttgcaatctattcgagaaattcttccctagcagttcgtacaggagaccagttgg

SEQ ID NO: 65464 - DNA, 60 bp, Artificial
  Synthetic oligonucleotide
ggtggggaaaagagcaacagctatactcagaaaagcaaccaggagattggttcagctcat

SEQ ID NO: 65465 - DNA, 60 bp, Artificial
  Synthetic oligonucleotide
ccgcaaacaagttgtagaccaagaactaggtgatgccccattccttgatcggcttcgccg

SEQ ID NO: 65466 - DNA, 60 bp, Artificial
  Synthetic oligonucleotide
ccgaaaacaagttgtagaccaagaactaggtgatgccccattccttgatcggcttcgccg

SEQ ID NO: 65467 - DNA, 60 bp, Artificial
  Synthetic oligonucleotide
gactggttcatgctaatgcccaagcagaaagtggaaggccctctttgcatcagaatagac

SEQ ID NO: 65468 - DNA, 60 bp, Artificial
  Synthetic oligonucleotide
gggactggttcatgctaatgcccaagcagaaagtggaaggccctctttgcatcagaatag

SEQ ID NO: 65469 - DNA, 60 bp, Artificial
  Synthetic oligonucleotide
gattggttcatgctaatgcccaagcagaaagtggaaggccctctttgcatcagaatagac

SEQ ID NO: 65470 - DNA, 60 bp, Artificial
  Synthetic oligonucleotide
gcgattggggtcctcatcggaggacttgaatggaatgataacacagttcgagtctctaaa

SEQ ID NO: 65471 - DNA, 60 bp, Artificial
  Synthetic oligonucleotide
ggaccgggatgatagatggatggtatggttatcatcatcagaatgaacagggatctggct

SEQ ID NO: 65472 - DNA, 60 bp, Artificial
  Synthetic oligonucleotide
atcctcagaacccaggagtcggaatgcgtttgtatcaatgggacttgcacagtagtaatg

SEQ ID NO: 65473 - DNA, 60 bp, Artificial
  Synthetic oligonucleotide
tatcctcagaacccaggagtcggaatgcgtttgtatcaatgggacttgcacagtagtaat

SEQ ID NO: 65474 - DNA, 60 bp, Artificial
  Synthetic oligonucleotide
gcaggcaaaccatttgaatggatgtcaatccgactttacttttcctgaaagtgccagcgc

SEQ ID NO: 65475 - DNA, 60 bp, Artificial
  Synthetic oligonucleotide
gcaattctcctcactgactgtgaatgtgagaggatcaggaatgaggatactggtaagagg

SEQ ID NO: 65476 - DNA, 56 bp, Artificial
  Synthetic oligonucleotide
gctcaccgtgcccagtgagcgaggactgcagcgtagacgctttgtccacaatgccc

SEQ ID NO: 65477 - DNA, 60 bp, Artificial
  Synthetic oligonucleotide
aatagggcaaaccaacgattgaatcccatgcatcaactcctgagacatttccaaaaagat

SEQ ID NO: 65478 - DNA, 60 bp, Artificial
  Synthetic oligonucleotide
aaccatgcgcaggctcgccgaccaaagtctcccaccgaacttctccagccttgaaaactt

SEQ ID NO: 65479 - DNA, 60 bp, Artificial
  Synthetic oligonucleotide
ggcattccaacctgaatgatgccacgtatcagagaacaagagctctcgtgcgcactggga

SEQ ID NO: 65480 - DNA, 51 bp, Artificial
  Synthetic oligonucleotide
acaccatggacacagtcaacagaacacatcaatattcagaaaaggggaaat

SEQ ID NO: 65481 - DNA, 52 bp, Artificial
  Synthetic oligonucleotide
tacaccatggacacagtcaacagaacacatcaatattcagaaaaggggaaat

SEQ ID NO: 65482 - DNA, 60 bp, Artificial
  Synthetic oligonucleotide
acgctcaccgtgcccagtgagcgaggactgcagcgtagacgctttgtccaaaatgccctc

SEQ ID NO: 65483 - DNA, 60 bp, Artificial
  Synthetic oligonucleotide
gactcaccacttgtgccaagctttcaggtagactgtttcctttggcatatccgcaaacgg

SEQ ID NO: 65484 - DNA, 60 bp, Artificial
  Synthetic oligonucleotide
tgtttacagcagtgagaggagaccagatatgcattgggtaccattccaacaattccacag

SEQ ID NO: 65485 - DNA, 60 bp, Artificial
  Synthetic oligonucleotide
tgctcctgttatcctcgatatcctggtgtcagatgtgtctgcagagacaactggaaaggc

SEQ ID NO: 65486 - DNA, 60 bp, Artificial
  Synthetic oligonucleotide
gttcctgttatcctcgatatcctggtgtcagatgtgtctgcagagacaactggaaaggct

SEQ ID NO: 65487 - DNA, 60 bp, Artificial
  Synthetic oligonucleotide
gctcctgttatcctcgatatcctggtgtcagatgtgtctgcagagacaactggaaaggct

SEQ ID NO: 65488 - DNA, 60 bp, Artificial
  Synthetic oligonucleotide
acatttgggtgacaagagaaccttatgtgtcatgcggtcctggcaaatgttatcaatttg

SEQ ID NO: 65489 - DNA, 60 bp, Artificial
  Synthetic oligonucleotide
acatttgggtgacaagagaaccttatgtgtcatgcgatcctagcaaatgttatcaatttg

SEQ ID NO: 65490 - DNA, 60 bp, Artificial
  Synthetic oligonucleotide
tgagtcagctgacatgagcattggagtaacagtgataaagaacaacatgataaacaatga

SEQ ID NO: 65491 - DNA, 60 bp, Artificial
  Synthetic oligonucleotide
agaatgccactgaaatcagagcatctgttgggagaatggttggtggaattggaaggttct

SEQ ID NO: 65492 - DNA, 60 bp, Artificial
  Synthetic oligonucleotide
ccggttggaatttccagcatggtggaggccatggtttccagggcccgaattgatgcgcga

SEQ ID NO: 65493 - DNA, 60 bp, Artificial
  Synthetic oligonucleotide
caagagtccgaatgtgcctgcataaatggttcttgctttaccataatgactgatggacca

SEQ ID NO: 65494 - DNA, 59 bp, Artificial
  Synthetic oligonucleotide
ctttaccataatgactgatggaccaagtaatggccaggcctcatacaagattttcaaga

SEQ ID NO: 65495 - DNA, 60 bp, Artificial
  Synthetic oligonucleotide
gggttagccattcaatccagactggaagtcaaaaccaccctgaaacatgcaatcaaagtg

SEQ ID NO: 65496 - DNA, 60 bp, Artificial
  Synthetic oligonucleotide
gatgggctatatacagcaaggacaatggtataagaataggttcaaagggagatgtatttg

SEQ ID NO: 65497 - DNA, 60 bp, Artificial
  Synthetic oligonucleotide
tgggctatatacagcaaggacaatggtataaggataggttccaagggagatgtatttgtt

SEQ ID NO: 65498 - DNA, 60 bp, Artificial
  Synthetic oligonucleotide
caggactttctttctgactcaaggggctttgttgaatgacaagcattccaatggaaccgt

SEQ ID NO: 65499 - DNA, 52 bp, Artificial
  Synthetic oligonucleotide
ttttggagacaatccacgccccaatgatggaacaggcagttgtggtccagtg

SEQ ID NO: 65500 - DNA, 60 bp, Artificial
  Synthetic oligonucleotide
atgcagcggggtctttggagacaatccacgccccaatgatggaacaggcagttgtggtcc

SEQ ID NO: 65501 - DNA, 60 bp, Artificial
  Synthetic oligonucleotide
aggatacatatgcagcggggtttttggagacaatccacgccccaatgatggaacaggcag

SEQ ID NO: 65502 - DNA, 60 bp, Artificial
  Synthetic oligonucleotide
ataggatacatatgcagcggggtttttggagacaatccacgccccaatgatggaacaggc

SEQ ID NO: 65503 - DNA, 53 bp, Artificial
  Synthetic oligonucleotide
ttaccataatgactgatggaccaagtaatggtcaggcctcatacaagattttc

SEQ ID NO: 65504 - DNA, 60 bp, Artificial
  Synthetic oligonucleotide
agagtctgaatgtgcttgcataaatggttcttgctttaccataatgactgatggaccaag

SEQ ID NO: 65505 - DNA, 60 bp, Artificial
  Synthetic oligonucleotide
caagagtccgaatgtgcttgcataaatggttcttgctttaccataatgactgatggacca

SEQ ID NO: 65506 - DNA, 60 bp, Artificial
  Synthetic oligonucleotide
tccacccactgaccattggtgagtgccccaaatatgtaaaatcggaaagattagtcttag

SEQ ID NO: 65507 - DNA, 58 bp, Artificial
  Synthetic oligonucleotide
agctcaagttgtcacgatggaaaagcatggctgcatgtttgtgtaactgggcatgatg

SEQ ID NO: 65508 - DNA, 60 bp, Artificial
  Synthetic oligonucleotide
agggcaaaagctgcatcaataggtgcttttatgtggagttgataaggggaagggaacagg

SEQ ID NO: 65509 - DNA, 60 bp, Artificial
  Synthetic oligonucleotide
cgtgggatcaatgatcggaacttctggagaggtgagaatgggcggaaaacaaggattgct

SEQ ID NO: 65510 - DNA, 60 bp, Artificial
  Synthetic oligonucleotide
ggaggcttgtggacagtattggttcatggtctcaaaatattctcaggacccaggagtcgg

SEQ ID NO: 65511 - DNA, 60 bp, Artificial
  Synthetic oligonucleotide
gatgtgtggacatacaacgctgaggtcctagttctgatggaaaatgagaggacacttgac

SEQ ID NO: 65512 - DNA, 60 bp, Artificial
  Synthetic oligonucleotide
gatgtgtggacatacaatgctgagctcctagttctgatggaaaatgagaggacacttgac

SEQ ID NO: 65513 - DNA, 60 bp, Artificial
  Synthetic oligonucleotide
tttggcattccaatctgaatgatgccacgtatcagagaacaagagcgcttgttcgcaccg

SEQ ID NO: 65514 - DNA, 60 bp, Artificial
  Synthetic oligonucleotide
ccaacagaagagcaagccgtggatatatgcaaggcagcaatgggtctaagaatcagttca

SEQ ID NO: 65515 - DNA, 60 bp, Artificial
  Synthetic oligonucleotide
ggtctggatacgagatgctaaaggtgccaaatgcactgacagatgatagatcaaagccca

SEQ ID NO: 65516 - DNA, 60 bp, Artificial
  Synthetic oligonucleotide
ccgcaaaacgaggttcctcccagtggctggtggaacaagcagtgtttatattgaggtgtt

SEQ ID NO: 65517 - DNA, 60 bp, Artificial
  Synthetic oligonucleotide
ccgcaaaacgaggttcctcccagtggctggtggaacaagtagtgtttacattgaagtgtt

SEQ ID NO: 65518 - DNA, 60 bp, Artificial
  Synthetic oligonucleotide
gtccgcaaaacgaggttcctcccagtggctggtggaacaagcagtgtctatattgaggtg

SEQ ID NO: 65519 - DNA, 60 bp, Artificial
  Synthetic oligonucleotide
ccgcaaaacgaggttcctcccagtggctggtggaacaagtagtgtttatattgaagtgtt

SEQ ID NO: 65520 - DNA, 60 bp, Artificial
  Synthetic oligonucleotide
gtccgcaaaacgaggttcctcccagtggctggtggaacaagcagtgtatatattgaggtg

SEQ ID NO: 65521 - DNA, 60 bp, Artificial
  Synthetic oligonucleotide
ccgcaaaacgaggttcctcccagtggctggtggaacaagcagtgtttatattgaagtgtt

SEQ ID NO: 65522 - DNA, 60 bp, Artificial
  Synthetic oligonucleotide
caacgcggaacttcttgtcgctctggagaatcaacatacaattgatctgactgattcgga

SEQ ID NO: 65523 - DNA, 60 bp, Artificial
  Synthetic oligonucleotide
gctaatgaatcgggaaggctaatagatttcctcaaggatgtgatggaatcaatggataaa

SEQ ID NO: 65524 - DNA, 57 bp, Artificial
  Synthetic oligonucleotide
ggagttcgctgagatcatgaagatctgttccaccattgaagagctcagacggcaaaa

SEQ ID NO: 65525 - DNA, 60 bp, Artificial
  Synthetic oligonucleotide
gaaagaggagttcgctgagatcatgaagatctgttccaccattgaagagctcagacggca

SEQ ID NO: 65526 - DNA, 60 bp, Artificial
  Synthetic oligonucleotide
gaggagttcgctgagatcatgaagatctgttccaccattgaagagctcagacggcaaaaa

SEQ ID NO: 65527 - DNA, 60 bp, Artificial
  Synthetic oligonucleotide
gaggagttcgctgagatcatgaagatctgttccaccattgaagagctcagacggcagaaa

SEQ ID NO: 65528 - DNA, 59 bp, Artificial
  Synthetic oligonucleotide
gaggagttcgctgagatcatgaagatctgttccaccattgaagagctcagacggcaaaa

SEQ ID NO: 65529 - DNA, 60 bp, Artificial
  Synthetic oligonucleotide
tctcatggaatggctaaagacaagaccaatcctgtcacctctgactaaggggattttggg

SEQ ID NO: 65530 - DNA, 60 bp, Artificial
  Synthetic oligonucleotide
ctcatggaatggctaaagacaagaccaatcctgtcacctctgactaaggggattttgggg

SEQ ID NO: 65531 - DNA, 60 bp, Artificial
  Synthetic oligonucleotide
ctcatggaatggctaaagacaagaccaatcctgtcacctctgactaaggggattttggga

SEQ ID NO: 65532 - DNA, 60 bp, Artificial
  Synthetic oligonucleotide
cgatcagagggaaacactcaaatggaacaatacacgataggtcccagtatcgcgccctga

SEQ ID NO: 65533 - DNA, 60 bp, Artificial
  Synthetic oligonucleotide
ccaaaaaaatcctcaggacccaggagtcggaatgcgtttgtatcaatggaacttgtacag

SEQ ID NO: 65534 - DNA, 60 bp, Artificial
  Synthetic oligonucleotide
ggaggcacaggatgtaatcatggaagttgttttccctaacgaagtgggagccaggatact

SEQ ID NO: 65535 - DNA, 60 bp, Artificial
  Synthetic oligonucleotide
ccctgtcactggcaatcatgatagctgggatctctttatggatgtgctccaatgggtctc

SEQ ID NO: 65536 - DNA, 60 bp, Artificial
  Synthetic oligonucleotide
ccctgtcactggcaatcatgatagctgggatctctctatggatgtgctccaacgggtctc

SEQ ID NO: 65537 - DNA, 60 bp, Artificial
  Synthetic oligonucleotide
aaacgatttgcagaccaagaactgggtgatgccccattccttgatcggcttcgccgagac

SEQ ID NO: 65538 - DNA, 60 bp, Artificial
  Synthetic oligonucleotide
cctggaatgatgatgggcatgttcaacatgctaagtacggttttgggagtctcgatactg

SEQ ID NO: 65539 - DNA, 60 bp, Artificial
  Synthetic oligonucleotide
agatatgttggacaccataaatttcgagagtactggtaatctaattgcaccagaatatgg

SEQ ID NO: 65540 - DNA, 55 bp, Artificial
  Synthetic oligonucleotide
tcctcatcgaatccttgatggaataaactgcacactgatagatgctctattgggg

SEQ ID NO: 65541 - DNA, 60 bp, Artificial
  Synthetic oligonucleotide
tctcctgttcacagcagtgagaggagaccagatatgcattggataccatgccaataattc

SEQ ID NO: 65542 - DNA, 60 bp, Artificial
  Synthetic oligonucleotide
ccaaaaatatcctcaggacccaggagtcggaatgcgtttgtatcaatggaacttgtacag

SEQ ID NO: 65543 - DNA, 60 bp, Artificial
  Synthetic oligonucleotide
cctttgacatgagcaatgaaggatcttatttcttcggagacaatgcagaggagtatgaca

SEQ ID NO: 65544 - DNA, 60 bp, Artificial
  Synthetic oligonucleotide
cttcctttgacatgagcaatgaaggatcttatttcttcggagacaatgcagaggagtatg

SEQ ID NO: 65545 - DNA, 60 bp, Artificial
  Synthetic oligonucleotide
catgagtaatgaaggatcttatttcttcggagacaatgcagaagagtacgacaattaagg

SEQ ID NO: 65546 - DNA, 60 bp, Artificial
  Synthetic oligonucleotide
gataatcactcactgagtgacatcaaaatcatggcgtcccaaggcaccaaacggtcttat

SEQ ID NO: 65547 - DNA, 60 bp, Artificial
  Synthetic oligonucleotide
atcactcactgagtgacatcaaaatcatggcgtcccaaggcaccaaacggtcttatgaac

SEQ ID NO: 65548 - DNA, 60 bp, Artificial
  Synthetic oligonucleotide
ctagcatctttattggagatgtgccacagcacacaaattggcgggacaaggatggtggac

SEQ ID NO: 65549 - DNA, 60 bp, Artificial
  Synthetic oligonucleotide
tcgggaaaagggcaacagctatactcagaaaagcaaccaggagattgattcagctgatag

SEQ ID NO: 65550 - DNA, 60 bp, Artificial
  Synthetic oligonucleotide
ttctagggtttgtgttcacgctcaccgtgcccagtgagcgaggactgcagcgtagacgct

SEQ ID NO: 65551 - DNA, 60 bp, Artificial
  Synthetic oligonucleotide
aagtggaacaggagataagaactttctcatttcagcttatttaatgataaaaaacaccct

SEQ ID NO: 65552 - DNA, 56 bp, Artificial
  Synthetic oligonucleotide
aagagataagaactttctcgtttcagcttatttaatgataaaaaacacccttgttt

SEQ ID NO: 65553 - DNA, 60 bp, Artificial
  Synthetic oligonucleotide
ctcagaagtagaaggaagaattcaggacctcgagaaatatgttgaagacactaaaataga

SEQ ID NO: 65554 - DNA, 60 bp, Artificial
  Synthetic oligonucleotide
catttgaatggatgtcaatccgaccttacttttcttgaaagttccagcgcaaaatgccat

SEQ ID NO: 65555 - DNA, 60 bp, Artificial
  Synthetic oligonucleotide
atttgaatggatgtcaatccgaccttacttttcttgaaagttccagcgcaaaatgccata

SEQ ID NO: 65556 - DNA, 60 bp, Artificial
  Synthetic oligonucleotide
ttgaatggatgtcaatccgaccttacttttcttgaaagttccagcgcaaaatgccataag

SEQ ID NO: 65557 - DNA, 60 bp, Artificial
  Synthetic oligonucleotide
tggcatggttcgaatcgaccatgggtgtctttcaatcagaatctagattaccaaatagga

SEQ ID NO: 65558 - DNA, 54 bp, Artificial
  Synthetic oligonucleotide
ggggtttatcaaatccttgccatttatgctacagtagcaggttctctgtcactg

SEQ ID NO: 65559 - DNA, 60 bp, Artificial
  Synthetic oligonucleotide
ggggtttatcaaatccttgccatttatgctacagtagcaggttctctgtcactggcaatc

SEQ ID NO: 65560 - DNA, 60 bp, Artificial
  Synthetic oligonucleotide
gggatttatcaaatccttgccatttatgctacagtagcaggttctctgtcactggcaatc

SEQ ID NO: 65561 - DNA, 60 bp, Artificial
  Synthetic oligonucleotide
tgggtttctagatgtatggacatataatgccgaacttcttgttttaatggaaaacgagag

SEQ ID NO: 65562 - DNA, 60 bp, Artificial
  Synthetic oligonucleotide
tgggtttctagatgtatggacatataatgccgaacttctggttttaatggaaaacgagag

SEQ ID NO: 65563 - DNA, 60 bp, Artificial
  Synthetic oligonucleotide
gggtttctagatgtatggacatataatgccgaacttcttgttttaatggaaaacgagaga

SEQ ID NO: 65564 - DNA, 60 bp, Artificial
  Synthetic oligonucleotide
gggtttctagatgtatggacatataatgccgaacttctggttttaatggaaaacgagaga

SEQ ID NO: 65565 - DNA, 60 bp, Artificial
  Synthetic oligonucleotide
ggaacaaatgctgataatttggggaatacatcaccccaatgatgataccgaacaaagggc

SEQ ID NO: 65566 - DNA, 60 bp, Artificial
  Synthetic oligonucleotide
gccccgcattaagcatcaatgaactgagcaatcttgcgaagggagagaaggctaatgtgc

SEQ ID NO: 65567 - DNA, 60 bp, Artificial
  Synthetic oligonucleotide
gacaataacttattcgtcatcaatgatgtgggagatcaacggtcctgagtcagtgctggt

SEQ ID NO: 65568 - DNA, 60 bp, Artificial
  Synthetic oligonucleotide
aaagttccagcgcaaaatgccataagcaccacattcccttatactggagatcctccatac

SEQ ID NO: 65569 - DNA, 54 bp, Artificial
  Synthetic oligonucleotide
cagctcatggcccagccaagagcatggaatatgatgctgttgctaccacgcact

SEQ ID NO: 65570 - DNA, 60 bp, Artificial
  Synthetic oligonucleotide
gacaagaccaatcctgtcacctctgactaaggggattttaggttttgtgttcacgctcac

SEQ ID NO: 65571 - DNA, 60 bp, Artificial
  Synthetic oligonucleotide
gacaagaccaatcctgtcacctctgactaaggggattttaggatttgtgtttacgctcac

SEQ ID NO: 65572 - DNA, 60 bp, Artificial
  Synthetic oligonucleotide
caagaccaatcctgtcacctctgactaaggggattttgggatttgtgttcacgctcaccg

SEQ ID NO: 65573 - DNA, 60 bp, Artificial
  Synthetic oligonucleotide
acaagaccaatcctgtcacctctgactaaggggattttaggatttgtgtttacgctcacc

SEQ ID NO: 65574 - DNA, 60 bp, Artificial
  Synthetic oligonucleotide
gacaagaccaatcctgtcacctctgactaaggggattttgggatttgtgttcacgctcac

SEQ ID NO: 65575 - DNA, 60 bp, Artificial
  Synthetic oligonucleotide
cgggcttctagatgtgtggacatacaatgctgagcttctagttctgatggaaaatgagag

SEQ ID NO: 65576 - DNA, 60 bp, Artificial
  Synthetic oligonucleotide
gacgggtttctagatgtgtggacatacaatgctgagctcctagttctgatggaaaatgag

SEQ ID NO: 65577 - DNA, 60 bp, Artificial
  Synthetic oligonucleotide
gggcttctagatgtgtggacatacaatgctgagcttctagttctgatggaaaatgagagg

SEQ ID NO: 65578 - DNA, 60 bp, Artificial
  Synthetic oligonucleotide
tcacgctcaccgtgcccagtgagcgaggactgcagcgtagacgctttgtccaaaatgccc

SEQ ID NO: 65579 - DNA, 60 bp, Artificial
  Synthetic oligonucleotide
tattcacgctcaccgtgcccagtgagcgaggactgcagcgtagacgctttgtccaaaatg

SEQ ID NO: 65580 - DNA, 55 bp, Artificial
  Synthetic oligonucleotide
gtttgtatcaacggaacttgcacagtagtaatgactgatggaagtgcatcaggaa

SEQ ID NO: 65581 - DNA, 60 bp, Artificial
  Synthetic oligonucleotide
gtttgtatcaacggaacttgcacagtagtaatgactgatggaagtgcatcaggaagagcc

SEQ ID NO: 65582 - DNA, 60 bp, Artificial
  Synthetic oligonucleotide
aaggaggcagaatggaattctcgtggactatcttagatatatgggacacaataaattttg

SEQ ID NO: 65583 - DNA, 56 bp, Artificial
  Synthetic oligonucleotide
ttccttgatcggcttcgccgagatcagaagtccctaaggggaagaggcagtactct

SEQ ID NO: 65584 - DNA, 60 bp, Artificial
  Synthetic oligonucleotide
ccttgatcggcttcgccgagatcagaagtccctaaggggaagaggcagcactctcggtct

SEQ ID NO: 65585 - DNA, 54 bp, Artificial
  Synthetic oligonucleotide
ccttgatcggcttcgccgagatcagaagtccctaaggggaagaggcagtactct

SEQ ID NO: 65586 - DNA, 60 bp, Artificial
  Synthetic oligonucleotide
ttccttgatcggcttcgccgagatcagaagtccctaaggggaagaggcagcactctcggt

SEQ ID NO: 65587 - DNA, 60 bp, Artificial
  Synthetic oligonucleotide
tttcttgatcggcttcgccgagatcagaagtccctaaggggaagaggcagcactctcggt

SEQ ID NO: 65588 - DNA, 52 bp, Artificial
  Synthetic oligonucleotide
ttgatcggcttcgccgagatcagaagtccctaaggggaagaggcagtactct

SEQ ID NO: 65589 - DNA, 53 bp, Artificial
  Synthetic oligonucleotide
cttgatcggcttcgccgagatcagaagtccctaaggggaagaggcagtactct

SEQ ID NO: 65590 - DNA, 57 bp, Artificial
  Synthetic oligonucleotide
aaccatgaagactatcattgctttgagctacattttatgtctggttcttggccaaga

SEQ ID NO: 65591 - DNA, 60 bp, Artificial
  Synthetic oligonucleotide
ggattttggggtttgtgttcacgctcaccgtgcccagtgagcgaggactgcaacgtatac

SEQ ID NO: 65592 - DNA, 60 bp, Artificial
  Synthetic oligonucleotide
gctggaaagaacacagatcttgaggctctcatggaatggctaaagacaagaccaatcctg

SEQ ID NO: 65593 - DNA, 60 bp, Artificial
  Synthetic oligonucleotide
ctgggaagaacacagatcttgaggctctcatggaatggctaaagacaagaccaatcctgt

SEQ ID NO: 65594 - DNA, 60 bp, Artificial
  Synthetic oligonucleotide
ctttgcagggaagaacacagatcttgaggctctcatggaatggctaaagacaagaccaat

SEQ ID NO: 65595 - DNA, 60 bp, Artificial
  Synthetic oligonucleotide
ctttgctgggaagaacacagatcttgaggctctcatggaatggctaaagacaagaccaat

SEQ ID NO: 65596 - DNA, 60 bp, Artificial
  Synthetic oligonucleotide
gctcagttattctgctggtgcacttgccagttgcatgggcctcatatacaacaggatggg

SEQ ID NO: 65597 - DNA, 60 bp, Artificial
  Synthetic oligonucleotide
cacaggatgtaatcatggaagttgttttcccaaatgaagtgggggccaggatattaacat

SEQ ID NO: 65598 - DNA, 60 bp, Artificial
  Synthetic oligonucleotide
cacaaagagcaatgatggatcaagtgagagaaagccggaacccaggaaatgctgagatcg

SEQ ID NO: 65599 - DNA, 60 bp, Artificial
  Synthetic oligonucleotide
gagtgagacggacgaaaatctcaaaattgcaattgcatccagccctgctcctcggtacat

SEQ ID NO: 65600 - DNA, 60 bp, Artificial
  Synthetic oligonucleotide
cctaaagagtgagacggacgaaaatctcaaaattgcaattgcatccagccctgctcctcg

SEQ ID NO: 65601 - DNA, 60 bp, Artificial
  Synthetic oligonucleotide
cacaggaacaatgcgcaggctcgccgaccaaagtctcccaccgaacttctccagccttga

SEQ ID NO: 65602 - DNA, 60 bp, Artificial
  Synthetic oligonucleotide
ggcaaaagctgcatcaataggtgcttttatgtggagttgataaggggaaggaaacaggaa

SEQ ID NO: 65603 - DNA, 60 bp, Artificial
  Synthetic oligonucleotide
gctgcatcaataggtgcttttatgtggagttgataaggggaaggagacaagagactagag

SEQ ID NO: 65604 - DNA, 60 bp, Artificial
  Synthetic oligonucleotide
ctcagttattctgctggtgcacttgccagttgcatgggcctcatatacaacagaatgggg

SEQ ID NO: 65605 - DNA, 60 bp, Artificial
  Synthetic oligonucleotide
caaggacattcttgagaaaacgcataatggaaagttgtgcagattaaacggggtccctcc

SEQ ID NO: 65606 - DNA, 60 bp, Artificial
  Synthetic oligonucleotide
gacaagaccaatcctgtcacctctgactaaggggattttgggatttgtattcacgctcac

SEQ ID NO: 65607 - DNA, 60 bp, Artificial
  Synthetic oligonucleotide
caagaccaatcctgtcacctctgactaaggggattttgggatttgtattcacgctcaccg

SEQ ID NO: 65608 - DNA, 60 bp, Artificial
  Synthetic oligonucleotide
tgacacagtacatgataggaccccttatcgaaccctattgatgaatgagttgggtgttcc

SEQ ID NO: 65609 - DNA, 60 bp, Artificial
  Synthetic oligonucleotide
gacacagtacatgataggaccccttatcgaaccctattgatgaatgagttgggtgttcca

SEQ ID NO: 65610 - DNA, 60 bp, Artificial
  Synthetic oligonucleotide
tgatacagtacatgataggaccccttatcgaaccctattgatgaatgagttgggtgttcc

SEQ ID NO: 65611 - DNA, 60 bp, Artificial
  Synthetic oligonucleotide
cagtacatgataggaccccttatcgaaccctattgatgaatgagttgggtgttccatttc

SEQ ID NO: 65612 - DNA, 60 bp, Artificial
  Synthetic oligonucleotide
cttctaatagatggtacagcctcattgagtcctggaatgatgatgggcatgttcaacatg

SEQ ID NO: 65613 - DNA, 56 bp, Artificial
  Synthetic oligonucleotide
cgacagctggtttaactcacatgatgatctggcattccaatttgaatgatacaaca

SEQ ID NO: 65614 - DNA, 56 bp, Artificial
  Synthetic oligonucleotide
cgacagctggtctgactcacatgatgatctggcattccaatttgaatgatacaaca

SEQ ID NO: 65615 - DNA, 58 bp, Artificial
  Synthetic oligonucleotide
tgatctggcattccaatttgaatgatacaacataccagaggacaagagcacttgttcg

SEQ ID NO: 65616 - DNA, 56 bp, Artificial
  Synthetic oligonucleotide
caacagctggtctgactcacatgatgatctggcattccaatttgaatgatacaaca

SEQ ID NO: 65617 - DNA, 60 bp, Artificial
  Synthetic oligonucleotide
cctctgttgaaggcaaaagctgcatcaatcggtgcttttatgtggagttgataaggggaa

SEQ ID NO: 65618 - DNA, 60 bp, Artificial
  Synthetic oligonucleotide
tctctgttgagggcaaaagctgcatcaatcggtgcttttatgtggagttgataaggggaa

SEQ ID NO: 65619 - DNA, 60 bp, Artificial
  Synthetic oligonucleotide
ctgttgaaggcaaaagctgcatcaatcggtgcttttatgtggagttgataaggggaagga

SEQ ID NO: 65620 - DNA, 60 bp, Artificial
  Synthetic oligonucleotide
ctgttgaaggcaaaagctgcatcaatcggtgcttttatgtggagttgataaggggaaggg

SEQ ID NO: 65621 - DNA, 60 bp, Artificial
  Synthetic oligonucleotide
ctacattcccttatactggagatcctccatacagccatgggacaggaacaggatacacca

SEQ ID NO: 65622 - DNA, 60 bp, Artificial
  Synthetic oligonucleotide
cattcccttatactggagatcctccatacagccatgggacaggaacaggatacaccatgg

SEQ ID NO: 65623 - DNA, 60 bp, Artificial
  Synthetic oligonucleotide
atcctcaggacccaggagtcggaatgcgtttgtatcaatgggacttgtgcagtagtaatg

SEQ ID NO: 65624 - DNA, 60 bp, Artificial
  Synthetic oligonucleotide
cctcttttgacatgagtaatgaaggatcttatttctttggagacaatgcagaggaatacg

SEQ ID NO: 65625 - DNA, 60 bp, Artificial
  Synthetic oligonucleotide
cctcgaacctgggacctttgatcttggggggctatatgaagcaattgaggagtgcctgat

SEQ ID NO: 65626 - DNA, 60 bp, Artificial
  Synthetic oligonucleotide
taaagtgaatggacaaggaggtagaatggaattctcgtggactatcttagatatatggga

SEQ ID NO: 65627 - DNA, 60 bp, Artificial
  Synthetic oligonucleotide
gtgaatggacaaggaggtagaatggaattctcgtggactatcttagatatatgggacacc

SEQ ID NO: 65628 - DNA, 60 bp, Artificial
  Synthetic oligonucleotide
cgcttgcatagagtcaatcagaaatgggaattatgaccatgatgtatacagagacgaagc

SEQ ID NO: 65629 - DNA, 60 bp, Artificial
  Synthetic oligonucleotide
cgcttgcatagagtcaatcagaaatgggacttatgaccatgatgtatacagagacgaagc

SEQ ID NO: 65630 - DNA, 60 bp, Artificial
  Synthetic oligonucleotide
gcctgcatagggtcaatcagaaagggaacttatgaccatgatgtatacagagacgaagca

SEQ ID NO: 65631 - DNA, 60 bp, Artificial
  Synthetic oligonucleotide
gcttgcatagggtcaatcagaaatgggacttatgaccatgatgtatacagagacgaagca

SEQ ID NO: 65632 - DNA, 60 bp, Artificial
  Synthetic oligonucleotide
tcaaaacccactcaaggccaaacaatcgtattaaacactgactggagtggctacagtggg

SEQ ID NO: 65633 - DNA, 60 bp, Artificial
  Synthetic oligonucleotide
gaggacaaagtatggtggaccagcaatagtatagtatcgatgtgttccagcacagaattc

SEQ ID NO: 65634 - DNA, 60 bp, Artificial
  Synthetic oligonucleotide
ggcagggctcaaatagaccagtaattcaaatagatccagtagcgatgacacatactagtc

SEQ ID NO: 65635 - DNA, 60 bp, Artificial
  Synthetic oligonucleotide
atgaatactatcattgctttgagctacattttatgtctggttttcgctcaaaaacttccc

SEQ ID NO: 65636 - DNA, 60 bp, Artificial
  Synthetic oligonucleotide
agaacaagggctcttgtgcgtactggtatggatcccaggatgtgctctctgatgcaaggc

SEQ ID NO: 65637 - DNA, 60 bp, Artificial
  Synthetic oligonucleotide
cacgatctgctctcattctgaggggatcagtggctcataagtcctgcctgcctgcttgtg

SEQ ID NO: 65638 - DNA, 60 bp, Artificial
  Synthetic oligonucleotide
cgcacggtctgctctcattctgaggggatcagtggctcataagtcctgcctgcctgcttg

SEQ ID NO: 65639 - DNA, 60 bp, Artificial
  Synthetic oligonucleotide
cagcagagagcatctgcaggacaaatcagcgtacagcccacattctcagtgcagagaaac

SEQ ID NO: 65640 - DNA, 60 bp, Artificial
  Synthetic oligonucleotide
gagagcatctgcaggacaaatcagcgtacagcccacattctcagtgcagagaaacctccc

SEQ ID NO: 65641 - DNA, 60 bp, Artificial
  Synthetic oligonucleotide
gtaatgagaatgggagacctacactcactccaaaacagaaacggaaaatggcgagaacaa

SEQ ID NO: 65642 - DNA, 60 bp, Artificial
  Synthetic oligonucleotide
cctcgaggttacttcaaagtgcacactgggaaaagctcaataatgagatcagatgcacct

SEQ ID NO: 65643 - DNA, 60 bp, Artificial
  Synthetic oligonucleotide
ctcctgttcacagcagtgagaggggaccaaatatgcattggataccatgccaataattcc

SEQ ID NO: 65644 - DNA, 60 bp, Artificial
  Synthetic oligonucleotide
tcacagcagtgagaggggaccaaatatgcattggataccatgccaataattccacagaga

SEQ ID NO: 65645 - DNA, 60 bp, Artificial
  Synthetic oligonucleotide
tgtttacagcagtgagaggagaccagatatgcattggataccattccaacaattccacag

SEQ ID NO: 65646 - DNA, 60 bp, Artificial
  Synthetic oligonucleotide
aaacatgggatgtcataaattttgagagcactggtaatttaattgcaccagaatacggat

SEQ ID NO: 65647 - DNA, 60 bp, Artificial
  Synthetic oligonucleotide
agacgtgggatgtcataaattttgagagcactggaaatctaattgcaccagaatacggtt

SEQ ID NO: 65648 - DNA, 60 bp, Artificial
  Synthetic oligonucleotide
ggaattctcttggactctattggagacgtgggatgtcataaattttgagagcactggtaa

SEQ ID NO: 65649 - DNA, 60 bp, Artificial
  Synthetic oligonucleotide
agacgtgggatgtcataaattttgagagcactggaaatctaattgcaccagaatacgggt

SEQ ID NO: 65650 - DNA, 60 bp, Artificial
  Synthetic oligonucleotide
agacatgggatgtcataaattttgagagcactggtaatttaattgcaccagaatacggat

SEQ ID NO: 65651 - DNA, 60 bp, Artificial
  Synthetic oligonucleotide
ttttcccagtagttcatacaggagaccggttggaatttccagcatggtggaggccatggt

SEQ ID NO: 65652 - DNA, 60 bp, Artificial
  Synthetic oligonucleotide
ccgaagacccagatgaaggcacagctggagtggagtctgctgttctgagaggattcctca

SEQ ID NO: 65653 - DNA, 60 bp, Artificial
  Synthetic oligonucleotide
gcgtactggaatggatcccaggatgtgctctctgatgcaaggatcaactctcccgagaag

SEQ ID NO: 65654 - DNA, 60 bp, Artificial
  Synthetic oligonucleotide
gggaaactgaatagggtaatcgagaaaacaaacgagaaattccatcaaatcgaaaaggaa

SEQ ID NO: 65655 - DNA, 60 bp, Artificial
  Synthetic oligonucleotide
tgcttgaggtggaacaagagataagaaccttctcgtttcagcttatttaatgataaaaaa

SEQ ID NO: 65656 - DNA, 60 bp, Artificial
  Synthetic oligonucleotide
tgcttgaggtggaacaagagataagaacattctcgtttcagcttatttaatgataaaaaa

SEQ ID NO: 65657 - DNA, 60 bp, Artificial
  Synthetic oligonucleotide
agcatggtccagctcaagttgtcacgatggaaaagcatggctgcatgtttgtgtcactgg

SEQ ID NO: 65658 - DNA, 60 bp, Artificial
  Synthetic oligonucleotide
tgtaaaattgcccccttgatggtagcatacatgctagaaagagagttagtccgcaaaaca

SEQ ID NO: 65659 - DNA, 60 bp, Artificial
  Synthetic oligonucleotide
tgtcactggcaatcatgatagctgggatttctatatggatgtgctccaacgggtctctgc

SEQ ID NO: 65660 - DNA, 60 bp, Artificial
  Synthetic oligonucleotide
ttacgggcaaccttcaaacattgaaaataagagtacatgaggggtatgaagagttcacaa

SEQ ID NO: 65661 - DNA, 60 bp, Artificial
  Synthetic oligonucleotide
aggaacagagaagctgacaataacttattcgtcatcaatgatgtgggagatcaacggtcc

SEQ ID NO: 65662 - DNA, 59 bp, Artificial
  Synthetic oligonucleotide
caagtgatcctctcgttattgccgcaagtatcattgggatcttgcacttgatattgtgg

SEQ ID NO: 65663 - DNA, 60 bp, Artificial
  Synthetic oligonucleotide
tcaagtgatcctctcgttgttgccgcaagtatcattgggatcttgcacttgatattgtgg

SEQ ID NO: 65664 - DNA, 59 bp, Artificial
  Synthetic oligonucleotide
caagtgacccgcttgttgttgctgcgagtatcattgggatcttgcacttgatattgtgg

SEQ ID NO: 65665 - DNA, 59 bp, Artificial
  Synthetic oligonucleotide
caagtgaccctcttgttgttgccgcgagtatcattgggatcttgcacttgatattgtgg

SEQ ID NO: 65666 - DNA, 60 bp, Artificial
  Synthetic oligonucleotide
caagtgacccgcttgttgttgctgcgagtatcattgggatcttgcacttgatattgtgga

SEQ ID NO: 65667 - DNA, 60 bp, Artificial
  Synthetic oligonucleotide
taggactacatctaaaaccgagctgcaactgctcacactcacaacctgaagcaaccaatg

SEQ ID NO: 65668 - DNA, 60 bp, Artificial
  Synthetic oligonucleotide
taggactacatctgaaaccgagctgcaattgctcacactcacaacctgaagcaaccaatg

SEQ ID NO: 65669 - DNA, 60 bp, Artificial
  Synthetic oligonucleotide
cactcaaatggaacaatacacgataggtcccagtatcgtgccctgataagctggccacta

SEQ ID NO: 65670 - DNA, 60 bp, Artificial
  Synthetic oligonucleotide
gcagggaagaacacagatcttgaggcactcatggaatggctaaagacaagaccaatcctg

SEQ ID NO: 65671 - DNA, 60 bp, Artificial
  Synthetic oligonucleotide
tgcagggaagaacacagatcttgaggcactcatggaatggctaaagacaagaccaatcct

SEQ ID NO: 65672 - DNA, 60 bp, Artificial
  Synthetic oligonucleotide
ggaagaataccgatcttgaggcactcatggaatggctaaagacaagaccaatcctgtcac

SEQ ID NO: 65673 - DNA, 60 bp, Artificial
  Synthetic oligonucleotide
cggttggaggtaatgaaaagaaggctaaactggcaaatgttgtgagaaaaatgatgacta

SEQ ID NO: 65674 - DNA, 60 bp, Artificial
  Synthetic oligonucleotide
ggggagcaaatgctgataatttggggaatacatcatcccaatgatgatacggaacaaagg

SEQ ID NO: 65675 - DNA, 60 bp, Artificial
  Synthetic oligonucleotide
ggggagcaaatgctgataatttggggaatacatcatcccaatgatgatacggaacaaaga

SEQ ID NO: 65676 - DNA, 60 bp, Artificial
  Synthetic oligonucleotide
ggggagcaaatgctgataatttggggaatacatcatcccaatgatgatacagaacaaaga

SEQ ID NO: 65677 - DNA, 60 bp, Artificial
  Synthetic oligonucleotide
gacaatgaacctggatcgggaaattggcctgatggttccaacattgggttcatgcccaag

SEQ ID NO: 65678 - DNA, 60 bp, Artificial
  Synthetic oligonucleotide
ctggagcgaaacgtcactgtgactcatgccaaggacattcttgagaaaacgcataatgga

SEQ ID NO: 65679 - DNA, 60 bp, Artificial
  Synthetic oligonucleotide
gccaaaagctgcatcaatcggtgcttttatgtggagttgataaggggaagggaacaggaa

SEQ ID NO: 65680 - DNA, 60 bp, Artificial
  Synthetic oligonucleotide
cagcattgcaggttggctccttggaaatccggaatgtgaccggctcttaagtgtacctga

SEQ ID NO: 65681 - DNA, 60 bp, Artificial
  Synthetic oligonucleotide
ggggaaattccaaacagcagcacaacgagcaatgatggaccaggtgagagaaagccggaa

SEQ ID NO: 65682 - DNA, 60 bp, Artificial
  Synthetic oligonucleotide
gctcagaccgagtgatggtatcacctctggccgtgacatggtggaataggaatggaccaa

SEQ ID NO: 65683 - DNA, 60 bp, Artificial
  Synthetic oligonucleotide
gctcagaccgagtgatggtatcacctctggccgtgacatggtggaataggaatggaccga

SEQ ID NO: 65684 - DNA, 60 bp, Artificial
  Synthetic oligonucleotide
ccctgggttttgcttaatgcatcttggttcaactccttcctcacacatgtactgaaatag

SEQ ID NO: 65685 - DNA, 60 bp, Artificial
  Synthetic oligonucleotide
ttaatgatccctgggttttgcttaatgcatcttggttcaactccttcctcacacatgcac

SEQ ID NO: 65686 - DNA, 60 bp, Artificial
  Synthetic oligonucleotide
taatgatccctgggttttgcttaatgcatcttggttcaactccttcctcacacatgtact

SEQ ID NO: 65687 - DNA, 60 bp, Artificial
  Synthetic oligonucleotide
taatgcatcttggttcaactccttcctcacacatgcactgaaatagttgtggcaatgcta

SEQ ID NO: 65688 - DNA, 60 bp, Artificial
  Synthetic oligonucleotide
ttgcttaatgcatcttggttcaactccttcctcgcacatgcactgaaatagttgtggcaa

SEQ ID NO: 65689 - DNA, 60 bp, Artificial
  Synthetic oligonucleotide
aggaagatctcacttaaggaatgacacagatgtggtaaactttgtgagcatggagttttc

SEQ ID NO: 65690 - DNA, 60 bp, Artificial
  Synthetic oligonucleotide
ggccaaattggcaaatgttgtgagaaagatgatgactaattcacaagacacagagctttc

SEQ ID NO: 65691 - DNA, 58 bp, Artificial
  Synthetic oligonucleotide
aaaatgatgactaattcacaagacacagagctttctttcacaatcactggggacaaca

SEQ ID NO: 65692 - DNA, 60 bp, Artificial
  Synthetic oligonucleotide
atgacagactccattaaatcatggagaaaggatatactaagaactcaagagtctgaatgt

SEQ ID NO: 65693 - DNA, 60 bp, Artificial
  Synthetic oligonucleotide
ggagaatgacagactccattaaatcatggagaaaggacatactgagaactcaggagtccg

SEQ ID NO: 65694 - DNA, 60 bp, Artificial
  Synthetic oligonucleotide
ggagaatgacagactccattaaatcatggagaaaggacatactaagaactcaggagtccg

SEQ ID NO: 65695 - DNA, 60 bp, Artificial
  Synthetic oligonucleotide
gtgcatagcatggtccagctcaagttgtcacgatggaaaagcatggctgcatgtttgtgt

SEQ ID NO: 65696 - DNA, 60 bp, Artificial
  Synthetic oligonucleotide
gttgaagacactaaaatagatctctggtcttacaacgcggagcttcttgttgccctggag

SEQ ID NO: 65697 - DNA, 54 bp, Artificial
  Synthetic oligonucleotide
acatttgggtgacaagagaaccttatgtgtcatgcgatcctgacaagtgttatc

SEQ ID NO: 65698 - DNA, 60 bp, Artificial
  Synthetic oligonucleotide
cattgagcatcaatgaactgagcaatcttgcgaaaggggagaaagctaatgtgttgatag

SEQ ID NO: 65699 - DNA, 60 bp, Artificial
  Synthetic oligonucleotide
ttgttcggactgggatggatcccaggatgtgctctctgatgcaagggtcgaccctcccac

SEQ ID NO: 65700 - DNA, 50 bp, Artificial
  Synthetic oligonucleotide
aacaggagataagaactttctcgtttcagcttatttaatgataaaaaaca

SEQ ID NO: 65701 - DNA, 60 bp, Artificial
  Synthetic oligonucleotide
gtgatgatgaatgcatgaatagcatcaggaatgggacatatgattatcccaaatatgaag

SEQ ID NO: 65702 - DNA, 60 bp, Artificial
  Synthetic oligonucleotide
taaatgtgatgatgaatgcatgaatagcatcaggaatgggacatatgattatcccaaata

SEQ ID NO: 65703 - DNA, 58 bp, Artificial
  Synthetic oligonucleotide
ggggaaggatggaattctcttggactctattggagacgtgggatgtcataaattttga

SEQ ID NO: 65704 - DNA, 60 bp, Artificial
  Synthetic oligonucleotide
gagaaccttatgtgtcatgcgatcctggcaagtgttatcaatttgcactcgggcagggga

SEQ ID NO: 65705 - DNA, 60 bp, Artificial
  Synthetic oligonucleotide
gagagaaccttatgtgtcatgcgatcctggcaagtgttatcaatttgcactcgggcaggg

SEQ ID NO: 65706 - DNA, 60 bp, Artificial
  Synthetic oligonucleotide
agataatcactcactgagtgacatcaaaatcatggcgtcccaaggcaccaaacggtctta

SEQ ID NO: 65707 - DNA, 60 bp, Artificial
  Synthetic oligonucleotide
ctgtggactagacaatgaacctggatcgggaaattggcctgatggttccaacattgggtt

SEQ ID NO: 65708 - DNA, 60 bp, Artificial
  Synthetic oligonucleotide
ctgtggattagacaatgaacctggatcgggaaattggccggatggttctaacattgggtt

SEQ ID NO: 65709 - DNA, 60 bp, Artificial
  Synthetic oligonucleotide
ctgtggactagacaatgaacctggatcgggaaattggccggatggttctaacattgggtt

SEQ ID NO: 65710 - DNA, 60 bp, Artificial
  Synthetic oligonucleotide
ctgtggactagacaatgaacctggatcgggaaattggcctgatggttccaatattgggtt

SEQ ID NO: 65711 - DNA, 60 bp, Artificial
  Synthetic oligonucleotide
ctgtggattagacaatgaacctggatcgggaaattggccggatggttccaacattgggtt

SEQ ID NO: 65712 - DNA, 60 bp, Artificial
  Synthetic oligonucleotide
acatttgggtgacgagagaaccttatgtgtcatgcgatcctggcaagtgttaccaatttg

SEQ ID NO: 65713 - DNA, 60 bp, Artificial
  Synthetic oligonucleotide
tctctgttgaaggcaaaagctgcatcaataggtgcttttatgtggagttgataaggggaa

SEQ ID NO: 65714 - DNA, 60 bp, Artificial
  Synthetic oligonucleotide
aagagtggtcccaagagggcaactgtccaccagaggggttcagattgcttcaaatgagaa

SEQ ID NO: 65715 - DNA, 60 bp, Artificial
  Synthetic oligonucleotide
gcagcacaacgggcaatgatggatcaagtgagagaaagccgcaatcctggaaatgcagag

SEQ ID NO: 65716 - DNA, 60 bp, Artificial
  Synthetic oligonucleotide
ggatcaggatatgcagcagacaaagaatccactcaaagggcaattgatgggataactaac

SEQ ID NO: 65717 - DNA, 60 bp, Artificial
  Synthetic oligonucleotide
gttgagaggatttctgattctaggcaaagaagacaaaagatatggaccagcactgagcat

SEQ ID NO: 65718 - DNA, 60 bp, Artificial
  Synthetic oligonucleotide
attgagaggatttctaattctaggcaaagaagacaaaagatatggaccagcattgagcat

SEQ ID NO: 65719 - DNA, 60 bp, Artificial
  Synthetic oligonucleotide
gaagtacacatcaggaagacaggagaagaaccctgctctcagaatgaaatggatgatggc

SEQ ID NO: 65720 - DNA, 60 bp, Artificial
  Synthetic oligonucleotide
gagcaagccgtggatatatgcaaggcagcaatgggtctaagaatcagttcatctttcagc

SEQ ID NO: 65721 - DNA, 60 bp, Artificial
  Synthetic oligonucleotide
gtggaccatatggccataatcaagaaatacacatcaggaagacaggagaagaaccctgcc

SEQ ID NO: 65722 - DNA, 60 bp, Artificial
  Synthetic oligonucleotide
aatgaactgagcaatcttgcgaaaggggagaaagctaatgtgttgatagggcaaggagac

SEQ ID NO: 65723 - DNA, 60 bp, Artificial
  Synthetic oligonucleotide
ctgattctaggcaaagaagacaaaagatatggaccagcactgagcatcaacgaactgagc

SEQ ID NO: 65724 - DNA, 60 bp, Artificial
  Synthetic oligonucleotide
tgagttgaatgcccctaattaccactatgaggagtgttcctgttatcctgatgctagcga

SEQ ID NO: 65725 - DNA, 60 bp, Artificial
  Synthetic oligonucleotide
ctcaggtacctatggaacaggctcatggcctgatggggcggacatcaatttcatgcctat

SEQ ID NO: 65726 - DNA, 60 bp, Artificial
  Synthetic oligonucleotide
ggtggacggttggtacggtttcaggcatcaaaattctgagggcacaggacaagcagcaga

SEQ ID NO: 65727 - DNA, 60 bp, Artificial
  Synthetic oligonucleotide
ggacggttggtacggtttcaggcatcaaaattctgagggcacaggacaagcagcagatct

SEQ ID NO: 65728 - DNA, 60 bp, Artificial
  Synthetic oligonucleotide
ggaatggtaaacggttggtacggtttcaggcatcaaaattctgagggcacaggacaagca

SEQ ID NO: 65729 - DNA, 60 bp, Artificial
  Synthetic oligonucleotide
ggaatgatagacggttggtacggtttcaggcatcaaaattctgagggcacaggacaagca

SEQ ID NO: 65730 - DNA, 60 bp, Artificial
  Synthetic oligonucleotide
gggaatggtggacggttggtacggtttcaggcatcaaaattctgagggcacaggacaagc

SEQ ID NO: 65731 - DNA, 60 bp, Artificial
  Synthetic oligonucleotide
ggtagacggttggtacggtttcaggcatcaaaattctgaaggcacaggacaagcagcaga

SEQ ID NO: 65732 - DNA, 60 bp, Artificial
  Synthetic oligonucleotide
gggaatgatggacggttggtacggtttcaggcatcaaaattctgagggcacaggacaagc

SEQ ID NO: 65733 - DNA, 60 bp, Artificial
  Synthetic oligonucleotide
gggaatggtagacggttggtacggtttcaggcatcaaaattctgaaggcacaggacaagc

SEQ ID NO: 65734 - DNA, 60 bp, Artificial
  Synthetic oligonucleotide
tctaaaattggcaacagggatgcggaatgtaccagagaaacaaactagaggcatattcgg

SEQ ID NO: 65735 - DNA, 60 bp, Artificial
  Synthetic oligonucleotide
tctgaagttggcaacagggatgcggaatgtaccagagaaacaaactagaggcatattcgg

SEQ ID NO: 65736 - DNA, 60 bp, Artificial
  Synthetic oligonucleotide
caaaacactctgaaattggcaacagggatgcggaatgtaccagagaaacaaactagaggc

SEQ ID NO: 65737 - DNA, 60 bp, Artificial
  Synthetic oligonucleotide
ggtaaacggttggtacggtttcaggcatcaaaattctgagggcacaggacaagcagcaga

SEQ ID NO: 65738 - DNA, 60 bp, Artificial
  Synthetic oligonucleotide
ctaaaattggcaacagggatgcggaatgtaccagagaaacaaactagaggcatattcggc

SEQ ID NO: 65739 - DNA, 60 bp, Artificial
  Synthetic oligonucleotide
aaaatgcaattggggtcctcaccggaggacttgaatggaatgataacacagttcgagtct

SEQ ID NO: 65740 - DNA, 60 bp, Artificial
  Synthetic oligonucleotide
aaaatgcgattggggtcctcatcggaggacttgaatggaatgataacacagttcgagtct

SEQ ID NO: 65741 - DNA, 60 bp, Artificial
  Synthetic oligonucleotide
cagttctcctccctgactgtgaatgtgagaggatcaggaatgaggatactggtaagaggc

SEQ ID NO: 65742 - DNA, 60 bp, Artificial
  Synthetic oligonucleotide
gcagttctcctccctgactgtgaatgtgagaggatcaggaatgaggatactggtaagagg

SEQ ID NO: 65743 - DNA, 60 bp, Artificial
  Synthetic oligonucleotide
caattctcctccctgactgtgaatgtgagaggatcaggaatgaggatactggtaagaggc

SEQ ID NO: 65744 - DNA, 60 bp, Artificial
  Synthetic oligonucleotide
gatgcaattctcctcgctgactgtgaatgtgagaggatcaggaatgaggatactggtaag

SEQ ID NO: 65745 - DNA, 60 bp, Artificial
  Synthetic oligonucleotide
catgaaaacagagggaagacttgaaaactgcgagaccaaatgccaaactcctttgggagc

SEQ ID NO: 65746 - DNA, 60 bp, Artificial
  Synthetic oligonucleotide
atttgtgttcacgctcaccgtgcccagtgagcgaggactgcagcgtagacgctttgtcca

SEQ ID NO: 65747 - DNA, 60 bp, Artificial
  Synthetic oligonucleotide
ccggttgggatttccagcatggtggaggccatggtgtctagggccagaattgatgcacgg

SEQ ID NO: 65748 - DNA, 60 bp, Artificial
  Synthetic oligonucleotide
ctggagcaaaacaaatgatgccggctcagaccgagtgatggtatcacctctggctgtgac

SEQ ID NO: 65749 - DNA, 60 bp, Artificial
  Synthetic oligonucleotide
gttgaagacactaaaatagatctctggtcttacaacgcggagctccttgttgccctggag

SEQ ID NO: 65750 - DNA, 60 bp, Artificial
  Synthetic oligonucleotide
cgagaagacgaacgagaaattccatcaaatcgaaaaggaattctcagaagtagaaggaag

SEQ ID NO: 65751 - DNA, 60 bp, Artificial
  Synthetic oligonucleotide
gagtgacagtgataaagaacaacatgataaacaatgaccttggaccagcaacggctcaaa

SEQ ID NO: 65752 - DNA, 60 bp, Artificial
  Synthetic oligonucleotide
tcggctgacatgagcattggagtaaccgtgataaagaacaacatgataaacaatgacctt

SEQ ID NO: 65753 - DNA, 60 bp, Artificial
  Synthetic oligonucleotide
ctgatatgagcattggagtaacagtgataaagaacaacatgataaacaatgacctaggac

SEQ ID NO: 65754 - DNA, 60 bp, Artificial
  Synthetic oligonucleotide
gcattggagtaacagtgataaagaacaacatgataaacaatgaccttggaccagcaacag

SEQ ID NO: 65755 - DNA, 60 bp, Artificial
  Synthetic oligonucleotide
caatgggacttgcacagtagtaatgactgatggaagtgcatcaggaagagccgatactag

SEQ ID NO: 65756 - DNA, 60 bp, Artificial
  Synthetic oligonucleotide
tgggacttgcacagtagtaatgactgatggaagtgcatcaggaagagccgatactagaat

SEQ ID NO: 65757 - DNA, 54 bp, Artificial
  Synthetic oligonucleotide
gtctcaaggcaccaaacgatcttatgagcagatggaaactggtggggagaacca

SEQ ID NO: 65758 - DNA, 57 bp, Artificial
  Synthetic oligonucleotide
ggcgtctcaaggcaccaaacgatcttatgagcagatggaaaccggtggagaacgcca

SEQ ID NO: 65759 - DNA, 56 bp, Artificial
  Synthetic oligonucleotide
gcgtctcaaggcaccaaacgatcttatgagcagatggaaactggtggagaacgcca

SEQ ID NO: 65760 - DNA, 60 bp, Artificial
  Synthetic oligonucleotide
gtgtacctgaatggtcctatatagtggaaaaggaaaacccggtgaatggtctgtgctacc

SEQ ID NO: 65761 - DNA, 60 bp, Artificial
  Synthetic oligonucleotide
aatgtacctgaatggtcctatatagtggaaaaggaaaacccggcgaatggtctgtgctac

SEQ ID NO: 65762 - DNA, 60 bp, Artificial
  Synthetic oligonucleotide
agtgtgcctgaatggtcctatatagtggaaaaggaaaacccggcgaatggtctgtgctac

SEQ ID NO: 65763 - DNA, 60 bp, Artificial
  Synthetic oligonucleotide
cctgaatggtcctatatagtggaaaaggaaaacccggcaaatggtctgtgctacccaggc

SEQ ID NO: 65764 - DNA, 60 bp, Artificial
  Synthetic oligonucleotide
ttaaaagtacctgaatggtcctatatagtggaaaaggaaaatccggcgcacggtctgtgt

SEQ ID NO: 65765 - DNA, 60 bp, Artificial
  Synthetic oligonucleotide
cctgaatggtcctatatagtggaaaaggaaaacccggcgaatggtctgtgctacccaggc

SEQ ID NO: 65766 - DNA, 57 bp, Artificial
  Synthetic oligonucleotide
tatagcattgtttccagttatgtgtgctcagggcttgttggagacacacccagaaaa

SEQ ID NO: 65767 - DNA, 60 bp, Artificial
  Synthetic oligonucleotide
tatagcattgtttccagttatgtgtgctcagggcttgttggagacacacccagaaaaaac

SEQ ID NO: 65768 - DNA, 60 bp, Artificial
  Synthetic oligonucleotide
cgacagctggtctaactcacatgatgatctggcattccaatttgaatgatacaacatatc

SEQ ID NO: 65769 - DNA, 60 bp, Artificial
  Synthetic oligonucleotide
cgacacgtggtctaactcacatgatgatctggcattccaatttgaatgatacaacatatc

SEQ ID NO: 65770 - DNA, 60 bp, Artificial
  Synthetic oligonucleotide
caacaatgagaccatattggagaccgggtatgtgtgtagcaaatttcattcggacacccc

SEQ ID NO: 65771 - DNA, 60 bp, Artificial
  Synthetic oligonucleotide
tgtgattccccaagtaatgtaaatggaggacccggagttaaggggtttggcttcaaatcc

SEQ ID NO: 65772 - DNA, 60 bp, Artificial
  Synthetic oligonucleotide
taagaacccaagagtctgaatgtcaatgtattgacgggacctgtgttgtcgctgttacag

SEQ ID NO: 65773 - DNA, 60 bp, Artificial
  Synthetic oligonucleotide
gggacctgtgttgtcgctgttacagatggacctgctgctaatagtgcagaccatagggtt

SEQ ID NO: 65774 - DNA, 60 bp, Artificial
  Synthetic oligonucleotide
cgctgttacagatggacctgctgctaatagtgcagaccatagggtttattggatacgaga

SEQ ID NO: 65775 - DNA, 60 bp, Artificial
  Synthetic oligonucleotide
ccatagggtttattggatacgagaaggaaaggtgataaagtatgaaaacattcccaaaac

SEQ ID NO: 65776 - DNA, 60 bp, Artificial
  Synthetic oligonucleotide
ggatacgagaaggaaaggtgataaagtatgaaaacattcccaaaacgaagatacagcact

SEQ ID NO: 65777 - DNA, 60 bp, Artificial
  Synthetic oligonucleotide
ttcccaaaacgaagatacagcacttggaggagtgttcttgttatgtggacattgacgtat

SEQ ID NO: 65778 - DNA, 60 bp, Artificial
  Synthetic oligonucleotide
cccaaaacgaagatacagcacttggaggagtgttcttgttatgtggacattgacgtatac

SEQ ID NO: 65779 - DNA, 60 bp, Artificial
  Synthetic oligonucleotide
ttggatgagaatcaacaatgagaccatattggagaccgggtatgtgtgtagcaaatttca

SEQ ID NO: 65780 - DNA, 60 bp, Artificial
  Synthetic oligonucleotide
agccttacgttagttgcgacaataataattgctggtcctttgcacttgcccaaggggcat

SEQ ID NO: 65781 - DNA, 60 bp, Artificial
  Synthetic oligonucleotide
cgattgggcgagaacaaagacgttatagtcacgagagagccttacgttagttgcgacaat

SEQ ID NO: 65782 - DNA, 60 bp, Artificial
  Synthetic oligonucleotide
ggataatgcaatacgattgggcgagaacaaagacgttatagtcacgagagagccttacgt

SEQ ID NO: 65783 - DNA, 60 bp, Artificial
  Synthetic oligonucleotide
aagccctcactgccgctgtgtcccttcagaggatttttcccttttcataaggataatgca

SEQ ID NO: 65784 - DNA, 60 bp, Artificial
  Synthetic oligonucleotide
ggggaccactcgactgtagtgtacccaacgataacaaccccggtggtaccaaactgcagt

SEQ ID NO: 65785 - DNA, 50 bp, Artificial
  Synthetic oligonucleotide
ggttattcaggtagtttcattgttgaaaacaacggttgtttccagccttg

SEQ ID NO: 65786 - DNA, 60 bp, Artificial
  Synthetic oligonucleotide
ggagaagagacatactaagaacccaagagtctgaatgtcaatgtattgacgggacctgtg

SEQ ID NO: 65787 - DNA, 60 bp, Artificial
  Synthetic oligonucleotide
atatgcagggaaaatgacagactccatcaaatcatggagaagagacatactaagaaccca

SEQ ID NO: 65788 - DNA, 60 bp, Artificial
  Synthetic oligonucleotide
ccggcaatgacgtatggttggggaggactgtatcaactagcggtagatcaggctttgaaa

SEQ ID NO: 65789 - DNA, 60 bp, Artificial
  Synthetic oligonucleotide
cttcaaatccggcaatgacgtatggttggggaggactgtatcaactagcggtagatcagg

SEQ ID NO: 65790 - DNA, 60 bp, Artificial
  Synthetic oligonucleotide
ccccaagtaatgtaaatggaggacccggagttaaggggtttggcttcaaatccggcaatg

SEQ ID NO: 65791 - DNA, 60 bp, Artificial
  Synthetic oligonucleotide
tagggaattacaaagagatatgcatagcttggtcaagtagcagctgtttcgacgggaagg

SEQ ID NO: 65792 - DNA, 60 bp, Artificial
  Synthetic oligonucleotide
gagatatgcatagcttggtcaagtagcagctgtttcgacgggaaggagtggatgcatgtc

SEQ ID NO: 65793 - DNA, 60 bp, Artificial
  Synthetic oligonucleotide
gacgggaaggagtggatgcatgtctgcatgacagggaacgacaatgatgcaagtgctcag

SEQ ID NO: 65794 - DNA, 60 bp, Artificial
  Synthetic oligonucleotide
gcgacaataataattgctggtcctttgcacttgcccaaggggcattactgggaacccaac

SEQ ID NO: 65795 - DNA, 60 bp, Artificial
  Synthetic oligonucleotide
caaggggcattactgggaacccaacacagcaatggaaccattaaagacagaacaccctat

SEQ ID NO: 65796 - DNA, 60 bp, Artificial
  Synthetic oligonucleotide
ggggcattactgggaacccaacacagcaatggaaccattaaagacagaacaccctataga

SEQ ID NO: 65797 - DNA, 60 bp, Artificial
  Synthetic oligonucleotide
aacaccctatagatcattgattcggttcccaataggaacagccccggtactagggaatta

SEQ ID NO: 65798 - DNA, 60 bp, Artificial
  Synthetic oligonucleotide
gtggcacttcaggtacctatggaacaggctcatggcctactggggcaaatatcaacttca

SEQ ID NO: 65799 - DNA, 60 bp, Artificial
  Synthetic oligonucleotide
agtgaaactgagcaatatgggggtttaccaaatacttgctatatatgctacggtggcagg

SEQ ID NO: 65800 - DNA, 60 bp, Artificial
  Synthetic oligonucleotide
ggtccagctcaagttgtcacgatggaaaagcatggctgcatgtttgtgtcactgggcatg

SEQ ID NO: 65801 - DNA, 60 bp, Artificial
  Synthetic oligonucleotide
ggtccagctcaagttgtcacgatggaaaagcatggctgcatgtttgtgtcactggggatg

SEQ ID NO: 65802 - DNA, 60 bp, Artificial
  Synthetic oligonucleotide
ttctgaggggatcagtggctcataagtcctgcctgcctgcttgtgtgtatgggcttgccg

SEQ ID NO: 65803 - DNA, 60 bp, Artificial
  Synthetic oligonucleotide
gacaatgaacctggatcgggaaattggcctgatggttccaatattgggtttatgcccaag

SEQ ID NO: 65804 - DNA, 60 bp, Artificial
  Synthetic oligonucleotide
attggaaaggttccaacaggccttggatgaggatcaacaatgagaccatactagaaacag

SEQ ID NO: 65805 - DNA, 60 bp, Artificial
  Synthetic oligonucleotide
atgaatccaaatcagaagataataacaattggtgtagtgaacactactctatcaacaata

SEQ ID NO: 65806 - DNA, 60 bp, Artificial
  Synthetic oligonucleotide
caaatcagaagataataacaattggtgtagtgaacactactctatcaacaatagcccttc

SEQ ID NO: 65807 - DNA, 60 bp, Artificial
  Synthetic oligonucleotide
atgaatccaaatcagaagataataacaattggtgtagtgaataccactctatcaacaata

SEQ ID NO: 65808 - DNA, 60 bp, Artificial
  Synthetic oligonucleotide
tgtggacatcgatgtgtactgcatatgtagggacaattggaaaggttccaacaggccttg

SEQ ID NO: 65809 - DNA, 60 bp, Artificial
  Synthetic oligonucleotide
gaaaacattcccaaaacaaagatacaacatttggaggagtgttcttgttatgtggacatc

SEQ ID NO: 65810 - DNA, 60 bp, Artificial
  Synthetic oligonucleotide
gtatgtagagacaattggaaaggttccaacaggccttggatgagaatcaacaatgagacc

SEQ ID NO: 65811 - DNA, 60 bp, Artificial
  Synthetic oligonucleotide
attgacgtatactgtgtatgtagagacaattggaaaggttccaacaggccttggatgaga

SEQ ID NO: 65812 - DNA, 60 bp, Artificial
  Synthetic oligonucleotide
cttgccatttatgctacagttgcaggttctctgtcactggcaatcatgatagctgggatc

SEQ ID NO: 65813 - DNA, 60 bp, Artificial
  Synthetic oligonucleotide
aactgtaatcccgaatatcgggtctagaccctgggtaaggggtctgtctagtagaataag

SEQ ID NO: 65814 - DNA, 60 bp, Artificial
  Synthetic oligonucleotide
gcaggcaaaccatttgaatggatgtcaatccgactttacttttcctaaaagtgccagcac

SEQ ID NO: 65815 - DNA, 60 bp, Artificial
  Synthetic oligonucleotide
cctcttttgacatgagtaatgaaggatcttatttcttcggagacaatgcagaagaatacg

SEQ ID NO: 65816 - DNA, 60 bp, Artificial
  Synthetic oligonucleotide
gacacaatacatgatagaatccctcatcgaaccctattgatgaatgagttgggtgttcca

SEQ ID NO: 65817 - DNA, 60 bp, Artificial
  Synthetic oligonucleotide
aagagtacatgaggggtatgaagaattcacaatggttgggagaagagcaacagctattct

SEQ ID NO: 65818 - DNA, 60 bp, Artificial
  Synthetic oligonucleotide
acatttgggtgacaagggaaccttatgtgtcatgcgatcctggcaagtgttatcaatttg

SEQ ID NO: 65819 - DNA, 60 bp, Artificial
  Synthetic oligonucleotide
gagcaaaagcagggtcaagatgaatccaaatcagaagattctatgcacttctgccactgc

SEQ ID NO: 65820 - DNA, 60 bp, Artificial
  Synthetic oligonucleotide
agcaaaagcagggtcaagatgaatccaaatcagaagattctatgcacttcagccactgct

SEQ ID NO: 65821 - DNA, 60 bp, Artificial
  Synthetic oligonucleotide
agcaaaagcagggtcaagatgaatccaaatcagaagattctatgcacttctgccactgct

SEQ ID NO: 65822 - DNA, 60 bp, Artificial
  Synthetic oligonucleotide
gcaaaagcagggtcaagatgaatccaaatcagaagattctatgcacttctgccactgcta

SEQ ID NO: 65823 - DNA, 60 bp, Artificial
  Synthetic oligonucleotide
gcagggtcaagatgaatccaaatcagaagattctatgcacttcagccactgctatcgtaa

SEQ ID NO: 65824 - DNA, 60 bp, Artificial
  Synthetic oligonucleotide
gcagggtcaagatgaatccaaatcagaagattctatgcacttctgccactgctatcgtaa

SEQ ID NO: 65825 - DNA, 60 bp, Artificial
  Synthetic oligonucleotide
tatcataaatgtgatgatgaatgcatgaatagtgtcaggaatgggacatatgattatccc

SEQ ID NO: 65826 - DNA, 60 bp, Artificial
  Synthetic oligonucleotide
cataaatgtgatgatgaatgcatgaatagtgtcaggaatgggacatatgattatcccaaa

SEQ ID NO: 65827 - DNA, 60 bp, Artificial
  Synthetic oligonucleotide
gagtcaggaaggctaatagatttcctcaaggatgtgatggaatcaatggataaagaggaa

SEQ ID NO: 65828 - DNA, 60 bp, Artificial
  Synthetic oligonucleotide
cggctgcattgagggcaagctttctcaaatgtccaaagaagtgaacgccaggattgagcc

SEQ ID NO: 65829 - DNA, 60 bp, Artificial
  Synthetic oligonucleotide
cggctgcattgagggcaagctttctcaaatgtccaaagaagtgaatgcaagaattgaacc

SEQ ID NO: 65830 - DNA, 60 bp, Artificial
  Synthetic oligonucleotide
cggctgcattgagggcaagctttctcaaatgtccaaagaagtgaatgcccaaattgaacc

SEQ ID NO: 65831 - DNA, 60 bp, Artificial
  Synthetic oligonucleotide
gaacggctgcattgagggcaagctttctcaaatgtccaaagaagtgaatgcccaaattga

SEQ ID NO: 65832 - DNA, 60 bp, Artificial
  Synthetic oligonucleotide
cctctggagcaaaacaaatgatgccggctcagaccgagtgatggtatcacctctggctgt

SEQ ID NO: 65833 - DNA, 60 bp, Artificial
  Synthetic oligonucleotide
ctggaagaacatcccagcgcggggaaggatcctaagaaaactggaggacccatatacaag

SEQ ID NO: 65834 - DNA, 60 bp, Artificial
  Synthetic oligonucleotide
acatcccagcgcggggaaggatcctaagaaaactggaggacccatatacaagagagtaga

SEQ ID NO: 65835 - DNA, 60 bp, Artificial
  Synthetic oligonucleotide
aatcaaaggagtgaaattgagcaacatgggggtttatcaaatacttgctatatacgctac

SEQ ID NO: 65836 - DNA, 60 bp, Artificial
  Synthetic oligonucleotide
aagattgcccctttaatggtggcatacatgttggaaagagaactggttcgtaagaccaga

SEQ ID NO: 65837 - DNA, 60 bp, Artificial
  Synthetic oligonucleotide
cgatctgctctcattctgaggggatcagtggctcataaatcctgcctgcctgcttgtgtg

SEQ ID NO: 65838 - DNA, 60 bp, Artificial
  Synthetic oligonucleotide
ggggatcaatgatcggaatttctggagaggcgaaaatggacgaagaacaaggattgcata

SEQ ID NO: 65839 - DNA, 60 bp, Artificial
  Synthetic oligonucleotide
ctatcagtggatcatcagaaactgggaaactgttaaaattcagtggtctcagaatcctac

SEQ ID NO: 65840 - DNA, 60 bp, Artificial
  Synthetic oligonucleotide
atcggcttcgccgagatcagaagtccctaagaggaagaggcagcactcttggtctggaca

SEQ ID NO: 65841 - DNA, 60 bp, Artificial
  Synthetic oligonucleotide
atgctgtggtaatgccagctcatggtccggccaagagcatggaatatgatgctgttgcta

SEQ ID NO: 65842 - DNA, 60 bp, Artificial
  Synthetic oligonucleotide
atgctgtagtaatgccggcccacggtccagccaagagcatggaatatgatgctgttgcaa

SEQ ID NO: 65843 - DNA, 60 bp, Artificial
  Synthetic oligonucleotide
aatgctgtggttatgccagctcacggtccagccaagagcatggaatatgatgctgttgct

SEQ ID NO: 65844 - DNA, 60 bp, Artificial
  Synthetic oligonucleotide
gggtcaggaatgagaatacttgtaaggggcaattctcctgtattcaactacaacaagacc

SEQ ID NO: 65845 - DNA, 60 bp, Artificial
  Synthetic oligonucleotide
ggatcaggaatgagaatacttgtaaggggcaattctcctgtattcaactacaacaagacc

SEQ ID NO: 65846 - DNA, 60 bp, Artificial
  Synthetic oligonucleotide
gggggtcaggaatgagaatacttgtaaggggcaattctcctgtattcaactacaacaaga

SEQ ID NO: 65847 - DNA, 60 bp, Artificial
  Synthetic oligonucleotide
ggggatcaggaatgagaatacttgtaaggggcaattctcctgtattcaactacaacaaga

SEQ ID NO: 65848 - DNA, 60 bp, Artificial
  Synthetic oligonucleotide
acttgtaaggggcaattctcctgtattcaactataacaaggccacgaagagactcacagt

SEQ ID NO: 65849 - DNA, 60 bp, Artificial
  Synthetic oligonucleotide
ggatgagaatacttgtaaggggcaattctcctgtattcaactacaacaagaccactaaaa

SEQ ID NO: 65850 - DNA, 60 bp, Artificial
  Synthetic oligonucleotide
atcaggaatgagaatacttgtaaggggcaattctcctgtattcaactataacaaggccac

SEQ ID NO: 65851 - DNA, 60 bp, Artificial
  Synthetic oligonucleotide
ggatcagggatgagaatacttgtaaggggcaattctcctgtattcaactacaacaagacc

SEQ ID NO: 65852 - DNA, 60 bp, Artificial
  Synthetic oligonucleotide
ggggatcagggatgagaatacttgtaaggggcaattctcctgtattcaactacaacaaga

SEQ ID NO: 65853 - DNA, 60 bp, Artificial
  Synthetic oligonucleotide
gtgaggggatcagggatgagaatacttgtaaggggcaattctcctgtattcaactacaac

SEQ ID NO: 65854 - DNA, 60 bp, Artificial
  Synthetic oligonucleotide
ctcctcggggttacttcaaaatacgaaatgggaaaagctcaataatgaggtcagatgcac

SEQ ID NO: 65855 - DNA, 60 bp, Artificial
  Synthetic oligonucleotide
ggcaacagggatgcggaatgtaccagagaaacaaactagaggcatattcggcgcaattgc

SEQ ID NO: 65856 - DNA, 60 bp, Artificial
  Synthetic oligonucleotide
tcttgaggcactcatggaatggctaaagacaagaccaatcctgtcacctctgactaaggg

SEQ ID NO: 65857 - DNA, 60 bp, Artificial
  Synthetic oligonucleotide
caaggaggcacaggatgtaatcatggaagttgttttccctaacgaagtgggagccaggat

SEQ ID NO: 65858 - DNA, 60 bp, Artificial
  Synthetic oligonucleotide
cccattgacaataggtgagtgtcccaagtatgtaaagtcagatagattggttttggcaac

SEQ ID NO: 65859 - DNA, 60 bp, Artificial
  Synthetic oligonucleotide
cccattgacaataggtgagtgccccaaatatgtaaagtcagatagattggttttggcgac

SEQ ID NO: 65860 - DNA, 60 bp, Artificial
  Synthetic oligonucleotide
cattgacaataggtgaatgtcccaaatatgtaaagtcagatagattggttttggcaacag

SEQ ID NO: 65861 - DNA, 60 bp, Artificial
  Synthetic oligonucleotide
acccattgacaataggtgagtgccccaaatatgtaaagtcagatagattggttttggcga

SEQ ID NO: 65862 - DNA, 60 bp, Artificial
  Synthetic oligonucleotide
gggagactgatccaaaacagcataacaatagagagaatggttctctcagcatttgatgag

SEQ ID NO: 65863 - DNA, 60 bp, Artificial
  Synthetic oligonucleotide
agggagactgatccaaaacagcataacaatagagagaatggttctctcagcatttgatga

SEQ ID NO: 65864 - DNA, 60 bp, Artificial
  Synthetic oligonucleotide
atgatcaaggatcaggatatgcagcagacaaagaatctactcaaaaggcaattgatggga

SEQ ID NO: 65865 - DNA, 60 bp, Artificial
  Synthetic oligonucleotide
gagtggatgcatgtatgcatgacagggaacgataatgatgcaagtgcccagataatatat

SEQ ID NO: 65866 - DNA, 60 bp, Artificial
  Synthetic oligonucleotide
tcagagcatctgttgggagaatggtcggtggaattgggagattctacatacagatgtgca

SEQ ID NO: 65867 - DNA, 60 bp, Artificial
  Synthetic oligonucleotide
gtgagtgccccaaatatgtaaagtcagatagattggttttggcgacagggctaagaaatg

SEQ ID NO: 65868 - DNA, 60 bp, Artificial
  Synthetic oligonucleotide
gccccaaatatgtaaagtcagatagattggttttggcgacagggctaagaaatgtccctc

SEQ ID NO: 65869 - DNA, 53 bp, Artificial
  Synthetic oligonucleotide
atcctcttgttattgccgcaagtatcattgggatcttgcacttgatattgtgg

SEQ ID NO: 65870 - DNA, 60 bp, Artificial
  Synthetic oligonucleotide
acgagagggaagaataatgaagtatgaaaatgtccctaaaacaaagatacaacacttgga

SEQ ID NO: 65871 - DNA, 60 bp, Artificial
  Synthetic oligonucleotide
gacaatgaacctggatcgggaaattggccggatggttccaacattgggtttatgcccaag

SEQ ID NO: 65872 - DNA, 60 bp, Artificial
  Synthetic oligonucleotide
gacaatgaacctggatcgggaaattggccggatggttctaacattgggtttatgcccaag

SEQ ID NO: 65873 - DNA, 60 bp, Artificial
  Synthetic oligonucleotide
ggcagagccagaatgtcaatatgtatatcaggcccgaacaacaatgcatcagcagtgatc

SEQ ID NO: 65874 - DNA, 60 bp, Artificial
  Synthetic oligonucleotide
ccagatgagtgcaggttctatgctctcagccaaggaacaacgattagagggagacactca

SEQ ID NO: 65875 - DNA, 60 bp, Artificial
  Synthetic oligonucleotide
ctcctgtgacccagatgagtgcaggttctatgctctcagccaagggacaacgatcagagg

SEQ ID NO: 65876 - DNA, 60 bp, Artificial
  Synthetic oligonucleotide
cggggtacgagatgctaaaggtgccaaatgcattgaccgacgataggtcaaaacccactc

SEQ ID NO: 65877 - DNA, 60 bp, Artificial
  Synthetic oligonucleotide
cggctgcattgagggcaagctttctcaaatgtcaaaagaagtgaacgccaggattgagcc

SEQ ID NO: 65878 - DNA, 58 bp, Artificial
  Synthetic oligonucleotide
gaggattcacgctcatgttatgaaaccttcaaagtcattggtggttggtccacaccta

SEQ ID NO: 65879 - DNA, 60 bp, Artificial
  Synthetic oligonucleotide
tgcgcaggctcgccgaccaaagtctcccgccgaacttctcctgccttgagaattttagag

SEQ ID NO: 65880 - DNA, 55 bp, Artificial
  Synthetic oligonucleotide
cctcttttgaaatgagtaatgaaggatcttatttcttcggagacaatgcagaaga

SEQ ID NO: 65881 - DNA, 60 bp, Artificial
  Synthetic oligonucleotide
agcgaaagcaggcaaaccatttgaatggatgtcaatccgactttacttttcctgaaagtg

SEQ ID NO: 65882 - DNA, 60 bp, Artificial
  Synthetic oligonucleotide
agcgaaagcaggcaaaccatttgaatggatgtcaatccgactttacttttcctaaaagtg

SEQ ID NO: 65883 - DNA, 56 bp, Artificial
  Synthetic oligonucleotide
ggtcttggccagacggtgctgagttgccattcactattgacaagtagtttgttcaa

SEQ ID NO: 65884 - DNA, 60 bp, Artificial
  Synthetic oligonucleotide
tgggttggtcttggccagacggtgctgagttgccattcaccattgacaagtagtttgttc

SEQ ID NO: 65885 - DNA, 60 bp, Artificial
  Synthetic oligonucleotide
gggttggtcttggccagacggtgctgagttgccattcaccattgacaagtagtttgttca

SEQ ID NO: 65886 - DNA, 60 bp, Artificial
  Synthetic oligonucleotide
taagtagcgacactgtgggttggtcttggccagacggtgctgagttgccattcaccattg

SEQ ID NO: 65887 - DNA, 60 bp, Artificial
  Synthetic oligonucleotide
taaatagtgacactgtaggttggtcttggccagacggtgctgagttgccattcaccattg

SEQ ID NO: 65888 - DNA, 60 bp, Artificial
  Synthetic oligonucleotide
ttacagctactatttgaagtggaacaagagataagaactttctcgtttcagcttatttaa

SEQ ID NO: 65889 - DNA, 60 bp, Artificial
  Synthetic oligonucleotide
actctacagagattcgcttggagaagcagtaatgaggatgggagaccttcactccctcca

SEQ ID NO: 65890 - DNA, 60 bp, Artificial
  Synthetic oligonucleotide
agtctctaaaattctacagagattcgcttggagaagcagtaatgagaatgggagacatcc

SEQ ID NO: 65891 - DNA, 60 bp, Artificial
  Synthetic oligonucleotide
ctctacagagattcgcttggagaagcagtaatgagaatgggagacatccactcactccaa

SEQ ID NO: 65892 - DNA, 60 bp, Artificial
  Synthetic oligonucleotide
acagagattcgcttggagaagcagtaatgagaatgagggacctccacttactccaaaaca

SEQ ID NO: 65893 - DNA, 60 bp, Artificial
  Synthetic oligonucleotide
tcagaggagcaagagtggtcccaagaggacaactgtccaccagaggagttcagattgctt

SEQ ID NO: 65894 - DNA, 60 bp, Artificial
  Synthetic oligonucleotide
cagaggagcaagagtggtcccaagaggacaactgtccaccagaggagttcagattgcttc

SEQ ID NO: 65895 - DNA, 58 bp, Artificial
  Synthetic oligonucleotide
ccaaactcccttgggagcaataaatacaacattgccctttcataatatccacccactg

SEQ ID NO: 65896 - DNA, 60 bp, Artificial
  Synthetic oligonucleotide
gaccaaatgccaaactcccttgggagcaataaatacaacaatgccttttcacaatgtcca

SEQ ID NO: 65897 - DNA, 60 bp, Artificial
  Synthetic oligonucleotide
accaaatgccaaactcccttgggagcaataaatacaacattgccctttcacaatatacac

SEQ ID NO: 65898 - DNA, 60 bp, Artificial
  Synthetic oligonucleotide
caacagctggtctgactcacatgatgatctggcattccaatttgaatgatacaacatacc

SEQ ID NO: 65899 - DNA, 60 bp, Artificial
  Synthetic oligonucleotide
cgacagctggtctgactcacatgatgatctggcattccaatttgaatgatacaacatacc

SEQ ID NO: 65900 - DNA, 60 bp, Artificial
  Synthetic oligonucleotide
cgacagctggtttaactcacatgatgatctggcattccaatttgaatgatacaacatacc

SEQ ID NO: 65901 - DNA, 60 bp, Artificial
  Synthetic oligonucleotide
ctcacatgatgatctggcattccaatttgaatgatgcaacataccagaggacaagagctc

SEQ ID NO: 65902 - DNA, 60 bp, Artificial
  Synthetic oligonucleotide
gactcacatgatgatctggcattccaatttgaatgatacaacataccagagaacaagagc

SEQ ID NO: 65903 - DNA, 60 bp, Artificial
  Synthetic oligonucleotide
aacaaagcaagtgtgcatagcatggtccagctcaagttgtcacgatggaaaagcatggct

SEQ ID NO: 65904 - DNA, 60 bp, Artificial
  Synthetic oligonucleotide
gttgggatttccagcatggtggaggccatggtgtctagggccagaattgatgcgcggatt

SEQ ID NO: 65905 - DNA, 60 bp, Artificial
  Synthetic oligonucleotide
cccatttcttgatcggcttcgccgagatcagaagtccctaaggggaagaggcagcactct

SEQ ID NO: 65906 - DNA, 60 bp, Artificial
  Synthetic oligonucleotide
ctgaagttggcaacagggatgcggaatgtaccagagaaacaaactagaggcctattcggc

SEQ ID NO: 65907 - DNA, 60 bp, Artificial
  Synthetic oligonucleotide
accctgaagttggcaacagggatgcggaatgtaccagagaaacaaactagaggcctattc

SEQ ID NO: 65908 - DNA, 60 bp, Artificial
  Synthetic oligonucleotide
cctgaagttggcaacaggaatgcggaatgtaccagagaaacaaactagaggcctattcgg

SEQ ID NO: 65909 - DNA, 60 bp, Artificial
  Synthetic oligonucleotide
accctgaagttggcaacaggaatgcggaatgtaccagagaaacaaactagaggcctattc

SEQ ID NO: 65910 - DNA, 60 bp, Artificial
  Synthetic oligonucleotide
gaaactggttcatgctaatgcccaagcagaaagtggaaggacccctttgcatcagaatgg

SEQ ID NO: 65911 - DNA, 60 bp, Artificial
  Synthetic oligonucleotide
tggttcatgctaatgcccaagcagaaagtggaaggacctctttgcatcagaatggaccag

SEQ ID NO: 65912 - DNA, 60 bp, Artificial
  Synthetic oligonucleotide
gggactggttcatgctaatgcccaagcagaaagtggaaggacctctttgcatcagaatag

SEQ ID NO: 65913 - DNA, 60 bp, Artificial
  Synthetic oligonucleotide
gagactggttcatgctaatgcccaagcagaaagtggaaggacctctttgcatcagaatgg

SEQ ID NO: 65914 - DNA, 60 bp, Artificial
  Synthetic oligonucleotide
gagactggttcatgctaatgcccaagcagaaagtggaaggacctctttgcatcagaatag

SEQ ID NO: 65915 - DNA, 60 bp, Artificial
  Synthetic oligonucleotide
gggactggttcatgctaatgcccaagcagaaagtggaaggacctctttgcatcagaacag

SEQ ID NO: 65916 - DNA, 60 bp, Artificial
  Synthetic oligonucleotide
ccgatgaggcacttaaaatgaccatggcctccacacctgcttcgcgatacctaactgaca

SEQ ID NO: 65917 - DNA, 60 bp, Artificial
  Synthetic oligonucleotide
caaaacagcataacaatagagagaatggttctctcggcattcgatgagaggagaaacaaa

SEQ ID NO: 65918 - DNA, 60 bp, Artificial
  Synthetic oligonucleotide
tcagggatcatgaaaacggaaggaacacttgaaaactgcgaaactaaatgccaaactccc

SEQ ID NO: 65919 - DNA, 60 bp, Artificial
  Synthetic oligonucleotide
ccacagaaaaggtcgacacaattctagagaggaatgtcactgtgactcacgctcaggaca

SEQ ID NO: 65920 - DNA, 60 bp, Artificial
  Synthetic oligonucleotide
aaacgtgggatgtcataaattttgagagcactggtaatttaattgcaccagagtacgggt

SEQ ID NO: 65921 - DNA, 60 bp, Artificial
  Synthetic oligonucleotide
aacgtgggatgtcataaattttgagagcactggtaatttaattgcaccagagtacgggtt

SEQ ID NO: 65922 - DNA, 60 bp, Artificial
  Synthetic oligonucleotide
ggaagagccgatactaaaatactattcattgaagaggggaaaattgtccatattagccca

SEQ ID NO: 65923 - DNA, 60 bp, Artificial
  Synthetic oligonucleotide
ccatgccaacaattccacagaaaaggtcgacacaatcctggagcgaaacgtcactgtgac

SEQ ID NO: 65924 - DNA, 60 bp, Artificial
  Synthetic oligonucleotide
ttcagaagtagaagggagaattcaggacctcgagaaatatgttgaagacactaaaataga

SEQ ID NO: 65925 - DNA, 60 bp, Artificial
  Synthetic oligonucleotide
cacagatgtggtaaactttgtgagcatggagttttctctcactgatccgaggcttgagcc

SEQ ID NO: 65926 - DNA, 60 bp, Artificial
  Synthetic oligonucleotide
acaccgacgtggtaaactttgtgagcatggagttttctctcactgacccaagacttgagc

SEQ ID NO: 65927 - DNA, 51 bp, Artificial
  Synthetic oligonucleotide
gaactgcagtgacactataataacatacaataacactgtgataaacaacat

SEQ ID NO: 65928 - DNA, 51 bp, Artificial
  Synthetic oligonucleotide
gaactgcagtgacactataataacatacaataacactgttataagcaacat

SEQ ID NO: 65929 - DNA, 60 bp, Artificial
  Synthetic oligonucleotide
tgaatggatgtcaatccgaccttacttttcttgaaagttccagcgcaaaatgccataagt

SEQ ID NO: 65930 - DNA, 60 bp, Artificial
  Synthetic oligonucleotide
agaacaagggcacttgtgcgtactgggatggatcccaggatgtgctctctgatgcaaggc

SEQ ID NO: 65931 - DNA, 60 bp, Artificial
  Synthetic oligonucleotide
gctcctcggggttacttcaaaatacgaagtgggaaaagctcaataatgaggtcagatgca

SEQ ID NO: 65932 - DNA, 60 bp, Artificial
  Synthetic oligonucleotide
ctcctcggggttacttcaaaatacgaagtgggaaaagctcaataatgaggtcagatgcac

SEQ ID NO: 65933 - DNA, 60 bp, Artificial
  Synthetic oligonucleotide
gatcatgaaaacagaaggaacacttgaaaactgcgagaccaaatgccaaactcccttggg

SEQ ID NO: 65934 - DNA, 60 bp, Artificial
  Synthetic oligonucleotide
gtgattgaaaagatgaacacccaatttgaagctgttggaaaagaattcagtaacttagag

SEQ ID NO: 65935 - DNA, 54 bp, Artificial
  Synthetic oligonucleotide
cactcactgagtgacatcaaaatcatggcgtctcaaggcaccaaacgatcttat

SEQ ID NO: 65936 - DNA, 60 bp, Artificial
  Synthetic oligonucleotide
ggcacgatctgcactcattctgagaggatcagtggctcataaatcctgcctgcctgcttg

SEQ ID NO: 65937 - DNA, 60 bp, Artificial
  Synthetic oligonucleotide
atccaaaacagcataacaatagagagaatggtcctctctgcatttgacgagaggagaaac

SEQ ID NO: 65938 - DNA, 51 bp, Artificial
  Synthetic oligonucleotide
tgaagggaggctgatccaaaacagcataacaatagagagaatggttctctc

SEQ ID NO: 65939 - DNA, 60 bp, Artificial
  Synthetic oligonucleotide
gggtgaaaggctgggcctttgacgatggaaatgacgtgtggatgggaagaacgatcagcg

SEQ ID NO: 65940 - DNA, 60 bp, Artificial
  Synthetic oligonucleotide
gagtgaaaggctgggcctttgacgatggaaatgacgtgtggatgggaagaacgatcagcg

SEQ ID NO: 65941 - DNA, 58 bp, Artificial
  Synthetic oligonucleotide
agtgcctgattaatgatccctgggttttgctcaatgcgtcttggttcaactccttcct

SEQ ID NO: 65942 - DNA, 60 bp, Artificial
  Synthetic oligonucleotide
agtgcctgattaatgatccctgggttttgctcaatgcgtcttggttcaactccttcctaa

SEQ ID NO: 65943 - DNA, 60 bp, Artificial
  Synthetic oligonucleotide
gtgccggagtatacctcccttagatcactaattgcctcgtcaggtaccttggagtttacc

SEQ ID NO: 65944 - DNA, 60 bp, Artificial
  Synthetic oligonucleotide
gccaagaacttccaggaaagggcaacaacacagcaacactgtgcctgggacatcatgcgg

SEQ ID NO: 65945 - DNA, 60 bp, Artificial
  Synthetic oligonucleotide
attgctcctcgaggttacttcaaagtgcacactgggaaaagctcaataatgagatcagat

SEQ ID NO: 65946 - DNA, 60 bp, Artificial
  Synthetic oligonucleotide
gaaaatgctgaggacatgggaaatggttgctttaagatataccacaagtgtgacaattct

SEQ ID NO: 65947 - DNA, 60 bp, Artificial
  Synthetic oligonucleotide
ggagcatgtcctaagtacattaagcaaagcactctgaagttggcgacagggatgcggaat

SEQ ID NO: 65948 - DNA, 60 bp, Artificial
  Synthetic oligonucleotide
gggaccttttcattgaacgcagcaaggcttttagcaactgttacccgtatgatgtgccgg

SEQ ID NO: 65949 - DNA, 60 bp, Artificial
  Synthetic oligonucleotide
aattctgagggcacgggacaagcggcagatctcaaaagtacccaagcagctatcaaccaa

SEQ ID NO: 65950 - DNA, 60 bp, Artificial
  Synthetic oligonucleotide
ggatggtaaacggctggtacggtttcagacaccaaaattctgagggcacgggacaagcgg

SEQ ID NO: 65951 - DNA, 60 bp, Artificial
  Synthetic oligonucleotide
caatgctactgaactggtccagaatttctcaatgggtaaaatatgcaacaatcctcatcg

SEQ ID NO: 65952 - DNA, 57 bp, Artificial
  Synthetic oligonucleotide
gttggcgacagggatgcggaatataccagaaaaacaaactagaggcatattcggtgc

SEQ ID NO: 65953 - DNA, 60 bp, Artificial
  Synthetic oligonucleotide
cttgcatggagtcaatcagaaatggaacttacaaccataacaaatacagagacgaagcat

SEQ ID NO: 65954 - DNA, 60 bp, Artificial
  Synthetic oligonucleotide
catgcggtgccaaacggaacgctagtgaagacaatcacggatgatcagatagaggtaacc

SEQ ID NO: 65955 - DNA, 60 bp, Artificial
  Synthetic oligonucleotide
ctggggttacccagaatggaggaagcagtgcttgcaagagggggcctaataacagtttct

SEQ ID NO: 65956 - DNA, 60 bp, Artificial
  Synthetic oligonucleotide
agaaattccatcaaatcgaaaaggagttttcagaagtagaagggagaatccaagacctcg

SEQ ID NO: 65957 - DNA, 60 bp, Artificial
  Synthetic oligonucleotide
atgatcaaggatcaggatatgcagcagacaaagaatccactcaaagggcaattgatggga

SEQ ID NO: 65958 - DNA, 60 bp, Artificial
  Synthetic oligonucleotide
caatatgggggtttatcaaatccttgccatctatgctacagtagcaggttccctgtcact

SEQ ID NO: 65959 - DNA, 60 bp, Artificial
  Synthetic oligonucleotide
agtctctaaaaatctacagagattcgcttggagaagcagtaatgaggatgggggatctcc

SEQ ID NO: 65960 - DNA, 60 bp, Artificial
  Synthetic oligonucleotide
agtctctaaaaatctacagagattcgcttggagaagcagtaatgagaatgagggacctcc

SEQ ID NO: 65961 - DNA, 60 bp, Artificial
  Synthetic oligonucleotide
gatcaggatacgagatgctaaaggtgccaaatgcattgacagacgataggtcaaagccca

SEQ ID NO: 65962 - DNA, 60 bp, Artificial
  Synthetic oligonucleotide
tggacaatggaactggcctgatggggctaaaatagagtacttcctctaagacacagaaaa

SEQ ID NO: 65963 - DNA, 60 bp, Artificial
  Synthetic oligonucleotide
caaggccaaacaatcgtattaaacactgactggagtggctacagtgggtccttcatggac

SEQ ID NO: 65964 - DNA, 60 bp, Artificial
  Synthetic oligonucleotide
ccttggacaatggaactggcctgatggggctaaaatagagtacttcctctaagacacaga

SEQ ID NO: 65965 - DNA, 60 bp, Artificial
  Synthetic oligonucleotide
ctcaaggccaaacaatcgtattaaacactgactggagtggctacagtgggtccttcatgg

SEQ ID NO: 65966 - DNA, 60 bp, Artificial
  Synthetic oligonucleotide
cccactcaaggtcagacaatcgtattaaacactgactggagtggctacagtgggtccttc

SEQ ID NO: 65967 - DNA, 60 bp, Artificial
  Synthetic oligonucleotide
aaggctaacgtgctaattgggcaaggagacgtagtgttggtaatgaaacggaaacgggac

SEQ ID NO: 65968 - DNA, 60 bp, Artificial
  Synthetic oligonucleotide
cccatatactggagatcctccatacagccatggaacgggaacaggatacaccatggacac

SEQ ID NO: 65969 - DNA, 60 bp, Artificial
  Synthetic oligonucleotide
cattcccttatactggagatcctccatacagccatggaacagggacaggatacaccatgg

SEQ ID NO: 65970 - DNA, 60 bp, Artificial
  Synthetic oligonucleotide
cattcccttatactggagatcctccatacagccatggaacaggaacagggtacaccatgg

SEQ ID NO: 65971 - DNA, 60 bp, Artificial
  Synthetic oligonucleotide
gcgcaaaatgccataagcaccacattcccgtatactggagatcctccatacagccatgga

SEQ ID NO: 65972 - DNA, 60 bp, Artificial
  Synthetic oligonucleotide
gcgcaaaatgccataagtaccacgttcccatatactggagatcctccatacagccatgga

SEQ ID NO: 65973 - DNA, 60 bp, Artificial
  Synthetic oligonucleotide
ccaaaaatatcctcaggacccaggagtcggaatgcgtttgtatcaatgggacttgtgcag

SEQ ID NO: 65974 - DNA, 60 bp, Artificial
  Synthetic oligonucleotide
cggcttgaaaagagggccttctacggaaggagtacctgagtctatgagggaagaatatcg

SEQ ID NO: 65975 - DNA, 60 bp, Artificial
  Synthetic oligonucleotide
gacccatgccaaggacattcttgagaaaacgcacaatggaaagctgtgcagactaagcgg

SEQ ID NO: 65976 - DNA, 55 bp, Artificial
  Synthetic oligonucleotide
actgaccattggtgagtgccccaaatatgtaaaatcggagaggttagtcttagca

SEQ ID NO: 65977 - DNA, 53 bp, Artificial
  Synthetic oligonucleotide
gatgtgtctgcagagacaactggaaaggctctaataggcccgtcgcagacata

SEQ ID NO: 65978 - DNA, 60 bp, Artificial
  Synthetic oligonucleotide
gtgacaagagaaccttatgtgtcatgcgatcctggcaagtgttatcaatttgcacttgga

SEQ ID NO: 65979 - DNA, 51 bp, Artificial
  Synthetic oligonucleotide
tggatcccaggatgtgctctctgatgcaagggtcaactcttccgaggagat

SEQ ID NO: 65980 - DNA, 60 bp, Artificial
  Synthetic oligonucleotide
ggtatgcagcagacaaagaatccactcaaaaggcaattgatgggataactaacaaagtaa

SEQ ID NO: 65981 - DNA, 60 bp, Artificial
  Synthetic oligonucleotide
taggcaagtcatagttgacagcgataataggtccggttattctggtattttctctgttga

SEQ ID NO: 65982 - DNA, 60 bp, Artificial
  Synthetic oligonucleotide
cgctcctcggggttatttcaaaatgcgcactgggaaaagctcaataatgaggtcagatgc

SEQ ID NO: 65983 - DNA, 60 bp, Artificial
  Synthetic oligonucleotide
cctcggggttacttcaaaatgcgcactgggaaaagctcaataatgaggtcagatgcacct

SEQ ID NO: 65984 - DNA, 53 bp, Artificial
  Synthetic oligonucleotide
tttggcattccaatctgaatgatgccacctatcagagaacaagagcgcttgtt

SEQ ID NO: 65985 - DNA, 60 bp, Artificial
  Synthetic oligonucleotide
gccggcaacgatgtatggttgggcaggacagtgtcaactagtggtagatcgggctttgaa

SEQ ID NO: 65986 - DNA, 60 bp, Artificial
  Synthetic oligonucleotide
gctggtcctttgctctcgcacaaggagcactgctagggactaaacatagcaatgggacca

SEQ ID NO: 65987 - DNA, 60 bp, Artificial
  Synthetic oligonucleotide
gaagcggaaaggcctttcaagcctccactaccgctgtgccccttcagaggattcttccct

SEQ ID NO: 65988 - DNA, 60 bp, Artificial
  Synthetic oligonucleotide
tttcactcagacacccccaggccagctgacccctcaacaatatcatgtgactccccaagc

SEQ ID NO: 65989 - DNA, 60 bp, Artificial
  Synthetic oligonucleotide
acagggtctactggatacgagagggaagaataatgaagtatgaaaatgtccccaaaacaa

SEQ ID NO: 65990 - DNA, 60 bp, Artificial
  Synthetic oligonucleotide
aataatatatgcagggagaatgacagactccatcaaatcatggagaaaggacatattgag

SEQ ID NO: 65991 - DNA, 60 bp, Artificial
  Synthetic oligonucleotide
ctgggaacgacaatgatgcgagtggccaaataatatatgcagggagaatgacagactcca

SEQ ID NO: 65992 - DNA, 60 bp, Artificial
  Synthetic oligonucleotide
gataatatatgcagggagaatgacagactccattaaatcatggagaaaggacatactaag

SEQ ID NO: 65993 - DNA, 60 bp, Artificial
  Synthetic oligonucleotide
gataatatatgcagggagaatgacagactccattaaatcatggagaaaggacatactgag

SEQ ID NO: 65994 - DNA, 60 bp, Artificial
  Synthetic oligonucleotide
caggacaagcagcagatcttaaaagcactcaagcagcaatcgaccagatcaacgggaaac

SEQ ID NO: 65995 - DNA, 60 bp, Artificial
  Synthetic oligonucleotide
ggacaagcagcagatcttaaaagcactcaagcagccatcgaccaaatcaatgggaaactg

SEQ ID NO: 65996 - DNA, 60 bp, Artificial
  Synthetic oligonucleotide
ttgctatatatgctacagttgcaggctccttgtcactggcaatcatgatagctgggattt

SEQ ID NO: 65997 - DNA, 60 bp, Artificial
  Synthetic oligonucleotide
tcagaagtagaagggagaattcaggacctcgagaaatatgttgaggacactaaaatagat

SEQ ID NO: 65998 - DNA, 60 bp, Artificial
  Synthetic oligonucleotide
cagctcatggtccagccaagagcatggaatatgatgctgttgctactacgcactcttgga

SEQ ID NO: 65999 - DNA, 60 bp, Artificial
  Synthetic oligonucleotide
tcaaagcccattcaaggtcagacaatcgtattaaacactgactggagtggttacagtgga

SEQ ID NO: 66000 - DNA, 60 bp, Artificial
  Synthetic oligonucleotide
cacagagaaggtcgacacaattctagagcggaacgtcactgtgactcatgccaaggacat

SEQ ID NO: 66001 - DNA, 60 bp, Artificial
  Synthetic oligonucleotide
cagagaaggtcgacacaattctagagcggaacgtcactgtgactcatgccaaggacattc

SEQ ID NO: 66002 - DNA, 60 bp, Artificial
  Synthetic oligonucleotide
gccagaatgccactgaaatcagagcatctgttgggagaatggtcggtggaattgggaggt

SEQ ID NO: 66003 - DNA, 60 bp, Artificial
  Synthetic oligonucleotide
agaatgccactgaaatcagagcatctgttgggagaatggtcggtggaattgggagattct

SEQ ID NO: 66004 - DNA, 60 bp, Artificial
  Synthetic oligonucleotide
cctgaatggtcctatatagtggaaaaggaaaacccgacgaatggtctgtgctacccaggc

SEQ ID NO: 66005 - DNA, 60 bp, Artificial
  Synthetic oligonucleotide
agtgtacctgaatggtcctatatagtggaaaaggaaaacccgacgaatggtctgtgctac

SEQ ID NO: 66006 - DNA, 60 bp, Artificial
  Synthetic oligonucleotide
ggcaaaagctgcatcaatcggtgcttttatgtggagttgataaggggaaggaaaccggaa

SEQ ID NO: 66007 - DNA, 60 bp, Artificial
  Synthetic oligonucleotide
ggcacggtctgcactcattctgagaggatcagtggctcataagtcctgcttgcctgcttg

SEQ ID NO: 66008 - DNA, 60 bp, Artificial
  Synthetic oligonucleotide
tcttatgaacagatggaaactgatggggaacgccagaatgcaactgaaatcagagcatcc

SEQ ID NO: 66009 - DNA, 60 bp, Artificial
  Synthetic oligonucleotide
ctgaaactctacagagattcgcttggagaagcagtaatgaggatgggagacctccactcc

SEQ ID NO: 66010 - DNA, 60 bp, Artificial
  Synthetic oligonucleotide
ttttaggttttgtgttcacgctcaccgtgcccagtgagcgaggactgcagcgtagacgct

SEQ ID NO: 66011 - DNA, 60 bp, Artificial
  Synthetic oligonucleotide
gagaccggttggaatttccagcatggtggaggccatggtgtctagggcccggattgatgc

SEQ ID NO: 66012 - DNA, 60 bp, Artificial
  Synthetic oligonucleotide
tggcaaatgttgtgagaaaaatgatgactaattcacaagacacagagctttctttcacaa

SEQ ID NO: 66013 - DNA, 60 bp, Artificial
  Synthetic oligonucleotide
tgacacaatacatgatagaatccctcatcgaaccctattgatgaatgagttgggtgttcc

SEQ ID NO: 66014 - DNA, 54 bp, Artificial
  Synthetic oligonucleotide
ggggtttatcaaattcttgccatttatgctacagtagcaggttccctgtcactg

SEQ ID NO: 66015 - DNA, 60 bp, Artificial
  Synthetic oligonucleotide
atttaggaaccaggcaagtatgtatagcatggtccagctcaagttgtcacgatggaaagg

SEQ ID NO: 66016 - DNA, 60 bp, Artificial
  Synthetic oligonucleotide
atagcactcagttattctgctggtgcacttgccagttgcatgggcctcatatacaacagg

SEQ ID NO: 66017 - DNA, 60 bp, Artificial
  Synthetic oligonucleotide
atagcgctcagttattctgctggtgcacttgccagttgcatgggcctcatatacaacagg

SEQ ID NO: 66018 - DNA, 60 bp, Artificial
  Synthetic oligonucleotide
acatttgggtgacgagagagccttatgtgtcatgcgatcctggcaagtgttatcaatttg

SEQ ID NO: 66019 - DNA, 60 bp, Artificial
  Synthetic oligonucleotide
gggaaatttcaaacagcagcacaacgagcaatgatggaccaggtgagggaaagccggaat

SEQ ID NO: 66020 - DNA, 60 bp, Artificial
  Synthetic oligonucleotide
catggaatggctaaagacaagaccaatcctgtcacctctgactaaggggattttaggttt

SEQ ID NO: 66021 - DNA, 60 bp, Artificial
  Synthetic oligonucleotide
tggctaaagacaagaccaatcctgtcacctctgactaaggggattttaggatttgtgttc

SEQ ID NO: 66022 - DNA, 60 bp, Artificial
  Synthetic oligonucleotide
gagagccttatgtgtcatgcgatcctggcaagtgttatcaatttgcactcgggcagggga

SEQ ID NO: 66023 - DNA, 60 bp, Artificial
  Synthetic oligonucleotide
gggaaccttatgtgtcatgcgatcctggcaagtgttatcaatttgcactcgggcagggga

SEQ ID NO: 66024 - DNA, 60 bp, Artificial
  Synthetic oligonucleotide
gattatgcctcccttaggtcactagttgcctcatccggcaccctggagtttaccaatgaa

SEQ ID NO: 66025 - DNA, 60 bp, Artificial
  Synthetic oligonucleotide
cttactcatcgtcaatgatgtgggagattaatggtcctgaatcagtgttggtcaatacct

SEQ ID NO: 66026 - DNA, 60 bp, Artificial
  Synthetic oligonucleotide
ttaggaaccaaacaagtatgcatagcatggtccagctcaagttgtcacgatggaagagca

SEQ ID NO: 66027 - DNA, 60 bp, Artificial
  Synthetic oligonucleotide
taaactttgtgagcatggagttttctctcactgacccaaggcttgagccacacaaatggg

SEQ ID NO: 66028 - DNA, 60 bp, Artificial
  Synthetic oligonucleotide
gtaaactttgtgagcatggagttttctctcactgacccgagacttgagccacacaaatgg

SEQ ID NO: 66029 - DNA, 60 bp, Artificial
  Synthetic oligonucleotide
tgaagggaggctgatccaaaacagcataacaatagagagaatggttctctctgcatttga

SEQ ID NO: 66030 - DNA, 60 bp, Artificial
  Synthetic oligonucleotide
gcaacgctgtgcctgggacatcatgcggtgccaaacggaacgctagtgaaaacaatcacg

SEQ ID NO: 66031 - DNA, 60 bp, Artificial
  Synthetic oligonucleotide
ataaatgtgatgatgaatgcatgaatagcgtaaagaatgggacatatgattatcccaagt

SEQ ID NO: 66032 - DNA, 60 bp, Artificial
  Synthetic oligonucleotide
acggattaagaaagaggagttcgctgagatcatgaagatctgttccaccattgaagagct

SEQ ID NO: 66033 - DNA, 51 bp, Artificial
  Synthetic oligonucleotide
gaggagttcgctgagatcatgaagatctgttccaccattgaagagctcaga

SEQ ID NO: 66034 - DNA, 60 bp, Artificial
  Synthetic oligonucleotide
gtctgggcggattaagaaagaggagttcgctgagatcatgaagatctgttccaccattga

SEQ ID NO: 66035 - DNA, 60 bp, Artificial
  Synthetic oligonucleotide
gcggattaagaaagaggagttcgctgagatcatgaagatctgttccaccattgaagagct

SEQ ID NO: 66036 - DNA, 60 bp, Artificial
  Synthetic oligonucleotide
ggacacttgactttcatgattctaatgtcaagaatctatatgataaagtcagaatgcagc

SEQ ID NO: 66037 - DNA, 60 bp, Artificial
  Synthetic oligonucleotide
aggacacttgactttcatgattctaatgtcaagaatctatatgataaagtcagaatgcag

SEQ ID NO: 66038 - DNA, 60 bp, Artificial
  Synthetic oligonucleotide
ggacacttgactttcatgattctaatgtcaagaacctgtataataaagtcagaatgcagc

SEQ ID NO: 66039 - DNA, 64 bp, Artificial
  Synthetic oligonucleotide
ggacacttgactttcatgattctaatgtcaagaatctatatgataaagtcagaatgcaactgag

SEQ ID NO: 66040 - DNA, 60 bp, Artificial
  Synthetic oligonucleotide
gcatcattcggtgcttttatgtggagttgataaggggaaggccacaggaaactagagtat

SEQ ID NO: 66041 - DNA, 60 bp, Artificial
  Synthetic oligonucleotide
cccagaaatagcaacaagacctaaagtgaatggacaaggaggcagaatggaattctcgtg

SEQ ID NO: 66042 - DNA, 60 bp, Artificial
  Synthetic oligonucleotide
ccagaaatagcaacaagacctaaagtgaatggacaaggaggcagaatggaattctcgtgg

SEQ ID NO: 66043 - DNA, 60 bp, Artificial
  Synthetic oligonucleotide
gaaatagccacaagacctaaggtgaatggacaaggaggcagaatggaattctcgtggact

SEQ ID NO: 66044 - DNA, 60 bp, Artificial
  Synthetic oligonucleotide
ccacaagacctaaggtgaatggacaaggaggcagaatggaattctcgtggactatattgg

SEQ ID NO: 66045 - DNA, 60 bp, Artificial
  Synthetic oligonucleotide
agaagaacccagcacttaggatgaaatggatgatggcaatgaaatatccaattaccgcag

SEQ ID NO: 66046 - DNA, 60 bp, Artificial
  Synthetic oligonucleotide
acaaatgtgatgatgaatgcatgaacagtgtgaagaatgggacatataattattccaagt

SEQ ID NO: 66047 - DNA, 60 bp, Artificial
  Synthetic oligonucleotide
gaatgcatgaacagtgtgaagaatgggacatatgattattccaagtatgaagaggagtct

SEQ ID NO: 66048 - DNA, 60 bp, Artificial
  Synthetic oligonucleotide
acaaatgtgatgatgaatgcatgaacagtgtgaagaatgggacatatgattattccaagt

SEQ ID NO: 66049 - DNA, 60 bp, Artificial
  Synthetic oligonucleotide
acaaatgtgatgatgaatgcatgaacagtgtgaagaatgggacatatgattatcccaagt

SEQ ID NO: 66050 - DNA, 60 bp, Artificial
  Synthetic oligonucleotide
aattctcgtggactatcttagatatatgggacacaataaattttgaaagtacaggcaatc

SEQ ID NO: 66051 - DNA, 60 bp, Artificial
  Synthetic oligonucleotide
aattctcgtggactatcttagatatatgggacacaataaattttgaaagtactggcaatc

SEQ ID NO: 66052 - DNA, 60 bp, Artificial
  Synthetic oligonucleotide
ctaaatggaatccctccacttgaattaagggattgcagcattgccggatggctccttggg

SEQ ID NO: 66053 - DNA, 60 bp, Artificial
  Synthetic oligonucleotide
ggaggcagaatggaattctcgtggactatcttagatatatgggacacaataaattttgag

SEQ ID NO: 66054 - DNA, 60 bp, Artificial
  Synthetic oligonucleotide
gaatgcatgaacagtgtgaagaatgggacatataattattccaagtatgaagaggagtct

SEQ ID NO: 66055 - DNA, 60 bp, Artificial
  Synthetic oligonucleotide
aacatcctcaaggggaaattccaaacagcagcacaacgagcaatgatggaccaggtgaga

SEQ ID NO: 66056 - DNA, 60 bp, Artificial
  Synthetic oligonucleotide
atctagggttgaacataggactacatctaaaaccgagctgcaactgctcacactcacaac

SEQ ID NO: 66057 - DNA, 60 bp, Artificial
  Synthetic oligonucleotide
ttcatgttacggggaacgaacaggaattacttgcacatgcagagataattggcagggctc

SEQ ID NO: 66058 - DNA, 60 bp, Artificial
  Synthetic oligonucleotide
aagccaagggacaacaatcagagggaaacactcaaacggaacaatacacgataggtccca

SEQ ID NO: 66059 - DNA, 60 bp, Artificial
  Synthetic oligonucleotide
tcacccaaataagtaacaccaacatccaaatggaagagagagcaagcaggggtttcaata

SEQ ID NO: 66060 - DNA, 60 bp, Artificial
  Synthetic oligonucleotide
cacatgggctcgaaacatactaagaacacaggaatctgaatgtgtatgccacaacggtgt

SEQ ID NO: 66061 - DNA, 60 bp, Artificial
  Synthetic oligonucleotide
cgtggagttgatacgtggaagacccaaggaggataaagtgtggtggaccagcaatagcat

SEQ ID NO: 66062 - DNA, 60 bp, Artificial
  Synthetic oligonucleotide
ttacagtggatctttcatggactattgggctgaaggggactgctatcgagcgtgttttta

SEQ ID NO: 66063 - DNA, 60 bp, Artificial
  Synthetic oligonucleotide
cacactagtcagtatatatgcagtcctgttctcacagacaatcccagaccgaatgaccca

SEQ ID NO: 66064 - DNA, 60 bp, Artificial
  Synthetic oligonucleotide
gggatctccagcatggtggaggccatggtgtctagggcccgaattgatgcgcgaattgac

SEQ ID NO: 66065 - DNA, 60 bp, Artificial
  Synthetic oligonucleotide
ctagcatctttattggagatgtgccacagcacacagattggcgggacaagaatggtggac

SEQ ID NO: 66066 - DNA, 60 bp, Artificial
  Synthetic oligonucleotide
tttcacaagaggattgcatgatcaaggcagttcgaggtgatctgaactttgtcaatagag

SEQ ID NO: 66067 - DNA, 60 bp, Artificial
  Synthetic oligonucleotide
tttcacaagaggattgcatgatcaaggcagttcggggtgatctgaactttgtcaatagag

SEQ ID NO: 66068 - DNA, 60 bp, Artificial
  Synthetic oligonucleotide
cacaagaggattgcatgatcaaggcagttcgaggtgatctgaactttgtcaatagagcaa

SEQ ID NO: 66069 - DNA, 60 bp, Artificial
  Synthetic oligonucleotide
cacaagaggattgcatgatcaaggcagttcggggtgatctgaactttgtcaatagagcaa

SEQ ID NO: 66070 - DNA, 60 bp, Artificial
  Synthetic oligonucleotide
cacaagaggattgcatgatcaaggcagttcggggtgatctgaactttgtcaatagggcaa

SEQ ID NO: 66071 - DNA, 60 bp, Artificial
  Synthetic oligonucleotide
tcacttaaggaatgacacagatgtggtaaactttgtgagcatggagttttctctcactga

SEQ ID NO: 66072 - DNA, 60 bp, Artificial
  Synthetic oligonucleotide
caaaatgccataagtactacattcccttatactggagatcctccatacagccatggaaca

SEQ ID NO: 66073 - DNA, 60 bp, Artificial
  Synthetic oligonucleotide
taatcaattcctgggcaggagatattctaagaactcaggaatcatcatgcacttgcattc

SEQ ID NO: 66074 - DNA, 60 bp, Artificial
  Synthetic oligonucleotide
atgtaatcaattcctgggcaggagatattctaagaactcaggaatcatcatgcacttgca

SEQ ID NO: 66075 - DNA, 60 bp, Artificial
  Synthetic oligonucleotide
ggcaatcacccaatgtgtaccaggcaaggtttgaagcagtagcgtggtcagctactgcat

SEQ ID NO: 66076 - DNA, 60 bp, Artificial
  Synthetic oligonucleotide
gagcccctatagaactctaatgagtgtagaaatagggcaatcacccaatgtgtaccaggc

SEQ ID NO: 66077 - DNA, 60 bp, Artificial
  Synthetic oligonucleotide
cagtgaaagaccggagcccctatagaactctaatgagtgtacaaatagggcaatcaccca

SEQ ID NO: 66078 - DNA, 60 bp, Artificial
  Synthetic oligonucleotide
cacagtgaaagaccggagcccctatagaactctaatgagtgtagaaatagggcaatcacc

SEQ ID NO: 66079 - DNA, 60 bp, Artificial
  Synthetic oligonucleotide
ccctgatgccaaagcagtagcagtggtgcattatgggggaattcccactgatgtaatcaa

SEQ ID NO: 66080 - DNA, 60 bp, Artificial
  Synthetic oligonucleotide
gatgggaagaaatggatgacaattggagtaacgggccctgatgccaaagcagtagcagtg

SEQ ID NO: 66081 - DNA, 60 bp, Artificial
  Synthetic oligonucleotide
gctactgcatgtcatgatgggaagaaatggatgacaattggagtaacgggccctgatgcc

SEQ ID NO: 66082 - DNA, 57 bp, Artificial
  Synthetic oligonucleotide
ggcaatcacccaatgtgtaccaggcaaggtttgaagcagtagcgtggtcagctactg

SEQ ID NO: 66083 - DNA, 60 bp, Artificial
  Synthetic oligonucleotide
aggattggtagtccttaatattctcctacatatagttagtattacaataacagtgttggt

SEQ ID NO: 66084 - DNA, 60 bp, Artificial
  Synthetic oligonucleotide
ggcaagttgtggttgataacttaaattggtcaggatacagtggctccttcacactaccgg

SEQ ID NO: 66085 - DNA, 60 bp, Artificial
  Synthetic oligonucleotide
agaacagatcaaaaggcaagttgtggttgataacttaaattggtcaggatacagtggctc

SEQ ID NO: 66086 - DNA, 60 bp, Artificial
  Synthetic oligonucleotide
cgatatggacctcaagtagctccattgtgatgtgtggagtagaccatgagattgccgact

SEQ ID NO: 66087 - DNA, 59 bp, Artificial
  Synthetic oligonucleotide
acagtggctccttcacactaccggtggaattaaccaaaagaaattgtctggttccatgc

SEQ ID NO: 66088 - DNA, 60 bp, Artificial
  Synthetic oligonucleotide
attgccgactggtcgtggcacgatggagctattcttccttttgacatcgataagatgtaa

SEQ ID NO: 66089 - DNA, 60 bp, Artificial
  Synthetic oligonucleotide
gtagctccattgtgatgtgtggagtagaccatgagattgccgactggtcgtggcacgatg

SEQ ID NO: 66090 - DNA, 60 bp, Artificial
  Synthetic oligonucleotide
gccgactggtcgtggcacgatggagctattcttccttttgacatcgataagatgtaattt

SEQ ID NO: 66091 - DNA, 60 bp, Artificial
  Synthetic oligonucleotide
gtccttaatattctcctacatatagttagtattacaataacagtgttggttctccctgga

SEQ ID NO: 66092 - DNA, 60 bp, Artificial
  Synthetic oligonucleotide
aggattggtagtccttaatattctcctacatatagttagtattacaataacagtcttggt

SEQ ID NO: 66093 - DNA, 60 bp, Artificial
  Synthetic oligonucleotide
ctcaaggttccctactcaatgacaaacattctaatggcacagtgaaagaccggagcccct

SEQ ID NO: 66094 - DNA, 60 bp, Artificial
  Synthetic oligonucleotide
cacagtgaaagaccggagcccctatagaactctaatgagtgtacaaatagggcaatcacc

SEQ ID NO: 66095 - DNA, 60 bp, Artificial
  Synthetic oligonucleotide
gagagtgatcatttcatgaacaatacagaatcattgtgtgatgctaagggttttgcaccc

SEQ ID NO: 66096 - DNA, 60 bp, Artificial
  Synthetic oligonucleotide
gggttttgcacccttttccaaagacaacggaataagaattggatcgaggggtcatgtttt

SEQ ID NO: 66097 - DNA, 60 bp, Artificial
  Synthetic oligonucleotide
gttttgcacccttttccaaagacaacggaataagaattggatcgaggggtcatgttttcg

SEQ ID NO: 66098 - DNA, 60 bp, Artificial
  Synthetic oligonucleotide
acgttctttcttactcaaggttccctactcaatgacaaacattctaatggcacagtgaaa

SEQ ID NO: 66099 - DNA, 60 bp, Artificial
  Synthetic oligonucleotide
gtccttaatattctcctacatatagttagtattacaataacagtcttggttctccctgga

SEQ ID NO: 66100 - DNA, 60 bp, Artificial
  Synthetic oligonucleotide
gtcattagggaatacaatgaaacagtaaggattgaaagggtaacacaatggcacaatacc

SEQ ID NO: 66101 - DNA, 60 bp, Artificial
  Synthetic oligonucleotide
gggaatacaatgaaacagtaaggattgaaagggtaacacaatggcacaataccaatgtca

SEQ ID NO: 66102 - DNA, 60 bp, Artificial
  Synthetic oligonucleotide
ccagagagtgatcatttcatgaacaatacagaatcattgtgtgatgctaagggttttgca

SEQ ID NO: 66103 - DNA, 60 bp, Artificial
  Synthetic oligonucleotide
tcagggtttgaaatcctgaaagtcagaaatggctgggtacaaaatagtaaagaacagatc

SEQ ID NO: 66104 - DNA, 60 bp, Artificial
  Synthetic oligonucleotide
ctgaaagtcagaaatggctgggtacaaaatagtaaagaacagatcaaaaggcaagttgtg

SEQ ID NO: 66105 - DNA, 60 bp, Artificial
  Synthetic oligonucleotide
agccaagcaggggaaaataattgggcagactgaaatcagtttcaatggaggccatataga

SEQ ID NO: 66106 - DNA, 60 bp, Artificial
  Synthetic oligonucleotide
ccaagcaggggaaaataattgggcagactgaaatcagtttcaatggaggccatatagaag

SEQ ID NO: 66107 - DNA, 60 bp, Artificial
  Synthetic oligonucleotide
gtaatgacagatggaccagcaaacagacaagcacaatacagagcattcaaagccaagcag

SEQ ID NO: 66108 - DNA, 60 bp, Artificial
  Synthetic oligonucleotide
gacagatggaccagcaaacagacaagcacaatacagagcattcaaagccaagcaggggaa

SEQ ID NO: 66109 - DNA, 60 bp, Artificial
  Synthetic oligonucleotide
gttcacggggtcatgcactagtcctatgggaaaccaggggtatggagttaagggatttgg

SEQ ID NO: 66110 - DNA, 60 bp, Artificial
  Synthetic oligonucleotide
gttcacggggtcatgcaccagtcctatgggaaaccaggggtatggagttaagggatttgg

SEQ ID NO: 66111 - DNA, 60 bp, Artificial
  Synthetic oligonucleotide
gccatatagaagaatgctcatgctaccccaatgaaggtaaagtggaatgtgtttgtagag

SEQ ID NO: 66112 - DNA, 60 bp, Artificial
  Synthetic oligonucleotide
gctcatgctaccccaatgaaggtaaagtggaatgtgtttgtagagacaactggactggaa

SEQ ID NO: 66113 - DNA, 60 bp, Artificial
  Synthetic oligonucleotide
ctgttgggagaatggttggaggaattggaagattctacatacagatgtgcactgaactcc

SEQ ID NO: 66114 - DNA, 60 bp, Artificial
  Synthetic oligonucleotide
gtccagccaagagcatggaatatgatgctgttgcaactacacactcttggattcctaaga

SEQ ID NO: 66115 - DNA, 60 bp, Artificial
  Synthetic oligonucleotide
cagctcatggcccagccaagagcatggaatatgatgctgttgctactacacattcctgga

SEQ ID NO: 66116 - DNA, 60 bp, Artificial
  Synthetic oligonucleotide
cacagtggaccatatggccataattaaaaagtacacatcagggagacaggaaaagaaccc

SEQ ID NO: 66117 - DNA, 60 bp, Artificial
  Synthetic oligonucleotide
agtggaccatatggccataattaagaagtacacatcagggagacaggaaaagaacccgtc

SEQ ID NO: 66118 - DNA, 60 bp, Artificial
  Synthetic oligonucleotide
cacagtggaccatatggccataattaagaaatacacatcagggagacaggaaaagaaccc

SEQ ID NO: 66119 - DNA, 60 bp, Artificial
  Synthetic oligonucleotide
gcagtctcgcactcgcgagatactaacaaaaaccacagtggaccatatggccataattaa

SEQ ID NO: 66120 - DNA, 60 bp, Artificial
  Synthetic oligonucleotide
tcacaagaagattgcatgataaaagcagttagaggtgatctgaatttcgttaacagggca

SEQ ID NO: 66121 - DNA, 60 bp, Artificial
  Synthetic oligonucleotide
cacaagaagattgcatgataaaagcagttagaggtgatctgaatttcgttaacagggcaa

SEQ ID NO: 66122 - DNA, 60 bp, Artificial
  Synthetic oligonucleotide
ggaccatatggccataattaagaaatacacatcagggagacaggaaaagaacccgtcact

SEQ ID NO: 66123 - DNA, 60 bp, Artificial
  Synthetic oligonucleotide
aagtcaaaatacgccgaagagttgacataaaccctggtcatgcagacctcagtgccaagg

SEQ ID NO: 66124 - DNA, 60 bp, Artificial
  Synthetic oligonucleotide
gaagtacacatcagggagacaggaaaagaacccttcacttaggatgaaatggatgatggc

SEQ ID NO: 66125 - DNA, 60 bp, Artificial
  Synthetic oligonucleotide
caagatacgccgaagagtagacataaaccctggtcatgcagacctcagtgccaaggaggc

SEQ ID NO: 66126 - DNA, 60 bp, Artificial
  Synthetic oligonucleotide
agtcaaaatacgccgaagagttgacataaaccctggtcatgcagacctcagtgccaagga

SEQ ID NO: 66127 - DNA, 60 bp, Artificial
  Synthetic oligonucleotide
caaaatacgccgaagagtagacataaaccctggtcatgcagacctcagtgccaaggaggc

SEQ ID NO: 66128 - DNA, 60 bp, Artificial
  Synthetic oligonucleotide
caaaatacgccgaagagttgacataaaccctggtcatgcagacctcagtgccaaggaggc

SEQ ID NO: 66129 - DNA, 60 bp, Artificial
  Synthetic oligonucleotide
ggggaaaagtgcaacagctatactcagaaaagcaaccaggagattggttcagcttatagt

SEQ ID NO: 66130 - DNA, 60 bp, Artificial
  Synthetic oligonucleotide
cagctatactcagaaaagcaaccaggagattggttcagcttatagtgagtggaagggacg

SEQ ID NO: 66131 - DNA, 60 bp, Artificial
  Synthetic oligonucleotide
aggagttcacaatggtggggaaaagggcaacagctatactcagaaaagcaaccagaagat

SEQ ID NO: 66132 - DNA, 60 bp, Artificial
  Synthetic oligonucleotide
aggagttcacaatggtggggaaaagagcaacagctatactcagaaaagcaaccaggagat

SEQ ID NO: 66133 - DNA, 60 bp, Artificial
  Synthetic oligonucleotide
ggggaaaagggcaacagctatactcagaaaagcaaccaggagattggttcagcttatagt

SEQ ID NO: 66134 - DNA, 60 bp, Artificial
  Synthetic oligonucleotide
gccgaagagttgacataaaccctggtcatgcagacctcagtgccaaggaggcacaagatg

SEQ ID NO: 66135 - DNA, 60 bp, Artificial
  Synthetic oligonucleotide
gccgaagagtagacataaaccctggtcatgcagacctcagtgccaaggaggcacaagatg

SEQ ID NO: 66136 - DNA, 60 bp, Artificial
  Synthetic oligonucleotide
aaatcctggtcatgcagacctcagtgccaaggaggcacaagatgtaatcatggaagttgt

SEQ ID NO: 66137 - DNA, 60 bp, Artificial
  Synthetic oligonucleotide
cacttttctcatcctcctgttcacagtagtgaaaggggaccaaatatgtgtcgggtacca

SEQ ID NO: 66138 - DNA, 60 bp, Artificial
  Synthetic oligonucleotide
tgactgggaacgacaatgatgcgagtggccaaataatatatgcagggagaatgacagact

SEQ ID NO: 66139 - DNA, 60 bp, Artificial
  Synthetic oligonucleotide
tatcctcaggacccaggagtcggaatgcgtttgtatcaatggaacttgtacagtagtaat

SEQ ID NO: 66140 - DNA, 60 bp, Artificial
  Synthetic oligonucleotide
aatgaactaagcaatcttgcgaagggagagaaggctaatgtgctaattgggcaaggagac

SEQ ID NO: 66141 - DNA, 60 bp, Artificial
  Synthetic oligonucleotide
aatgaactgagcaaccttgcaaaaggagaaaaggctaatgtgctaattgggcaaggagac

SEQ ID NO: 66142 - DNA, 60 bp, Artificial
  Synthetic oligonucleotide
gaacggctgcattgagggcaagctttctcaaatgtccaaagaagtaaacgcaagaattga

SEQ ID NO: 66143 - DNA, 60 bp, Artificial
  Synthetic oligonucleotide
gaacggctgcattgagggcaagctttctcaaatgtccaaagaagtgaatgcaagaattga

SEQ ID NO: 66144 - DNA, 55 bp, Artificial
  Synthetic oligonucleotide
gaacggctgcattgagggcaagctttctcaaatgtccaaagaagtaaacgcaaga

SEQ ID NO: 66145 - DNA, 60 bp, Artificial
  Synthetic oligonucleotide
gcttacaggcaaccttcaaacattgaaaataagagtacatgaaggatatgaggaattcac

SEQ ID NO: 66146 - DNA, 60 bp, Artificial
  Synthetic oligonucleotide
aaaagaacccgtcacttaggatgaaatggatgatggcaatgaaatatccgattacagctg

SEQ ID NO: 66147 - DNA, 60 bp, Artificial
  Synthetic oligonucleotide
agaacccgtcacttaggatgaaatggatgatggcaatgaaatatccgattacagctgaca

SEQ ID NO: 66148 - DNA, 60 bp, Artificial
  Synthetic oligonucleotide
atgtgcactgaactcaaactcagtgactatgaagggaggctgattcagaacagcataaca

SEQ ID NO: 66149 - DNA, 60 bp, Artificial
  Synthetic oligonucleotide
cttgccatttatgctacagttgcaggttctctgtcattggcaatcatgatagctgggatc

SEQ ID NO: 66150 - DNA, 60 bp, Artificial
  Synthetic oligonucleotide
acgagggatcttatttcttcggagacaatgcagaggagtatgacaattaaagaaaaatac

SEQ ID NO: 66151 - DNA, 57 bp, Artificial
  Synthetic oligonucleotide
aaaactctgaaattggcaacagggatgcggaatgtaccagagaaacaaactagaggc

SEQ ID NO: 66152 - DNA, 60 bp, Artificial
  Synthetic oligonucleotide
aaagcaggcaaaccatttgaatggatgtcaatccgactttacttttcttgaaagttccag

SEQ ID NO: 66153 - DNA, 60 bp, Artificial
  Synthetic oligonucleotide
catctttattggagatgtgccacagcacacagattggcggggcaagaatggtggacattc

SEQ ID NO: 66154 - DNA, 56 bp, Artificial
  Synthetic oligonucleotide
agcgcaaaatgccataagcaccacattcccttatactggagatcctccatacagcc

SEQ ID NO: 66155 - DNA, 54 bp, Artificial
  Synthetic oligonucleotide
cgcaaaatgccataagtactacattcccttatactggagatcctccatacagcc

SEQ ID NO: 66156 - DNA, 51 bp, Artificial
  Synthetic oligonucleotide
aaaatgccataagtactacattcccttatactggagatcctccatacagcc

SEQ ID NO: 66157 - DNA, 60 bp, Artificial
  Synthetic oligonucleotide
tttctctgttgaaggcaaaagctgcatcaatcggtgcttttatgtggagttgataagggg

SEQ ID NO: 66158 - DNA, 60 bp, Artificial
  Synthetic oligonucleotide
ggattttgggatttgtgttcacgctcaccgtgcccagtgagcgaggactgcagcgtagac

SEQ ID NO: 66159 - DNA, 54 bp, Artificial
  Synthetic oligonucleotide
cactcactgagtgacatcaaaatcatggcgtcccaaggcaccaaacggtcttat

SEQ ID NO: 66160 - DNA, 53 bp, Artificial
  Synthetic oligonucleotide
cactcactgagtgacatcaaaatcatggcgtcccaaggcaccaaacggtctta

SEQ ID NO: 66161 - DNA, 60 bp, Artificial
  Synthetic oligonucleotide
caacaacgagactatactggaaacagggtatgtgtgtagtaaatttcactcagacacccc

SEQ ID NO: 66162 - DNA, 60 bp, Artificial
  Synthetic oligonucleotide
caacaacgagactatactggaaacagggtatgtgtgtagtaaattccactcagacactcc

SEQ ID NO: 66163 - DNA, 60 bp, Artificial
  Synthetic oligonucleotide
tgagaatcaacaacgagactatactggaaacagggtatgtgtgcagtaaatttcactcag

SEQ ID NO: 66164 - DNA, 60 bp, Artificial
  Synthetic oligonucleotide
tgagaatcaacaacgagactatactggaaacagggtatgtgtgtagtaaatttcactcag

SEQ ID NO: 66165 - DNA, 60 bp, Artificial
  Synthetic oligonucleotide
gatacgggagggaagaataatgaagtatgaaaatgtccccaaaacaaagatacaacactt

SEQ ID NO: 66166 - DNA, 60 bp, Artificial
  Synthetic oligonucleotide
gggagggaagaataatgaagtatgaaaatgtccccaaaacaaagatacaacacttagaag

SEQ ID NO: 66167 - DNA, 60 bp, Artificial
  Synthetic oligonucleotide
gtcacagatggccctgctgctaatagtgcagatcacagggtttactggatacgagaggga

SEQ ID NO: 66168 - DNA, 60 bp, Artificial
  Synthetic oligonucleotide
cacagatggccctgctgctaatagtgcagatcacaggatttactggatacgggagggaag

SEQ ID NO: 66169 - DNA, 60 bp, Artificial
  Synthetic oligonucleotide
caacaacgagactatactggaaacagggtatgtgtgcagtaaatttcactcagacacccc

SEQ ID NO: 66170 - DNA, 60 bp, Artificial
  Synthetic oligonucleotide
cctttcaaatctccactaccgctatgccccttcagaggattcttcccttttcacaaggac

SEQ ID NO: 66171 - DNA, 60 bp, Artificial
  Synthetic oligonucleotide
gctgtcacagatggccctgctgctaatagtgcagatcacaggatttactggatacgggag

SEQ ID NO: 66172 - DNA, 60 bp, Artificial
  Synthetic oligonucleotide
cgacccctgcaataccgaactgcagtgacactataataacatacaataacactgtgataa

SEQ ID NO: 66173 - DNA, 60 bp, Artificial
  Synthetic oligonucleotide
tgtcacagatggccctgctgctaatagtgcagatcacagggtctactggatacgagaggg

SEQ ID NO: 66174 - DNA, 60 bp, Artificial
  Synthetic oligonucleotide
gtcacagatggccctgctgctaatagtgcagatcacagggtttattggatacgagaggga

SEQ ID NO: 66175 - DNA, 60 bp, Artificial
  Synthetic oligonucleotide
tgtatttgttatcagagagccgtttatttcatgctctcacttggaatgcaggactttctt

SEQ ID NO: 66176 - DNA, 60 bp, Artificial
  Synthetic oligonucleotide
atctcaatatgggttagccattcaatccagactggaagtcagaaccaccttgaaacatgc

SEQ ID NO: 66177 - DNA, 60 bp, Artificial
  Synthetic oligonucleotide
gggttagccattcaatccagactggaagtcagaaccaccttgaaacatgcaatcaaagtg

SEQ ID NO: 66178 - DNA, 60 bp, Artificial
  Synthetic oligonucleotide
gtcaaatcagtcgagttgagtgctcctaattaccactatgaggagtgttcctgttatcct

SEQ ID NO: 66179 - DNA, 60 bp, Artificial
  Synthetic oligonucleotide
ttgagtgctcctaattaccactatgaggagtgttcctgttatcctgatgctggcgaggtg

SEQ ID NO: 66180 - DNA, 60 bp, Artificial
  Synthetic oligonucleotide
ctatagaaccctaatgagctgtcctgttggtgaagctccctctccatacaattcaaggtt

SEQ ID NO: 66181 - DNA, 60 bp, Artificial
  Synthetic oligonucleotide
gagctgtcctgttggtgaagctccctctccatacaattcaaggtttgagtctgttgcttg

SEQ ID NO: 66182 - DNA, 60 bp, Artificial
  Synthetic oligonucleotide
atctcaatatgggttagccattcaatccagactggaagtcaaaaccaccctgaaacatgc

SEQ ID NO: 66183 - DNA, 56 bp, Artificial
  Synthetic oligonucleotide
ggttgaactgataagaggaaggcccaaggagaatacaatctggactagtgggagca

SEQ ID NO: 66184 - DNA, 60 bp, Artificial
  Synthetic oligonucleotide
ccggaatcaagtcaaaatacgacgcagggttgacataaacccgggccatgcagatctcag

SEQ ID NO: 66185 - DNA, 60 bp, Artificial
  Synthetic oligonucleotide
tccggaatcaagtcaaaatacgacgcagggttgacataaacccgggccatgcagatctca

SEQ ID NO: 66186 - DNA, 60 bp, Artificial
  Synthetic oligonucleotide
atggaccagcattgagcatcaatgaactgagtaatcttgcgaaaggggagaaagctaacg

SEQ ID NO: 66187 - DNA, 60 bp, Artificial
  Synthetic oligonucleotide
tgaaaggctgggcctttgatgatggaaatgacgtgtggatgggaagaacgatcagcgaga

SEQ ID NO: 66188 - DNA, 60 bp, Artificial
  Synthetic oligonucleotide
gagtgaaaggctgggcctttgatgatggaaatgacgtgtggatgggaagaacgatcagcg

SEQ ID NO: 66189 - DNA, 60 bp, Artificial
  Synthetic oligonucleotide
ttgctgggattcatcatgtgggcctgccagaaaggcaacattaggtgcaacatttgcatt

SEQ ID NO: 66190 - DNA, 60 bp, Artificial
  Synthetic oligonucleotide
ctgggctataaggaccagaagtggaggaaacaccaaccaacagagagcatctgcaggaca

SEQ ID NO: 66191 - DNA, 55 bp, Artificial
  Synthetic oligonucleotide
atgaaggcacagctggggtggagtctgctgttctgagaggattcctcattctggg

SEQ ID NO: 66192 - DNA, 59 bp, Artificial
  Synthetic oligonucleotide
aagattatagcattgtttccagttatgtgtgctcagggcttgttggcgacacacccaga

SEQ ID NO: 66193 - DNA, 60 bp, Artificial
  Synthetic oligonucleotide
cagtgttggttctccctggaaatggaaataatgggagctgcaatgaaacagtcattaggg

SEQ ID NO: 66194 - DNA, 60 bp, Artificial
  Synthetic oligonucleotide
gaatgcatgaatagtgtaaagaatgggacatatgattatcccaagtatgaagaggaatct

SEQ ID NO: 66195 - DNA, 60 bp, Artificial
  Synthetic oligonucleotide
ggtccagctcaagttgtcacgatggaaaagcatggctgcatgtttgtgtaactgggcatg

SEQ ID NO: 66196 - DNA, 60 bp, Artificial
  Synthetic oligonucleotide
gggcaaaagctgcatcaatcggtgcttttatgtggagttgataaggggaagggaacagga

SEQ ID NO: 66197 - DNA, 57 bp, Artificial
  Synthetic oligonucleotide
acaattgtccaccaggggggtacagattgcttcaaatgagaacatggagacaatgga

SEQ ID NO: 66198 - DNA, 60 bp, Artificial
  Synthetic oligonucleotide
cggctgcattgagggcaagctttctcaaatgtccaaagaagtaaacgcaagaattgaacc

SEQ ID NO: 66199 - DNA, 59 bp, Artificial
  Synthetic oligonucleotide
caagtgaccctcttgttgttgctgcgagtatcattgggatcttgcacttgatattgtgg

SEQ ID NO: 66200 - DNA, 54 bp, Artificial
  Synthetic oligonucleotide
cactcactgagtgacatccacatcatggcgtctcaaggcaccaaacgatcctat

SEQ ID NO: 66201 - DNA, 59 bp, Artificial
  Synthetic oligonucleotide
caagagctcttgttcgcaccggaatggatcccaggatgtgctctctgatgcagggttcg

SEQ ID NO: 66202 - DNA, 60 bp, Artificial
  Synthetic oligonucleotide
gaatgcatgaatagcgtaaagaatgggacatatgattatcccaagtatgaagaggagtct

SEQ ID NO: 66203 - DNA, 60 bp, Artificial
  Synthetic oligonucleotide
ggagcaatagctggttttatagaaggaggatggcaaggaatggttgatggttggtatgga

SEQ ID NO: 66204 - DNA, 60 bp, Artificial
  Synthetic oligonucleotide
gattgtttggggcaatagctggttttatagaaggaggatggcaaggaatggttgatggtt

SEQ ID NO: 66205 - DNA, 60 bp, Artificial
  Synthetic oligonucleotide
agcacagcaacgctgtgcctgggacatcatgcggtgccaaacggaacgctagtgaaaaca

SEQ ID NO: 66206 - DNA, 60 bp, Artificial
  Synthetic oligonucleotide
cacgataggtcccagtatcgcgccctaataagctggccactatcatcaccacccacagta

SEQ ID NO: 66207 - DNA, 60 bp, Artificial
  Synthetic oligonucleotide
caaaagtggtcccaagaggacaactgtccaccagaggggttcaaattgcttcaaatgaaa

SEQ ID NO: 66208 - DNA, 60 bp, Artificial
  Synthetic oligonucleotide
gcggggaatcaatgatcggaacttctggagaggtgaaaatggacgaagaacaaggattgc

SEQ ID NO: 66209 - DNA, 60 bp, Artificial
  Synthetic oligonucleotide
ggagtgaaaggctgggcctttgatgatggaaatgacgtgtggatgggaagaacgatcagc

SEQ ID NO: 66210 - DNA, 60 bp, Artificial
  Synthetic oligonucleotide
gttcgagtctctgaagctctacagagattcgcttggagaagcagtaatgaggatgggaga

SEQ ID NO: 66211 - DNA, 60 bp, Artificial
  Synthetic oligonucleotide
ggtagtgaagtatgaaaatgtccctaaaacaaagatacagcacctggaagagtgttcctg

SEQ ID NO: 66212 - DNA, 60 bp, Artificial
  Synthetic oligonucleotide
gggcaaatagagaattcaataacttgaccaaagggctctgtactataaattcatggcaca

SEQ ID NO: 66213 - DNA, 56 bp, Artificial
  Synthetic oligonucleotide
ctattgcttgaagtagaacaagagataagaactttctcgtttcagcttatttaatg

SEQ ID NO: 66214 - DNA, 60 bp, Artificial
  Synthetic oligonucleotide
caaggtcagacaatcgtattaaacactgactggagtggttacagtggatctttcatggac

SEQ ID NO: 66215 - DNA, 60 bp, Artificial
  Synthetic oligonucleotide
gaacataggactacacctgaaaccgagctgcaactgctctaactctccttctgaagccac

SEQ ID NO: 66216 - DNA, 60 bp, Artificial
  Synthetic oligonucleotide
tcaccgaagagggagcaattgttggcgaaatctcaccattgccttctcttccaggacata

SEQ ID NO: 66217 - DNA, 60 bp, Artificial
  Synthetic oligonucleotide
tggtgcacttgccagttgcatgggcctcatatacaacagaatggggactgtgaccaccga

SEQ ID NO: 66218 - DNA, 60 bp, Artificial
  Synthetic oligonucleotide
cagtagcaggttctctgtcactggcaatcatgatagctgggatttctatatggatgtgct

SEQ ID NO: 66219 - DNA, 60 bp, Artificial
  Synthetic oligonucleotide
tgggacagggagctgtggcccgatgacctctagtggagcatatggagtgaaaggattttc

SEQ ID NO: 66220 - DNA, 60 bp, Artificial
  Synthetic oligonucleotide
atatacagcaaagacaatggcataagaatcggttctaaaggggacgtttttgttataaga

SEQ ID NO: 66221 - DNA, 60 bp, Artificial
  Synthetic oligonucleotide
ccatgatggtgtgagctggctaacaattgggatttctggccccgataatggggcggtggc

SEQ ID NO: 66222 - DNA, 60 bp, Artificial
  Synthetic oligonucleotide
gtaatgggcaggcttcatacaaggttttcaagatagagaaagggaaagttgttaaatcag

SEQ ID NO: 66223 - DNA, 60 bp, Artificial
  Synthetic oligonucleotide
gacaccattaagagctggaggggcgacatattaaggacacaggagtctgaatgtgcttgc

SEQ ID NO: 66224 - DNA, 60 bp, Artificial
  Synthetic oligonucleotide
gttaaatcagttgagttagaagcacctaattatcactacgaggaatgctcctgttaccct

SEQ ID NO: 66225 - DNA, 60 bp, Artificial
  Synthetic oligonucleotide
ataggatacatttgcagtggagtatttggtgataatcctcgtcctaatgatgggacaggg

SEQ ID NO: 66226 - DNA, 60 bp, Artificial
  Synthetic oligonucleotide
ccattggttacgtttgcatgacacttgggtcaatcagcttaatacttcaattagggaaca

SEQ ID NO: 66227 - DNA, 60 bp, Artificial
  Synthetic oligonucleotide
ggtatggtagtggcgtttggataggtagaaccaaaagcattagttccaggagcggatttg

SEQ ID NO: 66228 - DNA, 60 bp, Artificial
  Synthetic oligonucleotide
ttctgggtggaactaataagggggagacctaaagaggaaactatctggactagtgggagt

SEQ ID NO: 66229 - DNA, 60 bp, Artificial
  Synthetic oligonucleotide
caagagtattagctggtaactcctccctttgccccatcagtggttgggccatatacagca

SEQ ID NO: 66230 - DNA, 60 bp, Artificial
  Synthetic oligonucleotide
agcccttaccgaactttgatgagctgtcctgttggtgaagccccctctccatacaattcg

SEQ ID NO: 66231 - DNA, 60 bp, Artificial
  Synthetic oligonucleotide
gtatttgaacatcagcgtcacgaatttggctgttgaacaggacataaccccaagagtatt

SEQ ID NO: 66232 - DNA, 60 bp, Artificial
  Synthetic oligonucleotide
tgcaacatcctcaaagggaaatttcagacagcagcacaacgagcaatgatggaccaggtg

SEQ ID NO: 66233 - DNA, 60 bp, Artificial
  Synthetic oligonucleotide
cagtagcaggttccctgtcactggcaatcatgatagctgggatttctatatggatgtgct

SEQ ID NO: 66234 - DNA, 60 bp, Artificial
  Synthetic oligonucleotide
tcatacaggagaccggttgggatttccagcatggtggaggccatggtgtctagggcccga

SEQ ID NO: 66235 - DNA, 60 bp, Artificial
  Synthetic oligonucleotide
acaccgatcttgaggcactcatggaatggctaaagacaagaccaatcctgtcacctctga

SEQ ID NO: 66236 - DNA, 60 bp, Artificial
  Synthetic oligonucleotide
gaagagcacagatcttgaggcactcatggaatggctaaagacaagaccaatcctgtcacc

SEQ ID NO: 66237 - DNA, 60 bp, Artificial
  Synthetic oligonucleotide
caccgatcttgaggcactcatggaatggctaaagacaagaccaatcctgtcacctctgag

SEQ ID NO: 66238 - DNA, 60 bp, Artificial
  Synthetic oligonucleotide
ggattttggggtttgtgttcacgctcaccgtgcccagtgagcgaggactgcagcgtatac

SEQ ID NO: 66239 - DNA, 60 bp, Artificial
  Synthetic oligonucleotide
ggatcttggggtttgtgttcacgctcaccgtgcccagtgagcgaggactgcagcgtagac

SEQ ID NO: 66240 - DNA, 60 bp, Artificial
  Synthetic oligonucleotide
cgaatgggctgacagctaatgagtcgggaaggctaatagatttcctcaaggatgtgatgg

SEQ ID NO: 66241 - DNA, 60 bp, Artificial
  Synthetic oligonucleotide
gatcgaatggtctaacagctaatgaatcaggaaggctaatagatttcctcaaggatgtga

SEQ ID NO: 66242 - DNA, 60 bp, Artificial
  Synthetic oligonucleotide
atgaagactatcattgctttgagctacattttatgtctggttttcgctcaaaaacttccc

SEQ ID NO: 66243 - DNA, 57 bp, Artificial
  Synthetic oligonucleotide
aaccatgaagactatcattgctttgagctacattttatgtctggttttcgcccaaaa

SEQ ID NO: 66244 - DNA, 60 bp, Artificial
  Synthetic oligonucleotide
aaccatgaagactatcattgctttgagctacattttatgtctggttttcgcccaaaaact

SEQ ID NO: 66245 - DNA, 60 bp, Artificial
  Synthetic oligonucleotide
aatagctggcacagtctcattgagtcctggaatgatgatgggcatgttcaacatgctaag

SEQ ID NO: 66246 - DNA, 59 bp, Artificial
  Synthetic oligonucleotide
cgtggtaaactttgtgagcatggagttttctctcactgacccgaggctggaaccgcaca

SEQ ID NO: 66247 - DNA, 60 bp, Artificial
  Synthetic oligonucleotide
cctttcaagccttcactgccgctatgcccagtccaagggttcttccctttccacaaggac

SEQ ID NO: 66248 - DNA, 60 bp, Artificial
  Synthetic oligonucleotide
accatcaaagatagaacaccatacaggtcattaatccgattcccaataggagcagcccca

SEQ ID NO: 66249 - DNA, 60 bp, Artificial
  Synthetic oligonucleotide
tgttaacggaggacccggagttaaggggtttggtttcaagaccggcaatgatgtgtggct

SEQ ID NO: 66250 - DNA, 60 bp, Artificial
  Synthetic oligonucleotide
agaaacaggatatgtgtgcagcaaatttcactcagacactcccaggccagctgacccctc

SEQ ID NO: 66251 - DNA, 60 bp, Artificial
  Synthetic oligonucleotide
catcaaaccgtggtatacccgaccataacaactcctgcaatacaaaactgcagtgacact

SEQ ID NO: 66252 - DNA, 60 bp, Artificial
  Synthetic oligonucleotide
agttacagagggatggattaactctcccaatcatgtcaaatcagttacacaaacactagt

SEQ ID NO: 66253 - DNA, 60 bp, Artificial
  Synthetic oligonucleotide
ggagaatgacagactctatcaaatcatggagaaaggacatattaaggacccaagaatccg

SEQ ID NO: 66254 - DNA, 60 bp, Artificial
  Synthetic oligonucleotide
aaatgtccctaaaacaaagatacagcacctggaagagtgttcctgctatgtggacaccga

SEQ ID NO: 66255 - DNA, 60 bp, Artificial
  Synthetic oligonucleotide
cggaggacccggagttaaggggtttggtttcaagaccggcaatgatgtgtggctgggcag

SEQ ID NO: 66256 - DNA, 60 bp, Artificial
  Synthetic oligonucleotide
ctgaagcagaaagacctttcaagccttcactgccgctatgcccagtccaagggttcttcc

SEQ ID NO: 66257 - DNA, 60 bp, Artificial
  Synthetic oligonucleotide
gggcagaacagtgtcaactagtggtagatcaggttttgagatcatcaaagttacagaggg

SEQ ID NO: 66258 - DNA, 60 bp, Artificial
  Synthetic oligonucleotide
caggatatgtgtgcagcaaatttcactcagacactcccaggccagctgacccctcaacag

SEQ ID NO: 66259 - DNA, 60 bp, Artificial
  Synthetic oligonucleotide
gggttcttccctttccacaaggacaatgcaatacgattgggcgaaaacaaggacgtcata

SEQ ID NO: 66260 - DNA, 60 bp, Artificial
  Synthetic oligonucleotide
cctttgctcttgcacaaggggcactactagggactaaacatagcaatggaaccatcaaag

SEQ ID NO: 66261 - DNA, 60 bp, Artificial
  Synthetic oligonucleotide
cacaaggacaatgcaatacgattgggcgaaaacaaggacgtcatagtcacaagagaaccc

SEQ ID NO: 66262 - DNA, 60 bp, Artificial
  Synthetic oligonucleotide
agtgttcctgctatgtggacaccgatgtgtattgcatatgcagagacaattggaaaggtt

SEQ ID NO: 66263 - DNA, 60 bp, Artificial
  Synthetic oligonucleotide
cctttgacatgagtaacgagggatcttatttcttcggagacaatgcagaggaatatgaca

SEQ ID NO: 66264 - DNA, 60 bp, Artificial
  Synthetic oligonucleotide
agacatccttaggcaaaatccaacagaggaacaagccgtggatatatgcaaggcagcaat

SEQ ID NO: 66265 - DNA, 60 bp, Artificial
  Synthetic oligonucleotide
ttggggcacttcagggacctatggaacaggctcatggcctgatggggcgaacatcaactt

SEQ ID NO: 66266 - DNA, 60 bp, Artificial
  Synthetic oligonucleotide
cgtgggatgtcataaattttgagagcactggaaatctaattgcaccagaatacgggttca

SEQ ID NO: 66267 - DNA, 60 bp, Artificial
  Synthetic oligonucleotide
acttgtgttgttgctgtcacagatggccctgctgctaatagtgcagatcacagggtttat

SEQ ID NO: 66268 - DNA, 60 bp, Artificial
  Synthetic oligonucleotide
gacttgtgttgttgctgtcacagatggccctgctgctaatagtgcagatcacagggtcta

SEQ ID NO: 66269 - DNA, 60 bp, Artificial
  Synthetic oligonucleotide
gacgggacttgtgttgttgctgtcacagatggccctgctgctaatagtgcagatcacagg

SEQ ID NO: 66270 - DNA, 60 bp, Artificial
  Synthetic oligonucleotide
acttgtgttgttgctgtcacagatggccctgctgctaatagtgcagatcacagggtttac

SEQ ID NO: 66271 - DNA, 60 bp, Artificial
  Synthetic oligonucleotide
cgggacttgtgttgttgctgtcacagatggccctgctgctaatagtgcagatcacagggt

SEQ ID NO: 66272 - DNA, 60 bp, Artificial
  Synthetic oligonucleotide
ggagaatggaattctcttggactctattggagacgtgggatgtcataaattttgagagca

SEQ ID NO: 66273 - DNA, 60 bp, Artificial
  Synthetic oligonucleotide
gcaaatttgacaaattgtacatttggggggttcaccacccgagcacggacagtgaccaaa

SEQ ID NO: 66274 - DNA, 60 bp, Artificial
  Synthetic oligonucleotide
acaaatttgacaaattgtacatttggggggttcaccacccgagcacggacagtgaccaaa

SEQ ID NO: 66275 - DNA, 60 bp, Artificial
  Synthetic oligonucleotide
gcaaatttgacaaattgtacatttggggggttcaccacccgagcacggacagagaacaaa

SEQ ID NO: 66276 - DNA, 60 bp, Artificial
  Synthetic oligonucleotide
cagctactatttgaagtggaacaggagataagaactttctcgtttcagcttatttaatga

SEQ ID NO: 66277 - DNA, 60 bp, Artificial
  Synthetic oligonucleotide
gatctggatacgagatgctaaaggtgccaaatgcattgaccgacgataggtcaaaaccca

SEQ ID NO: 66278 - DNA, 60 bp, Artificial
  Synthetic oligonucleotide
cttatgttcacagcagtgagaggggaccaaatatgcattggataccattccaacaattcc

SEQ ID NO: 66279 - DNA, 58 bp, Artificial
  Synthetic oligonucleotide
tgttcacagcagtgagaggggaccaaatatgcattggataccattccaacaattccac

SEQ ID NO: 66280 - DNA, 60 bp, Artificial
  Synthetic oligonucleotide
tctggaacctgggacctttgatcttggggggctatatgaagcaattgaggagtgcctaat

SEQ ID NO: 66281 - DNA, 60 bp, Artificial
  Synthetic oligonucleotide
atgtactactatctcctgaggaggtcagtgaaacacagggaacagagaaactgacgataa

SEQ ID NO: 66282 - DNA, 60 bp, Artificial
  Synthetic oligonucleotide
ttatcgaacattaatgagctgtcctgttggtgaagctccttccccatacaattcgagatt

SEQ ID NO: 66283 - DNA, 60 bp, Artificial
  Synthetic oligonucleotide
tgaaatcagagcatctgttgggagaatggttggaggaattggaagattctacatacagat

SEQ ID NO: 66284 - DNA, 60 bp, Artificial
  Synthetic oligonucleotide
ggagttgataagaggaagaccacaggagactagggtgtggtggacttcaaatagcataat

SEQ ID NO: 66285 - DNA, 60 bp, Artificial
  Synthetic oligonucleotide
caggttatgagactttcagggtcgttggtggttggaccacggctaattccaagtcacaga

SEQ ID NO: 66286 - DNA, 60 bp, Artificial
  Synthetic oligonucleotide
ctcaggttatgagactttcagggtcgttggtggttggaccacggctaattccaagtcaca

SEQ ID NO: 66287 - DNA, 60 bp, Artificial
  Synthetic oligonucleotide
aggggaaaattgtacacattagcccattgtcagggagtgctcagcatgtggaggaatgct

SEQ ID NO: 66288 - DNA, 60 bp, Artificial
  Synthetic oligonucleotide
gggatcctaataacgagagaggggccccaggagtaaaaggatgggcctttgacaatggaa

SEQ ID NO: 66289 - DNA, 60 bp, Artificial
  Synthetic oligonucleotide
atttggatgggacgaacaatcaaagaggattcacgctcaggttatgagactttcagggtc

SEQ ID NO: 66290 - DNA, 60 bp, Artificial
  Synthetic oligonucleotide
gacaatggaaatgatatttggatgggacgaacaatcaaagaggattcacgctcaggttat

SEQ ID NO: 66291 - DNA, 60 bp, Artificial
  Synthetic oligonucleotide
accacaatgtcaaattacagggttcgctcctttctccaaggacaactcaattaggctttc

SEQ ID NO: 66292 - DNA, 60 bp, Artificial
  Synthetic oligonucleotide
tacagggttcgctcctttctccaaggacaactcaattaggctttccgcaggtggggatat

SEQ ID NO: 66293 - DNA, 60 bp, Artificial
  Synthetic oligonucleotide
gtttcctcatgcagattgccatcttagcaacgactatgacactacatttcaagcagattg

SEQ ID NO: 66294 - DNA, 60 bp, Artificial
  Synthetic oligonucleotide
gaagaacatagtgcatttgaatagtactaccatagagaaggaaatttgtcctaaagtggt

SEQ ID NO: 66295 - DNA, 60 bp, Artificial
  Synthetic oligonucleotide
ccaagtcacagataaatagacaagtcatagttgacagtgaaaactggtctgggtattctg

SEQ ID NO: 66296 - DNA, 60 bp, Artificial
  Synthetic oligonucleotide
caagtcacagataaatagacaagtcatagttgacagtgaaaactggtctgggtattctgg

SEQ ID NO: 66297 - DNA, 60 bp, Artificial
  Synthetic oligonucleotide
tgtgcatagcatggtccagctcaagctgccatgatgggaaagcatggctacatgtttgtg

SEQ ID NO: 66298 - DNA, 60 bp, Artificial
  Synthetic oligonucleotide
catagcatggtccagctcaagctgccatgatgggaaagcatggctacatgtttgtgtcac

SEQ ID NO: 66299 - DNA, 60 bp, Artificial
  Synthetic oligonucleotide
aagcagattggatgcagcaacccctcgaataatcaagtggtgccatgtgaaccaatcata

SEQ ID NO: 66300 - DNA, 60 bp, Artificial
  Synthetic oligonucleotide
ggatgcagcaacccctcgaataatcaagtggtgccatgtgaaccaatcataatagagaag

SEQ ID NO: 66301 - DNA, 60 bp, Artificial
  Synthetic oligonucleotide
agcaaaagcaggagtgaagatgaatccaaatcagaagataatagcaattggctctgtttc

SEQ ID NO: 66302 - DNA, 60 bp, Artificial
  Synthetic oligonucleotide
caaaagcaggagtgaagatgaatccaaatcagaagataatagcaattggctctgtttctc

SEQ ID NO: 66303 - DNA, 60 bp, Artificial
  Synthetic oligonucleotide
accaatcataatagagaagaacatagtgcatttgaatagtactaccatagagaaggaaat

SEQ ID NO: 66304 - DNA, 60 bp, Artificial
  Synthetic oligonucleotide
ttgccatcttagcaacgactatgacactacatttcaagcagattggatgcagcaacccct

SEQ ID NO: 66305 - DNA, 58 bp, Artificial
  Synthetic oligonucleotide
tcgtgcggtcttgggaaatgttaccaatttgcacttgggcagggaaccactttgaaaa

SEQ ID NO: 66306 - DNA, 60 bp, Artificial
  Synthetic oligonucleotide
tcgtgcggtcttgggaaatgttaccaatttgcacttgggcagggaaccactttgaaaaac

SEQ ID NO: 66307 - DNA, 60 bp, Artificial
  Synthetic oligonucleotide
ttaggctttccgcaggtggggatatctgggtgacaagagaaccttatgtgtcgtgcggtc

SEQ ID NO: 66308 - DNA, 60 bp, Artificial
  Synthetic oligonucleotide
ctttccgcaggtggggatatctgggtgacaagagaaccttatgtgtcgtgcggtcttggg

SEQ ID NO: 66309 - DNA, 60 bp, Artificial
  Synthetic oligonucleotide
atggcccagcattgagcatcaatgaactgagcaaccttgcaaaaggggagaaggctaatg

SEQ ID NO: 66310 - DNA, 60 bp, Artificial
  Synthetic oligonucleotide
atggcccagcattgagcatcaatgaactgagcaatcttgcaaaaggggagaaggctaatg

SEQ ID NO: 66311 - DNA, 60 bp, Artificial
  Synthetic oligonucleotide
atggcccagcattgagcatcaatgaactgagcaatcttgcaaaaggggagaaggctaacg

SEQ ID NO: 66312 - DNA, 60 bp, Artificial
  Synthetic oligonucleotide
ggtcttacaatgcggagcttcttgtcgctctggagaatcaacatacaattgacctgactg

SEQ ID NO: 66313 - DNA, 60 bp, Artificial
  Synthetic oligonucleotide
aaccataatcccgaatatcgggtctagaccctgggtaagaggtctgtctagtagaataag

SEQ ID NO: 66314 - DNA, 52 bp, Artificial
  Synthetic oligonucleotide
agtgcctgattaatgatccctgggttttgctcaatgcgtcttggttcaactc

SEQ ID NO: 66315 - DNA, 60 bp, Artificial
  Synthetic oligonucleotide
ccctgtcactggcaatcatgatagctgggatttctatatggatgtgctccaacgggtctc

SEQ ID NO: 66316 - DNA, 58 bp, Artificial
  Synthetic oligonucleotide
tacatgataggaccccttatcgaaccctattgatgaatgagttgggtgttccatttca

SEQ ID NO: 66317 - DNA, 60 bp, Artificial
  Synthetic oligonucleotide
tatacgctacagtggcaggctccttatcactggcaatcatgatagctgggatttctttct

SEQ ID NO: 66318 - DNA, 60 bp, Artificial
  Synthetic oligonucleotide
tatacgctacagtggcaggctccttgtcactggcaatcatgatagctgggatttctttct

SEQ ID NO: 66319 - DNA, 60 bp, Artificial
  Synthetic oligonucleotide
tatacgctacagttgcaggctccttgtcactggcaatcatgatagctgggatttctttct

SEQ ID NO: 66320 - DNA, 60 bp, Artificial
  Synthetic oligonucleotide
cgctacagtagcaggctccttgtcactggcaatcatgatagctgggatttctttctggat

SEQ ID NO: 66321 - DNA, 60 bp, Artificial
  Synthetic oligonucleotide
gctacagtggcaggctccttgtcactggcaatcatgatagctgggatttctttctggatg

SEQ ID NO: 66322 - DNA, 60 bp, Artificial
  Synthetic oligonucleotide
gctacagtagcaggctccttgtcactggcaatcatgatagctgggatttctttctggatg

SEQ ID NO: 66323 - DNA, 60 bp, Artificial
  Synthetic oligonucleotide
gctacagtggcaggctccttatcactggcaatcatgatagctgggatttctttctggatg

SEQ ID NO: 66324 - DNA, 60 bp, Artificial
  Synthetic oligonucleotide
gctacagttgcaggctccttgtcactggcaatcatgatagctgggatttctttctggatg

SEQ ID NO: 66325 - DNA, 60 bp, Artificial
  Synthetic oligonucleotide
cggtggcaggttccttgtcactggcaatcatgatagctgggatttctttctggatgtgtt

SEQ ID NO: 66326 - DNA, 60 bp, Artificial
  Synthetic oligonucleotide
cttatgtgtcatgcgatcctggcaagtgttatcaatttgcacttggacaggggaccacac

SEQ ID NO: 66327 - DNA, 60 bp, Artificial
  Synthetic oligonucleotide
catgacttcgaaagggaagggtattcactggtcgggatagacccatttaaattactccaa

SEQ ID NO: 66328 - DNA, 60 bp, Artificial
  Synthetic oligonucleotide
ggcatgactttgaaagggaagggtattcactggtcgggatagacccatttaaattactcc

SEQ ID NO: 66329 - DNA, 60 bp, Artificial
  Synthetic oligonucleotide
tcttattttcctggcacggtcagcacttattctaaggggatcagttgcacataagtcttg

SEQ ID NO: 66330 - DNA, 60 bp, Artificial
  Synthetic oligonucleotide
aagatcttattttcctggcacggtcagcacttattctaaggggatcagttgcacataagt

SEQ ID NO: 66331 - DNA, 60 bp, Artificial
  Synthetic oligonucleotide
tgggcatgactttgaaagggaagggtattcactggtcgggatagacccatttaaattact

SEQ ID NO: 66332 - DNA, 60 bp, Artificial
  Synthetic oligonucleotide
ctgcctgcttgtgtgtatgggcttgcagtagcaagtgggcatgacttcgaaagggaaggg

SEQ ID NO: 66333 - DNA, 53 bp, Artificial
  Synthetic oligonucleotide
cactcaatgagtgacatcgaagccatggcgtctcaaggcaccaaacgatcata

SEQ ID NO: 66334 - DNA, 60 bp, Artificial
  Synthetic oligonucleotide
agcaaaagcagggtagataatcactcaatgagtgacatcgaagccatggcgtctcaaggc

SEQ ID NO: 66335 - DNA, 60 bp, Artificial
  Synthetic oligonucleotide
gaaggcttccgcgggccagatcagtgtgcaacctacattctcagtgcaacggaatctccc

SEQ ID NO: 66336 - DNA, 60 bp, Artificial
  Synthetic oligonucleotide
ggaatctcccttttgaaagagcaaccgttatggcagctttcagcgggaacaatgaaggac

SEQ ID NO: 66337 - DNA, 60 bp, Artificial
  Synthetic oligonucleotide
aaagagcaaccgttatggcagctttcagcgggaacaatgaaggacggacatccgacatgc

SEQ ID NO: 66338 - DNA, 60 bp, Artificial
  Synthetic oligonucleotide
ctcggacgaaaaggcaacgagcccgatcgtgccttcctttgacatgagtaatgaagggtc

SEQ ID NO: 66339 - DNA, 60 bp, Artificial
  Synthetic oligonucleotide
gggaagggtattcactggtcgggatagacccatttaaattacttcagaatagtcaagtgt

SEQ ID NO: 66340 - DNA, 60 bp, Artificial
  Synthetic oligonucleotide
aagccatggactccaataccctagaactgagaagcagatactgggccataaggaccagga

SEQ ID NO: 66341 - DNA, 60 bp, Artificial
  Synthetic oligonucleotide
gagccatggactccaataccctagaactaagaagcagatactgggccataaggaccagaa

SEQ ID NO: 66342 - DNA, 60 bp, Artificial
  Synthetic oligonucleotide
taatgcaaggttcaacacttcccagaaggtctggggccgcaggtgctgcagtgaaaggag

SEQ ID NO: 66343 - DNA, 60 bp, Artificial
  Synthetic oligonucleotide
gcaaggttcaacacttcccataaggtctggggccgcaggtgctgcagtgaaaggagttgg

SEQ ID NO: 66344 - DNA, 60 bp, Artificial
  Synthetic oligonucleotide
tttggcattccaatctgaatgatgccacctatcagagaacaagagcgcttgttcgcaccg

SEQ ID NO: 66345 - DNA, 60 bp, Artificial
  Synthetic oligonucleotide
taatgcaaggttcaacacttcccataaggtctggggccgcaggtgctgcagtgaaaggag

SEQ ID NO: 66346 - DNA, 54 bp, Artificial
  Synthetic oligonucleotide
gacgactaatccaaaatagcataacaatagagagaatggtgctttctgcttttg

SEQ ID NO: 66347 - DNA, 50 bp, Artificial
  Synthetic oligonucleotide
acccatatatagaagagtagacggaaagtggatgagagaactcatccttt

SEQ ID NO: 66348 - DNA, 60 bp, Artificial
  Synthetic oligonucleotide
gcaaggttcaacacttcccagaaggtctggggccgcaggtgctgcagtgaaaggagttgg

SEQ ID NO: 66349 - DNA, 50 bp, Artificial
  Synthetic oligonucleotide
caaggattgcatatgaaagaatgtgcaatattctcaaaggaaaatttcag

SEQ ID NO: 66350 - DNA, 60 bp, Artificial
  Synthetic oligonucleotide
acaggagaccggttggaatttccagtatggtggaggccatggtgtctagggcccggattg

SEQ ID NO: 66351 - DNA, 60 bp, Artificial
  Synthetic oligonucleotide
gggatttccagcatggtggaggccatggtgtctagggccagaattgatgcgcggattgat

SEQ ID NO: 66352 - DNA, 60 bp, Artificial
  Synthetic oligonucleotide
gaggaagaatccgatgaggcacttaaaatgaccattgcctctgtacctgcttcacgctac

SEQ ID NO: 66353 - DNA, 60 bp, Artificial
  Synthetic oligonucleotide
gaccatgggtgtctttcaatcagaatctagaatatcggataggatacatatgcagcgggg

SEQ ID NO: 66354 - DNA, 60 bp, Artificial
  Synthetic oligonucleotide
atggttcgaatcgaccatgggtgtctttcaatcagaatctagaatatcggataggataca

SEQ ID NO: 66355 - DNA, 60 bp, Artificial
  Synthetic oligonucleotide
gaaggctaaactggcaaatgttgtaaggaaaatgatgactaattcacaagacacagaact

SEQ ID NO: 66356 - DNA, 60 bp, Artificial
  Synthetic oligonucleotide
acgttgttagaaaaatgatgactaattcacaagacacagagctctctttcacaattactg

SEQ ID NO: 66357 - DNA, 60 bp, Artificial
  Synthetic oligonucleotide
ttgtgagaaaaatgatgactaattcacaagacacagaactctctttcacaataactggag

SEQ ID NO: 66358 - DNA, 60 bp, Artificial
  Synthetic oligonucleotide
cagggtagataatcactcacagagtgacatccacatcatggcgtctcaaggcaccaaacg

SEQ ID NO: 66359 - DNA, 60 bp, Artificial
  Synthetic oligonucleotide
gaggtagttcagggatcatgaaaacagaaggagcacttgaaaactgcgagaccaaatgcc

SEQ ID NO: 66360 - DNA, 60 bp, Artificial
  Synthetic oligonucleotide
gaggtagttcagggatcatgaaaacagaaggaaaacttgaaaactgcgagaccaagtgcc

SEQ ID NO: 66361 - DNA, 58 bp, Artificial
  Synthetic oligonucleotide
ctgaacggaatccctccacttgaattaggggattgcagcattgccggatggctccttg

SEQ ID NO: 66362 - DNA, 60 bp, Artificial
  Synthetic oligonucleotide
ggggcacttcagggacctatggaacaggctcatggcctgatggggcgaacatcaacttca

SEQ ID NO: 66363 - DNA, 60 bp, Artificial
  Synthetic oligonucleotide
ggaatcctaacaatgagagagggaatcacggagtgaaaggctgggcctttgacaatggag

SEQ ID NO: 66364 - DNA, 60 bp, Artificial
  Synthetic oligonucleotide
gagagggaatcaaggagtgaaaggctgggcctttgacaatggagatgacgtgtggatggg

SEQ ID NO: 66365 - DNA, 60 bp, Artificial
  Synthetic oligonucleotide
gagagggaatccaggagtgaaaggctgggcctttgacaatggagatgatgtatggatggg

SEQ ID NO: 66366 - DNA, 60 bp, Artificial
  Synthetic oligonucleotide
agagagggaatcacggagtgaaaggctgggcctttgacaatggagatgacgtgtggatgg

SEQ ID NO: 66367 - DNA, 60 bp, Artificial
  Synthetic oligonucleotide
gagagggaatccgggagtgaaaggctgggcctttgacaatggagatgatgtatggatggg

SEQ ID NO: 66368 - DNA, 60 bp, Artificial
  Synthetic oligonucleotide
gggaatcaaggagtgaaaggctgggcctttgacaatggagatgacgtgtggatgggaaga

SEQ ID NO: 66369 - DNA, 60 bp, Artificial
  Synthetic oligonucleotide
gctcagaccgagtgatggtatcacctctggccgtaacatggtggaataggaatggaccga

SEQ ID NO: 66370 - DNA, 60 bp, Artificial
  Synthetic oligonucleotide
ttcatttacgatgggaggcttgtggacagtattggttcatggtctcaaaatattctcagg

SEQ ID NO: 66371 - DNA, 60 bp, Artificial
  Synthetic oligonucleotide
gttgacagcggtaataggtccggttattctggtattttctctgttgagggcaaaagctgc

SEQ ID NO: 66372 - DNA, 60 bp, Artificial
  Synthetic oligonucleotide
gttgacagcgataataggtccggttattctggtattttctctgttgagggcaaaagctgc

SEQ ID NO: 66373 - DNA, 60 bp, Artificial
  Synthetic oligonucleotide
tgcttgaagtagagcaagagataagaactttctcgtttcagcttatttaatgataaaaaa

SEQ ID NO: 66374 - DNA, 60 bp, Artificial
  Synthetic oligonucleotide
cgaaacgtcaccgtgactcatgccaaggacattcttgagaaaacgcataatggaaagttg

SEQ ID NO: 66375 - DNA, 60 bp, Artificial
  Synthetic oligonucleotide
cgaaacgtcaccgtgactcatgccaaggacattcttgagaaaacgcataatggaaagtta

SEQ ID NO: 66376 - DNA, 60 bp, Artificial
  Synthetic oligonucleotide
cgaaacgtcaccgtgactcatgccaaggacattcttgagaaaacgcataatgggaagttg

SEQ ID NO: 66377 - DNA, 60 bp, Artificial
  Synthetic oligonucleotide
gagcgaaacgtcaccgtgactcatgccaaggacattcttgagaaaacgcataatgggaag

SEQ ID NO: 66378 - DNA, 60 bp, Artificial
  Synthetic oligonucleotide
tacagtagcaggttctctgtcactggcaatcatgatggctgggatctctttctggatgtg

SEQ ID NO: 66379 - DNA, 60 bp, Artificial
  Synthetic oligonucleotide
agcaaaagcaggggagaattctattaaccatgaagactatcattgctttgagctacattt

SEQ ID NO: 66380 - DNA, 60 bp, Artificial
  Synthetic oligonucleotide
agcaaaagcaggggataattctattaaccatgaagactatcattgctttgagctacattt

SEQ ID NO: 66381 - DNA, 60 bp, Artificial
  Synthetic oligonucleotide
gcaaaagcaggggataattctattaaccatgaagactatcattgctttgagctacatttt

SEQ ID NO: 66382 - DNA, 53 bp, Artificial
  Synthetic oligonucleotide
agcaaaagcaggggataattctattaaccatgaagactatcattgctttgagc

SEQ ID NO: 66383 - DNA, 53 bp, Artificial
  Synthetic oligonucleotide
agcaaaagcaggggataattctattaaccatgaagactatcattgctttaagc

SEQ ID NO: 66384 - DNA, 60 bp, Artificial
  Synthetic oligonucleotide
agaacgccactgaaatcagagcatctgttgggagaatggttggtggaatcgggagattct

SEQ ID NO: 66385 - DNA, 60 bp, Artificial
  Synthetic oligonucleotide
tatggaacaggctcatggcctgatggggcgaacatcaatttcatgcctatataagctttc

SEQ ID NO: 66386 - DNA, 60 bp, Artificial
  Synthetic oligonucleotide
cccattgcagagccacagaatacataatgaagggggtatacattaatactgccttgctca

SEQ ID NO: 66387 - DNA, 60 bp, Artificial
  Synthetic oligonucleotide
cccattgcagagccacagaatacataatgaagggggtatacattaatactgccttgctta

SEQ ID NO: 66388 - DNA, 54 bp, Artificial
  Synthetic oligonucleotide
acatttgggtgacaagagaaccttatgtgtcatgcgatcctggcaaatgttatc

SEQ ID NO: 66389 - DNA, 60 bp, Artificial
  Synthetic oligonucleotide
acatttgggtgacaagagaaccttatgtgtcatgcgatcctggcaaatgttatcaatttg

SEQ ID NO: 66390 - DNA, 54 bp, Artificial
  Synthetic oligonucleotide
acatttgggtgacaagagaaccttatgtgtcatgcgaccctggcaagtgttatc

SEQ ID NO: 66391 - DNA, 60 bp, Artificial
  Synthetic oligonucleotide
gagaaccttatgtgtcatgcgatcctggcaagtgttatcaatttgcactcgggcaaggga

SEQ ID NO: 66392 - DNA, 56 bp, Artificial
  Synthetic oligonucleotide
ggggtttatcaaatccttgccatctatgctacagtagcaggttccctgtcactggc

SEQ ID NO: 66393 - DNA, 60 bp, Artificial
  Synthetic oligonucleotide
ggggtttatcaaatccttgccatctatgctacagtagcaggttccctgtcactggcaatc

SEQ ID NO: 66394 - DNA, 60 bp, Artificial
  Synthetic oligonucleotide
gttcgagtctctgagaatctacagagattcgcttggagaaaccgtaatgaggatgggaga

SEQ ID NO: 66395 - DNA, 60 bp, Artificial
  Synthetic oligonucleotide
gggcaaaagctgcatcaataggtgcttttatgtggagttgataaggggaagggaacagga

SEQ ID NO: 66396 - DNA, 60 bp, Artificial
  Synthetic oligonucleotide
catctttattggagatgtgccacagcacacagattggcgggacaaggatggtggacattc

SEQ ID NO: 66397 - DNA, 60 bp, Artificial
  Synthetic oligonucleotide
caggtacctatggaaaaggctcatggcctgatggggcgaatatcaacttcatgcctatat

SEQ ID NO: 66398 - DNA, 60 bp, Artificial
  Synthetic oligonucleotide
ttcaggtacctatggaaaaggctcatggcctgatggggcgaatatcaacttcatgcctat

SEQ ID NO: 66399 - DNA, 60 bp, Artificial
  Synthetic oligonucleotide
gcaattggggtcctcatcggtggacttgaatggaatgataacacagttcgagtctctaaa

SEQ ID NO: 66400 - DNA, 60 bp, Artificial
  Synthetic oligonucleotide
gacaatgaacctggatcgggaaattggccggatggttccaacattgggttcatgcccaag

SEQ ID NO: 66401 - DNA, 51 bp, Artificial
  Synthetic oligonucleotide
taggggagaattctgatgttttagtcacaagagagccatatgtttcttgtg

SEQ ID NO: 66402 - DNA, 60 bp, Artificial
  Synthetic oligonucleotide
gcatgcttctatgttgagttgattcgtggaagaccaaaggaggacaaagtgtggtggacc

SEQ ID NO: 66403 - DNA, 60 bp, Artificial
  Synthetic oligonucleotide
ttgctatagagcatgcttctatgttgagttgattcgtggaagaccaaaggaggacaaagt

SEQ ID NO: 66404 - DNA, 60 bp, Artificial
  Synthetic oligonucleotide
ccacaatgggatatgtccagtagtgttcactgacggttctgctactggtccagcagagac

SEQ ID NO: 66405 - DNA, 60 bp, Artificial
  Synthetic oligonucleotide
gtgtatgccacaatgggatatgtccagtagtgttcactgacggttctgctactggtccag

SEQ ID NO: 66406 - DNA, 60 bp, Artificial
  Synthetic oligonucleotide
cagagtagagtgcattggatggtccagtacaagctgccatgatgggaaagcacgaatgtc

SEQ ID NO: 66407 - DNA, 60 bp, Artificial
  Synthetic oligonucleotide
acagtgtacaataccagagtagagtgcattggatggtccagtacaagctgccatgatggg

SEQ ID NO: 66408 - DNA, 60 bp, Artificial
  Synthetic oligonucleotide
cgtgctttagtgagttggcctttatcatcaccacccacagtgtacaataccagagtagag

SEQ ID NO: 66409 - DNA, 60 bp, Artificial
  Synthetic oligonucleotide
atagatctcaataccgtgctttagtgagttggcctttatcatcaccacccacagtgtaca

SEQ ID NO: 66410 - DNA, 60 bp, Artificial
  Synthetic oligonucleotide
gcatcagcagtggtttggtacaatgggcggcctatcacagaaattaatacgtgggcccga

SEQ ID NO: 66411 - DNA, 60 bp, Artificial
  Synthetic oligonucleotide
atgcatcagcagtggtttggtacaatgggcggcctatcacagaaattaatacgtgggccc

SEQ ID NO: 66412 - DNA, 60 bp, Artificial
  Synthetic oligonucleotide
gcacgaatgtctatatgtgtctcaggtcccaacaacaatgcatcagcagtggtttggtac

SEQ ID NO: 66413 - DNA, 60 bp, Artificial
  Synthetic oligonucleotide
ccatgatgggaaagcacgaatgtctatatgtgtctcaggtcccaacaacaatgcatcagc

SEQ ID NO: 66414 - DNA, 60 bp, Artificial
  Synthetic oligonucleotide
ctgccactgccattgcaataggcacaattgctgtattaataggaatagcaaacttaggtt

SEQ ID NO: 66415 - DNA, 60 bp, Artificial
  Synthetic oligonucleotide
ggtggaccagtaatagcatagtgtcaatgtgttccagcacagagttccttggacaatgga

SEQ ID NO: 66416 - DNA, 60 bp, Artificial
  Synthetic oligonucleotide
aggacaaagtgtggtggaccagtaatagcatagtgtcaatgtgttccagcacagagttcc

SEQ ID NO: 66417 - DNA, 60 bp, Artificial
  Synthetic oligonucleotide
gacccagatgaatgcagattctatgctctcagccaaggaacaacaataagaggaaaacac

SEQ ID NO: 66418 - DNA, 60 bp, Artificial
  Synthetic oligonucleotide
cccagatgaatgcagattctatgctctcagccaaggaacaacaataagaggaaaacactc

SEQ ID NO: 66419 - DNA, 60 bp, Artificial
  Synthetic oligonucleotide
cctgctatggaaaagattcagaaataacatgcacgtgtagggacaattggcaaggctcga

SEQ ID NO: 66420 - DNA, 60 bp, Artificial
  Synthetic oligonucleotide
attggcaaggctcgaatagaccagtgatacaaatagatcccacaatgatgacgcacacta

SEQ ID NO: 66421 - DNA, 60 bp, Artificial
  Synthetic oligonucleotide
actggtccagcagagactaggatatactatttcaaggagggaaaaatcctcaaatgggag

SEQ ID NO: 66422 - DNA, 60 bp, Artificial
  Synthetic oligonucleotide
atgctcctgctatggaaaagattcagaaataacatgcacgtgtagggacaattggcaagg

SEQ ID NO: 66423 - DNA, 60 bp, Artificial
  Synthetic oligonucleotide
caatacatatgcagtcctgtcctcacagacaacccacgtcccaatgaccccacagtagga

SEQ ID NO: 66424 - DNA, 52 bp, Artificial
  Synthetic oligonucleotide
atggtgacaacacctggctaggaagaacaataagcacagcttctagatctgg

SEQ ID NO: 66425 - DNA, 60 bp, Artificial
  Synthetic oligonucleotide
ggcaaggctcgaatagaccagtgatacaaatagatcccacaatgatgacgcacactagtc

SEQ ID NO: 66426 - DNA, 60 bp, Artificial
  Synthetic oligonucleotide
acgcacactagtcaatacatatgcagtcctgtcctcacagacaacccacgtcccaatgac

SEQ ID NO: 66427 - DNA, 60 bp, Artificial
  Synthetic oligonucleotide
gcatatgggaggagctgatagagacttcaacaatctgaccaaagggctctgcacaataaa

SEQ ID NO: 66428 - DNA, 60 bp, Artificial
  Synthetic oligonucleotide
gaggagctgatagagacttcaacaatctgaccaaagggctctgcacaataaattcatggc

SEQ ID NO: 66429 - DNA, 60 bp, Artificial
  Synthetic oligonucleotide
taggggagaattctgatgttttagtcacaagagagccatatgtttcttgtgacccagatg

SEQ ID NO: 66430 - DNA, 60 bp, Artificial
  Synthetic oligonucleotide
ggttacagtgggtctttcattgattactgggcaaaaggggattgctatagagcatgcttc

SEQ ID NO: 66431 - DNA, 60 bp, Artificial
  Synthetic oligonucleotide
gccactgccattgcaataggcacaattgctgtattaataggaatagcaaacttaggtttg

SEQ ID NO: 66432 - DNA, 60 bp, Artificial
  Synthetic oligonucleotide
aacttaggtttgaacataggactacacctgaaaccgagctgcaactgctctaactctcct

SEQ ID NO: 66433 - DNA, 60 bp, Artificial
  Synthetic oligonucleotide
taactctccttctgaagccacaaatgtaagccaaacaataataaacaattactacaatga

SEQ ID NO: 66434 - DNA, 61 bp, Artificial
  Synthetic oligonucleotide
ctctccttctgaagccacaaatgtaagccaaacaataataaacaattactacaatgaaacg

SEQ ID NO: 66435 - DNA, 60 bp, Artificial
  Synthetic oligonucleotide
gattggagtggttacagtgggtctttcattgattactgggcaaaaggggattgctataga

SEQ ID NO: 66436 - DNA, 60 bp, Artificial
  Synthetic oligonucleotide
ctgggaagaacaccgatcttgaggctctcatggaatggctaaagacaagaccaatcctgt

SEQ ID NO: 66437 - DNA, 60 bp, Artificial
  Synthetic oligonucleotide
gctgggaggaacacagatcttgaggctctcatggaatggctaaagacaagaccaatcctg

SEQ ID NO: 66438 - DNA, 60 bp, Artificial
  Synthetic oligonucleotide
tttgctgggaagaacaccgatcttgaggctctcatggaatggctaaagacaagaccaatc

SEQ ID NO: 66439 - DNA, 60 bp, Artificial
  Synthetic oligonucleotide
ctttgctgggaagaacaccgatcttgaggctctcatggaatggctaaagacaagaccaat

SEQ ID NO: 66440 - DNA, 60 bp, Artificial
  Synthetic oligonucleotide
tttgcagggaaaaacacagatctcgaggctctcatggaatggctaaagacaagaccaatc

SEQ ID NO: 66441 - DNA, 60 bp, Artificial
  Synthetic oligonucleotide
ataagtgtgatgatgaatgcatgaatagtgtcaggaatgggacatatgattatcccaaat

SEQ ID NO: 66442 - DNA, 60 bp, Artificial
  Synthetic oligonucleotide
ataaatgtaatgatgaatgcatgaatagtgtcaggaatgggacatatgattatcccaaat

SEQ ID NO: 66443 - DNA, 60 bp, Artificial
  Synthetic oligonucleotide
gtgatgatgaatgcatgaatagtgtcaggaatgggacatatgattatcccaaatatgaag

SEQ ID NO: 66444 - DNA, 60 bp, Artificial
  Synthetic oligonucleotide
ggagaatgacagactccatcaaatcatggagaaaggacatattgagaactcaggagtccg

SEQ ID NO: 66445 - DNA, 60 bp, Artificial
  Synthetic oligonucleotide
aagtgctcagataatatatgcagggaaaatgacagactccatcaaatcatggagaagaga

SEQ ID NO: 66446 - DNA, 60 bp, Artificial
  Synthetic oligonucleotide
gtggacatccttaggcagaatccaacagaggaacaagccgtggacatatgcaaggcagcg

SEQ ID NO: 66447 - DNA, 60 bp, Artificial
  Synthetic oligonucleotide
aaaaagaagtcctacataaacaggacaggaacatttgaattcacaagctttttctatcgt

SEQ ID NO: 66448 - DNA, 60 bp, Artificial
  Synthetic oligonucleotide
aaaaagaagtcctacataaacaggacaggaacatttgaattcacaagctttttctatcgc

SEQ ID NO: 66449 - DNA, 60 bp, Artificial
  Synthetic oligonucleotide
cccattccttgatcggcttcgccgagatcagaagtccctaaggggaagaggcagcactct

SEQ ID NO: 66450 - DNA, 60 bp, Artificial
  Synthetic oligonucleotide
cccattccttgatcggcttcgccgagatcagaagtccctaaggggaagaggcagtactct

SEQ ID NO: 66451 - DNA, 60 bp, Artificial
  Synthetic oligonucleotide
ccccattccttgatcggcttcgccgagatcagaagtccctaaggggaagaggcagtactc

SEQ ID NO: 66452 - DNA, 60 bp, Artificial
  Synthetic oligonucleotide
gcgtactgggatggatcccaggatgtgctctctgatgcaaggatcgactctcccgagaag

SEQ ID NO: 66453 - DNA, 56 bp, Artificial
  Synthetic oligonucleotide
ggggtttatcaaatccttgccatctatgctacagtagcaggttctctgtcactggc

SEQ ID NO: 66454 - DNA, 60 bp, Artificial
  Synthetic oligonucleotide
gtggacacagcatacaacaactggaggttcacgggcttgcgcagtatctggtaatccgtc

SEQ ID NO: 66455 - DNA, 60 bp, Artificial
  Synthetic oligonucleotide
tgatgtgcgtctgtagggataattggcacggttcgaatcgaccatgggtgtctttcaacc

SEQ ID NO: 66456 - DNA, 60 bp, Artificial
  Synthetic oligonucleotide
ctttgtgagcatggagttttctctcactgacccgagacttgagccacataaatgggaaaa

SEQ ID NO: 66457 - DNA, 60 bp, Artificial
  Synthetic oligonucleotide
tgatcaagcgagggatcaatgatcggaatttctggagaggcgaaaatggacggagaacaa

SEQ ID NO: 66458 - DNA, 60 bp, Artificial
  Synthetic oligonucleotide
gcacaggatgtaatcatggaagttgttttcccaaatgaagtgggagcgagaatactaaca

SEQ ID NO: 66459 - DNA, 60 bp, Artificial
  Synthetic oligonucleotide
gcacaggatgtaatcatggaagttgttttcccaaatgaagtgggagccaggatattgaca

SEQ ID NO: 66460 - DNA, 60 bp, Artificial
  Synthetic oligonucleotide
ggcacaggatgtaatcatggaagttgttttcccaaatgaagtgggagccaggatattaac

SEQ ID NO: 66461 - DNA, 60 bp, Artificial
  Synthetic oligonucleotide
gcacaggatgtaatcatggaagttgttttcccaaatgaagtgggagccaggatattaaca

SEQ ID NO: 66462 - DNA, 60 bp, Artificial
  Synthetic oligonucleotide
caggactgtaagattgctcccttaatggtggcatacatgttggaaagagaactggtgcgc

SEQ ID NO: 66463 - DNA, 60 bp, Artificial
  Synthetic oligonucleotide
ggattgcatgataaaagcagtccgaggtgatctgaatttcgtgaacagagcgaaccaacg

SEQ ID NO: 66464 - DNA, 60 bp, Artificial
  Synthetic oligonucleotide
tctcccgaagaggttagtgaaacacagggaacagagaaattgacaataacatattcatca

SEQ ID NO: 66465 - DNA, 60 bp, Artificial
  Synthetic oligonucleotide
cgtagcaatggtgttctcgcaagaggattgcatgataaaagcagtccgaggtgatctgaa

SEQ ID NO: 66466 - DNA, 60 bp, Artificial
  Synthetic oligonucleotide
cacaagaggattgcatgataaaagcagtccgaggtgatctgaatttcgtgaacagagcga

SEQ ID NO: 66467 - DNA, 60 bp, Artificial
  Synthetic oligonucleotide
caggattgtaagattgcccctttaatggtggcatacatgttggaaagagaactggttcgc

SEQ ID NO: 66468 - DNA, 60 bp, Artificial
  Synthetic oligonucleotide
gcattaactgaagacccagatgagggaacagctggagtagaatctgcggtgttgagagga

SEQ ID NO: 66469 - DNA, 60 bp, Artificial
  Synthetic oligonucleotide
aggaactccaggactgtaagattgctcccttaatggtggcatacatgttggaaagagaac

SEQ ID NO: 66470 - DNA, 60 bp, Artificial
  Synthetic oligonucleotide
ctccaggattgtaagattgcccctttaatggtggcatacatgttggaaagagaactggtt

SEQ ID NO: 66471 - DNA, 60 bp, Artificial
  Synthetic oligonucleotide
ggttagtgaaacacagggaacagagaaattgacaataacatattcatcatcgatgatgtg

SEQ ID NO: 66472 - DNA, 60 bp, Artificial
  Synthetic oligonucleotide
cccgaagaggttagtgaaacacagggaacagagaaattgacaataacatattcatcatca

SEQ ID NO: 66473 - DNA, 60 bp, Artificial
  Synthetic oligonucleotide
aacagaagacccagatgagggaacagctggagtggaatctgcggtactgagaggattcct

SEQ ID NO: 66474 - DNA, 60 bp, Artificial
  Synthetic oligonucleotide
ggcgaggagttacgctcaggttatgaaaccttcaaagtcattggtggttggtccacacct

SEQ ID NO: 66475 - DNA, 60 bp, Artificial
  Synthetic oligonucleotide
atgcagcagacaaagaatccactcaaaaggcatttgacagaatcaccaacaaggtaaatt

SEQ ID NO: 66476 - DNA, 58 bp, Artificial
  Synthetic oligonucleotide
agctcaagttgtcacgatggaaaagcatggctgcatgtttgtgtcactgggtatgata

SEQ ID NO: 66477 - DNA, 58 bp, Artificial
  Synthetic oligonucleotide
agctcaagttgtcacgatggaaaagcatggctgcatgtttgtgtcactgggcatgata

SEQ ID NO: 66478 - DNA, 58 bp, Artificial
  Synthetic oligonucleotide
agctcaagtcgtcacgatggaaaagcatggctgcatgtttgtgtcactggggatgaca

SEQ ID NO: 66479 - DNA, 60 bp, Artificial
  Synthetic oligonucleotide
ggatgtgttggacaccataaatttcgagagtactggtaatctaattgcaccggaatatgg

SEQ ID NO: 66480 - DNA, 60 bp, Artificial
  Synthetic oligonucleotide
ctggacggattaagaaagaagagttctccgagatcatgaagatctgttccaccattgaag

SEQ ID NO: 66481 - DNA, 60 bp, Artificial
  Synthetic oligonucleotide
tctcatggaatggctaaagacaagaccaatcctgtcacctctgactaaggggatcttggg

SEQ ID NO: 66482 - DNA, 60 bp, Artificial
  Synthetic oligonucleotide
ctcatggaatggctaaagacaagaccaatcctgtcacctctgactaaggggatcttgggg

SEQ ID NO: 66483 - DNA, 60 bp, Artificial
  Synthetic oligonucleotide
tacagatgtgcactgaactcaaactcagcgactatgaagggaggctgatccaaaacagca

SEQ ID NO: 66484 - DNA, 60 bp, Artificial
  Synthetic oligonucleotide
tcggctgacatgagcattggagtgacagtgataaagaacaacatgataaacaatgacctt

SEQ ID NO: 66485 - DNA, 60 bp, Artificial
  Synthetic oligonucleotide
cgggcaaccttcaaacattgaaaataagagtacatgaggggtatgaagagttcacaatgg

SEQ ID NO: 66486 - DNA, 60 bp, Artificial
  Synthetic oligonucleotide
cagtcttggttctccctggaaatggaaataatcccagctgcaatgaaacagtcattaggg

SEQ ID NO: 66487 - DNA, 60 bp, Artificial
  Synthetic oligonucleotide
tttaaatacggtaatggtgtttggataggaagaactaaaagcactagttcaaggagtgga

SEQ ID NO: 66488 - DNA, 60 bp, Artificial
  Synthetic oligonucleotide
gcacttgactcaaggaacatgctgggaacagatgtacactccaggtggagaagtgaggaa

SEQ ID NO: 66489 - DNA, 60 bp, Artificial
  Synthetic oligonucleotide
agtgttgcacttgactcaaggaacatgctgggaacagatgtacactccaggtggagaagt

SEQ ID NO: 66490 - DNA, 60 bp, Artificial
  Synthetic oligonucleotide
gtattttctctgttgagggcaaaagctgcatcaataggtgcttttatgtggagttgataa

SEQ ID NO: 66491 - DNA, 60 bp, Artificial
  Synthetic oligonucleotide
aatcaaaggagtgaaattgagcaatatgggggtttatcaaatacttgctatatacgctac

SEQ ID NO: 66492 - DNA, 60 bp, Artificial
  Synthetic oligonucleotide
tccagtgctgaacgtgactatgccaaacaatgacaattttgacaaactatacatttgggg

SEQ ID NO: 66493 - DNA, 60 bp, Artificial
  Synthetic oligonucleotide
gttgacagcgataataggtcaggttattctggtattttctctgttgagggcaaaagctgc

SEQ ID NO: 66494 - DNA, 60 bp, Artificial
  Synthetic oligonucleotide
ggtcatatataatggagaaagaaaatccgaggaatggtttgtgctacccaggcagtttca

SEQ ID NO: 66495 - DNA, 60 bp, Artificial
  Synthetic oligonucleotide
cggaaaattatgcaaactaaatggaatccctccacttgaactaggggattgtagcattgc

SEQ ID NO: 66496 - DNA, 60 bp, Artificial
  Synthetic oligonucleotide
gaaattccaaacagcagcacaacgagcaatgatggaccaggtgagggaaagccggaatcc

SEQ ID NO: 66497 - DNA, 60 bp, Artificial
  Synthetic oligonucleotide
agaggtagttcagggatcatgaaaacagaaggaacacttgaaaactgcgagaccaaatgc

SEQ ID NO: 66498 - DNA, 60 bp, Artificial
  Synthetic oligonucleotide
tttgcagggaagaacaccgatcttgaggcactcatggaatggctaaagacaagaccaatc

SEQ ID NO: 66499 - DNA, 60 bp, Artificial
  Synthetic oligonucleotide
caggtacctatgggaaaggctcatggcctgatggggcgaatatcaacttcatgcctatat

SEQ ID NO: 66500 - DNA, 60 bp, Artificial
  Synthetic oligonucleotide
ttcaggtacctatgggaaaggctcatggcctgatggggcgaatatcaacttcatgcctat

SEQ ID NO: 66501 - DNA, 60 bp, Artificial
  Synthetic oligonucleotide
tctctgttgaagccaaaagctgcatcaatcggtgcttttatgtggagttgataaggggaa

SEQ ID NO: 66502 - DNA, 60 bp, Artificial
  Synthetic oligonucleotide
gtgcccagataatatatgcagggagaatgacagactccattaaatcgtggagaaaggaca

SEQ ID NO: 66503 - DNA, 55 bp, Artificial
  Synthetic oligonucleotide
cgtggccatggtattttcacaagaggattgcatgatcaaagcagtccgaggcgat

SEQ ID NO: 66504 - DNA, 60 bp, Artificial
  Synthetic oligonucleotide
cgatctgctctcattctgagaggatcagtggctcataaatcctgcctgcctgcttgtgtg

SEQ ID NO: 66505 - DNA, 60 bp, Artificial
  Synthetic oligonucleotide
gttcgagtctctgaaactctacagagattcgcttggagaagcagtcatgagaatgggaga

SEQ ID NO: 66506 - DNA, 60 bp, Artificial
  Synthetic oligonucleotide
atacaggagaccggttggaatttccagcatggtggaggccatggtgtctagggcccggat

SEQ ID NO: 66507 - DNA, 60 bp, Artificial
  Synthetic oligonucleotide
gaacggctgcattgagggcaagctttctcaaatgtccaaagaagtgaatgccaaaattga

SEQ ID NO: 66508 - DNA, 60 bp, Artificial
  Synthetic oligonucleotide
gaaggctaaactggcaaatgttgtgagaaaaatgatgactaattcacaagacacagagct

SEQ ID NO: 66509 - DNA, 60 bp, Artificial
  Synthetic oligonucleotide
ataaatgtgatgatgaatgcatgaatagtgtaaagaatgggacatatgattatcccaagt

SEQ ID NO: 66510 - DNA, 60 bp, Artificial
  Synthetic oligonucleotide
ggggccaaagaaatagcactcagttattctgctggtgcacttgccagttgcatgggcctc

SEQ ID NO: 66511 - DNA, 60 bp, Artificial
  Synthetic oligonucleotide
taaactttgtgagcatggagttttctctcactgacccgagacttgagccacataaatggg

SEQ ID NO: 66512 - DNA, 60 bp, Artificial
  Synthetic oligonucleotide
taaactttgtgagcatggagttttctctcactgacccgaggcttgagccacataaatggg

SEQ ID NO: 66513 - DNA, 60 bp, Artificial
  Synthetic oligonucleotide
taaattttgtgagcatggagttttctctcactgacccgagacttgagccacataaatggg

SEQ ID NO: 66514 - DNA, 60 bp, Artificial
  Synthetic oligonucleotide
gtaaactttgtgagcatggagttttctctcactgacccgagatttgagccacataaatgg

SEQ ID NO: 66515 - DNA, 60 bp, Artificial
  Synthetic oligonucleotide
gtaaactttgtgagcatggagttttctctcactgacccgagacttgagccacataaatgg

SEQ ID NO: 66516 - DNA, 60 bp, Artificial
  Synthetic oligonucleotide
gctggtaactcctccctttgccccatcagtggttgggccatatacagcaaagacaatggc

SEQ ID NO: 66517 - DNA, 60 bp, Artificial
  Synthetic oligonucleotide
ttgtagcgattactgattggtcaggctatagtgggagcttcgtgcagcatccagagctga

SEQ ID NO: 66518 - DNA, 57 bp, Artificial
  Synthetic oligonucleotide
ctgattggtcaggctatagtgggagcttcgtacagcatccagagctgacagggctga

SEQ ID NO: 66519 - DNA, 60 bp, Artificial
  Synthetic oligonucleotide
gatcccaatggctggacagagactgatggtagtttctctttgaaacaggatattgtagcg

SEQ ID NO: 66520 - DNA, 60 bp, Artificial
  Synthetic oligonucleotide
gacagagactgatggtagcttctctgtgaaacaggatattgtagcgattactgattggtc

SEQ ID NO: 66521 - DNA, 60 bp, Artificial
  Synthetic oligonucleotide
ggtagcttctctgtgaaacaggatattgtagcgattactgattggtcaggctatagtggg

SEQ ID NO: 66522 - DNA, 60 bp, Artificial
  Synthetic oligonucleotide
ctttgaaacaggatattgtagcgattactgattggtcaggctatagtgggagcttcgtgc

SEQ ID NO: 66523 - DNA, 60 bp, Artificial
  Synthetic oligonucleotide
gcagtggagtatttggtgataatcctcgtcctaatgatgggacagggagctgtggcccga

SEQ ID NO: 66524 - DNA, 60 bp, Artificial
  Synthetic oligonucleotide
agcattagttccaggagcggatttgaaatgatttgggatcccaatggctggacagagact

SEQ ID NO: 66525 - DNA, 60 bp, Artificial
  Synthetic oligonucleotide
ccaggagcggatttgaaatgatttgggatcccaatggctggacagagactgatggtagct

SEQ ID NO: 66526 - DNA, 60 bp, Artificial
  Synthetic oligonucleotide
tgaaatgatttgggatcccaatggctggacagagactgatggtagtttctctttgaaaca

SEQ ID NO: 66527 - DNA, 60 bp, Artificial
  Synthetic oligonucleotide
ctgttaccctgattcagggaaagtgatgtgcgtttgtagggataattggcacggttcgaa

SEQ ID NO: 66528 - DNA, 60 bp, Artificial
  Synthetic oligonucleotide
ccctaattaccactacgaggaatgctcctgctaccctgattcagggaaagtgatgtgcgt

SEQ ID NO: 66529 - DNA, 60 bp, Artificial
  Synthetic oligonucleotide
gcgtctgtagggataattggcacggttcgaatcgaccatgggtgtctttcaaccaagacc

SEQ ID NO: 66530 - DNA, 60 bp, Artificial
  Synthetic oligonucleotide
agggaaagtgatgtgcgtttgtagggataattggcacggttcgaatcgaccatgggtgtc

SEQ ID NO: 66531 - DNA, 60 bp, Artificial
  Synthetic oligonucleotide
gcatttccttttgtggtgtgagtggtgacactgtgggttggtcttggccagacggtgctg

SEQ ID NO: 66532 - DNA, 60 bp, Artificial
  Synthetic oligonucleotide
tagcatttccttttgtggtgtaagtggtgacactgtgggttggtcttggccagacggtgc

SEQ ID NO: 66533 - DNA, 60 bp, Artificial
  Synthetic oligonucleotide
tagtgggagtagcatttccttttgtggtgtgagtggtgacactgtgggttggtcttggcc

SEQ ID NO: 66534 - DNA, 60 bp, Artificial
  Synthetic oligonucleotide
ctggactagtgggagtagcatttccttttgtggtgtaagtggtgacactgtgggttggtc

SEQ ID NO: 66535 - DNA, 60 bp, Artificial
  Synthetic oligonucleotide
atgtgcctgcataaatggttcatgttttactgtgatgactgatggcccgagcaatgggca

SEQ ID NO: 66536 - DNA, 60 bp, Artificial
  Synthetic oligonucleotide
atgtgcttgcataaatggttcatgttttactgtgatgactgatggcccgagtaatgggca

SEQ ID NO: 66537 - DNA, 60 bp, Artificial
  Synthetic oligonucleotide
tggttcatgttttactgtgatgactgatggcccgagtaatgggcaggcttcatacaaggt

SEQ ID NO: 66538 - DNA, 60 bp, Artificial
  Synthetic oligonucleotide
gcctgcataaatggttcatgttttactgtgatgactgatggcccgagcaatgggcaggct

SEQ ID NO: 66539 - DNA, 60 bp, Artificial
  Synthetic oligonucleotide
gaccatgggtgtctttcaaccaagacctggagtatcagataggatacatttgcagtggag

SEQ ID NO: 66540 - DNA, 60 bp, Artificial
  Synthetic oligonucleotide
acggttcgaatcgaccatgggtgtctttcaaccaagacctggagtatcagataggataca

SEQ ID NO: 66541 - DNA, 53 bp, Artificial
  Synthetic oligonucleotide
tacgctcaccgtgcccagtgagcgaggactgcagcgtagacgctttgtccaaa

SEQ ID NO: 66542 - DNA, 60 bp, Artificial
  Synthetic oligonucleotide
tcaccgaagagggagcaattgttggcgaaatctcaccattgccttcttttccaggacata

SEQ ID NO: 66543 - DNA, 60 bp, Artificial
  Synthetic oligonucleotide
aagggctttcaccgaagagggagcaattgttggcgaaatctcaccattgccttcttttcc

SEQ ID NO: 66544 - DNA, 60 bp, Artificial
  Synthetic oligonucleotide
ctaaggggtttcaccgaagagggagcaattgttggcgaaatctcaccattgccttctttt

SEQ ID NO: 66545 - DNA, 60 bp, Artificial
  Synthetic oligonucleotide
gggtttcaccgaagagggagcaattgttggcgaaatctcaccattgccttcttttccagg

SEQ ID NO: 66546 - DNA, 60 bp, Artificial
  Synthetic oligonucleotide
ggctttcaccgaagagggagcaattgttggcgaaatctcaccattgccttcttttccagg

SEQ ID NO: 66547 - DNA, 60 bp, Artificial
  Synthetic oligonucleotide
ctaagggctttcaccgaagagggagcaattgttggcgaaatctcaccattgccttctttt

SEQ ID NO: 66548 - DNA, 60 bp, Artificial
  Synthetic oligonucleotide
acgggaaactgaataggttaatcgagaaaacgaacgagaaattccatcaaatcgaaaagg

SEQ ID NO: 66549 - DNA, 60 bp, Artificial
  Synthetic oligonucleotide
aacgggaaactgaataggttaatcgagaaaacgaacgagaaattccatcaaatcgaaaag

SEQ ID NO: 66550 - DNA, 60 bp, Artificial
  Synthetic oligonucleotide
aacgggaaattgaataggttaatcgagaaaacgaacgagaaattccatcaaatcgaaaaa

SEQ ID NO: 66551 - DNA, 60 bp, Artificial
  Synthetic oligonucleotide
aatgggaaactgaatagggtaatcgagaagacgaacgagaaattccatcaaatcgaaaag

SEQ ID NO: 66552 - DNA, 60 bp, Artificial
  Synthetic oligonucleotide
aacgggaaattgaattggttaatcgagaaaacgaacgagaaattccatcaaatcgaaaaa

SEQ ID NO: 66553 - DNA, 60 bp, Artificial
  Synthetic oligonucleotide
cgctgactgtgaatgtgagaggatcaggaatgaggatactggtaagaggcaattctccag

SEQ ID NO: 66554 - DNA, 60 bp, Artificial
  Synthetic oligonucleotide
acatttgggtgacaagagaaccttatgtgtcatgcgatcctggcaagtgttatcaatttg

SEQ ID NO: 66555 - DNA, 54 bp, Artificial
  Synthetic oligonucleotide
acatttgggtgacaagagaaccttatgtgtcatgcgatcctggcaagtgttatc

SEQ ID NO: 66556 - DNA, 60 bp, Artificial
  Synthetic oligonucleotide
cgggactctagcatacttactgacagccagacagcgaccaaaaggattcgaatggccatc

SEQ ID NO: 66557 - DNA, 60 bp, Artificial
  Synthetic oligonucleotide
acggaaacgggactctagcatacttactgacagccagacagcgaccaaaaggattcgaat

SEQ ID NO: 66558 - DNA, 60 bp, Artificial
  Synthetic oligonucleotide
ccccttgatggtagcatacatgctagaaagagagttagtccgcaaaacgaggttcctccc

SEQ ID NO: 66559 - DNA, 60 bp, Artificial
  Synthetic oligonucleotide
cccctttgatggtagcatacatgctagaaagagagttagtccgcaaaacaagattcctcc

SEQ ID NO: 66560 - DNA, 54 bp, Artificial
  Synthetic oligonucleotide
gctcagaccgagtgatggtatcacctctggccgtgacgtggtggaacaggaatg

SEQ ID NO: 66561 - DNA, 60 bp, Artificial
  Synthetic oligonucleotide
ccccttgatggtagcatacatgctagaaagagagttagtccgcaaaacaaggttcctccc

SEQ ID NO: 66562 - DNA, 60 bp, Artificial
  Synthetic oligonucleotide
atttggcttcaaaacgggtaatgatgtatggttgggaaggactgtatcaactagtggaag

SEQ ID NO: 66563 - DNA, 60 bp, Artificial
  Synthetic oligonucleotide
cgggtaatgatgtatggttgggaaggactgtatcaactagtggaagatcaggctttgaaa

SEQ ID NO: 66564 - DNA, 60 bp, Artificial
  Synthetic oligonucleotide
cactgttatacatgagaaaataggagaccaccaaactgtggtatatccaacaatagcagc

SEQ ID NO: 66565 - DNA, 60 bp, Artificial
  Synthetic oligonucleotide
ttccgaggtttcttcccctttcacaaggacaatgcaatacgattgggtgagaacaaagac

SEQ ID NO: 66566 - DNA, 60 bp, Artificial
  Synthetic oligonucleotide
gtctgaatgtcaatgcattgacgggacttgtgttgtagctgttacagatggtcctgcggc

SEQ ID NO: 66567 - DNA, 60 bp, Artificial
  Synthetic oligonucleotide
gaatctgattttcaacactgttatacatgagaaaataggagaccaccaaactgtggtata

SEQ ID NO: 66568 - DNA, 60 bp, Artificial
  Synthetic oligonucleotide
gtcctgcggctaatagtgcagaccaccgaatttactggatacgagaagggaaggtaataa

SEQ ID NO: 66569 - DNA, 60 bp, Artificial
  Synthetic oligonucleotide
aaggtaataaagtatgaaaacattcccaaaacaaagatacaacatttggaggagtgttct

SEQ ID NO: 66570 - DNA, 60 bp, Artificial
  Synthetic oligonucleotide
ggagtgttcttgttatgtggacatcgatgtgtactgcatatgtagggacaattggaaagg

SEQ ID NO: 66571 - DNA, 60 bp, Artificial
  Synthetic oligonucleotide
ggaaaggttccaacaggccttggatgaggatcaacaatgagaccatactagaaacagggt

SEQ ID NO: 66572 - DNA, 60 bp, Artificial
  Synthetic oligonucleotide
ctagaaacagggtatgtatgtagcaaattccattcagatacccccaggccagccgatcct

SEQ ID NO: 66573 - DNA, 60 bp, Artificial
  Synthetic oligonucleotide
gcattgacgggacttgtgttgtagctgttacagatggtcctgcggctaatagtgcagacc

SEQ ID NO: 66574 - DNA, 60 bp, Artificial
  Synthetic oligonucleotide
gactccattaaatcatggagaaaggatatactaagaactcaagagtctgaatgtcaatgc

SEQ ID NO: 66575 - DNA, 60 bp, Artificial
  Synthetic oligonucleotide
gggacagctccagtactgggtaattacaaggagatatgtattgcttggtcaagtagcagt

SEQ ID NO: 66576 - DNA, 60 bp, Artificial
  Synthetic oligonucleotide
cacagcaatggaaccatcaaggacaggacaccatatcgatcgctgatccggttcccaata

SEQ ID NO: 66577 - DNA, 60 bp, Artificial
  Synthetic oligonucleotide
gctggtcttttgccctcgcccaaggggctctactggggactaaacacagcaatggaacca

SEQ ID NO: 66578 - DNA, 60 bp, Artificial
  Synthetic oligonucleotide
gttcccaatagggacagctccagtactgggtaattacaaggagatatgtattgcttggtc

SEQ ID NO: 66579 - DNA, 60 bp, Artificial
  Synthetic oligonucleotide
ccatcaaggacaggacaccatatcgatcgctgatccggttcccaatagggacagctccag

SEQ ID NO: 66580 - DNA, 60 bp, Artificial
  Synthetic oligonucleotide
gaacaaagacgtaatagtcacaagggagccttatgtcagttgtgacaatgatgattgctg

SEQ ID NO: 66581 - DNA, 60 bp, Artificial
  Synthetic oligonucleotide
ccgaggtttcttcccctttcacaaggacaatgcaatacgattgggtgagaacaaagacgt

SEQ ID NO: 66582 - DNA, 60 bp, Artificial
  Synthetic oligonucleotide
atgattgctggtcttttgccctcgcccaaggggctctactggggactaaacacagcaatg

SEQ ID NO: 66583 - DNA, 60 bp, Artificial
  Synthetic oligonucleotide
agtcacaagggagccttatgtcagttgtgacaatgatgattgctggtcttttgccctcgc

SEQ ID NO: 66584 - DNA, 50 bp, Artificial
  Synthetic oligonucleotide
ggttactcagggagtttcattgttgagaacaatggctgttttcagccctg

SEQ ID NO: 66585 - DNA, 60 bp, Artificial
  Synthetic oligonucleotide
ctagtggaagatcaggctttgaaatcatcaaagtcacagaggggtggattaactccccca

SEQ ID NO: 66586 - DNA, 60 bp, Artificial
  Synthetic oligonucleotide
gagcaaaagcaggtgcgagatgaatccaaatcagaagataataacaatcggggtagtgaa

SEQ ID NO: 66587 - DNA, 60 bp, Artificial
  Synthetic oligonucleotide
cagaccttggatgagaatcaacaacgagactatagtagaaacaggatatgtgtgcagcaa

SEQ ID NO: 66588 - DNA, 60 bp, Artificial
  Synthetic oligonucleotide
gacaatgaacctggatcgggaaattggccggatggttctaatattgggtttatgcccaag

SEQ ID NO: 66589 - DNA, 60 bp, Artificial
  Synthetic oligonucleotide
ccaacaataacgacccctgcaataccgaactgcagtgacactataataacatacaataac

SEQ ID NO: 66590 - DNA, 60 bp, Artificial
  Synthetic oligonucleotide
gcaggtgcgagatgaatccaaatcagaagataataacaatcggggtagtgaacaccactc

SEQ ID NO: 66591 - DNA, 60 bp, Artificial
  Synthetic oligonucleotide
cagaccttggatgagaatcaacaacgagactatactggaaacagggtatgtgtgcagtaa

SEQ ID NO: 66592 - DNA, 60 bp, Artificial
  Synthetic oligonucleotide
accttggatgagaatcaacaacgagactatactggaaacagggtatgtgtgtagtaaatt

SEQ ID NO: 66593 - DNA, 60 bp, Artificial
  Synthetic oligonucleotide
agcaaaagcaggtgcgagatgaatccaaatcagaagataataacaatcggggtagtgaat

SEQ ID NO: 66594 - DNA, 60 bp, Artificial
  Synthetic oligonucleotide
gcaggtgcgagatgaatccaaatcagaagataataacaatcggtgtagtgaatactactc

SEQ ID NO: 66595 - DNA, 60 bp, Artificial
  Synthetic oligonucleotide
gcaggtgcgagatgaatccaaatcagaagataataacaatcggggtagtgaataccactc

SEQ ID NO: 66596 - DNA, 60 bp, Artificial
  Synthetic oligonucleotide
agcaaaagcaggtgcgagatgaatccaaatcagaagataataacaatcggggtagtgaac

SEQ ID NO: 66597 - DNA, 60 bp, Artificial
  Synthetic oligonucleotide
agcaaaagcaggtgcgagatgaatccaaatcagaagataataacaatcggtgtagtgaat

SEQ ID NO: 66598 - DNA, 60 bp, Artificial
  Synthetic oligonucleotide
accttggatgagaatcaacaacgagactatactggaaacagggtatgtgtgcagtaaatt

SEQ ID NO: 66599 - DNA, 60 bp, Artificial
  Synthetic oligonucleotide
catggactccaataccctagaactaagaagcagatactgggccataaggaccagaagtgg

SEQ ID NO: 66600 - DNA, 60 bp, Artificial
  Synthetic oligonucleotide
tagtttataagagtcaattggtgtggatggcatcatactttgttgcatttgaggatttaa

SEQ ID NO: 66601 - DNA, 60 bp, Artificial
  Synthetic oligonucleotide
aagaggggttcagattgctctaaatgagaatgtgggagccatggactccaataccctaga

SEQ ID NO: 66602 - DNA, 60 bp, Artificial
  Synthetic oligonucleotide
taggtgcttttatgtggagttgataaggggaaggccacaggagactagagtatggtggac

SEQ ID NO: 66603 - DNA, 60 bp, Artificial
  Synthetic oligonucleotide
cgaatggtctgacagctaatgaatcgggaaggctaatagatttcctcaaggatgtgatag

SEQ ID NO: 66604 - DNA, 60 bp, Artificial
  Synthetic oligonucleotide
cgaacggtctaacagctaatgaatcgggaaggctaatagatttcctcaaggatgtgatgg

SEQ ID NO: 66605 - DNA, 60 bp, Artificial
  Synthetic oligonucleotide
gtcgaacggtctaacagctaatgaatcgggaaggctaatagatttcctcaaggatgtgat

SEQ ID NO: 66606 - DNA, 60 bp, Artificial
  Synthetic oligonucleotide
atatttgggtgacaagagaaccttatgtgtcatgcgatcctggcaagtgttatcaatttg

SEQ ID NO: 66607 - DNA, 56 bp, Artificial
  Synthetic oligonucleotide
aattccacagaaaaggtcgacacaattctagagaggaatgtcaccgtgactcacgc

SEQ ID NO: 66608 - DNA, 50 bp, Artificial
  Synthetic oligonucleotide
cactcacaacctgaagcaaccaatgcaagccaaacaataataaacaacta

SEQ ID NO: 66609 - DNA, 60 bp, Artificial
  Synthetic oligonucleotide
gggtcctcaccggaggacttgaatggaatgataacacagttcgagtctctgaaactctac

SEQ ID NO: 66610 - DNA, 60 bp, Artificial
  Synthetic oligonucleotide
tcggggttatttcaaaatgcgcactgggaaaagctcaataatgaggtcagatgcacctat

SEQ ID NO: 66611 - DNA, 60 bp, Artificial
  Synthetic oligonucleotide
ggggttatttcaaaatgcgcactgggaaaagctcaataatgaggtcagatgcacctattg

SEQ ID NO: 66612 - DNA, 60 bp, Artificial
  Synthetic oligonucleotide
acgaactgggaaaagctcaataatgaggtcagatgcacccattggcacctgcagttctga

SEQ ID NO: 66613 - DNA, 60 bp, Artificial
  Synthetic oligonucleotide
ggggacagagaaactgacaataacttactcatcgtcaatgatgtgggagattaatggccc

SEQ ID NO: 66614 - DNA, 60 bp, Artificial
  Synthetic oligonucleotide
acagggaacagagagactgacaataacttactcatcgtcaatgatgtgggagattaacgg

SEQ ID NO: 66615 - DNA, 60 bp, Artificial
  Synthetic oligonucleotide
gtaccttcgatcttggagggctatatgaagcaattgaggagtgcctgattaatgatccct

SEQ ID NO: 66616 - DNA, 60 bp, Artificial
  Synthetic oligonucleotide
ggtgttgcatttaacccagggaacatgctgggagcagatgtacactccaggaggggaagt

SEQ ID NO: 66617 - DNA, 60 bp, Artificial
  Synthetic oligonucleotide
gtgttgcatttaacccagggaacatgctgggagcagatgtacactccaggaggggaagtg

SEQ ID NO: 66618 - DNA, 60 bp, Artificial
  Synthetic oligonucleotide
caggaagacaagagaagaatcccgcactcaggatgaaatggatgatggcaatgaaatatc

SEQ ID NO: 66619 - DNA, 60 bp, Artificial
  Synthetic oligonucleotide
gagggcaaaagctgcatcaataggtgcttttatgtggagttgataaggggaaggagacaa

SEQ ID NO: 66620 - DNA, 60 bp, Artificial
  Synthetic oligonucleotide
cggaacttgcacagtagtaatgactgatggaagtgcatcaggaagagccgatacaaggat

SEQ ID NO: 66621 - DNA, 60 bp, Artificial
  Synthetic oligonucleotide
ggacttgcacagtagtaatgactgatggaagtgcatcaggaagagccgatactagaatac

SEQ ID NO: 66622 - DNA, 60 bp, Artificial
  Synthetic oligonucleotide
gaaagggcaacaacacagcaacactgtgcctgggacatcatgcggtgccaaacggaacgc

SEQ ID NO: 66623 - DNA, 60 bp, Artificial
  Synthetic oligonucleotide
cacagatctcgaggctctcatggaatggctaaagacaagaccaatcctgtcacctctgac

SEQ ID NO: 66624 - DNA, 60 bp, Artificial
  Synthetic oligonucleotide
gttggaatttccagcatggtggaggccatggtgtctagggcccgaattgatgcacgaatt

SEQ ID NO: 66625 - DNA, 60 bp, Artificial
  Synthetic oligonucleotide
ccggttggaatttccagcatggtggaggccatggtgtctagggcccgaattgatgcacga

SEQ ID NO: 66626 - DNA, 60 bp, Artificial
  Synthetic oligonucleotide
gttggaatttccagcatggtggaggccatggtgtctagggcccgaattgatgcgcgaatt

SEQ ID NO: 66627 - DNA, 60 bp, Artificial
  Synthetic oligonucleotide
acggaacaatacacgataggtcccagtatcgcgccctaataagctggccactatcatcac

SEQ ID NO: 66628 - DNA, 50 bp, Artificial
  Synthetic oligonucleotide
ggtgtcagatgtgtctgcagagacaactggaaaggctccaataggcccat

SEQ ID NO: 66629 - DNA, 57 bp, Artificial
  Synthetic oligonucleotide
agtgccccaaatatgtaaagtcagatagattggttttggcgacagggctaagaaatg

SEQ ID NO: 66630 - DNA, 60 bp, Artificial
  Synthetic oligonucleotide
gaaatagccacaagacctaaagtgaatggacaaggaggtagaatggaattctcgtggact

SEQ ID NO: 66631 - DNA, 60 bp, Artificial
  Synthetic oligonucleotide
atgttgtgagaaaaatgatgactaattcacaagacacagaactctctttcacaattactg

SEQ ID NO: 66632 - DNA, 60 bp, Artificial
  Synthetic oligonucleotide
acggtcttatgaacagatggaaactgatggggaacgccagaatgcaactgagatcagggc

SEQ ID NO: 66633 - DNA, 60 bp, Artificial
  Synthetic oligonucleotide
ccagctcatggtccagccaagagcatggaatatgatgctgttgctactacacactcctgg

SEQ ID NO: 66634 - DNA, 60 bp, Artificial
  Synthetic oligonucleotide
cctcttttgacatgagtaatgagggatcttatttcttcggagacaatgcagaagagtacg

SEQ ID NO: 66635 - DNA, 60 bp, Artificial
  Synthetic oligonucleotide
tcatgaaaacagaaggaacacttgaaaactgcgaaactaaatgccaaactcccttgggag

SEQ ID NO: 66636 - DNA, 60 bp, Artificial
  Synthetic oligonucleotide
gtgggacaccataaatttcgagagtactggtaacctaattgcaccagagtatggtttcaa

SEQ ID NO: 66637 - DNA, 60 bp, Artificial
  Synthetic oligonucleotide
tcaggcatcatgaaaacagaaggaacacttgaaaactgcgaaactaaatgccaaactccc

SEQ ID NO: 66638 - DNA, 60 bp, Artificial
  Synthetic oligonucleotide
gcatgtatgcatgacagggaacgataatgatgcaagtgcccagataatatatgcagggag

SEQ ID NO: 66639 - DNA, 60 bp, Artificial
  Synthetic oligonucleotide
taatggactccaacactgtgtcaagctttcaggtagactgtttcctttggcatatccgca

SEQ ID NO: 66640 - DNA, 60 bp, Artificial
  Synthetic oligonucleotide
catatggactccaacactgtgtcaagctttcaggtagactgtttcctttggcatatccgc

SEQ ID NO: 66641 - DNA, 60 bp, Artificial
  Synthetic oligonucleotide
ctctcatggagtggctaaagacaagaccaatcctgtcacctctgactaaggggattttag

SEQ ID NO: 66642 - DNA, 60 bp, Artificial
  Synthetic oligonucleotide
cagggatcaggatatgcagcagacaaagaatccactcaaaaggcaattgatgggataact

SEQ ID NO: 66643 - DNA, 60 bp, Artificial
  Synthetic oligonucleotide
atgatcagggatcaggatatgcagcagacaaagaatccactcaaaaggcaattgatggga

SEQ ID NO: 66644 - DNA, 60 bp, Artificial
  Synthetic oligonucleotide
ggtatgcagcagacaaagaatccactcaaaaggcatttgacagaatcaccaacaaggtaa

SEQ ID NO: 66645 - DNA, 60 bp, Artificial
  Synthetic oligonucleotide
cacagatgtggtaaactttgtgagcatggagttttctctcactgacccgaggcttgagcc

SEQ ID NO: 66646 - DNA, 60 bp, Artificial
  Synthetic oligonucleotide
cttactcatcgtcaatgatgtgggagattaatggccctgagtcagtgttggttaatacct

SEQ ID NO: 66647 - DNA, 60 bp, Artificial
  Synthetic oligonucleotide
agagagactgacaataacttactcatcgtcaatgatgtgggagattaacggccctgagtc

SEQ ID NO: 66648 - DNA, 60 bp, Artificial
  Synthetic oligonucleotide
gagactgacaataacttactcatcgtcaatgatgtgggagattaacggccctgagtcggt

SEQ ID NO: 66649 - DNA, 60 bp, Artificial
  Synthetic oligonucleotide
ctgacgataacttactcatcgtcaatgatgtgggagattaatggccctgagtcagtgttg

SEQ ID NO: 66650 - DNA, 60 bp, Artificial
  Synthetic oligonucleotide
ataacttactcatcgtcaatgatgtgggagattaatggccctgagtcagtgttggtcaat

SEQ ID NO: 66651 - DNA, 60 bp, Artificial
  Synthetic oligonucleotide
ctatatgaagcaatcgaggagtgcctgattaatgatccctgggttttgcttaatgcatct

SEQ ID NO: 66652 - DNA, 60 bp, Artificial
  Synthetic oligonucleotide
ccatttgaatggatgtcaatccgaccttacttttcttaaaagttccagcgcaaaatgcca

SEQ ID NO: 66653 - DNA, 60 bp, Artificial
  Synthetic oligonucleotide
cattctgagaggatcagtggctcataagtcctgcctgcctgcttgtgtatatggacttgc

SEQ ID NO: 66654 - DNA, 60 bp, Artificial
  Synthetic oligonucleotide
tggaaaggttccaacagaccttggatgagaatcaacaacgagactatagtagaaacagga

SEQ ID NO: 66655 - DNA, 60 bp, Artificial
  Synthetic oligonucleotide
gtagggataattggaagggttctaacagaccttggatgagaatcaacaacgagactatac

SEQ ID NO: 66656 - DNA, 60 bp, Artificial
  Synthetic oligonucleotide
gtagggacaattggaagggttctaacagaccttggatgagaatcaacaacgagactatac

SEQ ID NO: 66657 - DNA, 60 bp, Artificial
  Synthetic oligonucleotide
tgtatatgtagggacaattggaagggttctaacagaccttggatgagaatcaacaacgag

SEQ ID NO: 66658 - DNA, 60 bp, Artificial
  Synthetic oligonucleotide
gtctcattgagtcctggaatgatgatgggcatgttcaacatgctaagtacagtcttagga

SEQ ID NO: 66659 - DNA, 60 bp, Artificial
  Synthetic oligonucleotide
gttcctgttatcctcgatatcctggtgtcagatgtatctgcagagacaactggaaaggct

SEQ ID NO: 66660 - DNA, 60 bp, Artificial
  Synthetic oligonucleotide
ggagaagacgcacctgctggtcttacccatttgatgatttggcattccaacctgaatgat

SEQ ID NO: 66661 - DNA, 60 bp, Artificial
  Synthetic oligonucleotide
gacgcacctgctggtcttacccatttgatgatttggcattccaacctgaatgatgcaaca

SEQ ID NO: 66662 - DNA, 60 bp, Artificial
  Synthetic oligonucleotide
gtggggacatctgggtgacaagagaaccttatgtgtcatgcgatcctgacaagtgttatc

SEQ ID NO: 66663 - DNA, 60 bp, Artificial
  Synthetic oligonucleotide
ctgtgtcaagctttcaggtagactgctttctttggcatgtccgcaaacgaattgcagacc

SEQ ID NO: 66664 - DNA, 60 bp, Artificial
  Synthetic oligonucleotide
gctttcaggtagactgctttctttggcatgtccgcaaacgaattgcagaccaagaattgg

SEQ ID NO: 66665 - DNA, 60 bp, Artificial
  Synthetic oligonucleotide
ctcagaagtagaagggagaattcaggacctcgagaaatacgttgaagacactaaaataga

SEQ ID NO: 66666 - DNA, 60 bp, Artificial
  Synthetic oligonucleotide
gggcatctgcaggacaaatcagcgtacagcccacattctctgtacagagaaatcttccat

SEQ ID NO: 66667 - DNA, 60 bp, Artificial
  Synthetic oligonucleotide
aatcagctgatatgagcattggagtaacagtgataaagaacaacatgataaacaatgacc

SEQ ID NO: 66668 - DNA, 60 bp, Artificial
  Synthetic oligonucleotide
tgaatcagctgatatgagcattggagtaacagtgataaagaacaacatgataaacaatga

SEQ ID NO: 66669 - DNA, 60 bp, Artificial
  Synthetic oligonucleotide
agtatagtatcaatgtgttccagcacagaattccttggacaatggaactggcctgatggg

SEQ ID NO: 66670 - DNA, 60 bp, Artificial
  Synthetic oligonucleotide
ggagttaatacgtggaagacccaaggaggacaaagtatggtggaccagtaatagtatagt

SEQ ID NO: 66671 - DNA, 60 bp, Artificial
  Synthetic oligonucleotide
cgtgtttttatgtggagttaatacgtggaagacccaaggaggacaaagtatggtggacca

SEQ ID NO: 66672 - DNA, 60 bp, Artificial
  Synthetic oligonucleotide
tggtggaccagcaatagtatagtatcgatgtgttccagcacagaattccttggacaatgg

SEQ ID NO: 66673 - DNA, 60 bp, Artificial
  Synthetic oligonucleotide
ggagttaatacgtggaagacccaaggaggacaaagtatggtggaccagcaatagtatagt

SEQ ID NO: 66674 - DNA, 60 bp, Artificial
  Synthetic oligonucleotide
tggtggaccagtaatagtatagtatcaatgtgttccagcacagaattccttggacaatgg

SEQ ID NO: 66675 - DNA, 60 bp, Artificial
  Synthetic oligonucleotide
ggtggaccagcaatagtatagtatcgatgtgttccagcacagaattccttggacaatgga

SEQ ID NO: 66676 - DNA, 60 bp, Artificial
  Synthetic oligonucleotide
agaccagtaattcgaatagatccagtggcgatgacacatactagtcagtatatatgtagc

SEQ ID NO: 66677 - DNA, 60 bp, Artificial
  Synthetic oligonucleotide
cccactcaaggtcagacaatcgtattgaacactgactggagtggctacagtgggtccttc

SEQ ID NO: 66678 - DNA, 60 bp, Artificial
  Synthetic oligonucleotide
aagagaaccctatgtctcctgtgacccagatgagtgcaggttctatgctctcagccaagg

SEQ ID NO: 66679 - DNA, 60 bp, Artificial
  Synthetic oligonucleotide
tactactttaaggaagggaaaatattaaaatgggaacctctgactggaactgctaagcac

SEQ ID NO: 66680 - DNA, 60 bp, Artificial
  Synthetic oligonucleotide
ttgcagggataattggcagggctcaaatagaccagtaattcaaatagatccagtagcgat

SEQ ID NO: 66681 - DNA, 60 bp, Artificial
  Synthetic oligonucleotide
gtgcagggataattggcagggctcaaatagaccagtaattcaaatagatccactagcaat

SEQ ID NO: 66682 - DNA, 60 bp, Artificial
  Synthetic oligonucleotide
gataattggcagggctcaaatagaccagtaattcaaatagatccagtggcgatgacacat

SEQ ID NO: 66683 - DNA, 60 bp, Artificial
  Synthetic oligonucleotide
ggcagggctcaaatagaccagtaattcaaatagatccagtggcgatgacacatactagtc

SEQ ID NO: 66684 - DNA, 54 bp, Artificial
  Synthetic oligonucleotide
ggcaatgctactatttgctatccatactgtccaaaaaagtaccttgtttctact

SEQ ID NO: 66685 - DNA, 60 bp, Artificial
  Synthetic oligonucleotide
cttgccatttatgctacagtagcaggttctctgtcactggcaatcatgatggctgggatc

SEQ ID NO: 66686 - DNA, 54 bp, Artificial
  Synthetic oligonucleotide
gggttacttcaaaatacgaaatgggaaaagctcaataatgagatcagatgcacc

SEQ ID NO: 66687 - DNA, 60 bp, Artificial
  Synthetic oligonucleotide
tatcctagatatcctggcgtcagatgtgtctgcagagacaactggaaaggctctaatagg

SEQ ID NO: 66688 - DNA, 60 bp, Artificial
  Synthetic oligonucleotide
ggaaaatgagaggacacttgactttcatgattctaatgtcaagaatctgtatgataaagt

SEQ ID NO: 66689 - DNA, 61 bp, Artificial
  Synthetic oligonucleotide
ggaaaatgagaggacacttgactttcatgattctaatgtcaagaatctgtatgataaagtc

SEQ ID NO: 66690 - DNA, 60 bp, Artificial
  Synthetic oligonucleotide
ggattgtttggggcaatagctggctttatagaaggaggatggcaaggaatggttgatggt

SEQ ID NO: 66691 - DNA, 60 bp, Artificial
  Synthetic oligonucleotide
caacaaggcctaaagtgaatggacaaggaggtagaatggaattctcttggaccctattgg

SEQ ID NO: 66692 - DNA, 56 bp, Artificial
  Synthetic oligonucleotide
acgagggatcttatttcttcggagacaatgcagaggagtatgacaattaaagaaaa

SEQ ID NO: 66693 - DNA, 60 bp, Artificial
  Synthetic oligonucleotide
cagatccactagcatctttattggagatgtgccacagcacacaaattggcgggacaagga

SEQ ID NO: 66694 - DNA, 60 bp, Artificial
  Synthetic oligonucleotide
cagcagatccactagcatctttattggagatgtgccacagcacacaaattggcgggacaa

SEQ ID NO: 66695 - DNA, 60 bp, Artificial
  Synthetic oligonucleotide
aagaaatagcactcagttattctgctggtgcacttgccagttgcatgggcctcatataca

SEQ ID NO: 66696 - DNA, 60 bp, Artificial
  Synthetic oligonucleotide
acaccactctgtcaacaatagcccttctcattggggtgggaaatttagttttcaacacag

SEQ ID NO: 66697 - DNA, 60 bp, Artificial
  Synthetic oligonucleotide
ctgtggactagacaatgaacctggatcggggaattggccggatggttctaatattgggtt

SEQ ID NO: 66698 - DNA, 60 bp, Artificial
  Synthetic oligonucleotide
agacaagaccaatcctgtcacctctgactaaggggattttaggatttgtgttcacgctca

SEQ ID NO: 66699 - DNA, 60 bp, Artificial
  Synthetic oligonucleotide
cctggaacctggaacctttgatcttggaggactatatgaagcaattgaggagtgcctgat

SEQ ID NO: 66700 - DNA, 60 bp, Artificial
  Synthetic oligonucleotide
cgtgtttttatgtagagttaatacgcggaagacccaaggaggacaaagtatggtggacca

SEQ ID NO: 66701 - DNA, 60 bp, Artificial
  Synthetic oligonucleotide
gtgccagcgcaaaatgctataagcactacattcccttatactggagatcctccatacagc

SEQ ID NO: 66702 - DNA, 54 bp, Artificial
  Synthetic oligonucleotide
ggggtttaccaaatccttgccatttatgctacagtagcaggttccctgtcactg

SEQ ID NO: 66703 - DNA, 52 bp, Artificial
  Synthetic oligonucleotide
gagcatctgcaggacaaatcagcgtacagcccacattttctgtacagagaaa

SEQ ID NO: 66704 - DNA, 60 bp, Artificial
  Synthetic oligonucleotide
gagcatctgcaggacaaatcagcgtacagcccacattttctgtacagagaaatctcccat

SEQ ID NO: 66705 - DNA, 60 bp, Artificial
  Synthetic oligonucleotide
gagcatctgcaggacaaatcagcgtacagcccacattttctgtacagagaaatctcccgt

SEQ ID NO: 66706 - DNA, 60 bp, Artificial
  Synthetic oligonucleotide
gctcctcggtacattactgatatgagcatagaggaaataagcagggaatggtacatgctc

SEQ ID NO: 66707 - DNA, 60 bp, Artificial
  Synthetic oligonucleotide
ctgctcctcggtacattactgatatgagcatagaggaaataagcagggaatggtacatgc

SEQ ID NO: 66708 - DNA, 57 bp, Artificial
  Synthetic oligonucleotide
cattaaagggaagaggcagcacacttggactcgacttgcgagtggccacaatggaag

SEQ ID NO: 66709 - DNA, 60 bp, Artificial
  Synthetic oligonucleotide
ctcaaaattgcaattgcatccagccctgctcctcggtacattaccgatatgagcatagag

SEQ ID NO: 66710 - DNA, 60 bp, Artificial
  Synthetic oligonucleotide
aaataacagggggtctgatggtgaaaatggatcaggccatcatggacaagaggataatac

SEQ ID NO: 66711 - DNA, 60 bp, Artificial
  Synthetic oligonucleotide
gcagggtgacaaatacataatggactccaacacgataacctcgttccaggtagattgcta

SEQ ID NO: 66712 - DNA, 60 bp, Artificial
  Synthetic oligonucleotide
agacatgtgtgatgctccctttgatgacagactcagaagagatcaaaaggcattaaaggg

SEQ ID NO: 66713 - DNA, 60 bp, Artificial
  Synthetic oligonucleotide
ctccctttgatgacagactcagaagagatcaaaaggcattaaagggaagaggcagcacac

SEQ ID NO: 66714 - DNA, 60 bp, Artificial
  Synthetic oligonucleotide
gcttcgagcagataacattcttgcaggcattgcaactcttacttgaagttgagagtgaga

SEQ ID NO: 66715 - DNA, 60 bp, Artificial
  Synthetic oligonucleotide
atggcgccattgtagctgaaatatctcccattccctccatgccaggacattctacagagg

SEQ ID NO: 66716 - DNA, 60 bp, Artificial
  Synthetic oligonucleotide
gcgccattgtagctgaaatatctcccattccctccatgccaggacattctacagaggatg

SEQ ID NO: 66717 - DNA, 60 bp, Artificial
  Synthetic oligonucleotide
cagctggaaacattagtctcactgagggctttcacagatgatggcgccattgtagctgaa

SEQ ID NO: 66718 - DNA, 60 bp, Artificial
  Synthetic oligonucleotide
cctatttgatcaactggaaacattagtctcactgagggctttcacagacgatggcgccat

SEQ ID NO: 66719 - DNA, 52 bp, Artificial
  Synthetic oligonucleotide
ggggtctgatggtgaaaatggatcaggccatcatggacaagaggataatact

SEQ ID NO: 66720 - DNA, 60 bp, Artificial
  Synthetic oligonucleotide
cctatttgatcagctggaaacattagtctcactgagggctttcacagatgatggcgccat

SEQ ID NO: 66721 - DNA, 60 bp, Artificial
  Synthetic oligonucleotide
aaactgagaacagcttcgagcagataacattcttgcaggcattgcaactcttacttgaag

SEQ ID NO: 66722 - DNA, 60 bp, Artificial
  Synthetic oligonucleotide
gatggctaattgcagagtgcagaaacatattaaccaaaactgagaacagcttcgagcaga

SEQ ID NO: 66723 - DNA, 60 bp, Artificial
  Synthetic oligonucleotide
gatggctaattgcagagtgcagaaatatactaaccaaaactgagaacagcttcgagcaga

SEQ ID NO: 66724 - DNA, 60 bp, Artificial
  Synthetic oligonucleotide
gtttgaagagatcagatggctaattgcagagtgcagaaatatactaaccaaaactgagaa

SEQ ID NO: 66725 - DNA, 60 bp, Artificial
  Synthetic oligonucleotide
agagttggtccgcaaaacgaggttcctcccagtggctggtggaacaagcagtgtctatat

SEQ ID NO: 66726 - DNA, 60 bp, Artificial
  Synthetic oligonucleotide
agagttggtccgcaaaacgaggttcctcccagtggctggtggaacaagcagtgtatatat

SEQ ID NO: 66727 - DNA, 60 bp, Artificial
  Synthetic oligonucleotide
aaatatctggaagaacatcccagcgcggggaaggatcctaagaaaactggaggacccata

SEQ ID NO: 66728 - DNA, 57 bp, Artificial
  Synthetic oligonucleotide
gacaatggagatgacgtgtggatgggaagaacgatcagcaaggatttacgctcaggt

SEQ ID NO: 66729 - DNA, 60 bp, Artificial
  Synthetic oligonucleotide
gggagattctacatacagatgtgcactgaactcaaactcagcgattatgaagggagactg

SEQ ID NO: 66730 - DNA, 60 bp, Artificial
  Synthetic oligonucleotide
ctggaatgatgatgggcatgttcaacatgctaagtacagttttaggagtctcaatcctaa

SEQ ID NO: 66731 - DNA, 60 bp, Artificial
  Synthetic oligonucleotide
actcactgagtgacatcaaaatcatggcgtcccaaggcaccaaacggtcttatgaacaga

SEQ ID NO: 66732 - DNA, 60 bp, Artificial
  Synthetic oligonucleotide
atggaagttgttttcccaaatgaagtgggagccaggatattgacatcggagtcacagctg

SEQ ID NO: 66733 - DNA, 60 bp, Artificial
  Synthetic oligonucleotide
tatcaatgaactaagcaatcttgcgaagggagagaaggctaatgtgctaattgggcaagg

SEQ ID NO: 66734 - DNA, 60 bp, Artificial
  Synthetic oligonucleotide
taagaatgcatgaggggtatgaagaattcacaatggttgggagaagagcaacagccattc

SEQ ID NO: 66735 - DNA, 60 bp, Artificial
  Synthetic oligonucleotide
taagagtgcatgaggggtatgaagaattcacaatggttgggagaagagcaacagccattc

SEQ ID NO: 66736 - DNA, 60 bp, Artificial
  Synthetic oligonucleotide
cagtgagaggagaccagatatgcattggataccatgccaataattccacagagaaggtcg

SEQ ID NO: 66737 - DNA, 60 bp, Artificial
  Synthetic oligonucleotide
ctcttctaatagatggtacagcctcattgagtcctggaatgatgatgggcatgttcaaca

SEQ ID NO: 66738 - DNA, 60 bp, Artificial
  Synthetic oligonucleotide
ttaaatacggcaatggtgtttggataggaagaactaaaagtactagttcaaggagtggat

SEQ ID NO: 66739 - DNA, 60 bp, Artificial
  Synthetic oligonucleotide
ggcaatggtgtttggataggaagaactaaaagtactagttcaaggagtggatttgaaatg

SEQ ID NO: 66740 - DNA, 60 bp, Artificial
  Synthetic oligonucleotide
gggttagtcattcgatccagactggaggtcaaaaccaccctgaaacatgcaatcaaagtg

SEQ ID NO: 66741 - DNA, 60 bp, Artificial
  Synthetic oligonucleotide
gacatattgagaacacaagagtccgaatgtgcttgcataaatggttcttgctttaccata

SEQ ID NO: 66742 - DNA, 60 bp, Artificial
  Synthetic oligonucleotide
caggactttctttcttactcaaggggccttattgaatgacaagcattccaatggaaccgt

SEQ ID NO: 66743 - DNA, 60 bp, Artificial
  Synthetic oligonucleotide
aacataagtaataccaatttgattgctgaacaaactgcagctccagtaccactagcaggc

SEQ ID NO: 66744 - DNA, 60 bp, Artificial
  Synthetic oligonucleotide
aatcaaacgtacatcaacataagtaataccaatttgattgctgaacaaactgcagctcca

SEQ ID NO: 66745 - DNA, 60 bp, Artificial
  Synthetic oligonucleotide
atcttgaggctctcatggagtggctaaagacaagaccaatcctgtcacctctgactaagg

SEQ ID NO: 66746 - DNA, 60 bp, Artificial
  Synthetic oligonucleotide
actcgtcatcaatgatgtgggagatcaacggtcctgagtcagtgctggtcaatacttatc

SEQ ID NO: 66747 - DNA, 60 bp, Artificial
  Synthetic oligonucleotide
ggctcttgtacgtaccggtatggatcccaggatgtgctctctgatgcaaggatcaactct

SEQ ID NO: 66748 - DNA, 54 bp, Artificial
  Synthetic oligonucleotide
ttacgctcaccgtgcccagtgagcgaggactgcagcgtagacgctttgtccaaa

SEQ ID NO: 66749 - DNA, 60 bp, Artificial
  Synthetic oligonucleotide
ggtggaataaggatggtagacatccttaggcagaatccaacagaggaacaagccgtggat

SEQ ID NO: 66750 - DNA, 60 bp, Artificial
  Synthetic oligonucleotide
gcacacagattggtggaataaggatggtagacatccttaggcagaatccaacagaggaac

SEQ ID NO: 66751 - DNA, 60 bp, Artificial
  Synthetic oligonucleotide
aagatggtagacatccttaggcagaatccaacagaggaacaagctgtggatatatgcaag

SEQ ID NO: 66752 - DNA, 60 bp, Artificial
  Synthetic oligonucleotide
gctcagaccgagtgatggtatcacctctggctgtgacatggtggaataggaatgggccaa

SEQ ID NO: 66753 - DNA, 60 bp, Artificial
  Synthetic oligonucleotide
ttcaaagtcattggtggttggtccacacctaattccaaatcgcagatcaatagacaagtc

SEQ ID NO: 66754 - DNA, 60 bp, Artificial
  Synthetic oligonucleotide
aacccagctcacaagagtcaattggtgtggatggcatgccactctgctgcatttgaggat

SEQ ID NO: 66755 - DNA, 60 bp, Artificial
  Synthetic oligonucleotide
aacccagcttacaagagtcaattggtgtggatggcatgccactctgctgcatttgaggat

SEQ ID NO: 66756 - DNA, 60 bp, Artificial
  Synthetic oligonucleotide
gagtggatgcatgtatgcatgacagggaacgacaatgatgcaagtgctcaaataatatat

SEQ ID NO: 66757 - DNA, 58 bp, Artificial
  Synthetic oligonucleotide
aaacaagttgtagaccaagaactgagtgatgccccattccttgatcggcttcgccgag

SEQ ID NO: 66758 - DNA, 60 bp, Artificial
  Synthetic oligonucleotide
ccggaaacaagttgtagaccaagaactgagtgatgccccattccttgatcggcttcgccg

SEQ ID NO: 66759 - DNA, 60 bp, Artificial
  Synthetic oligonucleotide
gtccgaaaacaagttgtagaccaagaactgagtgatgccccattccttgatcggcttcgc

SEQ ID NO: 66760 - DNA, 60 bp, Artificial
  Synthetic oligonucleotide
atggtgtcccagggcaccaaacggtcttatgaacagatggaaactgatggggatcgccag

SEQ ID NO: 66761 - DNA, 60 bp, Artificial
  Synthetic oligonucleotide
atggcgtccccaggcaccaaacggtcttatgaacagatggaaactgatggggatcgccag

SEQ ID NO: 66762 - DNA, 60 bp, Artificial
  Synthetic oligonucleotide
ggcgtccccaggcaccaaacggtcttatgaacagatggaaactgatggggatcgccagaa

SEQ ID NO: 66763 - DNA, 60 bp, Artificial
  Synthetic oligonucleotide
gtcccagggcaccaaacggtcttatgaacagatggaaactgatggggatcgccagaatgc

SEQ ID NO: 66764 - DNA, 60 bp, Artificial
  Synthetic oligonucleotide
gtcccaaggcaacaaacggtcttatgaacagatggaaactgatggggatcgccagaatgc

SEQ ID NO: 66765 - DNA, 60 bp, Artificial
  Synthetic oligonucleotide
cccaaggcaccaaacggtcttatgaacagatggaaactgatggggatcgtcagaatgcaa

SEQ ID NO: 66766 - DNA, 60 bp, Artificial
  Synthetic oligonucleotide
gacccaaggcaccaaacggtcttatgaacagatggaaactgatggggatcgccagaatgc

SEQ ID NO: 66767 - DNA, 60 bp, Artificial
  Synthetic oligonucleotide
ggcaccaaacggtcttatgaacagatggaaactgatggggatcgtcagaatgcaactgag

SEQ ID NO: 66768 - DNA, 60 bp, Artificial
  Synthetic oligonucleotide
ccaaggcaccaaacggtcttatgaacagatggaaactgatggggatcgccagaatgcaac

SEQ ID NO: 66769 - DNA, 60 bp, Artificial
  Synthetic oligonucleotide
cccaaggcaccaaacggtcttatgaacagatggaaactgatggggatcgccagaatgcaa

SEQ ID NO: 66770 - DNA, 60 bp, Artificial
  Synthetic oligonucleotide
gttgacagcaaaagtaggtcaggttattctggtattttctctgttgagggcaaaagctgc

SEQ ID NO: 66771 - DNA, 60 bp, Artificial
  Synthetic oligonucleotide
aatcggtgcttttatgtggagttgataaggggaaggaaacaggaaactgaagtctggtgg

SEQ ID NO: 66772 - DNA, 60 bp, Artificial
  Synthetic oligonucleotide
agcgaaagcaggcaaaccatttgaatggatgttaatccgactttacttttcttgaaagtg

SEQ ID NO: 66773 - DNA, 60 bp, Artificial
  Synthetic oligonucleotide
gtctttgcagggaagaacaccgatcttgaggctctcatggaatggctaaagacaagacca

SEQ ID NO: 66774 - DNA, 60 bp, Artificial
  Synthetic oligonucleotide
ataagtcttgcctgcctgcttgtgtgtatgggcttgcagtagcaagtgggcatgactttg

SEQ ID NO: 66775 - DNA, 60 bp, Artificial
  Synthetic oligonucleotide
ataagtcttgcctgcctgcttgtgtgtatgggcttgcagtagcaagtgggcatgacttcg

SEQ ID NO: 66776 - DNA, 60 bp, Artificial
  Synthetic oligonucleotide
cggtctgaaaagagggccttctacggaaggagtgccggagtccatgagggaagagtatcg

SEQ ID NO: 66777 - DNA, 60 bp, Artificial
  Synthetic oligonucleotide
cggtctgaaaagagggccttctacggaaggagtgccggagtccatgagggaagaatatcg

SEQ ID NO: 66778 - DNA, 60 bp, Artificial
  Synthetic oligonucleotide
gtgatcgaaaagatgaacacccaattcgaagctgttggaaaagaattcagtaacttggag

SEQ ID NO: 66779 - DNA, 60 bp, Artificial
  Synthetic oligonucleotide
gtgatcgaaaagataaacacccaattcgaagctgttggaaaagaattcagtaacttggag

SEQ ID NO: 66780 - DNA, 60 bp, Artificial
  Synthetic oligonucleotide
tgtcactggcaatcatgatagctgggatttctttctggatgtgttccaacgggtctctgc

SEQ ID NO: 66781 - DNA, 60 bp, Artificial
  Synthetic oligonucleotide
taaaatactattcattgaagaggggaaaattgttcatattagcccattgtcaggaagtgc

SEQ ID NO: 66782 - DNA, 60 bp, Artificial
  Synthetic oligonucleotide
gtccagccaagagcatggaatatgatgctgttgcaactacacactcctggattcccaaga

SEQ ID NO: 66783 - DNA, 60 bp, Artificial
  Synthetic oligonucleotide
tgcaagtgcccagataatatatgcagggagaatgacagactccattaaatcgtggagaaa

SEQ ID NO: 66784 - DNA, 60 bp, Artificial
  Synthetic oligonucleotide
cagatccactagcatctttattggagatgtgccacagcacacagattggcgggacaagaa

SEQ ID NO: 66785 - DNA, 60 bp, Artificial
  Synthetic oligonucleotide
tggtctaactcacatgatgatctggcattccaatttgaatgatacaacataccagaggac

SEQ ID NO: 66786 - DNA, 60 bp, Artificial
  Synthetic oligonucleotide
tggtctaactcacatgatgatctggcattccaatttgaatgatgcaacataccagaggac

SEQ ID NO: 66787 - DNA, 60 bp, Artificial
  Synthetic oligonucleotide
aactcacatgatgatctggcattccaatttgaatgatacaacataccagaggacaagagc

SEQ ID NO: 66788 - DNA, 60 bp, Artificial
  Synthetic oligonucleotide
cgacagctggtctaactcacatgatgatctggcattccaatttgaatgatacaacatacc

SEQ ID NO: 66789 - DNA, 60 bp, Artificial
  Synthetic oligonucleotide
cgacacgtggtctaactcacatgatgatctggcattccaatttgaatgatacaacatacc

SEQ ID NO: 66790 - DNA, 56 bp, Artificial
  Synthetic oligonucleotide
cgacagctggtctaactcacatgatgatctggcattccaatttgaatgatacaaca

SEQ ID NO: 66791 - DNA, 56 bp, Artificial
  Synthetic oligonucleotide
cgacacgtggtctaactcacatgatgatctggcattccaatttgaatgatacaaca

SEQ ID NO: 66792 - DNA, 60 bp, Artificial
  Synthetic oligonucleotide
caaacagcagcacaacgagcaatgatggaccaagtgagagaaagccggaatcctgggaat

SEQ ID NO: 66793 - DNA, 59 bp, Artificial
  Synthetic oligonucleotide
tccaaacagcagcacaacgagcaatgatggaccaagtgcgagaaagcaggaatcctggg

SEQ ID NO: 66794 - DNA, 60 bp, Artificial
  Synthetic oligonucleotide
ttcaaagtcattggtggttggtccacacctaattccaaatcgcagatcaataggcaagtc

SEQ ID NO: 66795 - DNA, 60 bp, Artificial
  Synthetic oligonucleotide
gaaaccttcaaagtcattggtggttggtccacacctaattccaaattgcaggtaaatagg

SEQ ID NO: 66796 - DNA, 60 bp, Artificial
  Synthetic oligonucleotide
gaaaccttcaaagtcattggtggttggtccacacctaattccaaatcgcagataaatagg

SEQ ID NO: 66797 - DNA, 60 bp, Artificial
  Synthetic oligonucleotide
gaaaccttcaaagtcattggtggttggtccacacctaattccaaatcacagataaatagg

SEQ ID NO: 66798 - DNA, 60 bp, Artificial
  Synthetic oligonucleotide
ccttcaaagtcattggtggttggtccacacctaattccaaatcacagataaataggcaag

SEQ ID NO: 66799 - DNA, 60 bp, Artificial
  Synthetic oligonucleotide
ccttcaaagtcattggtggttggtccacacctaattccaaatcgcagataaataggcaag

SEQ ID NO: 66800 - DNA, 60 bp, Artificial
  Synthetic oligonucleotide
ccttcaaagtcattggtggttggtccacacctaattccaaattgcaggtaaataggcaag

SEQ ID NO: 66801 - DNA, 60 bp, Artificial
  Synthetic oligonucleotide
ggggtgaaattgagcaatatgggggtttatcaaattcttgccatttatgctacagtagca

SEQ ID NO: 66802 - DNA, 60 bp, Artificial
  Synthetic oligonucleotide
ggttaaattgagcaatatgggggtttatcaaatccttgccatctatgctacagtagcagg

SEQ ID NO: 66803 - DNA, 60 bp, Artificial
  Synthetic oligonucleotide
gcgcggtgtctggtaatccatcattcttcaggaacatggtctggctgacaaagaaaggat

SEQ ID NO: 66804 - DNA, 60 bp, Artificial
  Synthetic oligonucleotide
tccatccgctgaccattggtgagtgccccaaatatgtgaaatcggaaaaattagtcttag

SEQ ID NO: 66805 - DNA, 60 bp, Artificial
  Synthetic oligonucleotide
attggacgattctacatccaaatgtgcactgaacttaaactcagtgattatgaggggcga

SEQ ID NO: 66806 - DNA, 60 bp, Artificial
  Synthetic oligonucleotide
ggacgattctacatccaaatgtgcactgaacttaaactcagtgattatgaggggcgattg

SEQ ID NO: 66807 - DNA, 60 bp, Artificial
  Synthetic oligonucleotide
catacaggagaccggttggaatttccagcatggtggaggccatggtgtctagggcccgga

SEQ ID NO: 66808 - DNA, 60 bp, Artificial
  Synthetic oligonucleotide
ggacacagcatacaacaactggaggttcacaggcttgcgcagactatggtggtccgtcat

SEQ ID NO: 66809 - DNA, 60 bp, Artificial
  Synthetic oligonucleotide
tagcaacgagacctgaagtgaatggacagagaggcagaatggaattctcgtggactatct

SEQ ID NO: 66810 - DNA, 60 bp, Artificial
  Synthetic oligonucleotide
acaaggtaaattctgtgatcgaaaagatgaacacccaattcgaagctgttggaaaagaat

SEQ ID NO: 66811 - DNA, 60 bp, Artificial
  Synthetic oligonucleotide
gcagcattgccggatggctccttgggaatccagaatgtgatatacttctaactgtgccag

SEQ ID NO: 66812 - DNA, 60 bp, Artificial
  Synthetic oligonucleotide
gaagaggagtctaaactaaacaggactgaaatcaaaggggttaaattgagcaatatgggg

SEQ ID NO: 66813 - DNA, 60 bp, Artificial
  Synthetic oligonucleotide
ggaaaagaattcggtaacttggagaaaagactggagaacttgaataaaaagatggaggat

SEQ ID NO: 66814 - DNA, 60 bp, Artificial
  Synthetic oligonucleotide
ccctccacttgaattaagggattgcagcattgccggatggctccttgggaatccagaatg

SEQ ID NO: 66815 - DNA, 55 bp, Artificial
  Synthetic oligonucleotide
tggatgtgctccaacgggtctctgcaatgcagaatctgcatatgatcatcagtca

SEQ ID NO: 66816 - DNA, 60 bp, Artificial
  Synthetic oligonucleotide
gcccagcattgagcatcaatgaactgagcaatcttgcaaaaggggagaaggctaacgtgc

SEQ ID NO: 66817 - DNA, 60 bp, Artificial
  Synthetic oligonucleotide
gcccagcattgagcatcaatgaactgagcaatcttgcaaaaggggagaaggctaatgtgc

SEQ ID NO: 66818 - DNA, 60 bp, Artificial
  Synthetic oligonucleotide
ccttacacatgcattgagttagttgtggcagtgctactatttgctatccatactgtccaa

SEQ ID NO: 66819 - DNA, 60 bp, Artificial
  Synthetic oligonucleotide
acacatgcactgaaatagttgtggcaatgctactatttgctatccatactgtccaaaaaa

SEQ ID NO: 66820 - DNA, 60 bp, Artificial
  Synthetic oligonucleotide
cacatgcactgagatagttgtggcaatgctactatttgctatccatactgtccaaaaaag

SEQ ID NO: 66821 - DNA, 60 bp, Artificial
  Synthetic oligonucleotide
attcgtcatcaatgatgtgggagatcaacggtcctgagtcagtgctggtcaacacttatc

SEQ ID NO: 66822 - DNA, 60 bp, Artificial
  Synthetic oligonucleotide
agaggattgtttggggcaatagctggttttatagaagggggatggcaaggaatggttgat

SEQ ID NO: 66823 - DNA, 60 bp, Artificial
  Synthetic oligonucleotide
gcgagggatcaatgatcggaatttctggagaggcgaaaatggacggagaacaagaattgc

SEQ ID NO: 66824 - DNA, 60 bp, Artificial
  Synthetic oligonucleotide
ccagtcggaatttccagcatggtggaggccatggtgtctagggctcggattgatgcacgg

SEQ ID NO: 66825 - DNA, 60 bp, Artificial
  Synthetic oligonucleotide
ccagtcggaatttccagcatggtggaggccatggtgtctagggctaggattgatgcacgg

SEQ ID NO: 66826 - DNA, 60 bp, Artificial
  Synthetic oligonucleotide
tatgctacagttgcaggttctctgtcactggcaatcatgatagctgggatctctttctgg

SEQ ID NO: 66827 - DNA, 60 bp, Artificial
  Synthetic oligonucleotide
cgccactgaaatcagagcatctgttgggagaatggttggtggaatcgggagattctacat

SEQ ID NO: 66828 - DNA, 60 bp, Artificial
  Synthetic oligonucleotide
agaatgccactgaaatcagagcatctgttgggaggatggttggtggaattgggagattct

SEQ ID NO: 66829 - DNA, 60 bp, Artificial
  Synthetic oligonucleotide
gaccaatcctgtcacctctgactaaggggattttaggatttgtgttcacgctcaccgtgc

SEQ ID NO: 66830 - DNA, 59 bp, Artificial
  Synthetic oligonucleotide
agaccaatcctgtcacctctgactaaggggattttaggatttgtgttcacgctcaccgt

SEQ ID NO: 66831 - DNA, 60 bp, Artificial
  Synthetic oligonucleotide
atattcatcatcaatgatgtgggagatcaacggtcctgagtcagtgcttattaacaccta

SEQ ID NO: 66832 - DNA, 60 bp, Artificial
  Synthetic oligonucleotide
gacaccattaaaagctggaggggcgacatactaagaacacaggagtctgaatgtgcctgc

SEQ ID NO: 66833 - DNA, 60 bp, Artificial
  Synthetic oligonucleotide
ccatgatggtgtgagctggttaacaattggggtttctgggccagataatggggcggtggc

SEQ ID NO: 66834 - DNA, 60 bp, Artificial
  Synthetic oligonucleotide
ccactacgaggaatgctcctgctaccctgattcagggaaagtgatgtgcgtctgtaggga

SEQ ID NO: 66835 - DNA, 60 bp, Artificial
  Synthetic oligonucleotide
gcggctgaacaggacagaaccccaaaagtattagccggtaactcctccctttgccccatc

SEQ ID NO: 66836 - DNA, 60 bp, Artificial
  Synthetic oligonucleotide
aaacgcccagaaccatgtaaccagagtatcatcacctatgaaaataatacctgggtcaat

SEQ ID NO: 66837 - DNA, 60 bp, Artificial
  Synthetic oligonucleotide
cattaatgagctgtcctgttggtgaagctccttccccatacaattcgagatttgaatcag

SEQ ID NO: 66838 - DNA, 60 bp, Artificial
  Synthetic oligonucleotide
gtttggtgataatcctcgtcctaatgatggaacagggagctgtggcccggtgtcctctaa

SEQ ID NO: 66839 - DNA, 60 bp, Artificial
  Synthetic oligonucleotide
tgtcctctaatggagcatacggggtgaaaggattttcatttaggtatggtaatggcgttt

SEQ ID NO: 66840 - DNA, 60 bp, Artificial
  Synthetic oligonucleotide
aatggcgtttggataggtagaaccaagagcactagttccaggagcgggtttgaaatgatt

SEQ ID NO: 66841 - DNA, 60 bp, Artificial
  Synthetic oligonucleotide
tctttcaaccaagacctggagtataagataggatacatctgcagcggagtgtttggtgat

SEQ ID NO: 66842 - DNA, 60 bp, Artificial
  Synthetic oligonucleotide
cagtggatgggccatatacagcaaagacaacggcataagaatcggttccaaaggggacgt

SEQ ID NO: 66843 - DNA, 60 bp, Artificial
  Synthetic oligonucleotide
cgtgcagcatccagagctgacagggttggactgcatgaggccttgcttctgggtggaact

SEQ ID NO: 66844 - DNA, 56 bp, Artificial
  Synthetic oligonucleotide
gcaatgggcaggcttcatacaggattttcagaatagagaaagggaaagttgtcaaa

SEQ ID NO: 66845 - DNA, 60 bp, Artificial
  Synthetic oligonucleotide
tcggttccaaaggggacgtttttgtaataagggagccatttatttcgtgttctcatctgg

SEQ ID NO: 66846 - DNA, 60 bp, Artificial
  Synthetic oligonucleotide
gttcgagtctctgaaactctacagagattcgcttggggaagcagtaatgagaatgggaga

SEQ ID NO: 66847 - DNA, 60 bp, Artificial
  Synthetic oligonucleotide
cctgctgctaatagtgcagaccatagggtttattggatacgagaggggagggtagtgaag

SEQ ID NO: 66848 - DNA, 60 bp, Artificial
  Synthetic oligonucleotide
gcatgtatgcatgacagggaacgacaatgatgcaagtgctcaaataatatatgcagggag

SEQ ID NO: 66849 - DNA, 60 bp, Artificial
  Synthetic oligonucleotide
gtgcttttatgtggagttgataaggggaaggtcacaggagactagagtatggtggacctc

SEQ ID NO: 66850 - DNA, 60 bp, Artificial
  Synthetic oligonucleotide
taggtgcttttatgtggagttgataaggggaaggtcacaggagactagagtatggtggac

SEQ ID NO: 66851 - DNA, 60 bp, Artificial
  Synthetic oligonucleotide
cggtgcttttatgtggagttgataaggggaaggaaacaggaaactgaagtctggtggacc

SEQ ID NO: 66852 - DNA, 60 bp, Artificial
  Synthetic oligonucleotide
tcggtgcttttatgtggagttgataaggggaaggccacaggaaactagagtatggtggac

SEQ ID NO: 66853 - DNA, 60 bp, Artificial
  Synthetic oligonucleotide
taccaatttgcactcgggcaggggaccacactagacaacaaacattcaaatggcacaata

SEQ ID NO: 66854 - DNA, 60 bp, Artificial
  Synthetic oligonucleotide
cgggcaagggaccacactagacaacaaacattcaaatggcacaatacatgatagaatccc

SEQ ID NO: 66855 - DNA, 55 bp, Artificial
  Synthetic oligonucleotide
attggaagattctacatacagatgtgcactgaactcaaactcagcgactatgagg

SEQ ID NO: 66856 - DNA, 60 bp, Artificial
  Synthetic oligonucleotide
tctcagaatgaaatggatgatggcaatgaaatatccgattacagctgacaaaagaataat

SEQ ID NO: 66857 - DNA, 60 bp, Artificial
  Synthetic oligonucleotide
tcattctgagaggatcagtggctcataaatcctgcctgcctgcctgtgtatatggacttg

SEQ ID NO: 66858 - DNA, 60 bp, Artificial
  Synthetic oligonucleotide
ggatcagtggctcataaatcctgcctgcctgcttgtgtatatggacttgttgtggccagt

SEQ ID NO: 66859 - DNA, 60 bp, Artificial
  Synthetic oligonucleotide
caacgctgtgcctgggacatcatgcggtgccaaacggaacactagtgaagacaatcacag

SEQ ID NO: 66860 - DNA, 60 bp, Artificial
  Synthetic oligonucleotide
catgaaaacagaaggaacacttgggaactgtgagaccaaatgccaaactcctttgggagc

SEQ ID NO: 66861 - DNA, 60 bp, Artificial
  Synthetic oligonucleotide
catgaagacagaaggaacacttggaaactgtgagaccaaatgccaaactcctttgggagc

SEQ ID NO: 66862 - DNA, 60 bp, Artificial
  Synthetic oligonucleotide
catgaagacagaaggaacacttgggaactgtgagaccaaatgccaaactcctttgggagc

SEQ ID NO: 66863 - DNA, 60 bp, Artificial
  Synthetic oligonucleotide
ggcgatcatggaaaagaacatcatgctgaaagcgaacttcagtgtgatctttaaccgatt

SEQ ID NO: 66864 - DNA, 60 bp, Artificial
  Synthetic oligonucleotide
tattcatcatcaatgatgtgggagatcaacggtcctgagtcagtgcttattaacacctat

SEQ ID NO: 66865 - DNA, 60 bp, Artificial
  Synthetic oligonucleotide
cggctcctaagtgtacctgaatggtcctatatagtggaaaaggaaaacccagcgaatggt

SEQ ID NO: 66866 - DNA, 60 bp, Artificial
  Synthetic oligonucleotide
aaccatttgaatggatgtcaatccgaccttacttttcttgaaagttccagcgcaaaatgc

SEQ ID NO: 66867 - DNA, 60 bp, Artificial
  Synthetic oligonucleotide
cggctgcattgagggcaagctttctcaaatgtccaaagaagtgaatgccaaaattgaacc

SEQ ID NO: 66868 - DNA, 60 bp, Artificial
  Synthetic oligonucleotide
cactaaaatagatctctggtcttacaacgcggacgttcttgtcgccctggagaaccaaca

SEQ ID NO: 66869 - DNA, 60 bp, Artificial
  Synthetic oligonucleotide
cactaaaatagatctctggtcttacaacgcggagcttcttgtcgccctggagaaccaaca

SEQ ID NO: 66870 - DNA, 60 bp, Artificial
  Synthetic oligonucleotide
gaacggctgcattgagggcaagctttctcaaatgtcaaaagaagtaaacgccagaattga

SEQ ID NO: 66871 - DNA, 60 bp, Artificial
  Synthetic oligonucleotide
gaacggctgcattgagggcaagctttctcaaatgtcaaaagaagtgaacgccaggattga

SEQ ID NO: 66872 - DNA, 60 bp, Artificial
  Synthetic oligonucleotide
aggaacggagaaactgacaataacttattcgtcatcaatgatgtgggagatcaatggtcc

SEQ ID NO: 66873 - DNA, 60 bp, Artificial
  Synthetic oligonucleotide
cttattcgtcatcaatgatgtgggagatcaatggtcctgagtcggtgttggtcaatactt

SEQ ID NO: 66874 - DNA, 60 bp, Artificial
  Synthetic oligonucleotide
cgggaaccatgcgcaggcttgccgaccaaagtctcccaccgaacttctccagccttgaaa

SEQ ID NO: 66875 - DNA, 60 bp, Artificial
  Synthetic oligonucleotide
aaccatgaagactatcattgctttgagctacattttatgtctggttcttggccaagaact

SEQ ID NO: 66876 - DNA, 60 bp, Artificial
  Synthetic oligonucleotide
tgacacaatacatgataggaccccttatcgaaccctattgatgaatgagttgggtgtccc

SEQ ID NO: 66877 - DNA, 60 bp, Artificial
  Synthetic oligonucleotide
gggataagagtcagcaaaatgggagtagatgaatactccagcacagagagagtggtagtg

SEQ ID NO: 66878 - DNA, 60 bp, Artificial
  Synthetic oligonucleotide
gggataagagtcagcaaaatgggagtagatgaatactccagcacagagagagtggtggtg

SEQ ID NO: 66879 - DNA, 60 bp, Artificial
  Synthetic oligonucleotide
tgtcattgagagggataagagtcagcaaaatgggagtagatgaatactccagcacagaga

SEQ ID NO: 66880 - DNA, 60 bp, Artificial
  Synthetic oligonucleotide
tgtcattaagagggataagagtcagcaaaatgggagtagatgaatactccagcacagaga

SEQ ID NO: 66881 - DNA, 60 bp, Artificial
  Synthetic oligonucleotide
cccattgacaataggtgagtgtcccaaatatgtaaagtcagatagattggttttggcaac

SEQ ID NO: 66882 - DNA, 60 bp, Artificial
  Synthetic oligonucleotide
cccattgacaataggtgagtgtcccaaatatgtaaagtcagatagattggttttggcgac

SEQ ID NO: 66883 - DNA, 60 bp, Artificial
  Synthetic oligonucleotide
gggacaggatacaccatggacacagtcaacagaacacatcaatattcagaaaaggggaag

SEQ ID NO: 66884 - DNA, 60 bp, Artificial
  Synthetic oligonucleotide
tgggaaactgaataggataatcgagaaaacgaacgagaaattccatcaaatcgaaaagga

SEQ ID NO: 66885 - DNA, 60 bp, Artificial
  Synthetic oligonucleotide
cgggaaactgaataggttaatcgagaaaacgaacgagaaattccatcaaatcgaaaagga

SEQ ID NO: 66886 - DNA, 60 bp, Artificial
  Synthetic oligonucleotide
gggaaactgaatagggtaatcgagaagacgaacgagaaattccatcaaatcgaaaaggaa

SEQ ID NO: 66887 - DNA, 60 bp, Artificial
  Synthetic oligonucleotide
gattgtttggagcaatagctggttttatagaaggaggatggcaaggaatggttgatggtt

SEQ ID NO: 66888 - DNA, 60 bp, Artificial
  Synthetic oligonucleotide
cacttcaggtacctatggaacaggctcatggcctactggggcaaatatcaacttcatgcc

SEQ ID NO: 66889 - DNA, 60 bp, Artificial
  Synthetic oligonucleotide
tcattctgaggggatcagtggctcataagtcctgcctgcctgcttgtgtatatggacttg

SEQ ID NO: 66890 - DNA, 60 bp, Artificial
  Synthetic oligonucleotide
ccctttcacaatatccacccactgaccattggtgagtgccccaaatatgtaaaatcggaa

SEQ ID NO: 66891 - DNA, 60 bp, Artificial
  Synthetic oligonucleotide
ccctttcataatatccacccactgaccattggtgagtgccccaaatatgtaaaatcggag

SEQ ID NO: 66892 - DNA, 60 bp, Artificial
  Synthetic oligonucleotide
cttttcacaatgtccacccactgaccataggtgagtgccccaaatatgtaaaatcggaaa

SEQ ID NO: 66893 - DNA, 60 bp, Artificial
  Synthetic oligonucleotide
gattatgcctcccttaggtcactagttgcctcatccggcaccctggagtttaacaatgaa

SEQ ID NO: 66894 - DNA, 60 bp, Artificial
  Synthetic oligonucleotide
gtgcaggattatgcctcccttaggtcactagttgcctcatccggcaccctggagtttaac

SEQ ID NO: 66895 - DNA, 60 bp, Artificial
  Synthetic oligonucleotide
gatgtgcaggattatgcctcccttaggtcactagttgcctcatccggcaccctggagttt

SEQ ID NO: 66896 - DNA, 60 bp, Artificial
  Synthetic oligonucleotide
ggatgtcaatccgaccttacttttcttaaaagttccagcgcaaaatgccataagtactac

SEQ ID NO: 66897 - DNA, 60 bp, Artificial
  Synthetic oligonucleotide
gcccagccaagagcatggaatatgatgctgttgctactacacactcctggatcccgaaga

SEQ ID NO: 66898 - DNA, 60 bp, Artificial
  Synthetic oligonucleotide
cccagccaagagcatggaatatgatgctgttgctactacacactcctggatcccgaagag

SEQ ID NO: 66899 - DNA, 60 bp, Artificial
  Synthetic oligonucleotide
ccagccaagagcatggaatatgatgctgttgctactacgcactcttggatccctaagagg

SEQ ID NO: 66900 - DNA, 60 bp, Artificial
  Synthetic oligonucleotide
gtccagccaagagcatggaatatgatgctgttgctactacacactcctggatccctaaga

SEQ ID NO: 66901 - DNA, 60 bp, Artificial
  Synthetic oligonucleotide
cacggtccagccaagagcatggaatatgatgctgttgctactacacactcctggatccct

SEQ ID NO: 66902 - DNA, 60 bp, Artificial
  Synthetic oligonucleotide
ccagctcacggtccagccaagagcatggaatatgatgctgttgctactacacactcctgg

SEQ ID NO: 66903 - DNA, 60 bp, Artificial
  Synthetic oligonucleotide
ctcacggtccagccaagagcatggaatatgatgctgttgctactacacactcctggatcc

SEQ ID NO: 66904 - DNA, 60 bp, Artificial
  Synthetic oligonucleotide
cagctcatggcccagccaagagcatggaatatgatgctgttgctactacacactcatgga

SEQ ID NO: 66905 - DNA, 60 bp, Artificial
  Synthetic oligonucleotide
caggaacaatgcgcaggcttgccgaccaaagtctcccgccgaacttctcctgccttgaga

SEQ ID NO: 66906 - DNA, 60 bp, Artificial
  Synthetic oligonucleotide
tgacaatgcttgcatagggtcaatcaggaatggaacttatgaccatgatgtatacagaaa

SEQ ID NO: 66907 - DNA, 60 bp, Artificial
  Synthetic oligonucleotide
aatcaaaggagtgaaattgagcaatatgggggtttaccaaatacttgctatatacgctac

SEQ ID NO: 66908 - DNA, 60 bp, Artificial
  Synthetic oligonucleotide
acggtcttatgaacagatggaaactgatggggaacgccagaatgcaactgaaatcagagc

SEQ ID NO: 66909 - DNA, 60 bp, Artificial
  Synthetic oligonucleotide
gccagaatgcaactgaaatcagagcatctgttgggagaatggttggtggaatcggaaggt

SEQ ID NO: 66910 - DNA, 60 bp, Artificial
  Synthetic oligonucleotide
aaaggagtgaaattgagcaacatgggggtttatcaaatacttgctatatacgctacagta

SEQ ID NO: 66911 - DNA, 60 bp, Artificial
  Synthetic oligonucleotide
ccttatctttctggcacggtctgcactcattctgagaggatcagtggctcataagtcctg

SEQ ID NO: 66912 - DNA, 60 bp, Artificial
  Synthetic oligonucleotide
taaaagcactagttcaaggagtggatttgagatgatttgggatcccaatgggtggacaga

SEQ ID NO: 66913 - DNA, 60 bp, Artificial
  Synthetic oligonucleotide
tttaaatacggtaacggtgtttggataggaagaactaaaagcactagttcaaggagtgga

SEQ ID NO: 66914 - DNA, 60 bp, Artificial
  Synthetic oligonucleotide
gcaaggacaatggtataaggataggttccaagggagatgtatttgttatcagagagccgt

SEQ ID NO: 66915 - DNA, 60 bp, Artificial
  Synthetic oligonucleotide
cagcaaggacaatggtataaggataggttccaagggagatgtatttgtcatcagggagcc

SEQ ID NO: 66916 - DNA, 60 bp, Artificial
  Synthetic oligonucleotide
ccggaccagataacggggcagtggctgtattgaaatacaatggcataataacagacacta

SEQ ID NO: 66917 - DNA, 60 bp, Artificial
  Synthetic oligonucleotide
gtaaaggggttttcatttaaatacggtaacggtgtttggataggaagaactaaaagcact

SEQ ID NO: 66918 - DNA, 60 bp, Artificial
  Synthetic oligonucleotide
agccactgctatcgtaataggcacaattgcagtactcataggaacagcaaatctagggtt

SEQ ID NO: 66919 - DNA, 60 bp, Artificial
  Synthetic oligonucleotide
cttaactaaagggctctgtactataaattcatggcacatatatgggaaagacaatgcagt

SEQ ID NO: 66920 - DNA, 60 bp, Artificial
  Synthetic oligonucleotide
ggtttcaataacttaactaaagggctctgtactataaattcatggcacatatatgggaaa

SEQ ID NO: 66921 - DNA, 60 bp, Artificial
  Synthetic oligonucleotide
gccactgctatcgtaataggcacaattgcagtactcataggaatagcgaacttaggattg

SEQ ID NO: 66922 - DNA, 60 bp, Artificial
  Synthetic oligonucleotide
gccactgctatcgtaataggcacaattgcagtactcataggaacagcaaatctagggttg

SEQ ID NO: 66923 - DNA, 60 bp, Artificial
  Synthetic oligonucleotide
tgccactgctatcgtaataggcacaattgcagtactcataggaatagcgaacttaggatt

SEQ ID NO: 66924 - DNA, 60 bp, Artificial
  Synthetic oligonucleotide
ggagagagcaattgggacagaaatttgaggaaataaggtggttaattgaagaagtgcggc

SEQ ID NO: 66925 - DNA, 60 bp, Artificial
  Synthetic oligonucleotide
catatccgcaaacggtttgcagacaatggattgggtgatgccccattccttgatcggctc

SEQ ID NO: 66926 - DNA, 56 bp, Artificial
  Synthetic oligonucleotide
cagacaatggattgggtgatgccccattccttgatcggctccgccgagatcaaaag

SEQ ID NO: 66927 - DNA, 60 bp, Artificial
  Synthetic oligonucleotide
ccttgatcggctccgccgagatcaaaagtccctaaaaggaagaggcaacacccttggcct

SEQ ID NO: 66928 - DNA, 60 bp, Artificial
  Synthetic oligonucleotide
gggtcctcatcggaggacttgaatggaatggtaacacggttcgagtctctgaaaatctac

SEQ ID NO: 66929 - DNA, 60 bp, Artificial
  Synthetic oligonucleotide
ttgatcggctccgccgagatcaaaagtccctaaaaggaagaggcaacacccttggcctcg

SEQ ID NO: 66930 - DNA, 60 bp, Artificial
  Synthetic oligonucleotide
cttgatcggctccgccgagatcaaaagtccctaaaaggaagaggcaacacccttggcctc

SEQ ID NO: 66931 - DNA, 52 bp, Artificial
  Synthetic oligonucleotide
gaagtgcggcacagattgaaagcgacagagaatagtttcgaacaaataacat

SEQ ID NO: 66932 - DNA, 60 bp, Artificial
  Synthetic oligonucleotide
ggacagaaatttgaggaaataaggtggttaattgaagaagtgcggcacagattgaaagcg

SEQ ID NO: 66933 - DNA, 60 bp, Artificial
  Synthetic oligonucleotide
aatctacagagattcgcttggagaaaccgtaatgaggatgggagaccttcactacctcca

SEQ ID NO: 66934 - DNA, 60 bp, Artificial
  Synthetic oligonucleotide
caattgggacagaaatttgaggaaataaggtggttaattgaagaagtgcggcacagattg

SEQ ID NO: 66935 - DNA, 60 bp, Artificial
  Synthetic oligonucleotide
atatggactcaccacttgtgccaagctttcaggtagactgtttcctttggcatatccgca

SEQ ID NO: 66936 - DNA, 60 bp, Artificial
  Synthetic oligonucleotide
cacttaagatgaccattgcatctgtgcctacttcgcgctacctagctgacatgaccctcg

SEQ ID NO: 66937 - DNA, 60 bp, Artificial
  Synthetic oligonucleotide
tgatcggctccgccgagatcaaaagtccctaaaaggaagaggcaacacccttggcctcga

SEQ ID NO: 66938 - DNA, 60 bp, Artificial
  Synthetic oligonucleotide
ggctccgccgagatcaaaagtccctaaaaggaagaggcaacacccttggcctcgacatcg

SEQ ID NO: 66939 - DNA, 60 bp, Artificial
  Synthetic oligonucleotide
ctcatgcctaggcaaaagataataggctctctttgtgtgcgaatggaccaggcgatcatg

SEQ ID NO: 66940 - DNA, 60 bp, Artificial
  Synthetic oligonucleotide
ctcatgcctaggcaaaagataacaggctctctttgtgtgcgaatggaccaggcgatcatg

SEQ ID NO: 66941 - DNA, 60 bp, Artificial
  Synthetic oligonucleotide
gctacctagctgacatgaccctcgaggaaatgtcacgagactggttcatgctcatgccta

SEQ ID NO: 66942 - DNA, 60 bp, Artificial
  Synthetic oligonucleotide
cctagctgacatgaccctcgaggaaatgtcacgagactggttcatgctcatgcctaggca

SEQ ID NO: 66943 - DNA, 60 bp, Artificial
  Synthetic oligonucleotide
catgcctaggcaaaagataacaggctctctttgtgtgcgaatggaccaggcgatcatgga

SEQ ID NO: 66944 - DNA, 60 bp, Artificial
  Synthetic oligonucleotide
catgcctaggcaaaagataataggctctctttgtgtgcgaatggaccaggcgatcatgga

SEQ ID NO: 66945 - DNA, 60 bp, Artificial
  Synthetic oligonucleotide
agcaattgggacagaaatttgaggaaataaggtggttaattgaagaagtgcggcacagat

SEQ ID NO: 66946 - DNA, 58 bp, Artificial
  Synthetic oligonucleotide
ccaccattgaagagctcagacggcaaaaatagtgaatttagcttgtccttcatgaaaa

SEQ ID NO: 66947 - DNA, 60 bp, Artificial
  Synthetic oligonucleotide
ctgttccaccattgaagagctcggacggcagaaatagtgaatttagcttgtccttcatga

SEQ ID NO: 66948 - DNA, 60 bp, Artificial
  Synthetic oligonucleotide
ataccactctgtcaacaatagcccttctcattggagtgggaaacttagtcttcaacacag

SEQ ID NO: 66949 - DNA, 60 bp, Artificial
  Synthetic oligonucleotide
ggtagtgaacaccactctgtcaacaatagcccttctcattggggtgggaaatttagtttt

SEQ ID NO: 66950 - DNA, 60 bp, Artificial
  Synthetic oligonucleotide
ggtagtgaataccactctgtcaacaatagcccttctcattggagtgggaaacttagtctt

SEQ ID NO: 66951 - DNA, 60 bp, Artificial
  Synthetic oligonucleotide
ggtagtgaataccactctgtcaacaatagcccttctcatcggagtgggaaacttagtttt

SEQ ID NO: 66952 - DNA, 60 bp, Artificial
  Synthetic oligonucleotide
gggtagtgaacaccactctgtcaacaatagcccttctcattggggtgggaaatttagttt

SEQ ID NO: 66953 - DNA, 60 bp, Artificial
  Synthetic oligonucleotide
gctatatatgctacagtggcaggctccttgtcactggcaatcatgatagctgggatttct

SEQ ID NO: 66954 - DNA, 60 bp, Artificial
  Synthetic oligonucleotide
tacagtagcaggttccctgtcactggcaatcatgatagctgggatctctttatggatgtg

SEQ ID NO: 66955 - DNA, 60 bp, Artificial
  Synthetic oligonucleotide
gcaattggggtcctcatcggagggcttgaatggaatggtaacacggttcgagtctctgag

SEQ ID NO: 66956 - DNA, 60 bp, Artificial
  Synthetic oligonucleotide
taaatagaacagggacatttgaattcacaagctttttctatcgctatggatttgtagcca

SEQ ID NO: 66957 - DNA, 60 bp, Artificial
  Synthetic oligonucleotide
acagagttccttggacaatggaactggccagatggggctaaaatagagtacttcctctaa

SEQ ID NO: 66958 - DNA, 60 bp, Artificial
  Synthetic oligonucleotide
cacagaattccttggacaatggaactggcctgatggggctaaaatagagtacttcctcta

SEQ ID NO: 66959 - DNA, 60 bp, Artificial
  Synthetic oligonucleotide
gggacaatggaactggcctgatggggctaaaatagagtacttcctctaagatacaaaaaa

SEQ ID NO: 66960 - DNA, 60 bp, Artificial
  Synthetic oligonucleotide
cagagttccttggacaatggaactggccagatggggctaaaatagagtacttcctctaag

SEQ ID NO: 66961 - DNA, 60 bp, Artificial
  Synthetic oligonucleotide
tggacaatggaactggcctgatggggctaaaatagagtacttcctctaagatgcagaaaa

SEQ ID NO: 66962 - DNA, 58 bp, Artificial
  Synthetic oligonucleotide
gggacaatggaactggcctgatggggctaaaatagagtacttcctctaagatacaaaa

SEQ ID NO: 66963 - DNA, 60 bp, Artificial
  Synthetic oligonucleotide
ggatttgtgttcacgctcaccgtgcccagtgagcgaggactgcagcgtagacgctttgtc

SEQ ID NO: 66964 - DNA, 60 bp, Artificial
  Synthetic oligonucleotide
tttacgctcaggttatgaaactttcaaagtcattggtggttggtccacacctaactccaa

SEQ ID NO: 66965 - DNA, 60 bp, Artificial
  Synthetic oligonucleotide
ataacttactcatcgtcaatgatgtgggagattaatggtcctgaatcagtgttggtcaat

SEQ ID NO: 66966 - DNA, 60 bp, Artificial
  Synthetic oligonucleotide
gatgtgggagatcaatggtcctgagtcagtattggtcaatacctatcagtggatcatcag

SEQ ID NO: 66967 - DNA, 59 bp, Artificial
  Synthetic oligonucleotide
gattaatggccctgagtcagtgttggtcaatacctatcagtggatcatcagaaactggg

SEQ ID NO: 66968 - DNA, 60 bp, Artificial
  Synthetic oligonucleotide
ccagaatggtcatatataatggagaaagaaaatccaaggaatggcttgtgctacccaggc

SEQ ID NO: 66969 - DNA, 60 bp, Artificial
  Synthetic oligonucleotide
aggcttctaaccgtgccagaatggtcatatataatggagaaagaaaatccaaggaatggc

SEQ ID NO: 66970 - DNA, 59 bp, Artificial
  Synthetic oligonucleotide
caagtgatcctcttgttattgccgcaagtatcattgggatcttgcacttgatattgtgg

SEQ ID NO: 66971 - DNA, 60 bp, Artificial
  Synthetic oligonucleotide
ggttatgaaactttcaaagtcattggtggttggtccacacctaactccaaatcgcaggtc

SEQ ID NO: 66972 - DNA, 60 bp, Artificial
  Synthetic oligonucleotide
atacaggagaccggttgggatttccagcatggtggaggccatggtgtctagggccagaat

SEQ ID NO: 66973 - DNA, 60 bp, Artificial
  Synthetic oligonucleotide
gataatcactcactgagtgacatcaaaatcatggcgttccaaggcaccaaacggtcttat

SEQ ID NO: 66974 - DNA, 54 bp, Artificial
  Synthetic oligonucleotide
cactcactgagtgacatcaaaatcatggcgtcccaaggcaacaaacggtcttat

SEQ ID NO: 66975 - DNA, 55 bp, Artificial
  Synthetic oligonucleotide
aacaggagataagaactttctcgtttcagcttatttaatgataaaaaacaccctt

SEQ ID NO: 66976 - DNA, 51 bp, Artificial
  Synthetic oligonucleotide
acggacaaggggggagaatggaattctcttggactctattggaaacatggg

SEQ ID NO: 66977 - DNA, 60 bp, Artificial
  Synthetic oligonucleotide
ctgaggggatcagtggctcataaatcctgcctgcctgcttgtgtgtacggacttgctgtg

SEQ ID NO: 66978 - DNA, 60 bp, Artificial
  Synthetic oligonucleotide
gatcagtggctcataaatcctgcctgcctgcttgtgtgtacggacttgctgtggccagcg

SEQ ID NO: 66979 - DNA, 60 bp, Artificial
  Synthetic oligonucleotide
ctgagaggatcagtggctcataaatcctgcctgcctgcttgtgtgtacggacttgctgtg

SEQ ID NO: 66980 - DNA, 60 bp, Artificial
  Synthetic oligonucleotide
cattcacccattggcaataggtgagtgtcccaaatatgtaaagtcagatagattggtttt

SEQ ID NO: 66981 - DNA, 60 bp, Artificial
  Synthetic oligonucleotide
ggctcttgttcggactgggatggatcccaggatgtgctctctgatgcaagggtcgaccct

SEQ ID NO: 66982 - DNA, 60 bp, Artificial
  Synthetic oligonucleotide
ctgtggactagacaatgaacctggatcgggaaattggccggatggttctaatattgggtt

SEQ ID NO: 66983 - DNA, 60 bp, Artificial
  Synthetic oligonucleotide
gggagattctacatacagatgtgcactgaactcaagctcagcgactatgaagggagactg

SEQ ID NO: 66984 - DNA, 60 bp, Artificial
  Synthetic oligonucleotide
cctcttttgacatgagttatgaaggatcttatttcttcggagacaatgcagaagagtacg

SEQ ID NO: 66985 - DNA, 60 bp, Artificial
  Synthetic oligonucleotide
cagcagcacaacgagcaatgatggaccaggtgcgagaaagcagaaatcctgggaatgctg

SEQ ID NO: 66986 - DNA, 60 bp, Artificial
  Synthetic oligonucleotide
acagcagcacaacgagcaatgatggaccaggtgcgagaaagcagaaatcctgggaatgct

SEQ ID NO: 66987 - DNA, 60 bp, Artificial
  Synthetic oligonucleotide
aaaatgcaattggggtcctcatcggagggcttgaatggaatggtaacacggttcgagtct

SEQ ID NO: 66988 - DNA, 60 bp, Artificial
  Synthetic oligonucleotide
gacaagagcacttgtgcgtactgggatggatcccaggatgtgctctctgatgcaaggatc

SEQ ID NO: 66989 - DNA, 60 bp, Artificial
  Synthetic oligonucleotide
cactaaaatagatctctggtcttacaacgcggagcttcttgttgccctggagaaccaaca

SEQ ID NO: 66990 - DNA, 60 bp, Artificial
  Synthetic oligonucleotide
gaccattggtgagtgccccaaatatgtaaaatcggaaagattagtcttagcaacaggacc

SEQ ID NO: 66991 - DNA, 55 bp, Artificial
  Synthetic oligonucleotide
actgaccattggtgagtgccccaaatatgtaaaatcggaaagattagtcttagca

SEQ ID NO: 66992 - DNA, 54 bp, Artificial
  Synthetic oligonucleotide
aaaagaggtagttcagggatcatgaaaacagaaggaacacttgaaaactgcgag

SEQ ID NO: 66993 - DNA, 60 bp, Artificial
  Synthetic oligonucleotide
agtattgcatttgactcaaggaacctgctgggaacagatgtacactccaggtggagaagt

SEQ ID NO: 66994 - DNA, 60 bp, Artificial
  Synthetic oligonucleotide
agtgttacacttgactcaaggaacgtgttgggaacagatgtacactccaggtggagaagt

SEQ ID NO: 66995 - DNA, 60 bp, Artificial
  Synthetic oligonucleotide
actcaaggaacatgctgggaacagatgtacactccaggtggagaagtgaggaatgatgat

SEQ ID NO: 66996 - DNA, 60 bp, Artificial
  Synthetic oligonucleotide
gactcaaggaacgtgttgggaacagatgtacactccaggtggagaagtgaggaatgacga

SEQ ID NO: 66997 - DNA, 60 bp, Artificial
  Synthetic oligonucleotide
ctcaaggaacctgctgggaacagatgtacactccaggtggagaagtgagaaatgatgatg

SEQ ID NO: 66998 - DNA, 60 bp, Artificial
  Synthetic oligonucleotide
ctcaaggaacgtgttgggaacagatgtacactccaggtggagaagtgaggaatgacgatg

SEQ ID NO: 66999 - DNA, 50 bp, Artificial
  Synthetic oligonucleotide
aggagtggatttgaaatgatttgggatcccaatggatggacagagacaga

SEQ ID NO: 67000 - DNA, 60 bp, Artificial
  Synthetic oligonucleotide
cgtcaccgtgactcatgccaaggacattcttgagaaaacgcataatggaaagttgtgcag

SEQ ID NO: 67001 - DNA, 60 bp, Artificial
  Synthetic oligonucleotide
cgtcaccgtgactcatgccaaggacattcttgagaaaacgcataatggaaagttatgcag

SEQ ID NO: 67002 - DNA, 60 bp, Artificial
  Synthetic oligonucleotide
cggtatggatcccaggatgtgctctctgatgcaaggatcaactcttccgaggagatcggg

SEQ ID NO: 67003 - DNA, 50 bp, Artificial
  Synthetic oligonucleotide
atgaaggatcttatttcttcggagacaatgcagaagagtacgacaattaa

SEQ ID NO: 67004 - DNA, 60 bp, Artificial
  Synthetic oligonucleotide
ggttcaactccttcctcacacatgcactgaaatagttgtggcaatgctactatttgctat

SEQ ID NO: 67005 - DNA, 60 bp, Artificial
  Synthetic oligonucleotide
ggcaataggtgagtgtcccaaatatgtaaagtcagatagattggttttggcaacagggct

SEQ ID NO: 67006 - DNA, 60 bp, Artificial
  Synthetic oligonucleotide
cagctaatgagtcgggaaggctaatagatttcctcaaggatgtgatggaatcaatggata

SEQ ID NO: 67007 - DNA, 60 bp, Artificial
  Synthetic oligonucleotide
ttcacgctcaccgtgcccagtgagcgaggactgcagcgtagacgctttgtccaaaacgcc

SEQ ID NO: 67008 - DNA, 60 bp, Artificial
  Synthetic oligonucleotide
gtattcacgctcaccgtgcccagtgagcgaggactgcagcgtagacgcttcgtccaaaat

SEQ ID NO: 67009 - DNA, 60 bp, Artificial
  Synthetic oligonucleotide
tcatgccaaggacattcttgagaaaacgcataatggaaagttgtgcagattaaacggggt

SEQ ID NO: 67010 - DNA, 60 bp, Artificial
  Synthetic oligonucleotide
ccagcacttaggatgaaatggatgatggcaatgaaatatccaattaccgcagacaagagg

SEQ ID NO: 67011 - DNA, 60 bp, Artificial
  Synthetic oligonucleotide
agcaaaagcagggttaataatcactcactgagtgacatcaaaatcatggcgacccaaggc

SEQ ID NO: 67012 - DNA, 60 bp, Artificial
  Synthetic oligonucleotide
agcaaaagcagggttaataatcactcactgagtgacatcaaaatcatggcgtcccaaggc

SEQ ID NO: 67013 - DNA, 60 bp, Artificial
  Synthetic oligonucleotide
agcaaaagcagggttgataatcactcactgagtgacatcaaaatcatggcgtcccaaggc

SEQ ID NO: 67014 - DNA, 60 bp, Artificial
  Synthetic oligonucleotide
atctgttccaccattgaagagctcagacggcaaaagtagtgaatttagctcgtccttcat

SEQ ID NO: 67015 - DNA, 60 bp, Artificial
  Synthetic oligonucleotide
tctgttccaccattgaagagctcagacggcaaaagtagtgaatttagctcgtccttcatg

SEQ ID NO: 67016 - DNA, 56 bp, Artificial
  Synthetic oligonucleotide
atcctaataacgaaagagggaacccaggagtgaaaggctgggcctttgacaatgga

SEQ ID NO: 67017 - DNA, 60 bp, Artificial
  Synthetic oligonucleotide
ggatcctaacaatgagagagggaatccgggagtgaaaggctgggcctttgacaatggaga

SEQ ID NO: 67018 - DNA, 60 bp, Artificial
  Synthetic oligonucleotide
gggatcctaacaatgaaagagggaatccaggagtgaaaggctgggcctttgacaatggag

SEQ ID NO: 67019 - DNA, 60 bp, Artificial
  Synthetic oligonucleotide
ggatcctaacaatgagagagggaatccaggagtgaaaggctgggcctttgacaatggaga

SEQ ID NO: 67020 - DNA, 60 bp, Artificial
  Synthetic oligonucleotide
gggcacttgtgcgtactgggatggatcccaggatgtgctctctgatgcaaggctcaaccc

SEQ ID NO: 67021 - DNA, 60 bp, Artificial
  Synthetic oligonucleotide
gggcacttgtgcgtactgggatggatcccaggatgtgctctctgatgcaaggctcaactc

SEQ ID NO: 67022 - DNA, 60 bp, Artificial
  Synthetic oligonucleotide
aagagcacttgtgcgtactgggatggatcccaggatgtgctctctgatgcaaggctcaac

SEQ ID NO: 67023 - DNA, 60 bp, Artificial
  Synthetic oligonucleotide
aagggcacttgtgcgtactgggatggatcccaggatgtgctctctgatgcaaggctcaac

SEQ ID NO: 67024 - DNA, 60 bp, Artificial
  Synthetic oligonucleotide
agcaaaagcagggtagataatcactcactgagtgacatcaaaatcatggcgtctcaaggc

SEQ ID NO: 67025 - DNA, 60 bp, Artificial
  Synthetic oligonucleotide
agcaaaagcagggtagataatcactcacagagtgacatccacatcatggcgtctcaaggc

SEQ ID NO: 67026 - DNA, 60 bp, Artificial
  Synthetic oligonucleotide
gggaagggtattcactggtcgggatagacccatttaaattactccaaaacagtcaagtgt

SEQ ID NO: 67027 - DNA, 60 bp, Artificial
  Synthetic oligonucleotide
cgtatgttctctctatcgttccgtcaggccccctcaaagccgagatcgcgcagagacttg

SEQ ID NO: 67028 - DNA, 60 bp, Artificial
  Synthetic oligonucleotide
acgttctctctatcgttccgtcaggccccctcaaagccgagatcgcgcagagacttgaag

SEQ ID NO: 67029 - DNA, 60 bp, Artificial
  Synthetic oligonucleotide
tatgttctctctatcgttccatcaggccccctcaaagccgagatcgcgcagagacttgaa

SEQ ID NO: 67030 - DNA, 60 bp, Artificial
  Synthetic oligonucleotide
cttgaggctctcatggaatggctaaagacaagacccatcctgtcacctctgactaagggg

SEQ ID NO: 67031 - DNA, 58 bp, Artificial
  Synthetic oligonucleotide
cagatcttgaggctctcatggagtggctaaagacaaggccaatcctgtcacctctgac

SEQ ID NO: 67032 - DNA, 60 bp, Artificial
  Synthetic oligonucleotide
attatgtgggcctgccaaaaaggcaacattaggtgcaacatttgcatttgagtgcattaa

SEQ ID NO: 67033 - DNA, 60 bp, Artificial
  Synthetic oligonucleotide
ggaatggggacccgaacaacatggatagagcagtcaaactatacaagaagctcaaaagag

SEQ ID NO: 67034 - DNA, 60 bp, Artificial
  Synthetic oligonucleotide
ggaatggggacccgaataacatggatagagcagtcaaactatacaagaagctcaaaagag

SEQ ID NO: 67035 - DNA, 60 bp, Artificial
  Synthetic oligonucleotide
gtaatggggacccgaataacatggatagagcagtcaaactatacaagaagctcaaaagag

SEQ ID NO: 67036 - DNA, 60 bp, Artificial
  Synthetic oligonucleotide
gagacccgaataacatggatagagcagtcaaactatacaagaagctcaaaagagaaataa

SEQ ID NO: 67037 - DNA, 60 bp, Artificial
  Synthetic oligonucleotide
ccacagaagctgcttttggtctagtgtgtgccacttgtgaacagattgctgattcacagc

SEQ ID NO: 67038 - DNA, 60 bp, Artificial
  Synthetic oligonucleotide
tggatagagcagtcaaactatacaagaagctcaaaagagaaataacattccatggggcca

SEQ ID NO: 67039 - DNA, 53 bp, Artificial
  Synthetic oligonucleotide
ctgagtccatgagggaagaatatcaacaggaacagcagagtgctgtggatgtt

SEQ ID NO: 67040 - DNA, 60 bp, Artificial
  Synthetic oligonucleotide
gggaatgatggacggttggtacggtttcaggcatcaaaattctgagggcacagggcaagc

SEQ ID NO: 67041 - DNA, 60 bp, Artificial
  Synthetic oligonucleotide
caggacaagcagcagatcttaaaagcactcaagcagcaatcaaccaaatcaatgggaaac

SEQ ID NO: 67042 - DNA, 60 bp, Artificial
  Synthetic oligonucleotide
ggacaagcagcagatcttaaaagcactcaagcagcaatcaaccaaatcaatgggaaactg

SEQ ID NO: 67043 - DNA, 60 bp, Artificial
  Synthetic oligonucleotide
accccttaccggaccctattaatgaatgaattgggtgttccatttcatttgggaaccagg

SEQ ID NO: 67044 - DNA, 60 bp, Artificial
  Synthetic oligonucleotide
accccttatcggaccctattgatgaatgaattgggtgttccatttcatttgggaaccagg

SEQ ID NO: 67045 - DNA, 60 bp, Artificial
  Synthetic oligonucleotide
accccttaccggaccctattgatgaatgaattgggtgttccatttcatttgggaaccagg

SEQ ID NO: 67046 - DNA, 60 bp, Artificial
  Synthetic oligonucleotide
ccccttaccggaccctattgatgaatgaattgggtgttccatttcatttgggaaccaggc

SEQ ID NO: 67047 - DNA, 60 bp, Artificial
  Synthetic oligonucleotide
gcgatttgaagcaatatgatagtgacgaacctgaattaaggtcgctttcaagctggatac

SEQ ID NO: 67048 - DNA, 60 bp, Artificial
  Synthetic oligonucleotide
cgatttgaagcaatatgatagtgacgaacctgaattaaggtcactttcaagctggataca

SEQ ID NO: 67049 - DNA, 60 bp, Artificial
  Synthetic oligonucleotide
gcgatttgaagcaatatgatagtgacgaacctgaattgaggtcactttcaagctggatac

SEQ ID NO: 67050 - DNA, 60 bp, Artificial
  Synthetic oligonucleotide
tgatagtgacgaacctgaattaaggtcactttcaagctggatacagaatgagttcaacaa

SEQ ID NO: 67051 - DNA, 60 bp, Artificial
  Synthetic oligonucleotide
ggacgattctacatccaaatgtgcactgaacttaaactcagtgattatgaggggcgactg

SEQ ID NO: 67052 - DNA, 60 bp, Artificial
  Synthetic oligonucleotide
atgggattggacgattctacatccaaatgtgcactgaacttaaactcagtgattatgagg

SEQ ID NO: 67053 - DNA, 60 bp, Artificial
  Synthetic oligonucleotide
caaaatcatggcgtctcaaggcaccaaacggtcttatgaacagatggaaactgatgggga

SEQ ID NO: 67054 - DNA, 60 bp, Artificial
  Synthetic oligonucleotide
ggcaaaagctgcatcaatcggtgcttttatgtggagttgataaggggaaggaaacaggaa

SEQ ID NO: 67055 - DNA, 60 bp, Artificial
  Synthetic oligonucleotide
aggcaaaagctgcatcaatcggtgcttttatgtggagttgataaggggaagaaaccagga

SEQ ID NO: 67056 - DNA, 60 bp, Artificial
  Synthetic oligonucleotide
gggcaaaagctgcatcaatcggtgcttttatgtggagttgataaggggaaggaaacagga

SEQ ID NO: 67057 - DNA, 60 bp, Artificial
  Synthetic oligonucleotide
ggcaaaagctgcatcaatcggtgcttttatgtggagttgataaggggaagaaaccaggaa

SEQ ID NO: 67058 - DNA, 60 bp, Artificial
  Synthetic oligonucleotide
gattatagcattgtttccagttatgtgtgctcaggacttgttggagacacacccagaaaa

SEQ ID NO: 67059 - DNA, 60 bp, Artificial
  Synthetic oligonucleotide
ttctggtattttctccgttgaaggcaaaagctgcatcaatcggtgcttttatgtggagtt

SEQ ID NO: 67060 - DNA, 60 bp, Artificial
  Synthetic oligonucleotide
aagattatagcattgtttccagttatgtgtgctcaggacttgttggagacacacccagaa

SEQ ID NO: 67061 - DNA, 60 bp, Artificial
  Synthetic oligonucleotide
tattttctctgttgaaggcaaaagctgcatcaatcggtgcttttatgtggagttgataag

SEQ ID NO: 67062 - DNA, 60 bp, Artificial
  Synthetic oligonucleotide
gtattttctctgttgaaggcaaaagctgcatcaatcggtgcttttatgtggagttgataa

SEQ ID NO: 67063 - DNA, 60 bp, Artificial
  Synthetic oligonucleotide
ccgttgaaggcaaaagctgcatcaatcggtgcttttatgtggagttgataaggggaagga

SEQ ID NO: 67064 - DNA, 60 bp, Artificial
  Synthetic oligonucleotide
aaggcaaaagctgcatcaatcggtgcttttatgtggagttgataaggggaaggaaacagg

SEQ ID NO: 67065 - DNA, 60 bp, Artificial
  Synthetic oligonucleotide
aaggcaaaagctgcatcaatcggtgcttttatgtagaattgataaggggaaggaaacagg

SEQ ID NO: 67066 - DNA, 60 bp, Artificial
  Synthetic oligonucleotide
gggaatggtggacggttggtacggtttcaggcatcaaaattctgagggcacagggcaagc

SEQ ID NO: 67067 - DNA, 60 bp, Artificial
  Synthetic oligonucleotide
gggaatgatagacggttggtacggtttcaggcatcaaaattctgagggcacagggcaagc

SEQ ID NO: 67068 - DNA, 60 bp, Artificial
  Synthetic oligonucleotide
ggggatggtggacggttggtacggtttcaggcatcaaaattctgaaggcacaggacaagc

SEQ ID NO: 67069 - DNA, 60 bp, Artificial
  Synthetic oligonucleotide
gcgctgggaaggatcctaagaaaactggaggacccatatacaagagagtagatggaaggt

SEQ ID NO: 67070 - DNA, 60 bp, Artificial
  Synthetic oligonucleotide
gcgcgggtaaggatcctaagaaaactggaggacccatatacaagagagtagatggaaagt

SEQ ID NO: 67071 - DNA, 60 bp, Artificial
  Synthetic oligonucleotide
gctgggaaggatcctaagaaaactggaggacccatatacaagagagtagatggaaggtgg

SEQ ID NO: 67072 - DNA, 60 bp, Artificial
  Synthetic oligonucleotide
gcgctgggaaggatcctaagaaaactggaggacccatatacaagagagtagatggaaagt

SEQ ID NO: 67073 - DNA, 60 bp, Artificial
  Synthetic oligonucleotide
gtgcggggaaggatcctaagaaaactggaggacccatatacaagagagtagatggaaagt

SEQ ID NO: 67074 - DNA, 51 bp, Artificial
  Synthetic oligonucleotide
ggggcttggtgatgctccatttctcgatcggcttcgccgagatcagaagtc

SEQ ID NO: 67075 - DNA, 59 bp, Artificial
  Synthetic oligonucleotide
atgctcatgcccaagcagaaagtggcaggttccctttgcatcagaatggaccaggcagt

SEQ ID NO: 67076 - DNA, 60 bp, Artificial
  Synthetic oligonucleotide
ggatcctcatcaaaggatttgagtggaatgataacacagttcgagtctctgaagctctac

SEQ ID NO: 67077 - DNA, 60 bp, Artificial
  Synthetic oligonucleotide
gactggttcatgctcatgcccaagcagaaagtggcaggttccctttgcatcagaatggat

SEQ ID NO: 67078 - DNA, 60 bp, Artificial
  Synthetic oligonucleotide
gttcatgctcatgcccaagcagaaagtggcaggttccctttgtatcagaatggaccaggc

SEQ ID NO: 67079 - DNA, 60 bp, Artificial
  Synthetic oligonucleotide
ggttcatgctcatgcccaagcagaaagtggcaggttccctttgcatcagaatggaccagg

SEQ ID NO: 67080 - DNA, 59 bp, Artificial
  Synthetic oligonucleotide
atgctcatgcccaagcagaaagtggcaggttccctttgcatcagaatggatcaagcagt

SEQ ID NO: 67081 - DNA, 60 bp, Artificial
  Synthetic oligonucleotide
ctaactgacatgactcttgaagagatatcaagggactggttcatgctcatgcccaagcag

SEQ ID NO: 67082 - DNA, 60 bp, Artificial
  Synthetic oligonucleotide
catttcatttaggaaccaggcaagtgtgtatagcatggtccagttcaagttgtcatgatg

SEQ ID NO: 67083 - DNA, 60 bp, Artificial
  Synthetic oligonucleotide
tcaggtacatatggaacaggctcatggcctgatggggcggacatcaatctcatgcctata

SEQ ID NO: 67084 - DNA, 60 bp, Artificial
  Synthetic oligonucleotide
atcaggtacatatggaacaggctcatggcctgatggggcggacatcaatctcatgcctat

SEQ ID NO: 67085 - DNA, 60 bp, Artificial
  Synthetic oligonucleotide
caggtacatatggaacaggctcatggcctgatggggcggacatcaatctcatgcctatat

SEQ ID NO: 67086 - DNA, 60 bp, Artificial
  Synthetic oligonucleotide
gattacagtattgattccagttatgtgtgctcagggcttgttggcgacacacccagaaac

SEQ ID NO: 67087 - DNA, 60 bp, Artificial
  Synthetic oligonucleotide
aagattatagcattgattccagttatgtgtgctcagggcttgttggcgacacacccagaa

SEQ ID NO: 67088 - DNA, 60 bp, Artificial
  Synthetic oligonucleotide
cgacgggaagcttgtagacagtattggttcatggtctcaaaacatcctcaggactcagga

SEQ ID NO: 67089 - DNA, 60 bp, Artificial
  Synthetic oligonucleotide
cgacgggaagcttgtagacagtattggttcatggtctcaaaacatcctccggactcagga

SEQ ID NO: 67090 - DNA, 60 bp, Artificial
  Synthetic oligonucleotide
ttcatttacgacgggaagcttgtagacagtattggttcatggtctcaaaacatcctccgg

SEQ ID NO: 67091 - DNA, 60 bp, Artificial
  Synthetic oligonucleotide
tttatttacgacgggaagcttgtagacagtattggttcatggtctcaaaacatcctcagg

SEQ ID NO: 67092 - DNA, 60 bp, Artificial
  Synthetic oligonucleotide
gattccagttatgtgtgctcagggcttgttggcgacacacccagaaacaacgacagatct

SEQ ID NO: 67093 - DNA, 60 bp, Artificial
  Synthetic oligonucleotide
cggaccctattgatgaatgagttgggtgttccatttcatctggggaccaagcaagtgtgc

SEQ ID NO: 67094 - DNA, 60 bp, Artificial
  Synthetic oligonucleotide
cggaccctattgatgaatgagttgggtgttccatttcatttggggaccaagcaagtgtgc

SEQ ID NO: 67095 - DNA, 60 bp, Artificial
  Synthetic oligonucleotide
ttatcggaccctattgatgaatgagttgggtgttccatttcatttggggaccaagcaagt

SEQ ID NO: 67096 - DNA, 60 bp, Artificial
  Synthetic oligonucleotide
tcatcggaccctattgatgaatgagttgggtgttccatttcatctggggaccaagcaagt

SEQ ID NO: 67097 - DNA, 50 bp, Artificial
  Synthetic oligonucleotide
atgaaggatcttatttcttcggagacaatgcagaggagtacgacaactaa

SEQ ID NO: 67098 - DNA, 60 bp, Artificial
  Synthetic oligonucleotide
aatgaacgagttgggtgttccatttcatttgggaaccaggcaagtgtgtatagcatggtc

SEQ ID NO: 67099 - DNA, 60 bp, Artificial
  Synthetic oligonucleotide
atgtgcaggattatgcctcccttaggtcactagttgcctcatccggcaccctggagttta

SEQ ID NO: 67100 - DNA, 60 bp, Artificial
  Synthetic oligonucleotide
gcttttgacgaaagaaggaataaatatctggaagaacatcccagtgcggggaaggatcct

SEQ ID NO: 67101 - DNA, 60 bp, Artificial
  Synthetic oligonucleotide
cccgatcgtgccctcttttgacatgagtaatgaaggatcttatttcttcggagacaatgc

SEQ ID NO: 67102 - DNA, 60 bp, Artificial
  Synthetic oligonucleotide
tcgaaatggaagattttgtgcgacaatgcttcaacccgatgattgtcgaacttgcagaaa

SEQ ID NO: 67103 - DNA, 60 bp, Artificial
  Synthetic oligonucleotide
cgaaatggaagattttgtgcgacaatgcttcaacccgatgattgtcgaacttgcagaaaa

SEQ ID NO: 67104 - DNA, 60 bp, Artificial
  Synthetic oligonucleotide
agtctctaaaaatctacagagattcgcttggagaggcagtaatgagaatgggggacctcc

SEQ ID NO: 67105 - DNA, 59 bp, Artificial
  Synthetic oligonucleotide
agtctctaaaaatctacagagattcgcttggagaagcagtaatgagaatgggggacctc

SEQ ID NO: 67106 - DNA, 60 bp, Artificial
  Synthetic oligonucleotide
agtctctaaaaatctacagagattcgcttggagaagcagtaatgagaatgggagacatcc

SEQ ID NO: 67107 - DNA, 60 bp, Artificial
  Synthetic oligonucleotide
agtctctaaaaatctacagagattcgcttggagaagctgtaatgagaatgggggacctcc

SEQ ID NO: 67108 - DNA, 60 bp, Artificial
  Synthetic oligonucleotide
acaaatacctggaagaacatcccagtgcggggaaggatccaaagaaaactggaggcccaa

SEQ ID NO: 67109 - DNA, 60 bp, Artificial
  Synthetic oligonucleotide
cctggaagaacatcccagtgcggggaaggatccaaagaaaactggaggcccaatctacaa

SEQ ID NO: 67110 - DNA, 60 bp, Artificial
  Synthetic oligonucleotide
tgttccatttcatttgggaaccaggcaagtgtgcatagcatggtccagctcaagttgtca

SEQ ID NO: 67111 - DNA, 60 bp, Artificial
  Synthetic oligonucleotide
gggtgttccatttcatttgggaaccaggcaagtgtgcatagcatggtccagctcaagttg

SEQ ID NO: 67112 - DNA, 60 bp, Artificial
  Synthetic oligonucleotide
ccgagatcgcgcagagacttgaagatgtctttgctgggaagaacacagatcttgaggctc

SEQ ID NO: 67113 - DNA, 60 bp, Artificial
  Synthetic oligonucleotide
gcctgcatagggtcaatcagaaatggaacttatgaccataatgtgtacagagatgaagca

SEQ ID NO: 67114 - DNA, 60 bp, Artificial
  Synthetic oligonucleotide
tgggtgttccatttcatttgggaaccaggcaagtgtgcatagcatggtccagctcaagtt

SEQ ID NO: 67115 - DNA, 60 bp, Artificial
  Synthetic oligonucleotide
cggatgcattgagggcaagctttctcaaatgtccaaagaagtgaatgccaaaattgaacc

SEQ ID NO: 67116 - DNA, 60 bp, Artificial
  Synthetic oligonucleotide
accgaacggctgcattgagggcaagctttctcaaatgtccaaagaagtgaatgcaagaat

SEQ ID NO: 67117 - DNA, 60 bp, Artificial
  Synthetic oligonucleotide
gaacggatgcattgagggcaagctttctcaaatgtccaaagaagtgaatgccaaaattga

SEQ ID NO: 67118 - DNA, 60 bp, Artificial
  Synthetic oligonucleotide
ggctgcattgagggcaagctttctcaaatgtccaaagaagtgaatgccaaaattgaaccc

SEQ ID NO: 67119 - DNA, 60 bp, Artificial
  Synthetic oligonucleotide
ggaagaatccgatgaggcacttaaaatgaccatggcctccacacctgcttcgcgatacct

SEQ ID NO: 67120 - DNA, 60 bp, Artificial
  Synthetic oligonucleotide
ggaagaatccgatgaggcacttaaaatgaccatggcctccacacctgcttctcgatacct

SEQ ID NO: 67121 - DNA, 60 bp, Artificial
  Synthetic oligonucleotide
ctgaaggaagaatccgatgaggcacttaaaatgaccatggcctccacacctgcttcgcga

SEQ ID NO: 67122 - DNA, 60 bp, Artificial
  Synthetic oligonucleotide
gggaaccaggcaagtgtgtatagcatggtccagctcaagttgtcacgatggaaaagcatg

SEQ ID NO: 67123 - DNA, 60 bp, Artificial
  Synthetic oligonucleotide
tatagtattaattccagttatgtgtgctcagggcttgttggcgacacacccagaaacaac

SEQ ID NO: 67124 - DNA, 60 bp, Artificial
  Synthetic oligonucleotide
tatagtatcaattccagttatgtgtgctcagggcttgttggcgacacacccagaaacaac

SEQ ID NO: 67125 - DNA, 60 bp, Artificial
  Synthetic oligonucleotide
cgcagcaaagctttcagcaattgttacccttatgatgtaccagattatgcctcccttagg

SEQ ID NO: 67126 - DNA, 60 bp, Artificial
  Synthetic oligonucleotide
cggagcaatgctttcagcaattgttacccttatgatgtgccagactatgcatccctccga

SEQ ID NO: 67127 - DNA, 60 bp, Artificial
  Synthetic oligonucleotide
tatagtattgattccagttatgtgtgctcagggcttgttggcgacacacccagaaacaac

SEQ ID NO: 67128 - DNA, 60 bp, Artificial
  Synthetic oligonucleotide
tatagcattgattccagttatgtgtgctcagggcttgttggcgacacacccagaaacaac

SEQ ID NO: 67129 - DNA, 60 bp, Artificial
  Synthetic oligonucleotide
cattgaacgcagcaaggctttcagcaattgttacccttatgatgtgccagagcatgcctc

SEQ ID NO: 67130 - DNA, 60 bp, Artificial
  Synthetic oligonucleotide
tgaggggcgattgatccagaacagcttaacaatagagagaatggtgctctctgcttttga

SEQ ID NO: 67131 - DNA, 60 bp, Artificial
  Synthetic oligonucleotide
acataatggattccaacactgtgtcaagtttccaggtagattgctttctttggcatatcc

SEQ ID NO: 67132 - DNA, 60 bp, Artificial
  Synthetic oligonucleotide
gggcctttgacgatggaaatgacatatggatgggaagaactatcagcaaggattcacgct

SEQ ID NO: 67133 - DNA, 60 bp, Artificial
  Synthetic oligonucleotide
gttgacagcgataatagatcaggttattctggtgtcttttctgttgagagcaaaagctgc

SEQ ID NO: 67134 - DNA, 60 bp, Artificial
  Synthetic oligonucleotide
gtccattgtcgggaagtgctcagcatgtggaggagtgttcttgttatcctcgataccctg

SEQ ID NO: 67135 - DNA, 60 bp, Artificial
  Synthetic oligonucleotide
tcaaagccgcaatgtaaaatcacaggatttgcacctttttccaaggacaattcaattcgg

SEQ ID NO: 67136 - DNA, 60 bp, Artificial
  Synthetic oligonucleotide
tacggggcatgtcctaaatatgtcaagcaaaacactctgaagttggcaacagggatgcgg

SEQ ID NO: 67137 - DNA, 60 bp, Artificial
  Synthetic oligonucleotide
acggggcatgtcctaaatatgtcaagcaaaacactctgaagttggcaacagggatgcgga

SEQ ID NO: 67138 - DNA, 60 bp, Artificial
  Synthetic oligonucleotide
cggggcatgtcctaaatatgtcaagcaaaacactctgaagttggcaacagggatgcggaa

SEQ ID NO: 67139 - DNA, 60 bp, Artificial
  Synthetic oligonucleotide
tacggggcatgccctaagtatgtcaagcaaaacactctgaagttggcaacagggatgcgg

SEQ ID NO: 67140 - DNA, 60 bp, Artificial
  Synthetic oligonucleotide
ggggcctgtcctagatatgttaagcaaaacactctgaagttggcaacagggatgcggaat

SEQ ID NO: 67141 - DNA, 60 bp, Artificial
  Synthetic oligonucleotide
tggtgcacttgccagttgcatgggcctcatatacaacagaatgggaactgtgaccactga

SEQ ID NO: 67142 - DNA, 60 bp, Artificial
  Synthetic oligonucleotide
agaaggccaaactggcaaatgttgtgagaaagatgatgactaattcacaagacacagagc

SEQ ID NO: 67143 - DNA, 60 bp, Artificial
  Synthetic oligonucleotide
tggcaaatgttgtgagaaagatgatgactaattcacaagacacagagctttctttcacaa

SEQ ID NO: 67144 - DNA, 60 bp, Artificial
  Synthetic oligonucleotide
gccccaactcaacccaattgatggaccactacctgaggataatgagccaagtggatatgc

SEQ ID NO: 67145 - DNA, 60 bp, Artificial
  Synthetic oligonucleotide
aatgcaccaaatcatgagggaatacaagcaggagtggatagattctaccggatctgcaag

SEQ ID NO: 67146 - DNA, 60 bp, Artificial
  Synthetic oligonucleotide
aatgcaccaaatcatgagggaatacaagcaggagtagatagattctacaggatctgcaag

SEQ ID NO: 67147 - DNA, 60 bp, Artificial
  Synthetic oligonucleotide
aatgcaccaaatcatgagggaatacaagcaggagtggatagattctacaggatctgcaag

SEQ ID NO: 67148 - DNA, 60 bp, Artificial
  Synthetic oligonucleotide
tgcaccaaatcatgagggaatacaagcaggagtggatagattctacaggatctgcaagtt

SEQ ID NO: 67149 - DNA, 60 bp, Artificial
  Synthetic oligonucleotide
tgcaccaaatcatgagggaatacaagcaggagtggatagattttacaggatctgcaagtt

SEQ ID NO: 67150 - DNA, 60 bp, Artificial
  Synthetic oligonucleotide
cgccccaactcaacccaattgatggaccactacctgaggataatgagccaagtggatatg

SEQ ID NO: 67151 - DNA, 60 bp, Artificial
  Synthetic oligonucleotide
caccccaactcaacccaattgatggaccactacctgaggataatgagccaagtggatatg

SEQ ID NO: 67152 - DNA, 60 bp, Artificial
  Synthetic oligonucleotide
ggagcaccccaactcaacccaattgatggaccactacctgaggataatgagccaagtgga

SEQ ID NO: 67153 - DNA, 60 bp, Artificial
  Synthetic oligonucleotide
caccccaactcaacccaagtgatggaccactacctgaggataatgagccaagtggatatg

SEQ ID NO: 67154 - DNA, 60 bp, Artificial
  Synthetic oligonucleotide
cctgaggataatgagccaagtggatatgcacaaacagactgtgtcctggaagcaatggcc

SEQ ID NO: 67155 - DNA, 60 bp, Artificial
  Synthetic oligonucleotide
ctgatatgagcattggagtaacagtgataaagaacaacatgataaacaatgaccttgggc

SEQ ID NO: 67156 - DNA, 60 bp, Artificial
  Synthetic oligonucleotide
aagcattggagtaacagtgataaagaacaacatgataaacaatgaccttggaccagcaac

SEQ ID NO: 67157 - DNA, 60 bp, Artificial
  Synthetic oligonucleotide
gaataaacgagtcagctgatatgagcattggagtaacagtgataaagaacaacatgataa

SEQ ID NO: 67158 - DNA, 60 bp, Artificial
  Synthetic oligonucleotide
gagtaaacgagtcagctgatatgagcattggagtaacagtgataaagaacaacatgataa

SEQ ID NO: 67159 - DNA, 60 bp, Artificial
  Synthetic oligonucleotide
ggattaatgagtcagctgatatgagcattggagtaacagtgataaagaacaacatgataa

SEQ ID NO: 67160 - DNA, 60 bp, Artificial
  Synthetic oligonucleotide
ctgatatgagcattggagtaacagtgataaagaacaacatgataaacaatgaccttggac

SEQ ID NO: 67161 - DNA, 60 bp, Artificial
  Synthetic oligonucleotide
cagtctggacttccggttggaggtaatgaaaagaaggccaaactggcaaatgttgtgaga

SEQ ID NO: 67162 - DNA, 60 bp, Artificial
  Synthetic oligonucleotide
agaaggccaaactggcaaatgttgtgagaaaaatgatgactaattcacaagacacagagc

SEQ ID NO: 67163 - DNA, 60 bp, Artificial
  Synthetic oligonucleotide
cctgaggataatgagccaagtggatatgcacaaacagactgtgtcctggaagcaatggct

SEQ ID NO: 67164 - DNA, 60 bp, Artificial
  Synthetic oligonucleotide
gcttgaacagtctggacttccggttgggggtaatgaaaagaaggccaaactggcaaatgt

SEQ ID NO: 67165 - DNA, 60 bp, Artificial
  Synthetic oligonucleotide
gagcatggaatatgacgctgttgcaactacacactcctggattcccaagaggaaccgctc

SEQ ID NO: 67166 - DNA, 60 bp, Artificial
  Synthetic oligonucleotide
tgccgttgcaactacacactcctggattcccaagaggaaccgctctatcctcaacacaag

SEQ ID NO: 67167 - DNA, 60 bp, Artificial
  Synthetic oligonucleotide
cccaactcaacccaagtgatggaccactacctgaggataatgagccaagtggatatgcac

SEQ ID NO: 67168 - DNA, 60 bp, Artificial
  Synthetic oligonucleotide
cccaattgatggaccactacctgaggataatgagccaagtggatatgcacaaccagactg

SEQ ID NO: 67169 - DNA, 60 bp, Artificial
  Synthetic oligonucleotide
ccgttgcaactacacactcctggattcccaagaggaaccgctctatcctcaacacaagcc

SEQ ID NO: 67170 - DNA, 60 bp, Artificial
  Synthetic oligonucleotide
cccaactcaacccaattgatggaccactacctgaggataatgagccaagtggatatgcac

SEQ ID NO: 67171 - DNA, 60 bp, Artificial
  Synthetic oligonucleotide
gtgagaaagatgatgactaattcacaagacacagagctttctttcacaatcactggggac

SEQ ID NO: 67172 - DNA, 60 bp, Artificial
  Synthetic oligonucleotide
cataacagaggtagtgtatttgaataatactaccgtagaaaaagaaatttgtcccggaat

SEQ ID NO: 67173 - DNA, 60 bp, Artificial
  Synthetic oligonucleotide
gccacaagagactagggtatggtggacttcaaatagtatcgtcgcattttgtggtacttc

SEQ ID NO: 67174 - DNA, 60 bp, Artificial
  Synthetic oligonucleotide
cgtcgcattttgtggtacttctggtacctatggaacaggctcatggcctgatggggcgaa

SEQ ID NO: 67175 - DNA, 60 bp, Artificial
  Synthetic oligonucleotide
atgaatccaaatcagaagataatagcaattggctctgtctctctaaccattgcaacagta

SEQ ID NO: 67176 - DNA, 53 bp, Artificial
  Synthetic oligonucleotide
tgcaacagtatgtttcctcatgcagattgccatcctagcaacaaccgtgacac

SEQ ID NO: 67177 - DNA, 60 bp, Artificial
  Synthetic oligonucleotide
aagataatagcaattggctctgtctctctaaccattgcaacagtatgtttcctcatgcag

SEQ ID NO: 67178 - DNA, 60 bp, Artificial
  Synthetic oligonucleotide
cgatgggaaggcatggttgcatgtttgtgtcactggggatgatagaaatgcaactgctag

SEQ ID NO: 67179 - DNA, 60 bp, Artificial
  Synthetic oligonucleotide
agttcaagttgtcacgatgggaaggcatggttgcatgtttgtgtcactggggatgataga

SEQ ID NO: 67180 - DNA, 60 bp, Artificial
  Synthetic oligonucleotide
ggtctagttcaagttgtcacgatgggaaggcatggttgcatgtttgtgtcactggggatg

SEQ ID NO: 67181 - DNA, 60 bp, Artificial
  Synthetic oligonucleotide
tgtgcatagcatggtctagttcaagttgtcacgatgggaaggcatggttgcatgtttgtg

SEQ ID NO: 67182 - DNA, 60 bp, Artificial
  Synthetic oligonucleotide
cggcacaatacatgatagaatcccccatcgaactcttttaatgaatgaattgggtgttcc

SEQ ID NO: 67183 - DNA, 60 bp, Artificial
  Synthetic oligonucleotide
gtatcgtcgcattttgtggtacttctggtacctatggaacaggctcatggcctgatgggg

SEQ ID NO: 67184 - DNA, 60 bp, Artificial
  Synthetic oligonucleotide
ggatgatagaaatgcaactgctagtttcatttatgatggaatgcttgttgacagtattgg

SEQ ID NO: 67185 - DNA, 60 bp, Artificial
  Synthetic oligonucleotide
catgtttgtgtcactggggatgatagaaatgcaactgctagtttcatttatgatggaatg

SEQ ID NO: 67186 - DNA, 60 bp, Artificial
  Synthetic oligonucleotide
agaggggaaaattgtccatattagcccattgtcagggagtgctcagcacatagaggaatg

SEQ ID NO: 67187 - DNA, 60 bp, Artificial
  Synthetic oligonucleotide
ggggaaaattgtccatattagcccattgtcagggagtgctcagcacatagaggaatgttc

SEQ ID NO: 67188 - DNA, 60 bp, Artificial
  Synthetic oligonucleotide
gaagtgcatcaggaagggctgacactagaatactattcatcagagaggggaaaattgtcc

SEQ ID NO: 67189 - DNA, 60 bp, Artificial
  Synthetic oligonucleotide
cagagaggggaaaattgtccatattagcccattgtcagggagtgctcaacatatagagga

SEQ ID NO: 67190 - DNA, 60 bp, Artificial
  Synthetic oligonucleotide
actgatggaagtgcatcaggaagggctgacactagaatactattcatcagagaggggaaa

SEQ ID NO: 67191 - DNA, 60 bp, Artificial
  Synthetic oligonucleotide
gcaactgctagtttcatttatgatggaatgcttgttgacagtattggttcatggtctcaa

SEQ ID NO: 67192 - DNA, 60 bp, Artificial
  Synthetic oligonucleotide
ggttcatggtctcaaaatatcctcagaactcaggagtcagaatgcgtttgcatcaatgga

SEQ ID NO: 67193 - DNA, 60 bp, Artificial
  Synthetic oligonucleotide
taggcccgttatagatataaatatggcggattatagcatcgattccagttatgtgtgttc

SEQ ID NO: 67194 - DNA, 60 bp, Artificial
  Synthetic oligonucleotide
acatttgggtatcaagggaaccttatgtgtcatgcgaccccagcaaatgttaccagtttg

SEQ ID NO: 67195 - DNA, 60 bp, Artificial
  Synthetic oligonucleotide
atatttgggtaacaagggaacctgatgggtcatgcgaccccagcaaatgttaccagtttg

SEQ ID NO: 67196 - DNA, 60 bp, Artificial
  Synthetic oligonucleotide
gtcccggaatgccagaatacaggaactggtcgaaaccgcagtgtcaaattacagggtttg

SEQ ID NO: 67197 - DNA, 60 bp, Artificial
  Synthetic oligonucleotide
cggaatgccagaatacaggaactggtcgaaaccgcagtggcaaattaccggggttgctcc

SEQ ID NO: 67198 - DNA, 60 bp, Artificial
  Synthetic oligonucleotide
gggaaccttatgtgtcatgcgaccccagcaaatgttaccagtttgcactcgggcagggaa

SEQ ID NO: 67199 - DNA, 60 bp, Artificial
  Synthetic oligonucleotide
gttgataagaggaaggccacaagagactagggtatggtggacttcaaatagtatcgtcgc

SEQ ID NO: 67200 - DNA, 60 bp, Artificial
  Synthetic oligonucleotide
attttctctgttgaaggcaagagctgtgttaataggtgtttttatgtggagttgataaga

SEQ ID NO: 67201 - DNA, 60 bp, Artificial
  Synthetic oligonucleotide
tataaatatggcggattatagcatcgattccagttatgtgtgttcaggacttgttggcga

SEQ ID NO: 67202 - DNA, 60 bp, Artificial
  Synthetic oligonucleotide
caggacttgttggcgacacaccaaggaacgatgatagttctagcagcagcaactgcaggg

SEQ ID NO: 67203 - DNA, 60 bp, Artificial
  Synthetic oligonucleotide
atgtgtgttcaggacttgttggcgacacaccaaggaacgatgatagttctagcagcagca

SEQ ID NO: 67204 - DNA, 51 bp, Artificial
  Synthetic oligonucleotide
ttcacgctcaggttatgagactttcaaggtcattggtggttggaccactgc

SEQ ID NO: 67205 - DNA, 56 bp, Artificial
  Synthetic oligonucleotide
agcagcagcaactgcagggatcctaataatgagagagggaatccaggagtgaaagg

SEQ ID NO: 67206 - DNA, 60 bp, Artificial
  Synthetic oligonucleotide
tagttgacaataataactggtctggttactctggtattttctctgttgaaggcaagagct

SEQ ID NO: 67207 - DNA, 60 bp, Artificial
  Synthetic oligonucleotide
tcaatagacaagtcatagttgacaataataactggtctggttactctggtattttctctg

SEQ ID NO: 67208 - DNA, 59 bp, Artificial
  Synthetic oligonucleotide
caagtgaccctctcgttgttgctgcgagtatcattgggatcttgcacttgatattgtgg

SEQ ID NO: 67209 - DNA, 59 bp, Artificial
  Synthetic oligonucleotide
caagtgaccctcttattgttgctgcgagtatcattgggatcttgcacttgatattgtgg

SEQ ID NO: 67210 - DNA, 60 bp, Artificial
  Synthetic oligonucleotide
caaaattctgagggcacaggacaagcagcagatctcaaaagcactcaagcagcaatcaac

SEQ ID NO: 67211 - DNA, 59 bp, Artificial
  Synthetic oligonucleotide
caagtgaccctcttgttgttgctgcgaatatcattgggatcttgcacttgatattgtgg

SEQ ID NO: 67212 - DNA, 60 bp, Artificial
  Synthetic oligonucleotide
cgacggaaagcttgtagacagtattggttcatggtctcaaaatatcctcaggacccagga

SEQ ID NO: 67213 - DNA, 60 bp, Artificial
  Synthetic oligonucleotide
ggctgcttcaagatataccacaaatgtgacaatgcttgcatagaatcgattagaaacgga

SEQ ID NO: 67214 - DNA, 60 bp, Artificial
  Synthetic oligonucleotide
ggttgtttcaagatataccacaaatgtgacaatgcttgcatagagtcaattagaaacggg

SEQ ID NO: 67215 - DNA, 60 bp, Artificial
  Synthetic oligonucleotide
caatggctgcttcaagatataccacaaatgtgacaatgcttgcatagaatcgattagaaa

SEQ ID NO: 67216 - DNA, 60 bp, Artificial
  Synthetic oligonucleotide
ggtggacggttggtatggtttcaggcatcaaaattctgagggcacaggacaagcagcaga

SEQ ID NO: 67217 - DNA, 60 bp, Artificial
  Synthetic oligonucleotide
ggtggacggttggtacggcttcaggcatcaaaattctgagggcacaggacaagcagcaga

SEQ ID NO: 67218 - DNA, 60 bp, Artificial
  Synthetic oligonucleotide
aaaattctgagggcacaggacaagcagcagaccttaagagtacccaagcagctatcaacc

SEQ ID NO: 67219 - DNA, 60 bp, Artificial
  Synthetic oligonucleotide
atcctcaggacccaggagtcggaatgcgtttgcatcaatggaacttgtacagtagtaatg

SEQ ID NO: 67220 - DNA, 60 bp, Artificial
  Synthetic oligonucleotide
ccaaaaatatcctcaggacccaggagtcggaatgcgtttgcatcaatggaacttgtacag

SEQ ID NO: 67221 - DNA, 60 bp, Artificial
  Synthetic oligonucleotide
atggattccaacactgtgtcaagtttccaggtagattgctttctttggcatatccggaaa

SEQ ID NO: 67222 - DNA, 60 bp, Artificial
  Synthetic oligonucleotide
ccaacactgtgtcaagtttccaggtagattgctttctttggcatatccggaaacaagttg

SEQ ID NO: 67223 - DNA, 60 bp, Artificial
  Synthetic oligonucleotide
taatggattccaacactgtgtcaagtttccaggtagattgctttctttggcatatccgga

SEQ ID NO: 67224 - DNA, 60 bp, Artificial
  Synthetic oligonucleotide
cctcttttgacatgagcaatgaaggatcttatttcttcggagacaatgcagaggagtacg

SEQ ID NO: 67225 - DNA, 60 bp, Artificial
  Synthetic oligonucleotide
caggaactatgcacaggcttgccgaccaaagtctcccgccgaacttctcctgccttgaga

SEQ ID NO: 67226 - DNA, 60 bp, Artificial
  Synthetic oligonucleotide
caggaactatgcgcaggcttgccgaccaaagtctcccgccgaacttctcctgcattgaga

SEQ ID NO: 67227 - DNA, 60 bp, Artificial
  Synthetic oligonucleotide
ggaactatgcgcaggcttgccgaccaaagtctcccgccgaacttctcctgccttgagaac

SEQ ID NO: 67228 - DNA, 60 bp, Artificial
  Synthetic oligonucleotide
aaatttgaaatctcaggaactatgcacaggcttgccgaccaaagtctcccgccgaacttc

SEQ ID NO: 67229 - DNA, 60 bp, Artificial
  Synthetic oligonucleotide
agatttgaaatcacaggaactatgcgcaggcttgccgaccaaagtctcccgccgaacttc

SEQ ID NO: 67230 - DNA, 60 bp, Artificial
  Synthetic oligonucleotide
tccagttatgtgtgctcagggcttgttggcgacacacccagaaacaacgatggatctagc

SEQ ID NO: 67231 - DNA, 60 bp, Artificial
  Synthetic oligonucleotide
ccagttatgtgtgctcagggcttgttggcgacacacccagaaacaacgatggatctagca

SEQ ID NO: 67232 - DNA, 60 bp, Artificial
  Synthetic oligonucleotide
ccagttatgtgtgctcagggcttgttggcgacacacccagaaacaacgatgaatctagca

SEQ ID NO: 67233 - DNA, 60 bp, Artificial
  Synthetic oligonucleotide
gtcttttctgttgagagcaaaagctgcatcaataggtgcttttatgtggagctaataaga

SEQ ID NO: 67234 - DNA, 60 bp, Artificial
  Synthetic oligonucleotide
catctgggttacgagagaaccttatgtgtcatgcgatcctagcaggtgttaccagtttgc

SEQ ID NO: 67235 - DNA, 60 bp, Artificial
  Synthetic oligonucleotide
catttgggttacgagagaaccttatgtgtcatgcgatcctagcaggtgttaccagtttgc

SEQ ID NO: 67236 - DNA, 60 bp, Artificial
  Synthetic oligonucleotide
gttatatgtgctcagggcttgttggcgacacacccagaaacaacgatgggtctagtaata

SEQ ID NO: 67237 - DNA, 60 bp, Artificial
  Synthetic oligonucleotide
ttttctgttgagagcaaaagctgcatcaataggtgcttttatgtggagctaataagagga

SEQ ID NO: 67238 - DNA, 60 bp, Artificial
  Synthetic oligonucleotide
taggcaagtcatagttgacagcgataatagatcaggttattctggtattttctctgttga

SEQ ID NO: 67239 - DNA, 60 bp, Artificial
  Synthetic oligonucleotide
ctcagggcttgttggcgacacacccagaaacaacgatgggtctagtaatagcaattgccg

SEQ ID NO: 67240 - DNA, 60 bp, Artificial
  Synthetic oligonucleotide
gggcaatgatggatcaggtgagagaaagtcggaacccaggaaatgctgagatcgaagatc

SEQ ID NO: 67241 - DNA, 60 bp, Artificial
  Synthetic oligonucleotide
aaaaagctcaataatgaggtcagatgcacctattgaaacctgcagttctgaatgcattac

SEQ ID NO: 67242 - DNA, 60 bp, Artificial
  Synthetic oligonucleotide
gaagttggcaacagggatgcggaatataccagagaaacaaactagaggcatattcggcgc

SEQ ID NO: 67243 - DNA, 60 bp, Artificial
  Synthetic oligonucleotide
ttcaggtacctatgggacaggctcatggcctgatggggcggacatcaatctcatgcctat

SEQ ID NO: 67244 - DNA, 60 bp, Artificial
  Synthetic oligonucleotide
ttcaggtacctatgggtcaggctcatggcctgatggggcggacatcaatctcatgcctat

SEQ ID NO: 67245 - DNA, 60 bp, Artificial
  Synthetic oligonucleotide
ttcaggcacctatgggtcaggctcatggcctgatggggcggacatcaatctcatgcctat

SEQ ID NO: 67246 - DNA, 60 bp, Artificial
  Synthetic oligonucleotide
caggcacctatgggtcaggctcatggcctgatggggcggacatcaatctcatgcctatat

SEQ ID NO: 67247 - DNA, 60 bp, Artificial
  Synthetic oligonucleotide
caggtacctatgggtcaggctcatggcctgatggggcggacatcaatctcatgcctatat

SEQ ID NO: 67248 - DNA, 60 bp, Artificial
  Synthetic oligonucleotide
cctaagaggaaccgctctatcctcaacacaagccaaaggggaattcttgaggatgaacag

SEQ ID NO: 67249 - DNA, 60 bp, Artificial
  Synthetic oligonucleotide
tgttccatttcatttgggaaccaggcaagtgtgtatagcatggtccagctcaagttgtca

SEQ ID NO: 67250 - DNA, 60 bp, Artificial
  Synthetic oligonucleotide
gggtgttccatttcatttgggaaccaggcaagtgtgcatagcatggtccagctcaggttg

SEQ ID NO: 67251 - DNA, 60 bp, Artificial
  Synthetic oligonucleotide
tgggtgttccatttcatttgggaaccaggcaagtgtgcatagcatggtccagctcaggtt

SEQ ID NO: 67252 - DNA, 60 bp, Artificial
  Synthetic oligonucleotide
tgttccatttcatttgggaaccaggcaagtgtgcatagcatggtccagctcgagttgtca

SEQ ID NO: 67253 - DNA, 60 bp, Artificial
  Synthetic oligonucleotide
gggtgttccatttcatttgggaaccaggcaagtgtgtatagcatggtccagctcaagttg

SEQ ID NO: 67254 - DNA, 60 bp, Artificial
  Synthetic oligonucleotide
tgggtgttccatttcatttgggaaccaggcaagtgtgtatagcatggtccagctcaagtt

SEQ ID NO: 67255 - DNA, 60 bp, Artificial
  Synthetic oligonucleotide
tgggtgttccatttcatttgggaaccaggcaagtgtgcatggcatggtccagctcaagct

SEQ ID NO: 67256 - DNA, 60 bp, Artificial
  Synthetic oligonucleotide
atgtgcactgaactccaactcagtgactatgaagggaggctgatccagaacagcataaca

SEQ ID NO: 67257 - DNA, 60 bp, Artificial
  Synthetic oligonucleotide
gcactgaactccaactcagtgactatgaagggaggctgatccagaacagcataacaatag

SEQ ID NO: 67258 - DNA, 60 bp, Artificial
  Synthetic oligonucleotide
cgaccatgaagggaggctgatccagaacagcataacaatagagagaatgattctctctgc

SEQ ID NO: 67259 - DNA, 55 bp, Artificial
  Synthetic oligonucleotide
cgaccatgaagggaggctgatccagaacagcataacaatagagagaatgattctc

SEQ ID NO: 67260 - DNA, 60 bp, Artificial
  Synthetic oligonucleotide
catggcgtctcaaggcaccaaacgatcttatgagcagatggaaactggtggagaacgcca

SEQ ID NO: 67261 - DNA, 59 bp, Artificial
  Synthetic oligonucleotide
atggcgtctcaaggcaccaaacgatcttatgagcaaatggaaactggtggtgaacgcca

SEQ ID NO: 67262 - DNA, 59 bp, Artificial
  Synthetic oligonucleotide
atggcgtctcaaggcaccaaacgatcttatgagcagatggaaactggtggtgaacgcca

SEQ ID NO: 67263 - DNA, 60 bp, Artificial
  Synthetic oligonucleotide
gggaggttttacatacagatgtgcactgaactccaactcagcgaccatgaagggaggctg

SEQ ID NO: 67264 - DNA, 60 bp, Artificial
  Synthetic oligonucleotide
gctgcccagagggcaatgatggatcaagtgagagaaagtcggaacccaggaaacgctgag

SEQ ID NO: 67265 - DNA, 60 bp, Artificial
  Synthetic oligonucleotide
tgtgacaatgcctgcatagggtcaatcagaaatggaacttatgaccatgatgtatacaga

SEQ ID NO: 67266 - DNA, 60 bp, Artificial
  Synthetic oligonucleotide
tgacaatgcctgcatagggtcaatcagaaatggaacttatgaccatgatgtatacagaaa

SEQ ID NO: 67267 - DNA, 60 bp, Artificial
  Synthetic oligonucleotide
ccacggctaaggctatggaacagatggctggatcaagtgagcaagcagcggaagccatgg

SEQ ID NO: 67268 - DNA, 60 bp, Artificial
  Synthetic oligonucleotide
caccacggctaaggctatggaacagatggctggatcaagtgagcaagcagcggaagccat

SEQ ID NO: 67269 - DNA, 60 bp, Artificial
  Synthetic oligonucleotide
gggaaaatgctgaggacatgggcaatggttgcttcaagatataccacaaatgtgacaatg

SEQ ID NO: 67270 - DNA, 60 bp, Artificial
  Synthetic oligonucleotide
ctaaccgaggtcgaaacgtacgttctttctatcatcccgtcaggccccctcaaagccgag

SEQ ID NO: 67271 - DNA, 60 bp, Artificial
  Synthetic oligonucleotide
tcctcatcgaatccttgatggaatagactgcacactgatagatgctctattgggggaccc

SEQ ID NO: 67272 - DNA, 60 bp, Artificial
  Synthetic oligonucleotide
tcctcatcgaatcctcgatggaatggactgcacactgatagatgctctattgggggaccc

SEQ ID NO: 67273 - DNA, 60 bp, Artificial
  Synthetic oligonucleotide
tcctcatcgaatccttgatggaataaactgcacactgatagatgctctattgggggaccc

SEQ ID NO: 67274 - DNA, 60 bp, Artificial
  Synthetic oligonucleotide
cggtttgaaaagagggccttctacggaaggagtgcctgagtccatgagggaagaatatca

SEQ ID NO: 67275 - DNA, 60 bp, Artificial
  Synthetic oligonucleotide
agcaatcaaccaaatcaatgggaaactgaataggttaatcgggaaaacaaacgagaaatt

SEQ ID NO: 67276 - DNA, 60 bp, Artificial
  Synthetic oligonucleotide
cagatcttgaggctctcatggagtggctaaagacaagaccaatcctgtcacctctgacta

SEQ ID NO: 67277 - DNA, 60 bp, Artificial
  Synthetic oligonucleotide
ccaggcaagtgtgcatagcatggtccagctcaagttgtcacgatggaaaagcatggctgc

SEQ ID NO: 67278 - DNA, 60 bp, Artificial
  Synthetic oligonucleotide
tcaccgaagagggagcaattgttggcgaaatctcaccattgccttcttttccaggccata

SEQ ID NO: 67279 - DNA, 60 bp, Artificial
  Synthetic oligonucleotide
tcagaagtagaagggagaatccaagacctagagaaatacgttgaagacactaaaatagat

SEQ ID NO: 67280 - DNA, 51 bp, Artificial
  Synthetic oligonucleotide
cagctactatttgaagtggaacaggagataagaactttctcgtttcagctt

SEQ ID NO: 67281 - DNA, 60 bp, Artificial
  Synthetic oligonucleotide
caagtgaccctcttgttgttgctgcgagtatcattgggatcttgcacttgatattgtgga

SEQ ID NO: 67282 - DNA, 52 bp, Artificial
  Synthetic oligonucleotide
atttgggtgacaagagaaccttatgtgtcatgcgatcctggcaagtgttatc

SEQ ID NO: 67283 - DNA, 54 bp, Artificial
  Synthetic oligonucleotide
ctactgcttgaagtggagcaagagataagaactttctcgtttcagtttatttaa

SEQ ID NO: 67284 - DNA, 56 bp, Artificial
  Synthetic oligonucleotide
ctactgcttgaagtggagcaagagataagaactttctcgtttcagtttatttaatg

SEQ ID NO: 67285 - DNA, 56 bp, Artificial
  Synthetic oligonucleotide
tgcttgaagtggagcaagagataagaactttctagtttcagcttatttaataataa

SEQ ID NO: 67286 - DNA, 60 bp, Artificial
  Synthetic oligonucleotide
caactgttacccttatgatgtgccggattatgcctcccttaggtcactagttgcctcatc

SEQ ID NO: 67287 - DNA, 52 bp, Artificial
  Synthetic oligonucleotide
gtccctaagaggaagaggcagcactcttggtctggacatcgaaacagctact

SEQ ID NO: 67288 - DNA, 60 bp, Artificial
  Synthetic oligonucleotide
gaaagaacacagatcttgaggctctcatggaatggctaaagacaagacccatcctgtcac

SEQ ID NO: 67289 - DNA, 60 bp, Artificial
  Synthetic oligonucleotide
agcattaaacaaccggttccagatcaaaggtgttgagctgaagtcaggatacaaagactg

SEQ ID NO: 67290 - DNA, 60 bp, Artificial
  Synthetic oligonucleotide
gcattaaacaaccggttccagatcaaaggtgttgagctgaagtcaggatacaaagactgg

SEQ ID NO: 67291 - DNA, 60 bp, Artificial
  Synthetic oligonucleotide
gcattaaacaaccggttccagatcaaaggtgttgagctgaagtcaggatacaaagattgg

SEQ ID NO: 67292 - DNA, 60 bp, Artificial
  Synthetic oligonucleotide
tatcctcgatatcctggtgtcagatgtgtctgcagagacaactggaaaggctccaatagg

SEQ ID NO: 67293 - DNA, 60 bp, Artificial
  Synthetic oligonucleotide
gaatctgatgaggcacttaaaatgaccatggtctccacacctgctccgcgatacataact

SEQ ID NO: 67294 - DNA, 60 bp, Artificial
  Synthetic oligonucleotide
gaatctgatgaggcacttaaaatgaccatggtctccacacctgcttcgcgatacataact

SEQ ID NO: 67295 - DNA, 60 bp, Artificial
  Synthetic oligonucleotide
tctcatggaatggctaaagacaagaccaatcctgtcacctttgactaaggggattttggg

SEQ ID NO: 67296 - DNA, 60 bp, Artificial
  Synthetic oligonucleotide
ctcatggaatggctaaagacaagaccaatcctgtcacctttgactaaggggattttgggg

SEQ ID NO: 67297 - DNA, 60 bp, Artificial
  Synthetic oligonucleotide
ggcctttgatgatggaaatgacgtgtggatgggaagaacgatcagcgagaagttacgctc

SEQ ID NO: 67298 - DNA, 60 bp, Artificial
  Synthetic oligonucleotide
gcctttgatgatggaaatgacgtgtggatgggaagaacgatcagcgagaagttacgctca

SEQ ID NO: 67299 - DNA, 60 bp, Artificial
  Synthetic oligonucleotide
ggtcatggagtgaaaggctgggcctttgatgatggaaatgacgtgtggatgggaagaacg

SEQ ID NO: 67300 - DNA, 60 bp, Artificial
  Synthetic oligonucleotide
tatcctcgataccctggtgtcagatgtgtctgcagagacaactggaaaggctccaatagg

SEQ ID NO: 67301 - DNA, 60 bp, Artificial
  Synthetic oligonucleotide
caggtccggttattctggtattttctccgttgaaggcaaaagctgcatcaatcggtgctt

SEQ ID NO: 67302 - DNA, 60 bp, Artificial
  Synthetic oligonucleotide
aggtccggttattctggtattttctccgttgaaggcaaaagctgcatcaatcggtgcttt

SEQ ID NO: 67303 - DNA, 60 bp, Artificial
  Synthetic oligonucleotide
ggtccggttattctggtattttctccgttgaaggcaaaagctgcatcaatcggtgctttt

SEQ ID NO: 67304 - DNA, 60 bp, Artificial
  Synthetic oligonucleotide
gaacaacatgataaacaatgatcttggaccagcaactgcccaaatggctcttcagctatt

SEQ ID NO: 67305 - DNA, 60 bp, Artificial
  Synthetic oligonucleotide
gagcattggagtaacagtgataaagaacaacatgataaacaatgatcttggaccagcaac

SEQ ID NO: 67306 - DNA, 60 bp, Artificial
  Synthetic oligonucleotide
cctctgactaaggggattttaggattcgtgttcacgctcaccgtgcccagtgagcgagga

SEQ ID NO: 67307 - DNA, 60 bp, Artificial
  Synthetic oligonucleotide
cctctgactaaggggattttggggtttgtgttcacgctcaccgtgcccagtgagcgagga

SEQ ID NO: 67308 - DNA, 60 bp, Artificial
  Synthetic oligonucleotide
ttggggtttgtgttcacgctcaccgtgcccagtgagcgaggactgcaacgtagacgcttt

SEQ ID NO: 67309 - DNA, 60 bp, Artificial
  Synthetic oligonucleotide
ggggccaaagaaatagcgctcagttattctgctggtgcacttgccagttgcatgggcctc

SEQ ID NO: 67310 - DNA, 60 bp, Artificial
  Synthetic oligonucleotide
ggggccaaagaaatagctctcagttattctgctggtgcacttgccagttgcatgggcctc

SEQ ID NO: 67311 - DNA, 60 bp, Artificial
  Synthetic oligonucleotide
ggggccaaagaaatagcacttagttattctgctggtgcacttgccagttgcatgggcctc

SEQ ID NO: 67312 - DNA, 60 bp, Artificial
  Synthetic oligonucleotide
aagggctttcaccgaagagggagcaattgttggcgaaatttcaccattgccttcttttcc

SEQ ID NO: 67313 - DNA, 60 bp, Artificial
  Synthetic oligonucleotide
tgaccgactagagaccatagtattattaagggctttcaccgaagagggagcaattgttgg

SEQ ID NO: 67314 - DNA, 60 bp, Artificial
  Synthetic oligonucleotide
gttgaacgcagcaaagctttcagcaactgttacccttatgatgtgccagattatgcctcc

SEQ ID NO: 67315 - DNA, 60 bp, Artificial
  Synthetic oligonucleotide
cgcagcaaagctttcagcaactgttacccttatgatgtgccagattatgcctcccttagg

SEQ ID NO: 67316 - DNA, 60 bp, Artificial
  Synthetic oligonucleotide
tgtaaaggattatagcattgtttccagttatgtgtgctcaggacttgttggagacacacc

SEQ ID NO: 67317 - DNA, 54 bp, Artificial
  Synthetic oligonucleotide
caagttgtcacgatggaaaagcatggctgcatgtttgtgtcactgggtatgata

SEQ ID NO: 67318 - DNA, 60 bp, Artificial
  Synthetic oligonucleotide
gttcaagttgtcacgatggaaaagcatggctgcatgtttgtgtcactgggcatgataaaa

SEQ ID NO: 67319 - DNA, 60 bp, Artificial
  Synthetic oligonucleotide
tcatccgtcgggaagatgattgatggaattgggcgattctacatccaaatgtgcactgaa

SEQ ID NO: 67320 - DNA, 60 bp, Artificial
  Synthetic oligonucleotide
gtgaaaggagttggaacaatagcaatggaattgatcagaatgatcaaacgtgggatcaat

SEQ ID NO: 67321 - DNA, 60 bp, Artificial
  Synthetic oligonucleotide
ggggcctgccccagatatgttaagcaaaacactctgaagttggcaacagggatgcggaat

SEQ ID NO: 67322 - DNA, 60 bp, Artificial
  Synthetic oligonucleotide
aatacgttgaagacactaaaatagatctctggtcttacaatgcggagcttcttgtcgctc

SEQ ID NO: 67323 - DNA, 60 bp, Artificial
  Synthetic oligonucleotide
aatatgttgaagacactaaaatagatctctggtcttacaacgcggagcttcttgttgccc

SEQ ID NO: 67324 - DNA, 60 bp, Artificial
  Synthetic oligonucleotide
aatatgttgaagacactaaaatagatctctggtcttacaacgcggagcttcttgtcgccc

SEQ ID NO: 67325 - DNA, 60 bp, Artificial
  Synthetic oligonucleotide
gatacgttgaagacactaaaatagatctctggtcctacaacgcggaacttcttgtcgctc

SEQ ID NO: 67326 - DNA, 60 bp, Artificial
  Synthetic oligonucleotide
aatacgttgaagacactaaaatagatctctggtcttacaacgcggagcttcttgttgccc

SEQ ID NO: 67327 - DNA, 60 bp, Artificial
  Synthetic oligonucleotide
aatatgttgaagacactaaaatagatctctggtcttacaatgcggagcttcttgtcgccc

SEQ ID NO: 67328 - DNA, 60 bp, Artificial
  Synthetic oligonucleotide
ttcatttacgacggaaagcttgtagacagtattggttcatggtctcaaaatatcctcagg

SEQ ID NO: 67329 - DNA, 60 bp, Artificial
  Synthetic oligonucleotide
gggtcctcatcggaggacttgaatggaatgataacacagttcaagtctctaaaactctac

SEQ ID NO: 67330 - DNA, 52 bp, Artificial
  Synthetic oligonucleotide
cctgatggggcgaatatcaacttcatgcctatataagctttcgcaattttag

SEQ ID NO: 67331 - DNA, 60 bp, Artificial
  Synthetic oligonucleotide
cacactggaaaaagctcaataatgaggtcagatgcacctattgaaacctgcagttctgaa

SEQ ID NO: 67332 - DNA, 60 bp, Artificial
  Synthetic oligonucleotide
cacactgggaaaagctcaataatgaggtcagatgcacctattgaaacctgcagttctgaa

SEQ ID NO: 67333 - DNA, 60 bp, Artificial
  Synthetic oligonucleotide
ggagggaatggtggacggttggtacggtttcaggcatcaaaattctgagggcacaggaca

SEQ ID NO: 67334 - DNA, 60 bp, Artificial
  Synthetic oligonucleotide
gggaggggatggtggacggttggtacggtttcaggcatcaaaattctgagggcacaggac

SEQ ID NO: 67335 - DNA, 60 bp, Artificial
  Synthetic oligonucleotide
gggagggaatggtagacggttggtacggtttcaggcatcaaaattctgagggcacaggac

SEQ ID NO: 67336 - DNA, 60 bp, Artificial
  Synthetic oligonucleotide
caagccttacaactattgcttgaagtggagcaagagataagaactttctcgtttcagctt

SEQ ID NO: 67337 - DNA, 60 bp, Artificial
  Synthetic oligonucleotide
aggccccctcaaagccgagatcgcgcagagacttgaagatgtctttgctggaaagaacac

SEQ ID NO: 67338 - DNA, 60 bp, Artificial
  Synthetic oligonucleotide
acatctgggtgacaagagaaccttatgtgtcatgcgatcctgacaagtgttatcaatttg

SEQ ID NO: 67339 - DNA, 60 bp, Artificial
  Synthetic oligonucleotide
cgcagcaaagctttcagcaactgttacccttatgatgtgccggattatgcctcccttagg

SEQ ID NO: 67340 - DNA, 60 bp, Artificial
  Synthetic oligonucleotide
accaaaagaagccaacaaactgtaatcccgaatatcgggtctagaccctgggtaaggggt

SEQ ID NO: 67341 - DNA, 60 bp, Artificial
  Synthetic oligonucleotide
cgattaattcaaaatagcataacaatagagagaatggtgctctctgcttttgatgagagg

SEQ ID NO: 67342 - DNA, 60 bp, Artificial
  Synthetic oligonucleotide
ggggcctgtcccagatatgttaagcaaaacactctgaagttggcaacagggatgcggaat

SEQ ID NO: 67343 - DNA, 50 bp, Artificial
  Synthetic oligonucleotide
ctgggtgacaagagaaccttatgtgtcatgcgatcctgacaagtgttatc

SEQ ID NO: 67344 - DNA, 60 bp, Artificial
  Synthetic oligonucleotide
cagctggtgtggatggcatgtcattctgctgcatttgaagatttaagattgttaagcttc

SEQ ID NO: 67345 - DNA, 60 bp, Artificial
  Synthetic oligonucleotide
tcagctggtgtggatggcatgtcattctgctgcatttgaagatttaagattgttaagctt

SEQ ID NO: 67346 - DNA, 60 bp, Artificial
  Synthetic oligonucleotide
gggaaaagctcaataatgaggtcagatgcacccattggcacctgcagttctgaatgcatc

SEQ ID NO: 67347 - DNA, 60 bp, Artificial
  Synthetic oligonucleotide
tcggggttactttaaaatacgcactgggaaaagctcaataatgaggtcagatgcacccat

SEQ ID NO: 67348 - DNA, 60 bp, Artificial
  Synthetic oligonucleotide
cctcgaggttacttcaaagtgaacactgggaaaagctcaataatgaggtcagatgcacct

SEQ ID NO: 67349 - DNA, 60 bp, Artificial
  Synthetic oligonucleotide
gtctttgctggaaagaacacagatcttgaggctctcatggaatggctaaagacaagacca

SEQ ID NO: 67350 - DNA, 60 bp, Artificial
  Synthetic oligonucleotide
gtcatagttgacagcgataatagatcaggttattctggtattttctctgttgagggaaaa

SEQ ID NO: 67351 - DNA, 60 bp, Artificial
  Synthetic oligonucleotide
atcagaatggaccaggcaatcatggagaaaaacatcatgttgaaagcgaatttcagtgtg

SEQ ID NO: 67352 - DNA, 60 bp, Artificial
  Synthetic oligonucleotide
ctcccttttgaaagaacaaccgttatggcagctttcagcggtaacaatgagggacggaca

SEQ ID NO: 67353 - DNA, 60 bp, Artificial
  Synthetic oligonucleotide
ccaaatgaaaacccagcccacaaaagtcaattggtgtggatggcatgtcactctgctgca

SEQ ID NO: 67354 - DNA, 60 bp, Artificial
  Synthetic oligonucleotide
tgatgagaggaggaataaatacttagaggagcaccccagtgctgggaaggaccctaagaa

SEQ ID NO: 67355 - DNA, 60 bp, Artificial
  Synthetic oligonucleotide
ggggtcagttgcacataagtcttgtctgccggcttgtgtatatgggcttgcagtggcaag

SEQ ID NO: 67356 - DNA, 60 bp, Artificial
  Synthetic oligonucleotide
caatcgacagagggcatccgcgggccaaatcagtgtgcaacctacattctcagtgcaacg

SEQ ID NO: 67357 - DNA, 60 bp, Artificial
  Synthetic oligonucleotide
gattatagcattgtttccagttatgtgtgctcagggcttgttggagacacacccagaaaa

SEQ ID NO: 67358 - DNA, 60 bp, Artificial
  Synthetic oligonucleotide
gagatatcaagagactggttcatgctcatgcccaagcagaaagtggcaggttccctttgc

SEQ ID NO: 67359 - DNA, 60 bp, Artificial
  Synthetic oligonucleotide
atgtcaagagactggttcatgctcatgcccaagcagaaagtgacaggatccctttgcatc

SEQ ID NO: 67360 - DNA, 60 bp, Artificial
  Synthetic oligonucleotide
tcaagggactggttcatgctcatgcccaagcagaaagtggcaggttccctttgtatcaga

SEQ ID NO: 67361 - DNA, 60 bp, Artificial
  Synthetic oligonucleotide
gactcttgaggaaatgtcaagagactggttcatgctcatgcccaagcagaaagtgacagg

SEQ ID NO: 67362 - DNA, 60 bp, Artificial
  Synthetic oligonucleotide
gaccactaaaagactaacaattctcggaaaagatgccggcactttaattgaagacccaga

SEQ ID NO: 67363 - DNA, 60 bp, Artificial
  Synthetic oligonucleotide
ggttagcattgatcggtttttgagagttcgagaccaacgtgggaatgtattactatctcc

SEQ ID NO: 67364 - DNA, 60 bp, Artificial
  Synthetic oligonucleotide
aaatggttcctgagagaaatgagcaaggacaaactctatggagtaaaatgagtgatgccg

SEQ ID NO: 67365 - DNA, 52 bp, Artificial
  Synthetic oligonucleotide
atcagggagacaggaaaagaacccgtcacttaggatgaaatggatgatggca

SEQ ID NO: 67366 - DNA, 60 bp, Artificial
  Synthetic oligonucleotide
gagtaaaatgagtgatgctggatcagatcgagtgatggtatcacctttggctgtgacatg

SEQ ID NO: 67367 - DNA, 60 bp, Artificial
  Synthetic oligonucleotide
aactctatggagtaaaatgagtgatgctggatcagatcgagtgatggtatcacctttggc

SEQ ID NO: 67368 - DNA, 60 bp, Artificial
  Synthetic oligonucleotide
ccataattaagaagtacacatcggggagacaggaaaagaacccgtcacttaggatgaaat

SEQ ID NO: 67369 - DNA, 60 bp, Artificial
  Synthetic oligonucleotide
gaagtacacatcggggagacaggaaaagaacccgtcacttaggatgaaatggatgatggc

SEQ ID NO: 67370 - DNA, 60 bp, Artificial
  Synthetic oligonucleotide
cagagagggtagtggttagcattgatcggtttttgagagttcgagaccaacgtgggaatg

SEQ ID NO: 67371 - DNA, 60 bp, Artificial
  Synthetic oligonucleotide
gcatgataaaagcagttagaggtgacctgaatttcgttaacagggcaaatcagcggttga

SEQ ID NO: 67372 - DNA, 60 bp, Artificial
  Synthetic oligonucleotide
ggattgcatgataaaagcagttagaggtgacctgaatttcgtcaacagggcaaaccagcg

SEQ ID NO: 67373 - DNA, 60 bp, Artificial
  Synthetic oligonucleotide
cacaagaggattgcatgataaaagcagttagaggtgacctgaatttcgttaacagggcaa

SEQ ID NO: 67374 - DNA, 60 bp, Artificial
  Synthetic oligonucleotide
gtgttttcacaagaggattgcatgataaaagcagttagaggtgacctgaatttcgtcaac

SEQ ID NO: 67375 - DNA, 60 bp, Artificial
  Synthetic oligonucleotide
aaccctactgaagaacaagctgtggatatatgcaaggctgcaatggggttgagaatcagc

SEQ ID NO: 67376 - DNA, 60 bp, Artificial
  Synthetic oligonucleotide
ggcagaaccctactgaagaacaagctgtggatatatgcaaggctgcaatggggttgagaa

SEQ ID NO: 67377 - DNA, 60 bp, Artificial
  Synthetic oligonucleotide
ggcagaaccctaccgaagaacaagctgtggatatatgcaaggctgcaatggggttgagaa

SEQ ID NO: 67378 - DNA, 60 bp, Artificial
  Synthetic oligonucleotide
ggaccatatggccataattaagaagtacacatcggggagacaggaaaagaacccgtcact

SEQ ID NO: 67379 - DNA, 60 bp, Artificial
  Synthetic oligonucleotide
caagatacgccgaaaagtagacataaaccctggtcatgcagacctcagtgccaaggaggc

SEQ ID NO: 67380 - DNA, 60 bp, Artificial
  Synthetic oligonucleotide
atactaacaaaaaccacagtggaccatatggccataattaagaagtacacatcagggaga

SEQ ID NO: 67381 - DNA, 60 bp, Artificial
  Synthetic oligonucleotide
gcagtctcgcactcgcgagatactgacaaaaaccacagtggaccatatggccataattaa

SEQ ID NO: 67382 - DNA, 60 bp, Artificial
  Synthetic oligonucleotide
acagtggaccatatggccataattaagaagtacacatcagggagacaggaaaagaacccg

SEQ ID NO: 67383 - DNA, 60 bp, Artificial
  Synthetic oligonucleotide
cacagtggaccatatggccataattaagaagtacacatcggggagacaggaaaagaaccc

SEQ ID NO: 67384 - DNA, 60 bp, Artificial
  Synthetic oligonucleotide
cagatccactagcatctttattggagatgtgccacagcacactgattggcgggacaagga

SEQ ID NO: 67385 - DNA, 60 bp, Artificial
  Synthetic oligonucleotide
ctagcatctttattggagatgtgccacagcacactgattggcgggacaaggatggtggac

SEQ ID NO: 67386 - DNA, 60 bp, Artificial
  Synthetic oligonucleotide
aatacgccgaagagttgacataaaccctggtcatgcagacctcagtgccaaggaggcaca

SEQ ID NO: 67387 - DNA, 60 bp, Artificial
  Synthetic oligonucleotide
gccgaagagtagacataaaccctggtcatgcagacctcagtgccaaggaggcacaggatg

SEQ ID NO: 67388 - DNA, 60 bp, Artificial
  Synthetic oligonucleotide
gccgaaaagtagacataaaccctggtcatgcagacctcagtgccaaggaggcacaagatg

SEQ ID NO: 67389 - DNA, 60 bp, Artificial
  Synthetic oligonucleotide
atcagggatgagaatacttgtaaggggcaattctcctgtattcaactacaacaagaccac

SEQ ID NO: 67390 - DNA, 60 bp, Artificial
  Synthetic oligonucleotide
cagggatgagaatacttgtaaggggcaattctcctgtattcaactacaacaagaccacta

SEQ ID NO: 67391 - DNA, 60 bp, Artificial
  Synthetic oligonucleotide
actgacaataacttactcatcgtcaatgatgtgggagattaacggtcctgagtcggtttt

SEQ ID NO: 67392 - DNA, 60 bp, Artificial
  Synthetic oligonucleotide
cttactcatcgtcaatgatgtgggagattaacggtcctgagtcggttttggtcaatacct

SEQ ID NO: 67393 - DNA, 60 bp, Artificial
  Synthetic oligonucleotide
attcaactacaacaagaccactaaaagactaacaattctcggaaaagatgccggcacttt

SEQ ID NO: 67394 - DNA, 60 bp, Artificial
  Synthetic oligonucleotide
attcaactacaacaagaccactaaaagactaacagttctcggaaaagatgccggcacttt

SEQ ID NO: 67395 - DNA, 60 bp, Artificial
  Synthetic oligonucleotide
ctagcatctttattggagatgtgccacagcacacagattggcgggacaaggatgatggac

SEQ ID NO: 67396 - DNA, 60 bp, Artificial
  Synthetic oligonucleotide
gacattcttaggcagaaccctactgaagaacaagctgtggatatatgcaaggctgcaatg

SEQ ID NO: 67397 - DNA, 60 bp, Artificial
  Synthetic oligonucleotide
taaggggatcagttgcacataagtcttgcctgcctgcttgtgtgtatgggcttgcagtgg

SEQ ID NO: 67398 - DNA, 60 bp, Artificial
  Synthetic oligonucleotide
cggtcagcacttattctaaggggatcagttgcacataaatcttgtctgcctgcttgtgtg

SEQ ID NO: 67399 - DNA, 60 bp, Artificial
  Synthetic oligonucleotide
agtcaattggtatggatggcatgccactctgctgcatttgaggatttacgtatatcaagt

SEQ ID NO: 67400 - DNA, 60 bp, Artificial
  Synthetic oligonucleotide
acccagctcacaagagtcaattagtgtggatggcatgccactctgctgcatttgaggatc

SEQ ID NO: 67401 - DNA, 60 bp, Artificial
  Synthetic oligonucleotide
gcaaggctcaacacttcccagaaggtctggagccgcaggtgctgcagtgaaaggagttgg

SEQ ID NO: 67402 - DNA, 60 bp, Artificial
  Synthetic oligonucleotide
gcgtgggatcaatgaccgaaacttctggagaggtgaaaatggaccaaggacaaggattgc

SEQ ID NO: 67403 - DNA, 60 bp, Artificial
  Synthetic oligonucleotide
tgggatcaatgaccgaaacttctggagaggtgaaaatggacgaaggacaagggttgcata

SEQ ID NO: 67404 - DNA, 60 bp, Artificial
  Synthetic oligonucleotide
ttctacatccagatgtgcaccgaactcaaactcagtgactatgagggacgactaattcaa

SEQ ID NO: 67405 - DNA, 60 bp, Artificial
  Synthetic oligonucleotide
ccagatgtgcaccgaactcaaactcagtgactatgagggacgactaattcaaaatagcat

SEQ ID NO: 67406 - DNA, 60 bp, Artificial
  Synthetic oligonucleotide
ggatcaatgaccgaaacttctggagaggtgaaaatggacgaaggacaagggttgcatatg

SEQ ID NO: 67407 - DNA, 60 bp, Artificial
  Synthetic oligonucleotide
tagcacggtcagcacttattctaaggggatcagttgcacataaatcttgtctgcctgctt

SEQ ID NO: 67408 - DNA, 60 bp, Artificial
  Synthetic oligonucleotide
gattatgcctcccttaggtcactagttgcctcatccggcaccctggagtttacccaagaa

SEQ ID NO: 67409 - DNA, 60 bp, Artificial
  Synthetic oligonucleotide
tatataaataggacaggaacatttgaattcacaagctttttttatcgctatggatttgta

SEQ ID NO: 67410 - DNA, 60 bp, Artificial
  Synthetic oligonucleotide
ctcaaggcaccaaacggtcttatgaacagatggaaactgatggggatcgccagaatgcaa

SEQ ID NO: 67411 - DNA, 60 bp, Artificial
  Synthetic oligonucleotide
tctcaaggcaccaaacggtcttatgaacagatggaaactgatggggatcgccagaatgca

SEQ ID NO: 67412 - DNA, 60 bp, Artificial
  Synthetic oligonucleotide
ggcaccaaacggtcttatgaacagatggaaactgatggggatcgccagaatgcaactgag

SEQ ID NO: 67413 - DNA, 60 bp, Artificial
  Synthetic oligonucleotide
ggcgtctcaaggcaccaaacggtcttatgaacagatggaaactgatggggatcgccagaa

SEQ ID NO: 67414 - DNA, 60 bp, Artificial
  Synthetic oligonucleotide
aatcatggcgtctcaaggcaccaaacggtcttatgaacagatggaaactgatggggatcg

SEQ ID NO: 67415 - DNA, 60 bp, Artificial
  Synthetic oligonucleotide
gtctcaaggcaccaaacggtcttatgaacagatggaaactgatggggatcgccagaatgc

SEQ ID NO: 67416 - DNA, 60 bp, Artificial
  Synthetic oligonucleotide
cggtcttatgaacagatggaaactgatggggatcgccagaatgcaactgagattagggca

SEQ ID NO: 67417 - DNA, 60 bp, Artificial
  Synthetic oligonucleotide
acggtcttatgaacagatggaaactgatggggatcgccagaatgcaactgagattaggtc

SEQ ID NO: 67418 - DNA, 60 bp, Artificial
  Synthetic oligonucleotide
gggcggttgatccaaaacagcttgacaatagagagaatggtgctctctgcttttgatgag

SEQ ID NO: 67419 - DNA, 60 bp, Artificial
  Synthetic oligonucleotide
gttgcatgggcctcatatacaacagaatgggaactgtgaccactgaagtggcatttggcc

SEQ ID NO: 67420 - DNA, 54 bp, Artificial
  Synthetic oligonucleotide
atggagcaaattgcacactgatagatgctctattgggggaccctcactgtgatg

SEQ ID NO: 67421 - DNA, 60 bp, Artificial
  Synthetic oligonucleotide
catggggccaaagaaatagctctcagttattctgctggtgcacttgccagttgcatgggc

SEQ ID NO: 67422 - DNA, 60 bp, Artificial
  Synthetic oligonucleotide
cattgaacgcagcaaggctttcagcaactgttacccttatgatgtgccagagcatgcctc

SEQ ID NO: 67423 - DNA, 60 bp, Artificial
  Synthetic oligonucleotide
gaacgcagcaaggctttcagcaactgttacccttatgatgtgccagagcatgcctccctt

SEQ ID NO: 67424 - DNA, 60 bp, Artificial
  Synthetic oligonucleotide
gactaggaaaaggatacatgttcgagagtaagagaatgaagctccgaacacaaatacccg

SEQ ID NO: 67425 - DNA, 60 bp, Artificial
  Synthetic oligonucleotide
cacactcctggattcccaagaggaaccgctctattctcaacacaagccaaaggggaattc

SEQ ID NO: 67426 - DNA, 60 bp, Artificial
  Synthetic oligonucleotide
ccagccaaaagtatggaatatgatgccgttgcaactacacactcctggattcccaagagg

SEQ ID NO: 67427 - DNA, 60 bp, Artificial
  Synthetic oligonucleotide
atatgatgccgttgcaactacacactcctggattcccaagaggaaccgctctattctcaa

SEQ ID NO: 67428 - DNA, 60 bp, Artificial
  Synthetic oligonucleotide
ccgttgcaactacacactcctggattcccaagaggaaccgctctattctcaacacaagcc

SEQ ID NO: 67429 - DNA, 60 bp, Artificial
  Synthetic oligonucleotide
gcacataagtcttgcctgcctgcttgtgtgtatgggcttgcagtggcaagtgggcatgac

SEQ ID NO: 67430 - DNA, 60 bp, Artificial
  Synthetic oligonucleotide
catccgctggccagatcagtgtgcaacctacattctcagtgcaacggaatctcccttttg

SEQ ID NO: 67431 - DNA, 60 bp, Artificial
  Synthetic oligonucleotide
accctaagaaaactggaggacccatatataaaagagtagacggaaagtggatgagagaac

SEQ ID NO: 67432 - DNA, 60 bp, Artificial
  Synthetic oligonucleotide
gatcaaacgtgggatcaatgaccgaaacttctggaggggtgaaaatggacgaaggacaag

SEQ ID NO: 67433 - DNA, 60 bp, Artificial
  Synthetic oligonucleotide
gaatgtgcaatattctcaaaggaaaatttcagacagctgcccagagggcaatgatggatc

SEQ ID NO: 67434 - DNA, 60 bp, Artificial
  Synthetic oligonucleotide
gagggcatccgcgggccaaatcagtgtgcaacctacattctcagtgcaacggaatctccc

SEQ ID NO: 67435 - DNA, 60 bp, Artificial
  Synthetic oligonucleotide
caagaggaaagctttccacaagaggagttcagattgcttcaaatgagaatgtggaagcca

SEQ ID NO: 67436 - DNA, 60 bp, Artificial
  Synthetic oligonucleotide
ggtcgggatagaccccttcaagttactccaaaacagtcaagtgttcagcctgatcagacc

SEQ ID NO: 67437 - DNA, 60 bp, Artificial
  Synthetic oligonucleotide
ttcactggtcgggatagaccccttcaagttactccaaaacagtcaagtgttcagcctgat

SEQ ID NO: 67438 - DNA, 60 bp, Artificial
  Synthetic oligonucleotide
gcagtggcaagtgggcatgacttcgaaagagaagggtattcactggtcgggatagacccc

SEQ ID NO: 67439 - DNA, 60 bp, Artificial
  Synthetic oligonucleotide
gtatatgggcttgcagtggcaagtgggcatgacttcgaaagagaagggtattcactggtc

SEQ ID NO: 67440 - DNA, 60 bp, Artificial
  Synthetic oligonucleotide
atggactccaatactgtgtcaagctttcaggtagactgtttcctttggcacatccgcaaa

SEQ ID NO: 67441 - DNA, 60 bp, Artificial
  Synthetic oligonucleotide
gactccaatactgtgtcaagctttcaggtagactgtttcctttggcacatccgcaaacgg

SEQ ID NO: 67442 - DNA, 60 bp, Artificial
  Synthetic oligonucleotide
atcggctccgccgagatcaaaagtccctaaaaggaagaggcaacacccttagcctcgaca

SEQ ID NO: 67443 - DNA, 60 bp, Artificial
  Synthetic oligonucleotide
atcggctccgccgagatcaaaagtccctaaaaggaagaggcaacacccttggcctcgaca

SEQ ID NO: 67444 - DNA, 60 bp, Artificial
  Synthetic oligonucleotide
ggctccgccgagatcaaaagtccctaaaaggaagaggcaacacccttagcctcgacatcg

SEQ ID NO: 67445 - DNA, 60 bp, Artificial
  Synthetic oligonucleotide
cggcacagattgaaagcgacagagaatagtttcgaacaaataacatttatgcaagcctta

SEQ ID NO: 67446 - DNA, 60 bp, Artificial
  Synthetic oligonucleotide
gtgcggcacagattgaaagcgacagagaatagtttcgaacaaataacatttatgcaagcc

SEQ ID NO: 67447 - DNA, 60 bp, Artificial
  Synthetic oligonucleotide
gaagtgcggcacagattgaaagcgacagagaatagtttcgaacaaataacatttatgcaa

SEQ ID NO: 67448 - DNA, 60 bp, Artificial
  Synthetic oligonucleotide
ggacagaaatttgaggaaataaggtggttaattgaagaagtacggcacagattgaaagcg

SEQ ID NO: 67449 - DNA, 60 bp, Artificial
  Synthetic oligonucleotide
agcaattgggacagaaatttgaggaaataaggtggttaattgaagaagtacggcacagat

SEQ ID NO: 67450 - DNA, 57 bp, Artificial
  Synthetic oligonucleotide
ctgaaaatctacagagattcgcttggagaaaccgtaatgaggatgggagaccttcac

SEQ ID NO: 67451 - DNA, 60 bp, Artificial
  Synthetic oligonucleotide
ggcacagattgaaagcgacagagaatagtttcgaacaaataacatttatgcaagccttac

SEQ ID NO: 67452 - DNA, 60 bp, Artificial
  Synthetic oligonucleotide
gggtcctcatcggaggacttgaatggaatggtaacacggttcgaggctctgaaaatctac

SEQ ID NO: 67453 - DNA, 56 bp, Artificial
  Synthetic oligonucleotide
ggaccaggcgatcacggaaaagaacatcatactgaaagcgaacttcagtgtgatct

SEQ ID NO: 67454 - DNA, 60 bp, Artificial
  Synthetic oligonucleotide
ggaccaggcgatcacggaaaagaacatcatactgaaagcgaacttcagtgtgatctttaa

SEQ ID NO: 67455 - DNA, 60 bp, Artificial
  Synthetic oligonucleotide
gctgacatgaccctcgaggaaatgtcacgagactggttcatgctcatgcctaggcaaagg

SEQ ID NO: 67456 - DNA, 60 bp, Artificial
  Synthetic oligonucleotide
ttcaaatgacacagtacatgataggaccccttatcgaaccctattgatgaatgagttggg

SEQ ID NO: 67457 - DNA, 60 bp, Artificial
  Synthetic oligonucleotide
tccagtactgaacgtgactatgccaaacaatgacaattttgacaaactatacatttgggg

SEQ ID NO: 67458 - DNA, 60 bp, Artificial
  Synthetic oligonucleotide
cagtctctaccaaaagaagccaacaaactgtaatcccgaatatcgggtctagaccctggg

SEQ ID NO: 67459 - DNA, 60 bp, Artificial
  Synthetic oligonucleotide
ggtgaaaggctgggcctttgacgatggaaatgacatatggatgggaagaactatcagcaa

SEQ ID NO: 67460 - DNA, 60 bp, Artificial
  Synthetic oligonucleotide
gttgacagcgataatagatcaggttattctggtattttctctgttgagggcaaaagctgc

SEQ ID NO: 67461 - DNA, 60 bp, Artificial
  Synthetic oligonucleotide
agaactaggtgatgccccattccttgatcggcttcgccgagatcagaagtccctaagggg

SEQ ID NO: 67462 - DNA, 60 bp, Artificial
  Synthetic oligonucleotide
tctgaaattggcaacagggatgcggaatgtaccagagaaacaaactagaggcatattcgg

SEQ ID NO: 67463 - DNA, 60 bp, Artificial
  Synthetic oligonucleotide
gttcgagtctctgaagctctacagagattcgcttggagaagcattaatgagaacaggaga

SEQ ID NO: 67464 - DNA, 60 bp, Artificial
  Synthetic oligonucleotide
gctctacagagattcgcttggagaagcattaatgagaacaggagacctccattccctcca

SEQ ID NO: 67465 - DNA, 60 bp, Artificial
  Synthetic oligonucleotide
gggacttggtgatgctccatttctcgatcggcttcgccgagatcagaagtccctaagagg

SEQ ID NO: 67466 - DNA, 60 bp, Artificial
  Synthetic oligonucleotide
gttcgagtctctgaagctctacagagattcgcttggagaagcattaatgagaacgggaga

SEQ ID NO: 67467 - DNA, 60 bp, Artificial
  Synthetic oligonucleotide
gctctacagagattcgcttggagaagcattaatgagaacgggagacctccattccctcca

SEQ ID NO: 67468 - DNA, 60 bp, Artificial
  Synthetic oligonucleotide
actctacagagattcgcttggagaagcattaatgaggatgggagacctccattccctcca

SEQ ID NO: 67469 - DNA, 60 bp, Artificial
  Synthetic oligonucleotide
gttcatgctaatgcccaagcagaaagtggaaggacctctttgcatcaaaatagaccaggc

SEQ ID NO: 67470 - DNA, 60 bp, Artificial
  Synthetic oligonucleotide
gttcatgctaatgcccaagcagaaagtggaaggacctctttgcatcagaatagaccaggc

SEQ ID NO: 67471 - DNA, 60 bp, Artificial
  Synthetic oligonucleotide
gttcatgctaatgcccaagcagaaagtggaaggccctctttgcatcagaatagaccaggc

SEQ ID NO: 67472 - DNA, 60 bp, Artificial
  Synthetic oligonucleotide
ggaactggttcatgctaatgcccaagcagaaagtggaaggccctctttgcatcagaatag

SEQ ID NO: 67473 - DNA, 60 bp, Artificial
  Synthetic oligonucleotide
gttcatgctaatgcccaagcagaaagtggaaggacctctttgcatcagaatggaccaggc

SEQ ID NO: 67474 - DNA, 53 bp, Artificial
  Synthetic oligonucleotide
ttgaatgatgccacataccaaagaacaagagctctcgtgcgtactgggatgga

SEQ ID NO: 67475 - DNA, 60 bp, Artificial
  Synthetic oligonucleotide
cagtaaagggagttggaacgatggtaatggagctgattcggatgataaagcgaggaatca

SEQ ID NO: 67476 - DNA, 60 bp, Artificial
  Synthetic oligonucleotide
gtgaagatgctactgctggactctctcacctgatgatttggcattccaacttaaatgatg

SEQ ID NO: 67477 - DNA, 60 bp, Artificial
  Synthetic oligonucleotide
ccagcacacaagagtcagttgatatggatggcatgccattctgcagcatttgaagatctg

SEQ ID NO: 67478 - DNA, 60 bp, Artificial
  Synthetic oligonucleotide
caaatgagaacccagcacacaagagtcagttgatatggatggcatgccattctgcagcat

SEQ ID NO: 67479 - DNA, 60 bp, Artificial
  Synthetic oligonucleotide
atctgcagggcaaatcagtgtacaacctactttttcagtacagagaaatcttcctttcga

SEQ ID NO: 67480 - DNA, 60 bp, Artificial
  Synthetic oligonucleotide
ttcctttcgagagagcgaccattattgcagcatttacagggaacaatgaaggcagaacat

SEQ ID NO: 67481 - DNA, 60 bp, Artificial
  Synthetic oligonucleotide
cgaccattattgcagcatttacagggaacaatgaaggcagaacatctgacatgaggactg

SEQ ID NO: 67482 - DNA, 60 bp, Artificial
  Synthetic oligonucleotide
ggagttggaacgatggtaatggagctgattcggatgataaagcgaggaatcaatgatcgg

SEQ ID NO: 67483 - DNA, 60 bp, Artificial
  Synthetic oligonucleotide
tgcaacgtcctcaaagggaaatttcagaccgcagcacaacgagcgatgatggaccacgtg

SEQ ID NO: 67484 - DNA, 60 bp, Artificial
  Synthetic oligonucleotide
ctactgctggactctctcacctgatgatttggcattccaacttgaatgatgccacatacc

SEQ ID NO: 67485 - DNA, 56 bp, Artificial
  Synthetic oligonucleotide
gaagggtactctctagtcggaatagatcctttccgtctgcttcagaacagtcaggt

SEQ ID NO: 67486 - DNA, 60 bp, Artificial
  Synthetic oligonucleotide
gagcgatgatggaccacgtgcgagaaagcagaaatcctgggaatgctgagattgaagatc

SEQ ID NO: 67487 - DNA, 60 bp, Artificial
  Synthetic oligonucleotide
ggatccgtggctcataaatcctgcctgcctgcttgcgtgtatggacttgttgtggcaagt

SEQ ID NO: 67488 - DNA, 60 bp, Artificial
  Synthetic oligonucleotide
gcatatgagagaatgtgcaacgtcctcaaagggaaatttcagaccgcagcacaacgagca

SEQ ID NO: 67489 - DNA, 60 bp, Artificial
  Synthetic oligonucleotide
ctgggctataagaaccaggagtggaggaaacaccaaccaacagaggccatctgcagggca

SEQ ID NO: 67490 - DNA, 60 bp, Artificial
  Synthetic oligonucleotide
tgcaacgtcctcaaagggaaatttcagaccgcagcacaacgagcaatgatggaccaggtg

SEQ ID NO: 67491 - DNA, 60 bp, Artificial
  Synthetic oligonucleotide
acaacgagcgatgatggaccacgtgcgagaaagcagaaatcctgggaatgctgagattga

SEQ ID NO: 67492 - DNA, 60 bp, Artificial
  Synthetic oligonucleotide
ttatcttcctggcacgatctgcactcattctgagaggatccgtggctcataaatcctgcc

SEQ ID NO: 67493 - DNA, 60 bp, Artificial
  Synthetic oligonucleotide
cacacaagagtcagttgatatggatggcatgccattctgcagcatttgaagatctgaggg

SEQ ID NO: 67494 - DNA, 60 bp, Artificial
  Synthetic oligonucleotide
tactgggctataagaaccaggagtggaggaaacaccaaccaacagaggccatctgcaggg

SEQ ID NO: 67495 - DNA, 60 bp, Artificial
  Synthetic oligonucleotide
atgaaaacatggaaacgatggactccattactcttgagctgagaagcaaatactgggcta

SEQ ID NO: 67496 - DNA, 60 bp, Artificial
  Synthetic oligonucleotide
ctgagattgaagatcttatctttctggcacgatctgcactcattctgagaggatccgtgg

SEQ ID NO: 67497 - DNA, 60 bp, Artificial
  Synthetic oligonucleotide
cctggaagaacatcccagtgcggggaaagatccaaagaaaactggaggcccaatctacaa

SEQ ID NO: 67498 - DNA, 60 bp, Artificial
  Synthetic oligonucleotide
acaaatacctggaagaacatcccagtgcggggaaagatccaaagaaaactggaggcccaa

SEQ ID NO: 67499 - DNA, 57 bp, Artificial
  Synthetic oligonucleotide
aaaagagacggaaaatggatgagagagctgattctgtatgacaaagatgagatcagg

SEQ ID NO: 67500 - DNA, 60 bp, Artificial
  Synthetic oligonucleotide
ggaggcccaatctacaaaaaaagagacggaaaatggatgagagagctgattctgtatgac

SEQ ID NO: 67501 - DNA, 60 bp, Artificial
  Synthetic oligonucleotide
gggaggatgattggaggaattggaagattctacatacagatgtgcactgaactccaactc

SEQ ID NO: 67502 - DNA, 60 bp, Artificial
  Synthetic oligonucleotide
gagcatctgttgggaggatgattggaggaattggaagattctacatacagatgtgcactg

SEQ ID NO: 67503 - DNA, 60 bp, Artificial
  Synthetic oligonucleotide
gagaatggttctctctgcatttgacgagaggagaaacaaatacctggaagaacatcccag

SEQ ID NO: 67504 - DNA, 60 bp, Artificial
  Synthetic oligonucleotide
cgatggactccattactcttgagctgagaagcaaatactgggctataagaaccaggagtg

SEQ ID NO: 67505 - DNA, 60 bp, Artificial
  Synthetic oligonucleotide
tgagatcaggagaatttggcgccaagcaaacaatggtgaagatgctactgctggactctc

SEQ ID NO: 67506 - DNA, 60 bp, Artificial
  Synthetic oligonucleotide
tctgtatgacaaagatgagatcaggagaatttggcgccaagcaaacaatggtgaagatgc

SEQ ID NO: 67507 - DNA, 60 bp, Artificial
  Synthetic oligonucleotide
cgcttggggaagcagtaatgagaatgggagacctccacttactccaaaacagaaacggaa

SEQ ID NO: 67508 - DNA, 60 bp, Artificial
  Synthetic oligonucleotide
cctcttttgacatgagtaatgaaggatcttatttcttcggggacaatgcagaagagtacg

SEQ ID NO: 67509 - DNA, 60 bp, Artificial
  Synthetic oligonucleotide
tacttcaaaatgcgcactgggaaaagctcaataatgaggtcagatgcacctattggcacc

SEQ ID NO: 67510 - DNA, 57 bp, Artificial
  Synthetic oligonucleotide
gttcaagttgtcatgatggaaaagcatggctgcatgtttgtgtcactgggcatgata

SEQ ID NO: 67511 - DNA, 58 bp, Artificial
  Synthetic oligonucleotide
agctcaagctgccacgatggaaaagcatggctgcatgtttgtgtcactgggcatgatg

SEQ ID NO: 67512 - DNA, 60 bp, Artificial
  Synthetic oligonucleotide
gcctgcatagggtcaatcagaaatggaacttatgaccatgatgtatacagaaacgaagca

SEQ ID NO: 67513 - DNA, 50 bp, Artificial
  Synthetic oligonucleotide
cagaacagcttgacaatagagagaatggtgctctctgcttttgatgagag

SEQ ID NO: 67514 - DNA, 60 bp, Artificial
  Synthetic oligonucleotide
gatgaacgagttgggtgttccatttcatttaggaaccaggcaagtgtgtatagcatggtc

SEQ ID NO: 67515 - DNA, 60 bp, Artificial
  Synthetic oligonucleotide
atccaaatgtgcactgaacttaaactcagtgattatgaggggcgattgatccagaacagc

SEQ ID NO: 67516 - DNA, 60 bp, Artificial
  Synthetic oligonucleotide
cgtcccgtcaggccccctcaaagccgagatcgcgcagagacttgaagatgtctttgcagg

SEQ ID NO: 67517 - DNA, 58 bp, Artificial
  Synthetic oligonucleotide
cctcttttgaaatgagtaatgaaggatcttatttcttcggagacaatgcagaagagta

SEQ ID NO: 67518 - DNA, 60 bp, Artificial
  Synthetic oligonucleotide
cctcttttgaaatgagtaatgaaggatcttatttcttcggagacaatgcagaagagtacg

SEQ ID NO: 67519 - DNA, 60 bp, Artificial
  Synthetic oligonucleotide
cctcttttgatatgagtaatgaaggatcttatttcttcggagacaatgcagaagagtacg

SEQ ID NO: 67520 - DNA, 60 bp, Artificial
  Synthetic oligonucleotide
atccgatgaggcacttaaaatgaccatggcctccgcacctgcttcgcgatacctaactga

SEQ ID NO: 67521 - DNA, 60 bp, Artificial
  Synthetic oligonucleotide
ggaagaatccgatgaggcacttaaaatgaccatggcctccgcacctgcttcgcgatacct

SEQ ID NO: 67522 - DNA, 60 bp, Artificial
  Synthetic oligonucleotide
atcacattgaaagcaaacttcagtgtgattttcgatcgactggaaaccctgatactcctt

SEQ ID NO: 67523 - DNA, 60 bp, Artificial
  Synthetic oligonucleotide
aaaagctcaataatgaggtcagatgcacctattggcacctgcagttctgaatgcatcact

SEQ ID NO: 67524 - DNA, 60 bp, Artificial
  Synthetic oligonucleotide
tgaggcacttaaaatgaccatggtctccacacctgcttcgcgatacataactgacatgac

SEQ ID NO: 67525 - DNA, 60 bp, Artificial
  Synthetic oligonucleotide
cagtgataaagaacaacatgataaacaatgaccttggaccagcaacagcccagatggctc

SEQ ID NO: 67526 - DNA, 60 bp, Artificial
  Synthetic oligonucleotide
ggattaatgaatcagctgatatgagcattggagtaacagtgataaagaacaacatgataa

SEQ ID NO: 67527 - DNA, 60 bp, Artificial
  Synthetic oligonucleotide
atggattccaacactgtgtcaagtttccaggtagattgcttcctttggcatgtccgaaaa

SEQ ID NO: 67528 - DNA, 60 bp, Artificial
  Synthetic oligonucleotide
ctgggtgacaagagaaccttatgtgtcatgcgatcctggcaagtgttatcaatttgccct

SEQ ID NO: 67529 - DNA, 60 bp, Artificial
  Synthetic oligonucleotide
cggtcttatgaacagatggaaactgatggggaacgccagaatgcaactgagattagggca

SEQ ID NO: 67530 - DNA, 60 bp, Artificial
  Synthetic oligonucleotide
tttcagacagctgcccagagggcaatgatggatcaagtgagagaaagtcggaacccagga

SEQ ID NO: 67531 - DNA, 60 bp, Artificial
  Synthetic oligonucleotide
ttcaaacagctgcacaaagggcaatgatggatcaagtgagagaaagtcggaacccaggaa

SEQ ID NO: 67532 - DNA, 60 bp, Artificial
  Synthetic oligonucleotide
tggaaatgacgtgtggatgggaagaacgatcagcgagaagttacgctcaggttatgaaac

SEQ ID NO: 67533 - DNA, 54 bp, Artificial
  Synthetic oligonucleotide
aagtgccataggccaaatttcaaggcctatgttcttgtatgtgaggacaaacgg

SEQ ID NO: 67534 - DNA, 59 bp, Artificial
  Synthetic oligonucleotide
ctaagaagtgccataggccaaatttcaaggcctatgttcttgtatgtgaggacaaacgg

SEQ ID NO: 67535 - DNA, 60 bp, Artificial
  Synthetic oligonucleotide
tggattcatcataaaaggaagatctcatttaaggaatgacacagatgtggtaaactttgt

SEQ ID NO: 67536 - DNA, 60 bp, Artificial
  Synthetic oligonucleotide
aggaattatttcacagcagaggtgtcccattgtagagccactgagtacataatgaagggg

SEQ ID NO: 67537 - DNA, 60 bp, Artificial
  Synthetic oligonucleotide
gaggaggaattatttcacagcagaggtgtcccattgtagagccactgagtacataatgaa

SEQ ID NO: 67538 - DNA, 60 bp, Artificial
  Synthetic oligonucleotide
aaggagaacagattcatcgaaattggagtgacaagaagagaagtccacatatattacctt

SEQ ID NO: 67539 - DNA, 60 bp, Artificial
  Synthetic oligonucleotide
ggagaacagattcatcgaaattggagtgacaaggagagaagtccacatatattaccttga

SEQ ID NO: 67540 - DNA, 60 bp, Artificial
  Synthetic oligonucleotide
aaggagaacagattcatcgaaattggagtgacaaggagagaagtccacatatattacctt

SEQ ID NO: 67541 - DNA, 60 bp, Artificial
  Synthetic oligonucleotide
tgagaaaccgaagtttctaccagatttgtatgattacaaggagaacagattcatcgaaat

SEQ ID NO: 67542 - DNA, 60 bp, Artificial
  Synthetic oligonucleotide
tctaccagatttgtatgattacaaggagaacagattcatcgaaattggagtgacaaggag

SEQ ID NO: 67543 - DNA, 60 bp, Artificial
  Synthetic oligonucleotide
tgaaacaaacaaatttgcagcaatatgcactcacttggaggtatgtttcatgtattcaga

SEQ ID NO: 67544 - DNA, 60 bp, Artificial
  Synthetic oligonucleotide
caaacaaatttgcagcaatatgcactcacctggaggtatgtttcatgtattcagattttc

SEQ ID NO: 67545 - DNA, 60 bp, Artificial
  Synthetic oligonucleotide
cagattcatcgaaattggagtgacaaggagagaagtccacatatattaccttgaaaaggc

SEQ ID NO: 67546 - DNA, 60 bp, Artificial
  Synthetic oligonucleotide
tggatgctttgaaattgagcattgaagacccaagtcacgaaggagaagggattccattat

SEQ ID NO: 67547 - DNA, 60 bp, Artificial
  Synthetic oligonucleotide
attgagtacattgcaagcatgaggaggaattatttcacagcagaggtgtcccattgtaga

SEQ ID NO: 67548 - DNA, 60 bp, Artificial
  Synthetic oligonucleotide
tgcaagcatgaggaggaattatttcacagcagaggtgtcccattgtagagccactgagta

SEQ ID NO: 67549 - DNA, 60 bp, Artificial
  Synthetic oligonucleotide
gcaagcacgaggaggaattatttcacagcagaggtgtcccattgtagagccactgagtac

SEQ ID NO: 67550 - DNA, 60 bp, Artificial
  Synthetic oligonucleotide
gcaagcatgaggaggaattatttcacagcagaggtgtcccattgtagagccaccgagtac

SEQ ID NO: 67551 - DNA, 60 bp, Artificial
  Synthetic oligonucleotide
ctgattcagtctggatagagctcgatgaaattggagaggacttagccccaattgagtaca

SEQ ID NO: 67552 - DNA, 60 bp, Artificial
  Synthetic oligonucleotide
gtctggatagagctcgatgaaattggagaggacgtagccccaattgagtacattgcaagc

SEQ ID NO: 67553 - DNA, 60 bp, Artificial
  Synthetic oligonucleotide
attgagtacattgcaagcatgaggaggaactatttcacagcagaggtgtcccattgtaga

SEQ ID NO: 67554 - DNA, 60 bp, Artificial
  Synthetic oligonucleotide
attgagtacattgcaagcacgaggaggaattatttcacagcagaggtgtcccattgtaga

SEQ ID NO: 67555 - DNA, 60 bp, Artificial
  Synthetic oligonucleotide
gcaagcatgaggaggaactatttcacagcagaggtgtcccattgtagagccactgagtac

SEQ ID NO: 67556 - DNA, 60 bp, Artificial
  Synthetic oligonucleotide
gcaagcatgaggaggaattatttcacagcagaggtgtcccattgtagagccactgagtac

SEQ ID NO: 67557 - DNA, 60 bp, Artificial
  Synthetic oligonucleotide
ctgattcaatctggatagagctcgatgaaattggagaggacgtagccccaattgagtaca

SEQ ID NO: 67558 - DNA, 60 bp, Artificial
  Synthetic oligonucleotide
ctgattcagtctggatagagctcgatgaaattggagaggacgtagccccaattgagtaca

SEQ ID NO: 67559 - DNA, 60 bp, Artificial
  Synthetic oligonucleotide
ggatgctttgaaattgagcattgaagacccaagtcacgaaggagaagggattccattata

SEQ ID NO: 67560 - DNA, 60 bp, Artificial
  Synthetic oligonucleotide
gctggatacagaatgagttcaacaaggcctgcgagctaactgattcagtctggatagagc

SEQ ID NO: 67561 - DNA, 60 bp, Artificial
  Synthetic oligonucleotide
ggatacagagtgagttcaacaaggcctgcgagctaactgattcagtctggatagagctcg

SEQ ID NO: 67562 - DNA, 60 bp, Artificial
  Synthetic oligonucleotide
aggcctgcgagctaactgattcagtctggatagagctcgatgaaattggagaggacgtag

SEQ ID NO: 67563 - DNA, 60 bp, Artificial
  Synthetic oligonucleotide
agaatgagttcaacaaggcctgcgagctaactgattcagtctggatagagctcgatgaaa

SEQ ID NO: 67564 - DNA, 60 bp, Artificial
  Synthetic oligonucleotide
caatgagagagggaatcacggagtgaaaggctgggcctttgacgatggaaatgacatatg

SEQ ID NO: 67565 - DNA, 60 bp, Artificial
  Synthetic oligonucleotide
gacctttttgtggaacggagcaatgctttcagcaattgttacccttatgatgtgccagac

SEQ ID NO: 67566 - DNA, 60 bp, Artificial
  Synthetic oligonucleotide
gattctgaaggaagaatccgatgaggcacttaaaatgaccatggcctccacacctgcttc

SEQ ID NO: 67567 - DNA, 60 bp, Artificial
  Synthetic oligonucleotide
tccaggacctagagagatacgttgaagacactaaaatagatctctggtcctacaacgcgg

SEQ ID NO: 67568 - DNA, 60 bp, Artificial
  Synthetic oligonucleotide
tccaagacctagagagatacgttgaagacactaaaatagatctctggtcctacaacgcgg

SEQ ID NO: 67569 - DNA, 60 bp, Artificial
  Synthetic oligonucleotide
ccaagacctagagaaatacgttgaagacactaaaatagatctctggtcctacaacgcgga

SEQ ID NO: 67570 - DNA, 60 bp, Artificial
  Synthetic oligonucleotide
gggccataaggaccaggagtggaggaaacaccaatcaacagagggcctccgcaggccaaa

SEQ ID NO: 67571 - DNA, 60 bp, Artificial
  Synthetic oligonucleotide
ggtatggcttcaggcatcaaaattctgagggcacaggacaagcagcagaccttaaaagca

SEQ ID NO: 67572 - DNA, 60 bp, Artificial
  Synthetic oligonucleotide
gctctctgcttttgatgagagaaggaataaatatctggaagaacaccccagcgcggggaa

SEQ ID NO: 67573 - DNA, 60 bp, Artificial
  Synthetic oligonucleotide
gctgggtttcattatgtgggcctgccagagaggcaacattaggtgcaacatttgcatttg

SEQ ID NO: 67574 - DNA, 60 bp, Artificial
  Synthetic oligonucleotide
attgggcgattctacatccaaatgtgcactgaacttaaactcagtgattatgaagggcgg

SEQ ID NO: 67575 - DNA, 60 bp, Artificial
  Synthetic oligonucleotide
attgggcgattctacatccaaatgtgcactgaacttaagctcagtgattatgaagggcgg

SEQ ID NO: 67576 - DNA, 60 bp, Artificial
  Synthetic oligonucleotide
atcgggcgattctacatccaaatgtgcactgaacttaaactcagtgattatgaaggtcgg

SEQ ID NO: 67577 - DNA, 60 bp, Artificial
  Synthetic oligonucleotide
attgggcgattctacatccaaatgtgcactgaacttaaactcagtgattatgaaggtcgg

SEQ ID NO: 67578 - DNA, 60 bp, Artificial
  Synthetic oligonucleotide
atgattgatggaattgggcgattctacatccaaatgtgcactgaacttaaactcagtgat

SEQ ID NO: 67579 - DNA, 60 bp, Artificial
  Synthetic oligonucleotide
gggcgattctacatccaaatgtgcactgaacttaaactcagtgattatgaaggtcggttg

SEQ ID NO: 67580 - DNA, 60 bp, Artificial
  Synthetic oligonucleotide
tccgtcgggaagatgattgatggaattgggcgattctacatccaaatgtgcactgaactt

SEQ ID NO: 67581 - DNA, 60 bp, Artificial
  Synthetic oligonucleotide
ccgtcgggaagatgattgatggaattgggcgattctacatccaaatgtgcactgaactta

SEQ ID NO: 67582 - DNA, 60 bp, Artificial
  Synthetic oligonucleotide
gggcgattctacatccaaatgtgcactgaacttaaactcagtgattatgaagggcggttg

SEQ ID NO: 67583 - DNA, 60 bp, Artificial
  Synthetic oligonucleotide
tgggcgattctacatccaaatgtgcactgaacttaaactcagtgattatgaagggcggtt

SEQ ID NO: 67584 - DNA, 60 bp, Artificial
  Synthetic oligonucleotide
ttgggcgattctacatccaaatgtgcactgaacttaaactcagtgattatgaaggtcggt

SEQ ID NO: 67585 - DNA, 60 bp, Artificial
  Synthetic oligonucleotide
atggaattgggcgattctacatccaaatgtgcactgaacttaaactcagtgattatgaag

SEQ ID NO: 67586 - DNA, 60 bp, Artificial
  Synthetic oligonucleotide
tactgggccataaggaccagaagtggaggaaataccaatcgacagaaggcatccgcgggc

SEQ ID NO: 67587 - DNA, 60 bp, Artificial
  Synthetic oligonucleotide
gagagtatcaagtttcatcagagggacaagagtggtcccaagaggacaactatccaccag

SEQ ID NO: 67588 - DNA, 60 bp, Artificial
  Synthetic oligonucleotide
agcgtttgaagacctgagagtatcaagtttcatcagagggacaagagtggtcccaagagg

SEQ ID NO: 67589 - DNA, 60 bp, Artificial
  Synthetic oligonucleotide
ctatccaccagaggagttcaaattgcgtcaaatgagaacatggaaacaatggtctccagc

SEQ ID NO: 67590 - DNA, 60 bp, Artificial
  Synthetic oligonucleotide
tcccaagaggacaactatccaccagaggagttcaaattgcgtcaaatgagaacatggaaa

SEQ ID NO: 67591 - DNA, 60 bp, Artificial
  Synthetic oligonucleotide
ggtcggaatagatcctttccgtctgcttcaaaacagtcaggtcttcagtctcattagccc

SEQ ID NO: 67592 - DNA, 60 bp, Artificial
  Synthetic oligonucleotide
ggtctccagcacccttgaactgaggagcagatattgggctataagatccaggagtggagg

SEQ ID NO: 67593 - DNA, 60 bp, Artificial
  Synthetic oligonucleotide
aacatggaaacaatggtctccagcacccttgaactgaggagcagatattgggctataaga

SEQ ID NO: 67594 - DNA, 57 bp, Artificial
  Synthetic oligonucleotide
tcatcctgaggggatcagtggcccacaagtcctacatgcctgctggtgtgtacggac

SEQ ID NO: 67595 - DNA, 60 bp, Artificial
  Synthetic oligonucleotide
tacggacttgctgtggccagtggatacgacttcgaaagagaaggatctctctcggtcgga

SEQ ID NO: 67596 - DNA, 60 bp, Artificial
  Synthetic oligonucleotide
cagcagcacaaagagcaatgatggatcaagtgcggaaaagcaggaaccctgggaatgctg

SEQ ID NO: 67597 - DNA, 60 bp, Artificial
  Synthetic oligonucleotide
ccctgggaatgctgaaatcgaggatcttatctttctggcacggtctgcactcatcctgag

SEQ ID NO: 67598 - DNA, 60 bp, Artificial
  Synthetic oligonucleotide
aatcgaggatcttatctttctggcacggtctgcactcatcctgaggggatcagtggccca

SEQ ID NO: 67599 - DNA, 60 bp, Artificial
  Synthetic oligonucleotide
ctctcccaaggagatctggagctgctggtgcagcagtaaagggagttgggacaatggtga

SEQ ID NO: 67600 - DNA, 60 bp, Artificial
  Synthetic oligonucleotide
atttctggagaggcgaaaacggacgaaggacaaggattgcatatgagagaatgtgcaaca

SEQ ID NO: 67601 - DNA, 60 bp, Artificial
  Synthetic oligonucleotide
caaacagcagcacaaagagcaatgatggatcaagtgcggaaaagcaggaaccctgggaat

SEQ ID NO: 67602 - DNA, 60 bp, Artificial
  Synthetic oligonucleotide
aacatctgacatgagggctgaaatcataagaatgatggaaagtgccagaccagaagatgt

SEQ ID NO: 67603 - DNA, 60 bp, Artificial
  Synthetic oligonucleotide
gagggctgaaatcataagaatgatggaaagtgccagaccagaagatgtgtctttccaggg

SEQ ID NO: 67604 - DNA, 60 bp, Artificial
  Synthetic oligonucleotide
ttcgaaagagcgaccattatggcggcatttacagggcacactgaaggcagaacatctgac

SEQ ID NO: 67605 - DNA, 60 bp, Artificial
  Synthetic oligonucleotide
cgaccattatggcggcatttacagggcacactgaaggcagaacatctgacatgagggctg

SEQ ID NO: 67606 - DNA, 60 bp, Artificial
  Synthetic oligonucleotide
caggacaaatcagtgtacaacctaccttttcagttcagagaaatcttcctttcgaaagag

SEQ ID NO: 67607 - DNA, 60 bp, Artificial
  Synthetic oligonucleotide
tacaacctaccttttcagttcagagaaatcttcctttcgaaagagcgaccattatggcgg

SEQ ID NO: 67608 - DNA, 60 bp, Artificial
  Synthetic oligonucleotide
ggctataagatccaggagtggaggaaacaccatccagcagagggcatctgcaggacaaat

SEQ ID NO: 67609 - DNA, 60 bp, Artificial
  Synthetic oligonucleotide
tgatgcaaggatcaactctcccaaggagatctggagctgctggtgcagcagtaaagggag

SEQ ID NO: 67610 - DNA, 60 bp, Artificial
  Synthetic oligonucleotide
ggcgtcaagcgaacaacggagaagatgccactgctggtctcactcatctgatgatctggc

SEQ ID NO: 67611 - DNA, 60 bp, Artificial
  Synthetic oligonucleotide
ttctctctgcctttgatgaaaggaggaacaaatacctggaagaacatccccatgcgggga

SEQ ID NO: 67612 - DNA, 60 bp, Artificial
  Synthetic oligonucleotide
ggtggaattgggaggttttacatacagatgtgcactgaactccaactcagcgaccatgaa

SEQ ID NO: 67613 - DNA, 60 bp, Artificial
  Synthetic oligonucleotide
ggatctggcgtcaagcgaacaacggagaagatgccactgctggtctcactcatctgatga

SEQ ID NO: 67614 - DNA, 60 bp, Artificial
  Synthetic oligonucleotide
catgcggggaaggacccgaagaaaactggaggtccaatctacagaaggagagacgggaag

SEQ ID NO: 67615 - DNA, 60 bp, Artificial
  Synthetic oligonucleotide
gcctttgatgaaaggaggaacaaatacctggaagaacatccccatgcggggaaggacccg

SEQ ID NO: 67616 - DNA, 54 bp, Artificial
  Synthetic oligonucleotide
gggttacttcaaaatacgaaatgggaaaagctcaataatgaggtcagatgcacc

SEQ ID NO: 67617 - DNA, 60 bp, Artificial
  Synthetic oligonucleotide
tactggggttcattatgtgggcctgccaaaaaggcaacattaggtgcaacatttgcattt

SEQ ID NO: 67618 - DNA, 60 bp, Artificial
  Synthetic oligonucleotide
ctcatggtccagccaagagcatggaatatgatgctgttgcaactacacactcgtggattc

SEQ ID NO: 67619 - DNA, 60 bp, Artificial
  Synthetic oligonucleotide
ctcatggtccagccaagagcatggaatatgatgctgttgcaactacacactcgtggatcc

SEQ ID NO: 67620 - DNA, 60 bp, Artificial
  Synthetic oligonucleotide
ccaaacaagtgtgcatagcatggtccagctcaagttgtcacgatggaaaagcatggctgc

SEQ ID NO: 67621 - DNA, 60 bp, Artificial
  Synthetic oligonucleotide
ccaagcaagtgtgcatagcatggtccagctcaagttgtcacgatggaaaagcatggctgc

SEQ ID NO: 67622 - DNA, 60 bp, Artificial
  Synthetic oligonucleotide
gtgatctttgaccgactagagaacatagcattactaagggctttcaccgaagagggagca

SEQ ID NO: 67623 - DNA, 60 bp, Artificial
  Synthetic oligonucleotide
gggcaatggttgcttcaagatataccacaaatgtgacaatgcctgcatagggtcaatcag

SEQ ID NO: 67624 - DNA, 60 bp, Artificial
  Synthetic oligonucleotide
ttcatttacgatgggaggcttgtagacagtattggttcatggtctcaaaatatcctcagg

SEQ ID NO: 67625 - DNA, 60 bp, Artificial
  Synthetic oligonucleotide
ggaggcttgtagacagtattggttcatggtctcaaaatatcctcaggacccaggagtcgg

SEQ ID NO: 67626 - DNA, 60 bp, Artificial
  Synthetic oligonucleotide
tgagcatagcatggtccagctcaagttgtcacgatggaaaagcatggctgcatgtttgtg

SEQ ID NO: 67627 - DNA, 60 bp, Artificial
  Synthetic oligonucleotide
ttccaggtagattgctttctttggcatatccggaaacaagttgtagaccaagaactgagt

SEQ ID NO: 67628 - DNA, 60 bp, Artificial
  Synthetic oligonucleotide
gctttctttggcatatccggaaacaagttgtagaccaagaactgagtgatgccccattcc

SEQ ID NO: 67629 - DNA, 60 bp, Artificial
  Synthetic oligonucleotide
gcgcactgggaaaagctcaataatgaggtcagatgcacctattggcacctgcatttctga

SEQ ID NO: 67630 - DNA, 60 bp, Artificial
  Synthetic oligonucleotide
ggaagccatggattccaataccttagagctgagaagcagatactgggccataaggaccag

SEQ ID NO: 67631 - DNA, 60 bp, Artificial
  Synthetic oligonucleotide
gtcaggaagtgctcagcatgtggaggagtgttcctgttatcctcgataccctggtgtcag

SEQ ID NO: 67632 - DNA, 60 bp, Artificial
  Synthetic oligonucleotide
gcgggtaaggatcctaagaaaactggaggacccatatacaagagagtagatggaaagtgg

SEQ ID NO: 67633 - DNA, 60 bp, Artificial
  Synthetic oligonucleotide
gctgggaaggatcctaagaaaactggaggacccatatacaagagagtagatggaaagtgg

SEQ ID NO: 67634 - DNA, 60 bp, Artificial
  Synthetic oligonucleotide
gaatgaattgggtgttccatttcatttgggaaccaggcaagtgtgcatagcatggtccag

SEQ ID NO: 67635 - DNA, 60 bp, Artificial
  Synthetic oligonucleotide
tgaagggcggttgatccaaaacagcttgacaatagagagaatggtgctctctgcttttga

SEQ ID NO: 67636 - DNA, 60 bp, Artificial
  Synthetic oligonucleotide
gagcatagcatggtccagctcaagttgtcacgatggaaaagcatggctgcatgtttgtgt

SEQ ID NO: 67637 - DNA, 60 bp, Artificial
  Synthetic oligonucleotide
gggagaatctgatgaggcacttaaaatgaccatggcctccacacctgcttcgcgatacat

SEQ ID NO: 67638 - DNA, 60 bp, Artificial
  Synthetic oligonucleotide
agggagaatctgatgaggcacttaaaatgaccatggcctccacacctgcttcgcgataca

SEQ ID NO: 67639 - DNA, 60 bp, Artificial
  Synthetic oligonucleotide
gcaattggggtcctcatcggaggacttgaatggaatgataacacagttcaagtctctaaa

SEQ ID NO: 67640 - DNA, 60 bp, Artificial
  Synthetic oligonucleotide
aggaagatctcatttaaggaatgacacagatgtggtaaactttgtgagcatggagttttc

SEQ ID NO: 67641 - DNA, 60 bp, Artificial
  Synthetic oligonucleotide
gggaagatctcatttaaggaatgacacagatgtggtaaactttgtgagcatggagttttc

SEQ ID NO: 67642 - DNA, 60 bp, Artificial
  Synthetic oligonucleotide
ctccatttctcgatcggcttcgccgagatcagaagtccctaagaggaagaggcagcactc

SEQ ID NO: 67643 - DNA, 56 bp, Artificial
  Synthetic oligonucleotide
atcggcttcgccgagatcagaagtccctaagaggaagaggcagcactcttggtctg

SEQ ID NO: 67644 - DNA, 60 bp, Artificial
  Synthetic oligonucleotide
tcagctggtgtggatggcatgccattctgcagcatttgaagatttaagattgttaagctt

SEQ ID NO: 67645 - DNA, 60 bp, Artificial
  Synthetic oligonucleotide
cagctggtgtggatggcatgccattctgcagcatttgaagatttaagattgttaagcttc

SEQ ID NO: 67646 - DNA, 60 bp, Artificial
  Synthetic oligonucleotide
catgcctaggcaaaaggtaataggccctctttgtgcgcgaatggaccaggcgatcatgga

SEQ ID NO: 67647 - DNA, 60 bp, Artificial
  Synthetic oligonucleotide
ctcatgcctaggcaaaaggtaataggccctctttgtgcgcgaatggaccaggcgatcatg

SEQ ID NO: 67648 - DNA, 60 bp, Artificial
  Synthetic oligonucleotide
ctcagaagtagaagggagaattcaggacctagagaaatacgttgaagacactaaaataga

SEQ ID NO: 67649 - DNA, 60 bp, Artificial
  Synthetic oligonucleotide
acaagaccaatcctgtcacctctgactaaggggattttagggtttgtgtttacgctcacc

SEQ ID NO: 67650 - DNA, 60 bp, Artificial
  Synthetic oligonucleotide
acgtacgttctctctatcatcccgtcaggccccctcaaagccgagatcgcgcagagactg

SEQ ID NO: 67651 - DNA, 60 bp, Artificial
  Synthetic oligonucleotide
aacgtacgttctttctatcatcccgtcaggccccctcaaagccgagatcgcgcagagact

SEQ ID NO: 67652 - DNA, 60 bp, Artificial
  Synthetic oligonucleotide
tggagttttctctcactgacccgagacttgagccacacaaatgggagaaatactgtgtcc

SEQ ID NO: 67653 - DNA, 60 bp, Artificial
  Synthetic oligonucleotide
tggagttttctctcactgacccgagacttgagccacataaatgggagaagtactgtgtcc

SEQ ID NO: 67654 - DNA, 60 bp, Artificial
  Synthetic oligonucleotide
taccaaaagaagccaacaaactgtaatcccgaatattggatctagaccctgggtaagggg

SEQ ID NO: 67655 - DNA, 60 bp, Artificial
  Synthetic oligonucleotide
ccggaaacaagttgtagaccaagaactaggtgatgccccattccttgatcggcttcgccg

SEQ ID NO: 67656 - DNA, 60 bp, Artificial
  Synthetic oligonucleotide
ccggaaacaagttgtagaccaagaactgagcgatgccccattccttgatcggcttcgccg

SEQ ID NO: 67657 - DNA, 60 bp, Artificial
  Synthetic oligonucleotide
atcggcttcgccgagatcagaagtccctaagaggaagaggcagcactcttggcctggaaa

SEQ ID NO: 67658 - DNA, 60 bp, Artificial
  Synthetic oligonucleotide
atttgggaaccaaacaggtgtgcatagcatggtctagttcaagttgtcacgatgggaagg

SEQ ID NO: 67659 - DNA, 60 bp, Artificial
  Synthetic oligonucleotide
taccagtttgcactcgggcagggaaccacgctagataacaaacactcaaatggcacaata

SEQ ID NO: 67660 - DNA, 60 bp, Artificial
  Synthetic oligonucleotide
aaaattctgagggcacaggacaagcagcagatcttaaaagcactcaagcagcaatcgacc

SEQ ID NO: 67661 - DNA, 60 bp, Artificial
  Synthetic oligonucleotide
caatgagaaagggagtcatggagtgaaaggctgggcctttgacgatggaaatgacgtgtg

SEQ ID NO: 67662 - DNA, 60 bp, Artificial
  Synthetic oligonucleotide
gggagtcatggagtgaaaggctgggcctttgacgatggaaatgacgtgtggatgggaaga

SEQ ID NO: 67663 - DNA, 60 bp, Artificial
  Synthetic oligonucleotide
cagaatagaccaggcaatcatggataagaaaatcatgttgaaagcgaatttcagtgtgat

SEQ ID NO: 67664 - DNA, 60 bp, Artificial
  Synthetic oligonucleotide
atgcactcacctggaggtatgtttcatgtattcagattttcatttcatcaatgaacaagg

SEQ ID NO: 67665 - DNA, 60 bp, Artificial
  Synthetic oligonucleotide
cagcaatatgcactcacctggaggtatgtttcatgtattcagattttcatttcatcaatg

SEQ ID NO: 67666 - DNA, 60 bp, Artificial
  Synthetic oligonucleotide
tgcagcaatatgcactcacctggaggtatgtttcatgtattcagattttcatttcatcaa

SEQ ID NO: 67667 - DNA, 60 bp, Artificial
  Synthetic oligonucleotide
atagggtcaatcagaaatggaacttatgaccatgatgtatacagagacgaagcattaaac

SEQ ID NO: 67668 - DNA, 60 bp, Artificial
  Synthetic oligonucleotide
cccagatatgttaagcaaagcactctgaaattggcaacagggatgcggaatgtaccagag

SEQ ID NO: 67669 - DNA, 55 bp, Artificial
  Synthetic oligonucleotide
gcttgaagtggagcaagagataagaactttctcgtttcagcttatttaataataa

SEQ ID NO: 67670 - DNA, 60 bp, Artificial
  Synthetic oligonucleotide
ctgattcacagcatcggtcccacagacaaatggctactaccaccaacccactaatcaggc

SEQ ID NO: 67671 - DNA, 60 bp, Artificial
  Synthetic oligonucleotide
cagctaaggctatggaacagatggctggatcgagtgaacaggcagcggaggcaatggagg

SEQ ID NO: 67672 - DNA, 60 bp, Artificial
  Synthetic oligonucleotide
ataacgttccatggggccaaggaggtgtcactaagctactcaactggtgcacttgctagt

SEQ ID NO: 67673 - DNA, 60 bp, Artificial
  Synthetic oligonucleotide
gggcgattgatccagaacagcttaacaatagagagaatggtgctctctgcttttgacgag

SEQ ID NO: 67674 - DNA, 60 bp, Artificial
  Synthetic oligonucleotide
gacacaatacatgatagaaccccttatcgaaccctattgatgaatgagttgggtgttcca

SEQ ID NO: 67675 - DNA, 60 bp, Artificial
  Synthetic oligonucleotide
atcagaatggaccaggcaatcatggagaaaaacatcacgttgaaagcgaatttcagtgtg

SEQ ID NO: 67676 - DNA, 60 bp, Artificial
  Synthetic oligonucleotide
atcagaatggaccaggcaatcatggagaaaaacatcatgttgaaggcgaatttcagtgtg

SEQ ID NO: 67677 - DNA, 59 bp, Artificial
  Synthetic oligonucleotide
ggaagaggcaacactctcggtctagacatcaaagcagccacccatgttggaaagcagat

SEQ ID NO: 67678 - DNA, 60 bp, Artificial
  Synthetic oligonucleotide
ggaagaggcaacactctcggtctagacatcaaagcagccacccatgttggaaagcaaatt

SEQ ID NO: 67679 - DNA, 60 bp, Artificial
  Synthetic oligonucleotide
ctgtgtcaagtttccaggtagattgctttctttggcatatccggaaacaagttgtagacc

SEQ ID NO: 67680 - DNA, 60 bp, Artificial
  Synthetic oligonucleotide
ccctttgcatcagaatggaccaggcaatcatggagaaaaacatcatgttgaaagcgaatt

SEQ ID NO: 67681 - DNA, 60 bp, Artificial
  Synthetic oligonucleotide
ctctttgcatcagaatggaccaggcaatcatggagaaaaacatcatgttgaaagcgaatt

SEQ ID NO: 67682 - DNA, 60 bp, Artificial
  Synthetic oligonucleotide
gaagaggcaacactctcggtctagacatcaaagcagccacccatgttggaaagcaaattg

SEQ ID NO: 67683 - DNA, 54 bp, Artificial
  Synthetic oligonucleotide
ggaagaggcaacactctcggtctagacatcaaagcagccacccatgttggaaag

SEQ ID NO: 67684 - DNA, 57 bp, Artificial
  Synthetic oligonucleotide
ggcacttaaaatgaccatggcctccacacctgcttcgcgatacataactgacatgac

SEQ ID NO: 67685 - DNA, 51 bp, Artificial
  Synthetic oligonucleotide
gagcaattgttggcgaaatctcaccattgccttcttttccaggacatacta

SEQ ID NO: 67686 - DNA, 60 bp, Artificial
  Synthetic oligonucleotide
ctcggaagtagaagggagaattcaggacctcgagaaatatgttgaggacactaaaataga

SEQ ID NO: 67687 - DNA, 60 bp, Artificial
  Synthetic oligonucleotide
ctcagaagtagaagggagaattcaggacctcgagaaatatgttgaggacactaaaataga

SEQ ID NO: 67688 - DNA, 60 bp, Artificial
  Synthetic oligonucleotide
tcggaggacttgaatggaatgataacacagttcgagtctctgaagctctacagagattcg

SEQ ID NO: 67689 - DNA, 58 bp, Artificial
  Synthetic oligonucleotide
tcggaggacttgaatggaatgataacacagttcgagtctctgaagctctacagagatt

SEQ ID NO: 67690 - DNA, 60 bp, Artificial
  Synthetic oligonucleotide
tgcacaaagggcaatgatggatcaggtgagagaaagtcggaacccaggaaatgctgagat

SEQ ID NO: 67691 - DNA, 60 bp, Artificial
  Synthetic oligonucleotide
tgcacaaagagcaatggtagatcaagtgagagaaagtcggaacccaggaaatgctgagat

SEQ ID NO: 67692 - DNA, 60 bp, Artificial
  Synthetic oligonucleotide
ggaaaaacaccgatcttgaggttctcatggaatggctaaagacaagaccaatcctgtcac

SEQ ID NO: 67693 - DNA, 60 bp, Artificial
  Synthetic oligonucleotide
agcataacaatagagagaatggtgctctctgcttttgatgagaggaggaataaatactta

SEQ ID NO: 67694 - DNA, 50 bp, Artificial
  Synthetic oligonucleotide
aaaatgcaattggggtcctcatcggaggacttgaatggagtgataacaca

SEQ ID NO: 67695 - DNA, 60 bp, Artificial
  Synthetic oligonucleotide
ggcttcgccgagatcagaagtccctaagaggaagaggcagcactcttggcctggaaattg

SEQ ID NO: 67696 - DNA, 60 bp, Artificial
  Synthetic oligonucleotide
ggcttcgccgagatcagaagtccctaagaggaagaggcagcactcttggtctggaaattg

SEQ ID NO: 67697 - DNA, 60 bp, Artificial
  Synthetic oligonucleotide
gttcgagtctctgaaactctacagagattcgcttggagaagcattaatgaggatgggaga

SEQ ID NO: 67698 - DNA, 60 bp, Artificial
  Synthetic oligonucleotide
ggatcctcatcaaaggatttgaatggaatgataacacagttcgagtctctgaagctctac

SEQ ID NO: 67699 - DNA, 60 bp, Artificial
  Synthetic oligonucleotide
aaaatgcaattgggatcctcatcaaaggatttgaatggaatgataacacagttcgagtct

SEQ ID NO: 67700 - DNA, 60 bp, Artificial
  Synthetic oligonucleotide
gagctgggtgatgccccattcctcgatcggcttcgccgagatcagaagtccctaagagga

SEQ ID NO: 67701 - DNA, 60 bp, Artificial
  Synthetic oligonucleotide
gccccattccttgaccggcttcgccgagatcagaagtccctaagaggaagaggcagcact

SEQ ID NO: 67702 - DNA, 60 bp, Artificial
  Synthetic oligonucleotide
tttcaggtagactgctttctttggcatgtccgcaaacggtttgcagactggggacttggt

SEQ ID NO: 67703 - DNA, 60 bp, Artificial
  Synthetic oligonucleotide
ttcatgtagactgctttctttggcatgtccgcaaacgatttgcagaccgggagctgggtg

SEQ ID NO: 67704 - DNA, 60 bp, Artificial
  Synthetic oligonucleotide
agaaccccttatcgaaccctattgatgaatgagttgggtgttccatttcatttgggaacc

SEQ ID NO: 67705 - DNA, 60 bp, Artificial
  Synthetic oligonucleotide
tagaacccctcatcgaaccctattgatgaatgagttgggtgttccatttcatttgggaac

SEQ ID NO: 67706 - DNA, 60 bp, Artificial
  Synthetic oligonucleotide
atggaattggaagattctacatccaaatgtgcactgaacttaaactcagtgattatgaag

SEQ ID NO: 67707 - DNA, 60 bp, Artificial
  Synthetic oligonucleotide
atggaattggaagattctacatccaaatgtgcactgaacttaaactcagtgattatgagg

SEQ ID NO: 67708 - DNA, 60 bp, Artificial
  Synthetic oligonucleotide
atccaaatgtgcactgaacttaaactcagtgattatgaagggcggttgatccagaacagc

SEQ ID NO: 67709 - DNA, 60 bp, Artificial
  Synthetic oligonucleotide
tccaaatgtgcactgaacttaaactcagtgattatgaagggcggttgatccagaacagct

SEQ ID NO: 67710 - DNA, 60 bp, Artificial
  Synthetic oligonucleotide
atggaattgggagattctacatccaaatgtgcactgaacttaaactcagtgattatgaag

SEQ ID NO: 67711 - DNA, 51 bp, Artificial
  Synthetic oligonucleotide
gtggaggccatggtatctagggccaggattgatgcacggattgatttcgag

SEQ ID NO: 67712 - DNA, 60 bp, Artificial
  Synthetic oligonucleotide
aattcttccctagcagttcatacaggaggccagttggaatttccagcatggtggaggcca

SEQ ID NO: 67713 - DNA, 60 bp, Artificial
  Synthetic oligonucleotide
gttcatacaggaggccagttggaatttccagcatggtggaggccatggtatctagggcca

SEQ ID NO: 67714 - DNA, 60 bp, Artificial
  Synthetic oligonucleotide
gcatcgcccctataatgttctcgaacaaaatggcaaggttagggaaaggatacatgttcg

SEQ ID NO: 67715 - DNA, 60 bp, Artificial
  Synthetic oligonucleotide
gcaaacccattcaaagacaggactactggtttcagatggaggaccgaatctatacaatat

SEQ ID NO: 67716 - DNA, 60 bp, Artificial
  Synthetic oligonucleotide
tgttagtcacaaggaaattgagtccgtaaacagtgctgtggtaatgccagctcatggtcc

SEQ ID NO: 67717 - DNA, 60 bp, Artificial
  Synthetic oligonucleotide
ggaagaaaatcgagaagataaggccactcctaatagatggcacggcctcactgagtcccg

SEQ ID NO: 67718 - DNA, 60 bp, Artificial
  Synthetic oligonucleotide
gccaaattggcaaatgttgtgagaaagatgatgaccaactcaaaagatacagagctctcc

SEQ ID NO: 67719 - DNA, 60 bp, Artificial
  Synthetic oligonucleotide
ctgagtcccggaatgatgatgggcatgtttaacatgctaagcacagtcctaggagtctcg

SEQ ID NO: 67720 - DNA, 60 bp, Artificial
  Synthetic oligonucleotide
aggagtctcgatcttgaatattgggcaaaagaaatacacaaaaaccacatactggtggga

SEQ ID NO: 67721 - DNA, 60 bp, Artificial
  Synthetic oligonucleotide
catggtccagccaagagcatggaatatgatgctgttgcaactacacactcgtggatccct

SEQ ID NO: 67722 - DNA, 60 bp, Artificial
  Synthetic oligonucleotide
aacaaacaagggtggacaaattgactcaaggccgtcagacctatgactggacattaaaca

SEQ ID NO: 67723 - DNA, 60 bp, Artificial
  Synthetic oligonucleotide
actggtgggatggactacaatcttctgatgatttcgccctcatagtgaatgcacctaatc

SEQ ID NO: 67724 - DNA, 60 bp, Artificial
  Synthetic oligonucleotide
gcgcaaaatgctataagcactacattcccttataccggagatcctccatacagtcatgga

SEQ ID NO: 67725 - DNA, 60 bp, Artificial
  Synthetic oligonucleotide
tatacaatatccggaacctccacattccagaagtctgcctgaagtgggagctaatggatg

SEQ ID NO: 67726 - DNA, 60 bp, Artificial
  Synthetic oligonucleotide
caatgatctcggaccagcaactgcccaaatggctcttcagctattcatcaaggactacag

SEQ ID NO: 67727 - DNA, 60 bp, Artificial
  Synthetic oligonucleotide
ccggaacctccacattccagaagtctgcctgaagtgggagctaatggatgaggattatcg

SEQ ID NO: 67728 - DNA, 60 bp, Artificial
  Synthetic oligonucleotide
aacatttgaattcacaagctttttctaccgctatggatttgtagccaatttcagtatgga

SEQ ID NO: 67729 - DNA, 60 bp, Artificial
  Synthetic oligonucleotide
ggatgaacaaatgtaccagaagtgctgcaatttattcgagaaattcttccctagcagttc

SEQ ID NO: 67730 - DNA, 60 bp, Artificial
  Synthetic oligonucleotide
gacacacaaatacaaacgagaagatcatttgagctgaagaagctatgggagcaaacccat

SEQ ID NO: 67731 - DNA, 60 bp, Artificial
  Synthetic oligonucleotide
caaggactataggtacacataccggtgccacagaggtgacacacaaatacaaacgagaag

SEQ ID NO: 67732 - DNA, 60 bp, Artificial
  Synthetic oligonucleotide
tcgtggatccctaaaagaaaccgttccattctcaataccagccaaaggggaattcttgag

SEQ ID NO: 67733 - DNA, 60 bp, Artificial
  Synthetic oligonucleotide
ttcagctattcatcaaggactacaggtacacataccggtgccacagaggtgacacacaaa

SEQ ID NO: 67734 - DNA, 60 bp, Artificial
  Synthetic oligonucleotide
aattcttgaggatgaacaaatgtaccagaagtgctgcaatttattcgagaaattcttccc

SEQ ID NO: 67735 - DNA, 60 bp, Artificial
  Synthetic oligonucleotide
gaacaacatgataaacaatgatctcggaccagcaactgcccaaatggctcttcagctatt

SEQ ID NO: 67736 - DNA, 60 bp, Artificial
  Synthetic oligonucleotide
ttttgagcatcgcccctataatgttctcgaacaaaatggcaaggttagggaaaggataca

SEQ ID NO: 67737 - DNA, 60 bp, Artificial
  Synthetic oligonucleotide
agataaggccactcctaatagatggcacggcctcactgagtcccggaatgatgatgggca

SEQ ID NO: 67738 - DNA, 60 bp, Artificial
  Synthetic oligonucleotide
ggatgaggattatcgaggtagattgtgtaatcctctgaatccatttgttagtcacaagga

SEQ ID NO: 67739 - DNA, 60 bp, Artificial
  Synthetic oligonucleotide
acgagaagatcatttgagctgaagaagctatgggagcaaacccattcaaagacaggacta

SEQ ID NO: 67740 - DNA, 60 bp, Artificial
  Synthetic oligonucleotide
ggacaaattgactcaaggccgtcagacctatgactggacattaaacagaaaccaaccggc

SEQ ID NO: 67741 - DNA, 60 bp, Artificial
  Synthetic oligonucleotide
caacaagaggggttcaaattgcttcaaatgagaatatggaagctatggactctaacaccc

SEQ ID NO: 67742 - DNA, 60 bp, Artificial
  Synthetic oligonucleotide
aagaggaaagaaagtgattccaagaggaaagctttcaacaagaggggttcaaattgcttc

SEQ ID NO: 67743 - DNA, 60 bp, Artificial
  Synthetic oligonucleotide
tcagaaccagaagcgggggaaataccagccaacaaaaggcatccgcgggccagattagtg

SEQ ID NO: 67744 - DNA, 60 bp, Artificial
  Synthetic oligonucleotide
acaagaggggttcaaattgcttcaaatgagaatatggaagctatggactctaacaccctg

SEQ ID NO: 67745 - DNA, 60 bp, Artificial
  Synthetic oligonucleotide
gcctgatcagaccaaatgaaaacccagctcataagagtcaattggtatggatggcatgcc

SEQ ID NO: 67746 - DNA, 60 bp, Artificial
  Synthetic oligonucleotide
attggtcgggatagaccccttcaaactacttcagaatagtcaagtgttcagcctgatcag

SEQ ID NO: 67747 - DNA, 60 bp, Artificial
  Synthetic oligonucleotide
cctaagaaaactgggggacccatatatagaagagtagacgggaaatgggtgagggaactc

SEQ ID NO: 67748 - DNA, 60 bp, Artificial
  Synthetic oligonucleotide
gaaggaataaatacttagaagagcatcccagtgctgggaaggaccctaagaaaactgggg

SEQ ID NO: 67749 - DNA, 60 bp, Artificial
  Synthetic oligonucleotide
atgagagaaggaataaatacttagaagagcatcccagtgctgggaaggaccctaagaaaa

SEQ ID NO: 67750 - DNA, 60 bp, Artificial
  Synthetic oligonucleotide
gagcatctgtcggaagaatggttggtggcatcgggagattctacatccagatgtgcaccg

SEQ ID NO: 67751 - DNA, 60 bp, Artificial
  Synthetic oligonucleotide
ctacagaaatcagagcatctgtcggaagaatggttggtggcatcgggagattctacatcc

SEQ ID NO: 67752 - DNA, 60 bp, Artificial
  Synthetic oligonucleotide
ttgaaagagcaaccgttatggcagctttcagtgggaacaatgagggaaggacatcagaca

SEQ ID NO: 67753 - DNA, 60 bp, Artificial
  Synthetic oligonucleotide
ggggaaataccagccaacaaaaggcatccgcgggccagattagtgtgcaacctactttct

SEQ ID NO: 67754 - DNA, 60 bp, Artificial
  Synthetic oligonucleotide
tatatcaagtttcataagaggaaagaaagtgattccaagaggaaagctttcaacaagagg

SEQ ID NO: 67755 - DNA, 60 bp, Artificial
  Synthetic oligonucleotide
ggatggcatgccactctgctgcatttgaggatttacgtatatcaagtttcataagaggaa

SEQ ID NO: 67756 - DNA, 60 bp, Artificial
  Synthetic oligonucleotide
caaccgttatggcagctttcagtgggaacaatgagggaaggacatcagacatgcgaacag

SEQ ID NO: 67757 - DNA, 60 bp, Artificial
  Synthetic oligonucleotide
ctgcctgcttgtgtgtatgggcttgcagtagcgagtgggcatgactttgaaagagaagga

SEQ ID NO: 67758 - DNA, 60 bp, Artificial
  Synthetic oligonucleotide
aagagaaggatactcattggtcgggatagaccccttcaaactacttcagaatagtcaagt

SEQ ID NO: 67759 - DNA, 60 bp, Artificial
  Synthetic oligonucleotide
ttggcactccaatctgaatgatgccacttatcagagaacaagagcgcttgtccgcactgg

SEQ ID NO: 67760 - DNA, 60 bp, Artificial
  Synthetic oligonucleotide
gaacaagagcgcttgtccgcactgggatggatcccagaatgtgttccctaatgcaaggct

SEQ ID NO: 67761 - DNA, 60 bp, Artificial
  Synthetic oligonucleotide
gagcgcttgtccgcactgggatggatcccagaatgtgttccctaatgcaaggctcaacac

SEQ ID NO: 67762 - DNA, 60 bp, Artificial
  Synthetic oligonucleotide
atgcaaggctcaacacttcccagaaggtctggagccgcaggtgctgcagtgaaaggagtt

SEQ ID NO: 67763 - DNA, 54 bp, Artificial
  Synthetic oligonucleotide
ggggacccatatatagaagagtagacgggaaatgggtgagggaactcattcttt

SEQ ID NO: 67764 - DNA, 60 bp, Artificial
  Synthetic oligonucleotide
aggagagtgtggcgccaagcaaacaatggtgaagatgcaacatccggccttactcacatc

SEQ ID NO: 67765 - DNA, 60 bp, Artificial
  Synthetic oligonucleotide
ggagagtgtggcgccaagcaaacaatggtgaagatgcaacatccggccttactcacatca

SEQ ID NO: 67766 - DNA, 60 bp, Artificial
  Synthetic oligonucleotide
tactcacatcatgatttggcactccaatctgaatgatgccacttatcagagaacaagagc

SEQ ID NO: 67767 - DNA, 60 bp, Artificial
  Synthetic oligonucleotide
acatctgggtgacaagagaaccttatgtgtcatgcgatcctgataagtgttatcaatttg

SEQ ID NO: 67768 - DNA, 60 bp, Artificial
  Synthetic oligonucleotide
acatttgggtaacaagagaaccttatgtgtcatgcgatcctggcaagtgttatcaatttg

SEQ ID NO: 67769 - DNA, 60 bp, Artificial
  Synthetic oligonucleotide
tgctggtgcacttgccagttgcatgggcctcatatacaataggatgggggctgtaaccac

SEQ ID NO: 67770 - DNA, 60 bp, Artificial
  Synthetic oligonucleotide
caggtccggttattctggtattttctctgttgaaggcaaaagctgcatcaatcggtgctt

SEQ ID NO: 67771 - DNA, 60 bp, Artificial
  Synthetic oligonucleotide
ttacgagagaaccttatgtgtcatgcgatcctagcaggtgttaccagtttgcgctcggac

SEQ ID NO: 67772 - DNA, 60 bp, Artificial
  Synthetic oligonucleotide
gggaagatcattcatattagtccattgtcgggaagtgctcagcatgtggaggagtgttct

SEQ ID NO: 67773 - DNA, 60 bp, Artificial
  Synthetic oligonucleotide
ccaggcaagtgtgtatagcatggtccagttcaagttgtcatgatggaaaagcatggctgc

SEQ ID NO: 67774 - DNA, 60 bp, Artificial
  Synthetic oligonucleotide
tgatggaatgcttgttgacagtattggttcatggtctcaaaatatcctcagaactcagga

SEQ ID NO: 67775 - DNA, 60 bp, Artificial
  Synthetic oligonucleotide
tgacagtattggttcatggtctcaaaatatcctcagaactcaggagtcagaatgcgtttg

SEQ ID NO: 67776 - DNA, 60 bp, Artificial
  Synthetic oligonucleotide
acagtattggttcatggtctcaaaatatcctcagaactcaggagtcagaatgcgtttgca

SEQ ID NO: 67777 - DNA, 60 bp, Artificial
  Synthetic oligonucleotide
gttttgctggggttcatcatgtgggcctgccagaaaggcaacattaggtgcaacatttgc

SEQ ID NO: 67778 - DNA, 60 bp, Artificial
  Synthetic oligonucleotide
tgagggaagaatatcgacagaaacagcagagtgctgtggatgttgacgatggtcattttg

SEQ ID NO: 67779 - DNA, 56 bp, Artificial
  Synthetic oligonucleotide
aacaggaacagcagagtgctgtggatgttgacgatggtcattttgtcaacatagag

SEQ ID NO: 67780 - DNA, 60 bp, Artificial
  Synthetic oligonucleotide
ggacaatgatggatcaagtgagagaaagtcggaacccaggaaatgctgagatcgaagatc

SEQ ID NO: 67781 - DNA, 60 bp, Artificial
  Synthetic oligonucleotide
gcaatggtagatcaagtgagagaaagtcggaacccaggaaatgctgagatcgaagatctc

SEQ ID NO: 67782 - DNA, 60 bp, Artificial
  Synthetic oligonucleotide
ctgggaaaagctcaataatgaggtcagatgcacctattgaaacctgcagttctgaatgca

SEQ ID NO: 67783 - DNA, 60 bp, Artificial
  Synthetic oligonucleotide
cccagatatgttaagcaaaacactctgaaattggcaacagggatgcggaatgtaccagag

SEQ ID NO: 67784 - DNA, 60 bp, Artificial
  Synthetic oligonucleotide
cattccatggggccaaagaaatagcgctcagttattctgctggtgcacttgccagttgca

SEQ ID NO: 67785 - DNA, 60 bp, Artificial
  Synthetic oligonucleotide
tccatggggccaaagaaatagcactcagttattctgctggtgcacttgccagttgcatgg

SEQ ID NO: 67786 - DNA, 60 bp, Artificial
  Synthetic oligonucleotide
cattccatggggccaaagaaatagcactcagttattctgctggtgcacttgccagttgca

SEQ ID NO: 67787 - DNA, 60 bp, Artificial
  Synthetic oligonucleotide
tgacacaatacatgatagaacccctcatcgaaccctattgatgaatgagttgggtgttcc

SEQ ID NO: 67788 - DNA, 60 bp, Artificial
  Synthetic oligonucleotide
gaaatgggatcttttcattgaacgcagcaaggctttcagcaactgttacccttatgatgt

SEQ ID NO: 67789 - DNA, 60 bp, Artificial
  Synthetic oligonucleotide
gaaatgggaccttttcattgaacgcagcaaggctttcagcaactgttacccttatgatgt

SEQ ID NO: 67790 - DNA, 60 bp, Artificial
  Synthetic oligonucleotide
tgggaccttttcattgaacgcagcaaggctttcagcaactgttacccttatgatgtgcca

SEQ ID NO: 67791 - DNA, 60 bp, Artificial
  Synthetic oligonucleotide
gcaattgggatcctcatcggagggcttgaatggaatgataacacagttcgagtctctaaa

SEQ ID NO: 67792 - DNA, 60 bp, Artificial
  Synthetic oligonucleotide
ggcaacaacacagcaacgctgtgcctgggacatcatgcggtaccaaatggaacgctagtg

SEQ ID NO: 67793 - DNA, 60 bp, Artificial
  Synthetic oligonucleotide
caagcagctatcaaccaaatcaatgggaaactgaatagggtgattgagaagacgaacgag

SEQ ID NO: 67794 - DNA, 57 bp, Artificial
  Synthetic oligonucleotide
gggttcatcatgtgggcctgccaaaaaggcaacattaggtgcaacatttgcatttga

SEQ ID NO: 67795 - DNA, 52 bp, Artificial
  Synthetic oligonucleotide
tcgtgttcacgctcaccgtgcccagtgagcgaggactgcagcgtagacgttt

SEQ ID NO: 67796 - DNA, 60 bp, Artificial
  Synthetic oligonucleotide
ctactgcttgaagtggagcaagagataagaactttctcgcttcagcttatttagtaataa

SEQ ID NO: 67797 - DNA, 60 bp, Artificial
  Synthetic oligonucleotide
gagcaaaagctgcatcaataggtgcttttatgtggagctaataagaggaaggagacagga

SEQ ID NO: 67798 - DNA, 60 bp, Artificial
  Synthetic oligonucleotide
tctgttgagagcaaaagctgcatcaataggtgcttttatgtggagctaataagaggaagg

SEQ ID NO: 67799 - DNA, 60 bp, Artificial
  Synthetic oligonucleotide
agcggatatgcacaaacagactgtgtcctggaagcaatggctttccttgaggaatcccac

SEQ ID NO: 67800 - DNA, 60 bp, Artificial
  Synthetic oligonucleotide
cctcggggttacttcaaaatacgcagtgggaaaagctcaataatgaggtcagatgcaccc

SEQ ID NO: 67801 - DNA, 60 bp, Artificial
  Synthetic oligonucleotide
aagagataaggactttctcgtttcagcttatttaatgataaaaaacacccttgtttctac

SEQ ID NO: 67802 - DNA, 60 bp, Artificial
  Synthetic oligonucleotide
atgagccttctaaccgaggtcgaaacgtatgttctctctatcgtcccgtcaggccccctc

SEQ ID NO: 67803 - DNA, 60 bp, Artificial
  Synthetic oligonucleotide
caatgagaaagggaatcacggagtgaaaggctgggcctttgacgatggaaatgacgtgtg

SEQ ID NO: 67804 - DNA, 60 bp, Artificial
  Synthetic oligonucleotide
gggaatcacggagtgaaaggctgggcctttgacgatggaaatgacgtgtggatgggaaga

SEQ ID NO: 67805 - DNA, 60 bp, Artificial
  Synthetic oligonucleotide
tcagcctgatcagaccaaatgaaaacccagcccacaaaagtcaattggtgtggatggcat

SEQ ID NO: 67806 - DNA, 60 bp, Artificial
  Synthetic oligonucleotide
actaattcaaaatagcataacaatagagagaatggtactatctgcttttgatgagagaag

SEQ ID NO: 67807 - DNA, 60 bp, Artificial
  Synthetic oligonucleotide
atagtcaagtgttcagcctgatcagaccaaatgaaaacccagctcataagagtcaattgg

SEQ ID NO: 67808 - DNA, 60 bp, Artificial
  Synthetic oligonucleotide
tgtgcatagcttggtccagctcaagttgtcacgatggaaaagcatggctgcatgtttgtg

SEQ ID NO: 67809 - DNA, 60 bp, Artificial
  Synthetic oligonucleotide
aggccccctcaaagccgagatcgcgcagagacttgaagatgtctttgctgggaagaacac

SEQ ID NO: 67810 - DNA, 60 bp, Artificial
  Synthetic oligonucleotide
aacaggaacagggtacaccatggacacagtcaacaggacacatcaatactcagagagggg

SEQ ID NO: 67811 - DNA, 60 bp, Artificial
  Synthetic oligonucleotide
caccaacccactaatcaggcatgaaaacagaatggtgctggctagcaccacagctaaggc

SEQ ID NO: 67812 - DNA, 60 bp, Artificial
  Synthetic oligonucleotide
ggagaatccaagacctagagaaatacgttgaagacactaaaatagatctctggtcctaca

SEQ ID NO: 67813 - DNA, 60 bp, Artificial
  Synthetic oligonucleotide
gggagaatccaagacctagagaaatacgttgaagacactaaaatagatctctggtcctac

SEQ ID NO: 67814 - DNA, 60 bp, Artificial
  Synthetic oligonucleotide
cccaagtatgttaagcagaacaccctgaagttggcaacagggatgcggaatgtaccagag

SEQ ID NO: 67815 - DNA, 59 bp, Artificial
  Synthetic oligonucleotide
aagattatagcattgtttccagttatgtgtgctcagggcttgttggagacacacccaga

SEQ ID NO: 67816 - DNA, 60 bp, Artificial
  Synthetic oligonucleotide
aagattatagcattgtttccagttatgtgtgctcagggcttgttggagacacacccagaa

SEQ ID NO: 67817 - DNA, 60 bp, Artificial
  Synthetic oligonucleotide
atccaaatgtgcactgaacttaaactcagtgattatgaagggcggttgatccaaaacagc

SEQ ID NO: 67818 - DNA, 60 bp, Artificial
  Synthetic oligonucleotide
tctacatccaaatgtgcactgaacttaaactcagtgattatgaagggcggttgatccaga

SEQ ID NO: 67819 - DNA, 60 bp, Artificial
  Synthetic oligonucleotide
aatgtgcactgaacttaaactcagtgattatgaagggcggttgatccaaaacagcttgac

SEQ ID NO: 67820 - DNA, 60 bp, Artificial
  Synthetic oligonucleotide
attgggagattctacatccaaatgtgcactgaacttaaactcagtgattatgaagggcgg

SEQ ID NO: 67821 - DNA, 60 bp, Artificial
  Synthetic oligonucleotide
gggagattctacatccaaatgtgcactgaacttaaactcagtgattatgaagggcggtta

SEQ ID NO: 67822 - DNA, 60 bp, Artificial
  Synthetic oligonucleotide
gggagattctacatccaaatgtgcactgaacttaaactcagtgattatgaagggcggttg

SEQ ID NO: 67823 - DNA, 60 bp, Artificial
  Synthetic oligonucleotide
ggtggacggttggtacggtttcaggcatcaaaattctgagggcacagggcaagcagcaga

SEQ ID NO: 67824 - DNA, 60 bp, Artificial
  Synthetic oligonucleotide
gacggttggtacggtttcaggcatcaaaattctgagggcacagggcaagcagcagatctt

SEQ ID NO: 67825 - DNA, 60 bp, Artificial
  Synthetic oligonucleotide
ggacggttggtacggtttcaggcatcaaaattctgagggcacagggcaagcagcagatct

SEQ ID NO: 67826 - DNA, 60 bp, Artificial
  Synthetic oligonucleotide
cggttggtacggtttcaggcatcaaaattctgaaggcacaggacaagcagcagatcttaa

SEQ ID NO: 67827 - DNA, 60 bp, Artificial
  Synthetic oligonucleotide
atcaaaatagaccaggcaatcatggataagaacatcatgttgaaagcgaatttcagtgtg

SEQ ID NO: 67828 - DNA, 60 bp, Artificial
  Synthetic oligonucleotide
attctcagaagtagaagggagaattcaggacctcgagaaatatgttgaggacactaaaat

SEQ ID NO: 67829 - DNA, 60 bp, Artificial
  Synthetic oligonucleotide
agaattctcagaagtagaagggagaattcaggacctcgagaaatatgttgaggacactaa

SEQ ID NO: 67830 - DNA, 60 bp, Artificial
  Synthetic oligonucleotide
gaattctcagaagtagaagggagaattcaggacctcgagaaatatgttgaggacactaaa

SEQ ID NO: 67831 - DNA, 58 bp, Artificial
  Synthetic oligonucleotide
cagatcttgaggctctcatggagtggctaaagacaagaccaatcctgtcacctctgac

SEQ ID NO: 67832 - DNA, 60 bp, Artificial
  Synthetic oligonucleotide
tccagtgttgaacgtgactatgccaaacaatgacaatttcgacaaattatacatttgggg

SEQ ID NO: 67833 - DNA, 60 bp, Artificial
  Synthetic oligonucleotide
gctcagcatgtggaggagtgttcttgttatcctcgataccctggtgtcagatgtatttgc

SEQ ID NO: 67834 - DNA, 60 bp, Artificial
  Synthetic oligonucleotide
atcggcttcgccgagatcagaagtccctaaggggaagaggcaacactctcggtctaaaca

SEQ ID NO: 67835 - DNA, 60 bp, Artificial
  Synthetic oligonucleotide
taaaattgagcattgaagacccaagtcacgaaggagaagggatcccactatatgatgcga

SEQ ID NO: 67836 - DNA, 60 bp, Artificial
  Synthetic oligonucleotide
aatttgcagcaatatgcactcacctggaggtatgtttcatgtattcagattttcatttca

SEQ ID NO: 67837 - DNA, 53 bp, Artificial
  Synthetic oligonucleotide
agagacataagcgatttgaagcaatatgatagtgacgaacctgaattaaggtc

SEQ ID NO: 67838 - DNA, 60 bp, Artificial
  Synthetic oligonucleotide
caaatttgcagcaatatgcactcacctggaggtatgtttcatgtattcagattttcattt

SEQ ID NO: 67839 - DNA, 60 bp, Artificial
  Synthetic oligonucleotide
agagacataagcgatttgaagcaatatgatagtgacgaacctgaattgaggtcactttca

SEQ ID NO: 67840 - DNA, 60 bp, Artificial
  Synthetic oligonucleotide
agagacataagcgatttgaagcaatatgatagtgacgaacctgaattaaggtcgctttca

SEQ ID NO: 67841 - DNA, 60 bp, Artificial
  Synthetic oligonucleotide
tggagttttctctcactgacccgagacttgagccacataaatgggagaaatactgtgtcc

SEQ ID NO: 67842 - DNA, 60 bp, Artificial
  Synthetic oligonucleotide
atgataagcaagtgcagaactaaagagggaaggcgaaaaaccaatttatatggattcatc

SEQ ID NO: 67843 - DNA, 60 bp, Artificial
  Synthetic oligonucleotide
cctcgaacctgggacctttgatctcggggggctatatgaagcaattgaggagtgcctgat

SEQ ID NO: 67844 - DNA, 60 bp, Artificial
  Synthetic oligonucleotide
cctcgaacctgggacctttgatcttgaggggctatatgaagcaattgaggagtgcctgat

SEQ ID NO: 67845 - DNA, 60 bp, Artificial
  Synthetic oligonucleotide
atgataagcaagtgcagaactaaagagggaagacgaaaaaccaatttatatggattcatc

SEQ ID NO: 67846 - DNA, 60 bp, Artificial
  Synthetic oligonucleotide
taaactttgtgagcatggagttttctctcactgatccgagacttgagccacataaatggg

SEQ ID NO: 67847 - DNA, 60 bp, Artificial
  Synthetic oligonucleotide
gctgcccagagggcaatgatggatcaagtgagagaaagtcggaacccaggaaatgctgag

SEQ ID NO: 67848 - DNA, 60 bp, Artificial
  Synthetic oligonucleotide
gctgcacaaagggcaatgatggatcaagtgagagaaagtcggaacccaggaaatgctgag

SEQ ID NO: 67849 - DNA, 60 bp, Artificial
  Synthetic oligonucleotide
tgcacaaaggacaatgatggatcaagtgagagaaagtcggaacccaggaaatgctgagat

SEQ ID NO: 67850 - DNA, 60 bp, Artificial
  Synthetic oligonucleotide
tgcacaaagagcaatggtggatcaagtgagagaaagtcggaacccaggaaatgctgagat

SEQ ID NO: 67851 - DNA, 60 bp, Artificial
  Synthetic oligonucleotide
tgcacaaaaagcaatggtggatcaagtgagagaaagtcggaacccaggaaatgctgagat

SEQ ID NO: 67852 - DNA, 60 bp, Artificial
  Synthetic oligonucleotide
tgcacaaagggcaatgatggatcaagtgagagaaagtcggaacccaggaaatgctgagat

SEQ ID NO: 67853 - DNA, 60 bp, Artificial
  Synthetic oligonucleotide
gctgcacaaagagcaatggtggatcaagtgagagaaagtcggaacccaggaaatgctgag

SEQ ID NO: 67854 - DNA, 60 bp, Artificial
  Synthetic oligonucleotide
agtggatatgcacaaacagactgtgtcctggaggctatggccttccttgaagaatcccac

SEQ ID NO: 67855 - DNA, 60 bp, Artificial
  Synthetic oligonucleotide
agtggatatgcacaaacagactgtgtcctggaggctatggccttccttgaagagtcccac

SEQ ID NO: 67856 - DNA, 60 bp, Artificial
  Synthetic oligonucleotide
ccggattatgcctcccttaggtcactagttgcctcatccggcacactggagtttaacaat

SEQ ID NO: 67857 - DNA, 60 bp, Artificial
  Synthetic oligonucleotide
ttatcgaaccctattaatgaacgagttgggtgttccatttcatttgggaaccaggcaagt

SEQ ID NO: 67858 - DNA, 60 bp, Artificial
  Synthetic oligonucleotide
cggaccctattgatgaatgaattgggtgttccatttcatttgggaaccaggcaagtgtgc

SEQ ID NO: 67859 - DNA, 60 bp, Artificial
  Synthetic oligonucleotide
ttaccggaccctattgatgaatgaattgggtgttccatttcatttgggaaccaggcaagt

SEQ ID NO: 67860 - DNA, 53 bp, Artificial
  Synthetic oligonucleotide
accctgtatgttcaggcctcaggaagagtcacggtctctaccaggagaagcca

SEQ ID NO: 67861 - DNA, 60 bp, Artificial
  Synthetic oligonucleotide
agattgaattggttaactaagtcaggaaatgcatatccagtgttgaacgtgactatgcca

SEQ ID NO: 67862 - DNA, 60 bp, Artificial
  Synthetic oligonucleotide
gaatcttccaggaaatgaaaataacacagcaacactatgcctgggacatcatgcagtgcc

SEQ ID NO: 67863 - DNA, 60 bp, Artificial
  Synthetic oligonucleotide
gaagaccgtcattgctttaagctacattttctgcctggcttttggtcagaatcttccagg

SEQ ID NO: 67864 - DNA, 60 bp, Artificial
  Synthetic oligonucleotide
ccaacgccaccgagctagtccaaaattcctcaacagggaaaatatgcaacaatccccaca

SEQ ID NO: 67865 - DNA, 60 bp, Artificial
  Synthetic oligonucleotide
ccaggaaatgaaaataacacagcaacactatgcctgggacatcatgcagtgccgaacggg

SEQ ID NO: 67866 - DNA, 60 bp, Artificial
  Synthetic oligonucleotide
aacggtttcttcagtagattgaattggttaactaagtcaggaaatgcatatccagtgttg

SEQ ID NO: 67867 - DNA, 60 bp, Artificial
  Synthetic oligonucleotide
gagttcatcactgaaggtttcaattgggcaggagtaactcaaaatgggggaagcggtgct

SEQ ID NO: 67868 - DNA, 60 bp, Artificial
  Synthetic oligonucleotide
attccgaaggtacaggacaagcagcagaccttaaaagcactcaggcagccatcgatcaga

SEQ ID NO: 67869 - DNA, 60 bp, Artificial
  Synthetic oligonucleotide
ctcaataatgagatcagatgcacctattgacacctgcatctccgaatgtatcactccgaa

SEQ ID NO: 67870 - DNA, 60 bp, Artificial
  Synthetic oligonucleotide
cagatgcacctattgacacctgcatctccgaatgtatcactccgaacggaagcatcccca

SEQ ID NO: 67871 - DNA, 60 bp, Artificial
  Synthetic oligonucleotide
ggtaaggggccagtctggcagaataagcgtatattggacagtagtcaaacctggggacgt

SEQ ID NO: 67872 - DNA, 60 bp, Artificial
  Synthetic oligonucleotide
agagaatggatgggaagggatggtagatggttggtatggcttcaggcatcaaaattccga

SEQ ID NO: 67873 - DNA, 60 bp, Artificial
  Synthetic oligonucleotide
gggaagggatggtagatggttggtatggcttcaggcatcaaaattccgaaggtacaggac

SEQ ID NO: 67874 - DNA, 60 bp, Artificial
  Synthetic oligonucleotide
ctgaaattggcaacaggaatgcggaatgtccctgagaagcaaaccagaggcctgttcggc

SEQ ID NO: 67875 - DNA, 61 bp, Artificial
  Synthetic oligonucleotide
cagcatacaattgatttaactgattcagaaatgaacaagttgtttgaaaagactaggaggc

SEQ ID NO: 67876 - DNA, 60 bp, Artificial
  Synthetic oligonucleotide
cacgaaagtagatctttggtcttacaatgccgagcttcttgttgctttagaaaaccagca

SEQ ID NO: 67877 - DNA, 60 bp, Artificial
  Synthetic oligonucleotide
cttatgaccatgacatatacagagatgaggcagtgaacaatcggttccagatcaaaggtg

SEQ ID NO: 67878 - DNA, 60 bp, Artificial
  Synthetic oligonucleotide
cgattagaaacggaacttatgaccatgacatatacagagatgaggcagtgaacaatcggt

SEQ ID NO: 67879 - DNA, 60 bp, Artificial
  Synthetic oligonucleotide
aggaggcaattgagggaaaatgctgaagacatgggcaatggctgcttcaagatataccac

SEQ ID NO: 67880 - DNA, 60 bp, Artificial
  Synthetic oligonucleotide
ttgtttgaaaagactaggaggcaattgagggaaaatgctgaagacatgggcaatggctgc

SEQ ID NO: 67881 - DNA, 60 bp, Artificial
  Synthetic oligonucleotide
cggttccagatcaaaggtgttgagctaaagtctgggtacaaagactggatcttgtggatt

SEQ ID NO: 67882 - DNA, 60 bp, Artificial
  Synthetic oligonucleotide
ggaacagggtacaccatggacacagtcaacagaacacaccaatattcagagaaggggaag

SEQ ID NO: 67883 - DNA, 60 bp, Artificial
  Synthetic oligonucleotide
cagatcttgaggctctcatggaatggctaaagacaagaccaattctgtcacctctgacta

SEQ ID NO: 67884 - DNA, 60 bp, Artificial
  Synthetic oligonucleotide
tctttgcagggaagaacacagatctcgaggctctcatggaatggctaaagacaagaccaa

SEQ ID NO: 67885 - DNA, 60 bp, Artificial
  Synthetic oligonucleotide
gcctgcatagggtcaatcagaaatggaacttatgaccatgatgtatacagagacgaggca

SEQ ID NO: 67886 - DNA, 60 bp, Artificial
  Synthetic oligonucleotide
cttgaggttctcatggaatggctaaagacaagaccaatcctgtcacctctgactaagggg

SEQ ID NO: 67887 - DNA, 60 bp, Artificial
  Synthetic oligonucleotide
aggaaaagctgatactaaaatactattcattgaggaggggaaaatcgttcatactagccc

SEQ ID NO: 67888 - DNA, 60 bp, Artificial
  Synthetic oligonucleotide
catttatgcaagccttacagctactatttgaagtggaacaggagataagaactttctcgt

SEQ ID NO: 67889 - DNA, 60 bp, Artificial
  Synthetic oligonucleotide
cattcatgcaagccttacagctactatttgaagtggaacaggagataagaactttctcgt

SEQ ID NO: 67890 - DNA, 60 bp, Artificial
  Synthetic oligonucleotide
gggccaaggaagtagcgctcagttactctgctggtgcacttgccagttgcatgggcctca

SEQ ID NO: 67891 - DNA, 60 bp, Artificial
  Synthetic oligonucleotide
cagttattctgctggtgcacttgccagttgcatgggcctcatatacaacagaatgggggc

SEQ ID NO: 67892 - DNA, 60 bp, Artificial
  Synthetic oligonucleotide
ctggtgcacttgccagttgcatgggcctcatatacaacaggatggggactgtgaccactg

SEQ ID NO: 67893 - DNA, 58 bp, Artificial
  Synthetic oligonucleotide
cagttattctgctggtgcacttgccagttgcatgggcctcatatacaacagaatgggg

SEQ ID NO: 67894 - DNA, 60 bp, Artificial
  Synthetic oligonucleotide
tggtgcacttgccagttgcatgggcctcatatacaacaggatgggaacagtgaccacaga

SEQ ID NO: 67895 - DNA, 60 bp, Artificial
  Synthetic oligonucleotide
ctggtgcacttgccagttgcatgggcctcatatataacagaatgggaacagtgaccacag

SEQ ID NO: 67896 - DNA, 60 bp, Artificial
  Synthetic oligonucleotide
ctggtgcacttgccagttgcatgggcctcatatacaacaggatgggagctgtgaccactg

SEQ ID NO: 67897 - DNA, 60 bp, Artificial
  Synthetic oligonucleotide
accaacgccaccgagctagtccaaaattcctcaacagggaaaatatgcaacaatccccac

SEQ ID NO: 67898 - DNA, 60 bp, Artificial
  Synthetic oligonucleotide
ttgttttgctgggtttcattatgtgggcctgccagagaggcaacattaggtgcaacattt

SEQ ID NO: 67899 - DNA, 60 bp, Artificial
  Synthetic oligonucleotide
gacagtagtcaaacctggggacgtactggtaatcaacagtaatggaaacctaatcgctcc

SEQ ID NO: 67900 - DNA, 60 bp, Artificial
  Synthetic oligonucleotide
ggacaatagttaaacctggggacgtgctggtaatcaacagtaatggaaacctaatcgctc

SEQ ID NO: 67901 - DNA, 60 bp, Artificial
  Synthetic oligonucleotide
cctggggacgtgctggtaatcaacagtaatggaaacctaatcgctcctcggggttacttc

SEQ ID NO: 67902 - DNA, 60 bp, Artificial
  Synthetic oligonucleotide
cctggggacgtactggtaatcaacagtaatggaaacctaatcgctcctcgaggctacttc

SEQ ID NO: 67903 - DNA, 60 bp, Artificial
  Synthetic oligonucleotide
aaggaattttccgaagtagaagggaggattcaggaccttgagaaatacgttgaagacacg

SEQ ID NO: 67904 - DNA, 60 bp, Artificial
  Synthetic oligonucleotide
aaggaattctccgaagtagaagggaggattcaggaccttgagaaatacgttgaagacacg

SEQ ID NO: 67905 - DNA, 60 bp, Artificial
  Synthetic oligonucleotide
ccgaagtagaagggaggattcaggaccttgagaaatacgttgaagacacgaaagtagatc

SEQ ID NO: 67906 - DNA, 60 bp, Artificial
  Synthetic oligonucleotide
ggaattctccgaagtagaagggaggattcaggaccttgagaaatacgttgaagacacgaa

SEQ ID NO: 67907 - DNA, 60 bp, Artificial
  Synthetic oligonucleotide
gttttgctgggtttcattatgtgggcctgccagagaggcaacattaggtgcaacatttgc

SEQ ID NO: 67908 - DNA, 60 bp, Artificial
  Synthetic oligonucleotide
gggcaatggttgtttcaagatataccacaaatgtgacaatgcttgcatagagtcaattag

SEQ ID NO: 67909 - DNA, 60 bp, Artificial
  Synthetic oligonucleotide
tgctttgtgttgttttgctgggtttcattatgtgggcctgccagagaggcaacattaggt

SEQ ID NO: 67910 - DNA, 60 bp, Artificial
  Synthetic oligonucleotide
gtgtcaagctttcaggtagactgctttctttggcatgtccgcaaacgatttgcagactgg

SEQ ID NO: 67911 - DNA, 54 bp, Artificial
  Synthetic oligonucleotide
ttttctgttgagaacaaaagctgcatcaataggtgcttttatgtggagctaata

SEQ ID NO: 67912 - DNA, 60 bp, Artificial
  Synthetic oligonucleotide
atcggcttcgccgagatcagaagtccctaaggggaagaggcagcactctcggtctaaaca

SEQ ID NO: 67913 - DNA, 60 bp, Artificial
  Synthetic oligonucleotide
atcggcttcgccgagatcagaagtccctaaggggaagaggcaacactctcggtctagaca

SEQ ID NO: 67914 - DNA, 60 bp, Artificial
  Synthetic oligonucleotide
aagagggccttctacggaaggagtgcctgagtctatgagggaagaatatcaacaggaaca

SEQ ID NO: 67915 - DNA, 60 bp, Artificial
  Synthetic oligonucleotide
aagagggccttctacggaaggagtgcctgagtccatgagggaagaatatcaacaggaaca

SEQ ID NO: 67916 - DNA, 60 bp, Artificial
  Synthetic oligonucleotide
cggaaggagtgcctgagtctatgagggaagaatatcaacaggaacagcagagtgctgtgg

SEQ ID NO: 67917 - DNA, 60 bp, Artificial
  Synthetic oligonucleotide
cagaatagaccaggcaatcatggataagaacatcatgttgaaagcgaatttcagtgtgat

SEQ ID NO: 67918 - DNA, 60 bp, Artificial
  Synthetic oligonucleotide
gagagggaatcatggggtgaaaggctgggcctttgacgatggaaatgacatatggatggg

SEQ ID NO: 67919 - DNA, 60 bp, Artificial
  Synthetic oligonucleotide
agagagggaatcatggggtgaaaggctgggcctttgacgatggaaatgacatatggatgg

SEQ ID NO: 67920 - DNA, 60 bp, Artificial
  Synthetic oligonucleotide
gagagggaatcacggagtgaaaggctgggcctttgacgatggaaatgacatatggatggg

SEQ ID NO: 67921 - DNA, 60 bp, Artificial
  Synthetic oligonucleotide
gggaatggtggacggttggtacggcttcaggcatcaaaattctgagggcacaggacaagc

SEQ ID NO: 67922 - DNA, 60 bp, Artificial
  Synthetic oligonucleotide
gggaatggtggacggttggtatggtttcaggcatcaaaattctgagggcacaggacaagc

SEQ ID NO: 67923 - DNA, 60 bp, Artificial
  Synthetic oligonucleotide
ccattgtagagccactgagtacataatgaagggggtatacattaatactgccttgctcaa

SEQ ID NO: 67924 - DNA, 60 bp, Artificial
  Synthetic oligonucleotide
aacactctgaaattggcaacagggatgcgaaatgtaccagagaaacaaactagaggcata

SEQ ID NO: 67925 - DNA, 56 bp, Artificial
  Synthetic oligonucleotide
acaacacagcaacgctgtgcctgggacatcatgcggtaccaaatggaacgctagtg

SEQ ID NO: 67926 - DNA, 54 bp, Artificial
  Synthetic oligonucleotide
acatctgggtgacaagagaaccttatgtgtcatgcgatcctgacaagtgttatc

SEQ ID NO: 67927 - DNA, 60 bp, Artificial
  Synthetic oligonucleotide
gtgtcaagctttcaggtagactgctttctttggcatgtccgcaaacggtttgcaaactgg

SEQ ID NO: 67928 - DNA, 60 bp, Artificial
  Synthetic oligonucleotide
ccagttatgtgtgctcaggacttgttggagacacacccagaaaaaacgacagctccagca

SEQ ID NO: 67929 - DNA, 52 bp, Artificial
  Synthetic oligonucleotide
tgtcatgatggaaaagcatggctgcatgtttgtgtcactgggcatgataaaa

SEQ ID NO: 67930 - DNA, 60 bp, Artificial
  Synthetic oligonucleotide
aataagacaggaacatttgaattcacaagctttttctaccgctatggatttgtagccaat

SEQ ID NO: 67931 - DNA, 60 bp, Artificial
  Synthetic oligonucleotide
cggatatgcacaaacagactgtgtcctggaagcaatggctttccttgaggaatcccaccc

SEQ ID NO: 67932 - DNA, 60 bp, Artificial
  Synthetic oligonucleotide
tatataaataggacaggaacatttgaattcacaagctttttctatcgctatggatttgta

SEQ ID NO: 67933 - DNA, 60 bp, Artificial
  Synthetic oligonucleotide
ccataaggagattgagtctgtaaacaatgctgtggtaatgccagctcatggtccagccaa

SEQ ID NO: 67934 - DNA, 60 bp, Artificial
  Synthetic oligonucleotide
gattgagtctgtaaacaatgctgtggtaatgccagctcatggtccagccaagagtatgga

SEQ ID NO: 67935 - DNA, 60 bp, Artificial
  Synthetic oligonucleotide
gagacgaagcattgaacaaccggttccagatcaaaggtgttgagctgaagtcaggataca

SEQ ID NO: 67936 - DNA, 60 bp, Artificial
  Synthetic oligonucleotide
cttgaggctctcatggaatggctaaagacaagaccaattctgtcacctctgactaagggg

SEQ ID NO: 67937 - DNA, 60 bp, Artificial
  Synthetic oligonucleotide
ggaaaaacaccgatcttgaggctctcatggaatggctaaagacaagaccaatcctgtcac

SEQ ID NO: 67938 - DNA, 60 bp, Artificial
  Synthetic oligonucleotide
atgagtcttctaaccgaggtcgaaacgtatgttctctctatcgtcccgtcaggccccctc

SEQ ID NO: 67939 - DNA, 60 bp, Artificial
  Synthetic oligonucleotide
atgagctttctaaccgaggtcgaaacgtatgttctctctatcgtcccgtcaggccccctc

SEQ ID NO: 67940 - DNA, 60 bp, Artificial
  Synthetic oligonucleotide
cgaactgggaaaagctcaataatgaggtcagatgcacccattggcacctgcagttctgaa

SEQ ID NO: 67941 - DNA, 60 bp, Artificial
  Synthetic oligonucleotide
aaaattctgagggcacaggacaagcagcagatcttaaaagtacccaagcagctatcaacc

SEQ ID NO: 67942 - DNA, 60 bp, Artificial
  Synthetic oligonucleotide
ggtgacaagagaaccttatgtgtcatgcgatcctgacaagtgttatcaatttgcccttgg

SEQ ID NO: 67943 - DNA, 60 bp, Artificial
  Synthetic oligonucleotide
ctgggtgacaagagaaccttatgtgtcatgcgatcctgacaagtgttatcaatttgccct

SEQ ID NO: 67944 - DNA, 53 bp, Artificial
  Synthetic oligonucleotide
agtctctaagaatctacagagattcgcttggagaagcagtaatgagaatgggg

SEQ ID NO: 67945 - DNA, 60 bp, Artificial
  Synthetic oligonucleotide
agtctctaagaatctacagagattcgcttggagaagcagtaatgagaatgggggacctcc

SEQ ID NO: 67946 - DNA, 60 bp, Artificial
  Synthetic oligonucleotide
caaaagcagggtgacaaagacataatggattccaacactgtgtcaagtttccaggtagat

SEQ ID NO: 67947 - DNA, 60 bp, Artificial
  Synthetic oligonucleotide
aagcagggtgacaaagacataatggattccaacactgtgtcaagtttccaggtagattgc

SEQ ID NO: 67948 - DNA, 60 bp, Artificial
  Synthetic oligonucleotide
agcaaaagcagggtgacaaagacataatggattccaacactgtgtcaagtttccaggtag

SEQ ID NO: 67949 - DNA, 60 bp, Artificial
  Synthetic oligonucleotide
gcagggtgacaaagacataatggattccaacactgtgtcaagtttccaggtagattgctt

SEQ ID NO: 67950 - DNA, 60 bp, Artificial
  Synthetic oligonucleotide
tcagtgattatgaagggcggttgatccaaaacagcttgacaatagagaaaatggtgctct

SEQ ID NO: 67951 - DNA, 60 bp, Artificial
  Synthetic oligonucleotide
gtgattatgaagggcggttgatccaaaacagcttgacaatagagaaaatggtgctctctg

SEQ ID NO: 67952 - DNA, 60 bp, Artificial
  Synthetic oligonucleotide
gcactgaacttaaactcagtgattatgaagggcggttgatccaaaacagcttgacaatag

SEQ ID NO: 67953 - DNA, 60 bp, Artificial
  Synthetic oligonucleotide
actcagtgattatgaagggcggttgatccaaaacagcttgacaatagagaaaatggtgct

SEQ ID NO: 67954 - DNA, 60 bp, Artificial
  Synthetic oligonucleotide
tgaaggtcggttgatccaaaacagcttgacaatagagaaaatggtgctctctgcttttga

SEQ ID NO: 67955 - DNA, 60 bp, Artificial
  Synthetic oligonucleotide
aagggcggttgatccaaaacagcttgacaatagagaaaatggtgctctctgcttttgatg

SEQ ID NO: 67956 - DNA, 60 bp, Artificial
  Synthetic oligonucleotide
tgaagggcggttgatccaaaacagcttgacaatagagaaaatggtgctctctgcctttga

SEQ ID NO: 67957 - DNA, 60 bp, Artificial
  Synthetic oligonucleotide
tgaagggcggttgatccaaaacagcttgacaatagagaaaatggtgctctctgcttttga

SEQ ID NO: 67958 - DNA, 60 bp, Artificial
  Synthetic oligonucleotide
agggcggttgatccaaaacagcttgacaatagagaaaatggtgctctctgcttttgatga

SEQ ID NO: 67959 - DNA, 60 bp, Artificial
  Synthetic oligonucleotide
gggcggttgatccaaaacagcttgacaatagagaaaatggtgctctctgcttttgatgag

SEQ ID NO: 67960 - DNA, 56 bp, Artificial
  Synthetic oligonucleotide
ttgatccaaaacagcttgacaatagagaaaatggtgctctctgcttttgatgagag

SEQ ID NO: 67961 - DNA, 60 bp, Artificial
  Synthetic oligonucleotide
agggatcaacgatcgaaatttctggagaggtgagaatgggcggaaaacaagaagtgctta

SEQ ID NO: 67962 - DNA, 60 bp, Artificial
  Synthetic oligonucleotide
cgaaatttctggagaggtgagaatgggcggaaaacaagaagtgcttatgagagaatgtgc

SEQ ID NO: 67963 - DNA, 60 bp, Artificial
  Synthetic oligonucleotide
cctcttttgacatgagtaatgaaggatcttatttcttcggagacaatgcagaacagtacg

SEQ ID NO: 67964 - DNA, 60 bp, Artificial
  Synthetic oligonucleotide
gctcgacccttcctagaaggtccggagctgcaggtgctgcagtcaaaggaatcgggacaa

SEQ ID NO: 67965 - DNA, 60 bp, Artificial
  Synthetic oligonucleotide
tggaaatacggagggaagaacctcagacatgagggcagaaatcataagaatgatggaagg

SEQ ID NO: 67966 - DNA, 60 bp, Artificial
  Synthetic oligonucleotide
cgactctccctagaaggtccggagctgcaggtgctgcagtcaaaggaatcgggacaatgg

SEQ ID NO: 67967 - DNA, 60 bp, Artificial
  Synthetic oligonucleotide
aacgggggatcaacgatcgaaatttctggagaggtgagaatgggcggaaaacaagaagtg

SEQ ID NO: 67968 - DNA, 54 bp, Artificial
  Synthetic oligonucleotide
gatccaaaacagcttgacaatagagaaaatggtgctctctgcttttgatgagag

SEQ ID NO: 67969 - DNA, 60 bp, Artificial
  Synthetic oligonucleotide
gggcggttaatccaaaacagcttgacaatagagaaaatggtgctctctgcttttgatgag

SEQ ID NO: 67970 - DNA, 60 bp, Artificial
  Synthetic oligonucleotide
gaaatacggagggaagaacctcagacatgagggcagaaatcataagaatgatggaaggtg

SEQ ID NO: 67971 - DNA, 60 bp, Artificial
  Synthetic oligonucleotide
atcgggcgattctacatccaaatgtgcactgaacttaaactcagtgattatgaagggcgg

SEQ ID NO: 67972 - DNA, 60 bp, Artificial
  Synthetic oligonucleotide
gagggcctccgcaggccaaatcagtgtgcaacctacgttttctgtacaaagaaacctccc

SEQ ID NO: 67973 - DNA, 60 bp, Artificial
  Synthetic oligonucleotide
aggtcatccgtcgggaagatgattgatggaattgggcgattctacattcaaatgtgcact

SEQ ID NO: 67974 - DNA, 60 bp, Artificial
  Synthetic oligonucleotide
taggtcatccgtcgggaagatgattgatggaattgggcgattctacatccaaatgtgcac

SEQ ID NO: 67975 - DNA, 60 bp, Artificial
  Synthetic oligonucleotide
ggggatcaacgatcgaaatttctggagaggtgagaatgggcggaaaacaagaagtgctta

SEQ ID NO: 67976 - DNA, 60 bp, Artificial
  Synthetic oligonucleotide
catccgtcgggaagatgattgatggaattgggcgattctacatccaaatgtgcactgaac

SEQ ID NO: 67977 - DNA, 60 bp, Artificial
  Synthetic oligonucleotide
ggtcatccgtcgggaagatgattgatggaattgggcgattctacatccaaatgtgcactg

SEQ ID NO: 67978 - DNA, 60 bp, Artificial
  Synthetic oligonucleotide
cagctggtgtggatggcatgccattctgctgcatttgaagatttgagattgttaagcttc

SEQ ID NO: 67979 - DNA, 60 bp, Artificial
  Synthetic oligonucleotide
ggtcggttgatccaaaacagcttgacaatagagaaaatggtgctctctgcttttgatgag

SEQ ID NO: 67980 - DNA, 60 bp, Artificial
  Synthetic oligonucleotide
gtgcactgaacttaaactcagtgattatgaagggcggttgatccaaaacagcttgacaat

SEQ ID NO: 67981 - DNA, 60 bp, Artificial
  Synthetic oligonucleotide
gggcggttgatccaaaacagcttgacaatagagaaaatggtgctctctgcctttgatgag

SEQ ID NO: 67982 - DNA, 60 bp, Artificial
  Synthetic oligonucleotide
tgatgcagggctcgactcttcctagaaggtccggagctgcaggtgctgcagtcaaaggaa

SEQ ID NO: 67983 - DNA, 60 bp, Artificial
  Synthetic oligonucleotide
tcagctggtgtggatggcatgccattctgctgcatttgaagatttgagattgttaagctt

SEQ ID NO: 67984 - DNA, 60 bp, Artificial
  Synthetic oligonucleotide
tgatgcagggctcgactctccctagaaggtccggagctgcaggtgctgcagtcaaaggaa

SEQ ID NO: 67985 - DNA, 60 bp, Artificial
  Synthetic oligonucleotide
tacatccaaatgtgcactgaacttaaactcagtgattatgaagggcggttgatccaaaac

SEQ ID NO: 67986 - DNA, 60 bp, Artificial
  Synthetic oligonucleotide
tctacatccaaatgtgcactgaacttaaactcagtgattatgaagggcggttgatccaaa

SEQ ID NO: 67987 - DNA, 60 bp, Artificial
  Synthetic oligonucleotide
cagagggcctccgcaggccaaatcagtgtgcaacctacgttttctgtacaaagaaacctc

SEQ ID NO: 67988 - DNA, 53 bp, Artificial
  Synthetic oligonucleotide
agggcctccgcaggccaaatcagtgtgcaacctacgttttctgtacaaagaaa

SEQ ID NO: 67989 - DNA, 60 bp, Artificial
  Synthetic oligonucleotide
gaatctgatgaggcacttaaaatgaccatggtctccacacctgcttcacgatacataact

SEQ ID NO: 67990 - DNA, 60 bp, Artificial
  Synthetic oligonucleotide
ggtattttctccgttgaaggcaaaagctgcatcaatcggtgcttttatgtggagttgata

SEQ ID NO: 67991 - DNA, 60 bp, Artificial
  Synthetic oligonucleotide
acaggtccggttattctggtattttctccgttgaaggcaaaagctgcatcaatcggtgct

SEQ ID NO: 67992 - DNA, 59 bp, Artificial
  Synthetic oligonucleotide
tgccccaaattagcagaatacagaaattggtcaaagccgcaatgtaacattacaggatt

SEQ ID NO: 67993 - DNA, 60 bp, Artificial
  Synthetic oligonucleotide
tgccccaaattagcagaatacagaaattggtcaaagccgcaatgtaacattacaggattt

SEQ ID NO: 67994 - DNA, 60 bp, Artificial
  Synthetic oligonucleotide
agaatacagaaattggtcaaagccgcaatgtaacattacaggatttgcacctttttccaa

SEQ ID NO: 67995 - DNA, 60 bp, Artificial
  Synthetic oligonucleotide
taggtccggttattctggtattttctccgttgaaggcaaaagctgcatcaatcggtgctt

SEQ ID NO: 67996 - DNA, 60 bp, Artificial
  Synthetic oligonucleotide
ccctttgcatcagaatggaccaggcaatcgtggagaaaaacatcatgttgaaagcgaatt

SEQ ID NO: 67997 - DNA, 60 bp, Artificial
  Synthetic oligonucleotide
ccaggtagattgctttctttggcatatccggaaacaagttgtagaccaaaaactgagtga

SEQ ID NO: 67998 - DNA, 51 bp, Artificial
  Synthetic oligonucleotide
ccaggtagattgctttctttggcatatccggaaacaagttgtagaccaaaa

SEQ ID NO: 67999 - DNA, 60 bp, Artificial
  Synthetic oligonucleotide
ccaggtagattgctttctttggcatatccggaaacaagttgtagaccaagaactgagtga

SEQ ID NO: 68000 - DNA, 60 bp, Artificial
  Synthetic oligonucleotide
gctttctttggcatatccggaaacaagttgtagaccaagaactgagtgatgctccattcc

SEQ ID NO: 68001 - DNA, 60 bp, Artificial
  Synthetic oligonucleotide
gctttctttggcatatccggaaacaagttgtagaccaagaactgagtgatgccccatttc

SEQ ID NO: 68002 - DNA, 53 bp, Artificial
  Synthetic oligonucleotide
ttccaggtagattgctttctttggcatatccggaaacaagttgtagaccaaaa

SEQ ID NO: 68003 - DNA, 60 bp, Artificial
  Synthetic oligonucleotide
ttccaggtagattgctttctttggcatatccggaaacaagttgtagaccaaaaactgagt

SEQ ID NO: 68004 - DNA, 59 bp, Artificial
  Synthetic oligonucleotide
ggggtcatggagtgaaaggctgggcctttgatgatggaaatgacgtgtggatgggaaga

SEQ ID NO: 68005 - DNA, 60 bp, Artificial
  Synthetic oligonucleotide
ggaaggtggtcatggagtgaaaggctgggcctttgatgatggaaatgacgtgtggatggg

SEQ ID NO: 68006 - DNA, 60 bp, Artificial
  Synthetic oligonucleotide
ccctaaggggaagaggcaacactctcggtctagacatcaaagcagccacccatgttggaa

SEQ ID NO: 68007 - DNA, 60 bp, Artificial
  Synthetic oligonucleotide
ctaaggggaagaggcaacactctcggtctagacatcaaagcagccacccatgttggaaag

SEQ ID NO: 68008 - DNA, 60 bp, Artificial
  Synthetic oligonucleotide
tgatcttcttgaaaatttgcagacctaccagaaacgaatgggggtgcagatgcaacgatt

SEQ ID NO: 68009 - DNA, 60 bp, Artificial
  Synthetic oligonucleotide
agtggcatttggcttggtatgtgcaacatgtgaacagattgctgactcccagcacaggtc

SEQ ID NO: 68010 - DNA, 60 bp, Artificial
  Synthetic oligonucleotide
ccgaagcaataattgtggccatggtgttttcacaagaggattgcatgataaaagcagtta

SEQ ID NO: 68011 - DNA, 60 bp, Artificial
  Synthetic oligonucleotide
cgtggccatggtgttttcacaagaggattgcatgataaaagcagttagaggtgacctgaa

SEQ ID NO: 68012 - DNA, 60 bp, Artificial
  Synthetic oligonucleotide
acattgaaaataagagtgcatgaggggtatgaggagttcacaatggtggggaaaagagca

SEQ ID NO: 68013 - DNA, 60 bp, Artificial
  Synthetic oligonucleotide
agagtacatgaggggtatgaggagttcacaatggtggggaaaagagcaacagctatactc

SEQ ID NO: 68014 - DNA, 60 bp, Artificial
  Synthetic oligonucleotide
ctttactggagatgtgccacagcacacaaattggcgggacaaggatggtggacattctta

SEQ ID NO: 68015 - DNA, 60 bp, Artificial
  Synthetic oligonucleotide
ccggcactttaattgaagacccagatgaaagcacatccggagtggagtccgctgtcttga

SEQ ID NO: 68016 - DNA, 60 bp, Artificial
  Synthetic oligonucleotide
gctgcagtatcagcagatccactagcatctttattggagatgtgccacagcacacaaatt

SEQ ID NO: 68017 - DNA, 60 bp, Artificial
  Synthetic oligonucleotide
gcagatccactagcatctttattggagatgtgccacagcacacaaattggcgggacaagg

SEQ ID NO: 68018 - DNA, 60 bp, Artificial
  Synthetic oligonucleotide
agtaaaatgagtgatgctggatcagatcgagtgatggtatcacctctggctgtgacatgg

SEQ ID NO: 68019 - DNA, 60 bp, Artificial
  Synthetic oligonucleotide
aggggtatgaggagttcacaatggtggggaaaagagcaacagctatactcagaaaagcaa

SEQ ID NO: 68020 - DNA, 60 bp, Artificial
  Synthetic oligonucleotide
agcagttagaggtgacctgaatttcgtcaacagggcaaaccagcgattgaaccccatgca

SEQ ID NO: 68021 - DNA, 60 bp, Artificial
  Synthetic oligonucleotide
agcagttagaggtgacctgaatttcgtcaacagggcaaaccaacgattgaaccccatgca

SEQ ID NO: 68022 - DNA, 60 bp, Artificial
  Synthetic oligonucleotide
aaagcagttagaggtgacctgaatttcgtcaacagggcaaaccagcgattgaaccccatg

SEQ ID NO: 68023 - DNA, 60 bp, Artificial
  Synthetic oligonucleotide
aagcagttagaggtgacctgaatttcgtcaacagggcaaaccagcgattgaaccccatgc

SEQ ID NO: 68024 - DNA, 60 bp, Artificial
  Synthetic oligonucleotide
attgcatgataaaagcagttagaggtgacctgaatttcgtcaacagggcaaaccagcgat

SEQ ID NO: 68025 - DNA, 60 bp, Artificial
  Synthetic oligonucleotide
taaaagcagttagaggtgacctgaatttcgtcaacagagcaaatcagcggttgaacccca

SEQ ID NO: 68026 - DNA, 60 bp, Artificial
  Synthetic oligonucleotide
ctctatggagtaaaatgagtgatgctggatcagatcgagtgatggtatcacctctggctg

SEQ ID NO: 68027 - DNA, 60 bp, Artificial
  Synthetic oligonucleotide
gaggggtatgaggagttcacaatggtggggaaaagagcaacagctatactcagaaaagca

SEQ ID NO: 68028 - DNA, 60 bp, Artificial
  Synthetic oligonucleotide
aggacaaactctatggagtaaaatgagtgatgctggatcagatcgagtgatggtatcacc

SEQ ID NO: 68029 - DNA, 60 bp, Artificial
  Synthetic oligonucleotide
ctacggaccctgatgtcgcagtctcgcactcgcgagatactaacaaaaaccacagtggac

SEQ ID NO: 68030 - DNA, 60 bp, Artificial
  Synthetic oligonucleotide
ggatcagggatgagaatacttgtaaggggcaattctcctgtattcaactacaacaaggcc

SEQ ID NO: 68031 - DNA, 60 bp, Artificial
  Synthetic oligonucleotide
aactctatggagtaaaatgagtgatgctggatcagatcgagtgatggtatcacctctggc

SEQ ID NO: 68032 - DNA, 60 bp, Artificial
  Synthetic oligonucleotide
gggtatgaggagttcacaatggtggggaaaagagcaacagctatactcagaaaagcaacc

SEQ ID NO: 68033 - DNA, 60 bp, Artificial
  Synthetic oligonucleotide
gttcacaatggtggggaaaagagcaacagctatactcagaaaagcaaccagaagattgat

SEQ ID NO: 68034 - DNA, 60 bp, Artificial
  Synthetic oligonucleotide
agttcacaatggtggggaaaagagcaacagctatactcagaaaagcaaccagaagattgg

SEQ ID NO: 68035 - DNA, 60 bp, Artificial
  Synthetic oligonucleotide
caggcactttaattgaagacccagatgaaagcacatccggagtggagtccgctgtcttga

SEQ ID NO: 68036 - DNA, 60 bp, Artificial
  Synthetic oligonucleotide
ggtggggaaaagagcaacagctatactcagaaaagcaaccagaagattgattcagctcat

SEQ ID NO: 68037 - DNA, 60 bp, Artificial
  Synthetic oligonucleotide
tcacaagaggattgcatgataaaagcagttagaggtgacctgaatttcgtcaacagggca

SEQ ID NO: 68038 - DNA, 60 bp, Artificial
  Synthetic oligonucleotide
ccaaagcaaagcagaatgcagttctcttcattgactgtaaatgtgaggggatcagggatg

SEQ ID NO: 68039 - DNA, 60 bp, Artificial
  Synthetic oligonucleotide
gccgctccaccaaagcaaagcagaatgcagttctcttcattgactgtaaatgtgagggga

SEQ ID NO: 68040 - DNA, 60 bp, Artificial
  Synthetic oligonucleotide
gaagcaacaatcgtggccatggtgttttcacaagaggattgcatgataaaagcagttaga

SEQ ID NO: 68041 - DNA, 60 bp, Artificial
  Synthetic oligonucleotide
cggtttttgagagttcgagaccaacgtgggaatgtattattatctcctgaggaggtcagt

SEQ ID NO: 68042 - DNA, 60 bp, Artificial
  Synthetic oligonucleotide
aaccagcgattgaaccccatgcatcaacttttaaggcattttcagaaagatgcgaaagtg

SEQ ID NO: 68043 - DNA, 60 bp, Artificial
  Synthetic oligonucleotide
cagttagaggtgacctgaatttcgtcaacagggcaaaccagcgactgaaccccatgcatc

SEQ ID NO: 68044 - DNA, 60 bp, Artificial
  Synthetic oligonucleotide
gtggccatggtgttttcacaagaggattgcatgataaaagcagttagaggtgacctgaat

SEQ ID NO: 68045 - DNA, 60 bp, Artificial
  Synthetic oligonucleotide
tgttttcacaagaggattgcatgataaaagcagttagaggtgacctgaatttcgtcaaca

SEQ ID NO: 68046 - DNA, 60 bp, Artificial
  Synthetic oligonucleotide
agcagttagaggtgacctgaatttcgtcaacagggcaaaccagcgactgaaccccatgca

SEQ ID NO: 68047 - DNA, 60 bp, Artificial
  Synthetic oligonucleotide
ggggaaaagagcaacagctatactcagaaaagcaaccagaagattggttcagctcatagt

SEQ ID NO: 68048 - DNA, 60 bp, Artificial
  Synthetic oligonucleotide
cgaagcaataatcgtggccatggtgttttcacaagaggattgcatgataaaagcagttag

SEQ ID NO: 68049 - DNA, 60 bp, Artificial
  Synthetic oligonucleotide
gccgaagctataatcgtggccatggtgttttcacaagaggattgcatgataaaagcagtt

SEQ ID NO: 68050 - DNA, 60 bp, Artificial
  Synthetic oligonucleotide
cggcactttaattgaagacccagatgaaagcacatccggagtggagtccgctgtcttgag

SEQ ID NO: 68051 - DNA, 60 bp, Artificial
  Synthetic oligonucleotide
gcgcagagacttgaagatgtctttgctgggaaaaacacagatcttgaggctctcatggaa

SEQ ID NO: 68052 - DNA, 60 bp, Artificial
  Synthetic oligonucleotide
gcgcagagacttgaagatgtctttgctgggaaaagcacagatcttgaggctctcatggaa

SEQ ID NO: 68053 - DNA, 60 bp, Artificial
  Synthetic oligonucleotide
gcctggtatgtgcaacatgtgaacagattgctgactcccagcacaggtcccataggcaac

SEQ ID NO: 68054 - DNA, 60 bp, Artificial
  Synthetic oligonucleotide
gcaatgaggaccgttgggactcatcctagctccagtactggtctaagagatgatcttctt

SEQ ID NO: 68055 - DNA, 60 bp, Artificial
  Synthetic oligonucleotide
gcaatgagaactgttgggactcatcctagctccagtactggtctaagagatgatcttctt

SEQ ID NO: 68056 - DNA, 60 bp, Artificial
  Synthetic oligonucleotide
gcaatgagaaccgttgggactcatcctagctccagtactggtctaagagatgatcttctt

SEQ ID NO: 68057 - DNA, 60 bp, Artificial
  Synthetic oligonucleotide
gcaatgagaaccgttgggacccatcctagctccagtactggtctaagagatgatcttctt

SEQ ID NO: 68058 - DNA, 60 bp, Artificial
  Synthetic oligonucleotide
gcaatgagaaccgttgggactcatcctagttccagtactggtctaagagatgatcttctt

SEQ ID NO: 68059 - DNA, 60 bp, Artificial
  Synthetic oligonucleotide
ggattttggggtttgtgttcacgctcaccgtgcccagtgagcggggactgcagcgtagac

SEQ ID NO: 68060 - DNA, 60 bp, Artificial
  Synthetic oligonucleotide
ggcatttggcctggtatgtgcaacatgtgaacagattgctgactcccagcacaggtccca

SEQ ID NO: 68061 - DNA, 60 bp, Artificial
  Synthetic oligonucleotide
ggcttggtatgtgcaacatgtgaacagattgctgactcccagcacaggtcccataggcaa

SEQ ID NO: 68062 - DNA, 60 bp, Artificial
  Synthetic oligonucleotide
ggcctggtatgtgcaacatgtgaacagattgctgactcccagcacaggtcccacaggcaa

SEQ ID NO: 68063 - DNA, 60 bp, Artificial
  Synthetic oligonucleotide
tggcatttggcctggtatgtgcaacatgtgaacagattgctgactcccagcacaggtccc

SEQ ID NO: 68064 - DNA, 60 bp, Artificial
  Synthetic oligonucleotide
gtggcatttggcctggtatgtgcaacatgtgaacagattgctgactcccagcacaggtct

SEQ ID NO: 68065 - DNA, 60 bp, Artificial
  Synthetic oligonucleotide
ggcctggtatgtgcaacatgtgaacagattgctgactcccagcacaggtcccataggcaa

SEQ ID NO: 68066 - DNA, 60 bp, Artificial
  Synthetic oligonucleotide
cagcgtagacgctttgtccaaaatgccctcaatgggaatggggatccaaataacatggac

SEQ ID NO: 68067 - DNA, 60 bp, Artificial
  Synthetic oligonucleotide
ggatcttggggtttgtgttcacgctcaccgtgcccagtgagcggggactgcagcgtagac

SEQ ID NO: 68068 - DNA, 60 bp, Artificial
  Synthetic oligonucleotide
ttccatggggccaaagaaatagcactcagttattctgctggtgcacttgccagttgcatg

SEQ ID NO: 68069 - DNA, 60 bp, Artificial
  Synthetic oligonucleotide
gccagttgcatgggcctcatatacaataggatgggggctgtaaccaccgaagtggcattt

SEQ ID NO: 68070 - DNA, 60 bp, Artificial
  Synthetic oligonucleotide
agtggcatttggcctggtatgtgcaacatgtgaacagattgctgactcccagcacaggtc

SEQ ID NO: 68071 - DNA, 60 bp, Artificial
  Synthetic oligonucleotide
cagttgcatgggcctcatatacaataggatgggggctgtaaccaccgaagtggcatttgg

SEQ ID NO: 68072 - DNA, 60 bp, Artificial
  Synthetic oligonucleotide
agtactggtctaagagatgatcttcttgaaaatttgcagacctatcagaaacgaatgggg

SEQ ID NO: 68073 - DNA, 60 bp, Artificial
  Synthetic oligonucleotide
ctagctccagtactggtctaagagatgatcttcttgaaaatttgcagacctatcagaaac

SEQ ID NO: 68074 - DNA, 54 bp, Artificial
  Synthetic oligonucleotide
catcctagctccagtactggtctaagagatgatcttcttgaaaatttgcagacc

SEQ ID NO: 68075 - DNA, 60 bp, Artificial
  Synthetic oligonucleotide
caatgagaaccgttgggacccatcctagctccagtactggtctaagagatgatcttcttg

SEQ ID NO: 68076 - DNA, 60 bp, Artificial
  Synthetic oligonucleotide
tgcaacgattcaagtgacccgcttgttgttgctgcgagtatcattgggatcttgcacttg

SEQ ID NO: 68077 - DNA, 60 bp, Artificial
  Synthetic oligonucleotide
tatcagaaacgaatgggggtgcagatgcaacgattcaagtgacctgcttgttgttgctgc

SEQ ID NO: 68078 - DNA, 60 bp, Artificial
  Synthetic oligonucleotide
tatcagaaacgaatgggggtgcagatgcaacgattcaagtgacccgcttgttgttgctgc

SEQ ID NO: 68079 - DNA, 60 bp, Artificial
  Synthetic oligonucleotide
tgatcttcttgaaaatttgcagacctatcagaaacgaatgggggtgcagatgcaacgatt

SEQ ID NO: 68080 - DNA, 60 bp, Artificial
  Synthetic oligonucleotide
gcaacgattcaagtgacccgcttgttgttgctgcgagtatcattgggatcttgcacttga

SEQ ID NO: 68081 - DNA, 60 bp, Artificial
  Synthetic oligonucleotide
ttgaacgtgactatgccaaacaatgaaaaatttgacaaattgtacatttggggggttcac

SEQ ID NO: 68082 - DNA, 60 bp, Artificial
  Synthetic oligonucleotide
cgtgactatgccaaacaatgaaaaatttgacaaattgtacatttggggggttcaccaccc

SEQ ID NO: 68083 - DNA, 60 bp, Artificial
  Synthetic oligonucleotide
cgcagcaaagcctacagcaactgttacccttatgatgtgccggattatgtctcccttagg

SEQ ID NO: 68084 - DNA, 60 bp, Artificial
  Synthetic oligonucleotide
cgcagcaaagcctacagcaactgttacccttatgatgtgccggattatgcctcccttagg

SEQ ID NO: 68085 - DNA, 60 bp, Artificial
  Synthetic oligonucleotide
aaagcctacagcaactgttacccttatgatgtgccggattatgtctcccttaggtcacta

SEQ ID NO: 68086 - DNA, 60 bp, Artificial
  Synthetic oligonucleotide
aaagcctacagcaactgttacccttatgatgtgccggattatgcctcccttaggtcacta

SEQ ID NO: 68087 - DNA, 60 bp, Artificial
  Synthetic oligonucleotide
agcctacagcaactgttacccttatgatgtgccggattatgtctcccttaggtcactagt

SEQ ID NO: 68088 - DNA, 60 bp, Artificial
  Synthetic oligonucleotide
ccaattaaaatacaaatatccagcactgaacgtgactatgccaaacaatgaaaaatttga

SEQ ID NO: 68089 - DNA, 60 bp, Artificial
  Synthetic oligonucleotide
atacaaatacccagcattgaacgtgactatgccaaacaatgaaaaatttgacaaattgta

SEQ ID NO: 68090 - DNA, 60 bp, Artificial
  Synthetic oligonucleotide
acaaatacccagcattgaacgtgactatgccaaacaatgaaaaatttgacaaattgtaca

SEQ ID NO: 68091 - DNA, 60 bp, Artificial
  Synthetic oligonucleotide
cttgttgccctggagaaccaacatacaattgatctaactgactcagaaatgaacaaactg

SEQ ID NO: 68092 - DNA, 60 bp, Artificial
  Synthetic oligonucleotide
gggagaattcaggacctcgagaaatatgttgaggacactaaagtagatctctggtcgtac

SEQ ID NO: 68093 - DNA, 60 bp, Artificial
  Synthetic oligonucleotide
agggagaattcaggacctcgagaaatatgttgaggacactaaaatagatctctggtcata

SEQ ID NO: 68094 - DNA, 60 bp, Artificial
  Synthetic oligonucleotide
cccagatatgttaagcaaaacactctgaaattggcaacagggatgcgaaatgtaccagag

SEQ ID NO: 68095 - DNA, 60 bp, Artificial
  Synthetic oligonucleotide
cccagatatattaagcaaaacactctgaaattggcaacagggatgcgaaatgtaccagag

SEQ ID NO: 68096 - DNA, 60 bp, Artificial
  Synthetic oligonucleotide
tgaacgcagcaaagcctacagcaactgttacccttatgatgtgccggattatgtctccct

SEQ ID NO: 68097 - DNA, 60 bp, Artificial
  Synthetic oligonucleotide
ccaatgacaaaccatttcaaaatgtaaacaggatcacacatgggccctgtcccagatatg

SEQ ID NO: 68098 - DNA, 60 bp, Artificial
  Synthetic oligonucleotide
gtctgcatagggtcaatcagaaatggaacttatgaccatgatgtatacagagacgaagca

SEQ ID NO: 68099 - DNA, 52 bp, Artificial
  Synthetic oligonucleotide
ggttcatcatgtgggcctgccaaaaaggcaacattaggtgcaacatttgcat

SEQ ID NO: 68100 - DNA, 60 bp, Artificial
  Synthetic oligonucleotide
ttgttgaacgcagcaaagcctacagcaactgttacccttatgatgtgccggattatgcct

SEQ ID NO: 68101 - DNA, 60 bp, Artificial
  Synthetic oligonucleotide
tgaacgcagcaaagcctacagcaactgttacccttatgatgtgccggattatgcctccct

SEQ ID NO: 68102 - DNA, 60 bp, Artificial
  Synthetic oligonucleotide
gggttcatcatgtgggcctgccaaaaaggcaacattaggtgcaacatttgcatttgagtg

SEQ ID NO: 68103 - DNA, 60 bp, Artificial
  Synthetic oligonucleotide
aggaatgggacctttttgttgaacgcagcaaagcctacagcaactgttacccttatgatg

SEQ ID NO: 68104 - DNA, 60 bp, Artificial
  Synthetic oligonucleotide
agaaatgggacctttttgttgaacgcagcaaagcctacagcaactgttacccttatgatg

SEQ ID NO: 68105 - DNA, 57 bp, Artificial
  Synthetic oligonucleotide
ttttgttgaacgcagcaaagcctacagcaactgttacccttatgatgtgccggatta

SEQ ID NO: 68106 - DNA, 60 bp, Artificial
  Synthetic oligonucleotide
ggacctttttgttgaacgcagcaaagcctacagcaactgttacccttatgatgtgccgga

SEQ ID NO: 68107 - DNA, 60 bp, Artificial
  Synthetic oligonucleotide
gtacagagacgaagcattgaacaaccggttccagatcaaaggtgttgagctgaagtcagg

SEQ ID NO: 68108 - DNA, 60 bp, Artificial
  Synthetic oligonucleotide
cgcagcacagcctacagcaactgttacccttatgatgtgccggattatgcctcccttagg

SEQ ID NO: 68109 - DNA, 60 bp, Artificial
  Synthetic oligonucleotide
acgcagcaaagcctacagcaactgttacccttatgatgtgccggattatgtctcccttag

SEQ ID NO: 68110 - DNA, 60 bp, Artificial
  Synthetic oligonucleotide
ttgttgaacgcagcaaagcctacagcaactgttacccttatgatgtgccggattatgtct

SEQ ID NO: 68111 - DNA, 60 bp, Artificial
  Synthetic oligonucleotide
acagggaatctaattgctcctcggggttacttcaaaatacgaagtgggaaaagctcaata

SEQ ID NO: 68112 - DNA, 60 bp, Artificial
  Synthetic oligonucleotide
cagtctctaccaaaagaagccaacaaactgtaatcccgaatatcggatctagacccaggg

SEQ ID NO: 68113 - DNA, 60 bp, Artificial
  Synthetic oligonucleotide
tcacagtctctaccaaaagaagccaacaaactgtaatcccgaatatcggatctagaccca

SEQ ID NO: 68114 - DNA, 60 bp, Artificial
  Synthetic oligonucleotide
acaaattgtacatttggggggttcaccacccgggtacggacagtgaccaaatcagcctat

SEQ ID NO: 68115 - DNA, 60 bp, Artificial
  Synthetic oligonucleotide
aaaaatttgacaaattgtacatttggggggttcaccacccgagtacggacagtgaccaaa

SEQ ID NO: 68116 - DNA, 60 bp, Artificial
  Synthetic oligonucleotide
ttccagatcaaaggtgttgagctgaagtcaggatacaaagattggatcctatggatttcc

SEQ ID NO: 68117 - DNA, 60 bp, Artificial
  Synthetic oligonucleotide
gcattgaacaaccggttccagatcaaaggtgttgagctgaagtcaggatacaaagattgg

SEQ ID NO: 68118 - DNA, 60 bp, Artificial
  Synthetic oligonucleotide
ctgaagtcaggatacaaagattggatcctatggatttcctttgccatatcatgttttttg

SEQ ID NO: 68119 - DNA, 60 bp, Artificial
  Synthetic oligonucleotide
gcagaagtagaagggagaattcaggacctcgagaaatatgttgaggacactaaaatagat

SEQ ID NO: 68120 - DNA, 60 bp, Artificial
  Synthetic oligonucleotide
ggtgttgagctgaagtcaggatacaaagattggatcctatggatttcctttgccatatca

SEQ ID NO: 68121 - DNA, 60 bp, Artificial
  Synthetic oligonucleotide
tcagaagtagaagggagaattcaggacctcgagaaatatgttgaggacactaaagtagat

SEQ ID NO: 68122 - DNA, 60 bp, Artificial
  Synthetic oligonucleotide
agtagaatatgcgacagtcctcaccaaatccttgatggagaaaactgcacactaatagat

SEQ ID NO: 68123 - DNA, 60 bp, Artificial
  Synthetic oligonucleotide
gaccctcattgtgatggcttccaaaataaggaatgggacctttttgttgaacgcagcaaa

SEQ ID NO: 68124 - DNA, 60 bp, Artificial
  Synthetic oligonucleotide
cgctagtgaaaacaatcacgaatgaccaaattgaagtgactaatgctactgagctggttc

SEQ ID NO: 68125 - DNA, 60 bp, Artificial
  Synthetic oligonucleotide
ggtagaatatgcgacagtcctcaccaaatccttgatggagaaaactgcacactaatagat

SEQ ID NO: 68126 - DNA, 60 bp, Artificial
  Synthetic oligonucleotide
attgtgatggcttccaaaataaggaatgggacctttttgttgaacgcagcaaagcctaca

SEQ ID NO: 68127 - DNA, 60 bp, Artificial
  Synthetic oligonucleotide
tgtgatggcttccaaaataaggaatgggacctttttgttgaacgcagcaaagcctacagc

SEQ ID NO: 68128 - DNA, 60 bp, Artificial
  Synthetic oligonucleotide
agatttgaaatctcaggaactatgcgcaggcttgccgaccaaagtctcccgccgaacttc

SEQ ID NO: 68129 - DNA, 60 bp, Artificial
  Synthetic oligonucleotide
ataaggcaagaaatggccaacagaggcctctgggattcctttcgtcagtccgaaagaggc

SEQ ID NO: 68130 - DNA, 60 bp, Artificial
  Synthetic oligonucleotide
ctattcaccataaggcaagaaatggccaacagaggcctctgggattcctttcgtcagtcc

SEQ ID NO: 68131 - DNA, 60 bp, Artificial
  Synthetic oligonucleotide
cccggctattcaccataaggcaagaaatggccaacagaggcctctgggattcctttcgtc

SEQ ID NO: 68132 - DNA, 60 bp, Artificial
  Synthetic oligonucleotide
ggccacaaaggcagactacactctcgacgaggaaagcagggctaggattaagaccaggct

SEQ ID NO: 68133 - DNA, 60 bp, Artificial
  Synthetic oligonucleotide
ggccacaaaggcagactacactctcgacgaggaaagcagggctaggattaagacccggct

SEQ ID NO: 68134 - DNA, 60 bp, Artificial
  Synthetic oligonucleotide
ggggaggaaatggccacaaaggcagactacactctcgacgaggaaagcagggctaggatt

SEQ ID NO: 68135 - DNA, 60 bp, Artificial
  Synthetic oligonucleotide
ctaagaagtgccataggccaaatttcaaggcctatgttcttgtatgtgaggacaaacgga

SEQ ID NO: 68136 - DNA, 60 bp, Artificial
  Synthetic oligonucleotide
ttgatcttggggggctatatgaagcaattgaggagtgcctgattaatgatccctgggttt

SEQ ID NO: 68137 - DNA, 60 bp, Artificial
  Synthetic oligonucleotide
ctgattcagcctggatagagctcgatgaaattggagaggacgtagccccaattgagtaca

SEQ ID NO: 68138 - DNA, 60 bp, Artificial
  Synthetic oligonucleotide
ggatacagaatgagttcaacaaggcctgcgagctaactgattcagcctggatagagctcg

SEQ ID NO: 68139 - DNA, 60 bp, Artificial
  Synthetic oligonucleotide
atcactttcaagctggatacagaatgagttcaacaaggcctgcgagctaactgattcagt

SEQ ID NO: 68140 - DNA, 60 bp, Artificial
  Synthetic oligonucleotide
caaatttgcagcaatatgcactcacttggaggtatgtttcatgtattcagattttcattt

SEQ ID NO: 68141 - DNA, 60 bp, Artificial
  Synthetic oligonucleotide
gaaacaaacaaatttgcagcaatatgcactcacttggaggtatgtttcatgtattcagat

SEQ ID NO: 68142 - DNA, 60 bp, Artificial
  Synthetic oligonucleotide
aatttgcagcaatatgcactcacttggaggtatgtttcatgtattcagattttcatttca

SEQ ID NO: 68143 - DNA, 60 bp, Artificial
  Synthetic oligonucleotide
tgcagcaatatgcactcacctggaagtatgtttcatgtattcagattttcatttcatcaa

SEQ ID NO: 68144 - DNA, 60 bp, Artificial
  Synthetic oligonucleotide
atccaaatgcactgttaaagcacagatttgaaataatcgaggggagagacagaacaatgg

SEQ ID NO: 68145 - DNA, 60 bp, Artificial
  Synthetic oligonucleotide
ggaacgatgcgcaggcttgccgaccaaagtctcccgccgaacttctcctgccttgagaat

SEQ ID NO: 68146 - DNA, 60 bp, Artificial
  Synthetic oligonucleotide
gtcgctttcaagctggatacagaatgagttcaacaaggcctgcgagctaactgattcaat

SEQ ID NO: 68147 - DNA, 60 bp, Artificial
  Synthetic oligonucleotide
tagagctcgatgaaattggagaggacgtggccccaattgagtacattgcaagcatgagga

SEQ ID NO: 68148 - DNA, 60 bp, Artificial
  Synthetic oligonucleotide
gcctggatagagctcgatgaaattggagaggacgtagccccaattgagtacattgcaagc

SEQ ID NO: 68149 - DNA, 60 bp, Artificial
  Synthetic oligonucleotide
gcaagcatgaggaggaattatttcacagcagaggtgtcccattgtagagccactgaatac

SEQ ID NO: 68150 - DNA, 60 bp, Artificial
  Synthetic oligonucleotide
aaatggaagattttgtgcgacaatgcttcaacccgatgattgtcgaacttgcagaaaaag

SEQ ID NO: 68151 - DNA, 60 bp, Artificial
  Synthetic oligonucleotide
aaagacataagcgatttgaagcaatatgatagtgacgaacctgaattaaggtcactttca

SEQ ID NO: 68152 - DNA, 60 bp, Artificial
  Synthetic oligonucleotide
atggaagattttgtgcgacaatgcttcaacccgatgattgtcgaacttgcagaaaaagca

SEQ ID NO: 68153 - DNA, 60 bp, Artificial
  Synthetic oligonucleotide
tggggaggaaatggccacaaaggcagactacactctcgacgaggaaagcagggctaggat

SEQ ID NO: 68154 - DNA, 60 bp, Artificial
  Synthetic oligonucleotide
ggaggacagattcatcgaaattggagtgacaaggagagaagtccacatatattaccttga

SEQ ID NO: 68155 - DNA, 60 bp, Artificial
  Synthetic oligonucleotide
aaggaggacagattcatcgaaattggagtgacaaggagagaagtccacatatattacctt

SEQ ID NO: 68156 - DNA, 60 bp, Artificial
  Synthetic oligonucleotide
cactgttaaagcacagatttgaaataatcgaggggagagacagaacaatggcctggaccg

SEQ ID NO: 68157 - DNA, 60 bp, Artificial
  Synthetic oligonucleotide
cactgttaaagcacagatttgaaataatcgaggggagagacagaacaatggcctggacag

SEQ ID NO: 68158 - DNA, 60 bp, Artificial
  Synthetic oligonucleotide
cactgctaaagcacagatttgaaataatcgaggggagagacagaacaatggcctggacag

SEQ ID NO: 68159 - DNA, 60 bp, Artificial
  Synthetic oligonucleotide
aaatagttttgagcaaataacattcatgcaagcattacagctgctgtttgaagtggaaca

SEQ ID NO: 68160 - DNA, 60 bp, Artificial
  Synthetic oligonucleotide
tctgaagggagaatctgatgaggcacttaaaatgaccatggcctccacacctgcttcgcg

SEQ ID NO: 68161 - DNA, 60 bp, Artificial
  Synthetic oligonucleotide
ctgagaatagttttgagcaaataacattcatgcaagcattacagctgctgtttgaagtgg

SEQ ID NO: 68162 - DNA, 60 bp, Artificial
  Synthetic oligonucleotide
gaatagttttgagcaaataacattcatgcaagcattacagctgctgtttgaagtggaaca

SEQ ID NO: 68163 - DNA, 60 bp, Artificial
  Synthetic oligonucleotide
actgagaatagttttgagcaaataacattcatgcaagcattacagctgctgtttgaagtg

SEQ ID NO: 68164 - DNA, 60 bp, Artificial
  Synthetic oligonucleotide
gactaagaacaactgagaatagttttgagcaaataacattcatgcaagcattacagctgc

SEQ ID NO: 68165 - DNA, 60 bp, Artificial
  Synthetic oligonucleotide
agaacaactgagaatagttttgagcaaataacattcatgcaagcattacagctgctgttt

SEQ ID NO: 68166 - DNA, 60 bp, Artificial
  Synthetic oligonucleotide
cacagactaagaacaactgagaatagttttgagcaaataacattcatgcaagcattacag

SEQ ID NO: 68167 - DNA, 60 bp, Artificial
  Synthetic oligonucleotide
actgaagggagaatctgatgaggcacttaaaatgaccatggcctccacacctgcttcgcg

SEQ ID NO: 68168 - DNA, 60 bp, Artificial
  Synthetic oligonucleotide
ctgaagggagaatctgatgaggcacttaaaatgaccatggcctccacacctgcttcgcga

SEQ ID NO: 68169 - DNA, 52 bp, Artificial
  Synthetic oligonucleotide
ttacagctgctgtttgaagtggaacaggagataagaactttctcatttcagc

SEQ ID NO: 68170 - DNA, 60 bp, Artificial
  Synthetic oligonucleotide
gcaattgggctcctcatcggaggacttgaatggaatgataacacagttcgagtctctaaa

SEQ ID NO: 68171 - DNA, 60 bp, Artificial
  Synthetic oligonucleotide
gagcaaataacattcatgcaagcattacagctgctgtttgaagtggaacaggagataaga

SEQ ID NO: 68172 - DNA, 60 bp, Artificial
  Synthetic oligonucleotide
atgcaagcattacagctgctgtttgaagtggaacaggagataagaactttctcatttcag

SEQ ID NO: 68173 - DNA, 60 bp, Artificial
  Synthetic oligonucleotide
tggggtcctcatcggagggcttgaatggaatgataacacagttcgagtctctaaaaatct

SEQ ID NO: 68174 - DNA, 60 bp, Artificial
  Synthetic oligonucleotide
gcaattggggtcctcatcggagggcttgaatggaatgataacacagttcgagtctctaag

SEQ ID NO: 68175 - DNA, 60 bp, Artificial
  Synthetic oligonucleotide
gcaattggggttctcatcggagggcttgaatggaatgataacacagttcgagtctctaaa

SEQ ID NO: 68176 - DNA, 56 bp, Artificial
  Synthetic oligonucleotide
tggggtcctcatcggagggcttgaatggaatgataacacagttcgagtctctaaaa

SEQ ID NO: 68177 - DNA, 55 bp, Artificial
  Synthetic oligonucleotide
agaatgggggacctccacttactccaaaacagaaacggaaaatggcgagaacagc

SEQ ID NO: 68178 - DNA, 60 bp, Artificial
  Synthetic oligonucleotide
gcaaataacattcatgcaagcattacagctgctgtttgaagtggaacaggagataagaac

SEQ ID NO: 68179 - DNA, 60 bp, Artificial
  Synthetic oligonucleotide
agttttgagcaaataacattcatgcaagcattacagctgctgtttgaagtggaacaggag

SEQ ID NO: 68180 - DNA, 60 bp, Artificial
  Synthetic oligonucleotide
caggacttgttggagacacacccagaaaaaacgatagcttcagcagtagccattgcctag

SEQ ID NO: 68181 - DNA, 60 bp, Artificial
  Synthetic oligonucleotide
caggacttgttggagacacacccagaaaaaacgacagcttcagcaatagccattgcctag

SEQ ID NO: 68182 - DNA, 60 bp, Artificial
  Synthetic oligonucleotide
caggccttgttggagacacacccagaaaaaacgacagctccagcagtagccattgcctag

SEQ ID NO: 68183 - DNA, 57 bp, Artificial
  Synthetic oligonucleotide
caggacttgttggagacacacccagaaaaaacgacagctccagcagtagccattgcc

SEQ ID NO: 68184 - DNA, 60 bp, Artificial
  Synthetic oligonucleotide
caggacttgttggagacacacccagaaaaaacgacagattcagcagtagccattgcctag

SEQ ID NO: 68185 - DNA, 60 bp, Artificial
  Synthetic oligonucleotide
caggacttgttggagacacacccagaaaaaacgacagctccagcagtagccattgcctag

SEQ ID NO: 68186 - DNA, 60 bp, Artificial
  Synthetic oligonucleotide
caggacttgttggagacacacccagaaaaaacgacaacttcagcagtagccattgcctag

SEQ ID NO: 68187 - DNA, 55 bp, Artificial
  Synthetic oligonucleotide
caggacttgttggagacacacccagaaaaaacgacagctccagcagtagccattg

SEQ ID NO: 68188 - DNA, 60 bp, Artificial
  Synthetic oligonucleotide
agtctctaaaaatctacagagattcgcttggagaagcagtaatgagaacgggggacctcc

SEQ ID NO: 68189 - DNA, 60 bp, Artificial
  Synthetic oligonucleotide
agtctctaaaaatctacagagattcgcttggagaagcagtaatgagaatgggggatctcc

SEQ ID NO: 68190 - DNA, 60 bp, Artificial
  Synthetic oligonucleotide
ctaaaaatctacagagattcgcttggagaagcagtaatgagaatgggggacctccactta

SEQ ID NO: 68191 - DNA, 60 bp, Artificial
  Synthetic oligonucleotide
cgactcttcaaacacggcttgaaaagagggccttctacggaaggagtacctgagtctatg

SEQ ID NO: 68192 - DNA, 60 bp, Artificial
  Synthetic oligonucleotide
aaggacctctttgcatcagaatggaccaggcaatcatggagaaaaacatcatgttgaaag

SEQ ID NO: 68193 - DNA, 60 bp, Artificial
  Synthetic oligonucleotide
ccctttgcatcagaatggaccaggcaatcatggagaaaaacatcatgttgaaagcaaatt

SEQ ID NO: 68194 - DNA, 60 bp, Artificial
  Synthetic oligonucleotide
taacatggacaaagcagttaaactgtatagaaaacttaagagggagataacattccatgg

SEQ ID NO: 68195 - DNA, 60 bp, Artificial
  Synthetic oligonucleotide
ggacaaagcagttaaactgtatagaaaacttaagagggagataacattccatggggccaa

SEQ ID NO: 68196 - DNA, 54 bp, Artificial
  Synthetic oligonucleotide
ggaagaggcaacactctcggtctagacatcaaaacagccacccatgttggaaag

SEQ ID NO: 68197 - DNA, 60 bp, Artificial
  Synthetic oligonucleotide
ccctttgcatcaaaatggaccaggcaatcatggagaaaaacatcatgttgaaagcgaatt

SEQ ID NO: 68198 - DNA, 60 bp, Artificial
  Synthetic oligonucleotide
ccctctgcatcagaatggaccaggcaatcatggagaaaaacatcatgttgaaagcgaatt

SEQ ID NO: 68199 - DNA, 60 bp, Artificial
  Synthetic oligonucleotide
ccctttgcatcaggatggaccaggcaatcatggagaaaaacatcatgttgaaagcgaatt

SEQ ID NO: 68200 - DNA, 54 bp, Artificial
  Synthetic oligonucleotide
ggaagaggcagcactctcggtctagacatcaaagcagccacccatgttggaaag

SEQ ID NO: 68201 - DNA, 60 bp, Artificial
  Synthetic oligonucleotide
gagaaagatgatgactaattcacaagacacagagctttctttcacaatcactggggacaa

SEQ ID NO: 68202 - DNA, 60 bp, Artificial
  Synthetic oligonucleotide
gagcattggagtgacagtgataaagaacaacatgataaacaatgaccttggaccagcaac

SEQ ID NO: 68203 - DNA, 60 bp, Artificial
  Synthetic oligonucleotide
tcctggattcccaagaggaaccgctctattctaaacacaagccaaaggggaattcttgag

SEQ ID NO: 68204 - DNA, 60 bp, Artificial
  Synthetic oligonucleotide
ttgcaactacacactcctggattcccaagaggaaccgctctattctaaacacaagccaaa

SEQ ID NO: 68205 - DNA, 60 bp, Artificial
  Synthetic oligonucleotide
ccctcgaatgtttttggcgatgattacatatatcacaaaaaatcaacctgagtggttcag

SEQ ID NO: 68206 - DNA, 60 bp, Artificial
  Synthetic oligonucleotide
tatgagcattggagtaacagtgataaagaacaacatgataaacaatgaccttggaccagc

SEQ ID NO: 68207 - DNA, 60 bp, Artificial
  Synthetic oligonucleotide
tgcaccaaatcatgagggaatacaagcaggagtggatagattctacaggacctgcaagtt

SEQ ID NO: 68208 - DNA, 60 bp, Artificial
  Synthetic oligonucleotide
gcgatgattacatatatcacaaaaaatcaacctgagtggttcagaaacatcctgagcatc

SEQ ID NO: 68209 - DNA, 60 bp, Artificial
  Synthetic oligonucleotide
atgatgccgttgcaactacacactcctggattcccaagaggaaccgctctatcctaaaca

SEQ ID NO: 68210 - DNA, 60 bp, Artificial
  Synthetic oligonucleotide
gagcattggggtaacagtgataaagaacaacatgataaacaatgaccttggaccagcaac

SEQ ID NO: 68211 - DNA, 60 bp, Artificial
  Synthetic oligonucleotide
atgagcattggagtaacagtgataaagaacaacatgataaacaatgaccttggaccagca

SEQ ID NO: 68212 - DNA, 60 bp, Artificial
  Synthetic oligonucleotide
cctgggatgatgatgggcatgttcaacatgctaagcacggttttaggagtctcgatactg

SEQ ID NO: 68213 - DNA, 60 bp, Artificial
  Synthetic oligonucleotide
acagtgataaagaacaacatgataaacaatgaccttggaccagcaacagcccagatggct

SEQ ID NO: 68214 - DNA, 60 bp, Artificial
  Synthetic oligonucleotide
atgacgccgttgcaactacacactcctggattcccaagaggaaccgctctattctaaaca

SEQ ID NO: 68215 - DNA, 60 bp, Artificial
  Synthetic oligonucleotide
ccatggtccagccaaaagtatggaatatgatgccgttgcaactacacactcctggattcc

SEQ ID NO: 68216 - DNA, 60 bp, Artificial
  Synthetic oligonucleotide
gtccagccaaaagtatggaatatgatgccgttgcaactacacactcctggattcccaaga

SEQ ID NO: 68217 - DNA, 58 bp, Artificial
  Synthetic oligonucleotide
gaccggttggaatttctagcatggtggaggccatggtgtctagggcccggattgatgc

SEQ ID NO: 68218 - DNA, 55 bp, Artificial
  Synthetic oligonucleotide
ttttccccagtagttcatataggagaccggttggaatttctagcatggtggaggc

SEQ ID NO: 68219 - DNA, 60 bp, Artificial
  Synthetic oligonucleotide
caacttgttcgagaaatttttccctagtagttcatataggagaccggttggaatttctag

SEQ ID NO: 68220 - DNA, 60 bp, Artificial
  Synthetic oligonucleotide
ggtgccagcccatggtccagccaaaagtatggaatatgatgccgttgcaactacacactc

SEQ ID NO: 68221 - DNA, 60 bp, Artificial
  Synthetic oligonucleotide
gtgatgccagcccatggtccagccaaaagtatggaatatgatgccgttgcaactacacac

SEQ ID NO: 68222 - DNA, 60 bp, Artificial
  Synthetic oligonucleotide
gatgccagcccatggtccagccaaaagtatggaatatgatgccgttgcaactacacactc

SEQ ID NO: 68223 - DNA, 60 bp, Artificial
  Synthetic oligonucleotide
gagggaatacaagcaggagtggatagattctacaggacctgcaagttagtgggaatcaac

SEQ ID NO: 68224 - DNA, 60 bp, Artificial
  Synthetic oligonucleotide
tcggatgttcttggcgatgattacatatatcacaaaaaatcaacctgagtggttcagaaa

SEQ ID NO: 68225 - DNA, 60 bp, Artificial
  Synthetic oligonucleotide
aaacaatgctgtagtgatgccagcccatggtccagccaaaagtatggaatatgatgccgt

SEQ ID NO: 68226 - DNA, 60 bp, Artificial
  Synthetic oligonucleotide
atgatgccgttgcaactacacactcctggattcccaagaggaaccgctctattctcaaca

SEQ ID NO: 68227 - DNA, 60 bp, Artificial
  Synthetic oligonucleotide
cggcggcaactgcattagccaacaccatagaagtttttagatcgaatggtctaacagcta

SEQ ID NO: 68228 - DNA, 60 bp, Artificial
  Synthetic oligonucleotide
ctgtgtcctggaggctatggccttccttgaagaatcccacccagggatatttgagaactc

SEQ ID NO: 68229 - DNA, 54 bp, Artificial
  Synthetic oligonucleotide
tacaccatggacacagtcaacagaacacaccaatattcagaaaaggggaagtgg

SEQ ID NO: 68230 - DNA, 60 bp, Artificial
  Synthetic oligonucleotide
gtgagaaagatgatgaccaattcacaagacacagagctttctttcacaatcactggggac

SEQ ID NO: 68231 - DNA, 60 bp, Artificial
  Synthetic oligonucleotide
gtaaacaatgctgtagtgatgccagcccatggtccagccaaaagtatggaatatgatgcc

SEQ ID NO: 68232 - DNA, 60 bp, Artificial
  Synthetic oligonucleotide
tgtagtgatgccagcccatggtccagccaaaagtatggaatatgatgccgttgcaactac

SEQ ID NO: 68233 - DNA, 60 bp, Artificial
  Synthetic oligonucleotide
agccaacaccatagaagtttttagatcgaatggtctaacagctaatgaatcgggaaggct

SEQ ID NO: 68234 - DNA, 60 bp, Artificial
  Synthetic oligonucleotide
ctgcaacttgttcgagaaatttttccccagtagttcatataggagaccggttggaatttc

SEQ ID NO: 68235 - DNA, 60 bp, Artificial
  Synthetic oligonucleotide
ttggaatttctagcatggtggaggccatggtgtctagggcccggattgatgccagaattg

SEQ ID NO: 68236 - DNA, 60 bp, Artificial
  Synthetic oligonucleotide
cctggattcccaagaggaaccgctctattctaaacacaagccaaaggggaattcttgagg

SEQ ID NO: 68237 - DNA, 60 bp, Artificial
  Synthetic oligonucleotide
cccatggtccagccaaaagtatggaatatgatgccgttgcaactacacactcctggattc

SEQ ID NO: 68238 - DNA, 60 bp, Artificial
  Synthetic oligonucleotide
ccagcccatggtccagccaaaagtatggaatatgatgccgttgcaactacacactcctgg

SEQ ID NO: 68239 - DNA, 60 bp, Artificial
  Synthetic oligonucleotide
ccgttgcaactacacactcctggattcccaagaggaaccgctctattctaaacacaagcc

SEQ ID NO: 68240 - DNA, 60 bp, Artificial
  Synthetic oligonucleotide
atgatgccgttgcaactacacactcctggattcccaagaggaaccgctctattttaaaca

SEQ ID NO: 68241 - DNA, 60 bp, Artificial
  Synthetic oligonucleotide
tggaatatgatgccgttgcaactacacactcctggattcccaagaggaaccgctctattc

SEQ ID NO: 68242 - DNA, 60 bp, Artificial
  Synthetic oligonucleotide
aatgctgtagtgatgccagcccatggtccagccaaaagtatggaatatgatgccgttgca

SEQ ID NO: 68243 - DNA, 60 bp, Artificial
  Synthetic oligonucleotide
atatgatgccgttgcaactacacactcctggattcccaagaggaaccgctctattctaaa

SEQ ID NO: 68244 - DNA, 60 bp, Artificial
  Synthetic oligonucleotide
aatgccagcccatggtccagccaaaagtatggaatatgatgccgttgcaactacacactc

SEQ ID NO: 68245 - DNA, 60 bp, Artificial
  Synthetic oligonucleotide
atgatgccgttgcaactacacactcctggattcccaagaggaaccgctctattctaaaca

SEQ ID NO: 68246 - DNA, 60 bp, Artificial
  Synthetic oligonucleotide
ggcaaaagctgcatcaatcggtgcttttatgtggagttgataaggggaaggaaagaggaa

SEQ ID NO: 68247 - DNA, 60 bp, Artificial
  Synthetic oligonucleotide
aatcggtgcttttatgtggagttgataaggggaaggaaagaggaaactgaagtctggtgg

SEQ ID NO: 68248 - DNA, 60 bp, Artificial
  Synthetic oligonucleotide
gctcagcatgtcgaggagtgctcctgttatcctcgatatcctggtgtcagatgtgtctgc

SEQ ID NO: 68249 - DNA, 60 bp, Artificial
  Synthetic oligonucleotide
catgtcgaggagtgctcctgttatcctcgatatcctggtgtcagatgtgtatgccgagac

SEQ ID NO: 68250 - DNA, 60 bp, Artificial
  Synthetic oligonucleotide
caggaagtgcccagcatgtcgaggagtgctcctgttatcctcgatatcctggtgtcagat

SEQ ID NO: 68251 - DNA, 60 bp, Artificial
  Synthetic oligonucleotide
caggaaatgctcagcatgtcgaggagtgctcctgttatcctcgatatcctggtgtcagat

SEQ ID NO: 68252 - DNA, 60 bp, Artificial
  Synthetic oligonucleotide
caggaagtgctcagcatgtcgaggagtgctcctgttatcctcgatatcctggtgtcagat

SEQ ID NO: 68253 - DNA, 60 bp, Artificial
  Synthetic oligonucleotide
gaacccaggaatcggaatgcgtttgtatcaatggaacttgtacagtagtaatgactgatg

SEQ ID NO: 68254 - DNA, 60 bp, Artificial
  Synthetic oligonucleotide
gaacccaggagtcggaatgcgtttgtatcaatggaacttgtacagtggtaatgactgatg

SEQ ID NO: 68255 - DNA, 60 bp, Artificial
  Synthetic oligonucleotide
atcggtgcttttatgtggagttgataaggggaaggaaagaggaaactgaagtctggtgga

SEQ ID NO: 68256 - DNA, 52 bp, Artificial
  Synthetic oligonucleotide
atcggtgcttttatgtggagttgataaggggaaggaaagaggaaactgaagt

SEQ ID NO: 68257 - DNA, 60 bp, Artificial
  Synthetic oligonucleotide
catgtcgaggagtgctcctgttatcctcgatatcctggtgtcagatgtgtctgcagagac

SEQ ID NO: 68258 - DNA, 60 bp, Artificial
  Synthetic oligonucleotide
tgtcgaggagtgctcctgttatcctcgatatcctggtgtcagatgtgtctgcagagacaa

SEQ ID NO: 68259 - DNA, 60 bp, Artificial
  Synthetic oligonucleotide
gaacccaggagtcggaatgcgtttgtatcaatggaacttgtacagtaataatgactgatg

SEQ ID NO: 68260 - DNA, 60 bp, Artificial
  Synthetic oligonucleotide
gaacccaggagtcggaatgcgtttgtatcaatggaacttgtacagtagtaatgactgatg

SEQ ID NO: 68261 - DNA, 54 bp, Artificial
  Synthetic oligonucleotide
tgtgcatagcatggtccagctcaagttgtcacgatggaaaagcatggctgcatg

SEQ ID NO: 68262 - DNA, 60 bp, Artificial
  Synthetic oligonucleotide
ccaaaaaaatactcaggacccaggagtcggaatgcgtttgtatcaatggaacttgtacag

SEQ ID NO: 68263 - DNA, 60 bp, Artificial
  Synthetic oligonucleotide
ccaaaaaaatactcagaacccaggaatcggaatgcgtttgtatcaatggaacttgtacag

SEQ ID NO: 68264 - DNA, 60 bp, Artificial
  Synthetic oligonucleotide
ccaaaaatatactcagaacccaggagtcggaatgcgtttgtatcaatggaacttgtacag

SEQ ID NO: 68265 - DNA, 60 bp, Artificial
  Synthetic oligonucleotide
ccaaaaaaatactcagaacccaggagtcggaatgcgtttgtatcaatggaacttgtacag

SEQ ID NO: 68266 - DNA, 60 bp, Artificial
  Synthetic oligonucleotide
tgtagatataaatgtaaaggattatagcattgtttccagttatgtgtgctcaggacttgt

SEQ ID NO: 68267 - DNA, 60 bp, Artificial
  Synthetic oligonucleotide
cgtagatataaatgtaaaggattatagcattgtttccagttatgtgtgctcaggacttgt

SEQ ID NO: 68268 - DNA, 60 bp, Artificial
  Synthetic oligonucleotide
ggtgtcagatgtgtctgcagagacaactggaaaggctccaataggcccatcgtagatata

SEQ ID NO: 68269 - DNA, 60 bp, Artificial
  Synthetic oligonucleotide
gtcgaggagtgctcctgttatcctcgatatcctggtgtcagatgtgtctgcagagacaac

SEQ ID NO: 68270 - DNA, 60 bp, Artificial
  Synthetic oligonucleotide
aaaggattatagcattgtttccagttatgtgtgctcaggccttgttggagacacacccag

SEQ ID NO: 68271 - DNA, 60 bp, Artificial
  Synthetic oligonucleotide
aaaggatcatagcattgtttccagttatgtgtgctcaggacttgttggagacacacccag

SEQ ID NO: 68272 - DNA, 60 bp, Artificial
  Synthetic oligonucleotide
aaaggattatagcattgtttccagttatgtgtgctcaggacttgttggagatacacccag

SEQ ID NO: 68273 - DNA, 60 bp, Artificial
  Synthetic oligonucleotide
caggacttgttggagacacacccagaaaaaacgacagcttcagcagtagccattgcctag

SEQ ID NO: 68274 - DNA, 60 bp, Artificial
  Synthetic oligonucleotide
ctgttgaaggcaaaagctgcatcaataggtgcttttatgtggagttgataaggggaagga

SEQ ID NO: 68275 - DNA, 60 bp, Artificial
  Synthetic oligonucleotide
cagacacggcctgaaaagagggccttctacggaaggagtacctgagtctatgagggaaga

SEQ ID NO: 68276 - DNA, 60 bp, Artificial
  Synthetic oligonucleotide
cctgagtctatgagggaagaatatcgaaaggaacagcagaatgctgtggatgctgacgac

SEQ ID NO: 68277 - DNA, 58 bp, Artificial
  Synthetic oligonucleotide
tgagtctatgagggaagaatatcgaaaggaacagcagaatgctgtggatgctgacgac

SEQ ID NO: 68278 - DNA, 60 bp, Artificial
  Synthetic oligonucleotide
ctacggaaggagtacctgagtctatgagggaagaatatcgaaaggaacagcagaatgctg

SEQ ID NO: 68279 - DNA, 60 bp, Artificial
  Synthetic oligonucleotide
cgactcttcaaacacggcctgaaaagagggccttctacggaaggagtacctgagtctatg

SEQ ID NO: 68280 - DNA, 60 bp, Artificial
  Synthetic oligonucleotide
ccatcgactcttcaaacacggcctgaaaagagggccttctacggaaggagtacctgagtc

SEQ ID NO: 68281 - DNA, 60 bp, Artificial
  Synthetic oligonucleotide
tgagtctatgagggaagaatatcgaaaggaacagcagaatgctgtggatgctgacgacag

SEQ ID NO: 68282 - DNA, 60 bp, Artificial
  Synthetic oligonucleotide
gtctatgagggaagaatatcgaaaggaacagcagaatgctgtggatgctgacgacagtca

SEQ ID NO: 68283 - DNA, 60 bp, Artificial
  Synthetic oligonucleotide
aagggctttcaccgaagagggggcaattgttggcgaaatctcaccattgccttcttttcc

SEQ ID NO: 68284 - DNA, 60 bp, Artificial
  Synthetic oligonucleotide
ggcctggtatgtgcaacatgtgaacagattgctgacgcccagcacaggtcccataggcaa

SEQ ID NO: 68285 - DNA, 60 bp, Artificial
  Synthetic oligonucleotide
ggcctggtatgtgcaacatgtgaacagattgctgactcccagcacaggtctcataggcaa

SEQ ID NO: 68286 - DNA, 60 bp, Artificial
  Synthetic oligonucleotide
tgcaacgattcaaatgacccgcttgttgttgctgcgagtatcattgggatcttgcacttg

SEQ ID NO: 68287 - DNA, 60 bp, Artificial
  Synthetic oligonucleotide
tgcaacgattcaaatgacccgcttgttattgctgcgagtatcattgggatcttgcacttg

SEQ ID NO: 68288 - DNA, 60 bp, Artificial
  Synthetic oligonucleotide
tgcaacgattcaaatgacccgcttattgttgctgcgagtatcattgggatcttgcacttg

SEQ ID NO: 68289 - DNA, 60 bp, Artificial
  Synthetic oligonucleotide
tcaaatgacccgcttgttattgctgcgagtatcattgggatcttgcacttgatactgtgg

SEQ ID NO: 68290 - DNA, 60 bp, Artificial
  Synthetic oligonucleotide
tcaaatgacccgcttgttgttgctgcgagtatcattgggatcttgcacttgatactgtgg

SEQ ID NO: 68291 - DNA, 60 bp, Artificial
  Synthetic oligonucleotide
tcaaatgacccgcttattgttgctgcgagtatcattgggatcttgcacttgatactgtgg

SEQ ID NO: 68292 - DNA, 60 bp, Artificial
  Synthetic oligonucleotide
gcagggtgacaaagacataatggattccaacactgtgtcaagcttccaggtagattgctt

SEQ ID NO: 68293 - DNA, 60 bp, Artificial
  Synthetic oligonucleotide
caaaagcagggtgacaaagacataatggattccaacactgtgtcaagcttccaggtagat

SEQ ID NO: 68294 - DNA, 60 bp, Artificial
  Synthetic oligonucleotide
agcaaaagcagggtgacaaatacataatggattccaacactgtgtcaagtttccaggtag

SEQ ID NO: 68295 - DNA, 60 bp, Artificial
  Synthetic oligonucleotide
gcagggtgacaaatacataatggattccaacactgtgtcaagtttccaggtagattgctt

SEQ ID NO: 68296 - DNA, 60 bp, Artificial
  Synthetic oligonucleotide
tatccggaaacaagttgtagaccaagaactgagtgatgccccattccttgatcggcttcg

SEQ ID NO: 68297 - DNA, 60 bp, Artificial
  Synthetic oligonucleotide
gggaaaaggatacatgttcgagagtaagagaatgaagctccgaacacaaatacccgcaga

SEQ ID NO: 68298 - DNA, 60 bp, Artificial
  Synthetic oligonucleotide
caccgaagagggagcaattgttggcgaaatctcaccattgccttcttttccaggacatac

SEQ ID NO: 68299 - DNA, 60 bp, Artificial
  Synthetic oligonucleotide
gctttcaccgaagagggagcaattgttggcgaaatctcaccattgccttcttttccagga

SEQ ID NO: 68300 - DNA, 60 bp, Artificial
  Synthetic oligonucleotide
gagggctttcaccgaagagggagcaattgttggcgaaatctcaccattgccttcttttcc

SEQ ID NO: 68301 - DNA, 60 bp, Artificial
  Synthetic oligonucleotide
attactaagggctttcaccgaagagggagcaattgttggcgaaatctcaccattgccttc

SEQ ID NO: 68302 - DNA, 60 bp, Artificial
  Synthetic oligonucleotide
gggaagatgattgatggaattgggagattctacatccaaatgtgcactgaacttaaactc

SEQ ID NO: 68303 - DNA, 60 bp, Artificial
  Synthetic oligonucleotide
gtcgggaagatgattgatggaattgggagattctacatccaaatgtgcactgaacttaaa

SEQ ID NO: 68304 - DNA, 60 bp, Artificial
  Synthetic oligonucleotide
cgggaagatgattgatggaattgggagattctacatccaaatgtgcactgaacttaaact

SEQ ID NO: 68305 - DNA, 60 bp, Artificial
  Synthetic oligonucleotide
gcaagcattacaactgctgtttgaagtggaacaggagataagaactttctcatttcagct

SEQ ID NO: 68306 - DNA, 60 bp, Artificial
  Synthetic oligonucleotide
tgcaagcattacaactgctgtttgaagtggaacaggagataagaactttctcatttcagc

SEQ ID NO: 68307 - DNA, 60 bp, Artificial
  Synthetic oligonucleotide
ggaaacaagttgtagaccaagaactgagtgatgcccccttccttgatcggcttcgccgag

SEQ ID NO: 68308 - DNA, 60 bp, Artificial
  Synthetic oligonucleotide
ggaaacaagttgtagaccaaaaactgagtgatgccccattccttgatcggcttcgccgag

SEQ ID NO: 68309 - DNA, 60 bp, Artificial
  Synthetic oligonucleotide
cgcaaagagcaatggtggatcaagtgagagaaagtcggaacccaggaaatgctgagatcg

SEQ ID NO: 68310 - DNA, 60 bp, Artificial
  Synthetic oligonucleotide
tgcgcaaagagcaatggtggatcaagtgagagaaagtcggaacccaggaaatgctgagat

SEQ ID NO: 68311 - DNA, 60 bp, Artificial
  Synthetic oligonucleotide
ctgcacaaagagcaatggtggatcaagtgagagaaagtcggaacccaggaaatgctgaga

SEQ ID NO: 68312 - DNA, 60 bp, Artificial
  Synthetic oligonucleotide
atgttgaaagcgaatttcagtgtgatctttgaccgactagagaccatagtattactaagg

SEQ ID NO: 68313 - DNA, 60 bp, Artificial
  Synthetic oligonucleotide
gttgaaagcgaatttcagtgtgatctttgaccgactagagaccatagtattactaagggc

SEQ ID NO: 68314 - DNA, 60 bp, Artificial
  Synthetic oligonucleotide
ctggagaggtgagaatgggcggaaaacaagaagtgcttatgagagaatgtgcaacattct

SEQ ID NO: 68315 - DNA, 60 bp, Artificial
  Synthetic oligonucleotide
ggggatcaacgatcgaaatttctggagaggtgagaatgggcggaagacaagaagtgctta

SEQ ID NO: 68316 - DNA, 60 bp, Artificial
  Synthetic oligonucleotide
cgacccttcctagaaggtccggagctgcaggtgctgcagtcaaaggaatcgggacaatgg

SEQ ID NO: 68317 - DNA, 60 bp, Artificial
  Synthetic oligonucleotide
ccctccctagaaggtccggagctgcaggtgctgcagtcaaaggaatcgggacaatggtga

SEQ ID NO: 68318 - DNA, 60 bp, Artificial
  Synthetic oligonucleotide
aacgatcgaaatttctggagaggtgagaatgggcggaaaacaagaagtgcttatgagaga

SEQ ID NO: 68319 - DNA, 60 bp, Artificial
  Synthetic oligonucleotide
atcaacgatcgaaatttctggagaggtgagaatgggcggaaaacaagaagtgcttatgag

SEQ ID NO: 68320 - DNA, 60 bp, Artificial
  Synthetic oligonucleotide
attgggagattctacatccaaatgtgtactgaacttaaactcagtgattatgaagggcgg

SEQ ID NO: 68321 - DNA, 60 bp, Artificial
  Synthetic oligonucleotide
ccagctggtgtggatggcatgccattctgctgcatttgaagatttaagattgttaagctt

SEQ ID NO: 68322 - DNA, 56 bp, Artificial
  Synthetic oligonucleotide
caaagggcctccgcaggccaaatcagtgtgcaacctacgttttctgtacaaagaaa

SEQ ID NO: 68323 - DNA, 56 bp, Artificial
  Synthetic oligonucleotide
cagagggcctctgcaggccaaatcagtgtgcaacctacgttttctgtacaaagaaa

SEQ ID NO: 68324 - DNA, 56 bp, Artificial
  Synthetic oligonucleotide
cagagggcctccgcaggccaaatcagtgtgcaacctacgttttctgtacaaagaaa

SEQ ID NO: 68325 - DNA, 60 bp, Artificial
  Synthetic oligonucleotide
gagggcctccgcaggccaaatcagtgtgcaacctacgttttctgtacaaagaaatctccc

SEQ ID NO: 68326 - DNA, 60 bp, Artificial
  Synthetic oligonucleotide
cagagggcctccgcaggccaaatcagtgtgcaacctacgttttctgtacaaagaaatctc

SEQ ID NO: 68327 - DNA, 60 bp, Artificial
  Synthetic oligonucleotide
gtgtatctgaccaacaccaccatagagaaggaaatatgccccaaattagcagaatacaga

SEQ ID NO: 68328 - DNA, 60 bp, Artificial
  Synthetic oligonucleotide
gcaaataacattcatgcaggcattacagctgctgtttgaagtggaacaggagataaggac

SEQ ID NO: 68329 - DNA, 60 bp, Artificial
  Synthetic oligonucleotide
tggcgtcccaaggcaccaaacggtcttatgaacagatggaaactgatggggatcgccaga

SEQ ID NO: 68330 - DNA, 60 bp, Artificial
  Synthetic oligonucleotide
tcccaaggcaccaaacggtcttatgaacagatggaaactgatggggatcgccagaatgca

SEQ ID NO: 68331 - DNA, 60 bp, Artificial
  Synthetic oligonucleotide
ccaaacggtcttatgaacagatggaaactgatggggatcgccagaatgcaactgagatta

SEQ ID NO: 68332 - DNA, 60 bp, Artificial
  Synthetic oligonucleotide
catggcgtcccaaggcaccaaacggtcttatgaacagatggaaactgatggggatcgcca

SEQ ID NO: 68333 - DNA, 60 bp, Artificial
  Synthetic oligonucleotide
gcaccaaacggtcttatgaacagatggaaactgatggggatcgccagaatgcaactgaga

SEQ ID NO: 68334 - DNA, 60 bp, Artificial
  Synthetic oligonucleotide
ccaatgacaaaccatttcaaaatgtaaacaggatcacatatgggccctgtcccagatatg

SEQ ID NO: 68335 - DNA, 60 bp, Artificial
  Synthetic oligonucleotide
gcctgcatggggtcaatcagaaatggaacttatgaccatgatgtatacagagacgaagca

SEQ ID NO: 68336 - DNA, 60 bp, Artificial
  Synthetic oligonucleotide
acagcacagggaatctaattgctcctcggggttacttcaaaatacgaagtgggaaaagct

SEQ ID NO: 68337 - DNA, 60 bp, Artificial
  Synthetic oligonucleotide
cagcacagggaatctaattgctcctcggggttacttcaaaatacgaagtgggaaaagctc

SEQ ID NO: 68338 - DNA, 60 bp, Artificial
  Synthetic oligonucleotide
ctcaagcatcagggagagtcacagtctctaccaaaagaagccaacaaactgtaattccga

SEQ ID NO: 68339 - DNA, 60 bp, Artificial
  Synthetic oligonucleotide
ctcaagcatcagggagagtcacagtctctaccaaaagaagccaacaaactgtaatcccga

SEQ ID NO: 68340 - DNA, 60 bp, Artificial
  Synthetic oligonucleotide
ccaatgacaaaccatttcaaaatgtaaacaggatcacatatggggcctgtcccagatacg

SEQ ID NO: 68341 - DNA, 60 bp, Artificial
  Synthetic oligonucleotide
ccaatgacaaaccatttcaaaatgtaaacaggatcacatatggggcatgtcccagatatg

SEQ ID NO: 68342 - DNA, 60 bp, Artificial
  Synthetic oligonucleotide
ccaatgacaaaccatttcaaaatgtaaacaggatcacatatggggcctgtcccagatata

SEQ ID NO: 68343 - DNA, 60 bp, Artificial
  Synthetic oligonucleotide
ccaatgacaaaccatttcaaaatgtaaacaggatcacatatggggcctgtcccagatatg

SEQ ID NO: 68344 - DNA, 60 bp, Artificial
  Synthetic oligonucleotide
tggagtttaacaatgaaagcttcaattggactggagtcactcagaatggaacaagctctg

SEQ ID NO: 68345 - DNA, 50 bp, Artificial
  Synthetic oligonucleotide
ggagaaccaacatacaattgatctaactgactcagaaatgaacaaactgt

SEQ ID NO: 68346 - DNA, 60 bp, Artificial
  Synthetic oligonucleotide
tgacaatgcctgcatagggtcaatcagaaatggaacttatgaccatgatgtgtacagaga

SEQ ID NO: 68347 - DNA, 60 bp, Artificial
  Synthetic oligonucleotide
aacggaacgctagtgaaaacaatcacgaatgaccaaattgaagtgactaatgctactgag

SEQ ID NO: 68348 - DNA, 60 bp, Artificial
  Synthetic oligonucleotide
gacctttttgttgaacgcagcaaagcctacagcaactgttacccttatgatgtgccggat

SEQ ID NO: 68349 - DNA, 60 bp, Artificial
  Synthetic oligonucleotide
gccaaacggaacgctagtgaaaacaatcacgaatgaccaaattgaagtgactaatgctac

SEQ ID NO: 68350 - DNA, 59 bp, Artificial
  Synthetic oligonucleotide
ccaatgacaaaccatttcaaaatgtaaacaggatcacatatggggcatgtcccagatat

SEQ ID NO: 68351 - DNA, 55 bp, Artificial
  Synthetic oligonucleotide
gccctggagaaccaacatacaattgatctaactgactcagaaatgaacaaactgt

SEQ ID NO: 68352 - DNA, 55 bp, Artificial
  Synthetic oligonucleotide
gccctagagaaccaacatacaattgatctaactgactcagaaatgaacaaactgt

SEQ ID NO: 68353 - DNA, 60 bp, Artificial
  Synthetic oligonucleotide
gggagaatccaggacctcgagaaatatgttgaggacactaaaatagatctctggtcgtac

SEQ ID NO: 68354 - DNA, 60 bp, Artificial
  Synthetic oligonucleotide
gggagaattcaggacctcgagaaatatgttgaggacactaaaatagatctctggtcgtac

SEQ ID NO: 68355 - DNA, 55 bp, Artificial
  Synthetic oligonucleotide
gccctggagaatcaacatacaattgatctaactgactcagaaatgaacaaactgt

SEQ ID NO: 68356 - DNA, 60 bp, Artificial
  Synthetic oligonucleotide
gggagaattcaggacctcgagagatatgttgaggacactaaaatagatctctggtcgtac

SEQ ID NO: 68357 - DNA, 60 bp, Artificial
  Synthetic oligonucleotide
cagatcttaaaagcactcaagcagcaatcaaccaaatcaacgggaaactgaataggttaa

SEQ ID NO: 68358 - DNA, 60 bp, Artificial
  Synthetic oligonucleotide
ctaatgacaaaccatttcaaaatgtaaacaggatcacatatggggcctgtcccagatatg

SEQ ID NO: 68359 - DNA, 60 bp, Artificial
  Synthetic oligonucleotide
gaagggagaattcaggacctcgagaaatatgttgaggacactaaaatagatctctggtcg

SEQ ID NO: 68360 - DNA, 60 bp, Artificial
  Synthetic oligonucleotide
gctcaagcatcagggagagtcacagtctctaccaaaagaagccaacaaactgtaatcccg

SEQ ID NO: 68361 - DNA, 60 bp, Artificial
  Synthetic oligonucleotide
atgctcaagcatcagggagagtcacagtctctaccaaaagaagccaacaaactgtaatcc

SEQ ID NO: 68362 - DNA, 60 bp, Artificial
  Synthetic oligonucleotide
aagcttcaattggactggagtcgctcagaatggaacaagctctgcttgcaaaaggagatc

SEQ ID NO: 68363 - DNA, 60 bp, Artificial
  Synthetic oligonucleotide
gaaagcttcaattggactggagtcgctcagaatggaacaagctctgcttgcaaaaggaga

SEQ ID NO: 68364 - DNA, 57 bp, Artificial
  Synthetic oligonucleotide
aatgaaagcttcaattggactggagtcgctcagaatggaacaagctctgcttgcaaa

SEQ ID NO: 68365 - DNA, 60 bp, Artificial
  Synthetic oligonucleotide
aatgaaagcttcaattggactggagtcgctcagaatggaacaagctctgcttgcaaaagg

SEQ ID NO: 68366 - DNA, 60 bp, Artificial
  Synthetic oligonucleotide
gcgctgaacgtgactatgccaaacaatgaaaaatttgacaaattgtacatttggggggtt

SEQ ID NO: 68367 - DNA, 60 bp, Artificial
  Synthetic oligonucleotide
gcgctgaacgtggctatgccaaacaatgaaaaatttgacaaattgtacatttggggggtt

SEQ ID NO: 68368 - DNA, 60 bp, Artificial
  Synthetic oligonucleotide
cctcttttgacatgagtaatgaaggatcttatttcttcggagacaatgcagaaaaatacg

SEQ ID NO: 68369 - DNA, 60 bp, Artificial
  Synthetic oligonucleotide
cctcttttgacatgagtaatgaaggatcttatttcttcggagacaatgcaaaagagtacg

SEQ ID NO: 68370 - DNA, 58 bp, Artificial
  Synthetic oligonucleotide
aaacaagttgcagacaaagaactgagtgatgccccattccttgatcggcttcgccgag

SEQ ID NO: 68371 - DNA, 60 bp, Artificial
  Synthetic oligonucleotide
caagcattacagctgctgtttgaagtggaacaggagataagaactttctcttttcagctt

SEQ ID NO: 68372 - DNA, 60 bp, Artificial
  Synthetic oligonucleotide
cctcaggacccaggaatcggaatgcgtttgtatcaatggaacttgtacagtagtaatgac

SEQ ID NO: 68373 - DNA, 60 bp, Artificial
  Synthetic oligonucleotide
cctcaggacccaggagtcagaatgcgtttgtatcaatggaacttgtacagtagtaatgac

SEQ ID NO: 68374 - DNA, 60 bp, Artificial
  Synthetic oligonucleotide
aatcctcaggacccaggagtcagaatgcgtttgtatcaatggaacttgtacagtagtaat

SEQ ID NO: 68375 - DNA, 60 bp, Artificial
  Synthetic oligonucleotide
ccaaatgtgcactgaacttaaactcagtgattatgaagggcggttgatccagaacagctt

SEQ ID NO: 68376 - DNA, 60 bp, Artificial
  Synthetic oligonucleotide
gggcgattctacatccaaatgtgcactgaacttaaactcagtgattatgaagggcggtta

SEQ ID NO: 68377 - DNA, 60 bp, Artificial
  Synthetic oligonucleotide
gggcgattctacatccaaatgtgcactgaacttaaactcagtgattatgaaggacggttg

SEQ ID NO: 68378 - DNA, 60 bp, Artificial
  Synthetic oligonucleotide
tgggagattctacatccaaatgtgcactgaacttaaactcagtgattatgaagggcggtt

SEQ ID NO: 68379 - DNA, 60 bp, Artificial
  Synthetic oligonucleotide
ctacatccaaatgtgcactgaacttaaactcagtgattatgaagggcggttgatccagaa

SEQ ID NO: 68380 - DNA, 60 bp, Artificial
  Synthetic oligonucleotide
attctacatccaaatgtgcactgaacttaaactcagtgattatgaagggcggttgatcca

SEQ ID NO: 68381 - DNA, 60 bp, Artificial
  Synthetic oligonucleotide
attgggcgattctacatccaaatgtgcactgaacttaaactcagtgattatgaaggacgg

SEQ ID NO: 68382 - DNA, 60 bp, Artificial
  Synthetic oligonucleotide
ggaattgggagattctacatccaaatgtgcactgaacttaaactcagtgattatgaaggg

SEQ ID NO: 68383 - DNA, 60 bp, Artificial
  Synthetic oligonucleotide
aatgtgcactgaacttaaactcagtgattatgaagggcggttgatccagaacagcttgac

SEQ ID NO: 68384 - DNA, 60 bp, Artificial
  Synthetic oligonucleotide
ttgggagattctacatccaaatgtgcactgaacttaaactcagtgattatgaagggcggt

SEQ ID NO: 68385 - DNA, 53 bp, Artificial
  Synthetic oligonucleotide
acaccatggacacagtcaacagaacacaccaatattcagaaaaggggaagtgg

SEQ ID NO: 68386 - DNA, 60 bp, Artificial
  Synthetic oligonucleotide
gaccactacctgagggtaatgagccaagtggatatgcacaaacagactgtgtcctggagg

SEQ ID NO: 68387 - DNA, 60 bp, Artificial
  Synthetic oligonucleotide
gaccactacctgaggataatgagccaagtggatatgcacaaacagactgtgtcctggagg

SEQ ID NO: 68388 - DNA, 60 bp, Artificial
  Synthetic oligonucleotide
cactacctgaggataatgagccaagtggatatgcacaaacagactgtgtcctggaggcta

SEQ ID NO: 68389 - DNA, 60 bp, Artificial
  Synthetic oligonucleotide
cctgagggtaatgagccaagtggatatgcacaaacagactgtgtcctggaggctatggcc

SEQ ID NO: 68390 - DNA, 60 bp, Artificial
  Synthetic oligonucleotide
cctgaggataatgagccaagtggatatgcacaaacagactgtgtcctggaggctatggcc

SEQ ID NO: 68391 - DNA, 60 bp, Artificial
  Synthetic oligonucleotide
tgaggcacttaaaatgaccatggcctccacacctgcttcgcaatacatgactgacatgac

SEQ ID NO: 68392 - DNA, 60 bp, Artificial
  Synthetic oligonucleotide
ctgatgaggcacttaaaatgaccatggcctccacacctgcttcgcgatacatagctgaca

SEQ ID NO: 68393 - DNA, 58 bp, Artificial
  Synthetic oligonucleotide
cctcttttgatatgagtaatgaaggatcttatttcttcggagacaatgcagaagagta

SEQ ID NO: 68394 - DNA, 58 bp, Artificial
  Synthetic oligonucleotide
cctcttttgaaatgaataatgaaggatcttatttcttcggagacaatgcagaagagta

SEQ ID NO: 68395 - DNA, 59 bp, Artificial
  Synthetic oligonucleotide
cctcttttgacatgagtaatgaaggatcttatttcttcggagacaatgcagaagagtac

SEQ ID NO: 68396 - DNA, 56 bp, Artificial
  Synthetic oligonucleotide
cctcttttgacatgagtaatgaaggatcttatttcttcggagacaatgcagaagag

SEQ ID NO: 68397 - DNA, 57 bp, Artificial
  Synthetic oligonucleotide
cctcttttgatatgagtaatgaaggatcttatttcttcggagacaatgcagaagagt

SEQ ID NO: 68398 - DNA, 58 bp, Artificial
  Synthetic oligonucleotide
cctcttttgacatgagtaatgaaggatcttatttcttcggagacaatgcagaagagta

SEQ ID NO: 68399 - DNA, 60 bp, Artificial
  Synthetic oligonucleotide
caggacttgttggagacacacccagaaaaaatgacagcttcagcagtagccattgcctag

SEQ ID NO: 68400 - DNA, 60 bp, Artificial
  Synthetic oligonucleotide
tgatatgagcattggagtaacagtgataaagaacaacatgataaacaatgaccttggacc

SEQ ID NO: 68401 - DNA, 60 bp, Artificial
  Synthetic oligonucleotide
ctgatatgagcattggagtaacagtgataaagaacaacatggtaaacaatgaccttggac

SEQ ID NO: 68402 - DNA, 60 bp, Artificial
  Synthetic oligonucleotide
taggagaccggttggaatttctagcatggtggaggccatggtgtctagggcccggattga

SEQ ID NO: 68403 - DNA, 60 bp, Artificial
  Synthetic oligonucleotide
cgttgcaactacacactcctggattcccaagaggaaccgctctattctcaacacaagcca

SEQ ID NO: 68404 - DNA, 54 bp, Artificial
  Synthetic oligonucleotide
ggttggaatttctagcatggtggaggccatggtgtctagggcccggattgatgc

SEQ ID NO: 68405 - DNA, 60 bp, Artificial
  Synthetic oligonucleotide
aaaagaaggccaaactggcaaatgttgtgagaaagatgatgactaattcacaagacacag

SEQ ID NO: 68406 - DNA, 60 bp, Artificial
  Synthetic oligonucleotide
gcacaaacagactgtgtcctggaggctatggccttccttgaagaatcccacccagggctc

SEQ ID NO: 68407 - DNA, 60 bp, Artificial
  Synthetic oligonucleotide
gcacaaacagactgtgtcctggaggctatggccttccttgaagaatcccacccaggtatc

SEQ ID NO: 68408 - DNA, 60 bp, Artificial
  Synthetic oligonucleotide
gcacaaacagactgtgtcctggaggctatggccttccttgaagaatcccacccagggatc

SEQ ID NO: 68409 - DNA, 60 bp, Artificial
  Synthetic oligonucleotide
gcacaaacagactgtgtcctggaggctatggccttccttgaagaatcccacccaggaatc

SEQ ID NO: 68410 - DNA, 60 bp, Artificial
  Synthetic oligonucleotide
cagcgcaaaatgccataagcaccacattcccttatactggagatcctccatacagccatg

SEQ ID NO: 68411 - DNA, 60 bp, Artificial
  Synthetic oligonucleotide
taaaggttccagcgcaaaatgccataagcaccacattcccttatactggagatcctccat

SEQ ID NO: 68412 - DNA, 60 bp, Artificial
  Synthetic oligonucleotide
atgatgccgttgcaactacacactcctggattcccaagaggaaccgttctattctcaaca

SEQ ID NO: 68413 - DNA, 60 bp, Artificial
  Synthetic oligonucleotide
tgccgttgcaactacacactcctggattcccaagaggaaccgctctattctcaacacaag

SEQ ID NO: 68414 - DNA, 60 bp, Artificial
  Synthetic oligonucleotide
atgatgctgttgcaactacacactcctggattcccaagaggaaccgttctattctcaaca

SEQ ID NO: 68415 - DNA, 60 bp, Artificial
  Synthetic oligonucleotide
atgatgccgttgcaactacacactcctggattcccaagagaaaccgctctattctaaaca

SEQ ID NO: 68416 - DNA, 60 bp, Artificial
  Synthetic oligonucleotide
ggagtaacagtgataaagaacaacatgataaacaatgaccttggaccagcaacagcccag

SEQ ID NO: 68417 - DNA, 60 bp, Artificial
  Synthetic oligonucleotide
tataggtgccatagaggagacacacaaattcagacgagaagatcattcgagctaaagaag

SEQ ID NO: 68418 - DNA, 60 bp, Artificial
  Synthetic oligonucleotide
ccgttgcaactacacactcctggattcccaagagaaaccgctctattctaaacacaagcc

SEQ ID NO: 68419 - DNA, 60 bp, Artificial
  Synthetic oligonucleotide
ccgttgcaactacacactcctggattcccaagaggaaccgttctattctcaacacaagcc

SEQ ID NO: 68420 - DNA, 60 bp, Artificial
  Synthetic oligonucleotide
ccaaaaaaatcctcaggacccaggaatcggaatgcgtttgtatcaatggaacttgtacag

SEQ ID NO: 68421 - DNA, 60 bp, Artificial
  Synthetic oligonucleotide
ccagaaaaatactcagaacccaggagtcggaatgcgtttgtatcaatggaacttgtacag

SEQ ID NO: 68422 - DNA, 60 bp, Artificial
  Synthetic oligonucleotide
ccaaaaagatcctcaggacccaggagtcggaatgcgtttgtatcaatggaacttgtacag

SEQ ID NO: 68423 - DNA, 60 bp, Artificial
  Synthetic oligonucleotide
tatgcatagcatggtccagctcaagttgtcacgatggaaaagcatggctgcatgtttgtg

SEQ ID NO: 68424 - DNA, 54 bp, Artificial
  Synthetic oligonucleotide
acatctgggtgacaagagaaccttatgtgtcatgcgatcctgacaagtgctatc

SEQ ID NO: 68425 - DNA, 60 bp, Artificial
  Synthetic oligonucleotide
ctgcatcaatcggtgcttttatgtggagttgataaggggaaggaaacaggaaactgaagt

SEQ ID NO: 68426 - DNA, 60 bp, Artificial
  Synthetic oligonucleotide
aaagctgcatcaatcggtgcttttatgtggagttgataaggggaaggaaacaggaaactg

SEQ ID NO: 68427 - DNA, 60 bp, Artificial
  Synthetic oligonucleotide
tgtgtatagcatggtccagctcaagttgtcacgatggaaaagcatggctgcatgtttgtg

SEQ ID NO: 68428 - DNA, 54 bp, Artificial
  Synthetic oligonucleotide
acatttgggtgacaagagaaccttatgtgtcatgcgatccttacaagtgttatc

SEQ ID NO: 68429 - DNA, 54 bp, Artificial
  Synthetic oligonucleotide
acatctgggtgacaagagaaccttatgtgtcatgcgatcatgacaagtgttatc

SEQ ID NO: 68430 - DNA, 55 bp, Artificial
  Synthetic oligonucleotide
acatctgggtgacaagagaaccttatgtgtcatgcgatcctgacaagtgttatca

SEQ ID NO: 68431 - DNA, 54 bp, Artificial
  Synthetic oligonucleotide
caggacttgttggagacacacccagaaaaaacgacagctccagcagtagccatt

SEQ ID NO: 68432 - DNA, 60 bp, Artificial
  Synthetic oligonucleotide
tgtgctcaggacttgttggagacacacccagaaaaaacgacagctccagcagtagccatt

SEQ ID NO: 68433 - DNA, 60 bp, Artificial
  Synthetic oligonucleotide
gttatgtgtgctcaggacttgttggagacacacccagaaaaaatgacagcttcagcagta

SEQ ID NO: 68434 - DNA, 60 bp, Artificial
  Synthetic oligonucleotide
gtcgaggagtgctcatgttatcctcgatatcctggtgtcagatgtgtctgcagagacaac

SEQ ID NO: 68435 - DNA, 60 bp, Artificial
  Synthetic oligonucleotide
tgtcgaggagtgctcatgttatcctcgatatcctggtgtcagatgtgtctgcagagacaa

SEQ ID NO: 68436 - DNA, 60 bp, Artificial
  Synthetic oligonucleotide
catgtcgaggagtgctcctgttatcctcgatatcctggtgtcagatgtgtctgcagggac

SEQ ID NO: 68437 - DNA, 60 bp, Artificial
  Synthetic oligonucleotide
tgctcagcatgtcgaggagtgctcctgttatcctcgatatcctggtgtcagatgtgtctg

SEQ ID NO: 68438 - DNA, 60 bp, Artificial
  Synthetic oligonucleotide
cgaatttcagtgtgatctttgaccgactagagaccatagtattactaagggctttcaccg

SEQ ID NO: 68439 - DNA, 60 bp, Artificial
  Synthetic oligonucleotide
gtgatctttgaccgactagagaacatagtattactaagggctttcaccgaagagggagca

SEQ ID NO: 68440 - DNA, 60 bp, Artificial
  Synthetic oligonucleotide
acaaagacataatggattccaacactgtgtcaagtttccaggtagattgctttctttggc

SEQ ID NO: 68441 - DNA, 60 bp, Artificial
  Synthetic oligonucleotide
ttgcaagcatgaggaggaattatttcacagcagaggtgtcccattgtagagccactgagt

SEQ ID NO: 68442 - DNA, 56 bp, Artificial
  Synthetic oligonucleotide
agaagtgccataggccaaatttcaaggcctatgttcttgtatgtgaggacaaacgg

SEQ ID NO: 68443 - DNA, 60 bp, Artificial
  Synthetic oligonucleotide
taagaagtgccataggccaaatttcaaggcctatgttcttgtatgtgaggacaaacggaa

SEQ ID NO: 68444 - DNA, 60 bp, Artificial
  Synthetic oligonucleotide
tctcactgacccgagacttgagccacataaatgggagaaatactgtgtccttgagatagg

SEQ ID NO: 68445 - DNA, 60 bp, Artificial
  Synthetic oligonucleotide
attgcaagcatgaggaggaattatttcacagcagaggtgtcccattgtagagccactgag

SEQ ID NO: 68446 - DNA, 60 bp, Artificial
  Synthetic oligonucleotide
gagggctatatgaagcaattgaggagtgcctgattaatgatccctgggttttgctcaatg

SEQ ID NO: 68447 - DNA, 60 bp, Artificial
  Synthetic oligonucleotide
attgagtgcattgcaagcatgaggaggaattatttcacagcagaggtgtcccattgtaga

SEQ ID NO: 68448 - DNA, 60 bp, Artificial
  Synthetic oligonucleotide
gagctcgatgaaattggagaggacgtagccccaattgagtacattgcaagcatgaggagg

SEQ ID NO: 68449 - DNA, 60 bp, Artificial
  Synthetic oligonucleotide
gccccaattgagtacattgcaagcatgaggaggaattatttcacagcagaggtgtcccat

SEQ ID NO: 68450 - DNA, 60 bp, Artificial
  Synthetic oligonucleotide
gaagcaattgaggagtgcctgattaatgatccctgggttttgctcaatgcgtcttggttc

SEQ ID NO: 68451 - DNA, 60 bp, Artificial
  Synthetic oligonucleotide
atgatagtgacgaacctgaattaaggtcactttcaagctggatacagaatgagttcaaca

SEQ ID NO: 68452 - DNA, 60 bp, Artificial
  Synthetic oligonucleotide
taaggtcactttcaagctggatacagaatgagttcaacaaggcctgcgagctaactgatt

SEQ ID NO: 68453 - DNA, 60 bp, Artificial
  Synthetic oligonucleotide
tgaaaattgaaacaaacaaatttgcagcaatatgcactcacttggaggtatgtttcatgt

SEQ ID NO: 68454 - DNA, 60 bp, Artificial
  Synthetic oligonucleotide
tggagaggaaatggccacaaaggcagactacactctcgacgaggaaagcagggctaggat

SEQ ID NO: 68455 - DNA, 60 bp, Artificial
  Synthetic oligonucleotide
tggggaagaaatggccacaaaggcagactacactctcgacgaggaaagcagggctaggat

SEQ ID NO: 68456 - DNA, 60 bp, Artificial
  Synthetic oligonucleotide
aggtcactttcaagctggatacagaatgagttcaacaaggcctgcgagctaactgattca

SEQ ID NO: 68457 - DNA, 60 bp, Artificial
  Synthetic oligonucleotide
tatggattcatcataaaaggaagatctcatttaaggaatgacacagatgtggtaaacttt

SEQ ID NO: 68458 - DNA, 60 bp, Artificial
  Synthetic oligonucleotide
tatatggattcatcataaaaggaagatctcatttaaggaatgacacagatgtggtaaact

SEQ ID NO: 68459 - DNA, 60 bp, Artificial
  Synthetic oligonucleotide
gcaagcataaggaggaattatttcacagcagaggtgtcccattgtagagccactgagtac

SEQ ID NO: 68460 - DNA, 60 bp, Artificial
  Synthetic oligonucleotide
gcaagcatgaggaggaattatttcacagcagaggtgtcccactgtagagccactgagtac

SEQ ID NO: 68461 - DNA, 60 bp, Artificial
  Synthetic oligonucleotide
tcccatgataagcaagtgcagaactaaagagggaaggcgaaaaaccaatttatatggatt

SEQ ID NO: 68462 - DNA, 60 bp, Artificial
  Synthetic oligonucleotide
attcccatgataagcaagtgcagaactaaagagggaaggcgaaaaaccaatttatatgga

SEQ ID NO: 68463 - DNA, 60 bp, Artificial
  Synthetic oligonucleotide
ccatgataagcaagtgcagaactaaagagggaaggcgaaaaaccaatttatatggattca

SEQ ID NO: 68464 - DNA, 60 bp, Artificial
  Synthetic oligonucleotide
tttatatggattcatcataaaaggaagatctcatttaaggaatgacacagatgtggtaaa

SEQ ID NO: 68465 - DNA, 60 bp, Artificial
  Synthetic oligonucleotide
atgataagcaagtgcagaactaaagagggaaggcgaaaaaccaatttatatgggttcatc

SEQ ID NO: 68466 - DNA, 60 bp, Artificial
  Synthetic oligonucleotide
ggtaaactttgtgagcatggagttttctctcactgacccgagacttgagccacataaatg

SEQ ID NO: 68467 - DNA, 60 bp, Artificial
  Synthetic oligonucleotide
tgggttcatcataaaaggaagatctcatttaaggaatgacacagatgtggtaaactttgt

SEQ ID NO: 68468 - DNA, 60 bp, Artificial
  Synthetic oligonucleotide
catttaaggaatgacacagatgtggtaaactttgtgagcatggagttttctctcactgac

SEQ ID NO: 68469 - DNA, 60 bp, Artificial
  Synthetic oligonucleotide
gcatggagttttctctcactgacccgagacttgagccacataaatgggagaaatactgtg

SEQ ID NO: 68470 - DNA, 60 bp, Artificial
  Synthetic oligonucleotide
ctggatagagctcgatgaaattggagaggacgtagccccaattgagtacattgcaagcat

SEQ ID NO: 68471 - DNA, 60 bp, Artificial
  Synthetic oligonucleotide
ctgattcaatctggatagagctcgatgaaattggagaggacgtagccccaattgagtgca

SEQ ID NO: 68472 - DNA, 60 bp, Artificial
  Synthetic oligonucleotide
atcactttcaagctggatacagaatgagttcaacaaggcctgcgagctaactgattcaat

SEQ ID NO: 68473 - DNA, 60 bp, Artificial
  Synthetic oligonucleotide
tagagctcgatgaaattggagaggacgtagccccaattgagtacattgcaagcatgagga

SEQ ID NO: 68474 - DNA, 60 bp, Artificial
  Synthetic oligonucleotide
tggatagagctcgatgaaattggagaggacgtagccccaattgagtacattgcaagcatg

SEQ ID NO: 68475 - DNA, 60 bp, Artificial
  Synthetic oligonucleotide
cccaattgagtacattgcaagcatgaggaggaattatttcacagcagaggtgtcccattg

SEQ ID NO: 68476 - DNA, 60 bp, Artificial
  Synthetic oligonucleotide
ctttattggagatgtgccacagcacacaaattggcgggacaaggatggtggacattctta

SEQ ID NO: 68477 - DNA, 60 bp, Artificial
  Synthetic oligonucleotide
taaaagcagttagaggtgacctgaatttcgtcaacagggcaaaccagcggttgaacccca

SEQ ID NO: 68478 - DNA, 60 bp, Artificial
  Synthetic oligonucleotide
tggagatgtgccacagcacacaaattggcgggacaaggatggtggacattcttaggcaga

SEQ ID NO: 68479 - DNA, 60 bp, Artificial
  Synthetic oligonucleotide
ttgcatgataaaagcagttagaggtgacctgaatttcgtcaacagagcaaatcagcggtt

SEQ ID NO: 68480 - DNA, 60 bp, Artificial
  Synthetic oligonucleotide
gataaaagcagttagaggtgacctgaatttcgtcaacagggcaaaccagcgattgaaccc

SEQ ID NO: 68481 - DNA, 60 bp, Artificial
  Synthetic oligonucleotide
taaaagcagttagaggtgacctgaatttcgtcaacagagcaaatcagcggttgaacccta

SEQ ID NO: 68482 - DNA, 60 bp, Artificial
  Synthetic oligonucleotide
agaggccaatacagtgggtttgtcagaactctattccaacaaatgagagatgtacttggg

SEQ ID NO: 68483 - DNA, 60 bp, Artificial
  Synthetic oligonucleotide
agtaaaatgagtgatgctggatcagatcgagtgatggtatcacctttggctgtgacatgg

SEQ ID NO: 68484 - DNA, 54 bp, Artificial
  Synthetic oligonucleotide
aaaaccacagtggaccatatggccataattaagaagtacacatcagggagacag

SEQ ID NO: 68485 - DNA, 60 bp, Artificial
  Synthetic oligonucleotide
aaccctatggagtaaaatgagtgatgctggatcagatcgagtgatggtatcacctttggc

SEQ ID NO: 68486 - DNA, 60 bp, Artificial
  Synthetic oligonucleotide
gtggagtaaaatgagtgatgctggatcagatcgagtgatggtatcacctttggctgtgac

SEQ ID NO: 68487 - DNA, 60 bp, Artificial
  Synthetic oligonucleotide
ccctatggagtaaaatgagtgatgctggatcagatcgagtgatggtatcacctttggctg

SEQ ID NO: 68488 - DNA, 60 bp, Artificial
  Synthetic oligonucleotide
gaggattgcatgataaaagcagttagaggtgacctgaatttcgtcaacagagcaaatcag

SEQ ID NO: 68489 - DNA, 60 bp, Artificial
  Synthetic oligonucleotide
acaagaggattgcatgataaaagcagttagaggtgacctgaatttcgtcaacagggcaaa

SEQ ID NO: 68490 - DNA, 60 bp, Artificial
  Synthetic oligonucleotide
atggtgttttcacaagaggattgcatgataaaagcagttagaggtgacctgaatttcgtc

SEQ ID NO: 68491 - DNA, 60 bp, Artificial
  Synthetic oligonucleotide
gtgaggggttcagggatgagaatacttgtaaggggcaattctcctgtattcaactacaac

SEQ ID NO: 68492 - DNA, 60 bp, Artificial
  Synthetic oligonucleotide
aatgtgaggggttcagggatgagaatacttgtaaggggcaattctcctgtattcaactac

SEQ ID NO: 68493 - DNA, 60 bp, Artificial
  Synthetic oligonucleotide
ccgaagctataattgtggccatggtgttttcacaagaggattgcatgataaaagcagtta

SEQ ID NO: 68494 - DNA, 60 bp, Artificial
  Synthetic oligonucleotide
cactgactgtaaatgtgaggggatcagggatgagaatacttgtaaggggcaattctcctg

SEQ ID NO: 68495 - DNA, 60 bp, Artificial
  Synthetic oligonucleotide
gccgctccaccaaagcaaagcagaatgcagttctcttcattgactgtaaatgtgaggggt

SEQ ID NO: 68496 - DNA, 60 bp, Artificial
  Synthetic oligonucleotide
gccgctccgccaaagcaaagcagaatgcagttctcttcattgactgtaaatgtgagggga

SEQ ID NO: 68497 - DNA, 60 bp, Artificial
  Synthetic oligonucleotide
gaagcaataatcgtggccatggtgttttcacaagaggattgcatgataaaagcagttaga

SEQ ID NO: 68498 - DNA, 60 bp, Artificial
  Synthetic oligonucleotide
cagccgctccgccaaagcaaagcagaatgcagttctcttcattgactgtaaatgtgaggg

SEQ ID NO: 68499 - DNA, 60 bp, Artificial
  Synthetic oligonucleotide
ggccaatacagtgggtttgtcagaactctattccaacaaatgagagatgtacttgggaca

SEQ ID NO: 68500 - DNA, 60 bp, Artificial
  Synthetic oligonucleotide
ccgagactgcaaaatttctcccttgatggttgcatacatgttagagagagaacttgtccg

SEQ ID NO: 68501 - DNA, 60 bp, Artificial
  Synthetic oligonucleotide
tccgagattgcaaaatttctcccttgatggttgcatacatgttagagagagaacttgtcc

SEQ ID NO: 68502 - DNA, 60 bp, Artificial
  Synthetic oligonucleotide
gaactccgagattgcaaaatttctcccttgatggttgcatacatgttagagagagaactt

SEQ ID NO: 68503 - DNA, 60 bp, Artificial
  Synthetic oligonucleotide
tctttattggagatgtgccacagcacacaaattggcgggacaaggatggtggacattctt

SEQ ID NO: 68504 - DNA, 60 bp, Artificial
  Synthetic oligonucleotide
caagatacgccgaagagtagacataaaccctggtcatgcagaccttagtgccaaggaggc

SEQ ID NO: 68505 - DNA, 60 bp, Artificial
  Synthetic oligonucleotide
gttgctggcggaacaagcagtatatacattgaagttttacatttgactcaaggaacgtgt

SEQ ID NO: 68506 - DNA, 60 bp, Artificial
  Synthetic oligonucleotide
gtaagaagagccgcagtatcagcagatccactagcatctttattggagatgtgccacagc

SEQ ID NO: 68507 - DNA, 60 bp, Artificial
  Synthetic oligonucleotide
gagaagagctgcagtatcagcagatccactagcatctttattggagatgtgccacagcac

SEQ ID NO: 68508 - DNA, 54 bp, Artificial
  Synthetic oligonucleotide
tagcatacttactgacagccagacagcgaccaaaagaattcggatggccatcaa

SEQ ID NO: 68509 - DNA, 60 bp, Artificial
  Synthetic oligonucleotide
cgggactctagcatacttactgacagccagacagcgaccaaaggaattcggatggccatc

SEQ ID NO: 68510 - DNA, 60 bp, Artificial
  Synthetic oligonucleotide
tgtggccatggtgttttcacaagaggattgcatgataaaagcagttagaggtgacctgaa

SEQ ID NO: 68511 - DNA, 60 bp, Artificial
  Synthetic oligonucleotide
gtaaggggcaattctcctgtattcaactacaacaagaccactaaaagactaacaattctc

SEQ ID NO: 68512 - DNA, 60 bp, Artificial
  Synthetic oligonucleotide
acgaaaacgggactctagcatacttactgacagccagacagcgaccaaaggaattcggat

SEQ ID NO: 68513 - DNA, 60 bp, Artificial
  Synthetic oligonucleotide
gagaccatagtattactaagggctttcaccgaagagggagcaattgttggcgaaatttca

SEQ ID NO: 68514 - DNA, 60 bp, Artificial
  Synthetic oligonucleotide
caagaccaattctgtcacctctgactaaggggattttggggtttgtgttcacgctcaccg

SEQ ID NO: 68515 - DNA, 60 bp, Artificial
  Synthetic oligonucleotide
tctgtcacctctgactaaggggattttggggtttgtgttcacgctcaccgtgcccagtga

SEQ ID NO: 68516 - DNA, 60 bp, Artificial
  Synthetic oligonucleotide
gagacttgaagatgtctttgctgggaaaaacacagatcttgaggctctcatggaatggct

SEQ ID NO: 68517 - DNA, 60 bp, Artificial
  Synthetic oligonucleotide
gatgtctttgctgggaaaaacacagatcttgaggctctcatggaatggctaaagacaaga

SEQ ID NO: 68518 - DNA, 59 bp, Artificial
  Synthetic oligonucleotide
aaaacacagatcttgaggctctcatggaatggctaaagacaagaccaattctgtcacct

SEQ ID NO: 68519 - DNA, 58 bp, Artificial
  Synthetic oligonucleotide
tgagtctatgagggaagaatatcggaaggaacagcagaatgctgtggatgctgacgac

SEQ ID NO: 68520 - DNA, 60 bp, Artificial
  Synthetic oligonucleotide
ggattttggggtttgtgttcacgctcaccgtgcccagtgagcgaggactgcaacgtagac

SEQ ID NO: 68521 - DNA, 60 bp, Artificial
  Synthetic oligonucleotide
ttggggtttgtgttcacgctcaccgtgcccagtgagcgaggactgcagcgtagacgcttt

SEQ ID NO: 68522 - DNA, 60 bp, Artificial
  Synthetic oligonucleotide
gcgcagagacttgaggatgtctttgctgggaaaaacacagatcttgaggctctcatggaa

SEQ ID NO: 68523 - DNA, 60 bp, Artificial
  Synthetic oligonucleotide
gcaatgagagccgttgggactcatcctagctccagtactggtctaagagatgatcttctt

SEQ ID NO: 68524 - DNA, 60 bp, Artificial
  Synthetic oligonucleotide
tctacggaaggagtacctgagtctatgagggaagaatatcgaaaggaacagcagaatgct

SEQ ID NO: 68525 - DNA, 60 bp, Artificial
  Synthetic oligonucleotide
ttgaaagatgagccttctaaccgaggtcgaaacgtatgttctctctatcgttccatcagg

SEQ ID NO: 68526 - DNA, 60 bp, Artificial
  Synthetic oligonucleotide
attgaaagatgagccttctaaccgaggtcgaaacgtatgttctctctatcgttccatcag

SEQ ID NO: 68527 - DNA, 53 bp, Artificial
  Synthetic oligonucleotide
atgagccttctaaccgaggtcgaaacgtatgttctctctatcgttccatcagg

SEQ ID NO: 68528 - DNA, 60 bp, Artificial
  Synthetic oligonucleotide
aagatgagccttctaaccgaggtcgaaacgtatgttctctctatcgttccatcaggcccc

SEQ ID NO: 68529 - DNA, 53 bp, Artificial
  Synthetic oligonucleotide
atgagtcttctaaccgaggtcgaaacgtatgttctctctatcgttccatcagg

SEQ ID NO: 68530 - DNA, 60 bp, Artificial
  Synthetic oligonucleotide
gtccaaaatgccctcaatgggaatggagatccaaataacatggacaaagcagttaaactg

SEQ ID NO: 68531 - DNA, 60 bp, Artificial
  Synthetic oligonucleotide
cagcgtagacgctttgtccaaaatgccctcaatgggaatggagatccaaataacatggac

SEQ ID NO: 68532 - DNA, 60 bp, Artificial
  Synthetic oligonucleotide
cagcgtagacgctttgtccaaaatgccctcaacgggaatggggatccaaataacatggac

SEQ ID NO: 68533 - DNA, 60 bp, Artificial
  Synthetic oligonucleotide
caacgtagacgctttgtccaaaatgccctcaatgggaatggggatccaaataacatggac

SEQ ID NO: 68534 - DNA, 60 bp, Artificial
  Synthetic oligonucleotide
tgttcacgctcaccgtgcccagtgagcgaggactgcagcgtagacgctttgtccaaaatg

SEQ ID NO: 68535 - DNA, 60 bp, Artificial
  Synthetic oligonucleotide
ctggggtttgtgttcacgctcaccgtgcccagtgagcgaggactgcagcgtagacgcttt

SEQ ID NO: 68536 - DNA, 60 bp, Artificial
  Synthetic oligonucleotide
gctagttgcatgggcctcatatacaataggatgggggctgtaaccaccgaagtggcattt

SEQ ID NO: 68537 - DNA, 60 bp, Artificial
  Synthetic oligonucleotide
gccagttgcatgggcctcatatacaataggatgggggctgtaaccaccgaggtggcattt

SEQ ID NO: 68538 - DNA, 60 bp, Artificial
  Synthetic oligonucleotide
ttgcatgggcctcatatacaataggatgggggctgtaaccactgaagtggcatttggcct

SEQ ID NO: 68539 - DNA, 60 bp, Artificial
  Synthetic oligonucleotide
gccagttgcatgggcctcatatacaataggatgggggctgtgaccaccgaagtggcattt

SEQ ID NO: 68540 - DNA, 60 bp, Artificial
  Synthetic oligonucleotide
ctcagttattctgctggtgcacttgccagttgcatgggcctcatatacaataggatgggg

SEQ ID NO: 68541 - DNA, 60 bp, Artificial
  Synthetic oligonucleotide
gccagctgcatgggcctcatatacaataggatgggggctgtaaccacagaagtggcattt

SEQ ID NO: 68542 - DNA, 60 bp, Artificial
  Synthetic oligonucleotide
gccagttgcatgggcctcatatacaataggatgggggctgtaaccacagaagtggcattt

SEQ ID NO: 68543 - DNA, 59 bp, Artificial
  Synthetic oligonucleotide
cggagtctatgagggaagaatatcgaaaggaacagcagaatgctgtggatgctgacgac

SEQ ID NO: 68544 - DNA, 58 bp, Artificial
  Synthetic oligonucleotide
tgagtccatgagggaagaatatcgaaaggaacagcagaatgctgtggatgctgacgac

SEQ ID NO: 68545 - DNA, 60 bp, Artificial
  Synthetic oligonucleotide
ggtggcatttggcctggtatgtgcaacatgtgaacagattgctgactcccagcacaggtc

SEQ ID NO: 68546 - DNA, 60 bp, Artificial
  Synthetic oligonucleotide
cctgagtctatgagggaagagtatcgaaaggaacagcagaatgctgtggatgctgacgac

SEQ ID NO: 68547 - DNA, 60 bp, Artificial
  Synthetic oligonucleotide
acaacactaaacaacgggcattcaaatgacacagtacatgataggaccccttaccggacc

SEQ ID NO: 68548 - DNA, 60 bp, Artificial
  Synthetic oligonucleotide
caacactaaacaacgggcattcaaatgacacagtacatgataggaccccttaccggaccc

SEQ ID NO: 68549 - DNA, 60 bp, Artificial
  Synthetic oligonucleotide
tctggaataaatgagtcagctgatatgagcattggagtaacagtgataaagaacaacatg

SEQ ID NO: 68550 - DNA, 60 bp, Artificial
  Synthetic oligonucleotide
gaataaacgagtcagctgatatgagcattggagtaacagtgataaagaacaacatggtaa

SEQ ID NO: 68551 - DNA, 60 bp, Artificial
  Synthetic oligonucleotide
aaagcgaatttcagtgtgatctttgaccgactagagaccatagtattactaagggctttc

SEQ ID NO: 68552 - DNA, 51 bp, Artificial
  Synthetic oligonucleotide
tcctcatcggaggacttgaatggaatgataacacagttcgagtctctaaaa

SEQ ID NO: 68553 - DNA, 52 bp, Artificial
  Synthetic oligonucleotide
ggggcaattgttggcgaaatctcaccattgccttcttttccaggacatacta

SEQ ID NO: 68554 - DNA, 54 bp, Artificial
  Synthetic oligonucleotide
gggagaggcaacactctcggtctagacatcaaagcagccacccatgttggaaag

SEQ ID NO: 68555 - DNA, 60 bp, Artificial
  Synthetic oligonucleotide
ggctttcaccgaagagggagcaattgttggcgaaatctcaccactgccttcttttccagg

SEQ ID NO: 68556 - DNA, 60 bp, Artificial
  Synthetic oligonucleotide
ctaagggctttcaccgaagagggagcaattgttggcgaaatttcaccattgccttctttt

SEQ ID NO: 68557 - DNA, 60 bp, Artificial
  Synthetic oligonucleotide
aagggctttcaccgaagagggagcaattgttggcgaaatctcaccactgccttcttttcc

SEQ ID NO: 68558 - DNA, 60 bp, Artificial
  Synthetic oligonucleotide
aatcatgagggaatacaagcaggagtggatagattctacaggacctgcaagttagtggga

SEQ ID NO: 68559 - DNA, 60 bp, Artificial
  Synthetic oligonucleotide
aatgcaccaaatcatgagggaatacaagcaggagtggatagattctacaggacttgcaag

SEQ ID NO: 68560 - DNA, 60 bp, Artificial
  Synthetic oligonucleotide
aatgcaccaaatcatgagggaatacaagcaggagtggatagattctacaggacctgtaag

SEQ ID NO: 68561 - DNA, 60 bp, Artificial
  Synthetic oligonucleotide
catgagggaatacaagcaggagtggatagattctacaggacctgcaagttagtgggaatc

SEQ ID NO: 68562 - DNA, 60 bp, Artificial
  Synthetic oligonucleotide
catgagggaatacaagcaggagtggatagattctacaggacttgcaagttagtgggaatc

SEQ ID NO: 68563 - DNA, 60 bp, Artificial
  Synthetic oligonucleotide
aatgcatcaaatcatgagggaatacaagcaggagtggatagattctacaggacctgcaag

SEQ ID NO: 68564 - DNA, 60 bp, Artificial
  Synthetic oligonucleotide
aatgcaccaaatcatgagggaatacaagcaggagtggatagattctacaggacctgcaaa

SEQ ID NO: 68565 - DNA, 60 bp, Artificial
  Synthetic oligonucleotide
acattatcaggaagtgctcagcatgtcgaggagtgctcctgttatcctcgatatcctggt

SEQ ID NO: 68566 - DNA, 53 bp, Artificial
  Synthetic oligonucleotide
cttaaaatgaccatggcctccacacctgcttcgcgatacataactgacatgac

SEQ ID NO: 68567 - DNA, 60 bp, Artificial
  Synthetic oligonucleotide
agggagaatctgatgaggcacttaaaatgaccatggcctccacacctgcttcgcaataca

SEQ ID NO: 68568 - DNA, 60 bp, Artificial
  Synthetic oligonucleotide
tcctcatcggaggacttgaatggaatgataacacagttcgagtctctaaaaatctacaga

SEQ ID NO: 68569 - DNA, 60 bp, Artificial
  Synthetic oligonucleotide
gcaattagggtcctcatcggagggcttgaatggaatgataacacagttcgagtctctaaa

SEQ ID NO: 68570 - DNA, 60 bp, Artificial
  Synthetic oligonucleotide
gcaattggggtcctcatcggagggcttgagtggaatgataacacagttcgagtctctaaa

SEQ ID NO: 68571 - DNA, 60 bp, Artificial
  Synthetic oligonucleotide
caagcattacagctgctgtttgaagtggaacaggagataagaactttctcatttcagctt

SEQ ID NO: 68572 - DNA, 60 bp, Artificial
  Synthetic oligonucleotide
tctggtattttctctgttgaaggcaaaagctgcatcaatcggtgcttttatgtggagttg

SEQ ID NO: 68573 - DNA, 60 bp, Artificial
  Synthetic oligonucleotide
ctctgttgaaggcaaaagctgcatcaatcggtgcttttatgtggagttgataagaggaag

SEQ ID NO: 68574 - DNA, 60 bp, Artificial
  Synthetic oligonucleotide
tctccgttgaaggcaaaagctgcatcaatcggtgcttttatgtggagttgataaggggaa

SEQ ID NO: 68575 - DNA, 60 bp, Artificial
  Synthetic oligonucleotide
tctctgttgaaggcaaaagctgcatcaatcggtgcttttatgtggagttgataagaggaa

SEQ ID NO: 68576 - DNA, 60 bp, Artificial
  Synthetic oligonucleotide
gtgtacctgaccaacaccaccatagagaaggaaatatgccccaaactagcagaatacaga

SEQ ID NO: 68577 - DNA, 60 bp, Artificial
  Synthetic oligonucleotide
gtgtatctgaccaacaccaccatagagaaggaaatatgccccaaactagcagaatacaga

SEQ ID NO: 68578 - DNA, 60 bp, Artificial
  Synthetic oligonucleotide
aatctacagagattcgcttggagaagcagtaatgagaatgggggacctccacttactcca

SEQ ID NO: 68579 - DNA, 60 bp, Artificial
  Synthetic oligonucleotide
agtctctaaaaatctacagagattcgcttggagaagcagtaatgaggatgggggacctcc

SEQ ID NO: 68580 - DNA, 60 bp, Artificial
  Synthetic oligonucleotide
agcagggtgacaaagacataatggattccaacactgtgtcaagtttccaggtagattgct

SEQ ID NO: 68581 - DNA, 60 bp, Artificial
  Synthetic oligonucleotide
ggggtgacaaagacataatggattccaacactgtgtcaagtttccaggtagattgctttc

SEQ ID NO: 68582 - DNA, 60 bp, Artificial
  Synthetic oligonucleotide
ccctttgcatcagcatggaccaggcaatcatggagaaaaacatcatgttgaaagcgaatt

SEQ ID NO: 68583 - DNA, 60 bp, Artificial
  Synthetic oligonucleotide
atcagaatggaccaggcagtcatggagaaaaacatcatgttgaaagcgaatttcagtgtg

SEQ ID NO: 68584 - DNA, 60 bp, Artificial
  Synthetic oligonucleotide
ccctttgcatcagaatggaccaggcaaccatggagaaaaacatcatgttgaaagcgaatt

SEQ ID NO: 68585 - DNA, 60 bp, Artificial
  Synthetic oligonucleotide
ccctttgcatcagagtggaccaggcaatcatggagaaaaacatcatgttgaaagcgaatt

SEQ ID NO: 68586 - DNA, 60 bp, Artificial
  Synthetic oligonucleotide
atcagaatggaccaggcaaccatggagaaaaacatcatgttgaaagcgaatttcagtgtg

SEQ ID NO: 68587 - DNA, 60 bp, Artificial
  Synthetic oligonucleotide
caccgaagagggagcaattgttggcgaaatctcaccattgccttcttttccaggacatgc

SEQ ID NO: 68588 - DNA, 60 bp, Artificial
  Synthetic oligonucleotide
catgtcgaggagtgctcctgttatcctcgatatcctggtgtcagatgtgtctgtagggac

SEQ ID NO: 68589 - DNA, 60 bp, Artificial
  Synthetic oligonucleotide
ggctttcaccgaagagggagcagttgttggcgaaatctcaccattgccttcttttccagg

SEQ ID NO: 68590 - DNA, 60 bp, Artificial
  Synthetic oligonucleotide
aagggctttcaccgaagagggagcagttgttggcgaaatctcaccattgccttcttttcc

SEQ ID NO: 68591 - DNA, 60 bp, Artificial
  Synthetic oligonucleotide
gcaaataacattcatgcaagcattacagctgctgtttgaagtagaacaggagataagaac

SEQ ID NO: 68592 - DNA, 60 bp, Artificial
  Synthetic oligonucleotide
gcaaataacattcatgcaagcattacagctgctatttgaagtggaacaggagataagaac

SEQ ID NO: 68593 - DNA, 51 bp, Artificial
  Synthetic oligonucleotide
cctcttttgacatgagtaatgaaggatcttatttcttcggagacaatgcag

SEQ ID NO: 68594 - DNA, 60 bp, Artificial
  Synthetic oligonucleotide
ggattccaacactgtgtcaagtttccaggtagattgctttctttggcatatccggaaaca

SEQ ID NO: 68595 - DNA, 60 bp, Artificial
  Synthetic oligonucleotide
tggattccaacactgtgtcaagtttccaggtagattgctttctttggcatatccggaaac

SEQ ID NO: 68596 - DNA, 60 bp, Artificial
  Synthetic oligonucleotide
gcagagacataagcgatttgaagcaatatgatagtgacgaacctgaattaaggtcacttt

SEQ ID NO: 68597 - DNA, 60 bp, Artificial
  Synthetic oligonucleotide
caccgaagagggagtaattgttggcgaaatctcaccattgccttcttttccaggacatac

SEQ ID NO: 68598 - DNA, 60 bp, Artificial
  Synthetic oligonucleotide
caccgaagagggagcaattgttggcgaaatttcaccattgccttcttttccaggacatac

SEQ ID NO: 68599 - DNA, 60 bp, Artificial
  Synthetic oligonucleotide
gcattgaacaaccggttccagatcaaaggtgttgagctgaagtcagggtacaaagattgg

SEQ ID NO: 68600 - DNA, 60 bp, Artificial
  Synthetic oligonucleotide
cgtatgttctctctatcgttccatcaggccccctcaaagccgagatcgcgcagagacttg

SEQ ID NO: 68601 - DNA, 60 bp, Artificial
  Synthetic oligonucleotide
gtatgttctctctatcgttccatcaggccccctcaaagccgagatcgcgcagagacttga

SEQ ID NO: 68602 - DNA, 60 bp, Artificial
  Synthetic oligonucleotide
gtatgttctctctatcgttccgtcaggccccctcaaagccgagatcgcgcagagacttga

SEQ ID NO: 68603 - DNA, 60 bp, Artificial
  Synthetic oligonucleotide
tatgttctctctatcgttccatcaggccccctcaaagccgagatcgcgcagagacttgag

SEQ ID NO: 68604 - DNA, 60 bp, Artificial
  Synthetic oligonucleotide
aggccccctcaaagccgagatcgcgcagagacttgaagatgtctttgcagggaagaacac

SEQ ID NO: 68605 - DNA, 52 bp, Artificial
  Synthetic oligonucleotide
ttggaatttctagcatggtggaggccatggtgtctagggcccggattgacgc

SEQ ID NO: 68606 - DNA, 60 bp, Artificial
  Synthetic oligonucleotide
tgcaactacacactcctggattcccaagaggaaccgctctatcctcaacacaagccaaag

SEQ ID NO: 68607 - DNA, 60 bp, Artificial
  Synthetic oligonucleotide
ccgttgcaactacacactcctggattcccaagaggaaccgctccattctcaacacaagcc

SEQ ID NO: 68608 - DNA, 60 bp, Artificial
  Synthetic oligonucleotide
acaggagaccggttggaatttctagcatggtggaggccatggtgtctagggcccggattg

SEQ ID NO: 68609 - DNA, 60 bp, Artificial
  Synthetic oligonucleotide
cccaattgatggaccactacctgaggataatgagccaagtggatatgcacagacagactg

SEQ ID NO: 68610 - DNA, 60 bp, Artificial
  Synthetic oligonucleotide
tgccgttgcaactacacactcctggattcccaagaggaaccgctccattctcaacacaag

SEQ ID NO: 68611 - DNA, 60 bp, Artificial
  Synthetic oligonucleotide
tgccgttgcaactacacactcctggattcccaagaggaaccgctctattctaaacacaag

SEQ ID NO: 68612 - DNA, 60 bp, Artificial
  Synthetic oligonucleotide
agtggcatttggtctggtatgtgcaacatgtgaacagattgctgactcccagcacaggtc

SEQ ID NO: 68613 - DNA, 60 bp, Artificial
  Synthetic oligonucleotide
atcatgatatatacagagacgaggcattgaacaaccggttccagatcaaaggtgtcgaac

SEQ ID NO: 68614 - DNA, 60 bp, Artificial
  Synthetic oligonucleotide
ggtccagctcaagttgtcacgatggaaaagcatggctgcatgtttgtatcactgggcatg

SEQ ID NO: 68615 - DNA, 60 bp, Artificial
  Synthetic oligonucleotide
gtgaaaggttgggcctttgatgatggaaatgacgtgtggatgggaagaacgatcagcgag

SEQ ID NO: 68616 - DNA, 60 bp, Artificial
  Synthetic oligonucleotide
cctaaagagtgagactgatgaaaatctcaaaattgcagttgcatccagccctgctcctcg

SEQ ID NO: 68617 - DNA, 60 bp, Artificial
  Synthetic oligonucleotide
gatggctaattgcagaatgcagaaacatattaaccaaaactgagaacagctttgagcaga

SEQ ID NO: 68618 - DNA, 60 bp, Artificial
  Synthetic oligonucleotide
aaactgagaacagctttgagcagataacgttcttgcaggcattgcaactcttacttgaag

SEQ ID NO: 68619 - DNA, 60 bp, Artificial
  Synthetic oligonucleotide
gactgatgaaaatctcaaaattgcagttgcatccagccctgctcctcggtacattaccga

SEQ ID NO: 68620 - DNA, 60 bp, Artificial
  Synthetic oligonucleotide
aatggatcaggccattatggacaagaggataacactcaaggcaaatttctctgtcctatt

SEQ ID NO: 68621 - DNA, 60 bp, Artificial
  Synthetic oligonucleotide
tggatcaggccattatggacaagaggataacactcaaggcaaatttctctgtcctatttg

SEQ ID NO: 68622 - DNA, 60 bp, Artificial
  Synthetic oligonucleotide
gctttcacagacgatggcgccattgtagctgaaatatctcccattccttctatgccagga

SEQ ID NO: 68623 - DNA, 60 bp, Artificial
  Synthetic oligonucleotide
tttggggtttgtgttcacgctcaccgtgcccagtgagcgaggactgcagcgtagacgctt

SEQ ID NO: 68624 - DNA, 60 bp, Artificial
  Synthetic oligonucleotide
aggggattttggggtttgtgttcacgctcaccgtgcccagtgagcgaggactgcagcgta

SEQ ID NO: 68625 - DNA, 60 bp, Artificial
  Synthetic oligonucleotide
ttgcagcaatatgcacccacttggaggtatgtttcatgtattcagattttcatttcatca

SEQ ID NO: 68626 - DNA, 60 bp, Artificial
  Synthetic oligonucleotide
aatttgcagcaatatgcacccacttggaggtatgtttcatgtattcagattttcatttca

SEQ ID NO: 68627 - DNA, 60 bp, Artificial
  Synthetic oligonucleotide
atttgcagcaatatgcactcacttggaggtatgtttcatgtattcagattttcatttcat

SEQ ID NO: 68628 - DNA, 60 bp, Artificial
  Synthetic oligonucleotide
cagcaatatgcacccacttggaggtatgtttcatgtattcagattttcatttcatcaatg

SEQ ID NO: 68629 - DNA, 60 bp, Artificial
  Synthetic oligonucleotide
ttgcagcaatatgcactcacttggaggtatgtttcatgtattcagattttcatttcatca

SEQ ID NO: 68630 - DNA, 60 bp, Artificial
  Synthetic oligonucleotide
tgcagcaatatgcacccacttggaggtatgtttcatgtattcagattttcatttcatcaa

SEQ ID NO: 68631 - DNA, 60 bp, Artificial
  Synthetic oligonucleotide
tgacaatgcctgcatagggtcaatcagaaatggaacttataaccatgatgtatacagaga

SEQ ID NO: 68632 - DNA, 60 bp, Artificial
  Synthetic oligonucleotide
gcctgcatagggtcaatcagaaatggaacttataaccatgatgtatacagagacgaagca

SEQ ID NO: 68633 - DNA, 60 bp, Artificial
  Synthetic oligonucleotide
gcctgcatagggtcaatcagaaatggaacttatgaccatgatgtgtacagagatgaagca

SEQ ID NO: 68634 - DNA, 60 bp, Artificial
  Synthetic oligonucleotide
atcactgtcaagctggatacagaatgagttcaacaaggcctgcgagctaactgattcaat

SEQ ID NO: 68635 - DNA, 60 bp, Artificial
  Synthetic oligonucleotide
gtcactttcaagctggatacagaatgagttcaacaaggcctgcgagctaactgattcact

SEQ ID NO: 68636 - DNA, 60 bp, Artificial
  Synthetic oligonucleotide
aaggactaaaaacatgaagaaaacgagtcaactaaagtgggctcttggtgaaaacatggc

SEQ ID NO: 68637 - DNA, 60 bp, Artificial
  Synthetic oligonucleotide
caaggactaaaaacatgaagaaaacgagtcaactaaagtgggctcttggtgaaaacatgg

SEQ ID NO: 68638 - DNA, 60 bp, Artificial
  Synthetic oligonucleotide
aaatggaagattttgtgcgacaatgcttcaacccgatgattgtcgaacttgcagaaaagg

SEQ ID NO: 68639 - DNA, 60 bp, Artificial
  Synthetic oligonucleotide
gatcccaaggactaaaaacatgaagaaaacgagtcaactaaagtgggctcttggtgaaaa

SEQ ID NO: 68640 - DNA, 60 bp, Artificial
  Synthetic oligonucleotide
gtcactttcaagctggatacagaatgagttcaacaaggcctgcgagctaactgattcaat

SEQ ID NO: 68641 - DNA, 60 bp, Artificial
  Synthetic oligonucleotide
gtcactgtcaagctggatacagaatgagttcaacaaggcctgcgagctaactgattcaat

SEQ ID NO: 68642 - DNA, 60 bp, Artificial
  Synthetic oligonucleotide
gtcactttcaagctggatacagaatgagttcaacaaggcctgcgagctaactgattcagt

SEQ ID NO: 68643 - DNA, 60 bp, Artificial
  Synthetic oligonucleotide
aacatgaagaaaacgagtcaactaaagtgggctcttggtgaaaacatggcaccagagaaa

SEQ ID NO: 68644 - DNA, 60 bp, Artificial
  Synthetic oligonucleotide
aaacatgaagaaaacgagtcaactaaagtgggctcttggtgaaaacatggcaccagagaa

SEQ ID NO: 68645 - DNA, 53 bp, Artificial
  Synthetic oligonucleotide
aaaacatgaagaaaacgagtcaactaaagtgggctcttggtgaaaacatggca

SEQ ID NO: 68646 - DNA, 51 bp, Artificial
  Synthetic oligonucleotide
aaaacatgaagaaaacgagtcaactaaagtgggctcttggtgaaaacatgg

SEQ ID NO: 68647 - DNA, 60 bp, Artificial
  Synthetic oligonucleotide
gatggggatcgccagaatgcaactgagattagggcatccgtcgggaagatgattgatgga

SEQ ID NO: 68648 - DNA, 60 bp, Artificial
  Synthetic oligonucleotide
acggtcttatgaacagatggaaactgatggggatcgccagaatgcaactgagattagggc

SEQ ID NO: 68649 - DNA, 60 bp, Artificial
  Synthetic oligonucleotide
cgccagaatgcaactgagattagggcatccgtcgggaagatgattgatggaattgggcga

SEQ ID NO: 68650 - DNA, 60 bp, Artificial
  Synthetic oligonucleotide
gccagaatgcaactgagattagggcatccgtcgggaagatgattgatggaattggaagat

SEQ ID NO: 68651 - DNA, 60 bp, Artificial
  Synthetic oligonucleotide
gccagaatgcaactgagattagggcatccgtcgggaagatgattgatggaattgggcgat

SEQ ID NO: 68652 - DNA, 60 bp, Artificial
  Synthetic oligonucleotide
tcatggcgtcccaaggcaccaaacggtcttatgaacagatggaaactgatggggaacgcc

SEQ ID NO: 68653 - DNA, 60 bp, Artificial
  Synthetic oligonucleotide
ccaaggcaccaaacggtcttatgaacagatggaaactgatggggaacgccagaatgcaac

SEQ ID NO: 68654 - DNA, 60 bp, Artificial
  Synthetic oligonucleotide
ggcaccaaacggtcttatgaacagatggaaactgatggggaacgccagaatgcaactgag

SEQ ID NO: 68655 - DNA, 60 bp, Artificial
  Synthetic oligonucleotide
gtctggacttccggttgggggtaatgaaaagaaggccaaactggcaaatgttgtgagaaa

SEQ ID NO: 68656 - DNA, 60 bp, Artificial
  Synthetic oligonucleotide
ctatttaccataagacaagaaatggccaacagaggcctctgggattcctttcgtcagtcc

SEQ ID NO: 68657 - DNA, 60 bp, Artificial
  Synthetic oligonucleotide
ataagacaagaaatggccaacagaggcctctgggattcctttcgtcagtccgaaagaggc

SEQ ID NO: 68658 - DNA, 60 bp, Artificial
  Synthetic oligonucleotide
cgggactctagcatacttaccgacagccagacagcgaccaaaagaattcggatggccatc

SEQ ID NO: 68659 - DNA, 60 bp, Artificial
  Synthetic oligonucleotide
gaccactaaaagactaacaattctcggaaaagatgccggcactttaattgaagacccagg

SEQ ID NO: 68660 - DNA, 60 bp, Artificial
  Synthetic oligonucleotide
acgaaaacgggactctagcatacttaccgacagccagacagcgaccaaaagaattcggat

SEQ ID NO: 68661 - DNA, 60 bp, Artificial
  Synthetic oligonucleotide
taaggggcaattctcctgtattcaactacaacaagaccactaaaagactaacaattctcg

SEQ ID NO: 68662 - DNA, 60 bp, Artificial
  Synthetic oligonucleotide
tcgcgagatactaacaaaaaccacagtggaccatatggccataattaagaagtacacatc

SEQ ID NO: 68663 - DNA, 60 bp, Artificial
  Synthetic oligonucleotide
acagtctcgcactcgcgagatactgacaaaaaccacagtggaccatatggccataattaa

SEQ ID NO: 68664 - DNA, 60 bp, Artificial
  Synthetic oligonucleotide
gcagtctcgcacccgcgagatactgacaaaaaccacagtggaccatatggccataattaa

SEQ ID NO: 68665 - DNA, 59 bp, Artificial
  Synthetic oligonucleotide
aaaaccacagtggaccatatggccataattaagaagtacacatcagggagacaggaaaa

SEQ ID NO: 68666 - DNA, 60 bp, Artificial
  Synthetic oligonucleotide
gtgaggggatcagggatgagaatacttgtaaggggcaattctcctgtattcaactataac

SEQ ID NO: 68667 - DNA, 60 bp, Artificial
  Synthetic oligonucleotide
acacatcggggagacaggaaaagaacccgtcacttaggatgaaatggatgatggcgatga

SEQ ID NO: 68668 - DNA, 60 bp, Artificial
  Synthetic oligonucleotide
acacatcggggagacaggaaaagaacccgtcacttaggatgaaatggatgatggcaatga

SEQ ID NO: 68669 - DNA, 60 bp, Artificial
  Synthetic oligonucleotide
agtacacatcagggagacaggaaaagaacccgtcacttaggatgaaatggatgatggcaa

SEQ ID NO: 68670 - DNA, 60 bp, Artificial
  Synthetic oligonucleotide
aatgtgaggggatcagggatgagaatacttgtaaggggcaattctcctgtattcaactat

SEQ ID NO: 68671 - DNA, 60 bp, Artificial
  Synthetic oligonucleotide
ctctatggagtaaaatgagtgatgctggatcagatcgagtgatggtatcacctttggctg

SEQ ID NO: 68672 - DNA, 60 bp, Artificial
  Synthetic oligonucleotide
cctaaaggttccagcgcaaaatgccataagcaccacattcccttatactggagatcctcc

SEQ ID NO: 68673 - DNA, 60 bp, Artificial
  Synthetic oligonucleotide
taaaggttccagcgcaaaatgccataagcaccacattcccttatactggggatcctccat

SEQ ID NO: 68674 - DNA, 60 bp, Artificial
  Synthetic oligonucleotide
taaaggttccagcgcaaaatgccataagcaccacattcccttacactggagatcctccat

SEQ ID NO: 68675 - DNA, 60 bp, Artificial
  Synthetic oligonucleotide
ctaaaggttccagcgcaaaatgccataagcaccacattcccttatactggagatcctcca

SEQ ID NO: 68676 - DNA, 60 bp, Artificial
  Synthetic oligonucleotide
ctcaggtacatatggaacaggctcatggcctgatggggcggacaccaatctcatgcctat

SEQ ID NO: 68677 - DNA, 60 bp, Artificial
  Synthetic oligonucleotide
ctcaggtacatatggaacaggctcatggcctgatggggcgaacatcaatctcatgcctat

SEQ ID NO: 68678 - DNA, 60 bp, Artificial
  Synthetic oligonucleotide
ctcaggtacatatggaacaggctcatggcctgatggagcggacatcaatctcatgcctat

SEQ ID NO: 68679 - DNA, 60 bp, Artificial
  Synthetic oligonucleotide
tcaccgaagagggagtaattgttggcgaaatctcaccattgccttcttttccaggacata

SEQ ID NO: 68680 - DNA, 60 bp, Artificial
  Synthetic oligonucleotide
ggctttcaccgaaaagggagcaattgttggcgaaatctcaccattgccttcttttccagg

SEQ ID NO: 68681 - DNA, 60 bp, Artificial
  Synthetic oligonucleotide
aagggctttcaccgaaaagggagcaattgttggcgaaatctcaccattgccttcttttcc

SEQ ID NO: 68682 - DNA, 59 bp, Artificial
  Synthetic oligonucleotide
aaaacaaggaagcaactgagggaaaatgctgaagacatgggcaatggttgcttcaagat

SEQ ID NO: 68683 - DNA, 60 bp, Artificial
  Synthetic oligonucleotide
gggaatggtggatggttggtacggtttcaggcatcaaaattctgagggaataggacaagc

SEQ ID NO: 68684 - DNA, 60 bp, Artificial
  Synthetic oligonucleotide
ggtggatggttggtacggtttcaggcatcaaaattctgagggaataggacaagcagcaga

SEQ ID NO: 68685 - DNA, 60 bp, Artificial
  Synthetic oligonucleotide
ggtccagctcaagctgtcacgatggaaaagcatggctgcatgtttgtgtcactgggcatg

SEQ ID NO: 68686 - DNA, 60 bp, Artificial
  Synthetic oligonucleotide
tcgaatgtttttggcgatgattacatatatcacaaaaaatcaacctgagtggttcagaaa

SEQ ID NO: 68687 - DNA, 60 bp, Artificial
  Synthetic oligonucleotide
ccctagaatgtttttggcgatgattacatatatcacaaaaaatcaacctgagtggttcag

SEQ ID NO: 68688 - DNA, 60 bp, Artificial
  Synthetic oligonucleotide
ggagtaaaaggctgggcctttgatgatggaaatgacgtgtggatgggaagaacgatcagc

SEQ ID NO: 68689 - DNA, 60 bp, Artificial
  Synthetic oligonucleotide
gcatagcatggtccagctcaagttgtcacgatggaaaagcatggttgcatgtttgtgtca

SEQ ID NO: 68690 - DNA, 60 bp, Artificial
  Synthetic oligonucleotide
gaatcaggaaggctaatagatttcctcaaggatgtgatggaatcaatggataaagaggaa

SEQ ID NO: 68691 - DNA, 60 bp, Artificial
  Synthetic oligonucleotide
gaaggctaatagatttcctcaaggatgtgatggaatcaatggataaagaggaaatggaga

SEQ ID NO: 68692 - DNA, 60 bp, Artificial
  Synthetic oligonucleotide
gatcgaatggactaacagctaatgaatcaggaaggctaatagatttcctcaaggatgtga

SEQ ID NO: 68693 - DNA, 60 bp, Artificial
  Synthetic oligonucleotide
ccgagatcgcgcagagacttgaagatgtctttgcagggaagaacaccgatcttgaggcac

SEQ ID NO: 68694 - DNA, 60 bp, Artificial
  Synthetic oligonucleotide
atgataagcaagtgcagaactaaagagggaaggcgaaaaaccaatttgtatggattcatc

SEQ ID NO: 68695 - DNA, 60 bp, Artificial
  Synthetic oligonucleotide
atgataagcaagtgcagaactaaagagggaaggcgaaagaccaatttatatggattcatc

SEQ ID NO: 68696 - DNA, 60 bp, Artificial
  Synthetic oligonucleotide
atgataagcaagtgcagaactaaagagggaaggcggaaaaccaatttatatggattcatc

SEQ ID NO: 68697 - DNA, 60 bp, Artificial
  Synthetic oligonucleotide
gctcctgttatccccgatatcctggtgtcagatgtgtctgcagagacaactggaaaggct

SEQ ID NO: 68698 - DNA, 60 bp, Artificial
  Synthetic oligonucleotide
gttcctgttatcctcggtatcctggtgtcagatgtgtctgcagagacaactggaaaggct

SEQ ID NO: 68699 - DNA, 59 bp, Artificial
  Synthetic oligonucleotide
cctcttttgatatgagtaatgaaggatcttatttcttcggagacaatgcagaagagtac

SEQ ID NO: 68700 - DNA, 59 bp, Artificial
  Synthetic oligonucleotide
cctcttttgatatgagtaatgaaggatcttatttcttcggagacaatgcagacgagtac

SEQ ID NO: 68701 - DNA, 54 bp, Artificial
  Synthetic oligonucleotide
tttgatatgagtaatgaaggatcttatttcttcggagacaatgcagaagagtac

SEQ ID NO: 68702 - DNA, 60 bp, Artificial
  Synthetic oligonucleotide
cctcttttgatatgagtaatgaaggatcttatttcttcggagacaatgcagacgagtacg

SEQ ID NO: 68703 - DNA, 60 bp, Artificial
  Synthetic oligonucleotide
ggctttcaccgaagagggagcaattgttggcgaaatcttaccattgccttcttttccagg

SEQ ID NO: 68704 - DNA, 60 bp, Artificial
  Synthetic oligonucleotide
aagggctttcaccgaagagggagcaattgttggcgaaatcttaccattgccttcttttcc

SEQ ID NO: 68705 - DNA, 60 bp, Artificial
  Synthetic oligonucleotide
tcaccgaagagggagcaattgttggcgaaatttcaccattgccttcttttccaggacata

SEQ ID NO: 68706 - DNA, 60 bp, Artificial
  Synthetic oligonucleotide
gaatctgatgaggcacttaaaatgaccatggtctccacacctgcttcgcgatacatgact

SEQ ID NO: 68707 - DNA, 60 bp, Artificial
  Synthetic oligonucleotide
attgctcctcggggttactacaaaatgcgcactgggaaaagctcaataatgaggtcagat

SEQ ID NO: 68708 - DNA, 60 bp, Artificial
  Synthetic oligonucleotide
tgaagacacgaaaatagatctctggtcttacaatgcggaacttcttgttgccctagagaa

SEQ ID NO: 68709 - DNA, 60 bp, Artificial
  Synthetic oligonucleotide
cactaaaatagatctctggtcttacaatgcggagcttcttgtcgctctggagaaccaaca

SEQ ID NO: 68710 - DNA, 60 bp, Artificial
  Synthetic oligonucleotide
agaattctcagaagtagaagggagaattcaggacctcgagaaatatgtcgaggacactaa

SEQ ID NO: 68711 - DNA, 60 bp, Artificial
  Synthetic oligonucleotide
ctcagaagtagaagggagaattcaggacctcgagaaatatgttgaggacaccaaaataga

SEQ ID NO: 68712 - DNA, 60 bp, Artificial
  Synthetic oligonucleotide
ggaattctcagaagtagaagggagaattcaggacctcgagaagtatgttgaagacactaa

SEQ ID NO: 68713 - DNA, 60 bp, Artificial
  Synthetic oligonucleotide
ctcagaagtagaagggagaattcaggacctcgagaaatacgttgaggacactaaaataga

SEQ ID NO: 68714 - DNA, 60 bp, Artificial
  Synthetic oligonucleotide
aattctcagaagtagaagggagaattcaggacctcgagaaatatgttgaggacactaaaa

SEQ ID NO: 68715 - DNA, 60 bp, Artificial
  Synthetic oligonucleotide
tcagctggtgtggatggcatgccattctgctgcatttgaagatttaagattattaagctt

SEQ ID NO: 68716 - DNA, 60 bp, Artificial
  Synthetic oligonucleotide
tcagctggtgtggatggcatgccattctgctgcatttgaagatttaaggttgttaagctt

SEQ ID NO: 68717 - DNA, 60 bp, Artificial
  Synthetic oligonucleotide
tcagctggtgtggatggcatgccattctgctgcatttgaagatctaagattgttaagctt

SEQ ID NO: 68718 - DNA, 60 bp, Artificial
  Synthetic oligonucleotide
gatggcatgccattctgctgcatttgaagatttaagattgttaagcttcatcagagggac

SEQ ID NO: 68719 - DNA, 60 bp, Artificial
  Synthetic oligonucleotide
cagctggtgtggatggcatgccattctgctgcatttgaagatttaaggttgttaagcttc

SEQ ID NO: 68720 - DNA, 60 bp, Artificial
  Synthetic oligonucleotide
tcagctggtgtggatggcatgccattctgctgcatttgaagatttaagattgctaagctt

SEQ ID NO: 68721 - DNA, 60 bp, Artificial
  Synthetic oligonucleotide
cagctggtgtggatggcatgccattctgctgcatttgaagatctaagattgttaagcttc

SEQ ID NO: 68722 - DNA, 60 bp, Artificial
  Synthetic oligonucleotide
cagctggtgtggatggcatgccattctgctgcatttgaagatttaagattgctaagcttc

SEQ ID NO: 68723 - DNA, 60 bp, Artificial
  Synthetic oligonucleotide
cagctggtgtggatggcatgccattctgctgcatttgaagatttaagattattaagcttc

SEQ ID NO: 68724 - DNA, 60 bp, Artificial
  Synthetic oligonucleotide
gttcaagcatcagggagagtcacagtctctaccaggagaagtcagcagactataatcccg

SEQ ID NO: 68725 - DNA, 60 bp, Artificial
  Synthetic oligonucleotide
gaatctgatgaggcacttaaaatgaccatggcctccacacctgcttcgcgatacataact

SEQ ID NO: 68726 - DNA, 60 bp, Artificial
  Synthetic oligonucleotide
gtgacaaagacataatggattccaacactgtgtcaagtttccaggtagattgctttcttt

SEQ ID NO: 68727 - DNA, 59 bp, Artificial
  Synthetic oligonucleotide
cgaagagggagcaattgttggcgaaatctcaccattgccttcttttccaggacatacta

SEQ ID NO: 68728 - DNA, 60 bp, Artificial
  Synthetic oligonucleotide
tcgcttggagaagcagtaatgagaatgggggacctccacttactccaaaacagaaacgga

SEQ ID NO: 68729 - DNA, 60 bp, Artificial
  Synthetic oligonucleotide
gcgatggtggatcaagtgagagaaagtcggaacccaggaaatgctgagatcgaagatctc

SEQ ID NO: 68730 - DNA, 60 bp, Artificial
  Synthetic oligonucleotide
attcaaatgtgcactgaacttaaactcagtgattatgaagggcggttgatccagaacagc

SEQ ID NO: 68731 - DNA, 60 bp, Artificial
  Synthetic oligonucleotide
tcgggaagatgattgatggaattgggagattctacatccaaatgtgcactgaacttaaac

SEQ ID NO: 68732 - DNA, 60 bp, Artificial
  Synthetic oligonucleotide
tacatccaaatgtgcactgaacttaaactcagtgattatgaagggcggttgatccagaac

SEQ ID NO: 68733 - DNA, 60 bp, Artificial
  Synthetic oligonucleotide
gattgatggaattgggagattctacatccaaatgtgcactgaacttaaactcagtgatca

SEQ ID NO: 68734 - DNA, 60 bp, Artificial
  Synthetic oligonucleotide
aagatgattgatggaattgggagattctacatccaaatgtgcactgaacttaaactcagt

SEQ ID NO: 68735 - DNA, 60 bp, Artificial
  Synthetic oligonucleotide
gggcaatggtggatcaagtgagagaaagtcggaacccaggaaatgctgagatcgaagatc

SEQ ID NO: 68736 - DNA, 57 bp, Artificial
  Synthetic oligonucleotide
ctcaggtacatatggaacaggctcatggcctgatggggcggacatcaatctcatgcc

SEQ ID NO: 68737 - DNA, 60 bp, Artificial
  Synthetic oligonucleotide
ctcaggtacatatggaacaggctcatggcctgatggggcggacatcaatcttatgcctat

SEQ ID NO: 68738 - DNA, 54 bp, Artificial
  Synthetic oligonucleotide
ctcaggtacatatggaacaggctcatggcctgatggggcggacatcaatctcat

SEQ ID NO: 68739 - DNA, 58 bp, Artificial
  Synthetic oligonucleotide
ctcaggtacatatggaacaggctcatggcctgatggggcggacatcaatctcatgcct

SEQ ID NO: 68740 - DNA, 60 bp, Artificial
  Synthetic oligonucleotide
cggcctgaaaagagggccttctacggaaggagtgcctgagtctatgagggaagagtatcg

SEQ ID NO: 68741 - DNA, 58 bp, Artificial
  Synthetic oligonucleotide
agacgtgggacctttttgtggagcgaagcaatgctttcagcaactgttacccttatga

SEQ ID NO: 68742 - DNA, 60 bp, Artificial
  Synthetic oligonucleotide
aacaatcctcacaggatccttgatggaagggcctgcacattaatagatgctctactgggg

SEQ ID NO: 68743 - DNA, 60 bp, Artificial
  Synthetic oligonucleotide
ggacctgctaacggtttcttcagtagactgaactggttgactaaatcagaaagcgcatac

SEQ ID NO: 68744 - DNA, 60 bp, Artificial
  Synthetic oligonucleotide
atgcagtgccgaatgggacaatagtgaagacaatcacagatgatcagattgaggtgacta

SEQ ID NO: 68745 - DNA, 60 bp, Artificial
  Synthetic oligonucleotide
ggcatcaaaattctgagggtacaggacaagcagcagaccttaaaagcactcaggcagcca

SEQ ID NO: 68746 - DNA, 60 bp, Artificial
  Synthetic oligonucleotide
gcctggcagaataagcatctattggacaatagttaaacctggggacgtgctggtaatcaa

SEQ ID NO: 68747 - DNA, 60 bp, Artificial
  Synthetic oligonucleotide
tgccatatcatgccttttgctttgtgttgttttgctgggtttcattatgtgggcctgcca

SEQ ID NO: 68748 - DNA, 60 bp, Artificial
  Synthetic oligonucleotide
tgcaatagcaggttttatagaaaatggatgggagggaatgatagatggctggtatggctt

SEQ ID NO: 68749 - DNA, 60 bp, Artificial
  Synthetic oligonucleotide
ccagggaatgacaacagtacagcaacactgtgcctggggcaccatgcagtgccgaatggg

SEQ ID NO: 68750 - DNA, 60 bp, Artificial
  Synthetic oligonucleotide
gaaacgggacttatgatcatgatatatacagagacgaggcattgaacaaccggttccaga

SEQ ID NO: 68751 - DNA, 60 bp, Artificial
  Synthetic oligonucleotide
cagcagactataatcccgaatattggatctagaccctgggtaaggggccagcctggcaga

SEQ ID NO: 68752 - DNA, 60 bp, Artificial
  Synthetic oligonucleotide
agatctctggtcttacaatgcggaacttcttgttgccctagagaatcagcatacaatcga

SEQ ID NO: 68753 - DNA, 60 bp, Artificial
  Synthetic oligonucleotide
cagtaatggaaacctaatcgctcctcggggttacttcaagatgcgcactgggaaaagctc

SEQ ID NO: 68754 - DNA, 60 bp, Artificial
  Synthetic oligonucleotide
ccaatgacaagcccttccaaaatgtaaacaagatcacatacggagcatgtcccaagtatg

SEQ ID NO: 68755 - DNA, 60 bp, Artificial
  Synthetic oligonucleotide
gaggtgactaatgctactgagctagttcaaagctcctcaacagggaaaatatgcaacaat

SEQ ID NO: 68756 - DNA, 60 bp, Artificial
  Synthetic oligonucleotide
tatacagagatgaggcattgaacaaccggttccagatcaaaggtgttgagctgaagtcag

SEQ ID NO: 68757 - DNA, 60 bp, Artificial
  Synthetic oligonucleotide
ttgctcctcggggttatttcaaaatgcgcactgggaaaagctcaataatgaggtcagatg

SEQ ID NO: 68758 - DNA, 60 bp, Artificial
  Synthetic oligonucleotide
ctaatgctactgagctggttcagagttcctcaacaggtggaatatgcgacagtcctcatc

SEQ ID NO: 68759 - DNA, 60 bp, Artificial
  Synthetic oligonucleotide
actaatgctactgagctggttcagagttcctcaacaggtggaatatgcgacagtcctcat

SEQ ID NO: 68760 - DNA, 55 bp, Artificial
  Synthetic oligonucleotide
aggacttgaatggaatgataacacagttcgagtctctaagaatctacagagattc

SEQ ID NO: 68761 - DNA, 60 bp, Artificial
  Synthetic oligonucleotide
aggacttgaatggaatgataacacagttcgagtctctaaaaatctacagagattcgcttg

SEQ ID NO: 68762 - DNA, 60 bp, Artificial
  Synthetic oligonucleotide
gcaattggggtcctcatcggaggacttgagtggaatgataacacagttcgagtctctaaa

SEQ ID NO: 68763 - DNA, 60 bp, Artificial
  Synthetic oligonucleotide
aggacttgaatggaatgataacacagttcgagtctctaagaatctacagagattcgcttg

SEQ ID NO: 68764 - DNA, 60 bp, Artificial
  Synthetic oligonucleotide
ggtccagctcaagttgtcacgatggaaaagcatggttgcatgtttgtgtcactgggcatg

SEQ ID NO: 68765 - DNA, 60 bp, Artificial
  Synthetic oligonucleotide
tggagttttctctcactgatccgagacttgagccacataaatgggagaaatactgtgtcc

SEQ ID NO: 68766 - DNA, 60 bp, Artificial
  Synthetic oligonucleotide
ctctcactgacccgaggcttgagccacataaatgggagaaatactgtgtccttgagatag

SEQ ID NO: 68767 - DNA, 60 bp, Artificial
  Synthetic oligonucleotide
tgacagtgacgaacctgaattaaggtcactttcaagctggatacagaatgagttcaacaa

SEQ ID NO: 68768 - DNA, 60 bp, Artificial
  Synthetic oligonucleotide
gaggaattatttcacagcagaggtgtcccattgcagagccactgagtacataatgaaggg

SEQ ID NO: 68769 - DNA, 60 bp, Artificial
  Synthetic oligonucleotide
cgagatggaagattttgtgcgacaatgcttcaacccgatgattgtcgaacttgcagaaaa

SEQ ID NO: 68770 - DNA, 60 bp, Artificial
  Synthetic oligonucleotide
gattccaagaactaaaaacatgaagaaaacgagtcaactaaagtgggctcttggtgaaaa

SEQ ID NO: 68771 - DNA, 60 bp, Artificial
  Synthetic oligonucleotide
tcgagatggaagattttgtgcgacaatgcttcaacccgatgattgtcgaacttgcagaaa

SEQ ID NO: 68772 - DNA, 60 bp, Artificial
  Synthetic oligonucleotide
tggaattttctctcactgacccgagacttgagccacataaatgggagaaatactgtgtcc

SEQ ID NO: 68773 - DNA, 60 bp, Artificial
  Synthetic oligonucleotide
tggaattttctctcactgacccgagactagagccacataaatgggagaaatactgtgtcc

SEQ ID NO: 68774 - DNA, 60 bp, Artificial
  Synthetic oligonucleotide
ctcactgacccgagacttgagccacataaatgggagaaatactgtgtccttgagatagga

SEQ ID NO: 68775 - DNA, 60 bp, Artificial
  Synthetic oligonucleotide
aggaattatttcacagcagaggtgtcccattgcagagccactgagtacataatgaagggg

SEQ ID NO: 68776 - DNA, 60 bp, Artificial
  Synthetic oligonucleotide
ccccatgataagcaagtgcagaactaaagagggaaggcgaaaaaccaatttatatggatt

SEQ ID NO: 68777 - DNA, 60 bp, Artificial
  Synthetic oligonucleotide
catgataagcaagtgcagaactaaagagggaaggcgaaaaaccaatttatatggattcat

SEQ ID NO: 68778 - DNA, 60 bp, Artificial
  Synthetic oligonucleotide
tggagttttctctcactgacccgagactagagccacataaatgggagaaatactgtgtcc

SEQ ID NO: 68779 - DNA, 60 bp, Artificial
  Synthetic oligonucleotide
attcccaagaggaaccgctctattctcaacacaagccaaaggggaattcttgaggatgaa

SEQ ID NO: 68780 - DNA, 58 bp, Artificial
  Synthetic oligonucleotide
attcccaagaggaaccgctctattctcaacacaagccaaaggggaattcttgaggatg

SEQ ID NO: 68781 - DNA, 58 bp, Artificial
  Synthetic oligonucleotide
gctcaccgtgcccagtgagcgaggactgcagcgtagacgctttgtccaaaatgccctc

SEQ ID NO: 68782 - DNA, 57 bp, Artificial
  Synthetic oligonucleotide
gctcaccgtgcccagtgagcgaggactgcagcgtagacgctttgtccaaaatgccct

SEQ ID NO: 68783 - DNA, 60 bp, Artificial
  Synthetic oligonucleotide
atccggaaacaagttgtagaccaagaactgagtgatgccccattccttgatcggcttcgc

SEQ ID NO: 68784 - DNA, 60 bp, Artificial
  Synthetic oligonucleotide
ggcctttgacgatggaaatgacgtgtggatgggaagaacgattggcgaggagttacgctc

SEQ ID NO: 68785 - DNA, 60 bp, Artificial
  Synthetic oligonucleotide
ggcctttgacgatggaaatgacgtgtggatgggaagaacgatcggcgaggagttacgctc

SEQ ID NO: 68786 - DNA, 60 bp, Artificial
  Synthetic oligonucleotide
cggtgcttttatgtggagttgataaggggaaggaaagaggaaactgaagtctggtggacc

SEQ ID NO: 68787 - DNA, 60 bp, Artificial
  Synthetic oligonucleotide
ccataattaaaaagtacacatcggggagacaggaaaagaacccgtcacttaggatgaaat

SEQ ID NO: 68788 - DNA, 60 bp, Artificial
  Synthetic oligonucleotide
ccaggaggcaactgagggaaaatgctgaagacatgggcaatggttgtttcaagatatacc

SEQ ID NO: 68789 - DNA, 60 bp, Artificial
  Synthetic oligonucleotide
gaaaaaaccaggaggcaactgagggaaaatgctgaagacatgggcaatggttgtttcaag

SEQ ID NO: 68790 - DNA, 60 bp, Artificial
  Synthetic oligonucleotide
tgaggcacttaaaatgaccatggcctccacacctgcttcgcgatacataactgacatgac

SEQ ID NO: 68791 - DNA, 60 bp, Artificial
  Synthetic oligonucleotide
atgaggcacttaaaatgaccatggcctccacacctgcttcgcgatacataactgacatga

SEQ ID NO: 68792 - DNA, 55 bp, Artificial
  Synthetic oligonucleotide
cacttaaaatgaccatggcctccacacctgcttcgcgatacataactgacatgac

SEQ ID NO: 68793 - DNA, 60 bp, Artificial
  Synthetic oligonucleotide
ttgtttcaagatataccacaaatgtgacaatgcttgcatagagtcaattagaaacgggac

SEQ ID NO: 68794 - DNA, 60 bp, Artificial
  Synthetic oligonucleotide
attagaatggaccaggcaatcatggagaaaaacatcatgttgaaagcgaatttcagtgtg

SEQ ID NO: 68795 - DNA, 60 bp, Artificial
  Synthetic oligonucleotide
gtcagaatggaccaggcaatcatggagaaaaacatcatgttgaaagcgaatttcagtgtg

SEQ ID NO: 68796 - DNA, 60 bp, Artificial
  Synthetic oligonucleotide
aatggaacttatgaccatgatgtatacagagacgaagcattaaacaaccggttccagatc

SEQ ID NO: 68797 - DNA, 59 bp, Artificial
  Synthetic oligonucleotide
aaaagctcaataatgaggtcagatgcacctattggcacctgcagttctgaatgcatcac

SEQ ID NO: 68798 - DNA, 60 bp, Artificial
  Synthetic oligonucleotide
tgtgcatagcatggtccagctcaagttgtcacgatggaaaagcatggctgcatgtttgta

SEQ ID NO: 68799 - DNA, 60 bp, Artificial
  Synthetic oligonucleotide
aatgtgaggggatcagggatgagaatacttgtaaggggcaactctcctgtattcaactac

SEQ ID NO: 68800 - DNA, 60 bp, Artificial
  Synthetic oligonucleotide
gtgaggggatcagggatgagaatacttgtaaggggcaactctcctgtattcaactacaac

SEQ ID NO: 68801 - DNA, 60 bp, Artificial
  Synthetic oligonucleotide
gtacagagagggtggtggttagcattgatcggtttttgagagttcgagaccaacgtggga

SEQ ID NO: 68802 - DNA, 59 bp, Artificial
  Synthetic oligonucleotide
caagtgaccctcttgttgttgctgcgagcatcattgggatcttgcacttgatattgtgg

SEQ ID NO: 68803 - DNA, 60 bp, Artificial
  Synthetic oligonucleotide
ggaacaggctcatggcctgatggggcggacatcaatctcatgcctatataagctttcgca

SEQ ID NO: 68804 - DNA, 60 bp, Artificial
  Synthetic oligonucleotide
atggaatggctaaagacaagaccaatcctgtcacctctgactaaggggattttgggattt

SEQ ID NO: 68805 - DNA, 60 bp, Artificial
  Synthetic oligonucleotide
gcctgcatagggtcaatcagaaatggaacttatgaccatgatgtatacagagatgaggca

SEQ ID NO: 68806 - DNA, 60 bp, Artificial
  Synthetic oligonucleotide
gcctgcatagggtcaatcagaaatggaacttatgaccatgatgtatacagagatgaagca

SEQ ID NO: 68807 - DNA, 60 bp, Artificial
  Synthetic oligonucleotide
atgcctcccttaggtcactagttgcctcatccggcacactggagtttaacaatgaaagct

SEQ ID NO: 68808 - DNA, 60 bp, Artificial
  Synthetic oligonucleotide
ggcattaaacaaccggttccagatcaaaggtgttgagctgaagtcaggatacaaagactg

SEQ ID NO: 68809 - DNA, 60 bp, Artificial
  Synthetic oligonucleotide
gtacagagatgaagcattaaacaaccggttccagatcaaaggtgttgagctgaagtcagg

SEQ ID NO: 68810 - DNA, 60 bp, Artificial
  Synthetic oligonucleotide
tgacaatgtctgcatagggtcaatcagaaatggaacttatgaccatgatgtatacagaga

SEQ ID NO: 68811 - DNA, 60 bp, Artificial
  Synthetic oligonucleotide
aactgttacccttatgatgtgccggattatgcctcccttaggtcactagttgcctcatcc

SEQ ID NO: 68812 - DNA, 60 bp, Artificial
  Synthetic oligonucleotide
taacaatgcctgcatagggtcaatcagaaatggaacttatgaccatgatgtatacagaga

SEQ ID NO: 68813 - DNA, 60 bp, Artificial
  Synthetic oligonucleotide
ctgatgaggcacttaagatgaccatggcctccacacctgcttcgcgatacataactgaca

SEQ ID NO: 68814 - DNA, 60 bp, Artificial
  Synthetic oligonucleotide
acaagacataatggattccaacactgtgtcaagtttccaggtagattgctttctttggca

SEQ ID NO: 68815 - DNA, 60 bp, Artificial
  Synthetic oligonucleotide
cttgtcgccctggagaaccaacatacaattgatctgactgactcagaaatgaacaaactg

SEQ ID NO: 68816 - DNA, 60 bp, Artificial
  Synthetic oligonucleotide
tctctgttgaaggcaaaagctgtatcaatcggtgcttttatgtggagttgataaggggaa

SEQ ID NO: 68817 - DNA, 60 bp, Artificial
  Synthetic oligonucleotide
gcaagcattacaactgctgtttgaagtggaacaggagataagaactttctcatgtcagct

SEQ ID NO: 68818 - DNA, 60 bp, Artificial
  Synthetic oligonucleotide
tgcaagcattacaactgctgtttgaagtggaacaggagataagaactttctcatgtcagc

SEQ ID NO: 68819 - DNA, 60 bp, Artificial
  Synthetic oligonucleotide
atgttttttgctttgtgttgttttgctggggttcatcatgtgggcctgccaaaaaggcaa

SEQ ID NO: 68820 - DNA, 60 bp, Artificial
  Synthetic oligonucleotide
ttacccttatgatgtgccggattatgcctcccttaggtcactagttgcctcatccggcac

SEQ ID NO: 68821 - DNA, 60 bp, Artificial
  Synthetic oligonucleotide
ccttatgatgtgccggattatgcctcccttaggtcactagttgcctcatccggcacactg

SEQ ID NO: 68822 - DNA, 60 bp, Artificial
  Synthetic oligonucleotide
ccttatgatgtgccggattatgcctcccttaggtcactagttgcctcatccggcacacta

SEQ ID NO: 68823 - DNA, 60 bp, Artificial
  Synthetic oligonucleotide
cttatgatgtgccggattatgcctcccttaggtcactagttgcctcatccggcacactgg

SEQ ID NO: 68824 - DNA, 60 bp, Artificial
  Synthetic oligonucleotide
gttacccttatgatgtgccggattatgcctcccttaggtcactagttgcctcatccggca

SEQ ID NO: 68825 - DNA, 60 bp, Artificial
  Synthetic oligonucleotide
tgttacccttatgatgtgccggattatgcctcccttaggtcactagttgcctcatccggc

SEQ ID NO: 68826 - DNA, 60 bp, Artificial
  Synthetic oligonucleotide
ggattatagcattgtttccagttatgtgtgctcgggacttgttggagacacacccagaaa

SEQ ID NO: 68827 - DNA, 60 bp, Artificial
  Synthetic oligonucleotide
acctgtatgttcaagcatcagggagagtcacagtctctaccaggagaagtcagcagacta

SEQ ID NO: 68828 - DNA, 60 bp, Artificial
  Synthetic oligonucleotide
tggtgcacttgccagttgcatgggcctcatatacaacagaatggggactgtgaccactga

SEQ ID NO: 68829 - DNA, 60 bp, Artificial
  Synthetic oligonucleotide
cctcggggttactacaaaatgcgcactgggaaaagctcaataatgaggtcagatgcacct

SEQ ID NO: 68830 - DNA, 60 bp, Artificial
  Synthetic oligonucleotide
cctcggggttatttcaaaatgcgcactgggaaaagctcaataatgaggtcagatgcacct

SEQ ID NO: 68831 - DNA, 60 bp, Artificial
  Synthetic oligonucleotide
atgaagactatcattgctttgagctacattctctgtctgactttcggacaggacctccca

SEQ ID NO: 68832 - DNA, 60 bp, Artificial
  Synthetic oligonucleotide
gcctatatgctcaagcatcagggagagtcacagtctctaccaaaagaagccaacaaactg

SEQ ID NO: 68833 - DNA, 60 bp, Artificial
  Synthetic oligonucleotide
gagatgaggcattgaacaaccggttccagatcaaaggtgttgagctgaagtcaggataca

SEQ ID NO: 68834 - DNA, 53 bp, Artificial
  Synthetic oligonucleotide
gcaattggggtcctcatcggaggacttgaatggaatgataacacagttcgagt

SEQ ID NO: 68835 - DNA, 60 bp, Artificial
  Synthetic oligonucleotide
aatggaacttatgaccatgatgtatacagagacgaggcattaaacaaccggttccagatc

SEQ ID NO: 68836 - DNA, 60 bp, Artificial
  Synthetic oligonucleotide
ggtccagctcaagttgtcacgatggaaaagcatggctgcatgtttgtgtaactgggcacg

SEQ ID NO: 68837 - DNA, 60 bp, Artificial
  Synthetic oligonucleotide
tatcctcaggacccaggagtcagaatgcgtttgtatcaatggaacttgtacagtagtaat

SEQ ID NO: 68838 - DNA, 54 bp, Artificial
  Synthetic oligonucleotide
tatagcattgtttccagttatgtgtgctcagggcttgttggcgacacacccaga

SEQ ID NO: 68839 - DNA, 60 bp, Artificial
  Synthetic oligonucleotide
gggacaggctcatggcctgatggggcggacatcaatctcatgcctatataagctttcgca

SEQ ID NO: 68840 - DNA, 55 bp, Artificial
  Synthetic oligonucleotide
cccaagaggaaccgttctattctcaacacaagccaaaggggaattcttgaggatg

SEQ ID NO: 68841 - DNA, 60 bp, Artificial
  Synthetic oligonucleotide
aggagttcacaatggtggggaaaagagcaacagctatactcagaaaagcaaccagaagat

SEQ ID NO: 68842 - DNA, 60 bp, Artificial
  Synthetic oligonucleotide
aggagttcacaatggtggggaaaagagcaacagctatactcagaaaagcaaccaggagac

SEQ ID NO: 68843 - DNA, 60 bp, Artificial
  Synthetic oligonucleotide
aggagtttacaatggtggggaaaagagcaacagctatactcagaaaagcaaccaggagat

SEQ ID NO: 68844 - DNA, 60 bp, Artificial
  Synthetic oligonucleotide
atatgctcaagcatcagggagagtcacagtctctaccaaaagaagccaacaaactgtaat

SEQ ID NO: 68845 - DNA, 60 bp, Artificial
  Synthetic oligonucleotide
tttgggatttgtattcacgctcaccgtgcccagtgagcgaggactgcagcgtagacgctt

SEQ ID NO: 68846 - DNA, 60 bp, Artificial
  Synthetic oligonucleotide
ggaagaggcaacactctcggtctagacatcaaagcagccacccatgttggaaagcagata

SEQ ID NO: 68847 - DNA, 54 bp, Artificial
  Synthetic oligonucleotide
ggaagaggcaacactctcggtctagacatcaaagcagccacccatgttggtaag

SEQ ID NO: 68848 - DNA, 60 bp, Artificial
  Synthetic oligonucleotide
ggggccaaagaaatagcactcagttattctgctggtgcacttgccagttgcatgggcctt

SEQ ID NO: 68849 - DNA, 60 bp, Artificial
  Synthetic oligonucleotide
cgaagtggcatttggcctggtatgtgcaacatgtgaacagattgctgactcccagcacag

SEQ ID NO: 68850 - DNA, 60 bp, Artificial
  Synthetic oligonucleotide
gtagacgctttgtccaaaatgccctcaatgggaatggagatccaaataacatggacaaag

SEQ ID NO: 68851 - DNA, 60 bp, Artificial
  Synthetic oligonucleotide
gtagacgctttgtccaaaatgccctcaatgggaatggggatccaaataacatggacagag

SEQ ID NO: 68852 - DNA, 60 bp, Artificial
  Synthetic oligonucleotide
tagacgctttgtccaaaatgccctcaatgggaatggagatccaaataacatggacaaagc

SEQ ID NO: 68853 - DNA, 60 bp, Artificial
  Synthetic oligonucleotide
gacgctttgtccaaaatgccctcaatgggaatggggatccaaataacatggacaaagcag

SEQ ID NO: 68854 - DNA, 60 bp, Artificial
  Synthetic oligonucleotide
gacgctttgtccaaaatgccctcaatgggaatggggatccaaataacatggacagagcag

SEQ ID NO: 68855 - DNA, 60 bp, Artificial
  Synthetic oligonucleotide
taacattccatggggccaaagaaatagcactcagttattctgctggtgcacttgccagtt

SEQ ID NO: 68856 - DNA, 60 bp, Artificial
  Synthetic oligonucleotide
ccatggggccaaagaaatagcactcagttattctgctggtgcacttgccagttgcatggg

SEQ ID NO: 68857 - DNA, 58 bp, Artificial
  Synthetic oligonucleotide
cagcgtagacgctttgtccaaaatgccctcaatgggaatggggatccaaataacatgg

SEQ ID NO: 68858 - DNA, 60 bp, Artificial
  Synthetic oligonucleotide
cagcgtagacgctttgtccaaaatgccctcaatgggaatggggatccgaataacatggac

SEQ ID NO: 68859 - DNA, 60 bp, Artificial
  Synthetic oligonucleotide
ggcctttggcctggtatgtgcgacatgtgaacagattgctgactcccagcacaggtctca

SEQ ID NO: 68860 - DNA, 60 bp, Artificial
  Synthetic oligonucleotide
ggcctttggcctggtatgtgcaacatgtgaacagattgctgactcccagcacaggtctca

SEQ ID NO: 68861 - DNA, 60 bp, Artificial
  Synthetic oligonucleotide
ggcatttggcctggtatgtgcaacatgtgaacagattgctgactcccagcacaggtctca

SEQ ID NO: 68862 - DNA, 60 bp, Artificial
  Synthetic oligonucleotide
catttggcctggtatgtgcaacatgtgaacagattgctgactcccagcacaggtctcata

SEQ ID NO: 68863 - DNA, 60 bp, Artificial
  Synthetic oligonucleotide
gcatttggcctggtatgtgcaacatgtgaacagattgctgactcccagcacaggtctcat

SEQ ID NO: 68864 - DNA, 60 bp, Artificial
  Synthetic oligonucleotide
ggtctggtatgtgcaacatgtgaacagattgctgactcccagcacaggtctcataggcaa

SEQ ID NO: 68865 - DNA, 60 bp, Artificial
  Synthetic oligonucleotide
gaaaatttgcagacctatcagaaacgaatgggggtgcagatgcaacgattcaagtgaccc

SEQ ID NO: 68866 - DNA, 60 bp, Artificial
  Synthetic oligonucleotide
cgtagacgctttgtccaaaatgccctcaatgggaatggagatccaaataacatggacaaa

SEQ ID NO: 68867 - DNA, 58 bp, Artificial
  Synthetic oligonucleotide
atatcctggtatcagatgtgtctgcagagacaactggaaaggctccaataggcccatc

SEQ ID NO: 68868 - DNA, 53 bp, Artificial
  Synthetic oligonucleotide
aagttgtcatgatggaaaagcatggctgcatgtttgtgtaacgggggatgata

SEQ ID NO: 68869 - DNA, 60 bp, Artificial
  Synthetic oligonucleotide
caacactaaacaacgggcattcaaatgacacagtacatgataggaccccttatcgaaccc

SEQ ID NO: 68870 - DNA, 60 bp, Artificial
  Synthetic oligonucleotide
actaaacaacaggcattcaaatgacacagtacatgataggaccccttatcgaaccctctt

SEQ ID NO: 68871 - DNA, 60 bp, Artificial
  Synthetic oligonucleotide
gaggagtgctcctgctatcctcgatatcctggtgtcagatgtgtctgcagagacaactgg

SEQ ID NO: 68872 - DNA, 60 bp, Artificial
  Synthetic oligonucleotide
caacactaaacaacaggcattcaaatgacacagtacatgataggaccccttatcgaaccc

SEQ ID NO: 68873 - DNA, 60 bp, Artificial
  Synthetic oligonucleotide
caacactaaacaacgtgcattcaaatgacacagtacatgataggaccccttatcggaccc

SEQ ID NO: 68874 - DNA, 60 bp, Artificial
  Synthetic oligonucleotide
acaacactaaacaacgggcattcaaatgacacagtacatgataggaccccttatcgaacc

SEQ ID NO: 68875 - DNA, 60 bp, Artificial
  Synthetic oligonucleotide
acaacactaaacaacgtgcattcaaatgacacagtacatgataggaccccttatcggacc

SEQ ID NO: 68876 - DNA, 60 bp, Artificial
  Synthetic oligonucleotide
acaacactaaacaacgtgcattcaaatgacacagtacatgataggaccccttatcggaca

SEQ ID NO: 68877 - DNA, 60 bp, Artificial
  Synthetic oligonucleotide
acaacactaaacaacaggcattcaaatgacacagtacatgataggaccccttatcgaacc

SEQ ID NO: 68878 - DNA, 60 bp, Artificial
  Synthetic oligonucleotide
cccagatatattaagcaaaacactctgaaattggcaacagggatgcggaatgtaccagag

SEQ ID NO: 68879 - DNA, 60 bp, Artificial
  Synthetic oligonucleotide
ggagccaaagaaatagctctcagttattctgctggtgcacttgccagttgcatgggcctc

SEQ ID NO: 68880 - DNA, 60 bp, Artificial
  Synthetic oligonucleotide
gtgatctttaaccgactagagaacatagtattactaagggctttcaccgaagagggagca

SEQ ID NO: 68881 - DNA, 52 bp, Artificial
  Synthetic oligonucleotide
gaccctagtattactaagggctttcaccgaagagggagcaattgttggcgaa

SEQ ID NO: 68882 - DNA, 60 bp, Artificial
  Synthetic oligonucleotide
agtgtgatctttgaccgactagagaccctagtattactaagggctttcaccgaagaggga

SEQ ID NO: 68883 - DNA, 60 bp, Artificial
  Synthetic oligonucleotide
cctcgaacccgggacctttgatcttggggggctatatgaagcaattgaggagtgcctgat

SEQ ID NO: 68884 - DNA, 60 bp, Artificial
  Synthetic oligonucleotide
cctcgaacctgggacctttgatctaggggggctatatgaagcaattgaggagtgcctgat

SEQ ID NO: 68885 - DNA, 60 bp, Artificial
  Synthetic oligonucleotide
cctcgaacctggaacctttgatcttggggggctatatgaagcaattgaggagtgcctgat

SEQ ID NO: 68886 - DNA, 60 bp, Artificial
  Synthetic oligonucleotide
tctcgaacctgggacctttgatctcggggggctatatgaagcaattgaggagtgcctgat

SEQ ID NO: 68887 - DNA, 50 bp, Artificial
  Synthetic oligonucleotide
gttcctgttatcctcgatatcctggtgtcagatgtgtctgcagagacaac

SEQ ID NO: 68888 - DNA, 50 bp, Artificial
  Synthetic oligonucleotide
gctcctgttatcctcgatatcctggtgtcagatgtgtctgcagagacaac

SEQ ID NO: 68889 - DNA, 59 bp, Artificial
  Synthetic oligonucleotide
aaaagctcaataatgaggtcagatgcacctattggcacctgcagctctgaatgcatcac

SEQ ID NO: 68890 - DNA, 59 bp, Artificial
  Synthetic oligonucleotide
aaaagctcaataatgaggtcagatgcacctattggcacctgcagttctggatgcatcac

SEQ ID NO: 68891 - DNA, 60 bp, Artificial
  Synthetic oligonucleotide
cgcactgggaaaagctcaataatgaggtcagatgcacctattgacacctgtatctctgag

SEQ ID NO: 68892 - DNA, 60 bp, Artificial
  Synthetic oligonucleotide
cgactcttcaaacacggcctgaaaagagggccttctacggaaggagtgcctgagtctatg

SEQ ID NO: 68893 - DNA, 50 bp, Artificial
  Synthetic oligonucleotide
aaatgccataagcaccacattcccttatactggagatcctccatacagcc

SEQ ID NO: 68894 - DNA, 60 bp, Artificial
  Synthetic oligonucleotide
ggattatgcctcccttaggtcactagttgcctcatccggcacactggaatttaacaatga

SEQ ID NO: 68895 - DNA, 60 bp, Artificial
  Synthetic oligonucleotide
gtgccggattatgcctcccttaggtcactagttgcctcatccggcacactagagtttaac

SEQ ID NO: 68896 - DNA, 60 bp, Artificial
  Synthetic oligonucleotide
agtctctaaaaatctacagagattcgcttggggaagcagtaatgagaatgggggacctcc

SEQ ID NO: 68897 - DNA, 60 bp, Artificial
  Synthetic oligonucleotide
gattggacattaaacagaaatcaaccggcagcaactgcattagccaacaccatagaagtt

SEQ ID NO: 68898 - DNA, 60 bp, Artificial
  Synthetic oligonucleotide
gctttctttggcatgtccgaaaacaagttgtagaccaagaactgagtgatgccccattcc

SEQ ID NO: 68899 - DNA, 60 bp, Artificial
  Synthetic oligonucleotide
ccaggtagattgctttctttggcatgtccgaaaacaagttgtagaccaagaactgagtga

SEQ ID NO: 68900 - DNA, 60 bp, Artificial
  Synthetic oligonucleotide
ggcagaacccgacggaagaacaagctgtggatatatgcaaggctgcaatggggttgagaa

SEQ ID NO: 68901 - DNA, 60 bp, Artificial
  Synthetic oligonucleotide
ggtggacattcttaggcagaaccctacggaagaacaagctgtggatatatgcaaggctgc

SEQ ID NO: 68902 - DNA, 60 bp, Artificial
  Synthetic oligonucleotide
catccgtcgggaagatgattgatggaattgggagattctacatccaaatgtgtactgaac

SEQ ID NO: 68903 - DNA, 60 bp, Artificial
  Synthetic oligonucleotide
catccgtcgggaagatgattgatggaattgggagattctacatccaaatgtgcactgaac

SEQ ID NO: 68904 - DNA, 60 bp, Artificial
  Synthetic oligonucleotide
gcatccgtcgggaagatgattgatggaattgggagattctacatccaaatgtgcactgaa

SEQ ID NO: 68905 - DNA, 60 bp, Artificial
  Synthetic oligonucleotide
gcatccgtcgggaagatgattgatggaattgggagattctacatccaaatgtgtactgaa

SEQ ID NO: 68906 - DNA, 60 bp, Artificial
  Synthetic oligonucleotide
gggcatccgtcgggaagatgattgatggaattgggagattctacatccaaatgtgcactg

SEQ ID NO: 68907 - DNA, 60 bp, Artificial
  Synthetic oligonucleotide
gggcatccgtcgggaagatgattgatggaattgggagattctacatccaaatgtgtactg

SEQ ID NO: 68908 - DNA, 60 bp, Artificial
  Synthetic oligonucleotide
agattagggcatccgtcgggaagatgattgatggaattgggagattctacatccaaatgt

SEQ ID NO: 68909 - DNA, 60 bp, Artificial
  Synthetic oligonucleotide
tagggcatccgtcgggaagatgattgatggaattgggagattctacatccaaatgtgcac

SEQ ID NO: 68910 - DNA, 60 bp, Artificial
  Synthetic oligonucleotide
ccaggtggagaagtgaggaatgacgatgttgaccaaagcctaattattgcagccaggaac

SEQ ID NO: 68911 - DNA, 60 bp, Artificial
  Synthetic oligonucleotide
ccaggtggagaagtgaggaatgacgatgttgaccaaagcctaattattgcggccaggaac

SEQ ID NO: 68912 - DNA, 60 bp, Artificial
  Synthetic oligonucleotide
aacactctgaaattggcaacagggatgcggaatgtaccagagaaacaaactagaggcata

SEQ ID NO: 68913 - DNA, 60 bp, Artificial
  Synthetic oligonucleotide
gcaagcattacaactgctgtttgaagtggaacaggagataagaacttccaaatttcagct

SEQ ID NO: 68914 - DNA, 60 bp, Artificial
  Synthetic oligonucleotide
gcaagcattacaactgctgtttgaagtggaacaggagataagaactttctcttttcagct

SEQ ID NO: 68915 - DNA, 56 bp, Artificial
  Synthetic oligonucleotide
tgcaagcattacaactgctgtttgaagtggaacaggagataagaactttctccttt

SEQ ID NO: 68916 - DNA, 60 bp, Artificial
  Synthetic oligonucleotide
tgcaagcattacaactgctgtttgaagtggaacaggagataagaactttctcctttcagc

SEQ ID NO: 68917 - DNA, 60 bp, Artificial
  Synthetic oligonucleotide
tgcaagcattacaactgctgtttgaagtggaacaggagataagaactttctcttttcagc

SEQ ID NO: 68918 - DNA, 60 bp, Artificial
  Synthetic oligonucleotide
atcagaatggaccaggcaatcatggagaaaaacatcatattgaaagcgaatttcagtgtg

SEQ ID NO: 68919 - DNA, 60 bp, Artificial
  Synthetic oligonucleotide
atcagaatggaccaggcaatcatggagaaaaacatcatgctgaaagcgaatttcagtgtg

SEQ ID NO: 68920 - DNA, 60 bp, Artificial
  Synthetic oligonucleotide
aatgcaccaaatcatgagggaatacaagcaggagtggatagattctaccggacctgcaag

SEQ ID NO: 68921 - DNA, 60 bp, Artificial
  Synthetic oligonucleotide
aaatcatgagggaatacaagcaggagtggatagattctacaggacctgcaagttagtggg

SEQ ID NO: 68922 - DNA, 60 bp, Artificial
  Synthetic oligonucleotide
aatgcaccaaatcatgagggaatacaagcaggagtggatagattttacaggacctgcaag

SEQ ID NO: 68923 - DNA, 60 bp, Artificial
  Synthetic oligonucleotide
aatgcaccaaatcatgagggaatacaagcaggagtggataaattctacaggacctgcaag

SEQ ID NO: 68924 - DNA, 60 bp, Artificial
  Synthetic oligonucleotide
cagagacttgaagatgtctttgctgggaaaaacacagatcttgaggctctcatggaatgg

SEQ ID NO: 68925 - DNA, 60 bp, Artificial
  Synthetic oligonucleotide
gagacttgaggatgtctttgctgggaaaaacacagatcttgaggctctcatggaatggct

SEQ ID NO: 68926 - DNA, 60 bp, Artificial
  Synthetic oligonucleotide
agagacttgaagatgtctttgctgggaaaaacacagatcttgaggctctcatggaatggc

SEQ ID NO: 68927 - DNA, 60 bp, Artificial
  Synthetic oligonucleotide
ggtcgccagacttatgattggacattaaacagaaatcaaccggcagcaactgcattagcc

SEQ ID NO: 68928 - DNA, 60 bp, Artificial
  Synthetic oligonucleotide
aactaactcaaggtcgccagacttatgattggacattaaacagaaatcaaccggcagcaa

SEQ ID NO: 68929 - DNA, 60 bp, Artificial
  Synthetic oligonucleotide
caaactaacccaaggtcgccagacttatgattggacattaaacagaaatcaaccggcagc

SEQ ID NO: 68930 - DNA, 53 bp, Artificial
  Synthetic oligonucleotide
aagttgtcacgatggaaaagcatggctgcatgtttgtgtaacgggggatgata

SEQ ID NO: 68931 - DNA, 60 bp, Artificial
  Synthetic oligonucleotide
atgcgcactgggaaaagctcaataatgaggtcagatgcacctattgacacctgtatctct

SEQ ID NO: 68932 - DNA, 60 bp, Artificial
  Synthetic oligonucleotide
ctatatgttcgagcatcagggagagtcacagtctctaccaaaagaagccagcaaactgta

SEQ ID NO: 68933 - DNA, 59 bp, Artificial
  Synthetic oligonucleotide
tgggtttcattatgtgggcctgccagagaggcaacattaggtgcaacatttgcatttga

SEQ ID NO: 68934 - DNA, 59 bp, Artificial
  Synthetic oligonucleotide
ttggggttcatcatgtgggcctgccaaaaaggcaacattaggtgcaacatttgcatttg

SEQ ID NO: 68935 - DNA, 60 bp, Artificial
  Synthetic oligonucleotide
aagcctacagcaactgttacccttatgatgtgccggattatgcctcccttaggtcactag

SEQ ID NO: 68936 - DNA, 60 bp, Artificial
  Synthetic oligonucleotide
agcctacagcaactgttacccttatgatgtgccggattatgcctcccttaggtcactagt

SEQ ID NO: 68937 - DNA, 60 bp, Artificial
  Synthetic oligonucleotide
ctaatgctactgagctggttcagagttcctcaacaggtagaatatgcgacagtcctcacc

SEQ ID NO: 68938 - DNA, 60 bp, Artificial
  Synthetic oligonucleotide
aatgctactgagctggttcagagttcctcaacaggtagaatatgcgacagtcctcaccga

SEQ ID NO: 68939 - DNA, 60 bp, Artificial
  Synthetic oligonucleotide
ctgaaattggcaacagggatgcggaatgtaccagagaaacaaactagaggcatattcggc

SEQ ID NO: 68940 - DNA, 60 bp, Artificial
  Synthetic oligonucleotide
acaagaccaatcctgtcacctctgactaaggggattttgggatttgtattcacgctcacc

SEQ ID NO: 68941 - DNA, 60 bp, Artificial
  Synthetic oligonucleotide
gattcgcttggagaagcagtaatgagaatgggggacctccacttactccaaaacagaaac

SEQ ID NO: 68942 - DNA, 60 bp, Artificial
  Synthetic oligonucleotide
gaatgttcctggcgatgattacatatatcacaaaaaatcaacctgagtggttcagaaaca

SEQ ID NO: 68943 - DNA, 60 bp, Artificial
  Synthetic oligonucleotide
tcgaatgttcttggcgatgattacatatatcacaaaaaatcaacctgagtggttcagaaa

SEQ ID NO: 68944 - DNA, 60 bp, Artificial
  Synthetic oligonucleotide
ccctcgaatgttcttggcgatgattacatatatcacaaaaaatcaacctgagtggttcag

SEQ ID NO: 68945 - DNA, 60 bp, Artificial
  Synthetic oligonucleotide
gccctggagaaccaacatacaattgatctaactgactcagaaatgaacaaactgtttgaa

SEQ ID NO: 68946 - DNA, 60 bp, Artificial
  Synthetic oligonucleotide
ttgttgccctggagaaccaacatacaattgatctaactgactcagaaatgaacaaactgt

SEQ ID NO: 68947 - DNA, 60 bp, Artificial
  Synthetic oligonucleotide
ggtcatacaacgcggagcttcttgttgccctggagaaccaacatacaattgatctaactg

SEQ ID NO: 68948 - DNA, 60 bp, Artificial
  Synthetic oligonucleotide
ttcttgttgccctggagaaccaacatacaattgatctaactgactcagaaatgaacaaac

SEQ ID NO: 68949 - DNA, 60 bp, Artificial
  Synthetic oligonucleotide
ggtcgtacaacgcggagcttcttgttgccctggagaaccaacatacaattgatctaactg

SEQ ID NO: 68950 - DNA, 60 bp, Artificial
  Synthetic oligonucleotide
gaagaggcaatactctcggtctagacatcaaagcagccacccatgttggaaagcaaattg

SEQ ID NO: 68951 - DNA, 60 bp, Artificial
  Synthetic oligonucleotide
gaggaagaggcaatactctcggtctagacatcaaagcagccacccatgttggaaagcaaa

SEQ ID NO: 68952 - DNA, 60 bp, Artificial
  Synthetic oligonucleotide
aggaagaggcaatactctcggtctagacatcaaagcagccacccatgttggaaagcaaat

SEQ ID NO: 68953 - DNA, 60 bp, Artificial
  Synthetic oligonucleotide
tgtgcaacctgtgaacagattgctgactcccagcacaggtctcataggcaaatggtggca

SEQ ID NO: 68954 - DNA, 60 bp, Artificial
  Synthetic oligonucleotide
catgtgaacagattgctgactcccagcacaggtctcataggcaaatggtggcaacaacca

SEQ ID NO: 68955 - DNA, 53 bp, Artificial
  Synthetic oligonucleotide
gctcaccgtgcccagtgagcgaggactgcagcgtagacgttttgtccaaaatg

SEQ ID NO: 68956 - DNA, 60 bp, Artificial
  Synthetic oligonucleotide
caagaactaaaaacatgaagaaaacgagtcaactaaagtgggcacttggtgagaacatgg

SEQ ID NO: 68957 - DNA, 60 bp, Artificial
  Synthetic oligonucleotide
ttctctgttgaaggcaaaagctgcatcaatcggtgcttttatgtggagttgataagggga

SEQ ID NO: 68958 - DNA, 59 bp, Artificial
  Synthetic oligonucleotide
tctctgttgagggcaaaagctgcatcaatcggtgcttttatgtggagttgataagggga

SEQ ID NO: 68959 - DNA, 60 bp, Artificial
  Synthetic oligonucleotide
ccagttgctggcggaacaagcagtatatacattgaagttttacatttgactcaaggaacg

SEQ ID NO: 68960 - DNA, 60 bp, Artificial
  Synthetic oligonucleotide
cgtagccatggtgttttcacaagaggattgcatgataaaagcagttagaggtgacctgaa

SEQ ID NO: 68961 - DNA, 60 bp, Artificial
  Synthetic oligonucleotide
tcccagttgctggcggaacaagcagtatatacattgaagttttacatttgactcaaggaa

SEQ ID NO: 68962 - DNA, 60 bp, Artificial
  Synthetic oligonucleotide
gttgcaggcggaacaagcagtatatacattgaagttttacatttgactcaaggaacgtgt

SEQ ID NO: 68963 - DNA, 60 bp, Artificial
  Synthetic oligonucleotide
tgtgcatggcatggtccagctcaagctgtcacgatggaaaagcatggctgcatgtttgtg

SEQ ID NO: 68964 - DNA, 60 bp, Artificial
  Synthetic oligonucleotide
gtgccggattatgcctcccttaggtcactagttgcctcatccggcacactggagtttaac

SEQ ID NO: 68965 - DNA, 60 bp, Artificial
  Synthetic oligonucleotide
gccggattatgcctcccttaggtcactagttgcctcatccggcacactggagtttaacaa

SEQ ID NO: 68966 - DNA, 60 bp, Artificial
  Synthetic oligonucleotide
gatgtgccggattatgcctcccttaggtcactagttgcctcatccggcacactggagttt

SEQ ID NO: 68967 - DNA, 60 bp, Artificial
  Synthetic oligonucleotide
atgatgtgccggattatgcctcccttaggtcactagttgcctcatccggcacactggagt

SEQ ID NO: 68968 - DNA, 60 bp, Artificial
  Synthetic oligonucleotide
tgccggattatgcctcccttaggtcactagttgcctcatccggcacactggagtttaaca

SEQ ID NO: 68969 - DNA, 60 bp, Artificial
  Synthetic oligonucleotide
tgtgccggattatgcctcccttaggtcactagttgcctcatccggcacactggagtttaa

SEQ ID NO: 68970 - DNA, 60 bp, Artificial
  Synthetic oligonucleotide
gattatgcctcccttaggtcactagttgcctcatccggcacactggagtttaacaatgaa

SEQ ID NO: 68971 - DNA, 60 bp, Artificial
  Synthetic oligonucleotide
tgaggcacttaaaatgaccatagtctccacacctgcttcgcgatacataactgacatgac

SEQ ID NO: 68972 - DNA, 60 bp, Artificial
  Synthetic oligonucleotide
ttgattaacagcacagggaatctaattgctcctcggggttacttcaaaatacgaagtggg

SEQ ID NO: 68973 - DNA, 52 bp, Artificial
  Synthetic oligonucleotide
gggttacttcaaaatacgaagtgggaaaagctcaataatgaggtcagatgca

SEQ ID NO: 68974 - DNA, 60 bp, Artificial
  Synthetic oligonucleotide
cagggaatctaattgctcctcggggttacttcaaaatacgaagtgggaaaagctcaataa

SEQ ID NO: 68975 - DNA, 60 bp, Artificial
  Synthetic oligonucleotide
gcacagggaatctaattgctcctcggggttacttcaaaatacgaagtgggaaaagctcaa

SEQ ID NO: 68976 - DNA, 60 bp, Artificial
  Synthetic oligonucleotide
acagggaatctaattgctcctcggggttacttcaaaatacgaagtgggaaaagctcagta

SEQ ID NO: 68977 - DNA, 60 bp, Artificial
  Synthetic oligonucleotide
tattggacaatagtaaaaccgggagacatacttttgattaacagcacagggaatctaatt

SEQ ID NO: 68978 - DNA, 60 bp, Artificial
  Synthetic oligonucleotide
ggaatctaattgctcctcggggttacttcaaaatacgaagtgggaaaagctcaataatga

SEQ ID NO: 68979 - DNA, 60 bp, Artificial
  Synthetic oligonucleotide
agtaaaaccgggagacatacttttgattaacagcacagggaatctaattgctcctcgggg

SEQ ID NO: 68980 - DNA, 60 bp, Artificial
  Synthetic oligonucleotide
aaaccgggagacatacttttgattaacagcacagggaatctaattgctcctcggggttac

SEQ ID NO: 68981 - DNA, 60 bp, Artificial
  Synthetic oligonucleotide
ccgggagacatacttttgattaacagcacagggaatctaattgctcctcggggttacttc

SEQ ID NO: 68982 - DNA, 60 bp, Artificial
  Synthetic oligonucleotide
caatagtaaaaccgggagacatacttttgattaacagcacagggaatctaattgctcctc

SEQ ID NO: 68983 - DNA, 60 bp, Artificial
  Synthetic oligonucleotide
aatagtaaaaccgggagacatacttttgattaacagcacagggaatctaattgctcctcg

SEQ ID NO: 68984 - DNA, 60 bp, Artificial
  Synthetic oligonucleotide
tagtaaaaccgggagacatacttttgattaacagcacagggaatctaattgctcctcggg

SEQ ID NO: 68985 - DNA, 60 bp, Artificial
  Synthetic oligonucleotide
tggggttcatcatgtgggcctgccaaaaaggcaacattaggtgcaacgtttgcatttgag

SEQ ID NO: 68986 - DNA, 60 bp, Artificial
  Synthetic oligonucleotide
tgacaatgcctgcatagggtcgatcagaaatggaacttatgaccatgatgtatacagaga

SEQ ID NO: 68987 - DNA, 60 bp, Artificial
  Synthetic oligonucleotide
taagcatctattggacaatagtaaaaccgggagacatacttttgattaacagcacaggga

SEQ ID NO: 68988 - DNA, 60 bp, Artificial
  Synthetic oligonucleotide
tctattggacaatagtaaaaccgggagacatacttttgattaacagcacagggaatctaa

SEQ ID NO: 68989 - DNA, 60 bp, Artificial
  Synthetic oligonucleotide
gtaaaaccgggagacatacttttgattaacagcacagggaatctaattgctcctcggggt

SEQ ID NO: 68990 - DNA, 60 bp, Artificial
  Synthetic oligonucleotide
tacagcaactgttacccttatgatgtgccggattatgcctcccttaggtcactagttgcc

SEQ ID NO: 68991 - DNA, 60 bp, Artificial
  Synthetic oligonucleotide
tggagaaaactgcacactaatagatgctctattgggagaccctcattgtgatggcttcca

SEQ ID NO: 68992 - DNA, 60 bp, Artificial
  Synthetic oligonucleotide
cgcagcaacgcctacagcaactgttacccttatgatgtgccggattatgcctcccttagg

SEQ ID NO: 68993 - DNA, 60 bp, Artificial
  Synthetic oligonucleotide
cttgatggagaaaactgcacactaatagatgctctattgggagaccctcattgtgatggc

SEQ ID NO: 68994 - DNA, 60 bp, Artificial
  Synthetic oligonucleotide
gcctacagcaactgttacccttatgatgtgccggattatgcctcccttaggtcactagtt

SEQ ID NO: 68995 - DNA, 60 bp, Artificial
  Synthetic oligonucleotide
gccctggagaaccaacatacaattgatctaactgactcagaaatgaacaaactgttcgaa

SEQ ID NO: 68996 - DNA, 60 bp, Artificial
  Synthetic oligonucleotide
gaagcctacagcaactgttacccttatgatgtgccggattatgcctcccttaggtcacta

SEQ ID NO: 68997 - DNA, 60 bp, Artificial
  Synthetic oligonucleotide
caaaacactctgaaattggcaacagggatgcgaaatgtgccagagaaacaaactagaggc

SEQ ID NO: 68998 - DNA, 60 bp, Artificial
  Synthetic oligonucleotide
aaaatgtaaacaggatcacatatggggcctgtcccagatatgttaagcaaaacactctga

SEQ ID NO: 68999 - DNA, 60 bp, Artificial
  Synthetic oligonucleotide
ttcaaaatgtaaacaggatcacatatggggcctgtcccagatatgttaagcaaaacactc

SEQ ID NO: 69000 - DNA, 60 bp, Artificial
  Synthetic oligonucleotide
tcacatatggggcctgtcccagatatgttaagcaaaacactctgaaattggcaacaggga

SEQ ID NO: 69001 - DNA, 60 bp, Artificial
  Synthetic oligonucleotide
aacagcacagggaatctaattgctcctcggggttacttcaaaatacgaagtgggaaaagc

SEQ ID NO: 69002 - DNA, 60 bp, Artificial
  Synthetic oligonucleotide
gattaacagcacagggaatctaattgctcctcggggttacttcaaaatacgaagtgggaa

SEQ ID NO: 69003 - DNA, 60 bp, Artificial
  Synthetic oligonucleotide
cttttgattaacagcacagggaatctaattgctcctcggggttacttcaaaatacgaagt

SEQ ID NO: 69004 - DNA, 60 bp, Artificial
  Synthetic oligonucleotide
tacttttgattaacagcacagggaatctaattgctcctcggggttacttcaaaatacgaa

SEQ ID NO: 69005 - DNA, 60 bp, Artificial
  Synthetic oligonucleotide
atacttttgattaacagcacagggaatctaattgctcctcggggttacttcaaaatacga

SEQ ID NO: 69006 - DNA, 60 bp, Artificial
  Synthetic oligonucleotide
gagacatacttttgattaacagcacagggaatctaattgctcctcggggttacttcaaaa

SEQ ID NO: 69007 - DNA, 60 bp, Artificial
  Synthetic oligonucleotide
ggacaatagtaaaaccgggagacatacttttgattaacagcacagggaatctaattgctc

SEQ ID NO: 69008 - DNA, 60 bp, Artificial
  Synthetic oligonucleotide
agcacagggaatctaattgctcctcggggttacttcaaaatacgaagtgggaaaagctca

SEQ ID NO: 69009 - DNA, 60 bp, Artificial
  Synthetic oligonucleotide
gtatacagagacgaagcattaaacaaccggttccagatcaaaggtgttgagctgaagtca

SEQ ID NO: 69010 - DNA, 60 bp, Artificial
  Synthetic oligonucleotide
caacactaaacaacgtgcattcaaatgacacagtacatgataggacccctcatcggaccc

SEQ ID NO: 69011 - DNA, 60 bp, Artificial
  Synthetic oligonucleotide
caacactaaacaacgtgcattcaaatgacacagtacatgataggaccccttatcgaaccc

SEQ ID NO: 69012 - DNA, 60 bp, Artificial
  Synthetic oligonucleotide
caacactaaacaacgtgcattcaaatgacacagtacatgataggaccccttatcggacac

SEQ ID NO: 69013 - DNA, 60 bp, Artificial
  Synthetic oligonucleotide
caacactaaacaacgtgcattcaaatgacacagtacatgataggaccccttatcggacct

SEQ ID NO: 69014 - DNA, 60 bp, Artificial
  Synthetic oligonucleotide
acaacactaaacaacgtgcattcaaatgacacagtacatgataggacccctcatcggacc

SEQ ID NO: 69015 - DNA, 60 bp, Artificial
  Synthetic oligonucleotide
acaacactaaacaacgtgcattcaaatgacacagtacatgataggaccccttatcgaacc

SEQ ID NO: 69016 - DNA, 55 bp, Artificial
  Synthetic oligonucleotide
acaacactaaacaacgtgcattcaaatgacacagtacatgataggaccccttatc

SEQ ID NO: 69017 - DNA, 60 bp, Artificial
  Synthetic oligonucleotide
ggagggaaggacttcagacatgagggcagaaatcataagaatgatggaaggtgcaaaacc

SEQ ID NO: 69018 - DNA, 60 bp, Artificial
  Synthetic oligonucleotide
ggaaggaagaacctcagacatgagggcagaaatcataagaatgatggaaggtgcaaaacc

SEQ ID NO: 69019 - DNA, 60 bp, Artificial
  Synthetic oligonucleotide
gcacaaagagcaatggtggatcaagtgagagaaagtcggaacccaggaaatgctgagatc

SEQ ID NO: 69020 - DNA, 60 bp, Artificial
  Synthetic oligonucleotide
tgcacagagagcaatggtggatcaagtgagagaaagtcggaacccaggaaatgctgagat

SEQ ID NO: 69021 - DNA, 60 bp, Artificial
  Synthetic oligonucleotide
aagaatgatggaaggtgcaaaaccagaagaagtgtcattccgggggaggggagttttcga

SEQ ID NO: 69022 - DNA, 60 bp, Artificial
  Synthetic oligonucleotide
gggaagaacctcagacatgagggcagaaatcataagaatgatggaaggtgcaaaaccaga

SEQ ID NO: 69023 - DNA, 60 bp, Artificial
  Synthetic oligonucleotide
tgatggaaggtgcaaaaccagaagaagtgtcattccgggggaggggagttttcgagctct

SEQ ID NO: 69024 - DNA, 60 bp, Artificial
  Synthetic oligonucleotide
gggcggttgatccagaacagcttgacaatagagaaaatggtgctctctgcttttgatgaa

SEQ ID NO: 69025 - DNA, 60 bp, Artificial
  Synthetic oligonucleotide
gggcggttgatccagaacagcttgacaatagagaaaatggtgctctctgcttttgatgag

SEQ ID NO: 69026 - DNA, 58 bp, Artificial
  Synthetic oligonucleotide
gaaggacggttgatccagaacagcttgacaatagagaaaatggtgctctctgcttttg

SEQ ID NO: 69027 - DNA, 60 bp, Artificial
  Synthetic oligonucleotide
gaagggcggttgatccagaacagcttgacaatagagaaaatggtgctctctgcttttgat

SEQ ID NO: 69028 - DNA, 60 bp, Artificial
  Synthetic oligonucleotide
tgaagggcggttgatccagaacagcttgacaatagagaaaatggtgctctctgcttttga

SEQ ID NO: 69029 - DNA, 59 bp, Artificial
  Synthetic oligonucleotide
tgaagggcggttgatccagaacagcttgacaatagagaaaatggtgctctctgcttttg

SEQ ID NO: 69030 - DNA, 60 bp, Artificial
  Synthetic oligonucleotide
gatcatgaagggcggttgatccagaacagcttgacaatagagaaaatggtgctctctgct

SEQ ID NO: 69031 - DNA, 60 bp, Artificial
  Synthetic oligonucleotide
gattatgaagggcggttgatccagaacagcttgacaatagagaaaatggtgctctctgct

SEQ ID NO: 69032 - DNA, 60 bp, Artificial
  Synthetic oligonucleotide
ctcagtgatcatgaagggcggttgatccagaacagcttgacaatagagaaaatggtgctc

SEQ ID NO: 69033 - DNA, 60 bp, Artificial
  Synthetic oligonucleotide
actcagtgattatgaagggcggttgatccagaacagcttgacaatagagaaaatggtgct

SEQ ID NO: 69034 - DNA, 60 bp, Artificial
  Synthetic oligonucleotide
actcagtgatcatgaagggcggttgatccagaacagcttgacaatagagaaaatggtgct

SEQ ID NO: 69035 - DNA, 60 bp, Artificial
  Synthetic oligonucleotide
ggagggaagaacctcagacatgagggcagaaatcataagaatgatggaaggtgcaaaacc

SEQ ID NO: 69036 - DNA, 60 bp, Artificial
  Synthetic oligonucleotide
gagggaagaacttcagacatgagggcagaaatcataagaatgatggaaggtgcaaaacca

SEQ ID NO: 69037 - DNA, 60 bp, Artificial
  Synthetic oligonucleotide
ggagggaagaacttcagacatgagggcagaaatcataagaatgatggaaggtgcaaaacc

SEQ ID NO: 69038 - DNA, 60 bp, Artificial
  Synthetic oligonucleotide
cacagagagcaatggtggatcaagtgagagaaagtcggaacccaggaaatgctgagatcg

SEQ ID NO: 69039 - DNA, 60 bp, Artificial
  Synthetic oligonucleotide
ggcatgccattctgctgcatttgaagatttaagattgttaagcttcatcagaggggccaa

SEQ ID NO: 69040 - DNA, 60 bp, Artificial
  Synthetic oligonucleotide
ggataatatgggatcgagtactcttgaactgagaagcgggtactgggccataaggaccag

SEQ ID NO: 69041 - DNA, 51 bp, Artificial
  Synthetic oligonucleotide
tttgatatgagtaatgaaggatcttatttcttcggagacaatgcagaagag

SEQ ID NO: 69042 - DNA, 52 bp, Artificial
  Synthetic oligonucleotide
caaaatgccataagcaccacattcccttatactggagatcctccatacagcc

SEQ ID NO: 69043 - DNA, 60 bp, Artificial
  Synthetic oligonucleotide
acagggtacaccatggacacagtcaacagaacacaccaatattcagagaaggggaagtgg

SEQ ID NO: 69044 - DNA, 60 bp, Artificial
  Synthetic oligonucleotide
caccccaactcaacccaattgatggaccactacctgaggataatgagcccagtggatatg

SEQ ID NO: 69045 - DNA, 60 bp, Artificial
  Synthetic oligonucleotide
caccccaactcaacccaattgatggaccactacctgagaataatgagccaagtggatatg

SEQ ID NO: 69046 - DNA, 60 bp, Artificial
  Synthetic oligonucleotide
gggtacaccatggacacagtcaacagaacacaccaatattcagagaaggggaagtggact

SEQ ID NO: 69047 - DNA, 60 bp, Artificial
  Synthetic oligonucleotide
caccccaactcaacccaattgatggaccactacctgaggataatgagccgagtggatatg

SEQ ID NO: 69048 - DNA, 60 bp, Artificial
  Synthetic oligonucleotide
aaaacaaagagtgaataagagaggctatctaataagagctttgacattgaacacgatgac

SEQ ID NO: 69049 - DNA, 60 bp, Artificial
  Synthetic oligonucleotide
caccccaactcaacccaattgatggaccactacccgaggataatgagccaagtggatatg

SEQ ID NO: 69050 - DNA, 60 bp, Artificial
  Synthetic oligonucleotide
acagactgtgtcctggaggctatggccttccttgaagaatcccacccagggatcttcgag

SEQ ID NO: 69051 - DNA, 60 bp, Artificial
  Synthetic oligonucleotide
aaaaacaaagagtgaataagagaggctatctaataagagctttgacattgaacacgatga

SEQ ID NO: 69052 - DNA, 60 bp, Artificial
  Synthetic oligonucleotide
gcacaaacagactgtgtcctggaggctatggccttccttgaagaatcccacccagggata

SEQ ID NO: 69053 - DNA, 60 bp, Artificial
  Synthetic oligonucleotide
cccaactcaacccaattgatggaccactacccgaggataatgagccaagtggatatgcac

SEQ ID NO: 69054 - DNA, 60 bp, Artificial
  Synthetic oligonucleotide
cccaactcaacccaattgatggaccactacctgagaataatgagccaagtggatatgcac

SEQ ID NO: 69055 - DNA, 60 bp, Artificial
  Synthetic oligonucleotide
cccaactcaacccaattgatggaccactacctgaggataatgagcccagtggatatgcac

SEQ ID NO: 69056 - DNA, 60 bp, Artificial
  Synthetic oligonucleotide
gcacaaacagattgtgtcctggaggctatggccttccttgaagaatcccacccaggtatc

SEQ ID NO: 69057 - DNA, 60 bp, Artificial
  Synthetic oligonucleotide
agtggatatgcacaaacagattgtgtcctggaggctatggccttccttgaagaatcccac

SEQ ID NO: 69058 - DNA, 60 bp, Artificial
  Synthetic oligonucleotide
cccaactcaacccaattgatggaccactacctgaggataatgagccgagtggatatgcac

SEQ ID NO: 69059 - DNA, 60 bp, Artificial
  Synthetic oligonucleotide
tatagatgccatagaggagacacacaaattcagacgagaagatcattcgagctaaagaag

SEQ ID NO: 69060 - DNA, 60 bp, Artificial
  Synthetic oligonucleotide
aggagaccgattggaatttctagcatggtggaggccatggtgtctagggcccggattgat

SEQ ID NO: 69061 - DNA, 60 bp, Artificial
  Synthetic oligonucleotide
ccctagtagttcatataggagaccgattggaatttctagcatggtggaggccatggtgtc

SEQ ID NO: 69062 - DNA, 60 bp, Artificial
  Synthetic oligonucleotide
gatatacatataggtgccatagaggagacacacaaattcagacgagaagatcattcgagc

SEQ ID NO: 69063 - DNA, 60 bp, Artificial
  Synthetic oligonucleotide
tacagatatacatataggtgccatagaggagacacacaaattcagacgagaagatcattc

SEQ ID NO: 69064 - DNA, 60 bp, Artificial
  Synthetic oligonucleotide
ggaagaggcaacactatcggtctagacatcaaagcagccacccatgttggaaagcaaatt

SEQ ID NO: 69065 - DNA, 60 bp, Artificial
  Synthetic oligonucleotide
ggaagaggcaatactctcggtctagacatcaaagcagccacccatgttggaaagcaaatt

SEQ ID NO: 69066 - DNA, 60 bp, Artificial
  Synthetic oligonucleotide
gaagaggcaacactatcggtctagacatcaaagcagccacccatgttggaaagcaaattg

SEQ ID NO: 69067 - DNA, 60 bp, Artificial
  Synthetic oligonucleotide
gagaagcagtaatgagaatgggggacctccacttactccaaaacagaaacggaaaatggc

SEQ ID NO: 69068 - DNA, 60 bp, Artificial
  Synthetic oligonucleotide
ggctttcaccgaagagggaacaattgttggcgaaatctcaccattgccttcttttccagg

SEQ ID NO: 69069 - DNA, 60 bp, Artificial
  Synthetic oligonucleotide
aagggctttcaccgaagagggaacaattgttggcgaaatctcaccattgccttcttttcc

SEQ ID NO: 69070 - DNA, 60 bp, Artificial
  Synthetic oligonucleotide
gccgaagagtagacataaaccctggtcatgcagacctcagtgcaaaggaggcacaagatg

SEQ ID NO: 69071 - DNA, 60 bp, Artificial
  Synthetic oligonucleotide
gggtcagggatgagaatacttgtaaggggcaattctcctgtattcaactacaacaagacc

SEQ ID NO: 69072 - DNA, 60 bp, Artificial
  Synthetic oligonucleotide
atgtgaggggatcagggatgagaatacttgtaaggggcaattctcctgtattcaactaca

SEQ ID NO: 69073 - DNA, 60 bp, Artificial
  Synthetic oligonucleotide
acgaaaacgagactctagcatacttactgacagccagacagcgaccaaaagaattcggat

SEQ ID NO: 69074 - DNA, 60 bp, Artificial
  Synthetic oligonucleotide
acgaaaacgggactccagcatacttactgacagccagacagcgaccaaaagaattcggat

SEQ ID NO: 69075 - DNA, 60 bp, Artificial
  Synthetic oligonucleotide
cacaagaggattgcatgataaaagcagttagaggtgacctgaatttcgtcaacagagcaa

SEQ ID NO: 69076 - DNA, 60 bp, Artificial
  Synthetic oligonucleotide
gattgcatgataaaagcagttagaggtgacctgaatttcgtcaacagagcaaatcagcgg

SEQ ID NO: 69077 - DNA, 60 bp, Artificial
  Synthetic oligonucleotide
ggccatggtgttttcacaagaggattgcatgataaaagcagttagaggtgacctgaattt

SEQ ID NO: 69078 - DNA, 60 bp, Artificial
  Synthetic oligonucleotide
ccgagattgcaaaatttctcccttgatggttgcatacatgttagagagagaacttgtacg

SEQ ID NO: 69079 - DNA, 60 bp, Artificial
  Synthetic oligonucleotide
gtacagagagggtggtggttagcattgatcggtttttgagagttcgagaccaacgcggga

SEQ ID NO: 69080 - DNA, 60 bp, Artificial
  Synthetic oligonucleotide
caagtcaagatacgccgaagagtagacataaaccctggtcatgcagacctcagtgccaag

SEQ ID NO: 69081 - DNA, 60 bp, Artificial
  Synthetic oligonucleotide
ataatcgtggccatggtgttttcacaagaggattgcatgataaaagcagttagaggtgac

SEQ ID NO: 69082 - DNA, 60 bp, Artificial
  Synthetic oligonucleotide
gttcacaatggtggggaaaagagcaacagctatactcagaaaagcaaccagaagattggt

SEQ ID NO: 69083 - DNA, 60 bp, Artificial
  Synthetic oligonucleotide
agtacatgaggggtatgaggagttcacaatggtggggaaaagagcaacagctatactcag

SEQ ID NO: 69084 - DNA, 60 bp, Artificial
  Synthetic oligonucleotide
attggagatgtgccacagcacacaaattggcgggacaaggatggtggacattcttagaca

SEQ ID NO: 69085 - DNA, 60 bp, Artificial
  Synthetic oligonucleotide
caagatacgccgaagagtagacataaaccctggtcatgcagacctcagtgcaaaggaggc

SEQ ID NO: 69086 - DNA, 60 bp, Artificial
  Synthetic oligonucleotide
aatgagtgatgctggatcagatcgagtgatggtatcacctttggctgtgacatggtggaa

SEQ ID NO: 69087 - DNA, 60 bp, Artificial
  Synthetic oligonucleotide
tggtgtcagatgtgtctgcagagacaactggaaaggctccaataggcccatcgtagatat

SEQ ID NO: 69088 - DNA, 60 bp, Artificial
  Synthetic oligonucleotide
aaggtggtcatggagtgaaaggctgggcctttgatgatggaaatgacgtgtggatgggaa

SEQ ID NO: 69089 - DNA, 60 bp, Artificial
  Synthetic oligonucleotide
aagggggtcatggagtgaaaggctgggcctttgatgatggaaatgacgtgtggatgggca

SEQ ID NO: 69090 - DNA, 59 bp, Artificial
  Synthetic oligonucleotide
ggggtcatggagtgaaaggctgggcctttgatgatggaaatgacgtgtggatgggcaga

SEQ ID NO: 69091 - DNA, 60 bp, Artificial
  Synthetic oligonucleotide
aagggggtcatggagtgaaaggctgggcctttgatgatggaaatgacgtgtggatgggaa

SEQ ID NO: 69092 - DNA, 60 bp, Artificial
  Synthetic oligonucleotide
ggattatagcattgtttccagttatgtgtgctcagggcttgttggagacacacccagaaa

SEQ ID NO: 69093 - DNA, 60 bp, Artificial
  Synthetic oligonucleotide
atcagaatggaccaggcaatcatggaaaaaaacatcatgttgaaagcgaatttcagtgtg

SEQ ID NO: 69094 - DNA, 55 bp, Artificial
  Synthetic oligonucleotide
acatctgggtgacaagagaaccttatgtgtcatgcgaccctgacaagtgttatca

SEQ ID NO: 69095 - DNA, 54 bp, Artificial
  Synthetic oligonucleotide
acatctgggtgacaagagaaccttatgtgtcatgtgatcctgacaagtgttatc

SEQ ID NO: 69096 - DNA, 54 bp, Artificial
  Synthetic oligonucleotide
acatctgggtgacaagagaaccttatgtgtcatgcgatcctgacaagtgttacc

SEQ ID NO: 69097 - DNA, 54 bp, Artificial
  Synthetic oligonucleotide
acatctgggtgacaagagaaccttatgtgtcatgcgaccctgacaagtgttacc

SEQ ID NO: 69098 - DNA, 60 bp, Artificial
  Synthetic oligonucleotide
ggattatagcattgtttccagttatgtgtgctcaggacttgttggagacacacccaggaa

SEQ ID NO: 69099 - DNA, 60 bp, Artificial
  Synthetic oligonucleotide
gtcgaggagtgctcctgctatcctcgatatcctggtgtcagatgtgtctgcagagacaac

SEQ ID NO: 69100 - DNA, 60 bp, Artificial
  Synthetic oligonucleotide
gtaaaggattatagcattgtttccagttatgtgtgctcaggacttgttggagacacaccc

SEQ ID NO: 69101 - DNA, 60 bp, Artificial
  Synthetic oligonucleotide
atgggagcgcttcaggaaaagctgatactaaaatactattcattgaggaggggaaaatcg

SEQ ID NO: 69102 - DNA, 60 bp, Artificial
  Synthetic oligonucleotide
acttgtacagtagtaatgactgatgggagtgcttcaggaaaagctgatactaaaatacta

SEQ ID NO: 69103 - DNA, 60 bp, Artificial
  Synthetic oligonucleotide
cagtagtaatgactgatgggagtgcttcaggaaaagctgatactaaaatactattcattg

SEQ ID NO: 69104 - DNA, 60 bp, Artificial
  Synthetic oligonucleotide
ggtatctttgagaactcatgccttgaaacaatggaagtcgttcaacaaacaagggtggac

SEQ ID NO: 69105 - DNA, 60 bp, Artificial
  Synthetic oligonucleotide
gggatatttgagaactcatgccttgaaacaatggaagtcgttcaacaaacaagggtggac

SEQ ID NO: 69106 - DNA, 60 bp, Artificial
  Synthetic oligonucleotide
cccagggatctttgagaactcatgccttgaaacaatggaagtcgttcaacaaacaagggt

SEQ ID NO: 69107 - DNA, 60 bp, Artificial
  Synthetic oligonucleotide
ggaatctttgagaactcatgccttgaaacaatggaagtcgttcaacaaacaagggtggac

SEQ ID NO: 69108 - DNA, 60 bp, Artificial
  Synthetic oligonucleotide
gggatctttgagaactcatgccttgaaacaatggaagtcgttcaacaaacaagggtggac

SEQ ID NO: 69109 - DNA, 60 bp, Artificial
  Synthetic oligonucleotide
aaagcgaatttcagtgtggtctttgaccgactagagaccatagtattactaagggctttc

SEQ ID NO: 69110 - DNA, 60 bp, Artificial
  Synthetic oligonucleotide
tttcagtgtgatctttgaccgactagagaccatagtattactaagggctttcaccgaaga

SEQ ID NO: 69111 - DNA, 60 bp, Artificial
  Synthetic oligonucleotide
tttcagtgtgatttttgaccgactagagaccatagtattactaagggctttcaccgaaga

SEQ ID NO: 69112 - DNA, 60 bp, Artificial
  Synthetic oligonucleotide
tttcagtgtgatttttgaccgattagagaccatagtattactaagggctttcaccgaaga

SEQ ID NO: 69113 - DNA, 60 bp, Artificial
  Synthetic oligonucleotide
tccaggtagattgctttctttggcatatccggaaacaagttgtagaccaagaactgagtg

SEQ ID NO: 69114 - DNA, 60 bp, Artificial
  Synthetic oligonucleotide
aatggattccaacactgtgtcaagtttccaggtagattgctttctttggcatatccggaa

SEQ ID NO: 69115 - DNA, 60 bp, Artificial
  Synthetic oligonucleotide
cccatgataagcaagtgcagaactaaagagggaaggcgaaaaaccaatttatatggattc

SEQ ID NO: 69116 - DNA, 60 bp, Artificial
  Synthetic oligonucleotide
ccattgtagagccactgagtacataatgaagggggtatacattaatactgccctgctcaa

SEQ ID NO: 69117 - DNA, 60 bp, Artificial
  Synthetic oligonucleotide
atgacacagatgtggtaaactttgtgagcatggagttttctctcactgacccgagacttg

SEQ ID NO: 69118 - DNA, 60 bp, Artificial
  Synthetic oligonucleotide
taaactttgtgagcatggaattttctctcactgacccgagacttgagccacataaatggg

SEQ ID NO: 69119 - DNA, 60 bp, Artificial
  Synthetic oligonucleotide
aggaagatctcatttaaggaatgacacagatgtggtaaactttgtgagcatggaattttc

SEQ ID NO: 69120 - DNA, 60 bp, Artificial
  Synthetic oligonucleotide
atatggattcatcataaagggaagatctcatttaaggaatgacacagatgtggtaaactt

SEQ ID NO: 69121 - DNA, 60 bp, Artificial
  Synthetic oligonucleotide
caaatttgcagcaatatgcacccacttggaggtatgtttcatgtattcagattttcattt

SEQ ID NO: 69122 - DNA, 60 bp, Artificial
  Synthetic oligonucleotide
aaaattgaaacaaacaaatttgcagcaatatgcactcacttggaggtatgtttcatgtat

SEQ ID NO: 69123 - DNA, 60 bp, Artificial
  Synthetic oligonucleotide
gctggatacagaatgagttcaacaaggcctgcgagctaactgattcaatctggatagagc

SEQ ID NO: 69124 - DNA, 60 bp, Artificial
  Synthetic oligonucleotide
ggatacagaatgagttcaacaaggcctgcgagctaactgattcaatctggatagagctcg

SEQ ID NO: 69125 - DNA, 60 bp, Artificial
  Synthetic oligonucleotide
aactgattcaatctggatagagctcgatgaaattggagaggacgtagccccaattgagta

SEQ ID NO: 69126 - DNA, 60 bp, Artificial
  Synthetic oligonucleotide
actgattcagtctggatagagctcgatgaaattggagaggacgtagccccaattgagtac

SEQ ID NO: 69127 - DNA, 60 bp, Artificial
  Synthetic oligonucleotide
cggctgcatagagggcaagctttctcaaatgtccaaagaagtgaatgccaaaattgaacc

SEQ ID NO: 69128 - DNA, 60 bp, Artificial
  Synthetic oligonucleotide
gatggagctcgatgaaattggagaggacgtagccccaattgagtacattgcaagcatgag

SEQ ID NO: 69129 - DNA, 60 bp, Artificial
  Synthetic oligonucleotide
gattcatcgaaattggagtgacaaggagagaagtccacatatattaccttgaaaaggcca

SEQ ID NO: 69130 - DNA, 60 bp, Artificial
  Synthetic oligonucleotide
tggattcatcataaagggaagatctcatctaaggaatgacacagatgtggtaaactttgt

SEQ ID NO: 69131 - DNA, 60 bp, Artificial
  Synthetic oligonucleotide
cagattcatcgaaattggagtgacaagaagagaagtccacatatattaccttgaaaaggc

SEQ ID NO: 69132 - DNA, 60 bp, Artificial
  Synthetic oligonucleotide
ggctatatgaagcaattgaggagtgcctgattaatgatccctgggttttgctcaatgcgt

SEQ ID NO: 69133 - DNA, 60 bp, Artificial
  Synthetic oligonucleotide
aagtgccataggccaaatttcaaggcctatgttcttgtatgtgaggacaaacggaacatc

SEQ ID NO: 69134 - DNA, 60 bp, Artificial
  Synthetic oligonucleotide
agagacataagcgatttgaagcaatatgatagcgacgaacctgaattaaggtcactttca

SEQ ID NO: 69135 - DNA, 60 bp, Artificial
  Synthetic oligonucleotide
actaagaagtgccataggccaaatttcaaggcctatgttcttgtatgtgaggacaaacgg

SEQ ID NO: 69136 - DNA, 60 bp, Artificial
  Synthetic oligonucleotide
cgaacctgaattaaggtcactttcaagctggatacagaatgagttcaacaaggcctgcga

SEQ ID NO: 69137 - DNA, 60 bp, Artificial
  Synthetic oligonucleotide
aaaggaagatctcatttaaggaatgacacagatgtggtaaactttgtgagcatggagttt

SEQ ID NO: 69138 - DNA, 60 bp, Artificial
  Synthetic oligonucleotide
cataaagggaagatctcatttaaggaatgacacagatgtggtaaactttgtgagcatgga

SEQ ID NO: 69139 - DNA, 60 bp, Artificial
  Synthetic oligonucleotide
cacttttaaagcacagatttgaaataatcgaggggagagacagaacaatggcctggacag

SEQ ID NO: 69140 - DNA, 60 bp, Artificial
  Synthetic oligonucleotide
aattgagtacattgcaagcatgaggaggaattatttcacagcagaggtgtcccattgtag

SEQ ID NO: 69141 - DNA, 60 bp, Artificial
  Synthetic oligonucleotide
gaggacgtagccccaattgagtacattgcaagcatgaggaggaattatttcacagcagag

SEQ ID NO: 69142 - DNA, 60 bp, Artificial
  Synthetic oligonucleotide
cacagcagaggtgtcccattgtagagccactgagtacataatgaagggggtatacattaa

SEQ ID NO: 69143 - DNA, 60 bp, Artificial
  Synthetic oligonucleotide
attgagtacatcgcaagcatgaggaggaattatttcacagcagaggtgtcccattgtaga

SEQ ID NO: 69144 - DNA, 60 bp, Artificial
  Synthetic oligonucleotide
tcccattgtagagccactgagtacataatgaagggggtatacattaatactgccttgctc

SEQ ID NO: 69145 - DNA, 60 bp, Artificial
  Synthetic oligonucleotide
aaaccgaagtttctaccagatttgtatgattacaaggagaacagattcattgaaattgga

SEQ ID NO: 69146 - DNA, 60 bp, Artificial
  Synthetic oligonucleotide
ccaggctattcaccataaggcaagaaatggccaacagaggcctctgggattcctttcgtc

SEQ ID NO: 69147 - DNA, 60 bp, Artificial
  Synthetic oligonucleotide
aacggctgcatagagggcaagctttctcaaatgtccaaagaagtgaatgccaaaattgaa

SEQ ID NO: 69148 - DNA, 60 bp, Artificial
  Synthetic oligonucleotide
cagcaatatgcacccacttggaggtatgcttcatgtattcagattttcatttcatcaatg

SEQ ID NO: 69149 - DNA, 60 bp, Artificial
  Synthetic oligonucleotide
cgttccatggggccaaagaaatagctctcagttattctgctggtgcacttgccagttgca

SEQ ID NO: 69150 - DNA, 60 bp, Artificial
  Synthetic oligonucleotide
cagttattctgctggtgcacttgccagttgcatgggcctcatatacaataggatgggggc

SEQ ID NO: 69151 - DNA, 60 bp, Artificial
  Synthetic oligonucleotide
tgggaaaaacacagatcttgaggctctcatggaatggctaaagacaagaccaattctgtc

SEQ ID NO: 69152 - DNA, 60 bp, Artificial
  Synthetic oligonucleotide
agtgctggtctaagagatgatcttcttgaaaatttgcagacctatcagaaacgaatgggg

SEQ ID NO: 69153 - DNA, 60 bp, Artificial
  Synthetic oligonucleotide
tcttgaggctctcatggaatggctaaagacaagaccaattctgtcacctctgactaaggg

SEQ ID NO: 69154 - DNA, 60 bp, Artificial
  Synthetic oligonucleotide
ggggtgcagatgcaacgattcaagtgacccgcttgttgttgctgcgagtatcattgggat

SEQ ID NO: 69155 - DNA, 60 bp, Artificial
  Synthetic oligonucleotide
atcagaaacgaatgggggtgcagatgcaacgattcaagtgacccgcttgttgttgccgcg

SEQ ID NO: 69156 - DNA, 60 bp, Artificial
  Synthetic oligonucleotide
aagaaatagctctcagttattctgctggtgcacttgccagttgcatgggcctcatataca

SEQ ID NO: 69157 - DNA, 60 bp, Artificial
  Synthetic oligonucleotide
gtttgtgttcacgctcaccgtgcccagtgagcgaggactgcagcgtagacgctttgtcca

SEQ ID NO: 69158 - DNA, 60 bp, Artificial
  Synthetic oligonucleotide
cggaaggagtacctgagtctatgagggaagaatatcgaaaggaacagcagaatgctgtgg

SEQ ID NO: 69159 - DNA, 60 bp, Artificial
  Synthetic oligonucleotide
tggctaaagacaagaccaattctgtcacctctgactaaggggattttggggtttgtgttc

SEQ ID NO: 69160 - DNA, 60 bp, Artificial
  Synthetic oligonucleotide
caaagaaatagctctcagttattctgctggtgcacttgccagttgcatgggcctcatata

SEQ ID NO: 69161 - DNA, 60 bp, Artificial
  Synthetic oligonucleotide
tggaatggctaaagacaagaccaattctgtcacctctgactaaggggattttggggtttg

SEQ ID NO: 69162 - DNA, 60 bp, Artificial
  Synthetic oligonucleotide
tatcagaaacgaatgggggtgcagatgcaacgattcaagtgacccgcttgttgttgccgc

SEQ ID NO: 69163 - DNA, 60 bp, Artificial
  Synthetic oligonucleotide
ccaattctgtcacctctgactaaggggattttggggtttgtgttcacgctcaccgtgccc

SEQ ID NO: 69164 - DNA, 60 bp, Artificial
  Synthetic oligonucleotide
tgatcttcttgaaaatttgcagacctatcagaaacgaatgggggtgcagatgcaacggtt

SEQ ID NO: 69165 - DNA, 60 bp, Artificial
  Synthetic oligonucleotide
atcctgtcacctctgactaaggggattttggggtttgtgttcacgctcaccgtgcccagt

SEQ ID NO: 69166 - DNA, 60 bp, Artificial
  Synthetic oligonucleotide
tctacggaaggagtacctgagtctatgagggaagaatatcgaagggaacagcagaatgct

SEQ ID NO: 69167 - DNA, 60 bp, Artificial
  Synthetic oligonucleotide
ctcatggaatggctaaagacaagaccaattctgtcacctctgactaaggggattttgggg

SEQ ID NO: 69168 - DNA, 60 bp, Artificial
  Synthetic oligonucleotide
cagcgtagacgctttgtccaaaatgccctcaatgggaatggggatccaaacaacatggac

SEQ ID NO: 69169 - DNA, 60 bp, Artificial
  Synthetic oligonucleotide
tagctccagcactggtctaagagatgatcttcttgaaaatttgcagacctatcagaaacg

SEQ ID NO: 69170 - DNA, 60 bp, Artificial
  Synthetic oligonucleotide
catggaatggctaaagacaagaccaattctgtcacctctgactaaggggattttggggtt

SEQ ID NO: 69171 - DNA, 60 bp, Artificial
  Synthetic oligonucleotide
cgtagacgctttgtccaaaatgccctcaatgggaatggagatccaaataacatggacaag

SEQ ID NO: 69172 - DNA, 60 bp, Artificial
  Synthetic oligonucleotide
ccaccgaagtggcatttggcctggtatgtgcaacatgtgaacagattgctgactcccagc

SEQ ID NO: 69173 - DNA, 60 bp, Artificial
  Synthetic oligonucleotide
ctcagttattctgctggtgcacttgccagttgcatgggcctcatatacaatagaatgggg

SEQ ID NO: 69174 - DNA, 60 bp, Artificial
  Synthetic oligonucleotide
ggccaaagaaatagctctcagttattctgctggtgcacttgccagttgcatgggcctcat

SEQ ID NO: 69175 - DNA, 60 bp, Artificial
  Synthetic oligonucleotide
aagatgtctttgctgggaaaaacacagatcttgaggctctcatggaatggctaaagacaa

SEQ ID NO: 69176 - DNA, 60 bp, Artificial
  Synthetic oligonucleotide
tgtgttcacgctcaccgtgcccagtgagcgaggactgcagcgtagacgctttgtccaaaa

SEQ ID NO: 69177 - DNA, 60 bp, Artificial
  Synthetic oligonucleotide
ttgaagatgtctttgctgggaaaaacacagatcttgaggctctcatggaatggctaaaga

SEQ ID NO: 69178 - DNA, 60 bp, Artificial
  Synthetic oligonucleotide
cagagacttgaggatgtctttgctgggaaaaacacagatcttgaggctctcatggaatgg

SEQ ID NO: 69179 - DNA, 60 bp, Artificial
  Synthetic oligonucleotide
agtctctaaaaatctacagagattcgcttggagaagcagtaatgagaatgggggaccttc

SEQ ID NO: 69180 - DNA, 60 bp, Artificial
  Synthetic oligonucleotide
agtctctaaaaatctacagagattcgcttggagaagcagtaatgagaatgggagacctcc

SEQ ID NO: 69181 - DNA, 60 bp, Artificial
  Synthetic oligonucleotide
agtctctaaaaatctacagagattcgcttggagaagcagtgatgagaatgggggacctcc

SEQ ID NO: 69182 - DNA, 60 bp, Artificial
  Synthetic oligonucleotide
gggggtcaacgatcgaaatttctggagaggtgagaatgggcggaaaacaagaagtgctta

SEQ ID NO: 69183 - DNA, 60 bp, Artificial
  Synthetic oligonucleotide
ggtcaaacgggggatcaacgatcgaaatttctggagaggtgagaatgggcggaaaacaag

SEQ ID NO: 69184 - DNA, 60 bp, Artificial
  Synthetic oligonucleotide
gggtcaacgatcgaaatttctggagaggtgagaatgggcggaaaacaagaagtgcttatg

SEQ ID NO: 69185 - DNA, 57 bp, Artificial
  Synthetic oligonucleotide
gaggagtgctcctgctatcctcgatatcctggtgtcagatgtgtctgcagagacaac

SEQ ID NO: 69186 - DNA, 60 bp, Artificial
  Synthetic oligonucleotide
gcaagcattacagctgctgtttgaagtggaacaggagataagaactttctcatttcagct

SEQ ID NO: 69187 - DNA, 60 bp, Artificial
  Synthetic oligonucleotide
tgcaagcattacagctgctgtttgaagtggaacaggagataagaactttctcatttcagc

SEQ ID NO: 69188 - DNA, 60 bp, Artificial
  Synthetic oligonucleotide
ttctttggcatatccggaaacaagttgtagaccaagaactgagtgatgccccattccttg

SEQ ID NO: 69189 - DNA, 60 bp, Artificial
  Synthetic oligonucleotide
tgctttctttggcatatccggaaacaagttgtagaccaaaaactgagtgatgcccccttc

SEQ ID NO: 69190 - DNA, 60 bp, Artificial
  Synthetic oligonucleotide
tgcaactacacactcctggattcccaagaggaaccgctctattctcaacacaagccaaag

SEQ ID NO: 69191 - DNA, 60 bp, Artificial
  Synthetic oligonucleotide
cctggattcccaagaggaaccgctctattctcaacacaagccaaaggggaattcttgagg

SEQ ID NO: 69192 - DNA, 60 bp, Artificial
  Synthetic oligonucleotide
tgctgttgcaactacacactcctggattcccaagaggaaccgctctattctcaacacaag

SEQ ID NO: 69193 - DNA, 60 bp, Artificial
  Synthetic oligonucleotide
ccaacaccaccatagagaaggaaatatgccccaaactagcagaatacagaaattggtcaa

SEQ ID NO: 69194 - DNA, 60 bp, Artificial
  Synthetic oligonucleotide
accaacaccaccatagagaaggaaatatgccccaaactagcagaatacagaaattggtca

SEQ ID NO: 69195 - DNA, 60 bp, Artificial
  Synthetic oligonucleotide
gaccaacaccaccatagagaaggaaatatgccccaaactagcagaatacagaaattggtc

SEQ ID NO: 69196 - DNA, 60 bp, Artificial
  Synthetic oligonucleotide
ccaccatagagaaggaaatatgccccaaactagcagaatacagaaattggtcaaagccgc

SEQ ID NO: 69197 - DNA, 60 bp, Artificial
  Synthetic oligonucleotide
aaagctgcatcaatcggtgcttttatgtggagttgataaggggaaggaaacaggaagctg

SEQ ID NO: 69198 - DNA, 60 bp, Artificial
  Synthetic oligonucleotide
atccgaatggaccaggcaatcatggagaaaaacatcatgttgaaagcgaatttcagtgtg

SEQ ID NO: 69199 - DNA, 60 bp, Artificial
  Synthetic oligonucleotide
gcaatcatggggaaaaacatcatgttgaaagcgaatttcagtgtgatttttgaccgacta

SEQ ID NO: 69200 - DNA, 60 bp, Artificial
  Synthetic oligonucleotide
gggctttcaccgaagagggagcaattgttggcgaaatctcaccattgccttcttttccag

SEQ ID NO: 69201 - DNA, 60 bp, Artificial
  Synthetic oligonucleotide
gcaattggggtcctcgtcggaggacttgaatggaatgataacacagttcgagtctctaaa

SEQ ID NO: 69202 - DNA, 60 bp, Artificial
  Synthetic oligonucleotide
tgaccgactagagaccatagtattactaagggctttcaccgaagagggagcaattgttgg

SEQ ID NO: 69203 - DNA, 60 bp, Artificial
  Synthetic oligonucleotide
gaccatagtattactaagggctttcaccgaagagggagcaattgttggcgaaatctcacc

SEQ ID NO: 69204 - DNA, 54 bp, Artificial
  Synthetic oligonucleotide
tctctgttgaaggcaaaagctgcatcaatcggtgcttttatgtggagttgataa

SEQ ID NO: 69205 - DNA, 60 bp, Artificial
  Synthetic oligonucleotide
ccttttgcatcagaatggaccaggcaatcatggagaaaaacatcatgttgaaagcgaatt

SEQ ID NO: 69206 - DNA, 60 bp, Artificial
  Synthetic oligonucleotide
acagagattcgcttggagaagcagtaatgagaatgggagacctccacttactccaaaaca

SEQ ID NO: 69207 - DNA, 60 bp, Artificial
  Synthetic oligonucleotide
accctgaagttggcaacagggatgcggaatgtaccagagaaacaaactagaggcatattc

SEQ ID NO: 69208 - DNA, 60 bp, Artificial
  Synthetic oligonucleotide
acgaaaacgggactctagcatacttactgacagtcagacagcgaccaaaagaattcgaat

SEQ ID NO: 69209 - DNA, 60 bp, Artificial
  Synthetic oligonucleotide
gggttaatgagtcagctgatatgagcattggagtaacagtgataaagaacaacatgataa

SEQ ID NO: 69210 - DNA, 60 bp, Artificial
  Synthetic oligonucleotide
gggttaatgaatcagctgatatgagcattggagtaacagtgataaagaacaacatgataa

SEQ ID NO: 69211 - DNA, 60 bp, Artificial
  Synthetic oligonucleotide
atcaatgagtcagctgatatgagcattggagtaacagtgataaagaacaacatgataaac

SEQ ID NO: 69212 - DNA, 60 bp, Artificial
  Synthetic oligonucleotide
gaattaatgagtcagctgatatgagcattggagtaacagtgataaagaacaacatgataa

SEQ ID NO: 69213 - DNA, 60 bp, Artificial
  Synthetic oligonucleotide
gagcattggagtaacagtgataaagaacaacatgataaacaatgaccttggaccagctac

SEQ ID NO: 69214 - DNA, 60 bp, Artificial
  Synthetic oligonucleotide
ggattaatgagtcagccgatatgagcattggagtaacagtgataaagaacaacatgataa

SEQ ID NO: 69215 - DNA, 60 bp, Artificial
  Synthetic oligonucleotide
ccgatatgagcattggagtaacagtgataaagaacaacatgataaacaatgaccttggac

SEQ ID NO: 69216 - DNA, 60 bp, Artificial
  Synthetic oligonucleotide
ctgatatgagtattggagtaacagtgataaagaacaacatgataaacaatgaccttggac

SEQ ID NO: 69217 - DNA, 60 bp, Artificial
  Synthetic oligonucleotide
gaataaacgagtcagctgatatgagtattggagtaacagtgataaagaacaacatgataa

SEQ ID NO: 69218 - DNA, 60 bp, Artificial
  Synthetic oligonucleotide
gatatgagcattggagtaacagtgataaagaacaacatgataaacaatgaccttggacca

SEQ ID NO: 69219 - DNA, 60 bp, Artificial
  Synthetic oligonucleotide
gaataaacgagtctgctgatatgagcattggagtaacagtgataaagaacaacatgataa

SEQ ID NO: 69220 - DNA, 60 bp, Artificial
  Synthetic oligonucleotide
gcaaaccaacctatacgttcaggcatcagggagggtcacagtttcaactagaaggagtca

SEQ ID NO: 69221 - DNA, 60 bp, Artificial
  Synthetic oligonucleotide
ctcgggtgcatatggaacaggctcatggcctgatggggcggacatcaatctcatgcctat

SEQ ID NO: 69222 - DNA, 60 bp, Artificial
  Synthetic oligonucleotide
ggggctaaagaaatagcactcagttattctgctggtgcacttgccagttgcatgggcctc

SEQ ID NO: 69223 - DNA, 60 bp, Artificial
  Synthetic oligonucleotide
ccctagtagttcatataggagaccgattggaatttccagcatggtggaggccatggtgtc

SEQ ID NO: 69224 - DNA, 60 bp, Artificial
  Synthetic oligonucleotide
acaaataccagcagaaatgctagcaagcattgacctgaaatatttcaatgaatcaacaag

SEQ ID NO: 69225 - DNA, 60 bp, Artificial
  Synthetic oligonucleotide
cacaaataccagcagaaatgctagcaagcattgacctgaaatatttcaatgaatcaacaa

SEQ ID NO: 69226 - DNA, 60 bp, Artificial
  Synthetic oligonucleotide
ccataaggagattgagtctgtaaacaatgctgtggtaatgccagctcatggcccagccaa

SEQ ID NO: 69227 - DNA, 60 bp, Artificial
  Synthetic oligonucleotide
gggacaagagtgatcccaagaggacaactgtccaccagaggagttcaaatagcttctaat

SEQ ID NO: 69228 - DNA, 60 bp, Artificial
  Synthetic oligonucleotide
ggacaagagtgatcccaagaggacaactgtccaccagaggagttcaaatagcttctaatg

SEQ ID NO: 69229 - DNA, 60 bp, Artificial
  Synthetic oligonucleotide
tcagagggacaagagtagtcccaagaggacaactgtccaccagaggagttcagattgctt

SEQ ID NO: 69230 - DNA, 60 bp, Artificial
  Synthetic oligonucleotide
ggtcccaagaggacaactgtccaccagaggagttcaaatagcttctaatgagaacatgga

SEQ ID NO: 69231 - DNA, 60 bp, Artificial
  Synthetic oligonucleotide
caagagtggtcccaagaggacaactgtccaccagaggagttcaaatagcttctaatgaga

SEQ ID NO: 69232 - DNA, 60 bp, Artificial
  Synthetic oligonucleotide
agactaacaattctcggaaaagatgctggcactttaattgaagacccagatgaaagcaca

SEQ ID NO: 69233 - DNA, 60 bp, Artificial
  Synthetic oligonucleotide
cctccatacagccatggaacagggacaggatacaccatggacacagtcaacagaacacat

SEQ ID NO: 69234 - DNA, 60 bp, Artificial
  Synthetic oligonucleotide
ctccatacagccatggaacagggacaggatacaccatggacacagtcaacagaacacatc

SEQ ID NO: 69235 - DNA, 60 bp, Artificial
  Synthetic oligonucleotide
tactggggttcattatgtgggcctgccaaagaggcaacattaggtgcaacatttgcattt

SEQ ID NO: 69236 - DNA, 60 bp, Artificial
  Synthetic oligonucleotide
cgtcgccttaaatacggtttgaaaagagggccttctacggaaggagtacctgagtctatg

SEQ ID NO: 69237 - DNA, 60 bp, Artificial
  Synthetic oligonucleotide
tctctgttgaaggcaaaagttgcatcaatcggtgcttttatgtggagttgataaggggaa

SEQ ID NO: 69238 - DNA, 60 bp, Artificial
  Synthetic oligonucleotide
cgatcaactggaaacattagtctcagtgagggctttcacagatgatggcgccattgtagc

SEQ ID NO: 69239 - DNA, 60 bp, Artificial
  Synthetic oligonucleotide
tttcaggtagattgctatctatggcacataagaaagctgctcagcgtgagagacatgtgt

SEQ ID NO: 69240 - DNA, 60 bp, Artificial
  Synthetic oligonucleotide
gcgccattgtagctgaaatatctcccattccctctatgccaggacattctacagaggatg

SEQ ID NO: 69241 - DNA, 60 bp, Artificial
  Synthetic oligonucleotide
cctgctcctcggtacattactgatatgagcatagaggaaataagcagggaatggtacatg

SEQ ID NO: 69242 - DNA, 60 bp, Artificial
  Synthetic oligonucleotide
gctatctatggcacataagaaagctgctcagcgtgagagacatgtgtgatgctccctttg

SEQ ID NO: 69243 - DNA, 60 bp, Artificial
  Synthetic oligonucleotide
aaatggatcaggccattatggacaagaggataacactcaaagcaaatttctctgttctat

SEQ ID NO: 69244 - DNA, 60 bp, Artificial
  Synthetic oligonucleotide
ggatcaggccattatggacaagaggataacactcaaagcaaatttctctgttctattcga

SEQ ID NO: 69245 - DNA, 60 bp, Artificial
  Synthetic oligonucleotide
attactgatatgagcatagaggaaataagcagggaatggtacatgctcatgcccaggcag

SEQ ID NO: 69246 - DNA, 60 bp, Artificial
  Synthetic oligonucleotide
atggtacatgctcatgcccaggcagaagataacagggggtctgatagtgaaaatggatca

SEQ ID NO: 69247 - DNA, 60 bp, Artificial
  Synthetic oligonucleotide
gtttgaagaaatcagatggttaattgcagaatgcagaaacatactaaccaaaactgagaa

SEQ ID NO: 69248 - DNA, 60 bp, Artificial
  Synthetic oligonucleotide
tctgttctattcgatcaactggaaacattagtctcagtgagggctttcacagatgatggc

SEQ ID NO: 69249 - DNA, 60 bp, Artificial
  Synthetic oligonucleotide
agatgatggcgccattgtagctgaaatatctcccattccctctatgccaggacattctac

SEQ ID NO: 69250 - DNA, 60 bp, Artificial
  Synthetic oligonucleotide
aaactgagaacagtttcgagcagataacattcttgcaagcattgcaactcttacttgaag

SEQ ID NO: 69251 - DNA, 60 bp, Artificial
  Synthetic oligonucleotide
gatggttaattgcagaatgcagaaacatactaaccaaaactgagaacagtttcgagcaga

SEQ ID NO: 69252 - DNA, 60 bp, Artificial
  Synthetic oligonucleotide
gattatagcattgtttccagttatgtgtgctcagggcttgttggcgacacacccagaaaa

SEQ ID NO: 69253 - DNA, 60 bp, Artificial
  Synthetic oligonucleotide
aagattatagcattgtttccagttatgtgtgctcagggcttgttggcgacacacccagaa

SEQ ID NO: 69254 - DNA, 60 bp, Artificial
  Synthetic oligonucleotide
gatgtgcaagattatgcctcccttaggtcactagttgcctcgtcaggcaccctggagttt

SEQ ID NO: 69255 - DNA, 60 bp, Artificial
  Synthetic oligonucleotide
ggaggccatggctttccttgaagaatcccacccagggatctttgagaactcatgccttga

SEQ ID NO: 69256 - DNA, 60 bp, Artificial
  Synthetic oligonucleotide
tgctttctttggcatgtccgaaaacaagttgtagaccaagaactgagtgatgccccattc

SEQ ID NO: 69257 - DNA, 60 bp, Artificial
  Synthetic oligonucleotide
ttctctgttgagggcaaaagctgcatcaatagatgcttttacgtggagttaataagggga

SEQ ID NO: 69258 - DNA, 51 bp, Artificial
  Synthetic oligonucleotide
tggggcggacatcaatctcatgcctatataagctttcgcaattttagaaaa

SEQ ID NO: 69259 - DNA, 60 bp, Artificial
  Synthetic oligonucleotide
ctaatgagtcgggaaggctaatagatttcctcaaggatgtgatggaatcaatggataaag

SEQ ID NO: 69260 - DNA, 60 bp, Artificial
  Synthetic oligonucleotide
gaaacaatggaagtcgttcaacaaacaagggtggacaaactgacccaaggtcgccagacc

SEQ ID NO: 69261 - DNA, 60 bp, Artificial
  Synthetic oligonucleotide
gggagggaatggtagacggttggtacggtttcaggcatcaaaattctgaaggcacaggac

SEQ ID NO: 69262 - DNA, 60 bp, Artificial
  Synthetic oligonucleotide
gtattttgggatttgtgttcacgctcaccgtgcccagtgagcgaggactgcagcgtagac

SEQ ID NO: 69263 - DNA, 60 bp, Artificial
  Synthetic oligonucleotide
cctaaaggttccagcgcaaaatgccataagcaccacattcccttacactggagatcctcc

SEQ ID NO: 69264 - DNA, 60 bp, Artificial
  Synthetic oligonucleotide
gcaattggggtcctcatcggaggacttgaatggaatgataacacagttagagtctctaaa

SEQ ID NO: 69265 - DNA, 60 bp, Artificial
  Synthetic oligonucleotide
gggtcctcatcggaggacttgaatggaatgataacacagttagagtctctaaaactctac

SEQ ID NO: 69266 - DNA, 60 bp, Artificial
  Synthetic oligonucleotide
ggaacaggctcatggcctgatggagcggacatcaatctcatgcctatataagctttcgca

SEQ ID NO: 69267 - DNA, 60 bp, Artificial
  Synthetic oligonucleotide
aatgctactgagctggttcagagttcctcaacggggaaaatatgcaacaatcctcatcga

SEQ ID NO: 69268 - DNA, 60 bp, Artificial
  Synthetic oligonucleotide
caggaacaatgcgcaggcttgccgaccaaagtctcccgccgaacttctcctgcattgaga

SEQ ID NO: 69269 - DNA, 60 bp, Artificial
  Synthetic oligonucleotide
tcagaagtagaagggagaattcaagacctcgagaaatatgttgaggacactaaaatagat

SEQ ID NO: 69270 - DNA, 60 bp, Artificial
  Synthetic oligonucleotide
gaaacgaaaacgggactctagcatacttactgacagccagacagcgaccaaaagaattcg

SEQ ID NO: 69271 - DNA, 60 bp, Artificial
  Synthetic oligonucleotide
aggttccagcgcaaaatgccataagcaccacattcccttatactggagatcctccataca

SEQ ID NO: 69272 - DNA, 60 bp, Artificial
  Synthetic oligonucleotide
caaaccctggccatgcagacctcagtgccaaagaggcacaggatgtaatcatggaagttg

SEQ ID NO: 69273 - DNA, 60 bp, Artificial
  Synthetic oligonucleotide
caagtcatagttgacagcggtaataggtccggttattctggtattttctctgttgagggc

SEQ ID NO: 69274 - DNA, 60 bp, Artificial
  Synthetic oligonucleotide
gaatctgtaaacaatgctgtggtaatgccagctcatggtccagccaagagcatggaatat

SEQ ID NO: 69275 - DNA, 60 bp, Artificial
  Synthetic oligonucleotide
ggaggccatggctttccttgaggaatcccacccagggatctttgagaactcatgccttga

SEQ ID NO: 69276 - DNA, 57 bp, Artificial
  Synthetic oligonucleotide
tggcatgtccgaaaacaagttgtagaccaagaactgggtgatgccccattccttgat

SEQ ID NO: 69277 - DNA, 60 bp, Artificial
  Synthetic oligonucleotide
tggcatgtccgaaaacaagttgtagaccaagaactgggtgatgccccattccttgatcgg

SEQ ID NO: 69278 - DNA, 60 bp, Artificial
  Synthetic oligonucleotide
ttccagcgcaaaatgccataagtaccacgttcccttatactggagatcctccatacagcc

SEQ ID NO: 69279 - DNA, 60 bp, Artificial
  Synthetic oligonucleotide
gggaatggttgatggttggtacggtttcaggcatcaaaattctgagggaataggacaagc

SEQ ID NO: 69280 - DNA, 60 bp, Artificial
  Synthetic oligonucleotide
gcaattgttacccttatgatgtgccagattatgcctcccttaggtcactagttgcctcat

SEQ ID NO: 69281 - DNA, 58 bp, Artificial
  Synthetic oligonucleotide
agctcaagttgtcacgatggaaaagcatggctgcatgtttgtatcactggggatgaca

SEQ ID NO: 69282 - DNA, 58 bp, Artificial
  Synthetic oligonucleotide
agctcaagttgtcacgatggaaaagcatggctgcatgtttgtgtcactggggatgatg

SEQ ID NO: 69283 - DNA, 60 bp, Artificial
  Synthetic oligonucleotide
aagagtacatgaggggtatgaggaattcacaatggttgggcggagagcaacagccatcct

SEQ ID NO: 69284 - DNA, 60 bp, Artificial
  Synthetic oligonucleotide
agcagacaagagaataatggagatgattcctgaaagaaatgaacaagggcagacgctttg

SEQ ID NO: 69285 - DNA, 60 bp, Artificial
  Synthetic oligonucleotide
ctcaagggacctgctgggaacagatgtacactccaggcggagaagtgaggaatgatgatg

SEQ ID NO: 69286 - DNA, 60 bp, Artificial
  Synthetic oligonucleotide
cgctttggagcaagacaaatgatgctggatcggacagggtgatggtgtctcccctagctg

SEQ ID NO: 69287 - DNA, 60 bp, Artificial
  Synthetic oligonucleotide
gcggtactgaggggattcctaattctaggcaaagaggacaaaagatatggaccagcattg

SEQ ID NO: 69288 - DNA, 60 bp, Artificial
  Synthetic oligonucleotide
tagacaaaatccaactgaggagcaagctgtggatatatgcaaagcagcaatgggcttgag

SEQ ID NO: 69289 - DNA, 60 bp, Artificial
  Synthetic oligonucleotide
ggcaaccaaaaggcttacagtcctcggaaaggacgcaggtgcattaacagaagatccaga

SEQ ID NO: 69290 - DNA, 60 bp, Artificial
  Synthetic oligonucleotide
gacatgactccaagcacagagatgtcactgagaggagtgagggttagtaagatgggagta

SEQ ID NO: 69291 - DNA, 60 bp, Artificial
  Synthetic oligonucleotide
cgtaaacagagcaaaccaaagattgaaccccatgcatcaactcctgaggcacttccaaaa

SEQ ID NO: 69292 - DNA, 60 bp, Artificial
  Synthetic oligonucleotide
aaccgttccaatccttggtacctaaagctgccagaggtcaatacagtggatttgtgagaa

SEQ ID NO: 69293 - DNA, 60 bp, Artificial
  Synthetic oligonucleotide
ataagaatggaccaggcaatcatggagaaaaacatcatgttgaaagcgaatttcagtgtg

SEQ ID NO: 69294 - DNA, 58 bp, Artificial
  Synthetic oligonucleotide
tgatgaggcacttaaaatgaccatggcctccacacctgcttcgcgatacataactgac

SEQ ID NO: 69295 - DNA, 60 bp, Artificial
  Synthetic oligonucleotide
atggaatgataacacagttcgagtctctaaaactctacagagattcgcttggggaagcag

SEQ ID NO: 69296 - DNA, 60 bp, Artificial
  Synthetic oligonucleotide
aacattgaaaataagagtacatgaggggtatgaggagttcacaatggtggggaaaagagc

SEQ ID NO: 69297 - DNA, 60 bp, Artificial
  Synthetic oligonucleotide
acattgaaaataagagtacatgaggggtatgaggagttcacaatggtggggaaaagagca

SEQ ID NO: 69298 - DNA, 60 bp, Artificial
  Synthetic oligonucleotide
tatacagagacgaagcattaaacaaccggttccagatcaaaggtgttgagctaaagtcag

SEQ ID NO: 69299 - DNA, 60 bp, Artificial
  Synthetic oligonucleotide
tgtatacagagacgaagcattaaacaaccggttccagatcaaaggtgttgagctgaagtc

SEQ ID NO: 69300 - DNA, 60 bp, Artificial
  Synthetic oligonucleotide
gcctgcatagggtcaatcagaaatggaacttatgaccatgacgtatacagagatgaagca

SEQ ID NO: 69301 - DNA, 60 bp, Artificial
  Synthetic oligonucleotide
ccagtagttcatacaggagaccagttggaatttctagcatggtggaggccatggtgtcta

SEQ ID NO: 69302 - DNA, 60 bp, Artificial
  Synthetic oligonucleotide
agcaaaagcaggggataattctattaatcatgaagaccatcattgctttgagctacattt

SEQ ID NO: 69303 - DNA, 60 bp, Artificial
  Synthetic oligonucleotide
gggaaaggatatatgttcgaaagtaagagcatgaagctccgaacacaaataccagcagaa

SEQ ID NO: 69304 - DNA, 60 bp, Artificial
  Synthetic oligonucleotide
gtggtattggtaatgaaacgaaaacgggactctagcatacttactgacagccagacagcg

SEQ ID NO: 69305 - DNA, 60 bp, Artificial
  Synthetic oligonucleotide
ggggatcagggatgagaatacttgtaaggggaaattctcctgtattcaactacaacaaga

SEQ ID NO: 69306 - DNA, 52 bp, Artificial
  Synthetic oligonucleotide
gggggtcagggatgagaatactcgtaaggggcaattctcctgtattcaacta

SEQ ID NO: 69307 - DNA, 51 bp, Artificial
  Synthetic oligonucleotide
ggggtcagggatgagaatactcgtaaggggcaattctcctgtattcaacta

SEQ ID NO: 69308 - DNA, 60 bp, Artificial
  Synthetic oligonucleotide
ggcaatggctttccttgaagaatcccacccagggatatttgaaaactcgtgtcttgagac

SEQ ID NO: 69309 - DNA, 60 bp, Artificial
  Synthetic oligonucleotide
gagatgtcactgagggggataagagtcagcaaaatgggagtagatgaatactccagcaca

SEQ ID NO: 69310 - DNA, 60 bp, Artificial
  Synthetic oligonucleotide
gttcatgctaatgcccaagcagaaagtggaaggatctctttgcatcagaatagaccaggc

SEQ ID NO: 69311 - DNA, 60 bp, Artificial
  Synthetic oligonucleotide
gttcatgctaatgcccaagcagaaagtggaaggacctcttagcatcagaatggaccaggc

SEQ ID NO: 69312 - DNA, 60 bp, Artificial
  Synthetic oligonucleotide
gttcatgctaatgcccaagcagaaagtggaaggacctctgtgcatcagaatggaccaggc

SEQ ID NO: 69313 - DNA, 60 bp, Artificial
  Synthetic oligonucleotide
gagtaatgaaggatcttatttcttcggagacaatgcagaagagtacgacaattaaggaaa

SEQ ID NO: 69314 - DNA, 60 bp, Artificial
  Synthetic oligonucleotide
tgagtaatgaaggatcttatttcttcggagacaatgcagaagagtacgacaattaaggaa

SEQ ID NO: 69315 - DNA, 60 bp, Artificial
  Synthetic oligonucleotide
gtgccggattatgcctcccttaggtcactagttgcctcatcaggcaccctggagtttatc

SEQ ID NO: 69316 - DNA, 60 bp, Artificial
  Synthetic oligonucleotide
gccacagcacacaaattggcgggacaaggatggtggacattcttaggcagaacccgactg

SEQ ID NO: 69317 - DNA, 60 bp, Artificial
  Synthetic oligonucleotide
ggaagaacgatcagcgaggagttacgctcaggttatgaaaccttcaaagtcattggaggc

SEQ ID NO: 69318 - DNA, 60 bp, Artificial
  Synthetic oligonucleotide
gatgtctttgctgggaagaacacagatcttgaggctctcatggaatggctaaagacaaga

SEQ ID NO: 69319 - DNA, 60 bp, Artificial
  Synthetic oligonucleotide
gatgtatttgctgggaagaacacagatcttgaggctctcatggaatggctaaagacaaga

SEQ ID NO: 69320 - DNA, 60 bp, Artificial
  Synthetic oligonucleotide
acatttgggtaacaagagaaccttatgtgtcatgcgatcccagtaaatgttatcaatttg

SEQ ID NO: 69321 - DNA, 60 bp, Artificial
  Synthetic oligonucleotide
cgaagagttgacataaaccctggtcatgcagacctcagtgccaaggaggcacaagatgtg

SEQ ID NO: 69322 - DNA, 60 bp, Artificial
  Synthetic oligonucleotide
caccgaagagggagcaattgttggcgaaatctcaccattgcattctcttccaggacatac

SEQ ID NO: 69323 - DNA, 60 bp, Artificial
  Synthetic oligonucleotide
cggatatgcacaaacagactgtgtcctggaggcaatggccttccttgaggaatcccaccc

SEQ ID NO: 69324 - DNA, 60 bp, Artificial
  Synthetic oligonucleotide
cagagacttgaggatgtctttgcagggaagaacacagatcttgaggctctcatggaatgg

SEQ ID NO: 69325 - DNA, 60 bp, Artificial
  Synthetic oligonucleotide
ggaagaggcagcactctcggtctagacatcaaagcagccacccatgttggaaagcagata

SEQ ID NO: 69326 - DNA, 60 bp, Artificial
  Synthetic oligonucleotide
ttcatttacgatgggaggcttgtggacagtattggttcatggtctcaaaatatcctcagg

SEQ ID NO: 69327 - DNA, 60 bp, Artificial
  Synthetic oligonucleotide
gacagtattggttcatggtctcaaaatatcctcagaactcaggagtcagagtgcgtttgc

SEQ ID NO: 69328 - DNA, 60 bp, Artificial
  Synthetic oligonucleotide
tttgctgggaaacacacagatcttgaggctctcatggaatggctaaagacaagaccaatt

SEQ ID NO: 69329 - DNA, 60 bp, Artificial
  Synthetic oligonucleotide
tttgctgggaaaaacacagatcttgaggctctcatggaatggctaaagacaagaccaatc

SEQ ID NO: 69330 - DNA, 60 bp, Artificial
  Synthetic oligonucleotide
atctaagagtggctacaatggaagggaaaaagatcgttgaggacattttgaagaatgaaa

SEQ ID NO: 69331 - DNA, 60 bp, Artificial
  Synthetic oligonucleotide
ggcattaaagggaagaggcagcacacttggactcgatctaagagtggctacaatggaagg

SEQ ID NO: 69332 - DNA, 60 bp, Artificial
  Synthetic oligonucleotide
gaaaacctcaaaatagccattgcctccagtcctgctcctcggtatattactgatatgagc

SEQ ID NO: 69333 - DNA, 60 bp, Artificial
  Synthetic oligonucleotide
aagaatgaaacagatgaaaacctcaaaatagccattgcctccagtcctgctcctcggtat

SEQ ID NO: 69334 - DNA, 60 bp, Artificial
  Synthetic oligonucleotide
gtgctattgtggctgaaatctctcccattccctccatgccaggacattctacagaggatg

SEQ ID NO: 69335 - DNA, 60 bp, Artificial
  Synthetic oligonucleotide
tggtgctattgtggctgaaatctctcccattccctccatgccaggacattctacagagga

SEQ ID NO: 69336 - DNA, 60 bp, Artificial
  Synthetic oligonucleotide
ccaactagagacgttagtctctctgagggcattcacagaagatggtgctattgtggctga

SEQ ID NO: 69337 - DNA, 60 bp, Artificial
  Synthetic oligonucleotide
caggtacctatgggacaggctcatggcctgatggggcggacatcaatctcatgcctatat

SEQ ID NO: 69338 - DNA, 60 bp, Artificial
  Synthetic oligonucleotide
cacttcaggtacctatgggacaggctcatggcctgatggggcggacatcaatctcatgcc

SEQ ID NO: 69339 - DNA, 60 bp, Artificial
  Synthetic oligonucleotide
ccttcaaagtcattggtggttggtccacacctaattccaaatcgcagataaataggcagg

SEQ ID NO: 69340 - DNA, 60 bp, Artificial
  Synthetic oligonucleotide
ggttatgagactttcaaagtcattggtggttggtccacacctaattccaaatcgcaggtc

SEQ ID NO: 69341 - DNA, 60 bp, Artificial
  Synthetic oligonucleotide
gtggttggtccacacctaattccaaatcgcagatcaatagacaagtcatagttgacagcg

SEQ ID NO: 69342 - DNA, 60 bp, Artificial
  Synthetic oligonucleotide
aagtcattggtggttggtccacacctaattccaaatcgcagataaataggcaagtcatag

SEQ ID NO: 69343 - DNA, 60 bp, Artificial
  Synthetic oligonucleotide
ttcacgctcaggttatgagactttcaaagtcattggtggttggtccacacctaattccaa

SEQ ID NO: 69344 - DNA, 60 bp, Artificial
  Synthetic oligonucleotide
ctcaggttatgaaaccttcaaagtcattggtggttggtccacacctaattccaaatcgca

SEQ ID NO: 69345 - DNA, 60 bp, Artificial
  Synthetic oligonucleotide
tgctggaaagaacacagatcttgaggctctcatggaatggctaaagacaagaccaatcct

SEQ ID NO: 69346 - DNA, 60 bp, Artificial
  Synthetic oligonucleotide
caaaatccgccgaagagtagacataaaccctggtcatgcagacctcagtgccaaggaggc

SEQ ID NO: 69347 - DNA, 60 bp, Artificial
  Synthetic oligonucleotide
ggctatcaccgaagagggagcaattgttggcgaaatctcaccattgccttcttttccagg

SEQ ID NO: 69348 - DNA, 60 bp, Artificial
  Synthetic oligonucleotide
gggctatcaccgaagagggagcaattgttggcgaaatctcaccattgccttcttttccag

SEQ ID NO: 69349 - DNA, 60 bp, Artificial
  Synthetic oligonucleotide
tactaagggctttcaccgaagagggagcaattgttggcgaaatctcaccattgccttctt

SEQ ID NO: 69350 - DNA, 60 bp, Artificial
  Synthetic oligonucleotide
tctgacagctaatgaatcaggaaggctaatagatttcctcaaggatgtgatggaatcaat

SEQ ID NO: 69351 - DNA, 60 bp, Artificial
  Synthetic oligonucleotide
gacagctaatgaatcaggaaggctaatagatttcctcaaggatgtgatggaatcaatgga

SEQ ID NO: 69352 - DNA, 60 bp, Artificial
  Synthetic oligonucleotide
tctaacagctaatgaatcaggaaggctaatagatttcctcaaggatgtgatggaatcaat

SEQ ID NO: 69353 - DNA, 60 bp, Artificial
  Synthetic oligonucleotide
aacatgaagaaaacgagtcaactaaagtgggcacttggtgagaacatggcaccagagaaa

SEQ ID NO: 69354 - DNA, 60 bp, Artificial
  Synthetic oligonucleotide
ctgagatcagggcatccgtcgggaagatgattgatggaattgggcgattctacatccaaa

SEQ ID NO: 69355 - DNA, 60 bp, Artificial
  Synthetic oligonucleotide
ctaaatcatggcgtcccaaggcaccaaacggtcttatgaacagatggaaactgatgggga

SEQ ID NO: 69356 - DNA, 60 bp, Artificial
  Synthetic oligonucleotide
aaaatcatggcgtcccaaggcaccaaacggtcttatgaacagatggaaactgatggggaa

SEQ ID NO: 69357 - DNA, 60 bp, Artificial
  Synthetic oligonucleotide
caaagtcatggcgtctcaaggcaccaaacggtcttatgaacagatggaaactgatgggga

SEQ ID NO: 69358 - DNA, 60 bp, Artificial
  Synthetic oligonucleotide
gagcatccgtcgggaagatgattgatggaattgggcgattctacatccaaatgtgcactg

SEQ ID NO: 69359 - DNA, 60 bp, Artificial
  Synthetic oligonucleotide
ggcatccgtcgggaagatgattgatggaattgggcgattctacatccaaatgtgcactga

SEQ ID NO: 69360 - DNA, 60 bp, Artificial
  Synthetic oligonucleotide
gggcatccgtcgggaagatgattgatggaattgggcgattctacatccaaatgtgcactg

SEQ ID NO: 69361 - DNA, 60 bp, Artificial
  Synthetic oligonucleotide
ctgagatcagagcatccgtcgggaagatgattgatggaattgggcgattctacatccaaa

SEQ ID NO: 69362 - DNA, 60 bp, Artificial
  Synthetic oligonucleotide
ctgagattagagcatccgtcgggaagatgattgatggaattgggcgattctacatccaaa

SEQ ID NO: 69363 - DNA, 60 bp, Artificial
  Synthetic oligonucleotide
ctgagattagggcatccgtcgggaagatgattgatggaattgggcgattctacatccaaa

SEQ ID NO: 69364 - DNA, 60 bp, Artificial
  Synthetic oligonucleotide
ggaacgccagaatgcaactgagattagggcatccgtcgggaagatgattgatggaattgg

SEQ ID NO: 69365 - DNA, 60 bp, Artificial
  Synthetic oligonucleotide
caaacggtcttatgaacagatggaaactgatggggaacgccagaatgcaactgagatcag

SEQ ID NO: 69366 - DNA, 60 bp, Artificial
  Synthetic oligonucleotide
tcaaaatcatggcgtcccaaggcaccaaacggtcttatgaacagatggaaactgatgggg

SEQ ID NO: 69367 - DNA, 60 bp, Artificial
  Synthetic oligonucleotide
tcccaaggcaccaaacggtcttatgaacagatggaaactgatggggaacgccagaatgca

SEQ ID NO: 69368 - DNA, 60 bp, Artificial
  Synthetic oligonucleotide
gctatggtggatcaagtgagagaaagtcggaacccaggaaatgctgagatcgaagatctc

SEQ ID NO: 69369 - DNA, 60 bp, Artificial
  Synthetic oligonucleotide
caaacggtcttatgaacagatggaaactgatggggaacgccagaatgcaactgagattag

SEQ ID NO: 69370 - DNA, 60 bp, Artificial
  Synthetic oligonucleotide
gcatccgtcgggaagatgattgatggaattgggcgattctacatccaaatgtgcactgaa

SEQ ID NO: 69371 - DNA, 60 bp, Artificial
  Synthetic oligonucleotide
gcaatggtggaccaagtgagagaaagtcggaacccaggaaatgctgagatcgaagatctc

SEQ ID NO: 69372 - DNA, 60 bp, Artificial
  Synthetic oligonucleotide
ggagttttctctcactgacccgagacttgagccacataaatgggagaaatactgtgtcct

SEQ ID NO: 69373 - DNA, 60 bp, Artificial
  Synthetic oligonucleotide
ggttagggaaaggatacatgttcgaaagtaagagcatgaagctacggacacaaataccag

SEQ ID NO: 69374 - DNA, 60 bp, Artificial
  Synthetic oligonucleotide
ccaagtggatatgcacaaacagactgtgtcctggaagctatggctttccttgaggaatcc

SEQ ID NO: 69375 - DNA, 60 bp, Artificial
  Synthetic oligonucleotide
ttcaggtacatatggaacaggctcatggcctgatggggcggacatcaatctcatgcctat

SEQ ID NO: 69376 - DNA, 60 bp, Artificial
  Synthetic oligonucleotide
cctggaggctatggctttccttgaggaatcccacccagggatctttgagaactcgtgcct

SEQ ID NO: 69377 - DNA, 52 bp, Artificial
  Synthetic oligonucleotide
ggggatcagggatgagaatacttgtaaggggcaattctcctgtatttaacta

SEQ ID NO: 69378 - DNA, 60 bp, Artificial
  Synthetic oligonucleotide
acaggcaatctccaaacattgaaaataagagtacatgaggggtatgaggagttcacaatg

SEQ ID NO: 69379 - DNA, 60 bp, Artificial
  Synthetic oligonucleotide
tacaggcaatctccaaacattgaaaataagagtacatgaggggtatgaggagttcacaat

SEQ ID NO: 69380 - DNA, 60 bp, Artificial
  Synthetic oligonucleotide
acatttgggtgacaagagaaccttatgtgtcatgcgatcctggcaagtgttaccaatttg

SEQ ID NO: 69381 - DNA, 60 bp, Artificial
  Synthetic oligonucleotide
tgatgtgccagattatgcctcccttaggtcactagttgcctcgtcaggcactctggagtt

SEQ ID NO: 69382 - DNA, 60 bp, Artificial
  Synthetic oligonucleotide
tgtgccagattatgcctcccttaggtcactagttgcctcgtcaggcactctggagtttat

SEQ ID NO: 69383 - DNA, 60 bp, Artificial
  Synthetic oligonucleotide
ggcggaacaaggatggtggacattcttaggcagaatccgacggaagaacaagctgtggat

SEQ ID NO: 69384 - DNA, 52 bp, Artificial
  Synthetic oligonucleotide
ggggatcagggatgagaatacttgtaaggggcaattctcctgtattcaacta

SEQ ID NO: 69385 - DNA, 60 bp, Artificial
  Synthetic oligonucleotide
taaaatactattcattgaggaggggaaaatcgttcatattagcccattgtcaggaagtgc

SEQ ID NO: 69386 - DNA, 60 bp, Artificial
  Synthetic oligonucleotide
cacataaatgggagaaatactgtgtccttgagataggagatatgttactaagaagtgcca

SEQ ID NO: 69387 - DNA, 60 bp, Artificial
  Synthetic oligonucleotide
gccacataaatgggagaaatactgtgtccttgagataggagatatgttactaagaagtgc

SEQ ID NO: 69388 - DNA, 60 bp, Artificial
  Synthetic oligonucleotide
cattgagagggataagagtcagcaaaatgggagtagatgaatactccagcacagagagag

SEQ ID NO: 69389 - DNA, 60 bp, Artificial
  Synthetic oligonucleotide
ggagtaaaaggctgggcatttgatgatggaaatgacgtgtggatgggaagaacgatcagc

SEQ ID NO: 69390 - DNA, 51 bp, Artificial
  Synthetic oligonucleotide
aatcgaaaaggaattctcagaagtagaagggagaattcaggacctcgaaaa

SEQ ID NO: 69391 - DNA, 60 bp, Artificial
  Synthetic oligonucleotide
aatgctactgagctggttcagagttcctcaacaggtggaatatgcgacagtcctcatcag

SEQ ID NO: 69392 - DNA, 60 bp, Artificial
  Synthetic oligonucleotide
gcaaaagcagggtagataatcactcactgagtgacatcaaaatcatggcgtcccaaggca

SEQ ID NO: 69393 - DNA, 60 bp, Artificial
  Synthetic oligonucleotide
tcaccgaagagggggcaattgttggcgagatctcaccattgccttcttttccaggacata

SEQ ID NO: 69394 - DNA, 52 bp, Artificial
  Synthetic oligonucleotide
ggggcaattgttggcgagatctcaccattgccttcttttccaggacatacta

SEQ ID NO: 69395 - DNA, 60 bp, Artificial
  Synthetic oligonucleotide
gcagtctcgcactcgcgagatactaacaaaaaccacagttgaccatatggccataattaa

SEQ ID NO: 69396 - DNA, 60 bp, Artificial
  Synthetic oligonucleotide
tttcgcccaaaaacttcccggaaatgacaacagcacagcaacgctgtgcctgggacatca

SEQ ID NO: 69397 - DNA, 60 bp, Artificial
  Synthetic oligonucleotide
ggaggccatggctttccttgaggaatcccacccagggatctttgagaactcgtgccttga

SEQ ID NO: 69398 - DNA, 60 bp, Artificial
  Synthetic oligonucleotide
agctatggctttccttgaggaatcccacccagggatctttgagaactcgtgccttgaaac

SEQ ID NO: 69399 - DNA, 56 bp, Artificial
  Synthetic oligonucleotide
atcctaataatgagagagggaatccaggagtgaaaggctgggcctttgacaatgga

SEQ ID NO: 69400 - DNA, 60 bp, Artificial
  Synthetic oligonucleotide
gaaacaattgaagtcgttcaacaaacaagggtggacaaactgacccaaggtcgccagacc

SEQ ID NO: 69401 - DNA, 60 bp, Artificial
  Synthetic oligonucleotide
ttcaggtacctatggaacaggctcatggcctgatggagcggacatcaatctcatgcctat

SEQ ID NO: 69402 - DNA, 60 bp, Artificial
  Synthetic oligonucleotide
cagagaacaagggcccttgtgcgtactgggatggatcccaggatgtgctctctgatgcaa

SEQ ID NO: 69403 - DNA, 60 bp, Artificial
  Synthetic oligonucleotide
tgaccgactagagaccctaatattactaagggctttcaccgaagagggagcaattgttgg

SEQ ID NO: 69404 - DNA, 60 bp, Artificial
  Synthetic oligonucleotide
tagactgctttctttggcatgtccgcaaacgatttgcagaccaagaactgggtgatgccc

SEQ ID NO: 69405 - DNA, 60 bp, Artificial
  Synthetic oligonucleotide
aaaatgactattgcttctgtgcctgcttcacgctacctaactgacatgactcttgaagaa

SEQ ID NO: 69406 - DNA, 60 bp, Artificial
  Synthetic oligonucleotide
tcttgaagaaatgtcaagggactggttcatgctcatgcccaagcagaaagtggcaggctc

SEQ ID NO: 69407 - DNA, 60 bp, Artificial
  Synthetic oligonucleotide
gtcaagggactggttcatgctcatgcccaagcagaaagtggcaggctccctttgcatcag

SEQ ID NO: 69408 - DNA, 60 bp, Artificial
  Synthetic oligonucleotide
gcactcttggtctggacatcgaaacagctactcgtgcggggaagcagataatggagcgga

SEQ ID NO: 69409 - DNA, 60 bp, Artificial
  Synthetic oligonucleotide
aggaagaggcagcactcttggtctggacatcgaaacagctactcgtgcggggaagcagat

SEQ ID NO: 69410 - DNA, 60 bp, Artificial
  Synthetic oligonucleotide
ccccattccttgaccggcttcgccgagatcaaaagtccctaagaggaagaggcagcactc

SEQ ID NO: 69411 - DNA, 60 bp, Artificial
  Synthetic oligonucleotide
ggtgatgccccattccttgaccggcttcgccgagatcaaaagtccctaagaggaagaggc

SEQ ID NO: 69412 - DNA, 60 bp, Artificial
  Synthetic oligonucleotide
ggtggttgattgaagaagtacggcatagattaaaggttacagagaatagctttgaacaaa

SEQ ID NO: 69413 - DNA, 60 bp, Artificial
  Synthetic oligonucleotide
tacagagaatagctttgaacaaataacgtttatgcaagccttacaactactgcttgaagt

SEQ ID NO: 69414 - DNA, 60 bp, Artificial
  Synthetic oligonucleotide
ggagcggattctagaggaagaatccgatgaggcacttaaaatgactattgcttctgtgcc

SEQ ID NO: 69415 - DNA, 60 bp, Artificial
  Synthetic oligonucleotide
ggaagcagataatggagcggattctagaggaagaatccgatgaggcacttaaaatgacta

SEQ ID NO: 69416 - DNA, 55 bp, Artificial
  Synthetic oligonucleotide
gatactacttagggctttcacagaagaaggagcaattgtgggcgaaatctcaccg

SEQ ID NO: 69417 - DNA, 60 bp, Artificial
  Synthetic oligonucleotide
gctttgaacaaataacgtttatgcaagccttacaactactgcttgaagtggagcaagaga

SEQ ID NO: 69418 - DNA, 60 bp, Artificial
  Synthetic oligonucleotide
tttgaagaaataaggtggttgattgaagaagtacggcatagattaaaggttacagagaat

SEQ ID NO: 69419 - DNA, 60 bp, Artificial
  Synthetic oligonucleotide
tctgtgcctgcttcacgctacctaactgacatgactcttgaagaaatgtcaagggactgg

SEQ ID NO: 69420 - DNA, 60 bp, Artificial
  Synthetic oligonucleotide
tggcaggctccctttgcatcagaatggaccaggcaataatggataaaaacatcatattga

SEQ ID NO: 69421 - DNA, 60 bp, Artificial
  Synthetic oligonucleotide
atcatattgaaagcaaacttcagtgtgatttttgaacggctggaaactctgatactactt

SEQ ID NO: 69422 - DNA, 60 bp, Artificial
  Synthetic oligonucleotide
tctaacagctaatgagtcaggaaggctaatagatttcctcaaggatgtgatggaatcaat

SEQ ID NO: 69423 - DNA, 60 bp, Artificial
  Synthetic oligonucleotide
gttatgtgtgctcaggacttgttggagacacaccaaggaacgatgatagctctagcagca

SEQ ID NO: 69424 - DNA, 60 bp, Artificial
  Synthetic oligonucleotide
tgatgggatgcttgttgacagtattggttcatggtctcaaaatatcctcagaactcagga

SEQ ID NO: 69425 - DNA, 60 bp, Artificial
  Synthetic oligonucleotide
cagcaatatgcactcacttggaggtgtgtttcatgtattcagattttcatttcatcaatg

SEQ ID NO: 69426 - DNA, 60 bp, Artificial
  Synthetic oligonucleotide
ccagactatttaccataagacaagaaatggccaacagaggcctctgggattcctttcgtc

SEQ ID NO: 69427 - DNA, 60 bp, Artificial
  Synthetic oligonucleotide
taaactttgtgagcatggagttttctctcactgacccgagactagagccacataaatggg

SEQ ID NO: 69428 - DNA, 59 bp, Artificial
  Synthetic oligonucleotide
aaccgaacggctgcattgagggcaagctttctcaaatgtccaaagaagtgaatgcaaaa

SEQ ID NO: 69429 - DNA, 60 bp, Artificial
  Synthetic oligonucleotide
gaacggctacattgagggcaagctttctcaaatgtccaaagaagtgaatgcaaaaattga

SEQ ID NO: 69430 - DNA, 60 bp, Artificial
  Synthetic oligonucleotide
ccgaacggctgcattgagggcaagctttctcaaatgtccaaagaagtgaatgcaaaaatt

SEQ ID NO: 69431 - DNA, 55 bp, Artificial
  Synthetic oligonucleotide
gaacggctacattgagggcaagctttctcaaatgtccaaagaagtgaatgcaaaa

SEQ ID NO: 69432 - DNA, 60 bp, Artificial
  Synthetic oligonucleotide
aaccgaacggctgcattgagggcaagctttctcaaatgtccaaagaagtgaatgcaaaaa

SEQ ID NO: 69433 - DNA, 60 bp, Artificial
  Synthetic oligonucleotide
gcaagcatgaggaggaattatttcacagcagaggtgtcccattgcagagccacagaatac

SEQ ID NO: 69434 - DNA, 57 bp, Artificial
  Synthetic oligonucleotide
ccgaacggctgcattgagggcaagctttctcaaatgtccaaagaagtgaatgcaaaa

SEQ ID NO: 69435 - DNA, 60 bp, Artificial
  Synthetic oligonucleotide
ctcagaaaggcaaccaggagattgattcagctaatagtaagcgggagagacgaacagtca

SEQ ID NO: 69436 - DNA, 60 bp, Artificial
  Synthetic oligonucleotide
acttctcccctttgctgccgccccaccagaacagagtaggatgcagttctcctccttgac

SEQ ID NO: 69437 - DNA, 60 bp, Artificial
  Synthetic oligonucleotide
ggcagaatccgacagaggagcaagccgtggatatatgcaaggcggcaatgggcttgagga

SEQ ID NO: 69438 - DNA, 60 bp, Artificial
  Synthetic oligonucleotide
gaggaatgaacaagggcaaaccctctggagcaaaacaaatgatgccggctcagaccgagt

SEQ ID NO: 69439 - DNA, 60 bp, Artificial
  Synthetic oligonucleotide
tctgttgaaggcaaaagctgcatcaatcgatgcttttatgtggagttgataaggggaaga

SEQ ID NO: 69440 - DNA, 60 bp, Artificial
  Synthetic oligonucleotide
ctctgttgaaggcaaaagttgcatcaatcggtgcttttatgtggagttgataaggggaag

SEQ ID NO: 69441 - DNA, 60 bp, Artificial
  Synthetic oligonucleotide
ggcaaatttgacaaattgtacatttggggggttcaccacccgagcacggacaaagaacaa

SEQ ID NO: 69442 - DNA, 60 bp, Artificial
  Synthetic oligonucleotide
caagttgtagaccaagaactaggtgatgccccattccttgatcggcttcgccgagatcag

SEQ ID NO: 69443 - DNA, 60 bp, Artificial
  Synthetic oligonucleotide
gtccgaaaacaagttgcagaccaagaactaggtgatgccccattccttgatcggcttcgc

SEQ ID NO: 69444 - DNA, 60 bp, Artificial
  Synthetic oligonucleotide
gtccgaaaacaaattgtagaccaagaactaggtgatgccccattccttgatcggcttcgc

SEQ ID NO: 69445 - DNA, 60 bp, Artificial
  Synthetic oligonucleotide
gtccgaaaacaagttgtagaccaagaactaggtgatgccccattccttgatcggcttcgc

SEQ ID NO: 69446 - DNA, 60 bp, Artificial
  Synthetic oligonucleotide
gggagattttacatacagatgtgcactgaactcaaacttagcgactatgaaggaaggctg

SEQ ID NO: 69447 - DNA, 60 bp, Artificial
  Synthetic oligonucleotide
gaaggatttggcgtcaagcgaataatggagaagacgcaactgctggcctcacccatttga

SEQ ID NO: 69448 - DNA, 60 bp, Artificial
  Synthetic oligonucleotide
tgatgtaccagattatgcctcccttaggtcactagttgcctcgtcaggcactctggagtt

SEQ ID NO: 69449 - DNA, 60 bp, Artificial
  Synthetic oligonucleotide
attggacgattctacatccaaatgtgcactgaacttaaactcagtgattatgaagggcga

SEQ ID NO: 69450 - DNA, 60 bp, Artificial
  Synthetic oligonucleotide
catttgatgagaggagaaacaaatatctggaagagcaccccagtgctgggaaggacccca

SEQ ID NO: 69451 - DNA, 60 bp, Artificial
  Synthetic oligonucleotide
ggaccccaagaagactggaggtccaatctacaggaggagagatggaaaatggatgagaga

SEQ ID NO: 69452 - DNA, 60 bp, Artificial
  Synthetic oligonucleotide
cagattgcttcaaatgagaacatggagacaatggactccagtactctggaattgaggagc

SEQ ID NO: 69453 - DNA, 60 bp, Artificial
  Synthetic oligonucleotide
gagcatctgcagggcaaatcagcgtgcagcccacattctctgtgcagagaaacctcccgt

SEQ ID NO: 69454 - DNA, 60 bp, Artificial
  Synthetic oligonucleotide
cagtgtacagcccacattctctgtgcagagaaacctcccgttcgagagagcaaccattat

SEQ ID NO: 69455 - DNA, 60 bp, Artificial
  Synthetic oligonucleotide
agaatgccactgaaatcagagcatctgttgggagaatggttggtggaatcgggagatttt

SEQ ID NO: 69456 - DNA, 60 bp, Artificial
  Synthetic oligonucleotide
gggcacttgtgcgtactggaatggatcccaggatgtgctctctgatgcaaggctcaactc

SEQ ID NO: 69457 - DNA, 60 bp, Artificial
  Synthetic oligonucleotide
ttctgaggggttcagtggctcataagtcctgcctgcctgcttgcgtgtacggacttgctg

SEQ ID NO: 69458 - DNA, 60 bp, Artificial
  Synthetic oligonucleotide
cacgatctgctctcattctgaggggttcagtggctcataagtcctgcctgcctgcttgcg

SEQ ID NO: 69459 - DNA, 60 bp, Artificial
  Synthetic oligonucleotide
acagctgtccaccagaggagttcagattgcttcaaatgagaacatggagacaatggactc

SEQ ID NO: 69460 - DNA, 60 bp, Artificial
  Synthetic oligonucleotide
ggatcagtggctcataagtcctgcctgcctgcttgtgtgtatggacttgctgtagccagt

SEQ ID NO: 69461 - DNA, 60 bp, Artificial
  Synthetic oligonucleotide
ccatcaaatcgaaaaggaattctcagaagtagaagggagaattcaggacctcgagaaata

SEQ ID NO: 69462 - DNA, 60 bp, Artificial
  Synthetic oligonucleotide
cgagaaattccatcaaatcgaaaaggaattctcagaagtagaagggagaattcaggacct

SEQ ID NO: 69463 - DNA, 60 bp, Artificial
  Synthetic oligonucleotide
gcagcaatatgcactcacttggaggtatgcttcatgtattcagattttcatttcatcaat

SEQ ID NO: 69464 - DNA, 60 bp, Artificial
  Synthetic oligonucleotide
tgtccagtagaataagcatctattggacaatagtaaaaccgggagacatactgttgatta

SEQ ID NO: 69465 - DNA, 60 bp, Artificial
  Synthetic oligonucleotide
tcacaagaggattgcatgataaaagcagttagaggtgacctgaatttcgttaacagggca

SEQ ID NO: 69466 - DNA, 60 bp, Artificial
  Synthetic oligonucleotide
tgctttgtgttgttttgctggggttcatcatgtgggcctgccagagaggcaacattaggt

SEQ ID NO: 69467 - DNA, 60 bp, Artificial
  Synthetic oligonucleotide
ttgctttgtgttgttttgctggggttcatcatgtgggcctgccagagaggcaacattagg

SEQ ID NO: 69468 - DNA, 51 bp, Artificial
  Synthetic oligonucleotide
agcaggagataagaactttctcgtttcagcttatttaatgataaaaaacac
